United States Patent Application Publication US 2013/0129668 A1 - sequence listing, part 18

SEQ ID NO: 292863 - DNA, 122 bp, Homo sapiens
gaatggatcttatttttcgatagcacctgtccgagtctttctcccttttcaaaaatgctgcgtttcaacgtcattgtccattctgaggctctctttctgtctctctcgctcttttccctgcg

SEQ ID NO: 292864 - DNA, 122 bp, Homo sapiens
cagcagcagcaggtcctgtaccttctcagacttgtcccccatcaggatggctgcttgtaccgcagccccatatgctacggcctcatcagggttgatgctcttgttgagatcacgtccattga

SEQ ID NO: 292865 - DNA, 122 bp, Homo sapiens
caggtttcctcccggaggcctttcggtttcctctgaggccctatatagaggctccaggcccggactgtgcagaggtgcgcgcccacgccggcctcccggaccagcctgagctcggagcgcct

SEQ ID NO: 292866 - DNA, 122 bp, Homo sapiens
gtgcccgctgccgctcgttgtgctgaggacgaacggcgctgcgggcctggctccctatggcggctccctgctcgcgcttcactccaaggggaacccacagaggttttggaggagttattaat

SEQ ID NO: 292867 - DNA, 122 bp, Homo sapiens
ctcgtcttcttcctgcgtggccgtggagttggagtggctcgggtcagagcccaggctgcccgtgttttcctgacgctcctggccgaggggcagctgagaggaggagctgctgaagggcgccc

SEQ ID NO: 292868 - DNA, 122 bp, Homo sapiens
agggcgtggggggctgtgggtttcctcatgttatgaccacggtttcctgggggtgcagcgcgttctctgatgctctgaccacgggttcctacatggggtgtgttttcttcatcatcgtgggc

SEQ ID NO: 292869 - DNA, 122 bp, Homo sapiens
ctggctttaaataaacatggaataaaagagagagagagagagcgcgagcaagagtgagagcgcggagcctccagcagctgaaattagaagcagccagccccgggcagggaagccatctgcgc

SEQ ID NO: 292870 - DNA, 122 bp, Homo sapiens
gaaaacataagtttaaaatgtttgtaaaggaactcacctgaatctacacctctttacatgcgtcttgaggcagaaatggtgcttctctgtttcatatttcacttaaagaaactgaaacacct

SEQ ID NO: 292871 - DNA, 122 bp, Homo sapiens
caagatgtttagaaataggcatatttccaaaataagctataatacttcaaagtaatgttccgtgttactgaagtgcagtttaggaaagctgtgcttcctggctgttgattgtgtacttccca

SEQ ID NO: 292872 - DNA, 122 bp, Homo sapiens
tacaggtgcgcccgcattcactgaggtcggcctggcccacccctaccccaagaagcgaatcgcccttcattcaaggcaatgaccagcaagactatcacaaagagaaccacggtgaaaaatcc

SEQ ID NO: 292873 - DNA, 122 bp, Homo sapiens
gcggcacaagttggcgttccctttcatgtatgccaggagcagcactggaaaacaaaagcacgcgcagggctacttcccacccggcccagcccggcagccacagacggagggcggaggacagc

SEQ ID NO: 292874 - DNA, 122 bp, Homo sapiens
ttacccgcctcccgagaggctccagcggaagcacgtgggttacttccgggaggaaagtcccgcctcttctttgattcaaactcgcttccggaattaaataccaacgagacggcgccgggaac

SEQ ID NO: 292875 - DNA, 122 bp, Homo sapiens
cggggcctaaactcgagtctaaaagattgggcctcgttgtgtcgtttccgggtcgcgcgacgctgtgggccgctttcccctctccggagtgacctaacacaggataacgaaacctgcactgc

SEQ ID NO: 292876 - DNA, 122 bp, Homo sapiens
cgattttaaacggtgtggactgatccgcagtcgcgctcttgccgctgcccagctgagcagcgtgcaccacctctgcgtcgccctaccccgccctgcctgggtctccaggaaggttggagcgg

SEQ ID NO: 292877 - DNA, 122 bp, Homo sapiens
ccccgactcctctccgcgcctgagtacgggcccaagctgaaactcagggctttagaagaccggcacagcctccagtccgtggactcggggattcctaccctggagatcgggaacccggagcc

SEQ ID NO: 292878 - DNA, 122 bp, Homo sapiens
cgtggttttcccggagcctgcggggcgacaacagaaggccctagaggaaccactctgtgccggccttggaggagcttcccgagaccctctgtgcaggcatgaccccgcgggccatgagtgct

SEQ ID NO: 292879 - DNA, 122 bp, Homo sapiens
cccgaaccgggattagagaataaattatctgctctcttctcattgggctgtggctgaggacgccgtcggcggcgccgggctgggagctctcccggctctttgcattcaccgcacagctccgg

SEQ ID NO: 292880 - DNA, 122 bp, Homo sapiens
agttacttaaacctgcctgcagctgttttctcatctgtccagcaagactcacaggattgtcgtgagaattaaaagagataattcatatcaattgcctacaagactacctggcacatactaag

SEQ ID NO: 292881 - DNA, 122 bp, Homo sapiens
tggtggtctcaggattgaggttaggcaggaaagtcatgagatggtgtttgccctagattgcgtgataagttctttcagcccaaatttactgtattttaaatggaacatgctaggcattgaaa

SEQ ID NO: 292882 - DNA, 122 bp, Homo sapiens
tagagatagttaatgtcggccgtataagaaacattattaaagttactcttcggtcctttccgttcttgataaacaattcctgcgccttcctctcgaattctattttccattcctcaagtcac

SEQ ID NO: 292883 - DNA, 122 bp, Homo sapiens
tccttaatccaaagaatttgccaggaggcaccggaaggcaccagtatcacagaagcccaccgggaacacgaaagccagcgggcctgccccaccgtccgtcattaaaagccactccgagacac

SEQ ID NO: 292884 - DNA, 122 bp, Homo sapiens
ctcagtcaccaccgcacggcgcccaagcagctgctgccgccgccatgagttgtccgaccgcgcgccacttccggcgcagccccgctcaacattcttaaagaaaagaattttcagcccagaat

SEQ ID NO: 292885 - DNA, 122 bp, Homo sapiens
agcgccccctgttggttctgagctcccccttgtgtcctgagcgccacctcatgtcctgagcgccccctggtggttctgagctcccccttgtgtcctgagtgccacctcatgtcctgagcgac

SEQ ID NO: 292886 - DNA, 122 bp, Homo sapiens
ctaggtccttcttcttaatcacaaggcaaaaactgcatgtaaatttggtacaacaatgatcggccacttggaataaaactcaagatgctggaaaacattgattagccttgaataccatgtta

SEQ ID NO: 292887 - DNA, 122 bp, Homo sapiens
tatcgccagtccccaatcaaaacatcaatttggcaatctggcctctctccccctgcgctccggagctgccacttcaaagctgctacaacaagtcagtaattgtaactttgcatctaaatatt

SEQ ID NO: 292888 - DNA, 122 bp, Homo sapiens
aaagtttttttatcttttttctttatctattgtgcaacccacttcagtgccagcagcctacgggaacagaggccaggcaatggttcagggctacagtttgctctggcatggggtactatgag

SEQ ID NO: 292889 - DNA, 122 bp, Homo sapiens
tataaggtattttatttcaaaaatatcccaacactatgaaatgttgaaatatgaaaaaaccggaagttacaatttattataaaacaatgtacagggccgggattggtggctcacgcctgtaa

SEQ ID NO: 292890 - DNA, 122 bp, Homo sapiens
gagaagagctgttccctgaagccagcaccatggactggttaatatggtctctgctgggaacgcaatctactctctgcagatgataacaatcaaaacaagtgttattattatatacaaggctt

SEQ ID NO: 292891 - DNA, 122 bp, Homo sapiens
tttcagcaaacctctctctttccctcagcctttgctctgcctgcttcctgggcttggggccgcagaggccagcgaggctcccttcattccctccaccaaagcgaggtcttccctgcccccac

SEQ ID NO: 292892 - DNA, 122 bp, Homo sapiens
tcgcattgcctgcatgcctgggatgcacggatctgtggtgggatttgccctgtctgtgtgcgaggttgtggagtggtcatgggtctgcgtttggtggtgtgcaactggtgtacaggaccaga

SEQ ID NO: 292893 - DNA, 122 bp, Homo sapiens
caaacaggcccagcagaaggtgtcctgcccatctgaggcccctcttacgcccccttctgccgctggcctttgccgggctccccggccccctcaagctcgtcattcctgcctcagacttcaca

SEQ ID NO: 292894 - DNA, 122 bp, Homo sapiens
ggctgctctggaagggaggggccgtctggtgccctgcggggaccatcacgcccagacttacgccttggacacgtcgtgttctccatagagccagccatccttctcctcggggatgagcagcg

SEQ ID NO: 292895 - DNA, 122 bp, Homo sapiens
gatgcacagtgggtttatattgtgtcaacttcgcgaagctgaaaagacttttccttgcaccgctccgggttagtgttccccacaagaggcaattgcgtgagattttgaaggcggaagtgcag

SEQ ID NO: 292896 - DNA, 122 bp, Homo sapiens
ggggtctagctccccatccctgtgtgtcgctccggctggatccccatcctcccagcccctcggccaagtggaggatgctgatctgactgcctcctgccagacacctagggcctcctgctccc

SEQ ID NO: 292897 - DNA, 122 bp, Homo sapiens
agcagaagtgtggctgaggccactgaggaagcattcacagctcagacctgcagcctcctccgaccacagagctaatgctgtggagctgaccacttggcaccagagatctccagggaaaccct

SEQ ID NO: 292898 - DNA, 122 bp, Homo sapiens
ctcggcccgccccccacagcctgcccggccctcagccaggccggagctgaccctctcacccggcccttgcaggacaagcagcgggagctaggtgacaaaatggacctggcctcctacctgct

SEQ ID NO: 292899 - DNA, 122 bp, Homo sapiens
agtccattcacagggccagagttccaagtgtgcggcgtgggcggggcctgcagaaagggacggggcctgcagaaagggacggggctggcaaaggcctggtctacctcaccgatccgggtcgc

SEQ ID NO: 292900 - DNA, 122 bp, Homo sapiens
gtgcccattatctcaccctgcgagatggagctagcaacaatcggggtgcagagctttccgcgaacacctctgcacttccctgctccccccccaccttccccttccgctcggtttcgcaggga

SEQ ID NO: 292901 - DNA, 122 bp, Homo sapiens
gtcggggcagatcgactgcaaatcaaggcctcacttttcaaggagtagacgctgcttcctcggccgtgtctctacacgtgtgcaccccagaattgggattgggtaatactgccccaccggtc

SEQ ID NO: 292902 - DNA, 122 bp, Homo sapiens
aaaacgcggggtccttcagctaaatcctcggaaccccggatcttcgcccgtgccggtacgcgcctcccccgcgccgagaatccctggcacgcgatcgcctccccgcaggcccgccgggaagg

SEQ ID NO: 292903 - DNA, 122 bp, Homo sapiens
atggcacaaaatgggatgtgcctatatgtagatgtcagtattttcttctacgctctcccacgggggcagaggggaatggagtacaaatgttatcagcagccatctctatcatagtgtggtat

SEQ ID NO: 292904 - DNA, 122 bp, Homo sapiens
cacgcagcaagttctggaagcacacctccgggttcttacaccaataggtgactctcacaccgtgttccaccatcaggaagctcctcgatgcgactcagatcacatctgggtcccacattccc

SEQ ID NO: 292905 - DNA, 122 bp, Homo sapiens
cgggggcctcgggccccgctggagtgtggagcaggcccatgctcagctctccaggctgttcgtggctcccctgtcagctgctcactcctttccagagacaaaacaggaataatagacatcat

SEQ ID NO: 292906 - DNA, 122 bp, Homo sapiens
gagatgaaacacaggctggcccacacagccatccagatatcagtgaactccttggctgagcggctgtataagccagcatcatagccacacttgagcacacagttcaggctccttttcaccca

SEQ ID NO: 292907 - DNA, 122 bp, Homo sapiens
gcccccaggagcaaaacctgggcatcttctcctggaaacggagccctcatcttcccaagacgcggggccctcccccgaaaagacaggggctcccaccccccagagagcaaaataccttcctt

SEQ ID NO: 292908 - DNA, 122 bp, Homo sapiens
aaggaagacgcaggaggcacaaggcggggtggaggcgccgcgcagggacggaggtccacccgcccagatgtggggagatccgcgggaggggatcccgcccggcccggtgagccccgctggga

SEQ ID NO: 292909 - DNA, 122 bp, Homo sapiens
ccgtggccggaagtgggaggccgcgcgcgcgcgcgcaggcctactctgggcgtggcctgccgctgcgtgtttttttcacggtttctcattctcggtcgctaggctttgagggtgctggggtt

SEQ ID NO: 292910 - DNA, 122 bp, Homo sapiens
ccctatgaactctgaccccagctcccacactgtcgcctatcaccggcccactctccgtgccgcgtgtcccttaaaagctggggcctgggacaggaacgacagacaatgcagccaatggcgtc

SEQ ID NO: 292911 - DNA, 122 bp, Homo sapiens
cccttcccttgatccctgaggtcggcacttacccgaaggattccggtgggagtttggggccgcctgccgagagggttaggcaggaaaagtgaggacgattctcaaccctgaccttactttat

SEQ ID NO: 292912 - DNA, 122 bp, Homo sapiens
tggaccccctgctccggctcctccctggcagctggtcactcctggctcccctccagccagcgggctgtgaaagcctgttgaggttgagctcttgccctgcactcttgtcccacttccggctg

SEQ ID NO: 292913 - DNA, 122 bp, Homo sapiens
ccttggccggaaagaacaatgtcccagtacaagcaaatggcaaagtgtgaggggagatcacgggggacaaggagtggcaaaagcccccaggcaaccactgttctccagagctgaatgttctg

SEQ ID NO: 292914 - DNA, 122 bp, Homo sapiens
ggcgggaccagctgttggaagattgtgggggtggctacttgccaccaggatatgcagggtcggggacctaggaatcagccttgagcataaagattctgccgcaaacaggaaagaaaagaaag

SEQ ID NO: 292915 - DNA, 122 bp, Homo sapiens
tttttttttttttttgagacaagagtctcattctgtcgctggagtaaagcagcacaatctcggctcacttcaacctccacctcccatgttcaagtgattctcatgcctcagcttctcaagga

SEQ ID NO: 292916 - DNA, 122 bp, Homo sapiens
gaatatgtatcatttgattttgagcatgtggggttaaggtattagattactaccacaaaccgtagacccctgcatggcaccacatttattttcaggagtagatgttacatggcaggtatcaa

SEQ ID NO: 292917 - DNA, 122 bp, Homo sapiens
gacgctagtactcaggggaaggctgagccccatgggggtcgactgtttgctgcacagctccgggcaggaagccgaaaacgcttcgtatcctcctgggaatacaaagacattttttttcccca

SEQ ID NO: 292918 - DNA, 122 bp, Homo sapiens
gcccatttcttgccagctcatgggctacaccttgacctaacatctttacgtgggtacttgcgcttactttgcagccttcgtcagggtttgctgaagatggcggtatataggctgagcaagag

SEQ ID NO: 292919 - DNA, 122 bp, Homo sapiens
aattgttgttaagctgtaaatctgaaatgaaaggttcctgttaactcagttaatagatgacgtttattgtctcggaatacttggtgtgtagaatttgagcttgttagtgcagaaatgattgt

SEQ ID NO: 292920 - DNA, 122 bp, Homo sapiens
gcccgtcctcaccgccctctccccccgggtcaccaggagtgagagtgtgcccgaattccccgtggtgtcagcacagcagtgttgtttatggcattgtgtaactgagaaccctgcgtcactct

SEQ ID NO: 292921 - DNA, 122 bp, Homo sapiens
ctcccctggccgcggcgacccttctcgtcctcccacctccacctccacctcctcacctctcggcctggctcacgcgtttcccatcactctgtcagctcctgccaccgcgccttcttcccttt

SEQ ID NO: 292922 - DNA, 122 bp, Homo sapiens
gaggttgcggtgagcccacattgtgcgagtgaaactccttctcaaaaagcaccgctgcttcgggcgcggtggctcacgcctgtaatcctagcactactttgggaggccaaggcgggcagatc

SEQ ID NO: 292923 - DNA, 122 bp, Homo sapiens
agtaaagaacaggcagattctgagacttgggacaggcagcatttggcacctgcggaggcccggttctacacgtctgtagtggcagaaaggcaatatatattaaaacctaggaaaacagtcag

SEQ ID NO: 292924 - DNA, 122 bp, Homo sapiens
gattccaccctggaaatgtcctttactgtggatcctcacggctccagagttcatggcagtcgcccggcacctacatgctgggtccggagaaagggtcgcgccgggcagccgcgaaagcaagg

SEQ ID NO: 292925 - DNA, 122 bp, Homo sapiens
tcttccgccttccaagtgactagagttcctgggccagtctcccgaaatcaaaaggcgctccggcctccagcagaaatttttgctgagggcttgcaccgtggtcctggaggcttgaagatttc

SEQ ID NO: 292926 - DNA, 122 bp, Homo sapiens
caacccgcgggtaggacggagctcagaccagctgaacctcttgttggttttatactgagtcgacgtcatcctggatttagttcctggtaatatgcagatgacaaacagaaccagatttggcc

SEQ ID NO: 292927 - DNA, 122 bp, Homo sapiens
acttttttcagccttgggtttagtgacagggaaaaaagaacgttagctcatgtgaggatacgtataagggaattagataactctctacgtgatttgcaaacacctcaaaattgtcaagatgg

SEQ ID NO: 292928 - DNA, 122 bp, Homo sapiens
cacataatgagctggagaagtcattgactcaaacccaaaagcctgggctaaagatagcaccggcagcctggcgtggtggctcatgcctgtaatcccagcactttgggaggccaaggtgggtg

SEQ ID NO: 292929 - DNA, 122 bp, Homo sapiens
ccatgcggcaggtgcccagcatctcatagtggccttccgggccgcccgagctcaccagcacggggatgagcaccaccagcaccagcagcatcaccacacccgcggcggccgctagcagcgtc

SEQ ID NO: 292930 - DNA, 122 bp, Homo sapiens
cgggctatttatccaccttaccttccttcgtaaccaataaatcctcttacaaacctgaggcggcaaactaaaaggccagcggatggcctggtttgctgcggcggggaaacagtcacttcctg

SEQ ID NO: 292931 - DNA, 122 bp, Homo sapiens
acagcggtctcgggtttgcgcactgcgcacagtatcctcatcacgacacgatggaagctgcggagctggggtcaaaataagaaggcgcagctgggacctggtgacaccaagagaatggaagc

SEQ ID NO: 292932 - DNA, 122 bp, Homo sapiens
gaattgtcacaccgtatgtctgagtttgcacgtgctgttttactcatggtgttttcaagacgtatctgtgttgctccacatccgttgggttcattcacttcaaccactgcctgtgctgtatg

SEQ ID NO: 292933 - DNA, 122 bp, Homo sapiens
gacctgcccaagccccccagcccggccccatccagtgaagaccctggccttgcccagccccgcaagcggcgcctggcctccctcaatgctgaagctctcaataacctgctgctggagcgaga

SEQ ID NO: 292934 - DNA, 122 bp, Homo sapiens
aacaaaatggcaatagaatttcttttggaatgtgaccaaaacataactgaagcttatctgcgagaatacatgaaaaaatatagccaaaaatatttaaaaaagaagagtaacatttaccccca

SEQ ID NO: 292935 - DNA, 122 bp, Homo sapiens
cgagcttgaggtgagaaaggttctagggaggcgcggaggcgggagcgcgaccttccagcccgttagtagactgggtctacgtgccgggcgctgtgcggagcccgcagctcctgttcccgcgc

SEQ ID NO: 292936 - DNA, 122 bp, Homo sapiens
ccgtccccagcctgtggggatggagtgcggcgcggggctagcaggcggctcgggaggagccgaagcgccgcccagacccggaggctctggaggctctggagccgtccgggtctggcccctgc

SEQ ID NO: 292937 - DNA, 122 bp, Homo sapiens
gacaagagcagtgtcatgagctttgctgcgtgtacacctgtgcggcgatcacatccattacgccaaagggtatttctagcaccccataagaccccaatcatatcccagcacgagactccagg

SEQ ID NO: 292938 - DNA, 122 bp, Homo sapiens
gcatcacataacaggtggtgacgagtcatgaaggcttattaagcaaaagctaagtttaagcgttgtttacagaaagacaggactagaagcaatttggaagctgacttacaaagatgtctgat

SEQ ID NO: 292939 - DNA, 122 bp, Homo sapiens
aaatgagacgtggaaattcctcacctgccataagctagacagagcttttgagatgcaaaccgtatacactctcagaggagaggattgaaaccaaagagagaagtcactttcaaagcaccatc

SEQ ID NO: 292940 - DNA, 122 bp, Homo sapiens
tcccgcagccgagccccgccacgcgcgccttgcccgcccgccggccgcccccgccgcccccgccgcccccgggccctgatggactgaatgaaggctgcctacaccgcctatcgatgcctcac

SEQ ID NO: 292941 - DNA, 122 bp, Homo sapiens
gttcttccttctgagaggctccccttgcccattctccttggccacctcagaggtgggtttcggggagctttccctccatgcaggcctacagccagcctcctgccagtgggagaagttgttcc

SEQ ID NO: 292942 - DNA, 122 bp, Homo sapiens
cctgatctgataatatcaggatgggtgggaagggtccattcctcatcattcatgttctcccggcacagaggactgtgtggaggactcaggatttaggaccatactcaactggggtttgatct

SEQ ID NO: 292943 - DNA, 122 bp, Homo sapiens
ctgttattatattcgctctttgaaaaccacagaatgggttgttagaagtcatagatcttccgccacccccactgtggatttttttctcctttctctcctgcaactggtcctccatctccttc

SEQ ID NO: 292944 - DNA, 122 bp, Homo sapiens
gacagaagcttaaaagagttaatcctataggattaattagtagtggcaatgaccaaactgcgatgatatggatatattccatttttgggtttcatgggactgtactaccaaagtgtatttta

SEQ ID NO: 292945 - DNA, 122 bp, Homo sapiens
ggggcaggaggattactctcctcgctcccagcaagtaaaattagcctccactcggctccccgctgccgggcctgagcttctgaggccaggcagctgtcattccacccagcccagccagtgac

SEQ ID NO: 292946 - DNA, 122 bp, Homo sapiens
tctcctcacccaccccaccctgactgcctgtcacacctccggcagacaggttcccggctgcgggaacccaggatcaaggcaggggacagcagagaagggactttccaccctgaaatattcag

SEQ ID NO: 292947 - DNA, 122 bp, Homo sapiens
acatttagaccgcgaggggagagaggaactgccgtgaccacggagggctggcctttcccccggcgcagtttctctggaccgctagagcttcccttgagacgaaagcgatggcaggggcccgg

SEQ ID NO: 292948 - DNA, 122 bp, Homo sapiens
agtctttgtcttaatttctgaattcacgaatgttgaatgtgatgaattcgtgggaagccccgcagggagcctaagcagctctccagaggctgtggttgtcacggatgatgattgcgggaccc

SEQ ID NO: 292949 - DNA, 122 bp, Homo sapiens
gaggataatacaggagagcagctccaggtaagtggatgaggctgtaatgctctccagctacgtgagtccccaggtggttttcggaggcatcataagttcctggggagactgcaagattacag

SEQ ID NO: 292950 - DNA, 122 bp, Homo sapiens
ggatctcatttcagcactactttactactctcttggtcattttctatgcttaagccacagcggactttgtatttctcaaatacattaatctgcttatcctttgtgactcttgtactagctgt

SEQ ID NO: 292951 - DNA, 122 bp, Homo sapiens
ccgggggttgcagcccctgcctgggggccaggacagccagtgcggcgaggagccctcccacgccttccagggcctcagcttgctgctgctgctgctgaccttcgtgctgcccctggtcgtca

SEQ ID NO: 292952 - DNA, 122 bp, Homo sapiens
acccctgggaggggtggcgcatgtctgcgcgcggggcggaggcgggcgtctttggtgctgcggccccggagagcggcctggcctgcctggcgtccgtggggaggcgccggcggtcctaggac

SEQ ID NO: 292953 - DNA, 122 bp, Homo sapiens
ctcggggctggcgcggaggccgagggtccttcgcggggggctgctccggagtgggggatgcgaggaggcgctggggacggcggagcagaggcggatggcctggaggggcagggatgagggga

SEQ ID NO: 292954 - DNA, 122 bp, Homo sapiens
tgttaatggtaatcctcctttgatctcccctgcccagaaggaaataagcaaagaaatctccgaaggaccacaacccccccgggctatcggttatgtccccttcaagctgtatggggagggta

SEQ ID NO: 292955 - DNA, 122 bp, Homo sapiens
ttgtggtcagccgggagggacgtttttgccgtcccacgactccaacgggcagccgggctacgcaaacatggaaatcttccaagagcctccctggcccccagggctcagagggtggcagagcg

SEQ ID NO: 292956 - DNA, 122 bp, Homo sapiens
gatacagaagtattagtaaatcggtgccaggaatgaagtaaccgtttagatccaatgcgccggctccagcatcgaactcatgcccagcaccctttaaaccctcccgggactctgcagaaccc

SEQ ID NO: 292957 - DNA, 122 bp, Homo sapiens
ggctagatttgggctacagacagagttgtgatcagaggccaggaactaaatgatagatgccgatgaagagtcttctattactcaagtaggacaggtgctccaggtggctggggtgggggctg

SEQ ID NO: 292958 - DNA, 122 bp, Homo sapiens
tctctccgccgccgccgccgccgccgtgggccgggcccagctcttataccgagtcgggggcggagctccctgcgacctccgactggggccgccccgtccccttcagggccgcccgggcgtcc

SEQ ID NO: 292959 - DNA, 122 bp, Homo sapiens
acctgcccatctcagcgccagcctgggaaagaaagtagacgtgtaacttcaggttagtttcgctgaacaattgtttctttcacgcaatccctgaggggtgttttgcggggggtgtgggggag

SEQ ID NO: 292960 - DNA, 122 bp, Homo sapiens
agccattcttatggtggtacagaagctcctgacttccagccaaaaagacaaacggaggggcgaggccggagtacctggagttttcctcccagagcctctttaaaactcacccgtttaaagtg

SEQ ID NO: 292961 - DNA, 122 bp, Homo sapiens
cctatcctgggcagtgagggactgtggagaccgtgcaagagtcgctggctgaaccctgcccggatcaccgacccacaaaatagatagagaccctgcagctggtgttgttctaagtcactccg

SEQ ID NO: 292962 - DNA, 122 bp, Homo sapiens
gccccaccaacggctccaaacagcatctttctccattggcatttcaagcaccataggatccgctggatcacatggcccaagtctcagaacagcttgcacagctgcgtggacctattgcagag

SEQ ID NO: 292963 - DNA, 122 bp, Homo sapiens
cttgctatcggatcaccgtggagatcggagccggctgctcacctgcgccatcgccggcgacgcccgatcaccctgcctgcctgaaaccagaagcgcctcatccctggggtttcctctcagag

SEQ ID NO: 292964 - DNA, 122 bp, Homo sapiens
tcctgatcgggacatggcaaaggcctgggaagctggaaccaaggcattctcccatctacgcgcattcactcagacacctgagtctctggcaatgtcaaattttggattctgagaacataatt

SEQ ID NO: 292965 - DNA, 122 bp, Homo sapiens
cattttgaggttctgaacagctcaagtctgcaattctcattctccttacatgcagccactcgtgacagagggaagggccagcactgctcctgagtcctgggctcctggctaagggtcctcct

SEQ ID NO: 292966 - DNA, 122 bp, Homo sapiens
tttcttcaaggagcacctccacttgcttttcccagcaggaattcaaggaggccccagcggcgcctcttccatgcctgtctgatgcagcctcttgcagggatgcacgtccttgggatgcggcc

SEQ ID NO: 292967 - DNA, 122 bp, Homo sapiens
caggcacctcacagaagcgtatctgcggccagagagtaaaactgctctctccatattgcacgtgcttttctcaagaaacgctttctaatgccctgtaggactagaaacacaagcggtggtgt

SEQ ID NO: 292968 - DNA, 122 bp, Homo sapiens
aaatcccagcactaccactaaacttccctgagctcaggtttccacatgtataaagtggagcgaaaacacctccctttctgaaaggttgtgatacagctcgtaaagtgctgagtacagtgcct

SEQ ID NO: 292969 - DNA, 122 bp, Homo sapiens
actgtttcattttgagtttagttagtcgtagccattgataaatagttccagggccctcagcgctgttagagtgaaaagatcagcagttcttattcccatttatttggcgtcaagcctattct

SEQ ID NO: 292970 - DNA, 122 bp, Homo sapiens
gctcgcacctgctagtgaagccagtcaaggcggccctcgacctggcggcaggaaatcacccggaccaaggaggaggccctggagctgatcagcggctacatccagaagatcaaggcaggaga

SEQ ID NO: 292971 - DNA, 122 bp, Homo sapiens
tacttgggaggctgaggcaggagaatctcttgaacccgggaggcagaggttgcagtgagccgagatcgccccactgcactccagcctaggggacagatcaagactccgtctcaaaaaacaaa

SEQ ID NO: 292972 - DNA, 122 bp, Homo sapiens
ttgaggctggagcgtggacgcggtgggggagggtggggcgggggcagctttcgagaattacgaggacaggaggcagaggccctccccatccgcattattggaggagagagagcctcccccag

SEQ ID NO: 292973 - DNA, 122 bp, Homo sapiens
aggttgtttttgagtagacagttgctggaggaaggcacgtgagttgcagcctgaccagtgcgaccagtcctccttcaacagccccgcttgccttgaaaaggcgcccttactccgctcagggg

SEQ ID NO: 292974 - DNA, 122 bp, Homo sapiens
gggaggagaggaaatatcccatggctgactgtgccaaggaggtgtctgagccagccctcccggcccgagggcagggcaggtggccctgagagataagccaatcccgcagctgcagatgagga

SEQ ID NO: 292975 - DNA, 122 bp, Homo sapiens
tttggggtagcctgggatttcatatccttggagtcagataccttctcactggataaccttcggctaaccacttagctgccttgagtcttctaaaactgggataatagtccctccattgtgag

SEQ ID NO: 292976 - DNA, 122 bp, Homo sapiens
cgcgcgggaaagacgcgcaggcgcactgctggcaagggtgcttgcctgtgctggggtgggcggagctaaacccggagcgggatgacgtcatgaggacgcagccgcagagcgattcgcgtccc

SEQ ID NO: 292977 - DNA, 122 bp, Homo sapiens
aatagaagaagggaagggtggagaaaggggaaagcatggttaacaggaaacaacatgtaacggaagagacagcccagatgtgtctggctcacaacagacgtgatcatgttatgctggcctgg

SEQ ID NO: 292978 - DNA, 122 bp, Homo sapiens
ggcaccaacaagtgggggctgagaaggaaatgtacaggctgccaggctgaaatgggacatcgggcactccagggaggctcccttcaactggagaagctacactctctacctttggtggctct

SEQ ID NO: 292979 - DNA, 122 bp, Homo sapiens
aatcctgggccccttctcactccctcgactagctcatcacacgcatggcttccaactccacggccgtccacacgctgagggcccccgcgtctccatttccagttctcgcctctccctcgagc

SEQ ID NO: 292980 - DNA, 122 bp, Homo sapiens
gtttctgctggaggagtcactgttggagaaacatctgcgcaagccctgcccgggtgagcgcggcgcctgcacctggggagcgggacccggccaccggcgctgtccgcccagcttccctccgc

SEQ ID NO: 292981 - DNA, 122 bp, Homo sapiens
gaaaggcagaaagagtacgtctttgtggctcttatacagcagctgcttatttagtttttccgagacaggatttttaattagctgtctatggttattctcttttttgtttttcctcaatttat

SEQ ID NO: 292982 - DNA, 122 bp, Homo sapiens
ggtgtagaggttccttcttcctgattatggcaaatgagtgatttccaccatttctaaacccgtgtcccagtgtctaagaacatcttattcggcttcacctccaatttttacattatgaaaat

SEQ ID NO: 292983 - DNA, 122 bp, Homo sapiens
gttgcgcgtcggaagccggaagcagggactgagcgacagactaggaaacgccggtttctccggggctccccagcgccccacctttaccccggaggccgccctcttccatttgctcttgggcg

SEQ ID NO: 292984 - DNA, 122 bp, Homo sapiens
gagagagcaggagctcaaagaggttaagtggtgtgtgcccagggccaaacagtgagtccccgacagtctagagaactcagcgaccccgcctagcctggtgcaagtgtttaacagagttaaac

SEQ ID NO: 292985 - DNA, 122 bp, Homo sapiens
ggattagatgccagactttctagttccaaaccctgatgtggatgatgagaggaaagctcccggctctgtcacagccactccagtgttcccaaaacccaaatgttctgatgggagccccctat

SEQ ID NO: 292986 - DNA, 122 bp, Homo sapiens
catttctctcagctgagaaagtcccgcttgggacacttttattcctaatgaataagcgttcgtagttctagtgcccactgatctgagagtcagagcttacgacgccgagctccctacctcat

SEQ ID NO: 292987 - DNA, 122 bp, Homo sapiens
atgagaacttacatttgtcttcagggtccacacatgagatacatttgttattctgtgactcgctgcatctctcacagtaattaaactggtgtagagtcccctcttcttgatcttccaccagc

SEQ ID NO: 292988 - DNA, 122 bp, Homo sapiens
tgcgggcgggcgcgcagaggaaggaagagccgagaggaggcggggccgcggcggcgcgggcgggcgcttctcctaactttagttttggcgtttgaggcgagtttctgtctcagtcgggcgca

SEQ ID NO: 292989 - DNA, 122 bp, Homo sapiens
aacccagggaggcagaggtttgtagtgagccaagatcgcgccaccacgctacatcctgggcgacagagcgagactctgtctcaaaaaaaaaaaaaaaaaaaaaaaaaaaatgcaggatctca

SEQ ID NO: 292990 - DNA, 122 bp, Homo sapiens
gcctcttggtttgcgtcctgcactgaaaggaaatgacggattttgtaagtatctaccaatcgctgagagccacattaaagccccttatttgcatgccaggatctttaaagagagcaggcttt

SEQ ID NO: 292991 - DNA, 122 bp, Homo sapiens
ggaaagtaacttcaataggctccttttctgccaggacctccaatccctctgaacataagccgaaccacagactgccgcacatgtgtctgggtcctggcttttcttccctcacccctccgcag

SEQ ID NO: 292992 - DNA, 122 bp, Homo sapiens
agcccttcttccgagtaccgaggccctgctgctgggctttctcggcccctcaacagtacccggcgtcggcggccatcaccctctgagaagttcagcgaataaccacttttccgcttctggcc

SEQ ID NO: 292993 - DNA, 122 bp, Homo sapiens
gaaccagtcaacgctgaagacgcacatgcgaagccacacgggggagaaaccgtacgaatgcgatcactgtgggaaggccttcagcataggctccaacctgaatgtgcacaggcggatccaca

SEQ ID NO: 292994 - DNA, 122 bp, Homo sapiens
tagccgccccacttgcgggattccaaggcctcatcgagtgcgggtatctggctgtggattcgccgccgtcctgctggacgcctggaggctcgaaccccgccgcccccctaccccaggcttta

SEQ ID NO: 292995 - DNA, 122 bp, Homo sapiens
cattttgaataaagcgattcggttccttatccggggactgggttgctccgtgtgattggccggaggagtcacatggtgaaagtaactttacagggtcgctagctagtaggagggctttatgg

SEQ ID NO: 292996 - DNA, 122 bp, Homo sapiens
ggaccctcgcttggttatttcctctgggtgtgcaacacggctcttcgaagccctggaagtcggtgccgtcccggtggtgctgggggagcaggtccagcttccctaccaggacatgctgcagt

SEQ ID NO: 292997 - DNA, 122 bp, Homo sapiens
agacgccagggcttcagcccggccgcgctgccccgtgcaccggaggctccggcctggccgcgctgtcccgtgcaccagaggtgcggtgggcttggttttcccacctgcgcagtaggaggaag

SEQ ID NO: 292998 - DNA, 122 bp, Homo sapiens
cgtttgaagtaggaggagcaacaggctgctgaggtcgatacattgctgacccccctgttccgaagggatacggctgggctggttgataagctacaccaaggagaagaaacagaaatttcaat

SEQ ID NO: 292999 - DNA, 122 bp, Homo sapiens
gacaaaacacccccagaatctgctctttttccttccactctgaggctggtggctcagagccgaggcaaatgaacagaaacattttatccaggcctgctggtatttgtttctggcacgatcag

SEQ ID NO: 293000 - DNA, 122 bp, Homo sapiens
gttttgtctgtgcagcaggcaggaagaacccactgggtggttaccaaacaacccaatgtacgtggcaggtacaaactcatttttccagatcaagaaactgaagatagagaggagaaataacc

SEQ ID NO: 293001 - DNA, 122 bp, Homo sapiens
gggaagggaggggagccagcagggaggaggaggccagggcccgccccacagccactctcgcgcctccgaacagccacaggggcaaagccctgtcacccccaggatccggtcatcagggaaag

SEQ ID NO: 293002 - DNA, 122 bp, Homo sapiens
tcccctggccctctccagggcaggggaaggttgggcagtcctgggcggccagcaccccggcgtgcatgtctcctgagcagctgcccatcgggcctctgctggcctgggggctccaagatgca

SEQ ID NO: 293003 - DNA, 122 bp, Homo sapiens
agcactaaaccagaagccagaagaccaaagttctggtcttttctctgccataactagatacgggaattttactgtgtttccatttcttcatctgtaaaattaaggagcaggggaaaagatca

SEQ ID NO: 293004 - DNA, 122 bp, Homo sapiens
tgtaagcacttctttcccagagcactctgagtttcctcatttgcagggacaaatactgtgcgtggatcgatgatgacttccacatatacattccttggaaagctgaacaaaatgagtgaaaa

SEQ ID NO: 293005 - DNA, 122 bp, Homo sapiens
ggatatatgattttgtagatgtttcagagggacagtttcatccctgttggccgtcttcctcgtaactaataatgagaacctcccttcttctggaaagctatgacattcacttagggatttgg

SEQ ID NO: 293006 - DNA, 122 bp, Homo sapiens
gttgaccagacgcgtggagaggagagcaggccggcagctcttgagagtgccaacttcccacgggttgagctctctgggaacaggactgagagggacccaaccctaaccgcacgagccgcaca

SEQ ID NO: 293007 - DNA, 122 bp, Homo sapiens
tttcaggagacaggaggccccaagatgtggaaaagggcaatgcagtgctctttcaggcagcgtcagcctggttgtaccccaaaagtatgagtaacaaagccatttagaatagcagtaggcca

SEQ ID NO: 293008 - DNA, 122 bp, Homo sapiens
gcctgatgttgctggggcacatggctggggtgaacccgggcccatcccctgtgaagtcagcggctccccggcatcctatgacccacactggtgagtgtttgctcttggaggaggaggtgaaa

SEQ ID NO: 293009 - DNA, 122 bp, Homo sapiens
agacccacaggccccctgtcacttctgcaggcttttctgcagggaacgctcactgctgtgcgtgtcccccgggcaccgtggctgtgtcccctctgggctctccatgctcctagcccgttgtc

SEQ ID NO: 293010 - DNA, 122 bp, Homo sapiens
cgagagcgtggctcagccccacggccctgcgcggcctccctggaagcccctgtgctgtgccgggcactgggctccccatgcaggtgctgcgtctgcccggctctgtgctctgagtgcatgcg

SEQ ID NO: 293011 - DNA, 122 bp, Homo sapiens
ttgaaacaatacaccgtctcctcgccgtcccagatggtgcggggcagggggaatttcctgcgcagccggtacttgtctacggctcccagcggccggccgcgggctcgctcggcctcggtgta

SEQ ID NO: 293012 - DNA, 122 bp, Homo sapiens
gccggggttagccttcgaggcggggagagggagcggggtccttcaaggaccgcatgttcgcgatagcacatttgagccctggcaggccacctgggccgccttctttcggaaaccttgcgggg

SEQ ID NO: 293013 - DNA, 122 bp, Homo sapiens
gagttaataatctataaattcctggcacatggtaagcattggttatgtgtttgctatcaccgccattattatccttgctacttcacggaatactgcaggaaacccaaggaaacacaatgact

SEQ ID NO: 293014 - DNA, 122 bp, Homo sapiens
gggtgcaactggaagagaatgaaaggatgggaaaataccagaatggggaaaatacatttgcgggaaaaattttgtgtgcaaatagaagcaattacaaccaggtaacacccctccccctacac

SEQ ID NO: 293015 - DNA, 122 bp, Homo sapiens
gcatggcatctaatagtcatctcttcttaatacaaatgataataaatttcactgctaagacgacaatcatctgaaaaaaacagacatttgcttatgttttaaagtcataatagcaaactggg

SEQ ID NO: 293016 - DNA, 122 bp, Homo sapiens
ttgccctcgtgatcacatggctgactgggagcagtggctcaccactgctgcccagcatcacgagaggattgtaccactttctactgaatacatatgctttctcaccatcatggaaaaattgt

SEQ ID NO: 293017 - DNA, 122 bp, Homo sapiens
cccacagccgccctgcccagcctggctcctcctcacccgcccaggctgctgtgctcctcacgggaggaaaacccgcctgcgtccagctacctccaggaaagcaacaactgcccgtcctcgac

SEQ ID NO: 293018 - DNA, 122 bp, Homo sapiens
tccttttggcttcgaggtttaccccttccaggttagtttatccctcctgctgttctagggcgaaatatatgattggcttcgttgcaactggcgtgaggcctcgggagcctctgatcctcctg

SEQ ID NO: 293019 - DNA, 122 bp, Homo sapiens
tgcctgataactgatttcaggtgcctcccaaaaaaacatgtggcagcaaatctagacccacggtgcaatttaggagccataattgtagtaaaaactaaatctgatccagagtagacctttat

SEQ ID NO: 293020 - DNA, 122 bp, Homo sapiens
agcaggcggggagcacactagtgggcgaagggtacacagacccctaaaacattagagccccgtgtgctgccatggcagaaacaccgcaagaggtatgggctgttgggtttttcagcttaagg

SEQ ID NO: 293021 - DNA, 122 bp, Homo sapiens
tcaccacttcgttttcacgtctgggaggggagcggggggcggtgatggggaggagaccaacgctttgatttcccctggtaggtgttctgagtggctagggatccttccctcgcgtgcccctg

SEQ ID NO: 293022 - DNA, 122 bp, Homo sapiens
ccgtgatgtgtggggctggcacgtccctgctgtgacatgtgtgacaccacgtggggccggcgtgtccctgctgtgacaagtgtgacaccacgtgggggccggcgtgtccctgctgtgatgtg

SEQ ID NO: 293023 - DNA, 122 bp, Homo sapiens
aaagcctacagtcaggtgtcaatgtctttgtcagtctctcactgacagttctacagataacgacgaaaacaatgcaaatcaaccacaaagggaaatggttcctctggtggaaaaacacaaga

SEQ ID NO: 293024 - DNA, 122 bp, Homo sapiens
ctgaccctcgtcccgcccccgccattccccgcctcctcctgtcccgcagtcggcgtccagcggctctgcttgttcgtgtgtgtgtcgttgcaggccttattcatgggctcaccgctgaggtt

SEQ ID NO: 293025 - DNA, 122 bp, Homo sapiens
aggagcggggaagctgactcagggctgcggccggggtcctgcggggtaggagcgcgaggccggcctgagggaggaggcctagcgacccatccggcgcctcccgccccgggcacccgcccgcg

SEQ ID NO: 293026 - DNA, 122 bp, Homo sapiens
tggactctctcgctgccccgcaggctctgtggcctcgggacgtctgcacagccccctccccgcaaggctcagccgcctctcaggccggaagcctccaggcacccggctccccttcggggaag

SEQ ID NO: 293027 - DNA, 122 bp, Homo sapiens
cgttgcttcttgtccacaaacagaaactcgcaaaatgggtggctatccagagtgtgtctgcgtggccggagaagagaggcgaaatcaggaggatgatggaagttgctgctgcagatgttaag

SEQ ID NO: 293028 - DNA, 122 bp, Homo sapiens
ctctgcccctttcttccccccagtttttctcttggcagtgactgcttttcattgaccaaccgatgaagacagcacacgggcagctgtgccagttactccctcccttatgttccacctcaaac

SEQ ID NO: 293029 - DNA, 122 bp, Homo sapiens
agtttaggcctcaaatgggctctcctcaaggctggacctcaaaggcccagtttgggccttcgcaaatgtctctaacccttgacttagagtttgaagattcattccattctggatgtgaatgc

SEQ ID NO: 293030 - DNA, 122 bp, Homo sapiens
ccgcccgccttttcgcagggaaggtgcccggccaaactctgctctcttcctcccgcccctcgagtcacgtgatccgcttcaccttgtcgcgcgcccatcctaaacccgcgcgccccgcctcg

SEQ ID NO: 293031 - DNA, 122 bp, Homo sapiens
ctgtctttattaaccaacaactcagccccagccactccccaagcggggaaaaaaacactacgtttcttggtcagtgtacctctggacactgcagcccacacagctggctgaactcggtaaat

SEQ ID NO: 293032 - DNA, 122 bp, Homo sapiens
tgccaagccctgctggatggcagacagtgcgtgcaagcatcacagcccactggaagaggccgggggccccattttagagatgaggaacccaaagcagggtgggtgtggtccctgtgggggaa

SEQ ID NO: 293033 - DNA, 122 bp, Homo sapiens
ataaaaagtctaactctcctatgcaggctccaggtccaattctcagcacccagtcagactcgaggctcactctagcctgggagaacctggcctgtcctggctgtgatcacagcttggttcca

SEQ ID NO: 293034 - DNA, 122 bp, Homo sapiens
tcactggacctgtacttattgtctctcatcttgtccatcatgttgtttctcctttttaggcgtatatatatctatggaagaaaaaagtttaaatagaaacactcatttgatgaggaattctg

SEQ ID NO: 293035 - DNA, 122 bp, Homo sapiens
gagaccactggaagtggctctccatgatcggggggggcactaacccccgctctgggctgccggaaggaggaactcacgaggcccgagattgctatccacagccccagcgtgaccccagcatt

SEQ ID NO: 293036 - DNA, 122 bp, Homo sapiens
gcaggtgcagcattcattttaagtgactggagcaggttgtatcagtttattaattggtctcgttgaactgaagtactttccaggatttcagaaagtgcagtttcagcttgttggtaccgaga

SEQ ID NO: 293037 - DNA, 122 bp, Homo sapiens
aagcccagcaatgcacactcagccctcagtgggctgtctctgaaggtcctgtccctttttcgcttcccccccgctggagctgcttctcccgcttgcgggagcccaggctgagagcagacacc

SEQ ID NO: 293038 - DNA, 122 bp, Homo sapiens
ggaagtggcaggagacctgctttctcatttcacttggcctccatcttgctggaggaagatcgtgggcaagttatataatctctctgagcctcggttttctatctgcaaaatggggcaagaat

SEQ ID NO: 293039 - DNA, 122 bp, Homo sapiens
ctgagaagcaggagctatgaagtgggggaaagtgacagagagtatggggaatcagagagccgttcagtggtaaggaagggacagaaaaaatcgttatcatgtcaatgacagaacattaggtg

SEQ ID NO: 293040 - DNA, 122 bp, Homo sapiens
tggggtgggtggtccattcttggggacaaggcaggtcatcctgctgaatgtgtgtctctgcgatgtgccctttgggaaaaggaggaacaaggacagcaggatggctgcaggcacctgaccaa

SEQ ID NO: 293041 - DNA, 122 bp, Homo sapiens
agagttgttgtgtgagtttggggcgggcggcccgaggcttttatacgctccgggcggccgcggctcgccaatgagctgaatggagtcctacacaaacagggacattcctcgcattcctcccc

SEQ ID NO: 293042 - DNA, 122 bp, Homo sapiens
cagagttttctccatttaacaaccatttattaagcacctactatgtgccaggctccattgcgttgtgttctggcaatataaagccaagaaagacattccgtagtccaaatggacatttctca

SEQ ID NO: 293043 - DNA, 122 bp, Homo sapiens
tggcccgcctagaaaccaccggctgatgtaatgacttgaggcctggaaaaataaacagctcgcagggaaaccagcggtagccgtcgtaagcaaataccccatggccacctggaatctcgcac

SEQ ID NO: 293044 - DNA, 122 bp, Homo sapiens
ttcccagagagcgccgcgtcgggagcggagccttttctcgctaacaccgctcgccctctccgagtcagttccgcggtagaggtgacctgactctctgaggctcattttgcagttgttgaaat

SEQ ID NO: 293045 - DNA, 122 bp, Homo sapiens
attgttagagaggattaatgaatcactgtgacacacaatccaggttgacaattctactgacgttagcaaggcaacagtgcttgtttttgtgtgatatatttttcaggaggatgtatatgagg

SEQ ID NO: 293046 - DNA, 122 bp, Homo sapiens
ctgcggttctgggcttggagtgctgtctgtagccggaagagcagggcctctgcggcccctcgctgctgtagccggggtggcttctcctgggtgcggaagatggtgaatgctgccagtagctg

SEQ ID NO: 293047 - DNA, 122 bp, Homo sapiens
ctgtcttcctgcggggcaggtctcgggaccagcagcccgccatgcctgagcctcccaccccgtccatgagctcctgtgccgcccgagcctccccgatgagtgccgccccctgctccagggcg

SEQ ID NO: 293048 - DNA, 122 bp, Homo sapiens
tgctgtcagatggatatatagtaatgctacttgtcactttgtttggccctggtttggagacgggtttctgtttctccaacgtagtctctgttccagatcctcccatgatttttttcacatcc

SEQ ID NO: 293049 - DNA, 122 bp, Homo sapiens
ctttcctgatggacattaaccttgtttctctttagctgagactgctctttgttaccttaccgaactgtctatcctgtagttttcctgtgtggctaaatgaaagattgtaaatagccttgtag

SEQ ID NO: 293050 - DNA, 122 bp, Homo sapiens
ctcggcgcgcccggaggcgagctgccaactgaaccaaaaatgccgctgccgggagttgctcgcctagctgcgcagcagagatgtccaaaccctccacgcgggaggcggcagctcgccgagaa

SEQ ID NO: 293051 - DNA, 122 bp, Homo sapiens
gggtggtcgcggaagcgcctgggcgtcgtgggcctccgtagcaaacgcggggcgggagcacgactcagggcggcgcaatgtgattggcccaggtccccttcggagctttctattggtcctgg

SEQ ID NO: 293052 - DNA, 122 bp, Homo sapiens
caggggagctcagaggacacctggcctccttcaatccaggactcactgttgaagtggagccggggccctcgcaggaaagaatgagctgtgggagggccactggtccaccacagggagtctgt

SEQ ID NO: 293053 - DNA, 122 bp, Homo sapiens
ggctcagagcagagagagggtctcctgcgtggtcttgtggggcggcagaacggatcaggccgctggctttgctgctccgccgaccagggctttgctgatcggcgctgggagtttcgggggcg

SEQ ID NO: 293054 - DNA, 122 bp, Homo sapiens
tttctgaaagagttcttccgcttgttgttggctttcaactgttggatttgaggcgcttagcgccttcttcgtccgggtgcagcacattcttgattggtctcatgcctttgtggttgtaaatg

SEQ ID NO: 293055 - DNA, 122 bp, Homo sapiens
ctttgttcgccgcccctcggcgttccagctctcaaccttgctcccagcagcccccgccggcgcactcgacctacaggaaagttgctcccgagctgtggaggggcgtcatcgcctcctagcaa

SEQ ID NO: 293056 - DNA, 122 bp, Homo sapiens
tgccttagacccctactcgaaagacttccagcctcccccagacccaaccaaccctgggatcgtgctccagcttcctgccgccttcaccggcctgacctccgcgtgtccctgacccgggcccc

SEQ ID NO: 293057 - DNA, 122 bp, Homo sapiens
cttctattaggctaaatatctctgtataatggggaattatcctctgaagaggcaaactgccggcctctccagggagggggcggtgggaacctcgcatcgtgagggctctcccacggtgggga

SEQ ID NO: 293058 - DNA, 122 bp, Homo sapiens
cccccgagcttcttcccactgacctgccaggagactctgccatcttttctgaacaaaacccggtggcctatgtggaaataccgtggctatttccttgggagccagccactgtgtcgttgggc

SEQ ID NO: 293059 - DNA, 122 bp, Homo sapiens
agtggaatgaaaagcacttgttgaaagtcaccgttcataggcacaggctcactaaaaggccgagacctgctataggactatagaatgcttcacttcccctgaactcttatcgtcacattaca

SEQ ID NO: 293060 - DNA, 122 bp, Homo sapiens
tatctcaaatgtgaggcaaatagctaatggtgtttgtgtatacgaggaaggtggagtcaccggttcttcgtggccatcagaggaccgacacgcccataggtctcatgcattaagtctgcgtt

SEQ ID NO: 293061 - DNA, 122 bp, Homo sapiens
ggtgtgtgcaggctttcattcattcatgctttagttggttcttcctgcagcagcagagggcgggggaggtgtcatctgataaatgacaaattacctacaccctaaggagtttacagctctgt

SEQ ID NO: 293062 - DNA, 122 bp, Homo sapiens
agtttgagattttcctttacattttttctaagccgggggtaagactggtcttgcttcatgcgggctctggtcgctccctcttagggctagtatttccctctctgcttttccttcccttcctg

SEQ ID NO: 293063 - DNA, 122 bp, Homo sapiens
cctcagtcctgaaatgaggtggtcacccctgaccagggggctttggctcctggtatttcccggtctgtcacgaaggtccttttcctttaagtgccggccagagcctgagcgctccgagggag

SEQ ID NO: 293064 - DNA, 122 bp, Homo sapiens
agacaaaaccccgcagacaccaggttatagaaagaagaggctttattcggccaggagcgtcggcagacttgtgtctcaagaaccgtgctccctgaagaaaaagttcctggtccttttaaggg

SEQ ID NO: 293065 - DNA, 122 bp, Homo sapiens
tgggcgcgcagggatggggcgacagtacacggcgcgaagctgtggaatccaggcaggaagcggctgatcctcagcgcccagccgcagtgctcgcatctgggcggcccgggcgcgccggccgc

SEQ ID NO: 293066 - DNA, 122 bp, Homo sapiens
tccaacagggggcggcagcggcggtgaggaagacacgagtcccagggagtcctaggagcgcgcagtgggtggggctggacagcgagttccacttccatgccgcctgcgtgggcctcgcgcct

SEQ ID NO: 293067 - DNA, 122 bp, Homo sapiens
gttaactgattccctggtttaaatctgcagcacttcaaaagacttttctgtcttcactagcgccagtgcctggcacatggccacagccaggaagctgaggtttgctcttgagtcccaatgca

SEQ ID NO: 293068 - DNA, 122 bp, Homo sapiens
ccagacctctgcgggatgtgctggctgccaaccccaacaggttcatcaccctgctgctgccggggggtgcccagacggctgtgcgccccggttcgcccagcaccagcaccatgcgcctggac

SEQ ID NO: 293069 - DNA, 122 bp, Homo sapiens
gtgaggggcttgctgcctcatggactgcacggcagatgaactcatctttctgctcccattcggccctggtcacctccaggcggctgaagacgaagaagccggagcccttggtcttgcggggc

SEQ ID NO: 293070 - DNA, 122 bp, Homo sapiens
tacccaaggaaaggagtaatggtggcactgagtatttggaggtgggattcaaccagaatacgtgattgttaattggccctggactaaggttttattgcaagaaagggttctttagcttaaaa

SEQ ID NO: 293071 - DNA, 122 bp, Homo sapiens
accctggtggtaggatgtgccttaggtccccagagccaagaggcactatggccttgctcccggcacccgaccccacctgccgtggacccgtgcgcctgtgcgcagctcaggaagccaccggt

SEQ ID NO: 293072 - DNA, 122 bp, Homo sapiens
agcccagaatgtgccccagaatcgagtaacccagccctggggattgtcctggtcctgtcccgtcccacacggggatgaagtacagacgtccagcccagaaaagaaaatatctgggcgggtcc

SEQ ID NO: 293073 - DNA, 122 bp, Homo sapiens
ttgcccatcccaggccgggctgggactgcgcgaggcttgggtgggaggaggcggagggcgcgtctttccggcttctcgccaggggctggcttgggggcttctggcccatctcggtccccgtc

SEQ ID NO: 293074 - DNA, 122 bp, Homo sapiens
cgcgtactatgagcagcagatggcggccaggcaggccaatgctctgtcccaccaggtgagcgggcgcccaggctgccagccggccggtgcccaggacagatgcttgctgggaccctcgctgg

SEQ ID NO: 293075 - DNA, 122 bp, Homo sapiens
atatggccaccactgaggctgcttttgaataaattcatctgattttaaagttaaaatttgcgggtgcctcaggtgatctgctcagtccgcatcctaagacatatatacacatctttcacagg

SEQ ID NO: 293076 - DNA, 122 bp, Homo sapiens
gtcaacttctgagctagcgcattgctgccttgccctgctctggcgctcccacttggatctcgactgacttcgtagtcgtctcgttaatctgtcacactttagtattccgaggatcgtattta

SEQ ID NO: 293077 - DNA, 122 bp, Homo sapiens
tcctttaaggcggagggatctacaggagggcggctgtactgtgcttcgccttatatagggcgacttggggcacgcagtagctctctcgagtcactccggcgcagtgttgggactgtctgggt

SEQ ID NO: 293078 - DNA, 122 bp, Homo sapiens
gggggcttccacacccctcaacccaggaggtgcattccaagcctggacaggggtcactgacgtggccacattctcagccctgggctggcggccgctcctcccacacacctctccaactgcag

SEQ ID NO: 293079 - DNA, 122 bp, Homo sapiens
ttaaaaaatcttgtcccatcaaactctgctttcaggaatggcacgaagagccgacacgcacggtgagcagctgccttctgcagatggaacgcctcacctgggacgcctcacctgggacgcct

SEQ ID NO: 293080 - DNA, 122 bp, Homo sapiens
aggaaaattaaggcaaatagaattgggctggggagttgctacttattagtattcctcccacgttctaacctaattataaggaggttgttttggccatgggcagtcatctcaggttttgtttt

SEQ ID NO: 293081 - DNA, 122 bp, Homo sapiens
gcaagtagatcccgggagcggtggaggggcgggactccacgtctcctaggaaccgctgcgcgctcactgattggctgatcgctgctcagccgccattttcaaatccccggatgacggcggtg

SEQ ID NO: 293082 - DNA, 122 bp, Homo sapiens
ttaattgatgacacacatatggtgtttgttgcacatcccaacaaccgaccccagtgctctcgttagaagtattctcaaagactggggtcttttgaggtcaccttacttaccaaaaacttttt

SEQ ID NO: 293083 - DNA, 122 bp, Homo sapiens
gtcctcctctgcacaatcagcaacaccgactgatccctttctgcacgtcacagacccaggcgaggccctttaccgactcggctgcgatggccgcaacacccagtctgtggatgaggagtctg

SEQ ID NO: 293084 - DNA, 122 bp, Homo sapiens
gggtcaccaaggagcagttctccgggacccgttgcgtcagagggactgggcggggctgggcggggcaggacgggggcggcgctcaggaaccctggaacccgctggccctgaggccacggacc

SEQ ID NO: 293085 - DNA, 122 bp, Homo sapiens
ggtcggcaggtgggctctgtggagacgtggtcagatgaggtttcgggttgagtatgctctcggtggatgaatcacctctgccacacgctctaggtgctggggccacggctgcagcagtgaaa

SEQ ID NO: 293086 - DNA, 122 bp, Homo sapiens
attaccagttacacatcctagtacatgctcatcttgcaaccttaaaagcggtttataggccgggcgcggtggctcactcccacctgtaattccagcactttgggaggccgcggtgggtggtt

SEQ ID NO: 293087 - DNA, 122 bp, Homo sapiens
aaatcaataagtcagtgaatgttggcaggtgttcagagattttttctgtgtgtcattcaccgtggcacagttaagtaactgcttatgattaagtttttcacagtctcagaaaataaggagtt

SEQ ID NO: 293088 - DNA, 122 bp, Homo sapiens
gcaagagcaggaagcaggcaggggtcaaaatggcggccaacaggatgctggcagggacctcgggggataagaatgggggtgggatctcctatccatcactcaccaagctccctttggggccc

SEQ ID NO: 293089 - DNA, 122 bp, Homo sapiens
gaataacacctgtttcctcacccttccttgtcagaaaaccctataggacaagtgtgtgtgcgtttgtgtgtgtgtgtgtgtgtgtgtgtgtgtgtgtgtgtgtgagtgctgttcctgtcatc

SEQ ID NO: 293090 - DNA, 122 bp, Homo sapiens
ggcctgtgtcctgccccactgtcccttcacagccctctcccaacctcacctgccctgccacgggcctgctcgaaactcttctgagcgtcccctcacgatgagttcaacccttcctcctcctc

SEQ ID NO: 293091 - DNA, 122 bp, Homo sapiens
tgaaggtgtccgcggcgtcgtcgacggcggcgccggccatggaggagacgcagccgccgccgcagcctaagctgcccctgtgcgacagcctcatgatctgggtgagtgcgaggaggcgagag

SEQ ID NO: 293092 - DNA, 122 bp, Homo sapiens
cggggtgggttgcggcagcagggtggaggcctacgtattttcgtgggggtggggttgcgacgcagagtttaccatatttctccagggttgctccggccgcagaagttggcaaggttgtgtgt

SEQ ID NO: 293093 - DNA, 122 bp, Homo sapiens
gcgggggctgtgcctggtgggcggttttcccagagcagggagcaaacaggactgagttggcgccagcttcctcggatgtagatattgctggctggatgaccagccacagccagctagcttga

SEQ ID NO: 293094 - DNA, 122 bp, Homo sapiens
tgcttttaacacaactcattcatgatctgatattgtctggttctcactcagccattccttcgttcatcaaactcaaaatgtctttattaatatatactatatgtatagtttagtaatatgcg

SEQ ID NO: 293095 - DNA, 122 bp, Homo sapiens
ccctatctttgcaaggcagcaggggacgcaggagtgttggggcactgtctccgggagtggcgggggctgctgcagtacctgggagggccgcgcgggggcgggcgaggacgccgagctatgag

SEQ ID NO: 293096 - DNA, 122 bp, Homo sapiens
aatagtaacgaaaacagctaacatgcgatggagttcactatgcctaccacaattctataacgtacccctattattgtctccattttgcatatgtggaagatgaaatttggagacttgactcc

SEQ ID NO: 293097 - DNA, 122 bp, Homo sapiens
gccactgcactccagcctgagcgacagagtgagactctgtctcaaaaaaaaaaaaaaagacgaagtgagaattagtcacacagagagggcagaaggtattctgggagggaagagctggagaa

SEQ ID NO: 293098 - DNA, 122 bp, Homo sapiens
cggcccgcctgccggagccgtggtggcagccccgggaggagcactggcgtctgtttccttcggtgagtttcggtagtgagaaggagccgggggaggtgcggtcttgaggagcggaaggggcc

SEQ ID NO: 293099 - DNA, 122 bp, Homo sapiens
gacagcgggggagaggaggccgctctgcaccggccgaaagcgaagggctcgccggctggccgcgtagtgtaagggtcggtggtttctttgcttggtccctggaaatccaccccttcttatcc

SEQ ID NO: 293100 - DNA, 122 bp, Homo sapiens
ctgcccgccatgttctcgccaggtgtctgtgcggtcccccgtccataacctcggtgcaggcgctccccgccctaccgacctgggtcctgcctgctgcaagcttgcttctctgcctcatgccc

SEQ ID NO: 293101 - DNA, 122 bp, Homo sapiens
ctccccacctcccagacgaagagcggccaggcagaggtgccccccacttcccagatggggcggccgggcagaggtgcgcctcacatcccacaaggggcggccgggcagaggtgctccccaca

SEQ ID NO: 293102 - DNA, 122 bp, Homo sapiens
ccagatcccctctcacaggacatggagccccggggcgtgaatgccaaaggatacccagcccggcttccatccgtgatttcagctaggtcttctggagaacttgctgcgatctctccgtcagc

SEQ ID NO: 293103 - DNA, 122 bp, Homo sapiens
ttccgctaggccggcgaaggctggtgagaaagccggctctgcgccctgccctgtgctggccgccctcacctggcgctttgtaccctgaggcagctccggactcagggcaggtgggagggatt

SEQ ID NO: 293104 - DNA, 122 bp, Homo sapiens
cctcctaagccggaaggagcagcaggcatgtctggtctggcccaggcaaccaggcggcagcggtccaggttacccttccaagggctggggccctcgagggctccgttttttctcagaggttc

SEQ ID NO: 293105 - DNA, 122 bp, Homo sapiens
cagagccacctgatgcctgcccctctgctccacagcctttgtgtccaagcaggagggcagcgaggtagtgaagagacccaggcgctacctgtatcaatggctggggtgagagaaaaggcaga

SEQ ID NO: 293106 - DNA, 122 bp, Homo sapiens
catggctggctcccagtggtcaggactggctgtgccactgatccactgtgctcctggctgcgtcgctgtccttgcctgctgtgtcctgggagctgtactggagccccggccagacatatgca

SEQ ID NO: 293107 - DNA, 122 bp, Homo sapiens
aaaattccaacatatttccccatgccctgtcaatttattctcccagccaatgagatctagcgcagactatgccatataccgttgaccagtaactgttagcatgctttattgaaaatggatca

SEQ ID NO: 293108 - DNA, 122 bp, Homo sapiens
agcgagcgccggtctgaggacccctgccgtcgcggtgcactctgggaaatgtggttttcgcggcgctctctggggcttgaccccgaagcgggaggggcggggcccagagaggagggtcgtca

SEQ ID NO: 293109 - DNA, 122 bp, Homo sapiens
cctcccggggaggatgctccagggaccccgcgctgcactggctgcggccgtggggtgcggcggcttctgagtgaagaggggactttgccagggattcactcctgtgagtttcttcaggagag

SEQ ID NO: 293110 - DNA, 122 bp, Homo sapiens
gtatctcagagagtgtaccctctctctgatattgttcataatatccacggggtgagatgacgttactcccaggattgcagggggtgtaccccctctgcgatattgtttgtaatatcaaaggt

SEQ ID NO: 293111 - DNA, 122 bp, Homo sapiens
gtccgtctgcaccggcgcctcactgccttgttaaccagtgagtcccagggccgggcacggcgcagcctctcagccagttaggggtgagtgtgccggcaccttcctccgccacggcggagccg

SEQ ID NO: 293112 - DNA, 122 bp, Homo sapiens
cccaccccacaccagggctgggggctaggggtgggcacagcttgggcaggccatcctgagcgccaggcctggtccgcaggccggctggagggccctgccctgccaagcgggactccggctcc

SEQ ID NO: 293113 - DNA, 122 bp, Homo sapiens
aaaccccctgaaggaaggaaaggcccatacctctttattttctctgcttccctccctgtgcgtgtcccaaggctgggtaaatcagaactgacagcttttcccaagtgaggctctaagattct

SEQ ID NO: 293114 - DNA, 122 bp, Homo sapiens
tcatactctcgtttccttcatggtaaaaacaggtaggcataggccgggcatggtagttcacgcctgtaatcccagcactttgggaggtcgaggcaggtggatcacgagggcaggaggtggag

SEQ ID NO: 293115 - DNA, 122 bp, Homo sapiens
cagtcaacacaacccttaacaacggggacaccttctgggaaatgtgtcatcaggcaatttcgtcattgtgtgaacatcacacagtgacttacacaaacctaggcggtaccacctactacaca

SEQ ID NO: 293116 - DNA, 122 bp, Homo sapiens
atcgcgcccttagactcacaacagttgcagatctaacgtaatttttaaagccacctttggcgcctgcatgtttatccttccaaaagtccaggcgccccttctctcccgcatgcctcggtcac

SEQ ID NO: 293117 - DNA, 122 bp, Homo sapiens
tttgccctccacgcttacttatgtcctgtggcgtcttggctggaatcggggctctacccacgactccccagcctcgatgcctgggcccccctcttgcaggctcgatgaaaagcacccgcttc

SEQ ID NO: 293118 - DNA, 122 bp, Homo sapiens
ggcccacgtcctggccggcccctactcgagggagggcagatgagtcactgctgcgccccccgccccctgtgctgcctccccaagctctgcaggaccccagtgcactgaggaaaccggaccaa

SEQ ID NO: 293119 - DNA, 122 bp, Homo sapiens
cctcctccataaaagaaggccaagtccaaagaacagactacaatgtcctcaggacccccacggggggtaccccggcccccaggccccaagccgaagcccaagtgatggggggggtccccatg

SEQ ID NO: 293120 - DNA, 122 bp, Homo sapiens
tgggcatcgcggcggcgcgctgtcaatggcggcggcggcggccgggtcaggcgcggcaggcggcgagccccatggcggacagggccagggccctgctcagctcgcaaacacctttcctctgg

SEQ ID NO: 293121 - DNA, 122 bp, Homo sapiens
cccaaatttcacaagttaccaacagagtaacctaaagatgacccttcagtggcccctgagcgtggaggccacaacgggagggaagtccttggggctgagcccggctacttccaggtggaaac

SEQ ID NO: 293122 - DNA, 122 bp, Homo sapiens
tctcaaaaaaaaaaaagtgagagagattgaggctgggatatatggctcaggcatcatgcgcgtgtagggggcagttaaaaagcagaagtaagaaagattgcctagggaggcaggaagggtga

SEQ ID NO: 293123 - DNA, 122 bp, Homo sapiens
taccctttcttccacttgatcaaaccagctattgaagcttgtgcatgcatcacaaattctcgtgccatggttttcagctccatcaggtcatttaaggtcttctctacactgtttattctagt

SEQ ID NO: 293124 - DNA, 122 bp, Homo sapiens
aaaagtaaaattttaatgaataatggtgacctgtgacaccacccctgtaagcagcaggcacgctaggcatcggcctctcctgccctccatctcctttcagttgggtaagcctccaagcacag

SEQ ID NO: 293125 - DNA, 122 bp, Homo sapiens
ggctccagctttgaagcacagagcccaaagggaggggcgatggagcagaggccagcaggccgagagctcaggccatgcagagcctgggaggctaagccatgggatcaggtctgcatcctaaa

SEQ ID NO: 293126 - DNA, 122 bp, Homo sapiens
ggatgtagatggagaaggcgttcctgcgcatgcggcagcccaggagccagagcacaactgcgtttcctgtcagcccgacaagggaaacgatgcacgtcagcaccgtgaggctcaaggtctgc

SEQ ID NO: 293127 - DNA, 122 bp, Homo sapiens
tgttaactaaagaaaggaaaacagatcggtggttgctcatgggcaaagtggggtgggagtcgaaaggttacaaagagagatgaggaaacttttagggatgatggatgttttcattatcttga

SEQ ID NO: 293128 - DNA, 122 bp, Homo sapiens
cccccagcccgccctcagccgtgccagtggttacatccttcgggttagccgcccggggctcggccgcctgccccggcaaacagaggaaataactcacttctcgcagtttactcctggggccg

SEQ ID NO: 293129 - DNA, 122 bp, Homo sapiens
aagcggtgagactatcgtcaagcagtgagaccatcgcctattgctgagaccatcgcctatcgccaagtggagagtcccatcgaacccctttcgcttgctattctgtcctatttttccgtaga

SEQ ID NO: 293130 - DNA, 122 bp, Homo sapiens
ctccacgtacaattctggggcgaggggcaggtccaacatcccagatggtgaccaccactgcgcaaagccggggcgcagcgaccttccacgccctgcaccctccctggctgatgcaacccaca

SEQ ID NO: 293131 - DNA, 122 bp, Homo sapiens
gagattatgggagaagacgtgaacacttagtgcccaatgactgactcaaaatgtatgcagcgggatgcagagcagcgatttttggaaaggcttcccagaaggggtgggatgtgagaaggtag

SEQ ID NO: 293132 - DNA, 122 bp, Homo sapiens
gagatgattaggggcctgtagtgcctggcacagggctgccccaacagtggtggttgctggcgcattcttatatcagccccgcccctggcgagtcccacccatctgctgcctgtggggtgccc

SEQ ID NO: 293133 - DNA, 122 bp, Homo sapiens
agaggactccctgcaatccccacccgcttggtattcataccctttactagtctcctcccacgttgtatgagggttggcctgtgtgaccaataaaacacagacattgtcagcattctggtcct

SEQ ID NO: 293134 - DNA, 122 bp, Homo sapiens
aactttatttcacacgcattcagaataaaggatgcatgcttataggacgtagttggagcccggagacgtcctactgtactctcactttcagcttttaaacaaaaagaaaaattaatacgaca

SEQ ID NO: 293135 - DNA, 122 bp, Homo sapiens
cactagccactatctagtccatgtaaaagctctctcttcttcctctgaattcctctatcacggagtgtccctaccacttgacatttaatatgatcaatgctgaaatgtaagtagagataaac

SEQ ID NO: 293136 - DNA, 122 bp, Homo sapiens
aaccagcatgtaaaaacatccgtcgcatcctgtttttgtcaggttctttaatctgctcttcgagtctctgcaggttatgaaatgggacgaataaaagtaaacagtctagtaaaagtcaatgc

SEQ ID NO: 293137 - DNA, 122 bp, Homo sapiens
tctcaggcggcagaaagaccccagagccgagcgtgagccagtgcaccagactgctggtcccgcagcaactcgcggccgggtccctcctctttcacgtcgcccccgaactgggacacagcctc

SEQ ID NO: 293138 - DNA, 122 bp, Homo sapiens
cctgaaggggacgtgtgtgcctacttccttagatgaaacgtgatcactctaaccaggtcacggtaatgtcattccccttccccagtgactggtcaagggtcatgtgatgcaacctgggtccg

SEQ ID NO: 293139 - DNA, 122 bp, Homo sapiens
caagccctctagtctgtgacctcttggtcaaactgtctgttacccaggacacaaatagatcgagggtgtcagataacatggtaatttggtgggggagaagagggtttgagtgaacactgcaa

SEQ ID NO: 293140 - DNA, 122 bp, Homo sapiens
ctgccggggcagacgcaggacaaggctgcttttttgcccctggacctcaggatccaggtccgggacgccgcgggcaggggctctggaccgcgctactcgacccctcccccaccgcctgggtc

SEQ ID NO: 293141 - DNA, 122 bp, Homo sapiens
gtgggactggggatgccacgggacaaggctgctggcctggaaggtagtcacgtggagaaccgcaggagatgagattggaaagtagtaataagccatgtggataagaacagaggagcgggttt

SEQ ID NO: 293142 - DNA, 122 bp, Homo sapiens
cgattagtaaataccaacccatgctagagagtgaagagctctggaggagaggcacgggtgcgcccctggagttgctctaaacagggtaggcagggtgctcttgtcacagagaagatgaacga

SEQ ID NO: 293143 - DNA, 122 bp, Homo sapiens
actcacctcacaatgacagggaccctcatcatacaggtcagggctcaactcaaagacaggcgtggcagtgggacacagcaacaggactctccatgtggcaagggcacctggaggtgggaggg

SEQ ID NO: 293144 - DNA, 122 bp, Homo sapiens
tcgccatttgcccaggctggtctggaactcctgggctcagctgatccacctggctccactcgtgaaattgctgggattacaggcctggaccactgtgcctggccttcggggaacctgccccg

SEQ ID NO: 293145 - DNA, 122 bp, Homo sapiens
gcggggtcagcagctacattctggagggcacggagacgacgggtggctggagtttgggggcgccgcaaagctgacctgactgccccgtcacaccatgcccggggctcccccagccgggcgcc

SEQ ID NO: 293146 - DNA, 122 bp, Homo sapiens
aaagaaagccttttgtggcttcagaagccatttgcagagggcataagtgttaacacacaccgcttagattcaaaagcccaatttggcccctagttagcttctcaggattgtttctcctccca

SEQ ID NO: 293147 - DNA, 122 bp, Homo sapiens
taagggaacctgaagaggatccacaactgggagggatacagataggctctcaaaagctggcgcctcctccaagacttaatctgccaggagaactcagtgaaagtttctcagtccagcatcag

SEQ ID NO: 293148 - DNA, 122 bp, Homo sapiens
cccctccccatctgtggtttccagggcaaccctggaaaccaagagtgggtcgcctagaaacggtcagactggccccacccactctggatttccagggtcacccggcagtcccctctggcagc

SEQ ID NO: 293149 - DNA, 122 bp, Homo sapiens
ggagctcagccagttcaacatatgggaccgcgtccttcgcgcacaagaaattgtcaacatcgccaactgctccacaaacatgccgggcaacatcatcccgtgggtggacaataacgtcgatg

SEQ ID NO: 293150 - DNA, 122 bp, Homo sapiens
gaggacgagactgagtactactttcttggtggaggcgacagtcaaagccaggcattagaccggaatcgactcagttaaccactaggctgtgtgtgacagctggaggttagggaacgcggagg

SEQ ID NO: 293151 - DNA, 122 bp, Homo sapiens
ggtcctcacgaaccacctggggaccagcgcgtcctctcccacctcagagtcggacaaccacgcacttttagacgagaaagaagactcttatttctcggaaatcagaaactttattgccaata

SEQ ID NO: 293152 - DNA, 122 bp, Homo sapiens
cccctgcgcacatggccaggagactggctgcgaacattttcaggtaggtggacatgggcacgcccgcgggcatggtcggcaggctggacggggaaggaaggggcagtgtcagaagttccagc

SEQ ID NO: 293153 - DNA, 122 bp, Homo sapiens
ttgtagttttccagtacagtttttcccatcgctggaatcctggtttggttctgcgggaatcgagtgcttgagtgggacccagacagacaggaagggcgctcctgctcagttagccccagtaa

SEQ ID NO: 293154 - DNA, 122 bp, Homo sapiens
tcctgggattgttatgaagaggaggaagcagggtatggtgtggaaagtgttacaaacccacgcttcaggggtacttggattctggagtcagaccacctggcttcaaatctcaggtctgccac

SEQ ID NO: 293155 - DNA, 122 bp, Homo sapiens
tactccccttcctacacttgctggtatctttcaccaacttttgcagagacactgcaagtccgttgttaaggatttcaaactacatactttgtcctctgcagaaagtcactaacttcactctt

SEQ ID NO: 293156 - DNA, 122 bp, Homo sapiens
cactccaatgtaaagccagccactgccggcccgcttcccaggtcgcttttctctgaaaaccgaccccagtgcctccggctttacaatttgagtaaactgggtcatcagcaacggcaacgcag

SEQ ID NO: 293157 - DNA, 122 bp, Homo sapiens
tattgcacagaacatttctgcactgagagggaggagattattctgggtaaactttaatatcgtttacaagtataacactgtgatttaaagtgttcagtgacttcaagatggccccagacatt

SEQ ID NO: 293158 - DNA, 122 bp, Homo sapiens
acattcagggggtggggacagcatcctggcaggtcccgggcctgcaccacctggaggagccggtgactcacggggctgacagaagaactgaaaccagacaggagagtgcaggaaggaggaag

SEQ ID NO: 293159 - DNA, 122 bp, Homo sapiens
cgagggagccggaagccacccagccgtgtcgcagggagggcgccccgcccgccactcccacgcccacttctgcccgccccccactcacctgggctctcacctggaaggggtccctcgcttcc

SEQ ID NO: 293160 - DNA, 122 bp, Homo sapiens
ggcagatgagaagtttccttagtgttccttttcagtgtttctctgaggtgcatctaggaccgcaagaattcattttcatccacacttgagtgtctttggtaaaaccccaggtgagcttatcg

SEQ ID NO: 293161 - DNA, 122 bp, Homo sapiens
atgcgggaacacagatgaaccaagggacctgcactaatgctcctggaccgcaaggggaagcgcagcgagggctgttggtctagatttcttgaactttctgagcagcattccttccttctggg

SEQ ID NO: 293162 - DNA, 122 bp, Homo sapiens
attaagcctctttctctgctacaacccagtatctcagttactggctttccatatgcacatcgagcaataaacctactacggttataacttgtgttttaagtgaaaatgaattctttggggag

SEQ ID NO: 293163 - DNA, 122 bp, Homo sapiens
accttttattttgcgtgccacttttttttgcgattcaatgcctcaacacaacctttagtgcggtgcagatgaagcggaagaaccgagctgagcatgcaaaacaccagggtctctatcttgtc

SEQ ID NO: 293164 - DNA, 122 bp, Homo sapiens
tgattctctcgggaccattcatcatctttctaatttcctatagctatgcttctctttttgcgggaagcatggacagagggcagcccgggagtttgcctgtttttatgggcagtaggaagaaa

SEQ ID NO: 293165 - DNA, 122 bp, Homo sapiens
agacggcaacattctgagaagagtcaacagtgcccctttgatcaatggacttgggtgagccgggttgagatactggaggaggcaagcggtggggaggaggtgttcgggaaagtgatttccta

SEQ ID NO: 293166 - DNA, 122 bp, Homo sapiens
gggattacaggcgtgagccactgcacctggcccctcttggtccctcttggctgggcagggcggtagcctgtttccgctcgggcattctgggaagtgtagtgcagaagccgttgcaaccttgt

SEQ ID NO: 293167 - DNA, 122 bp, Homo sapiens
ttcctcctgcctgggctagtccttccgaaaagcagccagaaagctcctcttcatatgtagcgagtgactgtatgtaactgcctccctacaactgctgcaggccaccaagtcttgcctaaatt

SEQ ID NO: 293168 - DNA, 122 bp, Homo sapiens
cgcctctggcatccctgccagcctgcctgtggagttcaccatcgacgcacgggacgcgggcgaggggttgctcactgtccagatcttggtgagtctctgtgcatcccaccccgcaggtcatg

SEQ ID NO: 293169 - DNA, 122 bp, Homo sapiens
ggagtttccctgggcttcacccttgagactgtgttgcccattgctcggccatcggtctctcgctggccaacgagtgcctcctcccacagccccgtgcacgctgcggagcctggcacaggccg

SEQ ID NO: 293170 - DNA, 122 bp, Homo sapiens
ctctaccaatccgaagggctgctcgcccggcctcacgggaaaggtagtttccaggtagggcgccaacagcatcaagctgtgcgcgtgggctctgcgcatgcctcgtccgccggctacgtctg

SEQ ID NO: 293171 - DNA, 122 bp, Homo sapiens
tttccgtttcatctttctctctttaaagtcagtagttaacaaatactgcaatcggcgctacggctaggtcacctagccctcttcaacctcgacctatgggggatgagattgttgagcaaatt

SEQ ID NO: 293172 - DNA, 122 bp, Homo sapiens
gcgccagcggcgagtgcgactgcagagcccgaggccggggaccaggacagtcgcgaggttcgagtgttgcagagcctgcggggcaagatctgtaagcgggggctgggctgaggggacgccct

SEQ ID NO: 293173 - DNA, 122 bp, Homo sapiens
ggattggcacacctggaactccgtcaggtttggacagccagagcctccgaactgcgggggcgccaccacatgacgcgtccggtgctggagcccgctgccgcaggtcttggagcattcggacc

SEQ ID NO: 293174 - DNA, 122 bp, Homo sapiens
cctgttggttgaaataatacctgcctccaactactaactcactaacaagtccactaggcccgagtgcaggttagggactcgccagctcggaaggaagcctctgacctttctcgtagatctgc

SEQ ID NO: 293175 - DNA, 122 bp, Homo sapiens
tgcggcgactactgcagagcccgctgacccgacccgacgttattctcccccctcgtaacccgacacagcctagcccacctgccctgccagcgcgcacgcccacctctccgctacaggtgctg

SEQ ID NO: 293176 - DNA, 122 bp, Homo sapiens
ccgagtagttggagagagggtcatactccaggtctgtgggtggcctggagttgtccaccacgtacttgccactgggaacggggcggctgtgccgccggggctggctcacagccttggggacg

SEQ ID NO: 293177 - DNA, 122 bp, Homo sapiens
attggccatctctcagctcagacaacatggacaaccaaatgtcctgcttgaagttctgctcgctaggatttccattctaccctatttctagcatctttcagggacactcctgatgggtgtca

SEQ ID NO: 293178 - DNA, 122 bp, Homo sapiens
ggcagaaaatgaaccattattaaaacaacacggcaaccggccgggaaaacccattcacagcgatttatatcgcgtcgccgcggctgccgaaaggaaatgggaggagaagctcgaggtttaag

SEQ ID NO: 293179 - DNA, 122 bp, Homo sapiens
ggaagcaattatccagccaggagaggctgccgtgaccctgagtgcgctgtgcaggactgtcgtaggccccatggtatcatgtcactggcagtgtctgagtgtcacacaaaatcatggcatct

SEQ ID NO: 293180 - DNA, 122 bp, Homo sapiens
gccacctacaccaatgctaattgagaacagagctcagaatgggagcctgagaactgcacccggatgaactttttggtgggctgatttctgttgatcttgtcagaattaggttgtatatgcat

SEQ ID NO: 293181 - DNA, 122 bp, Homo sapiens
gctcctggcctctgcaggcgcctgggctgctccacctgagagctgcgcagggcggtctggcggtggctgctgcccacataatccgacccaaaggcccttggcttcaatgcaaatcccggagc

SEQ ID NO: 293182 - DNA, 122 bp, Homo sapiens
actggggcaccggtgggtgcggaccctcaaagggtgaaaataattcccgtgtgaattgcgcgcattataactgctctaagaaatgcagccagggcattttaaaatgtattttttcaatcact

SEQ ID NO: 293183 - DNA, 122 bp, Homo sapiens
cgcgcccccacgggtcagggctgctctagggtgcgggcaggcgagggcggcccaggggcgcggggcgaggggcgaaggagccaggaggctgagaactgcatggtagccctgcctgcctgccg

SEQ ID NO: 293184 - DNA, 122 bp, Homo sapiens
gtaaaggtttgctcagttttctctctgtctcagttaaaggggtcttgccatactactccccgcatagagttgttgtgagaactaaggagagcactcagaacaatgcctgcaacataacaatc

SEQ ID NO: 293185 - DNA, 122 bp, Homo sapiens
ggtcacactaacagttaatgcctttgtgctgaaacaaggtcttcactgtgcctctttgggcgaaaacaaaatccctagacacagagttgacttccagaaaaggctcccgtgctaagtcagcc

SEQ ID NO: 293186 - DNA, 122 bp, Homo sapiens
aaccacaatgagcaggttgcctgaaagtgttatcatgtaaagaaccaaaaatactacaaacgtgactttctccattatggggttctgtgtaagacctattaaaatgaattcagtcacattct

SEQ ID NO: 293187 - DNA, 122 bp, Homo sapiens
atggcccgaggcacttgcagcgcgggccggtccgggtggggttctacgacatcgagggcacgctgggcaagggcaacttcgctgtggtgaagctggggcggcaccggatcaccaagacggag

SEQ ID NO: 293188 - DNA, 122 bp, Homo sapiens
tcacattcagttaaaaacatcctgcccttctccctacaaaaaggttccatagaatcagaacgcagaggcgctgcaacttgctaactttgctctgtgttatttaccaaccgcacaaagaaaat

SEQ ID NO: 293189 - DNA, 122 bp, Homo sapiens
ccatgcagacatccactatctggaggatgttgtggttggcactcaactccagattgcctacgttgatctgggtgtaatcacgaaggaaatcctctgcaagctgtcttacttcttttggccag

SEQ ID NO: 293190 - DNA, 122 bp, Homo sapiens
ctcctgaagcgcgggacgctacgggaatcgagggaacggagcgcaccggggaccccgcggcgggccgaagacggcagtacccctaggctgcagcctgacgctcaggccccaaggcccccagc

SEQ ID NO: 293191 - DNA, 122 bp, Homo sapiens
gtgaggtggcactggccttgttgggaagctcagtggtggtgacctttgtaggctggagttcgttgtaggggaagtggctctattgaaccgggctccatagtgtcaatggtgaggatagaatt

SEQ ID NO: 293192 - DNA, 122 bp, Homo sapiens
gctgtgtcaatgcggtgcacccaggcaagcattccacggctgagccttttctgcatagagcgaagaacacctgtttataatccccatccttcattcattcccacctttaacaagcaggggtg

SEQ ID NO: 293193 - DNA, 122 bp, Homo sapiens
cacaagatggcagcctcacacctaccggaggaaacagctgcgccaccactccagtgatgccggcctctcgactacgagtaactccattggctcagctacagtgcgcgagacaagccgagagc

SEQ ID NO: 293194 - DNA, 122 bp, Homo sapiens
ctgagtcctagggggagcaaaagccatcatcctggggaaacgcttcatgtattttcccggcgagaaaaaccgtggggctgaaaacgcgaccccggccccagaacccgggacccccgagccgg

SEQ ID NO: 293195 - DNA, 122 bp, Homo sapiens
ctattctcctgtagcagccagggacgcttggtctcatacatgttgattaaaattaaataccgacctgactggtgattcttgaattaaggtttattaatttgcagcatggtgacatggaccag

SEQ ID NO: 293196 - DNA, 122 bp, Homo sapiens
cgagcgaggtgaggagcccgcgtcctcggctggtggagcgggcgggcgggcgcgcaaacccgagaggcagatatagaaaggggggcaggttaaaaataaccctctccggctgggaagctcgc

SEQ ID NO: 293197 - DNA, 122 bp, Homo sapiens
tttataaagctcttttatgtgaactcttgcttcatccaggcaagaacggtgttttgtttgcgaccatctcagtgtcaagagaaacgtgtcagtgagtacctggaccatcacttaactgatgc

SEQ ID NO: 293198 - DNA, 122 bp, Homo sapiens
gggatgattcctctgaagaaccagcctgtgaatcaaggaaacagcatcattaatacagtacgtcgcttaaggattgaaaaataaaccaaactgtcgtttttataagagcacattaaaaactt

SEQ ID NO: 293199 - DNA, 122 bp, Homo sapiens
gagaagggacaaggggcggcttagtcagggacagagacccacggccaccccatgctcacacgccacaacatgctgcatgccagtgtgatgtgtggagaaaagaaaagaacgcaggcagaaac

SEQ ID NO: 293200 - DNA, 122 bp, Homo sapiens
ggtgccgtgatgttccacgaggatcttggaattggaggcttccccgggctgtggggccaccgtttcatctgctcaccttgctggtaaggccagggctttgttcccgggagtgctcgggccgc

SEQ ID NO: 293201 - DNA, 122 bp, Homo sapiens
ggcgacgccttccgcctggctggtttgcatctctgcggccagtttacgagatttccaccacgaccagctgaaaacactcctgtccgaccactgccttccccaccgccaccatgcggtctcag

SEQ ID NO: 293202 - DNA, 122 bp, Homo sapiens
cgcgccccgagcctcgcccacacgccggcagcgggcccggagccgaggccaatggcagcccgctgccgccgctcgcgcagaccccgcctcccgaccacgggccaatcccagcccagcagcac

SEQ ID NO: 293203 - DNA, 122 bp, Homo sapiens
caggccccacccccgtccgataagccctgcccccggaagtcccgccccttagccaccctccgcttccttgatgcccacccggtagcgtccaacggctccacgaagtagagatctttttcgct

SEQ ID NO: 293204 - DNA, 122 bp, Homo sapiens
ccttccggtctgcgtgttgtgatggctccctctgatggcagtcgctggatgcttcatccacgtgtagtggttttctttcctctgcacacctctcagtacatactccagctgggacaatcttt

SEQ ID NO: 293205 - DNA, 122 bp, Homo sapiens
ggtccacttcctccaagacgagccatgatccgaacgagcctccctcacccctctgcctgccgtctcatctaagaccctcagaccctgagtatttggcagaaacgtgagcacttcagagcaaa

SEQ ID NO: 293206 - DNA, 122 bp, Homo sapiens
taggaggaagagccgtgagctaacaattgcaagacgtcgaggcgctgaggccaaagggtccgtgaggaaacaggcgcagctcgcgcccctcggcctacgggagggagggcaaggagagtcct

SEQ ID NO: 293207 - DNA, 122 bp, Homo sapiens
tcccaacaaagtcttctcattctggcatctgtgggtcccaaaacctgtcagttgccacctcgcacaagtccgcaccaagtttcctctcaggatttcctcacgagggagagtcctagctagag

SEQ ID NO: 293208 - DNA, 122 bp, Homo sapiens
taataaaactctcatatgtatatatctgtaaaccaagcttgtccaccctgcagcccagagcggctttgaatgtggctcaacacaaatttgtaaactttcttaaaacattaggagtggttttt

SEQ ID NO: 293209 - DNA, 122 bp, Homo sapiens
atgctaaagggtcatgtcatcaaacctaaactaaactgttatctgatcttgcaagaaattcggagaggggagagagggcggcgggcgggggcagggagagagagagagagagaaagaaagga

SEQ ID NO: 293210 - DNA, 122 bp, Homo sapiens
tcgctcttccttttctggcgctggtggctggcctaacttcggtctcagagtctttgttttcgctcatttacctggcagtcatttggacacctaattcgaggacaagttggggaggatgaagt

SEQ ID NO: 293211 - DNA, 122 bp, Homo sapiens
ccaccacgtaccgccccgccgggaaatagccaggcggcagcagtagcttggggtggtgggcgaccagctctctgctgccggctgggacccaggccccgcggtatttagcaccttttcttatg

SEQ ID NO: 293212 - DNA, 122 bp, Homo sapiens
cccaaatagtcaggcaggcttgaaaaatgagatcgaggcaccagtggaaggaaaaaacaccggcgaggcagagcagaggtattggcccctgtccaaaaccacgcaccccattcggtgcatac

SEQ ID NO: 293213 - DNA, 122 bp, Homo sapiens
ggcggggcgggccgcccaagctgcagcccaggcccccagcccccagccctagcctcggcccggcctccggcattgctccgcggctggaagcgcaatgcccttctcactgtgctccactgcaa

SEQ ID NO: 293214 - DNA, 122 bp, Homo sapiens
ctaggagggaaaaatcggctggagatgccaagagaaggcatgcgttaaattgtggtcatgcggagctaagtgtctttgagacattaaatcggacacgtcctgtaggttatacaggcgccaag

SEQ ID NO: 293215 - DNA, 122 bp, Homo sapiens
acccttcaggaaggactgtcctttcaccaacaccacctatggctgacagccagcatggttcgtttctagctgtgcttggccgtgaagttcagctgatcctgctctagctatttggtctggtg

SEQ ID NO: 293216 - DNA, 122 bp, Homo sapiens
cgcccatccactcgctccctcacccgcccaccctactcaccatggtgtcgctaagggcgccgtcctggagccccgcggcccctgtccaagaaactccacaggcccagaagacgccgacgctc

SEQ ID NO: 293217 - DNA, 122 bp, Homo sapiens
ctctcctcacttctctggacttggccctgagctggacctggtccactggggtaggcagggcgatggggaacctgtttatgctctgggcagctctgggcatatgctgtgctgcattcagtgcc

SEQ ID NO: 293218 - DNA, 122 bp, Homo sapiens
acaaacagctgagtcactatttgtgagggaggtgattggagagagcaaaagagttaggaacgtattaaaatgcaatagttttggtaaaaaaaatagggtctaactaaaacattgggagtttt

SEQ ID NO: 293219 - DNA, 122 bp, Homo sapiens
tgaacgatgccctcctggcaggcctcacagaactctgcacgatgcggcccgctgtccgggcggctggccacgtggatgcggtactggccaccatcctcctcgtagcactgctcgcgcaggct

SEQ ID NO: 293220 - DNA, 122 bp, Homo sapiens
gccgtcccagggttgggctacgccaaatctgcaaccagcaggctgggcgtggcgtgacagcgcgggcgggtagcgttacgtggcggggctgcagtgtggattagcccctcagcccttttgga

SEQ ID NO: 293221 - DNA, 122 bp, Homo sapiens
accaggctctgtgctaagtgttatacacagagtatcttgagcttcccactaaaggcaagtcgcggggggcccacctgcgccctctgtgcccgcctggtagcccgcagttctgtaaacagcca

SEQ ID NO: 293222 - DNA, 122 bp, Homo sapiens
cttctaacacataggtaagggaagtccaagtttttcagcaatcctgggctagtgtttcagcgataggtactaggaaggttcatattcccattctcaggagatgattgcataaaaagatggag

SEQ ID NO: 293223 - DNA, 122 bp, Homo sapiens
acacacgccccagcacacctcacagggcacaaccctcttttccctagactttagctgcctcgccttccaattcccagccagtccagtgctgaccagaggccgctgccagtcgggccctgctc

SEQ ID NO: 293224 - DNA, 122 bp, Homo sapiens
ccgcaagcgctccataaacgcacacagcgtcgcctctaccaggatcccgggcggccttcgcgggatttctcctggcgtcggctttcagactcccgagggtgggataaatcgagagggtggca

SEQ ID NO: 293225 - DNA, 122 bp, Homo sapiens
tatgcataacctcagtatataaatggtgctgaaggggtgtcaggccgttctaggctcatgcgtgtctgcgcgctgggctgctccgttcccggcttagaggaccaggacaagggctagccacc

SEQ ID NO: 293226 - DNA, 122 bp, Homo sapiens
ccgctttggtttgcatctgggctccgcggtaaggtccctccgcgctccgggaaggagacccggttacccaggccagcgaccttcatacatgggggttccacgtcagaactgccccaagcacc

SEQ ID NO: 293227 - DNA, 122 bp, Homo sapiens
gtgaccgcagcaacgattcgctcctcgattgttaggctctgagtggcattggggacactgcgatcgacggtttgaaaggagtaaaccgttgttttcgggaacttctctctcactgctgtggg

SEQ ID NO: 293228 - DNA, 122 bp, Homo sapiens
tagataaaagacagtactcaaatgattttttttcttaagcatttatttcaggtttattttcggacaccagtatgtggaaaatggtaataataataaatttgagacccggctcaataatgatt

SEQ ID NO: 293229 - DNA, 122 bp, Homo sapiens
cacctggtgtccaatggcaggaatattctgaagtgccaaagttaatcactgtggctcccacggtatcccctgagtttgtaatgcatgactctgaggcccacttttgggtaatggtgagttct

SEQ ID NO: 293230 - DNA, 122 bp, Homo sapiens
aggagtccgccgaagctgtggggctccaggtctcgctcataaacatccacacacgtccagcgaccgcggcgataaggctctcccaggccgtggggcagcttcaccacccggaaacgggagga

SEQ ID NO: 293231 - DNA, 122 bp, Homo sapiens
acagtaggcgctccagtggctcggggcatctaccaggcaggccgcgctgtcctgccctgccggggctggagtggagcaaccctccggggccacccacatctgggtaccttttccccactttt

SEQ ID NO: 293232 - DNA, 122 bp, Homo sapiens
tgttcctttgagcagctgcagcctggatgctttcccttaggggtaggggagaggcagaaccgctgaccctttaacaagttatccctcacagaacaggtgtctcccccgactctcggtggaga

SEQ ID NO: 293233 - DNA, 122 bp, Homo sapiens
atgtatgcacgtttaatccacgtgtacacgtattatcctatgtggagggcacgtgtctgccgtgacccagcaaggccatgtgttgtattatatacatatgcacacacgtttaatccacgtgc

SEQ ID NO: 293234 - DNA, 122 bp, Homo sapiens
tttggaatctggagtggaagctctgactcctactgcgcccttctttaggggtctctccctcggggtccacttggctcgaggcggcagcgagcccagcagctgagtggccggcggcacacgac

SEQ ID NO: 293235 - DNA, 122 bp, Homo sapiens
aaagagcccctcaaagctccaggactctccagagaagtctgaaagcctttggaaagtcaccgaggttggttgtaaagacacctagcatccagtcttcattccatcctgattctaccattaat

SEQ ID NO: 293236 - DNA, 122 bp, Homo sapiens
ccccaggttttgaacatcgtttttcctgtttatcagatctgctctgtctcctccaagcctcggcttattgttcctgcttctccacaacccttctggtctgagggggcaggccagatcccact

SEQ ID NO: 293237 - DNA, 122 bp, Homo sapiens
ttctagagcgtgggaaggggtcccagggaccgagccaagtggaaggcttgtccaggcccccgcctgctcccctggatctggagggagcctccacgtgcttccggctggggcggcaccgcgca

SEQ ID NO: 293238 - DNA, 122 bp, Homo sapiens
agcttcactcctgaagccagtgagaccacgagcccaccggaaggaacgaacaactccagacgcgccaccttaagagctgtaaccctcaccgcgaaggtccacggcttcattcctgagccagc

SEQ ID NO: 293239 - DNA, 122 bp, Homo sapiens
tctgggaggacccgtctctgctctgcagtctcaggccatgcttcagccatggctggagcacgcatggacagaattagagctacaagcagtaacaagcctccaggctgggaacgaacccaccc

SEQ ID NO: 293240 - DNA, 122 bp, Homo sapiens
gaggccatttggggcctggagacgccgtcggagggcaggaggtgagcctggagaggccaccgtgaggcctgagctgggcccggggagcttggcttcaggaagctgtgggccgaccaaggcca

SEQ ID NO: 293241 - DNA, 122 bp, Homo sapiens
ttttgattcattccttgggcatctggaccggttgggccacgtgggctcgctgggaaaacgcgccggcgtcccctcggagcgccgaggccgggcgagctgagggtgcggtgccgctggagcac

SEQ ID NO: 293242 - DNA, 122 bp, Homo sapiens
tgttgaaagctgtgagagagggccttttgccatcacaggcttggtgacaagcagagtctccgtgttagcaactatgataaacctgggcatttggatgaaacatttatctgaatgttatctga

SEQ ID NO: 293243 - DNA, 122 bp, Homo sapiens
ctctgccacctgcgaaagggacctcagggctatgggttcaacctgcatagtgacaagtcccggcccggccagtacatccgctctgtggacccgggctcacctgccgcccgctctggcctccg

SEQ ID NO: 293244 - DNA, 122 bp, Homo sapiens
tccgtagctcggggcagggtgggcgcgagagagcctagaagcccatgtagccgcgaatcccgcagccccagtacacctccctccgtgcctccccgccttttctgcagagctccgccctggag

SEQ ID NO: 293245 - DNA, 122 bp, Homo sapiens
tatcatctcagagatggttccctaggaacagagcctatgaaattggtattctcgtgtgaacggatttcaggagaagtatgtaaaggagttagggaagcaggtgagacagaggaagaagatag

SEQ ID NO: 293246 - DNA, 122 bp, Homo sapiens
ttgattctcttttcttactgagctgccttccacagtaggtctttaactggaccaataaaccgagtgaaaacgctggaaaaatctcagtcttcatctcttctctccccctgctgccccagcaa

SEQ ID NO: 293247 - DNA, 122 bp, Homo sapiens
accctgggtgcgggcccgcgcgggaggggcggtgccaggccctgcgcgggcgctacttgacgttgaacaccatcagcggccgctcctcccgccgctgccacgggctcttcttgtctcccgcc

SEQ ID NO: 293248 - DNA, 122 bp, Homo sapiens
ttccagagctgcgaggcagagccgcagcctcgttggctgcagggagaaacctctgatactcgtctcctgcatcacagccttccagaacgcctggggtgttcaccgggtgaagctactccacc

SEQ ID NO: 293249 - DNA, 122 bp, Homo sapiens
ggaactggggctctgggccaccggttcaggctgccccaggaaatgcctgctttgcggtgccgcagagggtatagaggagctcggccccagagggtggctgttggggaggcggagctggccgc

SEQ ID NO: 293250 - DNA, 122 bp, Homo sapiens
tccttcacttcccataccgtgtttattcaggtcccagatgcgaagagtcttatcccgtgacgcggagaccaaaatcaaactgccactgggtgtgaagctcagatctctcacgacatcttggt

SEQ ID NO: 293251 - DNA, 122 bp, Homo sapiens
tgattgaacctgacttaaagtgttagagatgaaagtgaacgggtttgaaaggctggtctccgggctgatgatggaacccgacttacagtgttagagatgaaagtgaacgggtttgaacggct

SEQ ID NO: 293252 - DNA, 122 bp, Homo sapiens
agatcatgccactgcactccagcgtgggcgacagtataaaactatgtctccgcacccccccgccaaaaaaaaaccattgaggcagctgcctcagcaggaagacatgtggctctgcccctgtt

SEQ ID NO: 293253 - DNA, 122 bp, Homo sapiens
atgcatggcctctaagagtgcccgtgtcggttcttcctggaagttgactttccttagacccgccaggtcaagttagccgcgtgacggacatccaggcgtgggacgtggtcagggcagggctc

SEQ ID NO: 293254 - DNA, 122 bp, Homo sapiens
acgtccccgtgcagccccggtcagcaccccgtggggacagctccgatcagcacccgacggcggacagctcctcccgcgcctcccgcctcgcccgccaccccgctccgggccgcacccgggtt

SEQ ID NO: 293255 - DNA, 122 bp, Homo sapiens
ggcagggtctatgtcatggacactgctacttgttcgatgaagctggccaggtttatgtcccgttctgaaaggccggcacactcatgggtgctcagcgtgatgtggacctgaaatgaaaccag

SEQ ID NO: 293256 - DNA, 122 bp, Homo sapiens
acctttcagtgagattttttcttaagtgccagcattagaatttgcaaaattgtcagcagccgctcagaagaaaaccccggcggtgtcagtgggccaccgttttgagaaatgctgaaatgtgt

SEQ ID NO: 293257 - DNA, 122 bp, Homo sapiens
taccttgcatgtgtctttaactaccacaagaaatgtttaagatttccattgagatattatcgacagggactcctgggctgcatcataagcctgattgaaagcctttagccttgtaatgatct

SEQ ID NO: 293258 - DNA, 122 bp, Homo sapiens
ccgagaccctgttacggccacatcaacacaggtccccctccccccggcgtcccctcccctcggaggagccccgtctgcgacgcttcccagtcaatcacccccagcatccctccccgctctca

SEQ ID NO: 293259 - DNA, 122 bp, Homo sapiens
ccaaaacccagagacaatggtccccgtcgaggacacaccctgaacgctagaatcccttcccgactcggccgtggatacgcccccagccaccaacgctgcaccccgagcctgctgacgcggag

SEQ ID NO: 293260 - DNA, 122 bp, Homo sapiens
gggaggccggggatccttgcagggcttctggggcgttgggaaacccaggcccgccggccacggctctaaaatgaagagggcggagaccccagtgaagagcaccccccgcaatccgcgcagat

SEQ ID NO: 293261 - DNA, 122 bp, Homo sapiens
tcgcgcaaggcgccccagcccgtaatccagcagtgcaggccgggctcgaagaagtgggagcgcgcgggcaggcagacggggcgcacggcggccgagcgcaccaccgggtggtcgagctgcag

SEQ ID NO: 293262 - DNA, 122 bp, Homo sapiens
ctgcattcttcaggcagttagacacactctttagcctaatggaattttagtcgccagtaacgggaccaagagctttcggggacaagggtggagaggaacatctttcttccatgaccggggtc

SEQ ID NO: 293263 - DNA, 122 bp, Homo sapiens
accctcgttttccacgggccagtcttggaggaaaaggccagcaggtaggttcccagggcacggagatgatgcccccggggactcccctctggcgattctgagaaaaccccttcccagccctg

SEQ ID NO: 293264 - DNA, 122 bp, Homo sapiens
tgtttcaagttcctcaggcccgttgtgtatacactagcatttgggaagagctggtttagacgtctcactacaatctgtcttaactttaatttggtctgcttgttttatctctttcaatttcc

SEQ ID NO: 293265 - DNA, 122 bp, Homo sapiens
gggctggcagacgggagattcgggctggaacagcggtaatgggcacaattaccctaatgacgcccctcgcggcatcttcccgtcctccctgtgcccgagtggagcgctctccgcgccccagc

SEQ ID NO: 293266 - DNA, 122 bp, Homo sapiens
agcctgggtaacatggtgaatccccacaagaaatacaaaaatgagcccggcatggtggcgcgcgcctgtagtcccagctactttggaggctaaggcaagaggatcacttccacccgggaggt

SEQ ID NO: 293267 - DNA, 122 bp, Homo sapiens
ggaacaggaccgtgcagcaggaggtgagcggttggcaagtgaacgtgatcacctgagctccgcctcctgtcagatcagtggtggcattagattctcgcaggagcgcgaaccctgttgtgaat

SEQ ID NO: 293268 - DNA, 122 bp, Homo sapiens
actacagatccactttctgtgtctctaggctggactttcctgagtgtccagacgctttggcgttcaggaactttccttatctcgatttccttatccctctcatctgccggtgttttctcctg

SEQ ID NO: 293269 - DNA, 122 bp, Homo sapiens
tgaaaatcatttaagtttgccccatggtaaaagatcaagtcctcagaaagatctccaaagcgtttatggtttgttttgttttgttttggtaagtttaccatgattttgcttgaattgctctc

SEQ ID NO: 293270 - DNA, 122 bp, Homo sapiens
ggaacttccggccccgccccgggcactaggcgaggaggtggccggtattctggatcactgcgtgtcttggggagcttgggattccgcagcttggcggccgagagcctttgtttgcctttttg

SEQ ID NO: 293271 - DNA, 122 bp, Homo sapiens
ctgagagcccccgtcaggctcgaatgggggtggttcttaaagagagaggaccggggtcgtcgtcttttcagtccattctccttgaatagggtggacatctgaggctttgcgactcgaagcta

SEQ ID NO: 293272 - DNA, 122 bp, Homo sapiens
tggggcggcgttaagagggccaccgagtttctccagtttcttttctcgctacctccttcccgcccccgcccagctccgcggctccagacccactcgggagctcgctctgccccttggcggca

SEQ ID NO: 293273 - DNA, 122 bp, Homo sapiens
agcagttgtggaagcttggaggtgggccaactgagccagacctttgttgcctagggccaccggctggggtgcgtggccaagagggcactgaggagtgcaggaatcttaacctggagagtgac

SEQ ID NO: 293274 - DNA, 122 bp, Homo sapiens
gcccccatctcattggtgcccacggtgggcgtctccccaccttccagctcgggctcctcgcgaagcgcctgttggagcacagtccccagggacctggtgggcagcctgtggctcctccggct

SEQ ID NO: 293275 - DNA, 122 bp, Homo sapiens
gatggatcgagagccttgtttccctgctgggatggccgaatgtaccagaagtctcgctggcgagcagcgccctcggcttccccggcaatcatcccaaacgcacacccttcccctggccgaag

SEQ ID NO: 293276 - DNA, 122 bp, Homo sapiens
tccagaaaagaagtcgcacgtattgaagccagtaacgccaagccagtgaattctccttgacgagaaagacccacttactctgcagaagagatatatgacagctgacaatccctggaggagaa

SEQ ID NO: 293277 - DNA, 122 bp, Homo sapiens
gttcccgcgggccccggtcggcgaacagctctgcaaggaccgccgcaggccacaagtgcacggggtgccaggagctccccgtccccggcccccagcccgggctgaaacagcaacggtttgcc

SEQ ID NO: 293278 - DNA, 122 bp, Homo sapiens
gagtccaggtggaaaggtccttcttggccacagcccaggggtgagcaccggcacccaccccgacgtgcagacttcccgggcttgcctcacggggaaagtcctgcctccccagggctgccaca

SEQ ID NO: 293279 - DNA, 122 bp, Homo sapiens
attaacatagccccgcccccacaccataggccgatcgggtgggcggggcctgggacggggcggggcttgtattagcataatccttacgccaggtgagaacccggtgctctggagctctggcg

SEQ ID NO: 293280 - DNA, 122 bp, Homo sapiens
ttaggaaggatcatgcctctggtatgatcacctaagtgtctgcaaagcacaggcgaagaacgcatggcaaggaacggaaggaggcctaccgccagaggtctggggtggtgcgtggagaactg

SEQ ID NO: 293281 - DNA, 122 bp, Homo sapiens
cggggccgccagggggtggagcagggcggggagttcgggaaacttgtaaatagccgaactcgggcctcccgccccaacccggggcggctccttccgaaggctccactccagcggctcgctgc

SEQ ID NO: 293282 - DNA, 122 bp, Homo sapiens
gaagctgtcactagggcagggtgaagggtagcacgaacatggacttcatgttccccccaccgggcatatcccagtgcaggctccagacggcagacgaggggcagccccacagcagcttcctc

SEQ ID NO: 293283 - DNA, 122 bp, Homo sapiens
ccatctcactgagtgctgatgactttgctttctgttactgagtaaagagaacttctataccgcctcacaggcacatctgccctcctctctgcattagaaactgtatgctctacttttcattc

SEQ ID NO: 293284 - DNA, 122 bp, Homo sapiens
ggggagagaggatatgctcagctcgggtcttggccctgcggctgacagcagaggccggtgcggggggaggggagggccggcgcggggcgggcggaccttgtgcgctcagccaatcagaaagc

SEQ ID NO: 293285 - DNA, 122 bp, Homo sapiens
acccaaagcagttatacctagaacacaagagcgctttttatctaatttcaggaatctgcccgtaaaacctgagccattgattcttcagaactttctgcagtttttgacttcatagattatgc

SEQ ID NO: 293286 - DNA, 122 bp, Homo sapiens
ctgcctcgggatcccaggcagggctggcggggcgagcgcggtcagcatggtggggccggacgccgtgcactatctccctcgcattcgcctccgctggtggcgccggcactgtccccgccccg

SEQ ID NO: 293287 - DNA, 122 bp, Homo sapiens
ccaatcaacataaatctctggatgtgttcatttctttattctctctacaagctctaatttcgaatggagcaccatgtttcatgctaattgccaggtttacattaatgcaagagatacatttc

SEQ ID NO: 293288 - DNA, 122 bp, Homo sapiens
atcaacatccaggacccgccggaagctgttacagcggaatagcgccgtcttacgctgagacgcgctgacgtagcagcccccttcgaatagactccggggtaaaaccgagcctgagcgagact

SEQ ID NO: 293289 - DNA, 122 bp, Homo sapiens
tagttatagcaatggatttatgcagagtcacctacctggtggtatcaaattgccatataccgggtacatagtttatttttaagcttaatctctctttgaatcagtttcctcatgtgtaaggt

SEQ ID NO: 293290 - DNA, 122 bp, Homo sapiens
ccttgaaccactgttggcaaagggacagataacgagcccagggcagtgtgggggactttgcgttttgaagtctgggtcagccagatagtaagcatcttttgcttttcctgctataacagata

SEQ ID NO: 293291 - DNA, 122 bp, Homo sapiens
ttctagttgcagcaaggaaataatacagttgactcttgaacaacacaggcttgaactgcacggatccatttatatgcacctttttttcccaccaaacacagatggaaaatacagtgtttgtg

SEQ ID NO: 293292 - DNA, 122 bp, Homo sapiens
caggagagtagagcatagagcagggcgatctctgtacaactctctatggttctggaggaccgcggaggtcgtgggaggagagagatgtggcctgaggatctggctcccaaactgttaagttt

SEQ ID NO: 293293 - DNA, 122 bp, Homo sapiens
gtggtatacggtgggtaattagtagcctatcacgtggtttctgtaaaatgcttgatagcacgtaaaacgctttcaggtcggcgtctcgtttcatcctcacaacagccaggtaaggaagataa

SEQ ID NO: 293294 - DNA, 122 bp, Homo sapiens
ttgttccctaggtgatctattctgtcctccaaccttaaggttcaagctgtcagaactgtacgtaacctcctttccacaaatgtctgaggtttctccaaaaaaggaaatggggtagtttttag

SEQ ID NO: 293295 - DNA, 122 bp, Homo sapiens
atgctacagcacataacacatttttactaaaggaaaaaagctaattatgtccatgcctctcgtaaaactggggggaaccttaaagagaaagaactaaggcttaagttatctgtagtataatc

SEQ ID NO: 293296 - DNA, 122 bp, Homo sapiens
ttttcttcgccatggcaggtccctttctcctgacccgcagttgcaggggctgagggtaggcgcaggtccgccctggggtcgaagccaccatcgggcctcgaggttgcccccctaacatccgg

SEQ ID NO: 293297 - DNA, 122 bp, Homo sapiens
tgaaacatctgagccaggaggcagcaaacggcctcctgcagggccaataatgctccctctcgagctcgcctggagtcaccaacggttctcctcccctgagccagattttctacaactcgttt

SEQ ID NO: 293298 - DNA, 122 bp, Homo sapiens
agaatcattgatcagcgattcgagaaggtttcctactttgtatttggtgatttcaacttccggctggattccaagtccgtcgtggaggtaggcgctggcttccctcccgccctggtctcatg

SEQ ID NO: 293299 - DNA, 122 bp, Homo sapiens
gaacccaggaagcctaacttcagacctggggtcttagccacagtgcaagactatgctaaacggcttcagcaagggagcttttacgcatggtcttctgagggtagttgatatggcaattccaa

SEQ ID NO: 293300 - DNA, 122 bp, Homo sapiens
gtggggcctaagtctggatcttggtggaggtgggcacaggatgagccggagtatggatcgcgttgcgccaggagggcggatgcacttgaggacagacggggatgcctcaacaggccaaaaag

SEQ ID NO: 293301 - DNA, 122 bp, Homo sapiens
gctctgtgtaggagtccagcacactttatcatgaatgactccaaccacggcggaactggccgtggaaccagtgccaaccaattcagggtgtgttcaccgtttctcagttcattatcacaact

SEQ ID NO: 293302 - DNA, 122 bp, Homo sapiens
ctggccgctgcgctcgcggcggtattcccaggtccggacctgccagcctcgcactgtgcgcgccgcccctgcagaccctgagccagggaccctccccttgtgtctgagctcttagctccctg

SEQ ID NO: 293303 - DNA, 122 bp, Homo sapiens
tttaaatatcatgaggctgcagggagcagagaatgatctggtaacagtaactaactcctccgctgcagaggcagtgacatttcatgtggtttgttcttcactgaaagtcaagggcatcacgt

SEQ ID NO: 293304 - DNA, 122 bp, Homo sapiens
ggctgaccctgaggactgcggggcagggagtgaggtgggagagaaacgcgaggatgtccgcgccgtgtttctcaggggctctgggggatgccaagactcacagtgcgtccagctcccagccc

SEQ ID NO: 293305 - DNA, 122 bp, Homo sapiens
aagggatccctgagccagacctacaccatggcagagccccccaggtcattttcccaccgtcggtgaaactgtgaggaaaccatggtattattcctggcctccctgcgcttccctctctcctt

SEQ ID NO: 293306 - DNA, 122 bp, Homo sapiens
tatataacacaccagagtggctgtctgaaaaggggagtgaaaggggtctgggaataggaacgaagagaggaagtgataaaataaacaaggagccttgcattggcccacagggtgtcaagaac

SEQ ID NO: 293307 - DNA, 122 bp, Homo sapiens
cttttcaaactttcactttccgggtgttctcttaaaagtttcaaagaaatcaagactttccgctagctgtaatgagacagtcatttccctatcttccttctgaatcttcctgtacattattg

SEQ ID NO: 293308 - DNA, 122 bp, Homo sapiens
ctcagatgtccggagactggaccctccgtgagccgcatggacacacggtcccgtgtcacccgggcccggccaggcacccagatccgtggcttggacacgctgcccacacactcaggagcgtc

SEQ ID NO: 293309 - DNA, 122 bp, Homo sapiens
ccgaataccaacaattctttctagggatgcacaaaaagtcgctggaggcagcagccgagtcggggaggaagcccgagggggaacgccaggccctgcccaagctcgacaagatggagcaggac

SEQ ID NO: 293310 - DNA, 122 bp, Homo sapiens
gactcgggtttaatgagactccattgggctgtaatcagtgtcatgtcggattcatgtcaacgacaacaacagggggacacaaaatggcggcggcttagctcctacccctggcggcggcggca

SEQ ID NO: 293311 - DNA, 122 bp, Homo sapiens
aaaggtggatcccaacaacaggaaactacctaaatcaccgaccagttctggtgctgcccgcgaagggctgcctcgcccgccgccgccgccgcctccgccgctgccgccgccgccaaggagag

SEQ ID NO: 293312 - DNA, 122 bp, Homo sapiens
cttgagtttttgttctctcttactgtcatctgctaatactataatatctgccccaaggggcgtgtgaatcattcttttccttcactctaaacatacgctaacaattccttttattgtcctct

SEQ ID NO: 293313 - DNA, 122 bp, Homo sapiens
cctctgaccagcctgcgcactgggaggagtctgcaattgggtggagcctccggaagctcgcgctgtttgcagggcggaggagcttggtccctcctcttcctgcgtggtatttgagattcgat

SEQ ID NO: 293314 - DNA, 122 bp, Homo sapiens
aggatgatggggacgagagtgcagatgaggacagctgctctgagcacagctccagcacctcgacctccaccaaccagaaggagggcaagtactgcgactgctgctactgcgaattctttggg

SEQ ID NO: 293315 - DNA, 122 bp, Homo sapiens
gtcaggataccggttacctttggagagactaagtgggggccgcaataagggcttctggagcggtaggaatgctcttgcttcctacacaggtttactcgctttgtggtaattcatcaatgtct

SEQ ID NO: 293316 - DNA, 122 bp, Homo sapiens
ccactgaaaaacccaacagtgggggctgccgtggggatccagggttgggggactctcagacggccccccaggcttgtccccatgcgtattctttgagctgatggggacgcagtgttcacagt

SEQ ID NO: 293317 - DNA, 122 bp, Homo sapiens
cgggggcccccctacctgcaggctgtcggcgcatggctgcggcggcggcggcggctcgtccggcttgaggaagacctgctggccccgcctgaggaattggacaacagcgatgaggatgtggt

SEQ ID NO: 293318 - DNA, 122 bp, Homo sapiens
aactccgttgcccagggaacagccattgaagtgtgcgctcccgagtctgcaccaggccggcgcctgtcgcggtgctggctgaacctcggcgctgcaggggctgtgcccggcgggtgcccatt

SEQ ID NO: 293319 - DNA, 122 bp, Homo sapiens
ttataaaatgatgaattaaaaggctgcaggtgtggtattcagagcactaaggataagactcgagataattccatctgggggaggttatttgttgggacaggacagtgtttaaactttgaagt

SEQ ID NO: 293320 - DNA, 122 bp, Homo sapiens
atcaggtccctacagacccggatggagaggataggcccggccacgctgagcttagagcatcgcctcggtcacgtcggggtggaggtcccccacgtagagcgaggccatggggtagctggggg

SEQ ID NO: 293321 - DNA, 122 bp, Homo sapiens
taatctacagatattcaaacctcaccaatataaccaatgtcctttttctggtacaggagccggttgagtgtcatatattacattcagttgtcaagtatctttagtctcctttaatctgtgac

SEQ ID NO: 293322 - DNA, 122 bp, Homo sapiens
taaaagtcacaatacacctagaacataccagaaaagcaagctttgtcattcctgctttaccggtatgatctcgtctaaacaaacatttcatttcagaaaatctgcatcaatctacacggacc

SEQ ID NO: 293323 - DNA, 122 bp, Homo sapiens
ggctccggctgcttttcccggctctgaggcggcagcggacagggtgctggggccaggggccgggcgtggggaggcgtgagggaaagggaaggtcagctagagagggagccgagcgagagcga

SEQ ID NO: 293324 - DNA, 122 bp, Homo sapiens
ccctctatgaagtacacagaccgacaaccttttacagaggactgggcttgacaaagagctcgcttggatccatcttgcttccctgtgcgcacccggccccactcacaccgagggagtttcgg

SEQ ID NO: 293325 - DNA, 122 bp, Homo sapiens
gatcccggagcttggtggtgtgtcatcagcctgtgtgtgtcctccttcctgtgcctgtgccggcaacacacatcacactccacaccctctgtgtgtgcatcggcactttcccgggcacgcgc

SEQ ID NO: 293326 - DNA, 122 bp, Homo sapiens
acatcctgtgggctggaggtggccggaatgggcgggcttgggaacgtgatgcccgggtaccgtgcctacaaggacgctgggtcatgactgttctctggaggctacgggtgccctgcagagtg

SEQ ID NO: 293327 - DNA, 122 bp, Homo sapiens
acgatgatgtcacccgtctactctcagctcctttttcaaattcggtgaggcgtttgtggacgagcacaccatgcaaagcggagcagaggaccccatgtgtgtcctacgacacttattttaac

SEQ ID NO: 293328 - DNA, 122 bp, Homo sapiens
agggcgcgagccaggtgcccaccagcagccagcatggctcccgggagttccatgctagggcggcgtagacagcacacgtctgtccatctgcattttccctgggtcaggaaagagaaaatgga

SEQ ID NO: 293329 - DNA, 122 bp, Homo sapiens
ccagaaagaacacttgcaggagcgcgagctgtggggtgcgcatggggcattcagggcctccgggtccgacgtaggcctccgcggtctccaatcgcattgccagagcgtgggtgggaggagtc

SEQ ID NO: 293330 - DNA, 122 bp, Homo sapiens
gccctcgccggtcccagtcagctccaggagcgctccaggctgggttgggctgggcctgggcgagcccggccgctgggagggggcctcgtagccctttccccagggcgcggtctccacctctc

SEQ ID NO: 293331 - DNA, 122 bp, Homo sapiens
atgagcttttgctgggacatcccacggaagtcgggtgcgccaagggaacggattaccctacgtcgacacctggaggactgtgggtgtaaggtgtccaagaagaaagctcagatctgccgaca

SEQ ID NO: 293332 - DNA, 122 bp, Homo sapiens
caccctccacctgtcatcacaaatggtccatggctcacctacaactagcccaacctcacacggcctgacccccggctcacagcccatcatggtgcccactgtgtcgttcaccacagcaacca

SEQ ID NO: 293333 - DNA, 122 bp, Homo sapiens
ctctggccggcgctggggtggagccggcggggccgtcgtgccgcccgtggccgctggggacgctggtgccctcccgccccgcccacttccccgccggtccgcccctggctagagaagccgca

SEQ ID NO: 293334 - DNA, 122 bp, Homo sapiens
ggtctcactcacccatcagcctggaaacagacgcatgtcggcaccctcccagcccctctgcgagagcctctccatagcctcgctgttgagcccgtggcagtgaaggtcccaggcgctggagc

SEQ ID NO: 293335 - DNA, 122 bp, Homo sapiens
ccagataacgttacaccaagttacttgttccagccaggaagcccaggcaatgacagacctcgctaaagccacacgctttctagccgaccaaacagaaaaacggaaagagaaagaaagaaaac

SEQ ID NO: 293336 - DNA, 122 bp, Homo sapiens
gaagcaaacaaacaaaaacagccactgggtttgtcttttcccctactcctgcctgagcgccgccgggtttctgagctgctccgggcgcggacctagctcacccgcagccggatgtcggagcc

SEQ ID NO: 293337 - DNA, 122 bp, Homo sapiens
gagggcccccgtcctgccctcccctccccggccccaccagggcctcagccccacattccacgcaggcctgcagctttaagccatccgctgggggctgccctgcaaactgctcgttccacatt

SEQ ID NO: 293338 - DNA, 122 bp, Homo sapiens
gggtcggctcagagtgggccccgtttactgaccccgtgctgtggctctgcagacacagcccgagcccccagcgccagcccaaggcaagccccatcctcggggtccccttcctgcgctcagcc

SEQ ID NO: 293339 - DNA, 122 bp, Homo sapiens
cgcgcccacacgcgcatggaagggcctggattcttttcccgcacggcgggagcaaggccacggcccctactcactgtttcaatgaattatgtaccttggtatcctggacaaggtccccaata

SEQ ID NO: 293340 - DNA, 122 bp, Homo sapiens
agcgggtggtgaggcagaaagtgcagggcggaatgaggagccccagcacctcagagctgtcgggcagtggcggggaagcaaagcacaggagcgctgtggtgccagcggccgggctagggacg

SEQ ID NO: 293341 - DNA, 122 bp, Homo sapiens
tatgggagaacattcctcttctgctggactctgtttctgctgcacccttgatttccctcccgtttggtattcccagggttcctgttcatatctctttggtcatatctcctggtcatatctct

SEQ ID NO: 293342 - DNA, 122 bp, Homo sapiens
gacgatcgcgatgccttcaggctcgcaaccgagggggtgcacgcaggggaacgtgccatccgggaacatctttcaggcaaaacaaagcattttgctttccagttgatgatagggagtgctga

SEQ ID NO: 293343 - DNA, 122 bp, Homo sapiens
cgcagcgcgccctggccgacccctggtggccggaggccgttactgtcgcggctgaaggggcgtgtcccggtgtatccgcagcgcgccctggctgccccctggtggccggaggccgttactgt

SEQ ID NO: 293344 - DNA, 122 bp, Homo sapiens
taaaggactagtggagggggcagcttccatcagacattatgaaattaaaaggagcacagacgcagtccagagaaaaggtgcttgaaaaaattcagtgttatgttaaaaagatccttagttcc

SEQ ID NO: 293345 - DNA, 122 bp, Homo sapiens
gatgctggaaatacaaagataactaagatccccctaaccttcaggaaactgggcagagcccggacaacccggagggcctggtgctgttacagacaaataggggcgagcaccacaaaagcgcc

SEQ ID NO: 293346 - DNA, 122 bp, Homo sapiens
agtaagtgcagagccggtaagcatatgtccccagcatgatattttagcttcatatgaagccgtaaagtggaaataagccaacagtacagcagcaactgctaactgttctgtctctccatgtt

SEQ ID NO: 293347 - DNA, 122 bp, Homo sapiens
tgcgcgccgagtgccggtggcttgcctctcagcgcctggatgggatcaggtggcagcgtccgctaggctcgctcctcccggctctgcccgccccccgccccccgccccccatcgcacaccgg

SEQ ID NO: 293348 - DNA, 122 bp, Homo sapiens
aaaccagagaaaagataaggattcagcaaaacgtattgacaaggaacaaccaatgagacacgaggaaaatcagatctgaatgaattaaatgaaacaaggcatcaagaaggaacgagtggtgg

SEQ ID NO: 293349 - DNA, 122 bp, Homo sapiens
gaactttaatgaggttggcttggcaaggcctgcggtgcttacctcggcttcgccctaccccgccagaagccctcataggttgtatccactggtctcccccaggtgcagggttattaggggaa

SEQ ID NO: 293350 - DNA, 122 bp, Homo sapiens
ggacatggtgatgtcctgggttggggctgaggaaggcctatgcgcggagggtgcggccttcggctaaggcagaggaccagggttgggtccgtggcggcgggaggggtggcctcctgcgctgg

SEQ ID NO: 293351 - DNA, 122 bp, Homo sapiens
acggaaaactcatttctcagcctggcttttatttacactcttattaaggaggctttcattcgtgttggaatggcagcgagaggctgcgggccaggcggccgaatgggtcgtgcccgagcgac

SEQ ID NO: 293352 - DNA, 122 bp, Homo sapiens
gaacccggggatgctcgcggggagggtcccgagcccgcgccggcctggcccccccgtccccggctgggcctctccgggacactccccgccccgctgctggccacctccgagcacgccacgtc

SEQ ID NO: 293353 - DNA, 122 bp, Homo sapiens
cacagtggcagagggtgccagccctgtgccctgagtcagccctgccggtcctctgtgtgccgggaaggaagtaaggaaagggaacacagcgcatggatctaaaaaggtgacaccagaagtaa

SEQ ID NO: 293354 - DNA, 122 bp, Homo sapiens
agacccgcgcagacccggcggcggacggcggctctcgactccggagagcggatcgcggggcgcaggagcccgatcgcgctggccatggcctccaactttaacgacatagtcaagcagggcta

SEQ ID NO: 293355 - DNA, 122 bp, Homo sapiens
ggaggcggttcgctgtggagcctggaccctctccacagttcagcccgccggaggcgtgtgcgcttccagatgagagcacttgttcactgaatgaccgtgcgtacttggggggacatctggcc

SEQ ID NO: 293356 - DNA, 122 bp, Homo sapiens
gcgaccaatatttactgaatatctactacgggccagcctgcatatatttgtctacatatacgcatattcactgggaccttagcagccaatgtttactgagcacctactatgggctggtgctg

SEQ ID NO: 293357 - DNA, 122 bp, Homo sapiens
caccgaaagcacgtaatcgccggtgtaactcatgttggctggggggcctcccggcgcgcgcggagaggctggggtgcgcccccatgcagcatgcttgtgctcaattgcagggtcctcgttct

SEQ ID NO: 293358 - DNA, 122 bp, Homo sapiens
aagggaggcagccagtcactcgcccgcccttccgggcccactcccgaggggacggtctcccgcccgccctcacacacagctagctcttcaggccaggcccccagggtttcgtccacctctca

SEQ ID NO: 293359 - DNA, 122 bp, Homo sapiens
aacacctctttgatctgctggggttttagccatagatcaacagatcaggggaaaggcaatcgagtggtcatttgatgggaccatcaatgtgagcagacatagagcctagatccttgaagtat

SEQ ID NO: 293360 - DNA, 122 bp, Homo sapiens
gtcggcgccccgcacgtgccgctggcgatcagtctgcagttccccagccagtgcaggtttcgtgtgcaaggggagagcttccgcggctaggagctgccggccttggggggtttgcggtgggc

SEQ ID NO: 293361 - DNA, 122 bp, Homo sapiens
cccacggcttctcgagattatctctgtgttttaatagataaaacgccttctctccccacccgtggggtgcaaagcacagcgcatggggctggtggcgcccgagagcatcacacaacgcatgc

SEQ ID NO: 293362 - DNA, 122 bp, Homo sapiens
agatgacaggtgactctctcaaaatggatgacctcgctctggaaatgagcttcaaatgtgcgtaaatcctttagataaatggagggaaacgtttaggaagatagaggagctagcaaggaagg

SEQ ID NO: 293363 - DNA, 122 bp, Homo sapiens
agctggtgtccatgagaacgcctaaagggggacaaggattttaaggcaggggtttgagaacgaagagtatgcagtccaccccaacccgctccctgctctacctgagggtcaaagcccctcac

SEQ ID NO: 293364 - DNA, 122 bp, Homo sapiens
cccgactacacatcactgggcaggagccggggagagggttcagcgcagggtctccaggagcgacatgtgtttggagctaagcgcccctcctgggggctcaatctttgaatacactggcctcc

SEQ ID NO: 293365 - DNA, 122 bp, Homo sapiens
ggggagtgctcatgtggacatcagggccagacacccactccagtgcacaagacagacttgcgaccgcttgagcccactgagcagatatggtgggtggctggaggcttctctttctcagtccc

SEQ ID NO: 293366 - DNA, 122 bp, Homo sapiens
tccaggctgtccaccccgaggcctccgcgctctcggagagaccgcactctcggagagactcgggagagaaagacgaaagaccgcctttggaggccgaactcagccatgcctccccagttccc

SEQ ID NO: 293367 - DNA, 122 bp, Homo sapiens
ccgaccaataacagatgccgcagtagcacgttcgctgcccaggggcgggacttgcgctggcgtgctagccgcgaccgccaatcagagcctcaaggctcccaagcaagctcgctctccccaga

SEQ ID NO: 293368 - DNA, 122 bp, Homo sapiens
acaaacattgattaatcacttactaagttgcatgctgtgcactggcaatacaatggtgagcgaaaagaaatttctgcctgaccctggttggggtgggggtggggggcatcaatcaaatattc

SEQ ID NO: 293369 - DNA, 122 bp, Homo sapiens
cctcgaaccggagctccgggatgcatgccaatctccggttgcgcctgcgcgtcgggctcccgtggggtccacgcatttcctacccggcccccgcgaacaggcgtaaagctctttcttcagtg

SEQ ID NO: 293370 - DNA, 122 bp, Homo sapiens
ccttccccctcgccagcattgccgtctacaactccgtggtgtttggggtcttcagtaacacgcagcggttcctcagccagcaccgctgcggggagccagaggccagtcctccccgcacgctg

SEQ ID NO: 293371 - DNA, 122 bp, Homo sapiens
ccgctcctgctggagggcaaggggactaatcacgcctttacttagtcatcaacgcatccacgcaggaccaagttcaaagcatgttgcgtgaaatcagacagcaggaagtttatttgattcct

SEQ ID NO: 293372 - DNA, 122 bp, Homo sapiens
ggcaaggctgcctaatttcaaagtccatgatattctaatagaaagggagatctagtgctgcgatcagatgcagagagaggtcatctttgcccatttcacgattccatagttgtgatttttcc

SEQ ID NO: 293373 - DNA, 122 bp, Homo sapiens
cgacctatgtagctatcagcatgtatattttctttctcatttctattagtaataatttaccggtgctgcagttggaggatgaaaatcttgaaagggctggcagtaaagctctaccaatccat

SEQ ID NO: 293374 - DNA, 122 bp, Homo sapiens
catgaggcaggagcccggaggaaacagtatgcccgtcaagggtctctggcgggactgattcgcactaggggcccaacaggcaataaggacccagcggattggccgaggataggccagtcccc

SEQ ID NO: 293375 - DNA, 122 bp, Homo sapiens
aacatctccctctccaactgttaccatactttatttagctttgttcccataaatgctctacgtcagtaatgagtggctctctgccagctgcccatggccactgtccctagccaccgtggaat

SEQ ID NO: 293376 - DNA, 122 bp, Homo sapiens
cggccatgaggaggagcaggagggtgagcgcggggcgcgagagcagggccatgcgcgcagcgccgggctctacgggtccccgagccgcggcgcggggcgcgtccccacagagtccccaggac

SEQ ID NO: 293377 - DNA, 122 bp, Homo sapiens
tcatgaagacgcgggggaagctttggttgtgtaaagctgagaactgcacccaagcttccccgttcaccccacctaccaggggatttgggctaaattcctggcctggcccacaaagaagacca

SEQ ID NO: 293378 - DNA, 122 bp, Homo sapiens
ggtcggggatctgcccggaggaaggaagagcggaatcgtccttttataacgggagcacggcgtcctggcgtgggttttctccccgatgaaatttctgatgtgattctttgcctccttccacg

SEQ ID NO: 293379 - DNA, 122 bp, Homo sapiens
cccgccgagcgaggctctcagcaaactttattttgaaagctcagctccctagggagggcccggcggcctccagccagggcgtgtgggggaattttggtgaaactctcaccagcccgtggggg

SEQ ID NO: 293380 - DNA, 122 bp, Homo sapiens
agatatctgggcattcatgcttttggcatttcatctaactatccatttcctaatggaaaccggcaattgctaaaaagtttactccatttcagtattttcaactaggggtgattctaccccct

SEQ ID NO: 293381 - DNA, 122 bp, Homo sapiens
aaatgtcccggcgcctctcccgagagccgcgacggcccggagccgggagggaaagctccacgcacaaacaccgccccctgcacaattagggcgaagatgacggctgcaaagttgttgcgtaa

SEQ ID NO: 293382 - DNA, 122 bp, Homo sapiens
tgcttcccttcctaaggctgaccaagacctgttgatccttttagattaaaaataaaatgtcgcatgtaaaggctgaagtcgcgttttatcagaatgccttgccttcttaggttcttttccat

SEQ ID NO: 293383 - DNA, 122 bp, Homo sapiens
ttcatctaatgtgacttatttttacctcgaggcatcagtgacccggcaaaacattcgttacgcgaaatcgcacccatcttatccatgctttaagcccactttaaatgcttccacctcctccc

SEQ ID NO: 293384 - DNA, 122 bp, Homo sapiens
ctccaaaggcttgggcgtgcggcttgctcttcctctccgcttgacgggcggtggttcccccgagacagaaacttgactgaaaaataataccaaatacccgtgctgcggcccgtggccctcca

SEQ ID NO: 293385 - DNA, 122 bp, Homo sapiens
ttgcctttcctcattggtccagctcagccctgccgggagacccctcacattacgtcacagcgcgctggcgctacacgcccgctaaaagaaggttgatttctaattggccccggtcggccaat

SEQ ID NO: 293386 - DNA, 122 bp, Homo sapiens
ccaccgccaacctccgtcagcctgcgagcgcgtgtggcggcgggggtgggggtgcggggacggagggcgggagtgttccggggctaggatggctgggatttagctacaaaagatgttccaga

SEQ ID NO: 293387 - DNA, 122 bp, Homo sapiens
acgggtgtttaccacactgttcttataccaagagtcagtgcacacgagctcagtgtccagcggtgggtctggttctctaaaccgtgcgataccacgtgcccatcgaacacgatggtgcagat

SEQ ID NO: 293388 - DNA, 122 bp, Homo sapiens
gtgagtgagacagatcagacacagtgagtgacgggaacatgtcagagacaccagagaccacgcggcaaaagcagagaatctgggaagagggagtgttgggaaataaaaagtgaacaaggagg

SEQ ID NO: 293389 - DNA, 122 bp, Homo sapiens
cggccctctacgggggtgtccaggccgccttccctggcgccttcagcttccgccatgctgcgggtttcctgtgccactgccctcctggctttgagggtgagcccctgctggggaagcggtca

SEQ ID NO: 293390 - DNA, 122 bp, Homo sapiens
atgatttatatacataacctaaaaatccccctaatgacattttatttgggttatctcattcgatttttactttgcacgtaaggaagctgagtctctgaaaggttagtgacttgtgcaagtca

SEQ ID NO: 293391 - DNA, 122 bp, Homo sapiens
aaaccactgagaccaccactgagagggtaaccaggcttctcagtagaaccaggggcttgccgcagggacgggagctctgactggccacgtcgtggagtctgcagctgcccatggtggaggga

SEQ ID NO: 293392 - DNA, 122 bp, Homo sapiens
acagcagactgcggtgaaatgccagaaaattacgcaatacataaaccaaacggcagactccggacagcggactgcggtgaaatgccagaaaattacgcaatacataaaccaaacggcagact

SEQ ID NO: 293393 - DNA, 122 bp, Homo sapiens
ggttcctgacaaggcagtgttgtggggagatggaaaggtagcctgggatccccaggagcccgccccacctccatcagctcaggctgggggtgctggcaggcattgctgtcacaatgccccat

SEQ ID NO: 293394 - DNA, 122 bp, Homo sapiens
acccggcggcaggcacatgggcctggatagttactgagaaaattctttcagaagggctttcggggacgtgaagtcacccctggcttcccgggattctgggttgggagcagccgcgcaggggc

SEQ ID NO: 293395 - DNA, 122 bp, Homo sapiens
gccgccacgcctgactgctttttgtattttttggtggagacggggttttactgtgttggccgggctggtctccagctcctgagcacgagtgatctgcccgcctcggcctcccgaggtgccgg

SEQ ID NO: 293396 - DNA, 122 bp, Homo sapiens
gctggaggtcagcctcctcgggtagtcgcaggcccagccctgccgcggccgcccggcttgcgtcacccgccctcgtccgggatttgtgaagttgccctgacgtggcagtagcttcgtggcgg

SEQ ID NO: 293397 - DNA, 122 bp, Homo sapiens
agggctgaagatgcccagaggcatcgccatcgactgggtggccggaaacgtgtactggaccgactcgggccgagatgtgattgaggtggcgcagatgaagggcgagaaccgcaagacgctca

SEQ ID NO: 293398 - DNA, 122 bp, Homo sapiens
gatccgtcgcccaaaagttcggaatgacggtacccctttcccttaagatcgatgaggagacgaaataaattgggatcagggcgacgtcctatggaaaacagccttttgtatttttgtctagt

SEQ ID NO: 293399 - DNA, 122 bp, Homo sapiens
ccgtaccaggccgccggtccggggttagggcacttgacgccggcgccgccatgttgtctccgggccacttccgcgtttctggcgcgtggtcttgcatttcctacttggtcctgttcgtggcg

SEQ ID NO: 293400 - DNA, 122 bp, Homo sapiens
ttccacctctaaagcatgtacccagtttgtctactacacatcatctctattactactacccgattgaagccatcaccacctctcaccttgaccacaacaaacatcttctagccagttatcta

SEQ ID NO: 293401 - DNA, 122 bp, Homo sapiens
agcgccgcaaccctctctagatggtaagcgcggccggcggcgggcgggcgggcaggggtgcgcggtggccggcccgctgcatcccgcgcgcctgccctgctgcgtccacggctgtccagtcc

SEQ ID NO: 293402 - DNA, 122 bp, Homo sapiens
tgagagtgtcatccgctgtgagttctgcggtgctctggtcccccgtgaagacatcgtccacgacattcacactcactgagccacgtcctgcccttggctggaatgtgagggcggtgagacac

SEQ ID NO: 293403 - DNA, 122 bp, Homo sapiens
tacaaaatcaagccttcatctggtctttctctatgctgtattcttattaatggttcatttcgaggaaactttactcacttctagagcagtcttttaattagagaacagtttcaagattaaaa

SEQ ID NO: 293404 - DNA, 122 bp, Homo sapiens
ggttgggcccattcttcagggagtaatgaagctgagaggggaactccggggccatcctaacgtcactccagagccctgaccctcaccagtgcaggcaagttccagtgccctgccttggcctg

SEQ ID NO: 293405 - DNA, 122 bp, Homo sapiens
ctccatgtcacactcacgctgcctccacggcaatggccagtctggggattggggtgtccacgctcgtccaaggcccccacgcgatgcccactcatcgccacatcacctggcaccatcctggt

SEQ ID NO: 293406 - DNA, 122 bp, Homo sapiens
gccgcggccgcctttcaactctgcggctggcgccggcctggccgggcccccgaggccgcgcggcctccaaggttccgtcccgccctcccagacgctcagctcgcatcgccccacagtggaac

SEQ ID NO: 293407 - DNA, 122 bp, Homo sapiens
actaccacttctcaatgatgtggctcatgtagtcctcggtgggcacgcggcccggctcgtcggcatcctcccgcggcagtgcctccttggcccggtgcagcagacgctcctcgcggctcctc

SEQ ID NO: 293408 - DNA, 122 bp, Homo sapiens
caccattgctgggaactgtgggtacccccagagtgaagcaataccatggctcagctgactcggcttctcccagtaaaggaagaatgggctggctgagcccggtgccaggactctgtagatgc

SEQ ID NO: 293409 - DNA, 122 bp, Homo sapiens
cacgaagactcgggccccggcgcgtccaagcagcacaatgagtagttcttgacccgaggtcgccctgaaggtgtcgcatgaagagcttgcttcacacacaacaggattcgatactttgccaa

SEQ ID NO: 293410 - DNA, 122 bp, Homo sapiens
cagggccgcgaagcagagagcggccggaggtgccagggccgcttcattgggattcatgagcgtgttgggcgggcggcctggggcttcgggcgcggggcgggggccgagtgggggggtgcgca

SEQ ID NO: 293411 - DNA, 122 bp, Homo sapiens
cttatgtggctgaggattcttccccgactcaggatgcaagtgccaggggacccgagtctccggggaaagctgggtgcatgcacggttctttgatccgtcatttgaataattagctcttaatt

SEQ ID NO: 293412 - DNA, 122 bp, Homo sapiens
atttccgaaccgaggaaaggctgtctaatgtggaatactgctagtttcccgtgaggagtgcggtgtttccgacagcggcactgaggatccgtgcggagcccccgcgtgaagcctgcgatgcc

SEQ ID NO: 293413 - DNA, 122 bp, Homo sapiens
caggatcgacgcgtggcagtgccacctgggcccggactctgggactgcgggaggcgggagcgcctggggccaggacctgggcgtacgctgagggcacccggtgaaggccggggaaagtgggg

SEQ ID NO: 293414 - DNA, 122 bp, Homo sapiens
ccccgaaccaaagcagctcttaatcttcactgtcctaagacgatctttcaaaggctcgtacggtattttttttaattaggtacaccttcgtaagtatccctttttttgtataattaggagat

SEQ ID NO: 293415 - DNA, 122 bp, Homo sapiens
cacataaaagagaaagagcatcatgataaaggggtgaccttttgttgtttcccaatactgcgatatgtttgcacccctttgccaatttctcattttgaccagagggcagacacctggcaggg

SEQ ID NO: 293416 - DNA, 122 bp, Homo sapiens
tatgaaaggaatcggggcttatcttaatcacacaccgggccccagcactgcccgagccggcgagggcctctgtgcaccagctccattgccaggcaggcctgcgcagatctataaattgatgg

SEQ ID NO: 293417 - DNA, 122 bp, Homo sapiens
atggtgggggatcatgacctgaaggattctttccttcccatgagctgcagggctggttgccgtccttgcaactgtgtcttatttgcctgtgccgttatatcttggtgacccctccacgtgta

SEQ ID NO: 293418 - DNA, 122 bp, Homo sapiens
gctgaagacgccgctgatctcctcccctatggacactgtgacagaggctgacatggccatcgcgatggctctgatgggacctattggtttcattcaccacaactgtaccgcagagttccagg

SEQ ID NO: 293419 - DNA, 122 bp, Homo sapiens
tcaaagaaacacctggttttcaccctgagtctaagcagtgagtctgagctgcagggtagccggagccacctcattcggccactggaggcctgtgctatgggccaggatgctaaactggaagg

SEQ ID NO: 293420 - DNA, 122 bp, Homo sapiens
gggcgtcgctaacgaggacgccgtccagggcgtcgctaacgaggttgaagtccagggtgtcgcacacgaggacgccgtccagggcatcgctaacgaggacgccgcccacggcatcgctaacg

SEQ ID NO: 293421 - DNA, 122 bp, Homo sapiens
ccccgcttgatgggcaaagtgatgccctgaccccggcttagcaggacaggcactgtgacccgctttttcagcaggaatgctagatttgggcagatcacgcacataaccttcactagggcttt

SEQ ID NO: 293422 - DNA, 122 bp, Homo sapiens
gcagggttaccagctgcgtgtccgaggggcagagagagaaacagagggggacggggcaggcgcgctgggcccgcccccccgtgcctggggcagcttctcattggtgaaacctcctccccggc

SEQ ID NO: 293423 - DNA, 122 bp, Homo sapiens
gaggcgggacccgagggaggagagtgaacccgagcaggagaagcagcccaggcagccaggcgccctcgatgcgagaggctgggcatttatttttattccaggctttccactgtgtggttatg

SEQ ID NO: 293424 - DNA, 122 bp, Homo sapiens
agaaaggcaggaaagggctctgcgacgccacactcagtctgggtggctctccccagccttcgcccaggctggtactggaattgacagttacgggatcctcagcccagccctcagccatacca

SEQ ID NO: 293425 - DNA, 122 bp, Homo sapiens
cctgcatcccacagggctggccgtgggcagaggcacagctgtggccaatctgctgtggggcggttcctgataaggaaactgggtgagtacctggtggcctttttcgtgtgtgtgtgtgtgtg

SEQ ID NO: 293426 - DNA, 122 bp, Homo sapiens
gccaagcacgaagagaaagccccgcctgaaactgcctggaggccccccggctgtcactctcgccacattccgtggagtatgtggttgcaacttctgtcactcaaggtctgatggcggggaga

SEQ ID NO: 293427 - DNA, 122 bp, Homo sapiens
tggttctcatgttagcaaatttgggacgaaatccgtatgcagaaaaagcgccgggccgcccgcaatccacccactccatgacccttttttaggacaaaatccctgggcgctggggcctgctg

SEQ ID NO: 293428 - DNA, 122 bp, Homo sapiens
acccagccggcggcgggctgcccacccagcctgggggtggcccgccatacttcctctgcccgttcacctgcaccaggcgatgcctgtctccctgacccacgcctccagcgccgccttcaccc

SEQ ID NO: 293429 - DNA, 122 bp, Homo sapiens
tctaagagaaaggcagtttgacaagtgaaatggtccccactcctgtaagaacgagacagacgtccttgttctgtgcaaccagagagacatgttctgacagcgtgtagaatcctcggcccatc

SEQ ID NO: 293430 - DNA, 122 bp, Homo sapiens
aagtcattagtccaggctattcctccatccatttgttaggtgacatacagcatagtacagcggagccagaatacctactgcacgtcagttcttcaatctttttttttaattgatttatttat

SEQ ID NO: 293431 - DNA, 122 bp, Homo sapiens
ctctgccataaacttctagcgtgtgccaatggtcacctgccacactcgcaccaggttgtccgtgtagccagcaaacagagtctgcagggaagaaatgacagtgacaggtcaggctggcataa

SEQ ID NO: 293432 - DNA, 122 bp, Homo sapiens
cgtaatccgcccacctcagcctcccaaaatgctgggattacaggtgtgagccaccacgcccggcctctcagttgattcttataaacaagcaggacagctgctgatgttcttgccagttaata

SEQ ID NO: 293433 - DNA, 122 bp, Homo sapiens
ttctctgagaactgaaacgacatcccgggacgaatgggagagttaggctgagctacacaccggggaggggagggttggagtttagccccaagcccttcggacgccttcttcggctcccgcgt

SEQ ID NO: 293434 - DNA, 122 bp, Homo sapiens
cgggtcctgagtgtgtgtggataggctgtgcgggtcctgactgtgtgtggaaaggccgtgcgggtcctgactgtgtttggaaaggccgtgtgggtcctgatcgtgtgtggaaaggacgtgcg

SEQ ID NO: 293435 - DNA, 122 bp, Homo sapiens
ttgctcatgctgacacttcgctggaggacaggaagtcacgctgtgcgtgcatggatttgccgtcatgctgtatgtgctcagggggcgtcctcagagctgtacccagagcgagaagcacgtca

SEQ ID NO: 293436 - DNA, 122 bp, Homo sapiens
gcttacccagggtggtgagcgcagcctcagtggcagaaatccccgtgcgccccctcctgccgcagaggaagacagacccctacggagcctccagggcgcagtctccagggcggagtcccggg

SEQ ID NO: 293437 - DNA, 122 bp, Homo sapiens
cccaatatagtgatctctccactataacccattgtcttgcatagatttcctaaagctttgcgcctcagttaactaaatgggctcagtgttcacgggccaccgtagtttctgaccaattgtag

SEQ ID NO: 293438 - DNA, 122 bp, Homo sapiens
cgagatcaagatgccagaaaataaatcaaatcaaatcaaatcccaggcgcaaacggccctcgtgttcttacccctcctctcgctgttggaaatcgcggctccatttatgggtggacagaaag

SEQ ID NO: 293439 - DNA, 122 bp, Homo sapiens
ggacagtcagcgggcctgcggggctgcgatgcacccctgaaagtgctttctccacgccggcgcacctgacacttaggtcctcgcagaaaccccattgactagggagaggattgcagactatg

SEQ ID NO: 293440 - DNA, 122 bp, Homo sapiens
agtagcattgcagcccaagtgggatccttgggaaggaaaatgctaagtggagtctggcttcggtacaagtaggctaatcatggcaaatgactggttggagctctgagaaagacatgagctct

SEQ ID NO: 293441 - DNA, 122 bp, Homo sapiens
ttgaccctcacttgctttgaccaggagttggttctgacactcccttccctccctgccaaccgccctccatcttttctctcctgtcttcctctctgtggaccccacaccctgcaattcctcct

SEQ ID NO: 293442 - DNA, 122 bp, Homo sapiens
ggtgggaggtggggcagcctagaggtttgtgggctttctgctgctgttgagagatttgtacgcttgcctccgctgtttccaaaggagtcggtggctcgaagtgcacgggaaacgttgtcaac

SEQ ID NO: 293443 - DNA, 122 bp, Homo sapiens
tccaggggtaaaggtcctacagcagtgaacctcccaccagtttgcctctcagggcacgtgcgtgagcccacttgcccaactcacaaggtctgccagggatgcttccgatgttcctgactgct

SEQ ID NO: 293444 - DNA, 122 bp, Homo sapiens
ctcactggttacaacttgaatagaactaataaatttatatacagactgaaaactctacatcgtctagacttgtgaaggactagaagagagtctcaagttgcagaatgtcagaaggacagtga

SEQ ID NO: 293445 - DNA, 122 bp, Homo sapiens
gggccttcctctctcaaattatagctggggaagtatctgaaggatttggaaaaaccagcccgagggttgttggggcaccctgtccatacacaaatgagggcaactagtggattctgaatgtg

SEQ ID NO: 293446 - DNA, 122 bp, Homo sapiens
gcccctcgtggaggccgtacaggtgcatcttgtacttgtgcccgggctctaggcctcccacggtgacctcactctccttgcccccaacacgcaccgcccggggccgcccatccctgtccttg

SEQ ID NO: 293447 - DNA, 122 bp, Homo sapiens
cttggcctgggacgccggccccgatcctcggctgccgcggcgcgcccgtgtgtgcgccctcgccctgtctgcacgacggtgcctgccgtgacctcttcgacgcctttgcctgcgcctgcggc

SEQ ID NO: 293448 - DNA, 122 bp, Homo sapiens
gcaaaacgttttcagcacagagcaacacgctgatcagtggctttggggatgactgtaacacgggtaagttacaagaaaaaatggcacaacccgccctgtgaaatctgagcggagcaaacagg

SEQ ID NO: 293449 - DNA, 122 bp, Homo sapiens
gcccccggccaggctaggcgtcctgctgctggatgaaggggttggggatggcctccatgccgtcctgcgggcagattagcaccacggacgtgccccggcacaccacgaggcccagctgccgg

SEQ ID NO: 293450 - DNA, 122 bp, Homo sapiens
accagagcagcagcaacagcaggagcagcaggggcagcagcaggctgccgatttccagcccggaggggccgggctcggaccccggcgggcaggggggatttgggggaccgactctcgtggac

SEQ ID NO: 293451 - DNA, 122 bp, Homo sapiens
aggtccgtggtaaaacgccacctcagttcccgagaagagcagcagaagaggaaagtgagccgggccgaggaaggaccctcagtttacattcacagcattaccggcaaaaggctggcgtttgg

SEQ ID NO: 293452 - DNA, 122 bp, Homo sapiens
ccctgctcctcggtcctagcccgggctttttctaactggggtggccccgcccagaattcccgcccctgccctgccggccaatcagagcagggccctcccgagggcccccgcagggcccacct

SEQ ID NO: 293453 - DNA, 122 bp, Homo sapiens
gaccacacccacaatggatggagatagacatcagtggctatgcctgtccctacctgaggtcgcccagctgtaagggtctcgctctcacatcagtgctgagaaccaggggcctcttcagcagc

SEQ ID NO: 293454 - DNA, 122 bp, Homo sapiens
cacacaatggtcacttaaaaatgtccttagttaaatgaaatcggatgcgcatgagttcagcgtgaggtccgggtcagggagaggaaggggcattggcgggtagggttgcgtcggtggggcct

SEQ ID NO: 293455 - DNA, 122 bp, Homo sapiens
gcagacaccatggagaagtgacacccacactctgatcacacctggaggaggcatccagcacgttggaagtgaagtagcacttacccaacaacataacctgggttgcctaaagttttacactt

SEQ ID NO: 293456 - DNA, 122 bp, Homo sapiens
gaactagccagcttgactcagtttaggtgatcccaattttggtggcaacaaccaaagcatcgtagtcaggagccagtcgaacatatgccttcctctctccatcagactgaatcagagtgttg

SEQ ID NO: 293457 - DNA, 122 bp, Homo sapiens
gcagaggctattctgtgaaggttttaggcttccagtcgggctgagtggggtattctgccgcgaaagtggaggttagagggtatgctgggagctcccttggccttgccaggtgagcctgccca

SEQ ID NO: 293458 - DNA, 122 bp, Homo sapiens
tcgctatactctgatagatccagccccctcagtcctcctggaatagcctggccctggctccgaggagagaagaggggctgttgctgggcccacagaagaaaaggcaaccccaggcataaaga

SEQ ID NO: 293459 - DNA, 122 bp, Homo sapiens
gatgccatcgatgcctggaactccaggggggcccggaggcccgggaggaccctgctcacccgggggacctctctggcaaaaatagcagacataggttagtggagcacatcgggcaacaggga

SEQ ID NO: 293460 - DNA, 122 bp, Homo sapiens
ttcttcaccaggcgaggattgagtcgcagtcgcgtcaggaactcgcctccaggtactgagcgagcgagccccgacggccgcggtgggtggaggggggaaagtgggggagagtggggcgggag

SEQ ID NO: 293461 - DNA, 122 bp, Homo sapiens
ggcccaggccgaggggagggggtcccctccggcagaaagttccagcaaggtgcacctggccgtaaaggcctcttcctccttggagtagttcttacatggccttcgccagaagttctgggttc

SEQ ID NO: 293462 - DNA, 122 bp, Homo sapiens
attcagaaaaccaagtcttctctatcatccttatcagccctttatgtccactgaattcatcgtagggcttggcttctgatggtgatgttctgatgctctgagaagttctttagaagtttgtg

SEQ ID NO: 293463 - DNA, 122 bp, Homo sapiens
accgggctggcttcctagcagatagggcgggaccgtcgggttgagtgacggccggtggcccgccctgggcgtgacgttgttctagtgttgttgccagcagctgcacgtggtcggctgagtcc

SEQ ID NO: 293464 - DNA, 122 bp, Homo sapiens
tgcacaggggcccccaccttcctctagactgccccccgccgggttccacacgaaagcccccggccacccccgcggagacccagcagccccagcccgcagcattacccagttgcgggcccgaa

SEQ ID NO: 293465 - DNA, 122 bp, Homo sapiens
ggggggggccgctccccccggtcgcccagtcgggtcgcgccggtcctttctcagggtgaccgcgttccttccgcccagagagggcaaagagtcccgctccctcgtgtgcatctcccgcccgc

SEQ ID NO: 293466 - DNA, 122 bp, Homo sapiens
agggcggcacccggaccgcggggcacgggaccggcagccgctccccgagcgccctcctcgcggaggccattatttccagcagtgccaaaagtctgagccttcttcggagggcagaggtcgag

SEQ ID NO: 293467 - DNA, 122 bp, Homo sapiens
atcaacaaacattgtgcttaggaccagtggcctttcctctcctgccaggctttcaaagtacggaaaagcaaacagaacagaacactcgaatttcagctcataggctggaagcaaatagactg

SEQ ID NO: 293468 - DNA, 122 bp, Homo sapiens
ggacatccaaagcagtgactctgccccggcccagcctcaggaagctgggtcctcacattccgtccaccccatctccgggctccaggtgccagaaattttccaccagcggccccgcgggattt

SEQ ID NO: 293469 - DNA, 122 bp, Homo sapiens
ccggcttgcgacccgggagcccacgcccgcagcagcaggaatgtggttttatttgggtggcgacttctgcggacccctcagtctcaagagagcgaggcgggaggactgaggggtctgtgttc

SEQ ID NO: 293470 - DNA, 122 bp, Homo sapiens
aggcaacttccgcaaatcactgcgtggagacgatgatcctgccagctcccttttggaaatcgtgaggatcagatcttggaccatgtataatatgatgcttctaatccaaaagaggaaaggca

SEQ ID NO: 293471 - DNA, 122 bp, Homo sapiens
cgccgggggcagccgggcgaagcggttcctgcgcaggaccaggacgcgcaggctgcccagcgccgaccccagcccctcgggtacctcctccaggccgttgttccccaggttcagtgcctcaa

SEQ ID NO: 293472 - DNA, 122 bp, Homo sapiens
ctgcagatccatggctgccctgggaactccaaagcacacacctacttcctccccagctcacgctgctgtattctgtgctgcctgaactgaagaaataaaatccagaatctgccccccaactt

SEQ ID NO: 293473 - DNA, 122 bp, Homo sapiens
tatttggctgaactgttttcctgtttaaacaacttgaacaccaaccaactagacaaacagcgctgcttgcaaaagagggcctacttcctccggcccccacccccatcccagcaaccccactc

SEQ ID NO: 293474 - DNA, 122 bp, Homo sapiens
ggagaggaggggctcaggtgctgtcaagggctccaaggaaggacacccagcagatggggccgggacagggagagaagtgtgaccctgaacagccaggctcctgcagctgcccatcttccaga

SEQ ID NO: 293475 - DNA, 122 bp, Homo sapiens
tgtgcaagggcttggatacctcagtgaacacaacaaaggcctctgttcttgcagcgttcacgttcacattctagagtgggagatagacagtaagcatgatgaataagtaaggtagacagtgt

SEQ ID NO: 293476 - DNA, 122 bp, Homo sapiens
ggaagggcgcatcattgtggcggattccaggaaccatcgggtacagatgtttgaatccaacggcagcttcctgtgcaagtttggtgctcaaggcagcggctttgggcagatggaccgccctt

SEQ ID NO: 293477 - DNA, 122 bp, Homo sapiens
ttaaagccacagagcctgttgtttacattgaattgtaggcagaattcctaaatgtgaaaacgatgaaagcagacttgcttggtggaagctgcgagtgaggggcctctctcggtgtttccctc

SEQ ID NO: 293478 - DNA, 122 bp, Homo sapiens
cagtcttgtctttgcctgagggtgagctaggaccctgggagcataagggaggggacttgccggagatcctagaagggaaaggaggcagcactgaaagaagaaacatttccttgattgatcat

SEQ ID NO: 293479 - DNA, 122 bp, Homo sapiens
aatgggcgctccccaaggagcaggtgggccgcgcggcacaatgtccgggctgtgggaacgcgctcgccctcattagcatcccggggcctgatgccgggagccccgcgcctcaatatgctgcc

SEQ ID NO: 293480 - DNA, 122 bp, Homo sapiens
atggagacagtactgacatttcatcttcccgaggcacgtcccctggctccgtgatgtggccgtacaacaagcctgccctttgttacggtgtgtgcacacatgtaagtgctctcgacaaatct

SEQ ID NO: 293481 - DNA, 122 bp, Homo sapiens
tagtgacctgggacaagaccagcagaactgcccagctgaccccagctctaatcgccggctcgccaagcaaaaaatgggttttttatttaagccactaaattttcaggggttttgttacactg

SEQ ID NO: 293482 - DNA, 122 bp, Homo sapiens
ccaggggctgagggttgcaggcggctgtggccttggccaggcatcaccaccaggtggcgccgcgcgcttccctggcgcccaacccggaggccgcgaggtcggggagcggatgcccgggggag

SEQ ID NO: 293483 - DNA, 122 bp, Homo sapiens
caggtgtaaactgctgagtgcagataccatgcagtgcaattatgactgaactgtacaactcgtattcccaaatttgcaatattgctgagaaatgctttcacaaacctctcaaattcctttaa

SEQ ID NO: 293484 - DNA, 122 bp, Homo sapiens
caaggctgccagcctttatgttctaaggaaacagaggagacgagggaagtatcttggtagcgtgtagtatttctgagtttctggttattaatcatgtaagtgagtgccagtatgtatcttag

SEQ ID NO: 293485 - DNA, 122 bp, Homo sapiens
tcacattggagagaaacctcatgcttgtcttctatgtgggaaggccttcagtctgtcttccgaccttagatgacatgagagaacacgcactggagaaaagccatatgaatgccatttatgtg

SEQ ID NO: 293486 - DNA, 122 bp, Homo sapiens
tccccatccgtctcgcgaccctaccagaaagtccactccagcttttccttcacctcggcacggctctgaaaggatcggtcccctccggcccgcacccacccccaagaggggccttcagcttt

SEQ ID NO: 293487 - DNA, 122 bp, Homo sapiens
gcgtcctagcgtttctggacagcaccggccaggaagtcaggaggcttggtgctgctcctgcgcctgccctcgccccaagtcctgggcttcgggatccccatggcaaccccaggtcccgctgg

SEQ ID NO: 293488 - DNA, 122 bp, Homo sapiens
gtgacagcgtctcagctccttaaggggtcacaggccctcccctatcactgggctctgtcacgcagccagctgcctccttctccctaggcagtcccaccaaacctcatgcgagtccttctgct

SEQ ID NO: 293489 - DNA, 122 bp, Homo sapiens
gcgagagtcctggtggatggcatctctttcccttctaaccatggccggggccctgggtgacgtcccttctaaccatggccggggccctgggtgacgtcccttctaactaggtccggggccct

SEQ ID NO: 293490 - DNA, 122 bp, Homo sapiens
cccacttccacgacaccggcaggggggagccatccgccaggcacaggaggcctggacagccgtgggcagcgtgcgctgttggaggacgcagggagagggaaggctggcccagggacgctgtg

SEQ ID NO: 293491 - DNA, 122 bp, Homo sapiens
gtacgcggtagagacggggaggtggcgcgaggcgggacatggtgagcgacccgaggggcgcgcggactgggctcgcggacggggctcgcggacgtagagcagtcgaggcgcggagggggagc

SEQ ID NO: 293492 - DNA, 122 bp, Homo sapiens
gtgagctcttagattagagcacgccaaatgacaaatctctcccatttttatggttctgtacgtagattctacttcgtatacctcagtatcattactatggaaacacaattccagttatttcc

SEQ ID NO: 293493 - DNA, 122 bp, Homo sapiens
ccacacagaatgtatacttctacgatggcagcactgagcgcgtggaaaccgaggagggtgcgtcctggtggtgtggtttaggaggatggcagggaatggctgagctctgggtggggctgggg

SEQ ID NO: 293494 - DNA, 122 bp, Homo sapiens
ttttgggttgtcttttctcccagctctcttctctgttatgtgtgccatttgcatgacaaacgagaccatcctctccaaaagctcacctgttcctgcagcctgcttcccacctcaagttttca

SEQ ID NO: 293495 - DNA, 122 bp, Homo sapiens
gggctataaagaaaagttctttcctgagctttgaatccccactgtcaggcttcaatggagcgcaaaaattcctaaatttggtgagaaatggcaacattaccagggaatgaacagaccaggcc

SEQ ID NO: 293496 - DNA, 122 bp, Homo sapiens
gtggatctgtgtaaccctcacattttacaagcagggacaatgtcaaactagcagccagcccgtctgccagtcagcagtattttttgttaagccccggtgatgcctggccttatctcgggcaa

SEQ ID NO: 293497 - DNA, 122 bp, Homo sapiens
atggccaaaagctcgggggtccagcaaaccacccaggaagattcccatttcttgttgggacggctttgctccttttcagcccatagcccagacagacctggaggctgagccctgaaccacag

SEQ ID NO: 293498 - DNA, 122 bp, Homo sapiens
cccacggaaaccctgcctgtactggggccgcagcgctgcccccacccatacgtaattacacggctcggtgtaattgcaaattcgaggtttacaaagcctccccctggaggccccacgtgagt

SEQ ID NO: 293499 - DNA, 122 bp, Homo sapiens
aaagagcatgagtgctctgtttttaaatcaagatgaatttaattttcagaaacagcatagcgattacacacttgggggccctgtgttcaaatctgagctctactacttactaactatatagt

SEQ ID NO: 293500 - DNA, 122 bp, Homo sapiens
agcttccttagctttgagcctctggtttctcgtttcctctttatgggtttaaatccataacggcagaaaaggatggccctctaactaccctccctctccgcgtgcgaacgactcggcgccgc

SEQ ID NO: 293501 - DNA, 122 bp, Homo sapiens
gaataattgtctccattccgcttcggcggtgtctgttgtgtccattgaacagaagcagaacgtgagtccgtatctgcccctcgccaccgccaccagcacctgggatttgactcacacttcaa

SEQ ID NO: 293502 - DNA, 122 bp, Homo sapiens
ggagtcttggtccaggagctgctagactggacacttctagcactggtctgagccaggagacgctgcgaaaagagggcaaacgtttctcctctcgcagttgccgcctcgcccctccacccccg

SEQ ID NO: 293503 - DNA, 122 bp, Homo sapiens
ccgtgctgcccagccacagcccagagagacagaaaggtggagactcacggcagggccgcacgcagggctgtgttgtccgcttcctgggacggtaccctgcgtccagcacactcacggccagg

SEQ ID NO: 293504 - DNA, 122 bp, Homo sapiens
tgcaggtcccatcaaaatgcaaaccctacctcctcgctttgaagcgactctccccgtactcgccccccagcctctaaactaatggcttagctaaccgattgcgacgagtgaaataccagaac

SEQ ID NO: 293505 - DNA, 122 bp, Homo sapiens
gggcgcgcacagcctcgcccggcgccgtgcagggtggctcctgaggcagccaggcccaagcgtgacctgccccgcacgcgtcctcagggccgccccagcctccagcccctgggggccggcgt

SEQ ID NO: 293506 - DNA, 122 bp, Homo sapiens
aaaccgttaggatcacaagggatggctgaagttcaaggaaaattagcttaatgcatctttcggagctgtcattagcattggaaagacaaaaaataaattgacagtggcccaaaaaaccctga

SEQ ID NO: 293507 - DNA, 122 bp, Homo sapiens
aacagcatataaggtacctcgactccggcggcagctaaaacccatctcacggactccatccggcctcttccgttgggatagtggagcttgggccttgctgccatgatagcttttcaggcttt

SEQ ID NO: 293508 - DNA, 122 bp, Homo sapiens
ttattctatggccaaaaggtaagatggccaaggcagcgatctgagcgtgatgtctggccccgcggggggcccaggaggcccaagttgggacagctccggagctaccccggtgcccctcagct

SEQ ID NO: 293509 - DNA, 122 bp, Homo sapiens
ctgctttcctccctcactcattctcctctctgactctggaggtctggtctgcagtcttgacggctcccaggccacagaaagtccaccagagaacctagaaggaagcaccaaggtggcagaac

SEQ ID NO: 293510 - DNA, 122 bp, Homo sapiens
ctagaatctaagctctgtgaggacagagccctgcttccttgtttttagagctatgttctccgatacggtgcctgatgcacagaaggcattcaataagtatttattgaatgaattaatttgtc

SEQ ID NO: 293511 - DNA, 122 bp, Homo sapiens
ttcttgacacaagtaaaatagttgtttgtaatcacctcttagtagaaggaaatttgcctgcgtcgtgttttgtagtattttaagactgttaaccgtgcaggccacactttctagtctcagag

SEQ ID NO: 293512 - DNA, 122 bp, Homo sapiens
aatgcaagaggcagggacgtctcccatgctccacagcaccctcacgtggggtggcgccttcgcaagtggactcagcggccccactaacccccgaaatggggtcgcgccttcggaaggggacc

SEQ ID NO: 293513 - DNA, 122 bp, Homo sapiens
agggagggatttagagttagcctttgattggtcagcttgactggcgacctttcccctctgcgacagtttcccgaggtacctagtgtctgagcggcacagacgagatctcgatcgaaggcgag

SEQ ID NO: 293514 - DNA, 122 bp, Homo sapiens
caatctcctctcctcgcatcccccaacccctcgtcgacgtccccacccccacctccaccccgcccagccccgcccctggcccgcaccctcaacctccgtccagagcggtcggttggccagcg

SEQ ID NO: 293515 - DNA, 122 bp, Homo sapiens
gggcgggaccagagagtggatggcagaggtgggctgtagagccaaagtggggtgggagcgcgaagatggcagctgctgaggaggagccgaagcccaaaaagctgaaggtggaggcgccgcaa

SEQ ID NO: 293516 - DNA, 122 bp, Homo sapiens
agccgccctcagcacagggtctgtgagtttcatttcttcgcggcgcggggcggggctgggcgcggggtgaaagaggcgaagcgagagcggaggccgcactccagcactgcgcagggaccggt

SEQ ID NO: 293517 - DNA, 122 bp, Homo sapiens
atgggggcttcaaatatcagcccccagtcagaagctgcaaccccagtgctctgctcagagcggctgtgatccagctccgacacccacggggtgaagtcatggggattaactgacttaactgt

SEQ ID NO: 293518 - DNA, 122 bp, Homo sapiens
aggcagatgcggagaggcgccgctggattgcgagcaggcccaggtgcggggccaggtgggcgttgtcgcagccgggaacgcccagccgctccagctgcccacaggacaaagcccagggttcc

SEQ ID NO: 293519 - DNA, 122 bp, Homo sapiens
tcattttgggacaatgtggaggtcaggggcttgatgccatttaaaactggcagcatcgatcgggggtggaaatagccctttacttccctgctttccagtgctggaatcagactgctaactgc

SEQ ID NO: 293520 - DNA, 122 bp, Homo sapiens
ccccaggtaactcttgagtgtgtcgctgatgccatcaccgcagcgctctgaccgccccctcggtccagcatttctcaggctcaacgagttcatggccaagattcctaatcttttgttctgtt

SEQ ID NO: 293521 - DNA, 122 bp, Homo sapiens
gcctcagcctggagtcggctgatgttccggttcatctcggagatctcagtctttgtgcgccgcaggtcattcccgtgcttcccaaccagcgtctgcagttcctcatacttgatctggtacat

SEQ ID NO: 293522 - DNA, 122 bp, Homo sapiens
acggcgagttgggctcagcataaggatggtgtaaagtacaaagacccaaacagatgccgtcgtgcctcccgtctctctgggcccaggctggtacagctattgttttgaacttccatagaatt

SEQ ID NO: 293523 - DNA, 122 bp, Homo sapiens
tgacaaatttctgaacctctttcaccccgcgccgaatctgcttctgcttcaccgctgcaacgacagaagagtcggtcgggggcctcgctcagccacccgcgcacccatcccacccgcgcacc

SEQ ID NO: 293524 - DNA, 122 bp, Homo sapiens
gcctttgtcccggtgctgagccgccgcgccgggggaggggactggactgaccccgtcgcccgttcactgattgacgtatcgattcattccagcactctcgctccggcagccgccatccaccg

SEQ ID NO: 293525 - DNA, 122 bp, Homo sapiens
gagtgctgagtgaagcaaaggaaactggctggagctgagccaggttgccagtcttggacgcggctccatcttttattcagagaatgacctcatccttggtcctggttctttaaaagaaagtg

SEQ ID NO: 293526 - DNA, 122 bp, Homo sapiens
agggaaaatcctggctctgaaggaggtgcaattttgtaaagaggtaacaagcttggggggcggggaggagagacagtgaaaagacagctgttaaaactacttatgggagacaaatctgattt

SEQ ID NO: 293527 - DNA, 122 bp, Homo sapiens
ctctactcatagccaatttggatttcctgaagcttaagtgtcagggcgcctgtcagggcccgaggaacgtgtttacagagctgtatatttttgggtaaaatttgtgaaagcaagatatttca

SEQ ID NO: 293528 - DNA, 122 bp, Homo sapiens
atctttgactgagtacagatacttgttcatttggtcaagaactccctgataatagaccatcgcagagtcatagtttcccagcaatgcatattcacgagccaattttacattctcactaatca

SEQ ID NO: 293529 - DNA, 122 bp, Homo sapiens
tccatagcaccaactctgcccattcacacacacagtcagccctccctcccgagtccaccgcgggcagagggccagccaccatgcctcccatagccgccatccctgggaaggagccctgaccc

SEQ ID NO: 293530 - DNA, 122 bp, Homo sapiens
aaagcctcctgttagagatgaggatgccccgcccttcggccccagagcaaaggatttccccgcttccggcgtggcccaaagaatcaagacccggtcagcaatggagcccagaacctctggcc

SEQ ID NO: 293531 - DNA, 122 bp, Homo sapiens
agagccggcgcggcccgggtccggggtgctggttgctgctggcccaggggagtgcttctccgggtctgcgcaggtggctggacacgccgcgactgctgcgcgcgggacggcctcctggcctc

SEQ ID NO: 293532 - DNA, 122 bp, Homo sapiens
gaacggcaagagggagggaaatagaagggaggtgaggggcgagcgggaagagcggcggcgcgccagcggctggagagagaaaaagtttttgcaaaagggaaaaaaaaagtttgcgcttctcg

SEQ ID NO: 293533 - DNA, 122 bp, Homo sapiens
tcctttggatcaagccctcgcgtcttccgggcaggcggaagggaggcgtctgcccagtgtcgccaggcttctcacgattttctggttgggagcatctaagcctgagacaaacgcatggagag

SEQ ID NO: 293534 - DNA, 122 bp, Homo sapiens
ttgtttgcataatgatttttcttcgtgggacttaaagtactatggagttggatcccattccgttgaatgcatagatagctctctggtggtggttggaattgttcagtgcctaggatggttag

SEQ ID NO: 293535 - DNA, 122 bp, Homo sapiens
tccgtggcttcccgggatcaagtatcgcacctaaaaggagcgcagagagcgtgcaactggcgggagaggcgtgaccagagtggaaccaaaagtgggtggcctgggaacctaacgcgtgacca

SEQ ID NO: 293536 - DNA, 122 bp, Homo sapiens
ttaagatctgggccacaaatacatatactttaagatttcccagctgcgcgtgatggctcacgcctgtaatcccagcactttgggaagccaaggcgggcggatcacttgaggtcaggagttta

SEQ ID NO: 293537 - DNA, 122 bp, Homo sapiens
ggttcaaggccgccttcacgcccacgattccttgttttttgggcagaggtcaaggctcaacggagagggagcccgggaccgagttgtggtgggagtttgctcctaacacccgcgaaatccta

SEQ ID NO: 293538 - DNA, 122 bp, Homo sapiens
tgtgattttccagcctatcggggaagagacctcgatagtatagaaaaaccttaccgctcacgggagttcacacagcaataaggatgaaaagatctttaatacttggagaacgagtaaggtgt

SEQ ID NO: 293539 - DNA, 122 bp, Homo sapiens
tgcgtggcgctggcgacccgtggctgctggcgtgggcggggtaccggttggtaggagagacggaccgttgttacataaccattaaactgaaataaaccggaccaaggtggaacagaatcaag

SEQ ID NO: 293540 - DNA, 122 bp, Homo sapiens
ctgtccgtgtcctagggacaggacagacacagtcacctcctgtctgtcagggcatgaggacgcagtcatcacctcacattccccaaagccctgccacacgtggacggtacgtgacttgatcc

SEQ ID NO: 293541 - DNA, 122 bp, Homo sapiens
gagagagagccccatgtagcagacgttattcttggtgggcggtcagtccctaagtggaggcgtttggtgccaggacggcctcgtgctggcctgttcagaccctggctctgcggctttctggc

SEQ ID NO: 293542 - DNA, 122 bp, Homo sapiens
gggagggccaggggcttaggaaggtcgggggcctgggggtccacccgggaccggagattgcggatgaggtcagcgctgccccccccaacacccttccctgctgcataccctgtctgaagtaa

SEQ ID NO: 293543 - DNA, 122 bp, Homo sapiens
gacccagaacgcaggatctcggtaaaggatgatgcctgtgcaaacggcgcggcacccacacggaaggtggcagctaggccgttgaggcaactgtggataagctattagttttgctggtttct

SEQ ID NO: 293544 - DNA, 122 bp, Homo sapiens
ggtggtgcttaaaggggcaggaactaccgaggtgaggacaaccgctcaggagagcagtcgcgaaggatccactgggggagaggatagcgggtggcgtctcctaggggccagaaccaggaagg

SEQ ID NO: 293545 - DNA, 122 bp, Homo sapiens
cagcaggcgcacggccgtctggatctccctggaggtgatggtcgagcgcttgtcataatgcgccaggcgggaagcctcacaggcaatgcgctcaaaaatgtcactaacaaaagaattcatga

SEQ ID NO: 293546 - DNA, 122 bp, Homo sapiens
cacaggcagtgctatggccttttttttttttttctttttccaataaaagaacttgcccagcgtgaagctctgtgatgctttctctgccccgtgacgatggagggtcagttctatgctccagg

SEQ ID NO: 293547 - DNA, 122 bp, Homo sapiens
ctagaaccttgtgtttgaattagaaggcagcagaacataagactgaaaaggtatttcaggcgtcaaggtgtgggagtaccacaaaagcctaggtaattagttaatattttatcctacatgta

SEQ ID NO: 293548 - DNA, 122 bp, Homo sapiens
gcaggagctgcagctctgccagcttgggccgagcctagagacaccggcctggctggtccacgccagccgcaggtgggaagggcctgggatggggggtgagggtctctcggctggggctgaag

SEQ ID NO: 293549 - DNA, 122 bp, Homo sapiens
gagagactaggtcactcattaacccccattctgttgcagattggaagggtttgaggcatccgacatttccacctgccatgggaatgctgcttaatcccaccctgtggtttggaatggtgaga

SEQ ID NO: 293550 - DNA, 122 bp, Homo sapiens
gctggggcacggggcggccgggtgagctggccggcgctcgctctctccattcagtgagcacggcagacaccggagacgcggggcccacccctccggcccccccccgaccaagaaacgccaac

SEQ ID NO: 293551 - DNA, 122 bp, Homo sapiens
aggaaagggaccggcacggaggcgggctctgcagttttcggacacgccaggcttcaagtccggcctcggtgttcacaagctctgttcaagctgcttggtctctccaaacttcagtttggtcg

SEQ ID NO: 293552 - DNA, 122 bp, Homo sapiens
agctcagctctggccctcgatctctatttcagccccctccaggttccctccaggccctagcgggcttaaatcgctccccgggctcagtgagacacaagcatgtgacctaaagtctaaaaagc

SEQ ID NO: 293553 - DNA, 122 bp, Homo sapiens
gcgaatcggcacctgggcagcaagcgactagcttgcaggttcaggtggaacgcatagacgcgctcttccaacctcctcccctctcgcgccactcagctaagggccacgtctacgctagcacc

SEQ ID NO: 293554 - DNA, 122 bp, Homo sapiens
acaagatttatcagttggcctgataacatttagctcattgtaatttgaaattagttatttcgggatctctacagctgtaaagtaatatgaaaatttctggttgctatactcatttctaattg

SEQ ID NO: 293555 - DNA, 122 bp, Homo sapiens
tctcccgctgctgccgctgcggcaggtcccaatattagcaacctccgcagagcggtggtgcgtgtgccgggagcctcctaccctcgccttcccagccccgcccggaacgaggccgcggcggc

SEQ ID NO: 293556 - DNA, 122 bp, Homo sapiens
acgcgccacctgggcgctccaagaagaggccgaagtttgccgcggccgtgagttggagctcgcgccgggccgctgcgccgggagctccgggggcttccctcgcttcccggtattgtttgcaa

SEQ ID NO: 293557 - DNA, 122 bp, Homo sapiens
tgaaactgcacatcgtaatatacacattcagagcgggctattggctaaatgaaggcaatgcgtgtggaagtctgatttgccaccttcagggcaggcgtcttatatcctaattcagaaagatg

SEQ ID NO: 293558 - DNA, 122 bp, Homo sapiens
catcccagacatatgcagaagaaagcccaaaccggctgtgtgagacaggaacaattaacacggtaacagatccgataatgcagaccatcaggcctaaagaacacggagggactgtgttctac

SEQ ID NO: 293559 - DNA, 122 bp, Homo sapiens
tgcgagaagaggttcaactcttccctccactgcctcctcatagaggaaggaccgggggctcgcacccaataatatacagtgataggaagaactcctgtgatatcagaagaatcaactccaga

SEQ ID NO: 293560 - DNA, 122 bp, Homo sapiens
gcccagaccccgctggagggtggacagagcgggagggtggactgagcctctcggggacagcgaccctgtctttgttccctgaaatagcagggagtcctgctgattattgactggtgagacag

SEQ ID NO: 293561 - DNA, 122 bp, Homo sapiens
tgcccaggagagaagggctgtggcctccttcggcatccctcttccccaccagcccacgcacgcccacttcaccgcctgctccaaggtccgaacccccgaatccatgactcatgatttctctt

SEQ ID NO: 293562 - DNA, 122 bp, Homo sapiens
caaagtcgctgagtcctcgcggctcggcaggggctttgtctaggcccgacaggattggaccgagagacccggcggccagcgggttcagggctgggaaaggccgccgctgccatcaggtctcc

SEQ ID NO: 293563 - DNA, 122 bp, Homo sapiens
cctattctagataagagcaacacgagtcttcggagaggttaagcgacttcctcagggtctcgcagtcagccggtagcagagaccgggtgtacagcacccgcatgttaggaccaaaagccgga

SEQ ID NO: 293564 - DNA, 122 bp, Homo sapiens
tcaatcggttgcctcaacatatcaagaaacctggcattgtatatggccctcaaaagatgacgccacccggtccaccacggttcaacgaggactaagacatctgccctcaaccatcatggcgg

SEQ ID NO: 293565 - DNA, 122 bp, Homo sapiens
ctgggaagaccgccagcaggcaggtgagcacgaagagcagcattgctggtgggtcccgagcgccgcaccactcaggccgacttctcctgtgcaatgctgaaaaacaataatcacaaggagat

SEQ ID NO: 293566 - DNA, 122 bp, Homo sapiens
gaggcggagacgtggttggcggggactgtgcgccctgggaggggtcggagtcggcgggggcggagccgagcgggcggggagggtgctgggtcgcgcctggcctggggccgaggcggcgcgcg

SEQ ID NO: 293567 - DNA, 122 bp, Homo sapiens
gccagagacccaggagggactccgagaagccggccccagcacctggaggtttctttcgcccgccggccgcatccggggcgttctacttcacccggtggtccagtggcgcctcctgacagcac

SEQ ID NO: 293568 - DNA, 122 bp, Homo sapiens
gcgtgatttttccagcactcttgcacttcgtggggcctgctcctgactgtgaggagagttcgaagggaggggaacaggaagagagggcaggaacacaagagcttgtttttttatttttgaca

SEQ ID NO: 293569 - DNA, 122 bp, Homo sapiens
cttgtattttaaacaaccaaaaagaattgtaagggtggcttgctgccaggcttgcactgccgttcctgggggtgtgcatcttcgggaaaggtggtggcggggcgtccactaggtttcctgtc

SEQ ID NO: 293570 - DNA, 122 bp, Homo sapiens
acgctccaccccaggtggagaagaggcggctggcaggagtcctttctccgggggcccccccgggcacttcacagctcccccgcacgctagagctgcacgttagagctgggccaccggcctcg

SEQ ID NO: 293571 - DNA, 122 bp, Homo sapiens
actccgcgcgtcacgggctccgccccgggaccgcctccgggaccgccctttcccccgccccgctgccagtcacccccgcctgctctgcccctccgcgaaggatcccagagagcccggcgcca

SEQ ID NO: 293572 - DNA, 122 bp, Homo sapiens
gaggaggtctggcgagcaccatctagggctgaagaactaggcagtggctccagcgcggggcggtgggggggacaagtgagccagggcaagaagaatggatttggccctagagtacgggttct

SEQ ID NO: 293573 - DNA, 122 bp, Homo sapiens
atgggtggaatacagtatttctcttttgtgtctggcttttttcattttgccccatgtctacgagattcatctatgctcttcctatatgtcagtaatttattccctttcattgctgagtagta

SEQ ID NO: 293574 - DNA, 122 bp, Homo sapiens
atgctttcatttttttggatgagaaattcaaagcttagagaggttaaagatttcacccagcgtcacattgttaataaataagatgacagtgttttgagtgaaaattttaaattgagtatttt

SEQ ID NO: 293575 - DNA, 122 bp, Homo sapiens
aatgctcatcagtgtttctcaaaaagagacagccagacattatatacaaacctccacccacgaaagattctcttaacaaaaaaaaccctgaacctgaatcaaatcaagctcctataactact

SEQ ID NO: 293576 - DNA, 122 bp, Homo sapiens
ccacaaatgaatgaaaggtctcctttttcacttccacttatttgcgggatccaggcctagcgtcgctcttttgcccttagctgcagatctgaagtggggctgcccgaccccaattcccggac

SEQ ID NO: 293577 - DNA, 122 bp, Homo sapiens
gcggcgggaacgcggccgtgagggtgtggggtgtaggtccgccaggcctgcaacggctgccgagggtcgtgggatgcgctcgccgcgtccctgctcaggcggagggagcccggcccgccgcc

SEQ ID NO: 293578 - DNA, 122 bp, Homo sapiens
aaggatgggtcagggttagacctgaagaggcactctggccacagactggcacagcccatgcgttgagctgtgggacaagtcttgggaccaagctgtccagcctccttggctccaccagcaga

SEQ ID NO: 293579 - DNA, 122 bp, Homo sapiens
agagcctggctataaccaagcagtttcccagggacaccaacacccacagacagggcacctcgactccagacaccatgtgcctcttgcttcccggattcatggaaacacagagaccagggatg

SEQ ID NO: 293580 - DNA, 122 bp, Homo sapiens
aactttaaggcgatctgttccccctttaagttaaaaaaggatgatgctgcttccttgtggcgaaggctgtcaggaacccactgatcaataaaagtaaactggcgcctccacggcttgattga

SEQ ID NO: 293581 - DNA, 122 bp, Homo sapiens
cccgacattgaagcctccctgtcataattggcaattttgtcatatttattcacaacagatcgggctgtcaggagcttgtgggggctctccggaggcccgccgtgaaatcggtttgaaatggc

SEQ ID NO: 293582 - DNA, 122 bp, Homo sapiens
gtacttgggagtttctgggggcagtggcccacagtggcccccagcccaggcagggcccaccgcaccagccaccatggatgccgccgctgcagctggtgttccttatgtggtactggaggctt

SEQ ID NO: 293583 - DNA, 122 bp, Homo sapiens
gagggacatccccgggaaagccatgttgcgactcctggtggggagggcaacaggagactccggagaagacgttgcgcttctttggaaacttgtggaggccctggtgggggcacactggagcc

SEQ ID NO: 293584 - DNA, 122 bp, Homo sapiens
tcgaatcaacacggccattaaggacaaaaacgggcaggacacaaaagcaagcctggatggcgcaccctacaaacgagttctgaaacaaagcgagtgccagacgcgcgtgggaaagacgcgcg

SEQ ID NO: 293585 - DNA, 122 bp, Homo sapiens
tgcgatccctccccaggaaagaagcagggctatttttgctccaaaagtatccatcctgcacgccctcttcagtgcttggcacgtggcgaataaaccaatcaggatgaaaggagccaacccaa

SEQ ID NO: 293586 - DNA, 122 bp, Homo sapiens
gctcatttaaagaggacgtaaggaaaagcaaccaaaaaggtgggaatagagtttaaggcgcgttcgtggtgattcagacctagagtggggagcaagccctctctctggacagccctcagcgg

SEQ ID NO: 293587 - DNA, 122 bp, Homo sapiens
ccgccgaagctggaattcgtcggctagtagttctcgccggcaactagaggaacctgttggcgtggcccagaaggcttagcgggattgcacgaggttagttgctaagcaaggtggtctttggt

SEQ ID NO: 293588 - DNA, 122 bp, Homo sapiens
acaaaattgcagttagatgggaggaatactttcaggagatctattgtataacatggtgatcgtagttaataatgtgttatatttgacatttgctaagagagtagattttaagtgttcttacc

SEQ ID NO: 293589 - DNA, 122 bp, Homo sapiens
ggagcgaaaattgggccgcctccacgtccagccattctccagcggccgggtttttcaaaacgctgcgcccagcgtctcgcgaggaccctccccccgggtcccccagctctgccgcggccgcg

SEQ ID NO: 293590 - DNA, 122 bp, Homo sapiens
ccaagcgtgactgcccgaggcccctcctgccgcggcgaggaagctccataaaagccctgtcgcgacccgctctctgcaccccatccgctggctctcacccctcggagacgctcgcccgacag

SEQ ID NO: 293591 - DNA, 122 bp, Homo sapiens
caaatcattgtgaaacaattacatggagcagccatgtgatgaggtgtgtagggggcacgccgagtgtagtaagttaatgtttccagcagggtgcggggaattgggactaaagagttaaattc

SEQ ID NO: 293592 - DNA, 122 bp, Homo sapiens
gcagtgtccaagaagctgcgggtgggcaggcggcctcggaacctgccttgctggcttcctcgaattggtagcgatcagttctagccgccgtgcccgcccgaatttgttcccaggcctctgct

SEQ ID NO: 293593 - DNA, 122 bp, Homo sapiens
aggaaaacacagaggcgcacattagcgtgcacgaaatcgcccgagggagctgagagctggcgaggtcacgagtgccgggctccgggcggggggtggggcagggcggcggggcaaggccgggg

SEQ ID NO: 293594 - DNA, 122 bp, Homo sapiens
ttgagtgctatttggtctcaaaaatccagatacataagccagtttgtcccctgagcccctcggcctccctttagagaactttaacctatcttctcttgactccaaggatcagacaagggtgc

SEQ ID NO: 293595 - DNA, 122 bp, Homo sapiens
tgacaggagcctgcgtttgatggccccaggcttgagaagcagttctagacacagctgagccgggatccagggttcattctgtgctgtgggaagtcgaaggaaggcccagcaggggtgtgagg

SEQ ID NO: 293596 - DNA, 122 bp, Homo sapiens
gggaactggcgcgcggcttggtttccattagagacgcaaagtttctgctccgggaggaggcggcggcgccgcgggctcgtcgcctgggggagcagaagcgggtgggaggtgcgggtggcctt

SEQ ID NO: 293597 - DNA, 122 bp, Homo sapiens
ccatagtgatgacatcagcctgagttccaactcctggaataaagaactgtgaccatacagcgacttgtgggcagttaggtctcagcataacactccttgtcccctcatgtcactgatttgga

SEQ ID NO: 293598 - DNA, 122 bp, Homo sapiens
gagccagggccccggcgttgtgctttcccacccttctagagtttctggagtccctggagccggacctgcccgccctgagagccatggggctccacctgtgggctgcaggcccaggaacccac

SEQ ID NO: 293599 - DNA, 122 bp, Homo sapiens
ggtcttgaagaaatctaaatcttttgatcatagagaaaatgaaagtgagcagagagtttacgtagtttgtcctaggtcgtgcaattcatctatggcacagtttagactggaacccagccttc

SEQ ID NO: 293600 - DNA, 122 bp, Homo sapiens
ctccagccgcactcgcagggcaaggcacacgcccccggctcctgctgccatgcgcctctgcgggggaccctttccaaataaattgcaagctttgaaagtggccctgtggaggcactaggctg

SEQ ID NO: 293601 - DNA, 122 bp, Homo sapiens
cagagccatggggaccttttaggcaactcaaattccttcaattgtttgcagtggtcctctcgaggggatgtaatgagttgacatgcaccagaacagatagaatgcactgccagctggtagtt

SEQ ID NO: 293602 - DNA, 122 bp, Homo sapiens
gttttctttccagaggaacatagcaattttatagcaaaacaccctattggcagttagcatcgcagttaggagcccagggacggagctggtggcatgtgtccagatgttggatctgtctattc

SEQ ID NO: 293603 - DNA, 122 bp, Homo sapiens
gaacttgtgcaatactgctcagaaaaacaaataataaaatgattacaatgaaaacatgttcgtgcattgtggggtacatggcagttgtctggaaatgttattttcaatgaacaaaacatatt

SEQ ID NO: 293604 - DNA, 122 bp, Homo sapiens
tacggcacgacccgcgcgcgactgcgcgcgcgtctctcttaaccgtggccacgcccgcgccggtggacgacgtaacagaggcctggcctacgacgtatcccattcattcattcacgcgttcg

SEQ ID NO: 293605 - DNA, 122 bp, Homo sapiens
tggtttcaggatctcgcagttaccaaaatgcaggatgctcaagtcccatatataaaatggcgtggtatttgcatacaacctacacacatgcttacatatccttttttaaaattacttatttt

SEQ ID NO: 293606 - DNA, 122 bp, Homo sapiens
gccgcggccggcgggctgggctggggtcggggcgggggcggtgcggcgggtgcggggctgcggagggggcgtggcggccgcccgcgggcggagagggggcggggcggcggcaaggcgcgcgg

SEQ ID NO: 293607 - DNA, 122 bp, Homo sapiens
agcctatggatgttttagtagcctaggttctgggatcgctgaggtccaaagaagtattcacgtgcctcgctcctgttttcctgaagcttgtgggggtgggaaacccgggatttggggatgag

SEQ ID NO: 293608 - DNA, 122 bp, Homo sapiens
cgcccagagacagagcgatatcctcccagataggccttctggaagattcactgccctttccgaactgtctggcctgttggccatgctggcctcgaggctcagcagttccaggcctcagcctg

SEQ ID NO: 293609 - DNA, 122 bp, Homo sapiens
acgtcccgggtcccccccgcgagtctccggctccaagatccaccccgaggctgcgggacccgccagatcctcgacccgggagaggcccaggcgcctttaccaggtttcattttccgtttagg

SEQ ID NO: 293610 - DNA, 122 bp, Homo sapiens
cttcacggttaagtctccccaggctccattcaaacaatttgatggctgaagcctaagttacgcagtcattttttcctggcctatctaagctacattagtaagactgaaacctcccctaagat

SEQ ID NO: 293611 - DNA, 122 bp, Homo sapiens
gggaacacactggatacatcagttggtgagccagggaaattagcaggaacgagctcatttcgatagcaatgagctgagtctccctccagctgccagacatttacgaggctggctgggtgccg

SEQ ID NO: 293612 - DNA, 122 bp, Homo sapiens
gaggccggttgccggagcctggagcctgcgtcttttgtctgccttgctcctgcgaaggagcgggagacggctgcgcgccccaagcgggccaatcaggagacagccggcgccggccggtaagg

SEQ ID NO: 293613 - DNA, 122 bp, Homo sapiens
cagagtgaaacagggtctcttggggctgccctgctgtctcccaggatgaggagctgtctacgtgctggggacagacaccacatgctgtggcttggggttattagattcagtaaacttccatg

SEQ ID NO: 293614 - DNA, 122 bp, Homo sapiens
gcggttccccctggcggctcccaggagccacaagtgggcgcagcgggcgcggtcccaagccggggcacatcggacacacccacccgcggccacactcacgcgccccccaccgataacacaca

SEQ ID NO: 293615 - DNA, 122 bp, Homo sapiens
ttcctgggggccagagggcctctcggggaggaacagaaaaaaaccagccaggagtgctaccgaccagcctcagccagaatgctgtcagaacaaggccccaaacatggcctggcctcagtgat

SEQ ID NO: 293616 - DNA, 122 bp, Homo sapiens
agcaaagacaatcgccggatgtctgagtaccccctctccttccaaaacaaacagaaaacccgtccacagcatctgtcgaccaaaagaagaaccgccagagtccagggaagcagcttgccggg

SEQ ID NO: 293617 - DNA, 122 bp, Homo sapiens
tagcagctttctaggtagaccggaggaaaaaaaagtgttcctaagcagagaaatgggatccgtaaaggcccattggagtgaacatgcatagtatactcagggaatcagttgattgagtaaat

SEQ ID NO: 293618 - DNA, 122 bp, Homo sapiens
cgcccaccgtcaggtgcctctgggtggccaggcggctgatgagtctttctgggttttctacggggagaagatgctcctggttggttctgaacgagaaccctgtgactcgggacagagcgggg

SEQ ID NO: 293619 - DNA, 122 bp, Homo sapiens
gaagcccaccgccccgtgagcggcgccggccccactgggctccggggtgatgacctgacgcgcgtggaaacccagacccgcgccccagaaacagtattccacttgggcttgcctccccgccc

SEQ ID NO: 293620 - DNA, 122 bp, Homo sapiens
gggtctagtctcagctgagcagcagcccgcaagaaccggcggatctatcctatcagaagtcggaagtcatctatcccatcagaagagtgaaagccgaccaccccctaatccgcctgggagaa

SEQ ID NO: 293621 - DNA, 122 bp, Homo sapiens
gggggcggggagggaggggagggagagaggaagaaggggtgagagggagaaacctgccgccgctcgccgcctctttgtctgctccgggacttggaacaaaagggggaactctgatgaactct

SEQ ID NO: 293622 - DNA, 122 bp, Homo sapiens
gcaggcggactcgaggagcaaacggccagtgagaacgattcaagggactcacccactcctcgccgtagcttgaccgtgagtctcagctgccgctgctgccgggaggtgccggccccacgcgg

SEQ ID NO: 293623 - DNA, 122 bp, Homo sapiens
accgctgagctccacctttagtccctgcctcagggctgtgtgcagtatcctgaaaaaagccggtctcttctgttggctgccccccaccccccccccaagcctgagacgtgctgagacccaaa

SEQ ID NO: 293624 - DNA, 122 bp, Homo sapiens
acagtcatgggcagctacacacgggctgggcagccactgtgccaacgactagggtgaccgcggtggaccagacagatccagtcttctggtccccaggggacagacaggtacgctagaatcac

SEQ ID NO: 293625 - DNA, 122 bp, Homo sapiens
actaccgcccacctgaggctcttccgcttcctctttccccccccaggctccgccccccagcgtcccgtggccatgacgaccgctcagagggactccctgttgtggaagctcgcggggttgct

SEQ ID NO: 293626 - DNA, 122 bp, Homo sapiens
tgacctcgtgattctcccgcctcagcctcccaaagtgctaggattacaggcgtgagccaccgcgcccggctggttatttcttgattgtatgctaaacatgcttccgcttttttttttttttt

SEQ ID NO: 293627 - DNA, 122 bp, Homo sapiens
gaaaacttgtcaatagtggcaaaaagcaaatctgtgtttccttgggaggaggtgggacagcggggtgcaggagagatgacaagagggttcaaggacacctcttcagtgatggatgggctcac

SEQ ID NO: 293628 - DNA, 122 bp, Homo sapiens
aataatacacttatattattgaaacttcaagcttatatttcagggttaaaacaggcaaggcggtgatcttttaatctaatttaggaaattaggtaaggcagagtttcatattttaacaaaat

SEQ ID NO: 293629 - DNA, 122 bp, Homo sapiens
agccttgggtatttaggaactagacagggtcttgcagcaaagtcaccctctctcctagaacgggtgctgttggctcccacagccccctctgtcctgagagaccctatgcctctgtggcagga

SEQ ID NO: 293630 - DNA, 122 bp, Homo sapiens
gtggcgcccgagccggacggctgccccgtgtgcgtttggcggcagcacagccgcgagctgcgcctagagagcatcaagtcgcagatcttgagcaaactgcggctcaaggaggcgcccaacat

SEQ ID NO: 293631 - DNA, 122 bp, Homo sapiens
gcccgggatcgagctaccgcggccgagcgcgccggccaccgcctgcaccgcccttccgcccgccctccggacggccgcagccctgcgggtctccgctccagacccacccccgccccaccccg

SEQ ID NO: 293632 - DNA, 122 bp, Homo sapiens
cctgggatccttggctctgagtagcacggtggaaaagtgaggtaatccaggctctgggcccgttttcctaggagcccagggcgcttcacctgtctgcagtcagcccctttcttggacgtctc

SEQ ID NO: 293633 - DNA, 122 bp, Homo sapiens
tagccagaggtgccaatctctgctctcccttggcacatcaggtttatcaatagcttccaacgaatagtgacctgttgctatatcccagcttcttcaaggaataatgtcttatgatttctgtc

SEQ ID NO: 293634 - DNA, 122 bp, Homo sapiens
ccacggaggatgtgcaaagtacaacacgtgaccccggagacggaagctcttctctacctccgtaaagatgatctctgatgaacagacatgatcatgcctggagaacagggatggacagtccc

SEQ ID NO: 293635 - DNA, 122 bp, Homo sapiens
ggttgtgcttcttccgtgaactcatacattacaaggtcagcactcgatgccgggttacagcgtctgagattcattcacgaaatgacaggatgctgatttggttgcagatgtggtctgagtct

SEQ ID NO: 293636 - DNA, 122 bp, Homo sapiens
atcttccgaactcagcaactgccagtagaacgcaccccggtcagggcgggctcgcgggcgcggtcccacccccaggcccctccgccgcggaggttctccagcgccgcccgtactcccgcctt

SEQ ID NO: 293637 - DNA, 122 bp, Homo sapiens
aacgctaggggaattgcaagtaggtggtaaaaattgggacaagaagtgtgggactaatagcggagaataaacacactttctgaaaccgcttttcctgatatctttgggctcgccatgttgct

SEQ ID NO: 293638 - DNA, 122 bp, Homo sapiens
tctgattgaacattcagaagatgaaacctgtctgagctgagagtgatcagtcatccctgccgccccgtcactgtcactcctttctgaatcataataaaactttgcaaaactctttggttcac

SEQ ID NO: 293639 - DNA, 122 bp, Homo sapiens
ccgcgtcgtgattctggaaatacacgaagccgaatccacgcttcttgccggactgcttgtcggcaataatctcggccttttccacggtgccaaactgcgagaagtgctcgatcaggtcgccc

SEQ ID NO: 293640 - DNA, 122 bp, Homo sapiens
gccccctcccgggcaggcgcaccacacccgaccccctgccgcgcaggggcacccacaccccgcccccgcacgcaggcacaaacccccacaacacgcacacccccgcgcgcaggcgcaccaca

SEQ ID NO: 293641 - DNA, 122 bp, Homo sapiens
ttccttcctgccagtcatgcaatcggccgcctccatcggcgccgcctgtatgcgcccctccgctgggccctctgggttagtttcaccttgatagggaggcaggaagacctggctgctggtgg

SEQ ID NO: 293642 - DNA, 122 bp, Homo sapiens
ctaccctccggttccaggtatgcaggcttcctcccttctgacggttcctgctgctggagtcgtccttcctgaaaccctgcctttgcttagcctcattcccatctctcagtcccatcctgcag

SEQ ID NO: 293643 - DNA, 122 bp, Homo sapiens
tgatgctgtccctctggggctacctatggggcaggaacatcaaagaggcccaagactggacggaatgcccttcttatctttctaagaaatggtgatctgggggctttggtacagcaggggag

SEQ ID NO: 293644 - DNA, 122 bp, Homo sapiens
agatagaaggggatagggatctccttccacatgttgaaggacaggctactggggtcgatgcgcacgttctgcaggggaagggacaagtacgcttgtgaggagagtgatgagggccccacgcc

SEQ ID NO: 293645 - DNA, 122 bp, Homo sapiens
taatatattctcctcggccgccgttggtacacggaccacattttgtttctcaaagcaatccgatgatttctgaggtcctttgcagcttgaagacggaacgactgtggtgatcgagtagccaa

SEQ ID NO: 293646 - DNA, 122 bp, Homo sapiens
ggtgaggtgaccttgagtgaatgcgtgtaggtggaaaaaggttccggggaatgcttgcatcgttctgcatccgagcgtccaacagagaaaagatcctgtttccagacaatacctgcatttgg

SEQ ID NO: 293647 - DNA, 122 bp, Homo sapiens
ggatagttcttccagatgatcatgaagcggatctgaatagagttcgacagaggcttgcaccgcgaccggttcagtcagtgatttcggaagtgctgtccttgccgtcttcccggaggtcctcc

SEQ ID NO: 293648 - DNA, 122 bp, Homo sapiens
catgcaagagatttgttaggggaagtgattgtgaagggaaaatggggagggagctaagggcgtctgagaaaccatcagattgagatgtgggtctggccccaggtgaggaggtgaaggaagga

SEQ ID NO: 293649 - DNA, 122 bp, Homo sapiens
ctcgcccctccgccccggggcggcggcttcctgctctgcagcgagcgtccgcaggagggacgccaggaccccggacgccacctctgaggtctctctgcacctgggtctctgacagccgggaa

SEQ ID NO: 293650 - DNA, 122 bp, Homo sapiens
tggagaaggcgagcgggtgctgctggagggctggctgtctccatgccctcacctcatccacgaaccttggaaccagcctgaggggacactggcgtaagatggggactacctatagtaggaag

SEQ ID NO: 293651 - DNA, 122 bp, Homo sapiens
gatggtgtgtttagaatatagaagtagagcagtcacagagaggcagcccagcagagtgttcgcacaaggactgggccagcaactccccactgcatgcaacgtatctgaggaaagtcattaaa

SEQ ID NO: 293652 - DNA, 122 bp, Homo sapiens
gactctctctaggacagaggtcgaagagaaaaagtagaggcgaagactccacgctctcctcgcggcgcgcagccacccacgcccacccccggcttccctgcaacctcaaaccagctcccagg

SEQ ID NO: 293653 - DNA, 122 bp, Homo sapiens
ttaaaacattagctctattagaaataaatcccgaacagctggttgaggttgcagaccagccgtacccagcagtgattgagaaattcaggaatgagctgcagcaggtcaacaggtgagaaggg

SEQ ID NO: 293654 - DNA, 122 bp, Homo sapiens
aaggggacgcttttttcttcagaacagctccaacggatacctcttattttagaccgcctgcggattctatctataaatcagcctaagccccgcttccttttaaaacaggattacgccgggtc

SEQ ID NO: 293655 - DNA, 122 bp, Homo sapiens
cggcatttgccagagccgaggcggaagccggagcatttgggggacgggaccgcgggaacccggaaacgcctgggctgcaccgagctggcggtggctacggcgacgggagccggcggcgctgc

SEQ ID NO: 293656 - DNA, 122 bp, Homo sapiens
caggatgcagtctgtcctcatgatgaggatgaatcattgctgcagatcctcaggcacacacggtcacacataggcacacacgtgcacactgtcgtgtgtacacactcctgcatgtgcccact

SEQ ID NO: 293657 - DNA, 122 bp, Homo sapiens
aataggcatgtgccaccaagcctggctaattttgtatttttagtagagatggggtttctccgtgtgggacaggctggtctcaaactccggacctcaggtgatccgcccacctcagcctcccg

SEQ ID NO: 293658 - DNA, 122 bp, Homo sapiens
tttggacaggctctccccatggggccacccagtgggcagcgggtgtgcaggacaagcagacgggcgccgggcgcgctccgcagcctcatccatcatgacacgcgccgtcacctcgtcaccaa

SEQ ID NO: 293659 - DNA, 122 bp, Homo sapiens
atgataaaacagtgtaacaataaacaataacaaaattcactgtagaaggatttgttttgccgtgaggaaaatggttccgtttcatcttgggattcctggttaaaagagtctccagtttacaa

SEQ ID NO: 293660 - DNA, 122 bp, Homo sapiens
ggctcccagcaggacaagcgccagacaagcctggactcaagaggatagactgggcaaaagcgcttctgggaatcgtagtttagggcgccgacctcaagatccaggctgggcacgctacccga

SEQ ID NO: 293661 - DNA, 122 bp, Homo sapiens
aagaaccaccttgagaagcaaggcttcttgctgtaggggtggaggacaccttccaacgaacgtcctcttttaatagaaagaggtatttcgcctggacacacatcacccactgctcgcaaacc

SEQ ID NO: 293662 - DNA, 122 bp, Homo sapiens
gccagaaccttgccaggacctcggtcactgcagttccagcaggcgggcgaccagtgtcaccgtcgtccggccaagccctcgagccagagctccatcgccttcgcctgccgtcgcatcggccc

SEQ ID NO: 293663 - DNA, 122 bp, Homo sapiens
cttccataaagtgcaaattcccgggagactgacaccactcggttcaggatcctcatgttccggacagtgagagtcaggcttggaggacgctgggcttggccacgggtacgcagcctcgggcg

SEQ ID NO: 293664 - DNA, 122 bp, Homo sapiens
ccgctgaaatgttcctaaaaacacgattttgtaaacgcttatgctccaccagacatccagcgcatctactggatgcccagcgtctacaccagacgcccagcgtcccgagtggggttcacttt

SEQ ID NO: 293665 - DNA, 122 bp, Homo sapiens
aataagagacaacgattcacgtctactttctaggatgacttccatgtgctccatctcgcgcgtccctgagcatgttgaatttccaaatcctaaataagccgcgcggtgtagtttgtattatg

SEQ ID NO: 293666 - DNA, 122 bp, Homo sapiens
ttagaggacatggcggttcattattattattattattacagaacaatcttagactctgtccgcaccctgcactctaggtcccgcgactctcagacctccaagtaggactacaaaacagaggt

SEQ ID NO: 293667 - DNA, 122 bp, Homo sapiens
ccgccatctggtggatgcgctgtgggatgctgacgatggtcgacggggacagggcgctggcgttggagaggctgccctgagaccccacggagctggcgggagaggggttgggagacatgggg

SEQ ID NO: 293668 - DNA, 122 bp, Homo sapiens
caggctctgagatcagagcgggtgcctgagcacattgggtgcaggcaggcagagactcctcgcccactcacccccgactggggaatcccactgccaggcttccagtgggtgaatggcctggg

SEQ ID NO: 293669 - DNA, 122 bp, Homo sapiens
ccttcacggatttggttggggtcagagagaggatggagactcaagggaataacgggagcccggagaagtgagggctttttcagggactggagattatctcgggaagccctggtggggctggg

SEQ ID NO: 293670 - DNA, 122 bp, Homo sapiens
tctgaacttaaaataatcctgtagcatagtccattattccaagagtccttttgatcttaacgacaaatacgaaggtctctgaattggactgctattttaactggggccctccctatgccagt

SEQ ID NO: 293671 - DNA, 122 bp, Homo sapiens
gcgggcagggacggaggcgcccaggggcaggcggcagcacgggaagaggccagcaggtggcgcggtcgcccaacccggccgccccccgggcgccgagggaagcgggtcaggggcgtccccac

SEQ ID NO: 293672 - DNA, 122 bp, Homo sapiens
tcaatgacgatgatactaataataatatgcaaagtttgttccaacgcatttagaggtgatcgcgacaagacatgaagccaatccctccctttctggggcaggggaggcagtgatgatcttgg

SEQ ID NO: 293673 - DNA, 122 bp, Homo sapiens
acatagcttctaccctcacggcactggcagtctgttggaagagaaagacattgtatcagtcgtgatggactagattatgctgtggtaacaaacctcccaaaataccagtgctttgcttgaaa

SEQ ID NO: 293674 - DNA, 122 bp, Homo sapiens
aaagacaggatccgactttgcacgaccctgcctcactcacttcctgctaatccacgggaccggggagggtgactgagttacccctcaacacgcagaaaaagctagtggccgctcagctcgca

SEQ ID NO: 293675 - DNA, 122 bp, Homo sapiens
gttcagaaggttcaaggaagcgaccgtcagcgccgagtggccagcagggcggggatgcggcgttgagccccgtcattcagcttcagtgtggagaaggcccggagctgtgggcatcagctcgg

SEQ ID NO: 293676 - DNA, 122 bp, Homo sapiens
tgctgggcgttcactgccaccgatgtcccctgctggggtggccgagtgccccgctctggccgacgttgaggcctctgaattgttcggcagacagtggcggcttctttaccttcgggttgaag

SEQ ID NO: 293677 - DNA, 122 bp, Homo sapiens
tgcagcaggatcacttggttcctctgcagtcccctcctcctctgattggctgtcccatgacgcctgcctgctgcctaccctggtgggcacagcaccaacctcccaatgtctgtttgcagcca

SEQ ID NO: 293678 - DNA, 122 bp, Homo sapiens
ggaggccgatgtgcgagcgagccacagcttttcgggccaaagcggcgaaggctgagtgtgcgtgcagggatgggtggggtggcaattcccttagctcttttggtttctgcacggtcccagga

SEQ ID NO: 293679 - DNA, 122 bp, Homo sapiens
agcaccaagtgacagacggcttctgcttggaaagggacaaagaagggtgaagaaagaccccggctgaggcacaagttcaaaagaaagacctagagcagaggataaagcaaatattgagagaa

SEQ ID NO: 293680 - DNA, 122 bp, Homo sapiens
agacagtgcaatctagatctctgtaccctgaatccccctagatggttcagccttccttgtcgctctccatgggttggatcctgctcacagaagcctctcagactctctgggtgggtgggaga

SEQ ID NO: 293681 - DNA, 122 bp, Homo sapiens
cagacacagaaaaggttgcgccttggaacgatttctgttatgggataataaaaatcccgacgtcagagctaaggaatgtgaccttccgctgctccagttgtaactccctgctgtcctcctgc

SEQ ID NO: 293682 - DNA, 122 bp, Homo sapiens
cccaccttccgtaaatcgtgcttccccctcgggcactccggtgactgccgagagagacgccgagccagcaagtaagaatgctccctggtggatttgttggtaaataagacatctcgcgtcgg

SEQ ID NO: 293683 - DNA, 122 bp, Homo sapiens
catttgtcagccaagagcagcctgggctgtattgtcgagaacgggaagtgaaaaaggagccggcttattactgaactggaacaaggagagagcaaacaacaccccccaaagtgcttatcctg

SEQ ID NO: 293684 - DNA, 122 bp, Homo sapiens
cttcaccatgctgttgcaaaccaatgacaagttcagcttcagcgcggacagggcgcagggcgcagaccctgtgcatatcccagaatcccggacccactgccactccactctgggaaggaaga

SEQ ID NO: 293685 - DNA, 122 bp, Homo sapiens
aggcgagccgcagtgagcccgacctctactgtgacccacggggcaccctgcgcaagggcacgctgggcagcaagggccagaagaccacccagaaccgctacagcttttacagcacctgcagt

SEQ ID NO: 293686 - DNA, 122 bp, Homo sapiens
gcagacccgctccctgcaagacccacgcgtcgccctgctgtgaacctggtcccacacctacgtggacccaggtttcctgaggacgtccgctggacccgcagatcccgcactggccaaagggc

SEQ ID NO: 293687 - DNA, 122 bp, Homo sapiens
tttccggtgtaccgtttgtcagccccaaagcctccacttcctgagtaatcactagatgcacgtgtgaggtatgtggttcccccccatgcccaaggcagattcctggccccacttcaggaagt

SEQ ID NO: 293688 - DNA, 122 bp, Homo sapiens
ggagtaggatgagagcacgggcagctggacagagtggctccaacaggactgcaggggagacgtgcggtcacctgcggcgtgggaacagcagggcaagggcaggcgggctcggctcctggact

SEQ ID NO: 293689 - DNA, 122 bp, Homo sapiens
ccattggcagacggagaaaaggccagtccgccgaggtcttcctaccccttggagactcagcgccaccgcggaagcagctattggcggaggccaggggccgcgactgctcacttccggcgcgg

SEQ ID NO: 293690 - DNA, 122 bp, Homo sapiens
ctccagcctgggcaatagagtgagactccacataaaaaaaaaaaaaacttggctggaattcgctttattcactgacaattatattggtcagatttgtgtatgttgatacttgtaggggatgg

SEQ ID NO: 293691 - DNA, 122 bp, Homo sapiens
tcttcacgagtgccacagaatagaagaagtaatcagtttagttccagataaggcaaatcacggctgtaaaatcactaaattagacatggcccttcaggtaagctgcttggggaagcaagtga

SEQ ID NO: 293692 - DNA, 122 bp, Homo sapiens
cactgcaggcctccagcaccttctcttctgtcctgggtcactgtatgaagactaaggattcgtggggaatgtgctgcttcccttcagcgcaggcgcccgtgcccggggccaggtgggaaggc

SEQ ID NO: 293693 - DNA, 122 bp, Homo sapiens
atctcgggaggtggggcatctctggggcccggccacttgggaggcggggcatcctgggggcggggcatctcagagggcgcctccggaggctggagtatcttgggaggtgggagcaggtggca

SEQ ID NO: 293694 - DNA, 122 bp, Homo sapiens
cctcttccctcggagactgggaaagttacggagggggcggcgccgcgggcggagcgcgcccggcctctgggtcctcagagcttcccgggtccgcgaacccccgaccgcccccgaaagccccg

SEQ ID NO: 293695 - DNA, 122 bp, Homo sapiens
ctgctgcaaaaaaaacaacttttggcgcaaagaatgttgcggccagagagcatccgctgtcgctgacaaaggagtagcaatggcaatgagaaaccgccggcgccacggccgaccgcggcggc

SEQ ID NO: 293696 - DNA, 122 bp, Homo sapiens
aaacgacagatttaagcttcctctcgtgatttatctcgcgctgccggaagcggaactacccgggtcctttagagggcagtcctttggggaaccttggaaccacggtcagaaaggttaggact

SEQ ID NO: 293697 - DNA, 122 bp, Homo sapiens
cggagatgcccggccagggtccggggtccgactggacggagcgtagctcttctgcagagccgcccgctgtggccgggaccgagggtggcggcggcgggtgaggttgggggccccggggtaag

SEQ ID NO: 293698 - DNA, 122 bp, Homo sapiens
cttgggtggctgattgatcattccttcaatggtccttcatcagcacgtctttactgagcacgtgctgtgtgctgttctaggcgctgaaggatagaagtgaagggttcccccctcgtggagct

SEQ ID NO: 293699 - DNA, 122 bp, Homo sapiens
gcccccggcgcctgcatagacgctggccgcgctgcagactggctgggaaccgtagctgggcgcctggacagagcccagggaccggtagttggtggagaaggtggagcgagtggtgaagctct

SEQ ID NO: 293700 - DNA, 122 bp, Homo sapiens
cgccttgaattctgaccactttaaaatatgcaagagacatattttaatttagattcgcttcgccctccaatcacaaacatcctactgcttggaaggaagacactgaattaacccccccagtc

SEQ ID NO: 293701 - DNA, 122 bp, Homo sapiens
cactccgcagtgttcacagcatcctcaccaggagcagattccatcttaagaaaccactttcgttgctcatccatgagaagccacttcttatcagctgaagtttcttcatgagactgcagcaa

SEQ ID NO: 293702 - DNA, 122 bp, Homo sapiens
agtaacttcctcttccaattttcttctccactactgacatatgagaacaatacccatagccgtccctactattctgattaaccaaaagctctgaggtttggaaaaattaagggcagcaagtt

SEQ ID NO: 293703 - DNA, 122 bp, Homo sapiens
ctgaaccctgagagaagctgacctgggcccgggggggttctcaccccacttcctcgagtgcgtccagacgtggggcggggcggggtggggtggggtgtggtggcgcccagggtgggggctcc

SEQ ID NO: 293704 - DNA, 122 bp, Homo sapiens
gcctgcagacacagaatctaatcagcagctgttttctgaatccagagccaacccatgcctcgcttgtcttttccactaggagtccagaccttttttgaaagggggtttaaccttttaaagac

SEQ ID NO: 293705 - DNA, 122 bp, Homo sapiens
aaaaaatttattttagaacaaagacctagaacgctcaccatcgaaataaatttgagcaatcgtgttctactctcttaagtacagtagacacgcaacaagtaaacatcgagtgcgaagtataa

SEQ ID NO: 293706 - DNA, 122 bp, Homo sapiens
ctgccctccttctttcttgtaaataccaaccatgcatttgtacagtgggccctgttcatgcgaaatccacatccatggtctcctagacctgctaccctggtacttccaccctaccccacccc

SEQ ID NO: 293707 - DNA, 122 bp, Homo sapiens
agagttattacaaagccagtgccaaaacccagccatgggctctttgcaacctcccagctgcgctcattccagctgacagcgagatgcaagcaaatgctcagctctccttaccctgaaggggt

SEQ ID NO: 293708 - DNA, 122 bp, Homo sapiens
agcccaaagacctgtttaacccttctgcggactcccctgcggatctggcttatataagaccgcggctttgatgtcaacctctcccgggagccaatggcaggggggcggggataaggaaaagg

SEQ ID NO: 293709 - DNA, 122 bp, Homo sapiens
tgcaggtttgttacataggtaaacctgtgtcctggagatttgttgtacagattgtttcatcgtccaggtattaagcctagatttcttagaaggaaaaagacaccaaaaatatgttcttaaag

SEQ ID NO: 293710 - DNA, 122 bp, Homo sapiens
acagataggaaggtccaatgtacctctaccctttccctcaaaggcaacatcagatacaaccgtggtacaatataaaacaggaacaccgacactagtgcaatgtgcatgttgttctgtcattt

SEQ ID NO: 293711 - DNA, 122 bp, Homo sapiens
ggtgacaagcgaagtaaaagatcttgcaaagtacctagtcaacattattgtttacatactcgataacaacccccacacccaaatttggaagtttacaaaatacctcaaatagtaccttggtg

SEQ ID NO: 293712 - DNA, 122 bp, Homo sapiens
gtgtgagagtgcgagtgtctgtgcgcgagtgagtgagcggcgggcgggcgcgagtgtggccgccgcggagcgcgagcaggacccggcgggcgcgctccccagcctccgtctccccgccggaa

SEQ ID NO: 293713 - DNA, 122 bp, Homo sapiens
ccgcaggctcatgtcgatggagatggactaggctggcccgggaggggagtgacagagggacgttctaggagcaattggggcaagaagaggacagtgatattttaaaacaaagtgtgttacac

SEQ ID NO: 293714 - DNA, 122 bp, Homo sapiens
ttttcaccaggctaaggaagattccaacaacatatccatggtgctgaagtaagaagatctcgtgctgtgaccctctagagggaagcactttctgttgaaagaaaagaacatgcatcctttca

SEQ ID NO: 293715 - DNA, 122 bp, Homo sapiens
ggggctacaaccatttcccccttggcctaaacatcttcatcaattcgaatgggggccatacgccacagtgctgtcctgtaactctatcagcagtgctcctgctgtgggaagatctcctgagt

SEQ ID NO: 293716 - DNA, 122 bp, Homo sapiens
ctgacctgcaagagcatgggcttgggcaggcggcctaccctcgcctgtaagtgcaaagaacgccccttcctgccaggtggcgacaggacgccgtatccagtgtaaagcctggggagcacgtg

SEQ ID NO: 293717 - DNA, 122 bp, Homo sapiens
ctctcacctaatggcctgaggaagcagtgctgctgtcttggtttgttctggcagctataacgaaataccatagactgggtggcttataaacaacggaaatttatttctcaccgttctggaag

SEQ ID NO: 293718 - DNA, 122 bp, Homo sapiens
tcaggatactcagcctggtggtctatgctttagtcccaggccagcgttcccatttgagggcgagaacaggtgaggtgacgctgtcttgctgttacgtaacagattagaccatgtgctttatg

SEQ ID NO: 293719 - DNA, 122 bp, Homo sapiens
aaagaacagttgaaggatattgagttccttttacacagcataaccagcggaaattaccaccgatgttaatttgaaacagaatgagatagccaactgaagtgccttgaggaagtatacaaaga

SEQ ID NO: 293720 - DNA, 122 bp, Homo sapiens
gatgggactgggaggcttagggggtgagggtgtaagccctgtgcctccctccacgtgctgcgtccggcatgccacgtcccctcgtccagccctctgctgccccctccacgcgctgcgtcctc

SEQ ID NO: 293721 - DNA, 122 bp, Homo sapiens
accaccgcgcaggcgcgctgcgtgccgccagcgccatgcgaaaccgactttcccgtctcgcgagagtggggccggccgccttcgcagttctcgctccgccccccacttcttgctcgttccct

SEQ ID NO: 293722 - DNA, 122 bp, Homo sapiens
ggtttcataagcagaaatcgccagctagtgatcacggttcagacaaatggtggaaatcgtcggcggcatagggacggggccagcgtgggtgtcagccgtgggtgtggcagttccgcactgac

SEQ ID NO: 293723 - DNA, 122 bp, Homo sapiens
cgttcactgacgggattcgtggcttccctcgtgtggccacctcatccaaacacgggccaacgggaacttcacaggagatcacaagtaatcctgcacaggcagaaattcagatgtgcggcctc

SEQ ID NO: 293724 - DNA, 122 bp, Homo sapiens
ccttcttgtcctcctcggggcagtccccactctggtgcttcttgacgtggcggctgaagacgaaagggtgtgtggtcttgaacaggcactcttcgcagctgaaggtctggcgtggggcgtgc

SEQ ID NO: 293725 - DNA, 122 bp, Homo sapiens
tgcgcttttcagaccggcttaaaaaacggcgcaccacgagactatatcccacacctggctcggagggtcctgcgcccacggaatctcgctcattgctagcacagcagtctgagatcaaactg

SEQ ID NO: 293726 - DNA, 122 bp, Homo sapiens
agacgggaagacgggggtggggtggggggcctacggccatgcccccttcctctctgtctccgcccccagcaaacacctggcgcgggctcagggctgagttcctcttggcggggcggtggttg

SEQ ID NO: 293727 - DNA, 122 bp, Homo sapiens
ctcggccctgcccacggactcccccagggaaggcacagctgtcttctaggagacacggagcgcaaaatagggcaccacatctagaacctgacaggctccagaaagggtctgaaaggcaagag

SEQ ID NO: 293728 - DNA, 122 bp, Homo sapiens
ccccataccacgccacgccgcggcccccgccgggctccgggccccgcgctggtccccggccgcctcgccctcgccgccccacgcccggccccggccaggccccagccccaccgccgccgcct

SEQ ID NO: 293729 - DNA, 122 bp, Homo sapiens
gggagcacgacctgccctcccaccggcgccacgctggcctgctgtcgctccccgacatctcgctggaggccttgcagaagaagaaggccatgcttcaagagcaagtcctcaagaccgccctg

SEQ ID NO: 293730 - DNA, 122 bp, Homo sapiens
gcggtggaacgccgcccgagtaagtgtgtctatgaggcgcgaggctggagtgggtggtgccggctgttcccaggagggatacggcttggcttggttgagggtaaggagtcaagttcgggtgt

SEQ ID NO: 293731 - DNA, 122 bp, Homo sapiens
ggccgtcaggtacgggtctctgtcaatctggcacctgacagctgagacaaacgaaaaagacgctccgctcgctgattcctgggccgcgcggggtcacggggcgctgcggctttcctggaatc

SEQ ID NO: 293732 - DNA, 122 bp, Homo sapiens
acactcccacatttaaagtcagctctttttgggatcagtcgtaatccttaatgctgacaccgcatggaaaatatataagcagaatgatgcccaagttatagaagttcctcttcctggatttt

SEQ ID NO: 293733 - DNA, 122 bp, Homo sapiens
tgacacatacagacatgcatgcacacagcagggttgtcagggtcacgcgtgtggcactggcggacacacacaaacatgcatgcacagagcagggtcgtcagggtcacgcgtgtggcactggc

SEQ ID NO: 293734 - DNA, 122 bp, Homo sapiens
ggccagtccaaggaagagcttccaggaggctggggagcaagggtgccgggctcctcatgccgggtcaggtctcccaggagtgccggctcccagggccactaggcccaggcctgcgcgaggag

SEQ ID NO: 293735 - DNA, 122 bp, Homo sapiens
cccgcgaaggctctccacgcaggaagaagatcaaggagtcacggataaagcctctctgggcggccaagtcgcctgtttgtctatggtttcagtaaatacgtctgttgcggcatctagcggct

SEQ ID NO: 293736 - DNA, 122 bp, Homo sapiens
atgatgtactgagaaggacagaacatgacttccgcaacattcctgcccaaaaagcagaatcgaaatctaaccacaaacccaaactgaggaaacatgctacaaaaaaagtggctcactcttca

SEQ ID NO: 293737 - DNA, 122 bp, Homo sapiens
ggtcccatgtggagggaccagcccctaggatggggcgcctggctgggcagctgcttttgccgcctgcactgcgagcattgggaggtggagaccgcggcctctctgctgtggtggcggggagg

SEQ ID NO: 293738 - DNA, 122 bp, Homo sapiens
gtggctccactggctttaatctgccccacctcttccacaccaacctccaccctctggttccgatgtgcttggttacaaagcacctgattatttaagagaacgaaaaaccaccaccagttcct

SEQ ID NO: 293739 - DNA, 122 bp, Homo sapiens
gctgactaagaagcccgaggataaccacacccagtgccagctggtgcctgtggtggagatcggcatcagtgagcgccagaatgctgagcagcatgtcacccagctcatgtccaccgagcctc

SEQ ID NO: 293740 - DNA, 122 bp, Homo sapiens
caccccaacccccactgcaagttatttctgtccttagagccccaggccggggctggagagcgtttgggagggaaaggaccaggacgtgggagtggcagtgcggaaagaggagtggggtcagg

SEQ ID NO: 293741 - DNA, 122 bp, Homo sapiens
gggtggctggggcacctgggaacggggatgccttgccctccgaggtctcccctgggcggccgcccatgccattttccgggctgctcgccttctagaagttcctgcaggaagctggtgatgtg

SEQ ID NO: 293742 - DNA, 122 bp, Homo sapiens
agggcagtaaagcaggtaaaaggcgcagatcacagatggtagctgatggcggggctgcggcgagaataaagcagcagagggtgggaggcgccgaaggggctgctattttggagggtggtggg

SEQ ID NO: 293743 - DNA, 122 bp, Homo sapiens
aagagggtgcccgaggcttcggtgtgctgaggccggggcagctgctggacttcgggtcttcggtgcggaccctggacctgcctcagatccgttcctagccgcccctctgctctgtatggcag

SEQ ID NO: 293744 - DNA, 122 bp, Homo sapiens
gatggagagaggccaccagagggcgcagaagagcagcaaggctgccccctccaaggccggcgactcggccacctgggccgccaagccctgcatggggtgtttatcgttggaaagggtgtttt

SEQ ID NO: 293745 - DNA, 122 bp, Homo sapiens
caaggcctgtgcctgccctgagggcgagttggttgagccttgtacagacaactctcagagcgtgggcctgggccgaacctttccctgtgagcagcagcatcagcgtctagaacgacggccct

SEQ ID NO: 293746 - DNA, 122 bp, Homo sapiens
ggcaagggtccttgcttccctgcagcaggcctccttcggctgtcattagaaggctactggcgcactggtgcaaggaccctggtgtaccagtgcacaccggatgcaccccaccctctggacca

SEQ ID NO: 293747 - DNA, 122 bp, Homo sapiens
gcggaggtggggatccggcggggggcgcgagtctcgctacggtgctggggggggcgggggcggctccccaggacccaggctccccccactgttattgttcctgaaagcaccgttctgccaat

SEQ ID NO: 293748 - DNA, 122 bp, Homo sapiens
gtcaattttatgatccactgctggtttgggctgatttgcttttaactaattattgatcaccgtaatgactaacttttgagagagccctgccaaaaataaatattccttaaatgaggtacacc

SEQ ID NO: 293749 - DNA, 122 bp, Homo sapiens
gctttgaggagtgatttccagtgcccataggccagcagaccactcagacaagggcaatttcgagatttctaatctaggcaagggccgtgccaagcaccacactgacagctatcatttgaggc

SEQ ID NO: 293750 - DNA, 122 bp, Homo sapiens
acccggagccgctcctgcgcctgcgcagcgtgtagcgcctgggccctttcgggccgcacgcgcctgcgcagcccctgccgggggcgtcttcctcagtgcctgatggtctggacccctgggtc

SEQ ID NO: 293751 - DNA, 122 bp, Homo sapiens
gacagtcacatacaaaataccatcgccttcagacaatcacaatgatctgttgaatgcttacgctgccagggtcagttgtaggcatgggtgcattagcgaaaaaacacacattccttgttctc

SEQ ID NO: 293752 - DNA, 122 bp, Homo sapiens
agggagatgaaaactgaccacgtgccaggtgtggccgaagcccccagggagggccacattcggggagcggggggtcgggggagggccaccgactggctctgctgccagcacaggcccctccc

SEQ ID NO: 293753 - DNA, 122 bp, Homo sapiens
cggagagccggggtaaccgtggagggcgacgcgcagaggctgcggctatttaggcgtggtcgccggcgcgcatgcgcaggctgcgcggcccgtcgtccccgccacgccccgcggggcgggtt

SEQ ID NO: 293754 - DNA, 122 bp, Homo sapiens
gcaggtagggactggagccaggaggtgtaggcagtgggaggaagagaaagatgactgatccgtccagcgtgctcccaaggccctgtctcaacctcatctgagaacttaccacactctactac

SEQ ID NO: 293755 - DNA, 122 bp, Homo sapiens
cgcggccggataggcgctgcgctaggcacaaggctcttaggagaacctctgtctgttggccgcctcgggcgcccccagtgcgcgactccgcgctccagaggcagaggtcagtctcctcctga

SEQ ID NO: 293756 - DNA, 122 bp, Homo sapiens
gggggttcagccccccgcccggccagccgccccgtccgggaggtgaggggcgcctctgcccgaccgcccctactgggaagtgaggagcccctctgcctgaccagccgccccgtccgggaggg

SEQ ID NO: 293757 - DNA, 122 bp, Homo sapiens
agggatgggcacatgtgtgtcttcaggacgcctgtctcaggcacccgtgtgtcttcaggacgcctgtcgggcacacgcgtgtcttcagaacgcttgtctggggcacacgtgtgttctcagga

SEQ ID NO: 293758 - DNA, 122 bp, Homo sapiens
cctagctgattttgtaggatgtgctggggtccactttggaagcgctcactgtctgtctgccgagcctgtgtctcatggcagtgagtggcgttgatctcctgcacgttcatgatggagctggg

SEQ ID NO: 293759 - DNA, 122 bp, Homo sapiens
tgcatcatcgactccttcatgattggtgccatcatggccaagatggcaaggcccaagaagcgggcacagacgctgctgttcagccacaacgccgtggtggccctgcgtgacggcaagctctg

SEQ ID NO: 293760 - DNA, 122 bp, Homo sapiens
gggcgcctggtacaggtagccctgcgggtaggacatggtgggcgcggggcgcggggcccgcgtcacgccgagcagcgggcagggcgcgcggcgccctccatccacgcccggccggggcgcgg

SEQ ID NO: 293761 - DNA, 122 bp, Homo sapiens
ccagcggcgcccccgtgcggcccggctctgaggcagcggctcagggagggagggaggccacgtcccgggcacgccacgccacgccacgccccgcccccagattcgtctcgccccagtgggcc

SEQ ID NO: 293762 - DNA, 122 bp, Homo sapiens
agcttgggttctccagatgcacaaaatttcaatcgccttgaaaataggagctggagtagccggtggccttagtgcgtctgcagcagaaaccccattgtccctgggcctgatttagccgggag

SEQ ID NO: 293763 - DNA, 122 bp, Homo sapiens
gagaatcactaaagtgtttctaagatttttattgcttgtcaagtacatcctttagggctccgcgtctaaatatttaagattccagctttgctcttatcagagctcaaatgtggccacagttc

SEQ ID NO: 293764 - DNA, 122 bp, Homo sapiens
caaaggccggggccagctccgcacccacccagcctaaggcgcctgcccggggcgccacctcggcctctggctcccgagaatgctgctcctgaagatcgggactgggcttctcgccttgtttt

SEQ ID NO: 293765 - DNA, 122 bp, Homo sapiens
ttgccacaacgcctccctggatctcgggtagttggggccactgctctgaggctgaaggatcgcggagaaccgcacttttagcttggtttttaaagtacacgtgaagtttacacagagaaaaa

SEQ ID NO: 293766 - DNA, 122 bp, Homo sapiens
ggctcaagcgatctgaccaccccggccttccaacgtgctgggattacaggcatgagccaccgcacccaggctgggaacaaaatattgagataagagtgagatgggtccgaagcaggaggata

SEQ ID NO: 293767 - DNA, 122 bp, Homo sapiens
cgcagcaccgtagtgcgcttgcgctgagcagcccgcgagggcggaagtgggagctgcgaccgcgctccctgtgaggtgggcaagcggcgaaatggcgccctccgggagtcttgcagttcccc

SEQ ID NO: 293768 - DNA, 122 bp, Homo sapiens
tcccaaagtgctgggattacaggtttaagccacctcacccagccaactttaggtggcttacgaggaaatagctgatatcatctaccccagtggttccttttgaggattaagaggcagtgcgt

SEQ ID NO: 293769 - DNA, 122 bp, Homo sapiens
atgtggcgtgtttaccctcgtgtcagcatgactggtgttccaccctggcagatgaaggcccggtccttcctgggctcctaattggggacactacatccaagagccgtgacagggttcagcaa

SEQ ID NO: 293770 - DNA, 122 bp, Homo sapiens
gcagatgcgtggtcgcaaactgatttccaagtccgttgtctgatgctgcgagacactatccgtttgttacagcgaattgggggccgatgacgctggaggtggaagaagccgcggttctgttt

SEQ ID NO: 293771 - DNA, 122 bp, Homo sapiens
aaaatccaaccaggtttgtaggtaaccagttacgtttcaaatgtgatcttaagcccaccccgagtgagtgaacctcaacatgagagtagaagactctggaagggaagatgtgagaagataaa

SEQ ID NO: 293772 - DNA, 122 bp, Homo sapiens
ttcagatgaacatggtctctgttccatgttggtgaaggagtgcttgggagggaccgtccccggaaagtagtcaggcttggggggcagtccagtaggcacctgcttctcaggtgtgtgtgggt

SEQ ID NO: 293773 - DNA, 122 bp, Homo sapiens
gttggagcaaggattaggctgccttttttggtatagctccagagagcagaacagggataacggctgcagaataatttttaaacaatcaaatatggaaaaaatgaggaatttgtcccaaggag

SEQ ID NO: 293774 - DNA, 122 bp, Homo sapiens
gcgactatgcctttcctccctgagagtttcgctacatttcccaggatgctttgccaatagcgacgctattagtcgtcatcgacggaagtgcacctgactgagcggaagtaggagctctcaga

SEQ ID NO: 293775 - DNA, 122 bp, Homo sapiens
caccatttttcagaccagctcgcagcctgggggcagtggttcaagcacaggctttggagccgaaatgactgcgcctgaagtactcttcttccacttccccgctgtgtgaccctgggcacgtt

SEQ ID NO: 293776 - DNA, 122 bp, Homo sapiens
tgtgaatttgtccaaagcaggtattgagacaactgtcatgactgatgctgccatttttgccgttatgtcaagagtcaacaaggtgggtatatctggagttatgttgaattcatgaagattat

SEQ ID NO: 293777 - DNA, 122 bp, Homo sapiens
cttgtctcctgaattctctgactttttctcagcacctctgctgggacctgcccaggagctcgggcagatgggttccgccagcggcgccaactcccacggctcgcggggatggggagttgggg

SEQ ID NO: 293778 - DNA, 122 bp, Homo sapiens
ctcccctctcacaatagatagatacaataattattgctaaatttggcttattaaataaaccgtgattgagggcctgtgatgatctccgatgaagaagtgcctgaattttgtgtatggaattt

SEQ ID NO: 293779 - DNA, 122 bp, Homo sapiens
tgaaaaaattcgtcttaattcgcccttttgagagaattctgtttctaaatgcatttttttcgttggttcttacaagtcgttaagagttgtaacatgaaataagtagagatcaccaatctatc

SEQ ID NO: 293780 - DNA, 122 bp, Homo sapiens
caaccagccacctctgcaagggtgtgccaggagcaggtgcaccactcacccaccagcggccggacatggtacatcagttcttctaccctaaaggtggaccacagtgccatctgcttttccta

SEQ ID NO: 293781 - DNA, 122 bp, Homo sapiens
aagaatggggtccttttcgggagtggctaaaccccagggacaggagtgaccactgggacccggtccgccccgaggcagccagcctagagccccagcgggaacaggtgtacccgcccggctcc

SEQ ID NO: 293782 - DNA, 122 bp, Homo sapiens
aaaatcactcttctggaaccaccctaccttgtcactgagtctacagtcccagcatacagacggcaatgcttcctttaatttggggttcccagttttagttggttgtaatcactttctaaaag

SEQ ID NO: 293783 - DNA, 122 bp, Homo sapiens
ctcctccaggaagtcttccctggaaacaccatggacacaggctaccctaagttagaaggccgcagccatcacttgtgcttctggctctgcatccagcctaagctttggagcacctccctcct

SEQ ID NO: 293784 - DNA, 122 bp, Homo sapiens
ggacggcgctggaggggcgggtcgggtaggtctcccggagctgatgtgtactgtgtgcgccggggaggcgccggcttgtactcggcagcgcgggaataaagtttgctgatttggtgtctagc

SEQ ID NO: 293785 - DNA, 122 bp, Homo sapiens
gggctggggcagaggcagcccggcaggccctcagggaggctggggctgggggcaggggtacggttgtgcccgggtacccttaatgtttgagctgatgggggagtcagttgtccttgacagtc

SEQ ID NO: 293786 - DNA, 122 bp, Homo sapiens
gccacatgccgttccaggcagcagagatggcagcacggaacaccgcagccagcctgggctcgctgggcctccattctactggggtgggaatctcaagcaaagaagccacgcgtgtggcatga

SEQ ID NO: 293787 - DNA, 122 bp, Homo sapiens
cagtttcggatgatgagctgactcaagtcctgcagtgtgacctgctccacaggagggggccgtggccgagaccccaagagctggcccagacgacgaagcgccaccgagtagtggtgggcgcg

SEQ ID NO: 293788 - DNA, 122 bp, Homo sapiens
ccacgcctcccccggcccaggtactcacgctccgtaagtcgggatggggggtgggggtggcgcagcccgaaatgtattatacacggcccggccccggccccgaagatgtgcgccccggtagg

SEQ ID NO: 293789 - DNA, 122 bp, Homo sapiens
gacccgggagacacctcaagtattgtgactgccccaactgcggaagtgggaaagggaaaccgaacacacaccactactggagaagttgaagatctgtttgcgggaaaagtttccaactttac

SEQ ID NO: 293790 - DNA, 122 bp, Homo sapiens
gatgagctgctcgttgtcgtcccgcagcagctccagctccacctggtgctcctggtcctgcgcgaacaccgagtccaggttctccagcacagccaccaccagcggcatcagctctttgacca

SEQ ID NO: 293791 - DNA, 122 bp, Homo sapiens
ttcacacggaaaggggtgtgggagggcgcgtgtgagtgtgtgtgtccacgtgtgcgtgcccgcgcctacgcggctgttcactggaagggagtcacagcttgggacttaatgtgtttaagccg

SEQ ID NO: 293792 - DNA, 122 bp, Homo sapiens
gcacctgtaatcccagctcctcaggaggctgaggcgggaggatcacttgagccaggagttcgagaccaacttggacaacatagcaagaccctgtctcagtcagtcaatcaatcaatgataaa

SEQ ID NO: 293793 - DNA, 122 bp, Homo sapiens
aagccagttaggtggttacacagtagtccaggcaggaaaagatgttaacttggattagggcgatgttagcacagatgcacagattatgggtagatctgagagagatttataagggattgtta

SEQ ID NO: 293794 - DNA, 122 bp, Homo sapiens
gctgactgatatggcaggcaccatgaatctgaatgatgggctgactgaaaacctcatggacgacctgctggataacatcacgctcccgccatcccagccatcgcccactgggggactcatgc

SEQ ID NO: 293795 - DNA, 122 bp, Homo sapiens
cactttacacactataaatagagcagctcatgggcgtatttgcgctagtgttgggtgttccgctgtgctgtttttccgtcatggctcgcactaagcaaactgctcggaagtctactggtggc

SEQ ID NO: 293796 - DNA, 122 bp, Homo sapiens
cgggaggcgggaggcggggaccgggccagcggaggtggggagcctggaagctggccctcgcgaggcggcgcggggagggtgggtgaagagcgcctgtgcgcgctaggcggagcctcacccgc

SEQ ID NO: 293797 - DNA, 122 bp, Homo sapiens
gagacggaatgaaacaaattcaagcaaaaaccctgacagtaaccatgtccattcaaattgcgtatgccctttttatgttaaaagccgtgaatacttacaggacagtgggaatttaaaactaa

SEQ ID NO: 293798 - DNA, 122 bp, Homo sapiens
cggcatttggttcatcccacagtgccagttctgcttaccaaaagtagcctacgaagcactcgcattccacgcctggctccacgtcagccagccaggcttcttacccatttaaagttacagaa

SEQ ID NO: 293799 - DNA, 122 bp, Homo sapiens
agcagcacaccttccagagagcccagcccaatgaaacaaaggcactggtgtcatgtgtaacgacccaagcctgtatcatctaatgttacaaccctgaggagccggtttctgagtcatatttg

SEQ ID NO: 293800 - DNA, 122 bp, Homo sapiens
ttttaaagctgcatttcaactctgcaactaccatgccggtaattaagccagaggaagcggcgacagatttcacttttcacagacacccttcccacctgtgctcccgctccgtgtggccgcag

SEQ ID NO: 293801 - DNA, 122 bp, Homo sapiens
ctctgggaacaggaagcatgtaccgcgggaccaacaaggcttttggacagagaactttcacgggttttgtagaagcaactgggctcccctgaggctgccaagagggtgtgctctgatcacat

SEQ ID NO: 293802 - DNA, 122 bp, Homo sapiens
tagtattgtatcctgtggcatcatacaaggggtgcaagttaaactctttaaagttaatcacgatttttgctcttggccttctgggtttatccgtacgccgaagacaggcacctgtattacat

SEQ ID NO: 293803 - DNA, 122 bp, Homo sapiens
cccaggtcccacccagccccaatctcagtcctggccttgtcccagccctgtcccctgccgcgcctctccctgaactccagccctggggccagccctaactgcactgtctcagctccactcct

SEQ ID NO: 293804 - DNA, 122 bp, Homo sapiens
ctgcagtctcctcgctcttccctcgggtgttctttctgagatccggtttcaatcctcgagcgtgtagccctcaggtccccttacaactccccagagctccgtgtgcatgcgtgcgagaggga

SEQ ID NO: 293805 - DNA, 122 bp, Homo sapiens
ggcgggcgaggcgcctgcagccgggcgcaagatgatgaagtttcggttccggcggcagggcgccgacccgcagcgcgagaagctcaagcaggagcttttcgccttcaacaaggtgcggcggc

SEQ ID NO: 293806 - DNA, 122 bp, Homo sapiens
actattattatcgtcagtatttagcgctaaaccctatttacatttgtaatggctagtgcacgagcattggaacctggtctggaaagtatccctctccccaggcctgatttgcccggaggtgg

SEQ ID NO: 293807 - DNA, 122 bp, Homo sapiens
ccagcactgtggtgggaggcgggctctgcagtaggcccatcactcagaggtaagtcggaacgcaggtcgcttaactagagaggctttgagttccgcttttcctgttctggaatcttgctaac

SEQ ID NO: 293808 - DNA, 122 bp, Homo sapiens
agcttccggaactgctgcggggagttgcgaactctggtcctcttggcagtatcggcggtgcgcctgcctgcctgctgtgactccagggactctaaagttagagacttcctttgcgttctatc

SEQ ID NO: 293809 - DNA, 122 bp, Homo sapiens
ggatggagtggaaggcagtcttcccctggagtcgcgctgcccagcagccggacttttctccgaccacccctggccgaattcccctcgatggctgcgtcgttccaccatcgctggtctgccag

SEQ ID NO: 293810 - DNA, 122 bp, Homo sapiens
ctgcagtgctgcaggaccatcttctacccagaggcatgaagcaaagtatcatgggagccccgcagggcattgcggggaggcaagattctcccagccccttcctgctgcttttggaggcctga

SEQ ID NO: 293811 - DNA, 122 bp, Homo sapiens
ccccagcctgcaccgtggcagttgcgggtaggagacgcccagtgtcaccgagtggtctgacgcgcgcacctcccagtagtggtgcccggcctggaagctctgggcacattgcacctgccaga

SEQ ID NO: 293812 - DNA, 122 bp, Homo sapiens
gcctcacagggctgttgggaggattcagtgagtcagtgcacataaagtgctttaagtgcccggcacagaaacacttggtagatattagctgctgttattagtcagtgtaccttgactgtatt

SEQ ID NO: 293813 - DNA, 122 bp, Homo sapiens
acaattagccaaagacagtagagcaaagagagctcaaccagctgcattgggagccagctgcgttgccttgacagttcagtgttctaggtttcttttcgtctgagacagagagagttgcagag

SEQ ID NO: 293814 - DNA, 122 bp, Homo sapiens
ataccaaaaggtctgggcaggcccaaaggagcccctttctctcggttttagcaacttcgccggcaactgtctcgcaatcttgagaacaaacacagctccacaatggccggcgttttctcgga

SEQ ID NO: 293815 - DNA, 122 bp, Homo sapiens
tctcttattttattcaatgccaagatttcccaagatgaaggagatggtggatcctcagcacgaatatggtaatgtggctggtgccactacaaaccctgtaaacagtgtaactgtggaggctg

SEQ ID NO: 293816 - DNA, 122 bp, Homo sapiens
ctggatgcctgccgggctctctctccgccttcctcttccctcccagtcctgccgagctgacggcgtcccggatcacatggagcccccgccccaccccagcccgccccccgccgccaacgccg

SEQ ID NO: 293817 - DNA, 122 bp, Homo sapiens
tccctattcgaggccccagccggagcgttccgggatccttcgggggagtgcccagccccgcgcccccgcctcccacatgactccgggtgggcccttttgacgtgcgcggagggcggggggca

SEQ ID NO: 293818 - DNA, 122 bp, Homo sapiens
atgcccaagtccccccaaccccgtgggctcccatgcagcctgagcctccccaacgggtgccgccccctgctccgcagcgcccaggtcccaccgaccacccaagggctgaggagtgcaggcgc

SEQ ID NO: 293819 - DNA, 122 bp, Homo sapiens
tacatcagtacaagtataaaaattacatggtattggtttcagaggcagctgagatgcagtcgacagaatgggcccaaaataaagagaatctgagtttgaatctcagtccaatgtccctaatt

SEQ ID NO: 293820 - DNA, 122 bp, Homo sapiens
gcggagtcttgccgtaacccaagatggcaaccatctctcaaatgtcacgccgtacaatgacgtcacacagcgactatgcctttcctccctgagagtttcgctacatttcccaggatgctttg

SEQ ID NO: 293821 - DNA, 122 bp, Homo sapiens
cccaagcttcagatccacgcgtgtcttgggcagtttttccaggtatctcacagcatctaacgcccaaccgttcgagacctaagtcattgtttttttcttccctcccctcccgcatcctcagc

SEQ ID NO: 293822 - DNA, 122 bp, Homo sapiens
cgggctttttgtttccgtcaagcttcatgacctgcaggaagtaaaaccaggtctgcctcacgctctgcacacccctcccctccctggcggccgccctgcacaccccttccctccccagcggc

SEQ ID NO: 293823 - DNA, 122 bp, Homo sapiens
ggccaacagcgctgaactgcggtacctgactgttccgtgccgaacagtgagtagcataatcgcagccgctgatgtctccgggcttccagaggacaaagggtggcgggaaagggggcgaagag

SEQ ID NO: 293824 - DNA, 122 bp, Homo sapiens
ccggagctgagtgccactctttgtgaactgagccttggtaacagcgcccaggaaagataccggctggaggaaccaggaacggagggcaagcagctgggccaaggtagagagcaccataccca

SEQ ID NO: 293825 - DNA, 122 bp, Homo sapiens
gaagggtccgctccaggagggtgtgggttccgatgcctgggtcctggaggtccggggagtcgcggagggacctccctccggtaaccgacggattggggacaaatgctctgcccagtctgatc

SEQ ID NO: 293826 - DNA, 122 bp, Homo sapiens
ccaggtcgctccatccctgctggggcctcagggctcatgtctgggatttccccacctttgcggggcaggagcggctcctcttgggcggggaaggaggcagggccggctcgtctccccattcc

SEQ ID NO: 293827 - DNA, 122 bp, Homo sapiens
cgtctgggcctaactccagacccctcttgaagggccactgtagttccagagatctccgagcgtcagccaagattgtcatggagcctgcgtggcaatttgactcctatacttgccctttcttg

SEQ ID NO: 293828 - DNA, 122 bp, Homo sapiens
ttgagatcttcccaagccagtcacccagtcgataatcagctcaagatcatccctataccccgagtagaattagttgtcaatatttagggcacaaaattcattttggtgagatgccctaggcc

SEQ ID NO: 293829 - DNA, 122 bp, Homo sapiens
caggaagcttccacggtaacaagcagcctgagggaccgtgtggtgttcccggccagacatcgagaagtgcccaaaaggttagagctccggctctggtgccggaagacgtggattctgctgca

SEQ ID NO: 293830 - DNA, 122 bp, Homo sapiens
caaaggccccgccaaatcccggaagccgtcctgtccgctccagctgcgtgcctgattggacgggtcccagccccgcgtccctgattggataatgtttagggcgccaccccctaatgccctga

SEQ ID NO: 293831 - DNA, 122 bp, Homo sapiens
cctcagatctgctataaataatatgtgtgcagagcatgacttcgatgagctcacacacggcgtttggaggcactaattaactccgtcaccctcatagcgccatctccgggaggccaaaagcg

SEQ ID NO: 293832 - DNA, 122 bp, Homo sapiens
cggcgtgggtcttggggaatagaggctttctccgtgcgtggtaaacgagcccagggctctcgggagccatcgagtgtcgtggggcggtgggttccgccttccgtcgccggcggccggcacgg

SEQ ID NO: 293833 - DNA, 122 bp, Homo sapiens
caaggttaataaatgattttcatcccaaacactaaacatgattgatgggtagaggctgcccgaagtactgtgtaaagatggaatctgagatagaagaatgctgtggtcaattagtaattctt

SEQ ID NO: 293834 - DNA, 122 bp, Homo sapiens
aaggggtggtgcctgggaggacctgcagaggagctcctgcatctcctcaggccctttcttcggcgccctcttgtggcagctgagagcaggcccagggcagaagggaggcaggggcattaaga

SEQ ID NO: 293835 - DNA, 122 bp, Homo sapiens
atgtggacaagacacagctgggacagagcaggaagtctctgctgacgcggccgcagctggcgcctgatgggcagggaaatccccagctgtgagcctctcaatccctcatcatcacaacctgc

SEQ ID NO: 293836 - DNA, 122 bp, Homo sapiens
ttcactcctgaagccagcgagaccatgaacccaccagcaggaagaaactccgaacacgtccgaacgtcagaaggaacaaattccggacataccgtctttaggaactttaacactcaccggga

SEQ ID NO: 293837 - DNA, 122 bp, Homo sapiens
accgtaacctatgaatgacatgctgagaccagaaacccaaaatgatgtaactgagagtggcgctaaggccctaagttctggtcacgctgtcacctaagtaagaacctggccaaaagtgagga

SEQ ID NO: 293838 - DNA, 122 bp, Homo sapiens
cagcggggtccttggcccggcggcccagcggccgcttccactcttcggccagcatggacacgttgttgttcatgaccaggccaagcagaaagagcaccaggggtggcgccagcaggatgccc

SEQ ID NO: 293839 - DNA, 122 bp, Homo sapiens
aaccttcaatattgagctttgctcttctcaaaaacctggtgtcacagcactggcctccagcgcatccagccgcgggccccttttgctcaataacggtttctatggagacatctgtgatgcca

SEQ ID NO: 293840 - DNA, 122 bp, Homo sapiens
ctcctgcgtcccgagtttgggaatggcccggccgtgctcaggcccaggcggtggaggcctcggtgtagtagtgccgtgcttgtcgacgttcccaggagtccgggttcagaagccccctctcc

SEQ ID NO: 293841 - DNA, 122 bp, Homo sapiens
cttcttttgagtttattgttttcctgtcttctacagcagaattggatattcccaaacaatcggcaagtctggtgtttatcctagagtgctgcctcccttcacaccccctagtttcaaacagt

SEQ ID NO: 293842 - DNA, 122 bp, Homo sapiens
tggagttttttgcctgagtttcgtgttttattgttttttttatggcttagccatgtggttcgttgtccacatccacatgtacgtttgtatgtagtccacattggttgttagatttttttttt

SEQ ID NO: 293843 - DNA, 122 bp, Homo sapiens
gccttgccccatctcgattttcaactccagttgtgtctgcctggagggtggcatggccagcgttagtatctccttctgcagctcagtgatgggctccagcagccctcaccatgcctcagaac

SEQ ID NO: 293844 - DNA, 122 bp, Homo sapiens
tgtgtgacctgcattttgccccaggagagggtgtcaggttgaatccgtggattcagataccgagtctgctgaagtcagattgtctgactacaatccacctggcatccatcaaagacaaataa

SEQ ID NO: 293845 - DNA, 122 bp, Homo sapiens
gagccacgacggccctgaccacgctgacgcccaggctgcgggctcctcgcccggaccaaccgccagccacgccgaggtcgcacctcggggtcgccccacccgcaacacctgccgccgcccgg

SEQ ID NO: 293846 - DNA, 122 bp, Homo sapiens
ggaggcttgaaggaatgagtactggagtctttgggggactcccttcccttccgacagcctcgactctccgccccttccctgcctgcccgcgggcccctttaaccgggtggcggaaggggcgg

SEQ ID NO: 293847 - DNA, 122 bp, Homo sapiens
ggaagcctagagggccacctggaggatgggaaggttggcacgtgagggaaggtgcagaggcggaaagggcaccagatttccatttctgtatcacaagacacggaatggggctgggccccaga

SEQ ID NO: 293848 - DNA, 122 bp, Homo sapiens
gcacagggcggctcttcgaaagtgacgagcatatacctgtctcctctgctggcagggtcccgggcacggagccgagggactagaggaggaacagggcgagcgagagggaagcacagaggcga

SEQ ID NO: 293849 - DNA, 122 bp, Homo sapiens
atcggaaaggcagcagcaaggctgtgacagccgccaggtcagccagagtgggggcctccccggccaagtaggtgtgcagccgaagccactcctccaaggggctcagggccctgcccagggcc

SEQ ID NO: 293850 - DNA, 122 bp, Homo sapiens
cagattttgagaacatcattgcatagatttgcctttagtatcaaaaggggcaactctttgcgttacacaggtcacaatgtctgtccatctgtctggatcccatttttcgcatgactggaatg

SEQ ID NO: 293851 - DNA, 122 bp, Homo sapiens
acatgacaactaaatgtcatgtgggatcctgaatgggaccctggagccgcaaaagtgttccggatggtgaatcctcacgagtctgcagcaacctcaattcttgcctcctcagaagaaagaat

SEQ ID NO: 293852 - DNA, 122 bp, Homo sapiens
gtaaaggcttctgatggccgggtggcctgacggccaggtgcgagtggggaggacagctcacgcggcctgagcagccacccctggccatagctccagcccccgcccctgcccccggcccctgc

SEQ ID NO: 293853 - DNA, 122 bp, Homo sapiens
gccgaggtaggggtagtgaggaggcagcagatggggaaggaagctacagagggggctccacgttgagacctgcaggggcctgacagtactgtccagggcacagcccagagtcagctctcaag

SEQ ID NO: 293854 - DNA, 122 bp, Homo sapiens
gcgccgccttaggagctgtaacactcaccgcgaagatctgcagcttcactcctgagccggcgagaccacgaaccccaccagaaggaagaaactccggacacgccgcctttaagaactataac

SEQ ID NO: 293855 - DNA, 122 bp, Homo sapiens
gtggcttctgggggggcggggcggggggaggaaaggggcacgggttcccggtctcgtagacgctgcagcggagcagagcctctaggcatgccctcatctagagcagctgctgcggaatccgg

SEQ ID NO: 293856 - DNA, 122 bp, Homo sapiens
caaaaacaatcaatattttcaattattctattgttcagcattcttaagatttttatacctcggggcaattaacacatcatttggtcaggtggaagttatgtatttcttttgtaaatatgaag

SEQ ID NO: 293857 - DNA, 122 bp, Homo sapiens
tagcctgcgggacacaggactgtgggctggactgggccagggtacggtctcttccctacacgccgggctggggaagtggggagcagccgcagagccccatccagcaagccccccacaagatg

SEQ ID NO: 293858 - DNA, 122 bp, Homo sapiens
agggcggacggacagacagacgggtgggcggaaggaaggaaggaaggaaggaaggaaggacggatggaaggaaaagggctgggagagacccctgtgctgacgactctaatgcttagaaacct

SEQ ID NO: 293859 - DNA, 122 bp, Homo sapiens
gagctcctccggcaagctgattggctgggacagcaggattaggcctgtcaagaagagccacgggcgggcacgcactgcccattggttggaaggcccttcgctctagctgggaggctgacggc

SEQ ID NO: 293860 - DNA, 122 bp, Homo sapiens
tggtatgattaacttcgaagtccactgcagacacaaatgaactttccctaaaatgcaacacgagagtactaactacagtcagtaaagatgagagggggttattttgtagctcttcctgcagg

SEQ ID NO: 293861 - DNA, 122 bp, Homo sapiens
caaggatggtctcggactggccgtcgctgtacaggaaggccgtgtctatctcggtgtggccgcgctccaggaaggcgcgcgtgactgcggcgctggtgggcgcgtccatgcggcgccccatc

SEQ ID NO: 293862 - DNA, 122 bp, Homo sapiens
gaaggacacccttccctcacgctgagctcagcacagagcctgcaggagttgcccgcagcccggcggctgccatggagatacacacaggacacaagtgtctgtgatttctgtggccacacctg

SEQ ID NO: 293863 - DNA, 122 bp, Homo sapiens
gaagccagagcaaggtgtgtgggaggggtgtgtgcggttctcgccaggggcccctggcctcggcgcccggcacacaccagtggggcaggctggcagccgtcagaacaaaagggctttcttct

SEQ ID NO: 293864 - DNA, 122 bp, Homo sapiens
ctcccttccccctgctcacccttcccagtctctgttatctatttttccactctctaccaccgtgtgatcaaatttttagcttttggaattcttgaggttgctttttagagcgtttctgtccc

SEQ ID NO: 293865 - DNA, 122 bp, Homo sapiens
gcgcgcactgggcagccccacgctcaaagtgttcggcaaccacgccaagaccgagagcggcgtgcagagggagaacctgaagctggagatcctgaagaacatcatcaatagctccgagggct

SEQ ID NO: 293866 - DNA, 122 bp, Homo sapiens
ggaacctgcacatcaggttccttgctcccctctcaaccaaaactcagacatctaataccacggtaggccccgttctccctcccccacctccctggcccaggcctccagccctaggccctggg

SEQ ID NO: 293867 - DNA, 122 bp, Homo sapiens
ctgcccttttttttttttttttttttgagacagtctcgccttgtcacccaggctgaagtgcggtggcacgatctcactgcaacctgcgccttctgggatcaagcgattctcctgcctcagcc

SEQ ID NO: 293868 - DNA, 122 bp, Homo sapiens
gctgttgggacgttctctgctcagcctattggctgagcccgggagccgctgtctgccaatcgggtggtgaaaggcagacaaatctaccccgccaccagcaaaaacggcgcgtaacccttgcg

SEQ ID NO: 293869 - DNA, 122 bp, Homo sapiens
catctgaaaagtgcctgtctggatgtacctgtctataaccatggacctgcctccaaggtgcgtggaccaacctccgcgtacctgattcactcgatgcgcacctggccgtacgtagcttcatc

SEQ ID NO: 293870 - DNA, 122 bp, Homo sapiens
aggcttatcaaaagggtccttggtgaggcctgaggatggaggctccagagcctgaggtagcgaaccctggggacctgagtgatctcgttttgtgagagagcctggcccctccccagagccag

SEQ ID NO: 293871 - DNA, 122 bp, Homo sapiens
aagcagactagagaaaggaaaattaatagaaactgggcttcacatgcaaggtccataggccgttttgaaaagtcaaggaagagtgaagctcatccttggccaggagaatatgcattggcaga

SEQ ID NO: 293872 - DNA, 122 bp, Homo sapiens
ctgccgggctgtcctggacctggtgaatcctttcggggttcagcaaaggcggacgctgaccgggccaaggagtgggacctgcagtgctggaccacccttttccaagcgcagaagtgccgtgc

SEQ ID NO: 293873 - DNA, 122 bp, Homo sapiens
tgcaggcaaaaacctgtcactctttcctcattcagcccagtgtctcattacatctcctgtcgatcagggtctaaatgtgtggggcggagaaccccagccaatcagtggtgctagcgtgaaaa

SEQ ID NO: 293874 - DNA, 122 bp, Homo sapiens
cctcggggaacaaaaccgtgaaggctaattaggacaagtcggagcagggaacggggacgccgggaggggagagcgcgctccgagttgggcagaacctggaacggtcacaggaaacccgggcg

SEQ ID NO: 293875 - DNA, 122 bp, Homo sapiens
ccacttcttttggtattgaggttcctgcggcctaggacatgctcaccttctctgtctccccggacattgtgtggaatgtcatgtaggcacccagcagtggccaaatggatgttgttagcttg

SEQ ID NO: 293876 - DNA, 122 bp, Homo sapiens
tcccccgagcctctccgaacccccgttggacttcccctccctggccggcgccgcccgacccgctcccccatcctagagggaattccctgcgccgcggctgtgaggcacctccaccccggcct

SEQ ID NO: 293877 - DNA, 122 bp, Homo sapiens
gcggagcccgggccgccgagggaagccgcgccggtggatgtgtgcgaccgcgcgtagccccggtgcccccgggcgcaaagtctccagccctggccgggccccgctcctcagctccgcggtcc

SEQ ID NO: 293878 - DNA, 122 bp, Homo sapiens
gggaacggaaaacagtaggagaaacacctcagggagcccatgagcccgggactgatgcctcgaggccctgctggcggctctgggtttgtgccgggctcatggggggcaaagtccacatctcc

SEQ ID NO: 293879 - DNA, 122 bp, Homo sapiens
acattaaagaaagttactaaaaaggaaaacagggctgaaatggcctttccttagctggctcgtgcaagatgcaactttaaaagggttgtctcaaagactggatggctcagaggaattggtga

SEQ ID NO: 293880 - DNA, 122 bp, Homo sapiens
atttattttttatagaaactgcagtgactgagtgtagaccgttcttcaaggatgaaatcacgtttgctgcgttttagagaacacttgatgtgactctgcgttctgctttgaaatggtgccat

SEQ ID NO: 293881 - DNA, 122 bp, Homo sapiens
accgcctttccgtctttgttttatcttgagtagcttagaaagattggagaagaaagcttacgtggaatgaaaatcaacttttatggatattttgaggactaaaagaataaatagggcgtccg

SEQ ID NO: 293882 - DNA, 122 bp, Homo sapiens
acctgagcacgcccccgcttcgccagccgaccccctcgtcctgcccccaaccctggcccccgtgcgtccacgcgccgcagattcccaccagtacctcaccttgttctcagttgtaatttggg

SEQ ID NO: 293883 - DNA, 122 bp, Homo sapiens
gctgatccactgcctttgctctgatgtcagaatgggctattgattggttttactgaccaacgagaccactgtctgggattttctgtcagatgaaactactggctagataatacaatggcttc

SEQ ID NO: 293884 - DNA, 122 bp, Homo sapiens
gggtggcaatcaagtcaccgtctccgtttactccccgcagtgtggtcgcgcaacttggagcgcagcccctcactcaccgacaagaagaacgggtgcgacccgatttaagatagtaacagagt

SEQ ID NO: 293885 - DNA, 122 bp, Homo sapiens
cttttaactggccctttgagctacatgttttggtaacttttgtccatatgttattaaatacgctttttgttttgctaatctatcttttgtcagtttaattcgcggagcctgaaattgtagag

SEQ ID NO: 293886 - DNA, 122 bp, Homo sapiens
cacttctacttttcccacccttctggtctggacagaaatgaaatagttcagttttaggcacgataagaattcaaggtggtgagtggaacatgagcaggaattaaacataatgcactttaaat

SEQ ID NO: 293887 - DNA, 122 bp, Homo sapiens
agtagggaagagaggaggaaggagaggtggtgagcagaaccagtcaggttttttgcaaggcgaccttgagagaataaaggaaactgtgtcaaagttccgtgggctttgggactgcattcctg

SEQ ID NO: 293888 - DNA, 122 bp, Homo sapiens
gcttctgcagttttcttctcatgtcttctgcgctttgacggactaaagccatgtgaatcacgcagtgattttcagggctatcgggatcaaagggagtatacatacgataggcctcacacagt

SEQ ID NO: 293889 - DNA, 122 bp, Homo sapiens
acagtgaagttctctagagcaaacttctcaggaggccgcgcactccgggttgggttcatacgccgcgtgatctgtccctccgagaaggcccgcctcactgtcttcttcctctgaaatcaaga

SEQ ID NO: 293890 - DNA, 122 bp, Homo sapiens
tctccaagcactgaggggcagaaactcccggatcgggcgctgccagcctccagtcccctccgtcctcggaggttcctggctctctgatccccgtgtcccgatccctgcctctctggcgctct

SEQ ID NO: 293891 - DNA, 122 bp, Homo sapiens
cccggaggattcccgtgccccccgccggccggcccaccattaccgcccccggggcccggccggggtccacacagacggtcctcactgctccggctgcgaaggttctgctcggtacacgcgat

SEQ ID NO: 293892 - DNA, 122 bp, Homo sapiens
agagaagcccttttaaaaatgggtggattacagtctgagacaacagcatcacacctgtggcggtaatgcaggtcacaacctggtgaggagcagagggcatccttcggaaggatcctggagta

SEQ ID NO: 293893 - DNA, 122 bp, Homo sapiens
ggatgcacaggccgcctgcgcgcgggccgggaaggcgcttggagacaatgtcccgtgctgcgacccgggacaggcagtgatggagcagggacttagtttgccttttagttcttgtatgaaaa

SEQ ID NO: 293894 - DNA, 122 bp, Homo sapiens
ggagagtgtcccatggttagaccccacccagcactgagaaccagcttcctggggccaagccggccctccccggccatctgcgggcaccgggaagacaggccatcctctgcggttctccctcg

SEQ ID NO: 293895 - DNA, 122 bp, Homo sapiens
gggaatccgttgagggcgcagctcggccttaaaaacctgtacttgcgattctaagaccagcgcgggttttccgtgccccaccttgtctgccggtggagactgagcagtcagcccgctgtaat

SEQ ID NO: 293896 - DNA, 122 bp, Homo sapiens
gcgcctgcatggagagacatttactgttctgtagataacagtgcagtgatacaggtgtctcgggaccagatgtgactcctgtgaaagggacatagcatgaggttatcttgaaaggaatctca

SEQ ID NO: 293897 - DNA, 122 bp, Homo sapiens
ataaataatagttaaactgagttcctgagaaagaacctaccacatgaaagtatgtcagagcgctgtgagtaacaacatggcacgactataaaatagcgagaatactgacagtcacgacgaca

SEQ ID NO: 293898 - DNA, 122 bp, Homo sapiens
cgggcttggtgcggaagaggttgctctttccgaggcggcccacctgctgtctgacaagttcgactagcaagacattgtggaagctgccgctggaaactcgccatctaggagaaccaaatatt

SEQ ID NO: 293899 - DNA, 122 bp, Homo sapiens
actggggctgggaacgctgccatgaattgggcttggtctgtctgaagggagccaccttttcgacaatccttagacttcttttgcctgttggaattacaccttggatcgtggcgaagtctata

SEQ ID NO: 293900 - DNA, 122 bp, Homo sapiens
aacccggcggggggaggttggggacgggcctggcagttgtgaactcgaacctgccgctgtcgccgcggcggggcggggagcgagagtgggccgcggaggccggccttcgggctccatggacg

SEQ ID NO: 293901 - DNA, 122 bp, Homo sapiens
gtctgctgtctgtccctaggaacgttactaccctacgtacttcctatgaggggagccgcacggcgtctgtccttttccatccctaggaacgtgactaccctacgtacttcctatgaggggag

SEQ ID NO: 293902 - DNA, 122 bp, Homo sapiens
cgtaggctttcccgcagcccgggatgtggcagttgtgcaaatgcttcttcttgcccccatcgggcccacatggagcccccagtcgctccgcctccagacagttggggcagcgacagacggtc

SEQ ID NO: 293903 - DNA, 122 bp, Homo sapiens
attagatgaccaatgaaggcacttagagatatagtcatgagcttggtatcctcttgaactcggctccagttgaagtttctgaaaactttgaccagagaattttcagttttgttaggtttatg

SEQ ID NO: 293904 - DNA, 122 bp, Homo sapiens
ggaacggcatgttgggaccacaagatctcacaacctccatttgtccagaccgggctcaagcgcaataaatccaaaaaacatctgtcatctcttcagctgaaaaaagctcaactgcaactatt

SEQ ID NO: 293905 - DNA, 122 bp, Homo sapiens
gacctgagaaggcagactctgccctctgccacagactgggagggagagggcagtcacggccgccagggacacaccgtgtgcccagaccagggcttgccgtaactaacgggtggcaggaaagc

SEQ ID NO: 293906 - DNA, 122 bp, Homo sapiens
ggaagtgacagagaatagacgaacgtaatttccagaccatcgtccttcaggggtggggcccgtggagaagaaaacctctcagtgccattgtctcgcacctgggaggacgcacatggggcaaa

SEQ ID NO: 293907 - DNA, 122 bp, Homo sapiens
gcaggctgtgcagccgaatcgcttcgcaattattcatgctggtcggagggggatggggcgcgggaagctatgtgtgcatttgtctggagggtagtttctgaaaagccagagctggtggggag

SEQ ID NO: 293908 - DNA, 122 bp, Homo sapiens
gtaaatgcttccaagatatgagcgaatgctatagaaattgcaggaaagtccaaagggctgcgcgtctcctgtggctcagtcttatttcatacctgcaacatcttttaagggaaatttgcaaa

SEQ ID NO: 293909 - DNA, 122 bp, Homo sapiens
actgacctttctctttcaaagctgtgagatctgaactggagatttcttattccctgacttcgtttcccctaaagtttaagcaaaggattcagggtgtgttgctttcagctgaaacactgtat

SEQ ID NO: 293910 - DNA, 122 bp, Homo sapiens
tgtactgagggctcccaagtgcttccagaagccaataaaggatcacttcagtttacttcacggctaaggagtaacccttaagaaccatggccaaacgcctgcaagcagagttgtcctgtcca

SEQ ID NO: 293911 - DNA, 122 bp, Homo sapiens
cgagagaaccgtgggcaccgtccgccactgcttcttcaccgtgatcttcgccatcttctccgctatcatcttcctgtcattcgaggctgtgtcatcactgtcaaagctgggggaagtggagg

SEQ ID NO: 293912 - DNA, 122 bp, Homo sapiens
cctccttatcactaaagttacctttagaccaaggcttcaggaatatggcagtgcctgagtcgctatcccagccatgaatctgcaaatcatccaaccagcctgagccttgagtttgtgcccag

SEQ ID NO: 293913 - DNA, 122 bp, Homo sapiens
attttgtttgcagaaatcactgacttctctcatgttactttttgtgattgctagaggtaacgatatcaaagttcaatgtgctcagcttgtctgtaatagtaaaatcttagtaaatcactcta

SEQ ID NO: 293914 - DNA, 122 bp, Homo sapiens
cactgggctttgagaaaaccccatcttgcgtgctcttactgtatctctcactgataagtccgctcataaaaccagggccttatccagggccacgcttacagaactcccacggacacaccatg

SEQ ID NO: 293915 - DNA, 122 bp, Homo sapiens
gaaggccctggcagcacgagaacaggtccacggggtggggggggggcgtggggggggcatcggaataaatggaagaagaatcgatatgatacaatttagcgctttaaattatgcacttttat

SEQ ID NO: 293916 - DNA, 122 bp, Homo sapiens
agaaccagtatggtcgcttctaaaggaaagttctaaaacgtgtctccccaggacccctctcggcctagctgctggaccagctcttcctcaagtgcaggaatacattagaagcggcctccaga

SEQ ID NO: 293917 - DNA, 122 bp, Homo sapiens
ccctagacctgacatctggtggggcggcctctgtgtccctagacatgacatcctgcggggcggcctctgttccctagacctgacatcctgcggggcggcctctgtgtccctagacctgacat

SEQ ID NO: 293918 - DNA, 122 bp, Homo sapiens
aagttggtgttccctgtcatcaaatcaattgcagatattcatctgtaaaaaccattcttccggccagcgcagtggctcatgcctgtaatcccagcactttgggaggccgaggcgggcggatc

SEQ ID NO: 293919 - DNA, 122 bp, Homo sapiens
ggcctctcggacctatttgactggctgctatctgcccccaaacttgagtatttgccctctcgactgcatttgtattaaaagttggtaactgtcgttaaagccactattcttaagtatctcat

SEQ ID NO: 293920 - DNA, 122 bp, Homo sapiens
ttgcagacctttctttgtcacttattaataataattatgggccatttaacttctgtaagtcgacatttcctgaccttggactctacctcacagggatgatttaaggataaataagataatac

SEQ ID NO: 293921 - DNA, 122 bp, Homo sapiens
gcgccctcgccaggactctcccgctcaggccccctgcgcagtctctgttactgtcacttccggaggttcgccgcctcaaacctccctccggaagcaagctgctgtgccttgtagcgtgtgga

SEQ ID NO: 293922 - DNA, 122 bp, Homo sapiens
ctgcaggaaccggaggtgggagtgcagccaccggctctgcctgggcacctgcgtggcctacggggatggccacttcatcacctttgatggcgatcgctacagctttgaaggcagctgcgagt

SEQ ID NO: 293923 - DNA, 122 bp, Homo sapiens
cggtaacgggcgtcaggggcgctcggcggcctgctgtccaagctggggtcaggagcctggcggtagcaaagagcatcaccgaaaggaagctggtaggctagcgaggccagccccaaagaccc

SEQ ID NO: 293924 - DNA, 122 bp, Homo sapiens
acaccagcccggcctccacaccagagttctgggcgaaccagtgatttgtttctccccaaacgtgcctgtacccatccccacctcccagtcttcccactcctttgatgggagtggagtggggg

SEQ ID NO: 293925 - DNA, 122 bp, Homo sapiens
gggggtgggcgaggaggggcgctcaagtcacgtgcccgcgctggggccgcaataaatgctcgcgaacgcgagagagcgacggaagcgctaggcgcctggttctgcgcgtactggctgtacgg

SEQ ID NO: 293926 - DNA, 122 bp, Homo sapiens
aattacacactcaaaaaaaacagtacactacaagagttgttttgtacacttcattctcttcgaatgcctttgtggcttacagtgatgatcacatatattggttccttgcaacctttttcatt

SEQ ID NO: 293927 - DNA, 122 bp, Homo sapiens
ccgctaaccctgctgtcgcctctttccaccagcgcaccgcctaggcaagccagctgacgccgggggcacagaccaccctccactgagtgcggagcagccaaggtgagtgcaccgatgcccct

SEQ ID NO: 293928 - DNA, 122 bp, Homo sapiens
ccataccccaccacttggacctgcacggggcttcctcctaggatgagcggccagctggtacgcacataggaacagctccatgggagacagccccagtgacttccagcaccttcagggcagag

SEQ ID NO: 293929 - DNA, 122 bp, Homo sapiens
acgtcgtttttaaagaccgaggctttatagcattgacattcttttctgtacccctaatcgcggcatctgtttccataatcttacgcttaacctcgtgctccttgccatccttttgcagcatc

SEQ ID NO: 293930 - DNA, 122 bp, Homo sapiens
tgaagtttaattatggacacatttcagttcaaagtgctaaacaggtgaagcagagtagcacggaactagaaaatctagaaaactaggaaaatcaagtaagttacaaaattaagggagatgat

SEQ ID NO: 293931 - DNA, 122 bp, Homo sapiens
gagggctgcaccgtccggcccaggaactccctgcagtagggatgccctcccggatgagcccgagatcctcacaaggcgggaaatctcgtaagatttcatcccccaggacctgggatttcggg

SEQ ID NO: 293932 - DNA, 122 bp, Homo sapiens
gctggcggaaaaggagcgggagatggccgagatgcgggcaaggatgcagcagcagctggacgagtaccaggagcttctggacatcaagctggccctggacatggagatccacgcctaccgca

SEQ ID NO: 293933 - DNA, 122 bp, Homo sapiens
tccacatccccagagcccccatgcctgccacgttaggacagtctctgccaacaccctgggcgccatgccagggagacagaagcttttccaagaagcagaactcgcttcccttgtggccctcc

SEQ ID NO: 293934 - DNA, 122 bp, Homo sapiens
agtagaaagaagaaaaatctgtaaggaaaacagaggagtcagagagagagggcagagcagcgggttcactcatggccccaaatgtagtttcagaactccatagtcgcttcttaatcatgttt

SEQ ID NO: 293935 - DNA, 122 bp, Homo sapiens
gggcgatttgcatttctatgaaaaccggactacaggggcaactccgccgcagggcaggcgcggcgcctcagggatggcttttgggctctgcccctcgctgctcccggcgtttggcgcccgcg

SEQ ID NO: 293936 - DNA, 122 bp, Homo sapiens
caggaaaaacacacagtcgtggtcagccggagcccctgggggcgcagcacgacaccccgacgaacgccacttaccgagtcccgccctccagcttcgcctgctgcgcgctcttgtcctctctc

SEQ ID NO: 293937 - DNA, 122 bp, Homo sapiens
agcagaagccaccaggccttcctaaggcttaggcccagatccagctttgtgtaacatctgcggcatccctttggttaaaatgagtcaggttcaaggatagaggactatctgagggcataaat

SEQ ID NO: 293938 - DNA, 122 bp, Homo sapiens
agcagagttcttcgtcactgttgctgtcttcgccttcctctactctttggctgccactgtcgtttacattttcttccagaacaaataccgggaaaacaaccggggcccactcattgtaagtg

SEQ ID NO: 293939 - DNA, 122 bp, Homo sapiens
gagggtgggtggggggtctggcctggggggcgcctcccgccccctcttggggaaggtgctcggagactcccgggccctgggcggagagtgtggggaggctgggctaaaggcagagacccagg

SEQ ID NO: 293940 - DNA, 122 bp, Homo sapiens
gcggaagacaagacaaaaatgactccagttcgctagacgcgcagaggggcggatagcgcgcggaccccgccttccccaaccgagtgtgggttccagtcgctggggaggacctggtggccccc

SEQ ID NO: 293941 - DNA, 122 bp, Homo sapiens
gtagtccgcgcgttgggggaccgggacggcagtgtcggggggctcggggctggtgcccggcgggcctctgcgtgtcccctggagcctggggccgagcctaggtgagagtctcctgggtccgc

SEQ ID NO: 293942 - DNA, 122 bp, Homo sapiens
actgggtttgcagtctgagctgggcaccaaagatgtagcatgaatcagatgccctgccctcgcttccaggggaagatctggaggcaggccatgcccagggcctgtatagggagtgggcagtg

SEQ ID NO: 293943 - DNA, 122 bp, Homo sapiens
cacagtaactgatgccaggattctgtagaggcccccggatatttcaaattccaggacctgcgcacaagcaagtgacccgccttctctctcaagttggtttcccataataggactgtccatgg

SEQ ID NO: 293944 - DNA, 122 bp, Homo sapiens
ttggaagggggaaaaacaaatccacaaaacgctccctagcagaggatggtttcgatccatcgacctctgggttatgggcccagcacgcttccgctgcgccactctgctacgcgagtcacagg

SEQ ID NO: 293945 - DNA, 122 bp, Homo sapiens
gaagataagagaggataggtgccttcttactctgtgctcttggtaagaagctaagaggagcgtgtgctgttgtgggtggaatccaggctgccccagaaggtgctctgtcactgtagggaggg

SEQ ID NO: 293946 - DNA, 122 bp, Homo sapiens
gtgaattcggggcaggacgctcagggcccatggtcagcacagcgggtgggtgggttccagcgtggtcacttctccaggggtgcataattgagcagcttctcgatcaggtccacgtgggccag

SEQ ID NO: 293947 - DNA, 122 bp, Homo sapiens
cgggagccaggctgacccgccagcatggtagagttcgcgcccttgtttatgccgtgggagcgcaggctgcagacacttgctgtcctacagtttgtcttctccttcttggcactgggtaagtt

SEQ ID NO: 293948 - DNA, 122 bp, Homo sapiens
ggccggggaacgacgggcggcccaggcgacgacccaaggggacggttcccagcggccgagcgactccagggtcagaggtctgcactccagtccggaggcaggcgactctttccccaacaccc

SEQ ID NO: 293949 - DNA, 122 bp, Homo sapiens
ttggaagtgacgaccttgaagatcggccggttggaagtgacgaccttgaagatcggcgggcgcagcggggccgagggggcgggtctggcgctaggtccagcccctgcgtgccgggaacccca

SEQ ID NO: 293950 - DNA, 122 bp, Homo sapiens
agtcggcttcagatgcgtccatctcctccggcacccatggacagtattcaattttgcagacggcaagacttctaccaggagcacctcagcaacctgtgagttcttctgcatacatttcaatc

SEQ ID NO: 293951 - DNA, 122 bp, Homo sapiens
cagtccctgcttgttccacttgaccatcagtgaccttggcaaggggcagagccagccagccggcatgctgggggcttcgtgaacataaatacatttaatcctggcctctgctccataaggtt

SEQ ID NO: 293952 - DNA, 122 bp, Homo sapiens
ggtatcctgctgatgccccttagaaattttgagaacatccactaatttcatggctagtcacgtaggaatttctttttggattttttttttttttttggcattgctccctcactctgggatag

SEQ ID NO: 293953 - DNA, 122 bp, Homo sapiens
cgaaagggggcagggcgcatccctgccaggaaccaatagaaagcctccaagggtcaggagcgacgttcagcaggagcaatgactggcctatattcgggactcgggggcgggtcggcgccaga

SEQ ID NO: 293954 - DNA, 122 bp, Homo sapiens
ggagctccctggcaacacccaggctgccgtaccgtctcctgcatcagactgagcctccatcgggctcctcccacagccccaggcgggcccctgagtaggggctctcagcttgtgtggaggtc

SEQ ID NO: 293955 - DNA, 122 bp, Homo sapiens
gcagctcatgcaccgctatcaggagctggactcggacggagatgaggaccagggcgagggcgaggcgggatccgaggagtcctcagagtccgaaatgctgaatttggaggtgtgtcttcccc

SEQ ID NO: 293956 - DNA, 122 bp, Homo sapiens
taagagtagctgataaatgccgcaatcatcaaacagccaaagcaaagagctagtagtgctcgcctaaaactgactacgttagtccatttatatctttctgtaaacttgatgcttttaccatg

SEQ ID NO: 293957 - DNA, 122 bp, Homo sapiens
gcatttggatcttgatggaatgtcctaattgacaggagggctcagtgcacatgccagggacgcgcaggagttaaattctgagacaggagtgctgctctgtcctgcttctgctgtgcctgccc

SEQ ID NO: 293958 - DNA, 122 bp, Homo sapiens
attggtccctacagcaagagggcaaggacaattgcttaagttgacctctgggtccggaatcgcgggcaaagatggcggcggccaggtgttggaggcctttgctacgcggtccgaggctttca

SEQ ID NO: 293959 - DNA, 122 bp, Homo sapiens
gacaaccaggagcctgcgtggccacgcagccactgcccagcggccacagtcgcaggagggcgtacccttgtgctgtgcattcggtgggttcggatgaacgtttagtgacatggacccaccac

SEQ ID NO: 293960 - DNA, 122 bp, Homo sapiens
cctgatttggagttgcagaaccttgccctgcttttatctcactttaccgcccgagaatggcgccagccggggtggggggggctaaagatttggacccagaccgtgccactgccaactgccct

SEQ ID NO: 293961 - DNA, 122 bp, Homo sapiens
tacagttaatatctttatacataaattttttgttttttttttactaggtattttgaccaacgtgatttagctgatgagccatcttgatgtagctgatctctcagggatagaagatatttctc

SEQ ID NO: 293962 - DNA, 122 bp, Homo sapiens
ggttctcttaaacagagttcttctgaaacatcagccccacggttccacagctgacacagacgaactggggatggacgcttaaacacatcagcacaatccataaaggtgtgagggtgtttggc

SEQ ID NO: 293963 - DNA, 122 bp, Homo sapiens
gtcgtggagaagtggggggcagatgccttgtaagatccactggagggcacatgcgggggtcgacagagagtcggggaaccaacgtggattccctgctaaatgctatttggcagcgcaagaag

SEQ ID NO: 293964 - DNA, 122 bp, Homo sapiens
aaaggtcaagacctgtacgtacctctcgcgcaggctcgggttgcgttctggtaggacgtacgtgtttctgagcgcttggtggaaagatttaaatggggggaagagaagatgaaaagcaggaa

SEQ ID NO: 293965 - DNA, 122 bp, Homo sapiens
catgatctgcccacctctgcctcccaaagtgctgggattacaggcgtgagccaccgtgcccggcccctaattacccagttcttaagaaaaagtgcggccgggcgcagtggctgaaacctgta

SEQ ID NO: 293966 - DNA, 122 bp, Homo sapiens
tgggcgtatcaacagggggccagccctgtccctcaaccctggggagctggtgctgccgatcgacctgactggcccacaacgtcttcagctaccactgcaagggcctgcggggtgacggctgt

SEQ ID NO: 293967 - DNA, 122 bp, Homo sapiens
tgagtgtctgcgggaactcccacgccacttcccgaaaggatgaaccttctcaatgtgctgcgcctgcacctggcgagcagctttggcatttctcaggcgctcatctgtcagggcatccactg

SEQ ID NO: 293968 - DNA, 122 bp, Homo sapiens
gtgaagccagttgtcgtagtccatttgactcacacacttcttggatccaatctgcacacccgaattttggcttatgatatatatcaacctgcatttcttcttggttttccttgtaaaatgta

SEQ ID NO: 293969 - DNA, 122 bp, Homo sapiens
ccgaccctgccgccccgcggggtagaggacaaagccccggagtcacggcctctctcctggcgcctccaggagttttgggtactgttttgggtggtaaggaactagagttcctcccggtgtgc

SEQ ID NO: 293970 - DNA, 122 bp, Homo sapiens
aatgagagggggccgaattagtacttccgctttccgtgctgtttaacgagccactatgcccgtccctcggatactctgattggccagcctctctcagctcgtcagtttattggccagcgccg

SEQ ID NO: 293971 - DNA, 122 bp, Homo sapiens
ggagcacaggcttctgccctctcctgatgtccctagcagcgccgggcacgcagcagtgctcgctgggtttttgttgcacctttgagaggaaaaggagctcggtgtcccctgcagcccctgga

SEQ ID NO: 293972 - DNA, 122 bp, Homo sapiens
acacctaagccccgacccctctgaacttcccagaagcgcgcaggaggcatggtgcgcatgcgtgtagccacctcaaaggcggcgggaagttggttttctgagtagcaactgagcagcttgaa

SEQ ID NO: 293973 - DNA, 122 bp, Homo sapiens
gtgggggagtccggagagtcccctctctccccagctggaggagcaggctgggtgggggggcgaggtagtggcaagggtgggggaagatgagaatagtgtaggggaaaaaatctgccttggat

SEQ ID NO: 293974 - DNA, 122 bp, Homo sapiens
tggtggacgggctgctttgggcagggccgccctcaggctatataagcgcactcgcggcggcgttggtgttatgctctgggccattcctgagctcgggtaaggctcgctgcaggaggaggctg

SEQ ID NO: 293975 - DNA, 122 bp, Homo sapiens
tcgggaagctgttctcccgaggcgcccggtgaggaggcagcgggacgaccgcggttcgggcgccggattctacctccgcgtctccccaggccgcggctcctgcctggcctggtctctctccc

SEQ ID NO: 293976 - DNA, 122 bp, Homo sapiens
tgccatctgcggctgctgaaggaggcgcctccagaaaagatgccgagtgttgcaagctgtcgatgcagccaagagccgaagaggcatcttgccgattggggagggagcggcgcttacgtgtt

SEQ ID NO: 293977 - DNA, 122 bp, Homo sapiens
gaaagaaatatgcggttattgacgaaaactggaagaacattaaaacaacaacaggccgggcgtggtggctcatgcctgtaatcctagcactttgggaggcagaggcgagtggatcacttgag

SEQ ID NO: 293978 - DNA, 122 bp, Homo sapiens
ccgcctctccaacttcacagaggtcgttgctagtggccacggcggggtggggacgggcggcgttcgggactgggaagctacttgactgccacgtgctcctgcctcgcaacagcggctctaga

SEQ ID NO: 293979 - DNA, 122 bp, Homo sapiens
gtaggcttcttacaagaggaaatctgattccttggcggaggaatagctagagataggagtcgaccttgctgctctgagttcctgatagcagtgctctgctttcttaaactaggacacaaggg

SEQ ID NO: 293980 - DNA, 122 bp, Homo sapiens
gcgggaggacccgcctcaaagagccggcccgatcatcgcctcctagaatacccagctcaacgtctacctggagtcggctctacaggacgcgctcatctcaaacccagagctcaggcttttag

SEQ ID NO: 293981 - DNA, 122 bp, Homo sapiens
agaacagaaatttatttctcacagttctagagactagcaagtttaagatcaaggagcatgcggttttcatatctggttaggaccaactttctggttcatagattggccttcttgctgggccc

SEQ ID NO: 293982 - DNA, 122 bp, Homo sapiens
cactgccacgcctgactagtttttgtatttttggtggagacggggtttcgccgtgttggccgggctggtctccagctcctgacctccagctcctgatctgccctcctcggcctcccgaggtg

SEQ ID NO: 293983 - DNA, 122 bp, Homo sapiens
tcggacgccccgccctggtggatgcggattgcctgcgacgtggaggggtggggacctcggcggtttgggtgtttccgcagtctggcagcgctgcctctgaatccagctttccccacacactc

SEQ ID NO: 293984 - DNA, 122 bp, Homo sapiens
agtcggagctcgtactctgtactctggcgggggcggggcagggcctctgcggggcggggccgcggtatgctgctagctgttactcccgccttccccgcagccctgtgaatgctcagccttgt

SEQ ID NO: 293985 - DNA, 122 bp, Homo sapiens
gcggggctggcggggctggcggggcggcgggggagcccggagtccctgggggcaggcggtcgtcagggaggggtctgttgaggcgggcggcgcggggccccagggagacgcgttgcctttgc

SEQ ID NO: 293986 - DNA, 122 bp, Homo sapiens
acacagcacgtctaacgccagggagccgggcgcccggggaactactgagccgcgccgcgccgggctccgccccccaggccgctcgccattggtccattagaatgggtaagggcggtgccgcc

SEQ ID NO: 293987 - DNA, 122 bp, Homo sapiens
agatccattggagctaaaatattttggcaatttggctttggtggccagaagaaaaaacctcgaaaggaatagcaacagatattgacaaaaatgaaatttatgggatgaaaaaaaagagcaag

SEQ ID NO: 293988 - DNA, 122 bp, Homo sapiens
ttcttttatttgatgattcaatacatttttgattcaaatagtcaccacataacctaggcacgatattaagcattttacaagcaaaatattttactgattttcttttaaattgccagagtaca

SEQ ID NO: 293989 - DNA, 122 bp, Homo sapiens
cactgcacggccgtagtcattgtcctccagcacctgcacgggtggcagatgggcaggactcggcatcaaggggtgtccgggacactgccgggggaggtgtgacgtgcttggggcacagagag

SEQ ID NO: 293990 - DNA, 122 bp, Homo sapiens
taaggatggctaaggatggcaggaatgcagtttgtgggtcatcaacacagatttgaatcccggggtcccgtaggaagcacgagttaccaaattcattggacctctggtttcttgtgcccacc

SEQ ID NO: 293991 - DNA, 122 bp, Homo sapiens
ctggaagttcacacacctagactgataaggctctgacatgctgtatgggccaccctcttgcgtggacaccctcttaacctccctcagagtctgactccccacccccaagctcttcatcttgt

SEQ ID NO: 293992 - DNA, 122 bp, Homo sapiens
agggaagggcttgcagcagatcctcagggtcttgatggacaagtcagagctgtgttagtccggggcacatcagcctgctcatctgagttgcagagagaaggaacatatgcctagaggggcgc

SEQ ID NO: 293993 - DNA, 122 bp, Homo sapiens
aaaagaaagcatagatacacgtgagaaggtgaaacatgaactctactgccagcatataggcgaggtaacttagaagagtggaaggttgctcacctgtactgacaagagaggtggccaaagaa

SEQ ID NO: 293994 - DNA, 122 bp, Homo sapiens
tgaaaacaaggatagaaatgtctgctaacatgctctgtgaccttgatcaacagctttccccgctcttggccttggtgtcctaacttaaatggggaaactgtgatctctctcagctcaaaatt

SEQ ID NO: 293995 - DNA, 122 bp, Homo sapiens
gccgggcaggcagggggcgccggggagggttattgaccctggacccaggctgcacccagacgaagcgccggaggctgcgctgcgccctctccgcggcccaacgctctggcagcccgccccct

SEQ ID NO: 293996 - DNA, 122 bp, Homo sapiens
ccgctttgccttccagctgccctttgctgagggcgcgggcgatggggcgcgcctcgacttcgtggtgcgctatgagacccctgagggcactttctgggccaacaaccacggccgcaactaca

SEQ ID NO: 293997 - DNA, 122 bp, Homo sapiens
cttcatggcgtcacgtgacataattaccaccagaatcaatcaagatgaattgcacgtcagcgcccggtggggatttttgcttagttgatcctggcccaagcctcttgtgcaatcgatggctc

SEQ ID NO: 293998 - DNA, 122 bp, Homo sapiens
tatgatgcaactcaactcttagcaacatactgagcatacaccacttagaactaacacaaccgaaagaatgataaattaaataaccttctcccctacctagtgtttctttcatggcaacagtt

SEQ ID NO: 293999 - DNA, 122 bp, Homo sapiens
tgataggtgctgggaagtcccgtcagccttctgtctgtgtgacatagaaaatgtagttttcgttgtgtttctgaagtgagcccagacttcaggaagcagttttcattgacagggtagatcgt

SEQ ID NO: 294000 - DNA, 122 bp, Homo sapiens
tctttcatgagggcacttgctgtgaatccagtggcttaagcccagccccatgttgggacccgcgttccccgtcctacacgacgccgtgatgcgtgtcagcaggcagcctgctcagtgggcac

SEQ ID NO: 294001 - DNA, 122 bp, Homo sapiens
cacacagccatctttgggcatggtggaaatggcacccctttctcctggtggatccaaacccgtgacagggtacatgacttggtgagttgagccttaccggatttcagtcccacttgcccatt

SEQ ID NO: 294002 - DNA, 122 bp, Homo sapiens
tgctcactgggcctggggaagcccaggatgaaatgagacaaaccctctgccctctggccacggtgtgctggtgcctgcgctttaggcgggtactaaaagacaagcaaatattaaagatactc

SEQ ID NO: 294003 - DNA, 122 bp, Homo sapiens
atcgagaattctttctgcccaactaagcgaattatagcgaactgcggaaaggtgaggctccgggagaggaagcgcccatctctggactcccatccatccctatcctgtcctttcccccttcc

SEQ ID NO: 294004 - DNA, 122 bp, Homo sapiens
gggcgtccggcttccttctgcaacagacgtgggtcacgctctctctggctctctttctgccgccatcttgattccacgttccctccacaaaatgcctggcgaagccacagaaaccgtccctg

SEQ ID NO: 294005 - DNA, 122 bp, Homo sapiens
ttggcaccctcccttctcaaaggcgtttgaaagagtgaagtctaaagcactagatgagatcgaatttttggaatagaaagaaaactttagtagtatctgctttagtattctcatgttacaga

SEQ ID NO: 294006 - DNA, 122 bp, Homo sapiens
ttgctctcccctccccccatactcctaccctttgccccctaattttattttgttttccctcgttgtgatcaattttaaaagacagttctcaagcagcacaaaacggtgtaacttatgcccct

SEQ ID NO: 294007 - DNA, 122 bp, Homo sapiens
cggctgacgtcaccggaggatgtggcagagtcggcgcgggagagctgggccgggaggcgccggaagcggcggccggggatccgctgccactgcagcctacacccttcccggccctcggtgct

SEQ ID NO: 294008 - DNA, 122 bp, Homo sapiens
ttctctataactaaatttagtttaaaattaagttatctataaaggcagcctttccatgatcgttggagcacattctgctcatgttagaagttcattgttctttgtttttagttattaagcac

SEQ ID NO: 294009 - DNA, 122 bp, Homo sapiens
ttttagcccaattttaaagctgggaaacctgaggcatgaagaaattattagcttcctctgcgtcatagctagaaagtgtttcagtgagatttgaacttgggtagtctgattccagagtgtgt

SEQ ID NO: 294010 - DNA, 122 bp, Homo sapiens
tttactcgtggtaccagctcagttgcagatgcatacggaacgcaggaagccggggccccacgttcccccatatgcagtctgcaaatgcaaacacggaggctgaaacaaacacgtctggaaga

SEQ ID NO: 294011 - DNA, 122 bp, Homo sapiens
cgggtaggcatattcctagactatgaggccggcacactgtctttctacaatgtcacagaccgctctcatatctacaccttcactgatacttttactgagaaactttggcccctcttctaccc

SEQ ID NO: 294012 - DNA, 122 bp, Homo sapiens
ttctcacctccgcatcccagtcagcggagtcggggtttcctggctgcgggtaggcgggagcgagggagccgggcccggcggaggattgacgaggcccgcgttcggtgtccttacccagccct

SEQ ID NO: 294013 - DNA, 122 bp, Homo sapiens
gcccgagtcgccgcataagcggaacctgtactatttctcctacccgctgtttgtaggcttcgcgctgctgcgtttggtcgccttccacctggggctcctcttcgtgtggctctgccagcgct

SEQ ID NO: 294014 - DNA, 122 bp, Homo sapiens
ctgggcctctggagatgcttttgtttttactcccacatcccctctgaaggccagtgttgtcgcgcccatttaatacatgagacacgcagctgaggttcagagaacttaggtgactcgccagt

SEQ ID NO: 294015 - DNA, 122 bp, Homo sapiens
tcccggtcctccaggtcccgggacagggtagataaagtgaaacacatttgcttccccgggcgggaggaagggacatggagctgcctctctggaaatgcggcccatcaatcataaactgatta

SEQ ID NO: 294016 - DNA, 122 bp, Homo sapiens
gcccagcttagggttttcaggaaatttggaagctgccgcagtagttggagtctaaggactcgtgacaatcttcgggtgcccttcgagagaaaaggggaggtaagcggggtagaagtacctct

SEQ ID NO: 294017 - DNA, 122 bp, Homo sapiens
ggcctcctttggggattccaaagtaagacaatctcatctccttttggtgattcatctccacggcttttcctaaaggtaacatgtaagaggaagaggtggtgagtctctaagcaattcttgct

SEQ ID NO: 294018 - DNA, 122 bp, Homo sapiens
ctggtgtaaatgaatctactgcactgccagtcatataaaagtacagcacacatggccaggcgcagtggctccaccgtaatcccagccccccagtgggacaaaatggaggtgaagacaatgat

SEQ ID NO: 294019 - DNA, 122 bp, Homo sapiens
tcacggcttgctctttcctcctccgcctctaggcattgaagttgatatcgatgtggagcacggagggaaaagaagccgcctgacccccgtctctccagagagttccagcacagaggagaaga

SEQ ID NO: 294020 - DNA, 122 bp, Homo sapiens
tgttgcccggtgaagagactgtggtctgaccagggatgcagacacagctggacacagtcccggtccttaaacaacttaccttcaggtctgagatcagtgaggacatggaagataagaccgaa

SEQ ID NO: 294021 - DNA, 122 bp, Homo sapiens
gatcccctcctccggggtgtatctcctacccctagcaagattccggtacgctctcagaaacgcacgcctttccccactgttacatcgtgcgccgtggaccaggagaaccaagatccaagggt

SEQ ID NO: 294022 - DNA, 122 bp, Homo sapiens
cccagctttcccacaggccctacatgtctgtgggttccttgtgtgaccaggtgatctacccggactcagtggagggcatgcgaaggaagggctacccggagcaggacctggaagccatcctg

SEQ ID NO: 294023 - DNA, 122 bp, Homo sapiens
gtagctcatcacagggagggctggagagtgatgcttcccttctccaaaacccttacaggtcgtattctatatagctcttctctttgtctccccaaagctcctcctctttagatgcatggaaa

SEQ ID NO: 294024 - DNA, 122 bp, Homo sapiens
tcgtcctctttaagtacggtgctccttcctttcatggaaggggcagggccctccccggaacgggggtctcaggacctacggtcaaaccagacacaccctatggaacccaagcatatacacag

SEQ ID NO: 294025 - DNA, 122 bp, Homo sapiens
ggcctggggtgcggcaaggcaggagccagtgccgtgaagggcaacccagggctggtctcccgccaacctgtctgcagcccgagcacctgggccaggggcggagaccggaccaaggaggcacc

SEQ ID NO: 294026 - DNA, 122 bp, Homo sapiens
cagcatctgctgcttccaaagcttcactgatacaaagagaatgtgacattttgaagaagtcgacaaatgttggaaccaggtgagctgctgatgtgcacccagcctccctctgcctcttttag

SEQ ID NO: 294027 - DNA, 122 bp, Homo sapiens
tggttccaaaacccagagaagaaaatcacaaaggccgacttgtctattgtttttaattcccgaaggaaatggacctcccctagatcactgggaatcttcagctcacagaacatttttggtcg

SEQ ID NO: 294028 - DNA, 122 bp, Homo sapiens
gggcaagtgagtacagtgccagaatagggcggggcgcgaaataagatcccgaccggcgggcgcggggcggggcgatgcaggcagggtaaggggctggcagagtgagacccgccccgaccggg

SEQ ID NO: 294029 - DNA, 122 bp, Homo sapiens
tctaacatctacctctctggaacaaatatgcccagttactggtaatataacatgtggtatcgtttttcccttatttggaacatacagaactaaattaataacagttcttacaagaccctggg

SEQ ID NO: 294030 - DNA, 122 bp, Homo sapiens
agctccccaccccctactgtgacccaagcagttacttaaacactaatacctcccattggccggcgtggcagagcagcagctctggcgctagagggaacctgggctgctctagctgggggaga

SEQ ID NO: 294031 - DNA, 122 bp, Homo sapiens
tttgtatcctatttgctgttagatagctctggtcttattatgcaaaaggtgcctttcccccgtcttgccctgaattgtattacaaagcttcctcaaattaggaaacattaaaaggtgcccag

SEQ ID NO: 294032 - DNA, 122 bp, Homo sapiens
cggccgcaggaaccacgatgagaggcaggagctgctcctggctgaggggcttcaaccactcgccgaggaggagcagagggcctaggaggaccccgggcgtggaccacccgccctggcagttg

SEQ ID NO: 294033 - DNA, 122 bp, Homo sapiens
cgctgcccccacctctctaaagagtctccgctgtgttctagacaaatacaacgacttcatcgaggccaaccgcattgaggacgcacgggagcgaatgaggacgctgcggaagctggtaagga

SEQ ID NO: 294034 - DNA, 122 bp, Homo sapiens
tttctttatttgcacaagtctctagaaaagcccacgtggcctaatgtcatagacttgatgcgtgttgaggcttggaccctcaatgacggtgttgattgtcctgccattccaggcctgcaacg

SEQ ID NO: 294035 - DNA, 122 bp, Homo sapiens
caatgcgcaccacgctaaccttgccttgctacaggctcctcaggagacagattcccctgtcggctttgttcagcaacccaaaatgtaatcaagtaaccactctactgtagagggaagaaagg

SEQ ID NO: 294036 - DNA, 122 bp, Homo sapiens
accgggcagcgaccgggcctccttcatcaagaacctgcagggcatcagctccttccgccgcggcaccttcaccgactgcgcgctggccaacatgacggagcagatccggcaggaccgcagca

SEQ ID NO: 294037 - DNA, 122 bp, Homo sapiens
actgctctcgcttctgatcctcgcaatgtgggtggtggggagcggccagctccactactccgtcccggaggaagccgaacacggcaccttcgtgggccgcatcgcgcaggacctggggctgg

SEQ ID NO: 294038 - DNA, 122 bp, Homo sapiens
ctccctcgattccctagcgaggcttgggaatcgcgtggaagacacttctctcaccttgcccggttccgtaccagctcaagcccgtccctgttactccaacctgcgccccgcctcccacggag

SEQ ID NO: 294039 - DNA, 122 bp, Homo sapiens
gcgaagtaggaaatgtttcggagacactaattggctcgattgcctggcgcgctcctggaccgaaagctgtggctggttgaggcgttgcctggcgacgtgttactcagtggcgcagtgcttcc

SEQ ID NO: 294040 - DNA, 122 bp, Homo sapiens
aaaggaagttggtatcaacgtgatctcgactaagggaccgagcggaagtcctcaatcgtacgccacgcggagagcatgctgggggccggaaggaagaggaaattccagtagccgatcaggag

SEQ ID NO: 294041 - DNA, 122 bp, Homo sapiens
ggaccagctcgtaagcagtgcagatgtgttggaacaggccgtacttgtgggatgatgactcgatgcctgtgcccatgatcaagccccctgcagagacatcacacacagtgtcagcagggaga

SEQ ID NO: 294042 - DNA, 122 bp, Homo sapiens
gttttcatttgtaaaatgaagacactgatgcgtgcatgacagggactcttctgatgcctccgtgtcgatggccaccaagccctgagaaccctgccggcacccagcaccccatgccagccagc

SEQ ID NO: 294043 - DNA, 122 bp, Homo sapiens
acagtttctcagctctctttattaaatcagtttcttatcggagttatgagagcttaactccgtcctttgaattgaggtttccctccagtcttgtgtactcacctctctggaggttcttggtg

SEQ ID NO: 294044 - DNA, 122 bp, Homo sapiens
ctgcacaagcaacttcctgtctcctcaaaggagataaatgatcctaattcactttaatgccggaagaaggaggttctgtgtcattctaataagcctcaaactcctggtactatttttacccc

SEQ ID NO: 294045 - DNA, 122 bp, Homo sapiens
tagacgctgagcaagaatgtacacagatgcccactgtaatagagtagagaacagtgtagacgctgagcgagaatgtacacagacgcccactgtaatagagaagatagaggagaacagcgtag

SEQ ID NO: 294046 - DNA, 122 bp, Homo sapiens
cagctcagggaccgctctaaattctcctcttattgagtaggggctggaaatcattcagctcggcggcgcgccccagaaccaccccctacccccgctccggcccgcggccgcgcccgcgcccg

SEQ ID NO: 294047 - DNA, 122 bp, Homo sapiens
ttgctcactgatctaactcaagaaattgaaaatcttcaagtccagaattgaactcatcatcgtttcctgtctcagttaaaattaccaacatatcctccttagtcatccaaggcaaaaacctg

SEQ ID NO: 294048 - DNA, 122 bp, Homo sapiens
tgggctcaagtgatctcctgcctctcaaagtgctggggttacaggcatgagccactgcaccgtgcctggcctggaatgctaatcttttgagaagagatgaccctcggttgctgtgaaaagtg

SEQ ID NO: 294049 - DNA, 122 bp, Homo sapiens
cttacccgagtgaagctttaaaagtcattatgaatccattagctcagcagaccttacaaacggccttcactactctggactgcatttaaatttacaacagagagaagtaacttttcctcatt

SEQ ID NO: 294050 - DNA, 122 bp, Homo sapiens
acttttggctaaaagaggcactgccaggtgtacagtcctgggcatgcgctgtttgagcttcgggggagagcccagcactggtccccggaaaggtgcctagaagaacaaggtgcaggaccccg

SEQ ID NO: 294051 - DNA, 122 bp, Homo sapiens
gttgaagaagagtgtggaggaagctattaccaggggagggccagggctctgaggagtgggcgctgggagaagctcccatttaggaatgaatttaactgtccttgggttacactaccatttat

SEQ ID NO: 294052 - DNA, 122 bp, Homo sapiens
caaaatgcccaatagttggatggcgagggttttttcttttacaatcatatggcttgattccgttttccagatcttgtctgagagctgctatttgaaataaaaatgtttgcatccatttcctc

SEQ ID NO: 294053 - DNA, 122 bp, Homo sapiens
cagcaggtcatttggctctcaaactcagacctccacttggacttttatcattagtaggtacgttctggcctctatctttactcttcattttgtatctggtattgtacaaaggccaggtagga

SEQ ID NO: 294054 - DNA, 122 bp, Homo sapiens
gcgcctgcccggggaaggcaccgcccacctgaccctttcctcgcacctcgcggtgttctgcggctctcgtctgctccgcgaaacttagattgtatgtggaagcattggaatctagggggtgc

SEQ ID NO: 294055 - DNA, 122 bp, Homo sapiens
gagtcagaaaaatgctaatgattctggggctgccggagctgagccaggctggctctgggccgtgagtggccggggtgttttcccttcctctgctctgctgttttcttttcctcccctggcac

SEQ ID NO: 294056 - DNA, 122 bp, Homo sapiens
cacggcgggcccggggcaaagcgccgggctgcggcagaagggcggcagcggcggcggccgcgatggatctaggctagggcagtcgccacccgcccaagctgcgagccccatactcgactcct

SEQ ID NO: 294057 - DNA, 122 bp, Homo sapiens
agcaggcagagcttctggcagggtcgcctaaagacgactcccacaccaggcagggaacctcggcgcagcagtgagtgcgttcattatccattgctaagtaataagttaccccaagacactgt

SEQ ID NO: 294058 - DNA, 122 bp, Homo sapiens
ctctgccactgtgctgtgtggcctcgggcagatcactcaacctctctgtgcctggttccccgcctgtgaagtggggccagcaagcgggtgctgtggggttcaccctgatgtgtgcgtgactc

SEQ ID NO: 294059 - DNA, 122 bp, Homo sapiens
agtgctaggcacagctgtctcccagcccacctcctcagcgctcactgccagagagcggggcggccagccagcgcctgttactccaggaagccactgcccaatccccagcctgctgggctgtg

SEQ ID NO: 294060 - DNA, 122 bp, Homo sapiens
tcaggccagccataaccaccacggctgttatgggtgcggttactatggcaacagagcaaccggaagcggaagactgccggtttccttgtcgcaagaaatctgttaggaacaaaaagggacca

SEQ ID NO: 294061 - DNA, 122 bp, Homo sapiens
cactgccattctgtcattcactagtgttctcgacggagaggcgctcttgctgtgctgtgtcgtttttgatggagagatgctcttgctgtgtttttgacggagagatgctcttgttgtgtttt

SEQ ID NO: 294062 - DNA, 122 bp, Homo sapiens
ggccaggctgagcaactgtatgttgtctacaaagggcctcaacctggcctcacatggccacgtccagcaccaaagacaaatgtacagggaaggggagggtgtgaggtccaacactcacctat

SEQ ID NO: 294063 - DNA, 122 bp, Homo sapiens
atatctggtaacttgtgttgcttgaaaactcagatataccctcttttatgcaataggaatcggttgggttcctgaatgggaaaactattgtgatttcaggatatcaaatccagagttttatt

SEQ ID NO: 294064 - DNA, 122 bp, Homo sapiens
ataagtctctggagggtgagattttagaagcaagcacagggacactgcagggcccgggggcgaggctgggaaaacccagccggaaaagccaatggagcacaaagaaagggcctcttttctgg

SEQ ID NO: 294065 - DNA, 122 bp, Homo sapiens
ccgggtcagatccactcttctaagatccgcaagcccccggtacgtttctctacccttttacgcggaaggtgagtctttgcctacacacgttggtcactctcaccgggctgtccagcgcctcc

SEQ ID NO: 294066 - DNA, 122 bp, Homo sapiens
aatggagaggacggtggaagagcgagccagggcagccacgatggggcggagtcaggcaggcggagtgaggagtggcaccacgcggagcttagttaagattgaagtgagagcccatccaatga

SEQ ID NO: 294067 - DNA, 122 bp, Homo sapiens
ctaatgccaccactgatctgacaggaggcggagctcacacagtaatgcttggacaggaggcggagctcacacggtaatgctgtgacgggaggcggagctcacacggtaatgctgtgacggga

SEQ ID NO: 294068 - DNA, 122 bp, Homo sapiens
gtctgggttcagagtcaatcttgcaacagggcccccttggcaagggtcacagtgcgacgccgcgctccccttcaccaccccagctcggcccagcgagaggtgcagcacgtgcaggccgaggg

SEQ ID NO: 294069 - DNA, 122 bp, Homo sapiens
gatgagcagaattcacagtcctcgatggaacattcgatgaacagctcagagaaagtagatcggcagccgtctggagactcgggtctggccgcagagacgtctgcaatctctcaggtacctcg

SEQ ID NO: 294070 - DNA, 122 bp, Homo sapiens
cccaagccccgtcgattagacaggtttaggcacttccgggactctcagaagcctgggaagcgagttctctgcaattggactaagcctgcgaccgtctggtataacaattatatgaataatcc

SEQ ID NO: 294071 - DNA, 122 bp, Homo sapiens
agcctgctgtggagttggggagcagagggaacccagcttacttcttaacaaagctagaggcgggcctggtgcttgggaagggcgactcccacttcagccacttctcgtaggcaggctggtct

SEQ ID NO: 294072 - DNA, 122 bp, Homo sapiens
gcctgtcatctccagggatgtcttacaggtagatagaaaccacaactgtgtttgggtgggcgggggaggggcaggggagtgaagggacaagcctcttgcctatctccaagccaggtacctag

SEQ ID NO: 294073 - DNA, 122 bp, Homo sapiens
ccaggcccggccagtcacggggaggatccagggagctgtaggtcatctggtcccgctcctcgtttggggcctccgtggtgacaatgcctggccacaggaaatgggatcactgggagccctgt

SEQ ID NO: 294074 - DNA, 122 bp, Homo sapiens
aaaccgggaggctgtgccacgtctgtgggtagttcggtgcgcacacgctggatgggcacacgtgtgtgggcgcgtgcatgtgggcatacagtggcacatgcgcacgtgtgacaggggctaac

SEQ ID NO: 294075 - DNA, 122 bp, Homo sapiens
acagcagtgccccttggtggagcgaagttgctctcccgggcttacctgaactgcctgcgccggggccgggcgggggccgggccggggccgctgtagtgccgcgctgcgagccgactgtgcgc

SEQ ID NO: 294076 - DNA, 122 bp, Homo sapiens
ggcgctgtgggtccccaggaagtggggtaccaggctctactcccaccccggcctctgaaacgcttctctctcggccgctagcctagaggctgccagggttgggcactgttctcactcacacg

SEQ ID NO: 294077 - DNA, 122 bp, Homo sapiens
gcccgaacgctgaggcaccgatcccggctccgtcgccgcccgcgaggcccgccttggccacgggctctggaggccagtgcctcccgctcgccgcccgctgcgctcctcacccctgcctgcac

SEQ ID NO: 294078 - DNA, 122 bp, Homo sapiens
tttcctggtgagctttggcccatcctgggcctctccactaaactctgctgacggggagctcgcatcccgttatctgcaaactgtgctgacagatgcgtgtgccgtaacccatgttgctttcc

SEQ ID NO: 294079 - DNA, 122 bp, Homo sapiens
tagagggatggcaggaaggcttttaaggaatatccacaaggcacgtttattgccaacaggcgatggagagtagggtatgccaggggagggtcgttcctaaataaggggatgtcttagccaga

SEQ ID NO: 294080 - DNA, 122 bp, Homo sapiens
tactttccagtttgggattaataagagtaacgctgctacattcttgtacatgcctcttggcgaatctgtgtgcacatttctcttaggtatgtttaaggagtggatggctgagtcataggtta

SEQ ID NO: 294081 - DNA, 122 bp, Homo sapiens
gtctttgagattatcagccttatccttggtaggctagccaggcacagaactcaataggaacgagagacttccacctgaccacagaggtgagaatcacctttcccttcaccccccattgtcat

SEQ ID NO: 294082 - DNA, 122 bp, Homo sapiens
cggcgagtcctggagtcaggcctcgagctctgagccgggcggaaactcagtgggggtctccggaaaaggcctgagccacaggcgccactccctacggctgaggctacaaagcctgcggcacc

SEQ ID NO: 294083 - DNA, 122 bp, Homo sapiens
ccgcccactttgccggtgggacagagtggctgacggcgtgtggcacaggcggggtgagcccggaagggtgagcatgcgcctgctgacgcttcgttcaccaagcggggggcctctacagctcg

SEQ ID NO: 294084 - DNA, 122 bp, Homo sapiens
agctcacattcctgtttctgtccagttttgttttctttaaaggtccctctgtcccccacccgggtgcagaccccccgccgcacaccgctatggttcacagaggcgggccacagccgtagaaa

SEQ ID NO: 294085 - DNA, 122 bp, Homo sapiens
accagtactcagaccaaagagcaaaacattaccagtacctagaagtctccttctagttaccgccctcctgaggctaaccactgcctgactcacttctgatttctaataggataattcattta

SEQ ID NO: 294086 - DNA, 122 bp, Homo sapiens
cggcacgtagaggagttggacctaagaccgcgatcactctcacctcgcagagcccagctacgggcccgcagtctccgccgccgccaccacaccggcatgactaacggctcttcgcgcttctt

SEQ ID NO: 294087 - DNA, 122 bp, Homo sapiens
aagacctcacctgcaaccccatccttgcatagcttctctgcctgccctgtccccatccctcggtcccttctaggtgtcacccgagagccttctcaataaatcacttgcataagaattccctt

SEQ ID NO: 294088 - DNA, 122 bp, Homo sapiens
gaggcccaggcgggaagatcacttgagctccggagttcgagtccagcctgggcaacatagcgagaccagaaaataagcaagtaagttactctctgggctgtcgtaacttattttttcttttt

SEQ ID NO: 294089 - DNA, 122 bp, Homo sapiens
cctcggaccggctcccggctcccggtccggctgcctgccagcggccgctcaggacagaagcgagatgcctgcctaggcgtttctggttacaatcacctcacacaccggcctgcattccgcct

SEQ ID NO: 294090 - DNA, 122 bp, Homo sapiens
ctgagcagcgcaagttccagctgagcagtcaggtaaccccaggggcccatgctcccaggccggggcgcgtcagacccgtgcgaggccggccttccagctgcagaacgtcggaagagcagctc

SEQ ID NO: 294091 - DNA, 122 bp, Homo sapiens
caatgcggtctttgcctggggggttggccttcagtaactgctcggcaatgtcattcaccgcggtgatttgtgctgcaagggtgttcatttcaggctccagggtctcgaacctgagagggtgg

SEQ ID NO: 294092 - DNA, 122 bp, Homo sapiens
acagaaagcaatgtcactacttcaaatctagacctttgatcagcctgggtgctctccttgcgttcttcataaattttttttttattcttcaaatccaaactcaaggatgatctcctctttta

SEQ ID NO: 294093 - DNA, 122 bp, Homo sapiens
cactctcctgagcgacggaaggagactttcctgcttggaaggcttgactccaaggggagtcgaagccggcccctcactcaccccctcaccggagcacagccctgcgtgttgctatctgtgtg

SEQ ID NO: 294094 - DNA, 122 bp, Homo sapiens
gatcacctacggccagtgcggggatgtactgcgggccctgggccagaaccctaccaatgccgaggtgctgcgtgtgctgggcaagcccaagcctgaaggtcagtgcggctgcatggcagacc

SEQ ID NO: 294095 - DNA, 122 bp, Homo sapiens
tggttgcttacaatcagaaggattgccatagctctaggcatcaagactggaagttgggaacgaagaatgccaatgaggtctccactcacacatgctctgatacctatcccttaagaggattc

SEQ ID NO: 294096 - DNA, 122 bp, Homo sapiens
aaagaccaaaaagccacatcggggtaacgaggagggataaaaaggaaaaaccgtctgttccgatttgccgatcagcaacccggagaacacagcacgtcgtctgtcaaggaaaatgaggacat

SEQ ID NO: 294097 - DNA, 122 bp, Homo sapiens
ccggggaggcgcctcctcccagccggaaccgcccgactccgcttcgtcctcttgggcccacggaccactccccactgccccagccccaacacctgcagatcctgcgagcccgagccctcccg

SEQ ID NO: 294098 - DNA, 122 bp, Homo sapiens
ggcaaggaccagaaacactaaagttcagagaggctgtccttctggccccaacataaaggccgcccagaaggatcaggattttataatcctgattaagatgtgttatcctccccctcaagatg

SEQ ID NO: 294099 - DNA, 122 bp, Homo sapiens
cgtcctcggcctgctgcggccccctccttgccctggctttgtttttctttttctttctttcgttttctttttcttttcttttctttttttttttttttttttttttttttgagacagggtgc

SEQ ID NO: 294100 - DNA, 122 bp, Homo sapiens
tcccatgtacataagctcccggaggagcggtggccgagcaagcctctgggcccgagcgttcggtgtctccacttcactcaggtatagtgttccctggaaccgggaggctgccagctgccagc

SEQ ID NO: 294101 - DNA, 122 bp, Homo sapiens
gcgggcagccacagccaacctgaacggggagagagtgacagcggcgagggtgggggacggcggggacttggcgtaacttcttacaggacttaactagcaagtcctctaggctagaatgttcg

SEQ ID NO: 294102 - DNA, 122 bp, Homo sapiens
atttaccgacggagacgcccagcaggtaacctggtttgggagggctttgggagcccagggcgggcgaggtgagggcctgcctctggtctgacctgctaagaggctgtggccgtccccatatt

SEQ ID NO: 294103 - DNA, 122 bp, Homo sapiens
gagacaagctgatgcacggcctggaaggtgcagccctcatccctgcgttccctccccgcgcggagttcctgtctcaaggccaagacgcgcagcgctgatgctggccccttcctaggtcagtg

SEQ ID NO: 294104 - DNA, 122 bp, Homo sapiens
gtgcctgtagtcccagctacttgggaggctgaggcaggagaatggcgtgaacctgggaggcggagtttgcagtgagccaacgttgcaccactgcactccaacctgggcgacagagcaagact

SEQ ID NO: 294105 - DNA, 122 bp, Homo sapiens
aggggtttctgagttggatttagttttcactgggtaaaggcataaattaaaaggaggaaccgggtacccttaagaaagtcaatgaagtaactaagcttgctattcaaaccaggaaaacacag

SEQ ID NO: 294106 - DNA, 122 bp, Homo sapiens
ggcatctgggggaggccagctggggtgaggtcatctgccagccaggcccgtaggacttggcgcttcttgtttatcacagccacatgtggggccactgccagggcccgccccaactctgcagt

SEQ ID NO: 294107 - DNA, 122 bp, Homo sapiens
gtcccttgtccctagacctagaaatatgctcggtccgcatgtcccggcccgcaactccctcggaggaagcacagtcctcactgaaaggggagagcagtcagtctagggcacgcaaccgcccg

SEQ ID NO: 294108 - DNA, 122 bp, Homo sapiens
tattttctctttgctttctgtagcttttattgtttaatgctcagccttggaaggatatgccgttccatatgttctaaaaggaacaaaacagtctaccagtacttagcatctactcatttcca

SEQ ID NO: 294109 - DNA, 122 bp, Homo sapiens
ctgagcatagccctctaagtgactaagactcaaacaaaatgcagaaggtgagcttgttaacggctctgaaatatgatagctttgagtggtagtaccaccaatcagagaaagtcactgcacat

SEQ ID NO: 294110 - DNA, 122 bp, Homo sapiens
ttcgttcctcccggtaggttcatggtctcgctggctcaggagtgaagctgcagacctccacggtattacagctcataaaaccagtgtggacccaaagagtgagcagtagcaagatttattgc

SEQ ID NO: 294111 - DNA, 122 bp, Homo sapiens
gtataacaactattgacatagcatttacaatgtcctagctatcacgggagctaggagctgcgtatctgggagctgcgtaggttaggtacagacactgcccctttttatataagggacttgag

SEQ ID NO: 294112 - DNA, 122 bp, Homo sapiens
gagaagagcggttctcattgtcactgggctctggagctttcttcagtagacttcggagttcgccccgtggtcggcgggggtttgggctcgggttactcctgggtaaatcggttcaataatgc

SEQ ID NO: 294113 - DNA, 122 bp, Homo sapiens
cggcgccggttctaggagagcatctcgccggcaaaatgcaatctcgggggaggcagaggccgcccctgccgctgccggaggctgggggatgggggcgggaggagggagggagggagggacac

SEQ ID NO: 294114 - DNA, 122 bp, Homo sapiens
gcgcggcctcgcggagcccgcccctccctcccagcgcgaaatctgaaacaatctcggagacggattttggaaactcctctcggtgcatatcctaaggctgcacgactagctgcgtgtgaaac

SEQ ID NO: 294115 - DNA, 122 bp, Homo sapiens
ctacacactgtgaaatcctcataatccctgctttggagaaagagatgacccttgtcctgccgggcacttgatctttgatctgcccacctgggctgaggtgctggcctcacccctgggtggcc

SEQ ID NO: 294116 - DNA, 122 bp, Homo sapiens
cctgcttctcctcgccggtctcctccgcagggttctcttcttcttgtttctgggacatggcgggaccgggactgtggagtgtaaggggcccgggaaggcaaccggagaagggaagggggagg

SEQ ID NO: 294117 - DNA, 122 bp, Homo sapiens
aaagcacatggcaccagtccatgcctcagagttcgtacggcactggggaccacagcaggccgagtaccctgggtggcaatcctgcctgctttctgcacttgaacataaagtcctgctcaaga

SEQ ID NO: 294118 - DNA, 122 bp, Homo sapiens
gctgattaaaaaaaaaagtgtttcagaattctactcagccttgctcacaggcaatgaccccgtcagatctgataaactgaacaagctaggggctaccaggagctgcaaaagagacctacaca

SEQ ID NO: 294119 - DNA, 122 bp, Homo sapiens
tttcacttcctcacaagaaccctgtgaggtaaatcagcagatagtgggattcccatcttccggatgagggaactggggctcattacttgctcaaagtcacaggaccaggaaagaatccagat

SEQ ID NO: 294120 - DNA, 122 bp, Homo sapiens
tgctttgtaccttgcaattctttcggctttggactccagactgtgggtgtccatggtacccgaaccatagggtgagtcaccgtggacaccggaggtttctgtgcagtatttggatcgagttt

SEQ ID NO: 294121 - DNA, 122 bp, Homo sapiens
cttatagtagcaagggggaatcctcactgcatgctgggaactgtagtcttcctgggtccccgttcctccaggacgcggaggcgccggagttgccgccattttaggtcccgaggtgcgccggc

SEQ ID NO: 294122 - DNA, 122 bp, Homo sapiens
tcccctctcctagcaaggctgacagctctctatagccaccagatcagctcccccaacccccggcccccaaaatgaaattattgcaagatctgcctggttctgctgtttgttgcctgggactc

SEQ ID NO: 294123 - DNA, 122 bp, Homo sapiens
ccaagcaggctggtcggaatggacttgagggtggaggccgtgaggaggacacgggtcaggcggccttgggctgctgggcaccagggttccaggacttcacacagcacccagtgagcctcctg

SEQ ID NO: 294124 - DNA, 122 bp, Homo sapiens
gcagcccttcaaggacggcgcgccgctcctgcatgctgatggcctgcggggctgcctgcccgtgccccggcgcccaactcctacaaggaagaaattcaggggctccccgcccccgccacagt

SEQ ID NO: 294125 - DNA, 122 bp, Homo sapiens
gcgagcgtgtgtggctgggggaagccattgcctgtttaatagttgctgttgctgcacttccgcttctctcccagcgagagagagacacgagtggccaggcccagccgcagccgcagcagcag

SEQ ID NO: 294126 - DNA, 122 bp, Homo sapiens
gggccagaacaatggctttttgcccggaaaacggagttgggagcaagggcgggcgcgccccgggaatcacgcgggactcggtgggcgccccaggcccgaagtccctaggcacctcctccccc

SEQ ID NO: 294127 - DNA, 122 bp, Homo sapiens
atctgcccgccttgacctcccaaagtgctgggattacaggtgtgagccactgtgcctggccgatgctatcaccttctgacctgcaatacccagaatctcagagacaggaagaaaactcttag

SEQ ID NO: 294128 - DNA, 122 bp, Homo sapiens
aaacgaatgaacacgtgcacgggtgggtgaacaacccgcagccccacatgaacctccgcacgtggacctccacagccacggaagccagcccaggctgggcacagcggcttgcaggaggcctg

SEQ ID NO: 294129 - DNA, 122 bp, Homo sapiens
agaaaccctgcttagatgaaggtggataatgtaaaccagtaacaacagcgataataataacgactatcatttatctagcatttgctctctgccagttttgtgctaagcattttatgtatatc

SEQ ID NO: 294130 - DNA, 122 bp, Homo sapiens
tttattcgtgctctattgtgacgtccaaagcctgacccaaggaactgattcaggtagaggcgacgccagctcagtgtagggggcaagctctgcaagaccttggccgagtgacttctgctgct

SEQ ID NO: 294131 - DNA, 122 bp, Homo sapiens
cgacagactcacaggaacccatggaggcgggggaaggctcaggcatggcgggctgcagcccgagcctccccgacaaatgccgccccctgctccagggcgcccagtcccatcgaccgcccaag

SEQ ID NO: 294132 - DNA, 122 bp, Homo sapiens
gggatccgggcgcaccctggaagctccagatgggcgttggagacctagggcgagatgaaccgaggaccgtccatgtgtgtgggtgccgctcaggagcggggaggtgggggtgtgggtggacg

SEQ ID NO: 294133 - DNA, 122 bp, Homo sapiens
caggtcgggccagttgctggtgagcttatgaagtgtggtctcctccccggagctcatgtgcgcttcccacctggtgagctcagggtctctctggagggatcctgcctcccacccctgtctcc

SEQ ID NO: 294134 - DNA, 122 bp, Homo sapiens
ttcgctcggggctgacgcggttctctggccgctgtgccgtgctgggccactaggtggcagcggaggccgcccggagcgacagccggcggtgcggaggcgggcccggcgcgggcaggcaggag

SEQ ID NO: 294135 - DNA, 122 bp, Homo sapiens
cccacgccccctcaccggtgatgctgatcttggcggaccacttggacgtgccgtccagcacgctctgcttgaccgccttcatctgctgcgtgtgcgccgtcttggtcaccgcgaagatctcc

SEQ ID NO: 294136 - DNA, 122 bp, Homo sapiens
ggaccatggccagaagcatcttgacagcggactggagctcgcttgcagacaccttcaaatcgagtggtatttaaagctccctctcaaacacggaaaaaccctgacatcaaactgataccaag

SEQ ID NO: 294137 - DNA, 122 bp, Homo sapiens
ccttggatgaggtggtggtccctcactgagcttcccggtgcgctctccctacctgctgtccgacaaggaggtgtgcaagatcgtgcagcagagcctctccgtgggcaactttgccgcggggc

SEQ ID NO: 294138 - DNA, 122 bp, Homo sapiens
gtgactggcatctgaagtgggggacactcttgtgagactgagccctcaacctgtgcgatgcgacactatctcctggtagatagcatcagaattgagttaaatgataggacacccaccaggtc

SEQ ID NO: 294139 - DNA, 122 bp, Homo sapiens
acatggctcaccctgtaaatccaacactttgggtggctgaggcaggaggatcacttgaaccgaggagtttgaaaccagcctcagcaacatagtgagaccctgtctcaactaaaaaaatttaa

SEQ ID NO: 294140 - DNA, 122 bp, Homo sapiens
gtctcttgccggaaggtgcgagttagtgcgctcgattgtgggcgggggcggaaagaggcgcgttttaaagtggtaacagatggttttcttatccaataggattaaaaaatttgtccttaccc

SEQ ID NO: 294141 - DNA, 122 bp, Homo sapiens
acctcgtgatctacctgctttggtctctcaaagtgctgggattacaaatgtgagcccctgcgcccggcttcaagcttttaagtgaagaataaatatagtatgggccaggcacaggggctgac

SEQ ID NO: 294142 - DNA, 122 bp, Homo sapiens
ccagtggagtgttcagtctggaatttcaagattttgtgaataaatgcctaataaaaaccccgtagagagagcagatttgaagcaactcatggttcatgcttttatcaagagatctgatgctg

SEQ ID NO: 294143 - DNA, 122 bp, Homo sapiens
atattttagccaatcagaagggctccgggcgcatctaagccaatcagaaggagccaggtacggcgaccccaggagagagcgtgtgacgcacgcgccggaaaaagaggttacggggcgccggt

SEQ ID NO: 294144 - DNA, 122 bp, Homo sapiens
ggcaggctgcaggtcctgagccctgccccacagggaggatgctgaggtccggcaggaattcgagtgcagcgccggtgggccggcactgctgggggatccagtgcaccctccgcagctgctgg

SEQ ID NO: 294145 - DNA, 122 bp, Homo sapiens
tgggcagctcctgcccctaacaaagatggcgacgccgccacacatgctcctagcactccccggccgcccacccttcaaaaagatggcagccgcctcatccggtttgaaggctgaacgaacag

SEQ ID NO: 294146 - DNA, 122 bp, Homo sapiens
gccactacctcagcagagaagccctggtggttgatctgatgttccgagccggctccgtcgcgagctccaaacagcagccgcagttcactgagtcggtggctgtaaaggaggggacctccaga

SEQ ID NO: 294147 - DNA, 122 bp, Homo sapiens
tcctaccttatgtggatgggttccatcttattttcaatgtcctcctgttgcagaagcttccggttagtcctgggactaaagggcaattgacctcactcctcctgggtctgactgactaatct

SEQ ID NO: 294148 - DNA, 122 bp, Homo sapiens
ggaccaggtagtctcgcccaactgggacagagcggtcgcccgaggaccggatctgcgcggcgcagtggcctaaaaaggaggccgagccagtccctagctccgccttcccgggccctgcgccc

SEQ ID NO: 294149 - DNA, 122 bp, Homo sapiens
cgggggtgagtggcctctccggcatccagcccccgccccctgctcggagccgcgcctccgcgcccccgccccctaaaccgcctccggagccctcggaggccccagcatccctggcggagcgc

SEQ ID NO: 294150 - DNA, 122 bp, Homo sapiens
tgacggtgaagtcgttgatgaggtggtggttgtgctcgttgaggccgcagtgcagggtcacgcagtcgctgtggaagagcaggtcctgcagggtgctgacacgctgcagccccagcgcccgc

SEQ ID NO: 294151 - DNA, 122 bp, Homo sapiens
ctcccggacttggaggtttctgcagcagacggctctctcatacttccctattaaacattgcgaccacacgctctttccagccttggccgaagccactgtagcgtcccctctcctccccccac

SEQ ID NO: 294152 - DNA, 122 bp, Homo sapiens
cccaggcaacgcgccgcgctcggttcagggctccgcccagggactcactccgcgtcagcgcgcgcccacctaggtgggctggcaaccagccaccagtttccaactctttctccaacagggaa

SEQ ID NO: 294153 - DNA, 122 bp, Homo sapiens
gcgtggagagggccgccccggcccgcagttcccgccctgacactgggataacttcccccgcggctgcccagcgccgccctgaccagaccctctgtaccccgacttctgtccggccagaagcc

SEQ ID NO: 294154 - DNA, 122 bp, Homo sapiens
ctaaagggggcggcgagcttatgctttaatttttaacaactatccaaaatgtttttgacccgatagtattaacagtatatggcatatctaaaaaactactatcaaaaaatcttgaatgaagt

SEQ ID NO: 294155 - DNA, 122 bp, Homo sapiens
ccagcagagaaaatagtgtgtagagaggagaggagagccagagggccagcaaggcaaagtcgggcagggccaccaggtataaggcaatgaattctgggctttagcctaagaacaagggccag

SEQ ID NO: 294156 - DNA, 122 bp, Homo sapiens
gtataaagggattggttaagaccctctcgattctgctcggttctcaagcacaacaaacagcgtgtattttaccgccgcgcggcgcagcgcgggacagtacgctcctccgcctgcgcggcgcc

SEQ ID NO: 294157 - DNA, 122 bp, Homo sapiens
ccaccgcggagatctgggacggcaaggctatccgtggcatcgggacggcggaggcgggggcgaggggagagggtcacctcctttgatattaattcatcggtaatgggtatgaacagaaaaaa

SEQ ID NO: 294158 - DNA, 122 bp, Homo sapiens
tcacagcacaggccggggctccgccagcggcggaccggctggcccaccatgctgcactggcgggagtactccgacagggtggcacaactgctgttctgtgggcctggctggggggctgcggc

SEQ ID NO: 294159 - DNA, 122 bp, Homo sapiens
ctggtgcattgtgttgggtaccgggggcgcggaggagacgagtgcaatttccttctgcaccgtaatctttgtattggagacgccggagaggaaaacgggacctgacgctccgcctggcgcga

SEQ ID NO: 294160 - DNA, 122 bp, Homo sapiens
actgttactgtaagatgaacattaaaaagtcacgtctggccagtacggggatcgaacccgcgaccttagcgttattagcaccacgctctaaccaactgagctaaccggccccgcttactaaa

SEQ ID NO: 294161 - DNA, 122 bp, Homo sapiens
gaaatcatgccggacatgctgcaggagagagcgcgtgactcgcagccgggacagcctgaccgccacccccactgcaggccctcgcagtggcccgggagagaatccctctcagcccttcacct

SEQ ID NO: 294162 - DNA, 122 bp, Homo sapiens
caggtcatctctgttgggccccggcgctctggcccgcgccggtcttgggccccagggtagcggccactgcgggcggagcagagggaaacaccagagtctgtgactccagacaggacccactg

SEQ ID NO: 294163 - DNA, 122 bp, Homo sapiens
tccctcattcctcagcagacacaataatcttgttgttctttgaactcatcaggcacctctcgcctcaaggcctttcccctcattgtttatctgccaaagacactctccccccgatatccatg

SEQ ID NO: 294164 - DNA, 122 bp, Homo sapiens
cgggagaccttcacgctcactcgctctccgccacacgccggaactgcgcggccacgtccacggggaccctggccatgccccgcaccgccacccagccccaggcgatccccgggccccacgcg

SEQ ID NO: 294165 - DNA, 122 bp, Homo sapiens
ctacggtgacacaggcggcgtggggttagacaggtaccggtcagactacggtgacacaggcggcgtgcggttagacaggtaccggtcagattacggtggcacaggcggcgtggggttagaca

SEQ ID NO: 294166 - DNA, 122 bp, Homo sapiens
ccccgccggtccacaaacatggtgtcaatctcattgccatcacaggccagcagctttgcccggcgcccattacactgagtacggaagacgcaatggccaagatgcaagggtcaggaggccac

SEQ ID NO: 294167 - DNA, 122 bp, Homo sapiens
ctctcccagggtgtggtgtccacagccgaaggggccagaaagtgggcttagctcaggggccgggcgcaggagacgactggaaggcagcccgggcttgcaaagtgcccagagcctctgatatg

SEQ ID NO: 294168 - DNA, 122 bp, Homo sapiens
cagacttttattatctccatttttcccacagcggagtacattactgagttcttccagctgcgtgcggagctcctggcggttgctcctgtcgctctgagcagccgtcctgtgcgaggccatag

SEQ ID NO: 294169 - DNA, 122 bp, Homo sapiens
tgtctggaaacacaaaacagtcaacatagattttaagactcatctatactctcttcttcccgggtttgggaactgcggttgctacacaggtcacatttgaaataaaagtcctgggacggcgg

SEQ ID NO: 294170 - DNA, 122 bp, Homo sapiens
tccattccagttctagaagttctaggctgtgaattgtggatagtaacttggactttcccccgacctttctctccctcagattcctccctcaatcatttccaaataaagtggtaaaaaaccac

SEQ ID NO: 294171 - DNA, 122 bp, Homo sapiens
aaactgcccagtgtgactctgatgactgtgatgtgaatcccacagcaaagttgagcagtgcgcaacctgggctactgcacctggcagccctggctcctcctcctctgcctcttcctgctcct

SEQ ID NO: 294172 - DNA, 122 bp, Homo sapiens
gcactccagcctgggcgacagagcgagactccatctcaaaaaaaaaaaaaaacaaaaaaacggctctgggagaagagtgaccaatggttctgccccaggaacaggaagaagggagggtcagg

SEQ ID NO: 294173 - DNA, 122 bp, Homo sapiens
caaaggacaaatggatgaaattctccagatagaataaaacttcaactaaatagaaggtaccggaaaaatagaaatagtgctttggcacactgaattttagttagttggggttaaagccagaa

SEQ ID NO: 294174 - DNA, 122 bp, Homo sapiens
ccattcctggcagatggaagttcccagctgcatggagcttagggttctgtgctaaccagacgctgggagaacttggaggaaaccggtgtttacaatcgcagctagtcacgtactgccatctt

SEQ ID NO: 294175 - DNA, 122 bp, Homo sapiens
cgcggctccgagctaggagcatgcgcgcgctctgacgcccctggtggcgacggctggacgcggggttaaattgagaaggaggagggcagcagcaatacccctgaggccttgaaaggatcttg

SEQ ID NO: 294176 - DNA, 122 bp, Homo sapiens
ctctgaaggccagtggttaagtcctttctccctgttatcttacctagtaatcagggtcaccgaagcctgtggctctttatcattctcccccatcaggaaatggaggtggaggcagaggagga

SEQ ID NO: 294177 - DNA, 122 bp, Homo sapiens
cggggcggggaaggaaacgtgatgattgcgcaagcgcagaaaatgggccctcttggccgtcgggacttgtactgttggtgactccgtctccttagacggtggagcctgcgtgacccagaaag

SEQ ID NO: 294178 - DNA, 122 bp, Homo sapiens
gaggacagtgatatgcctccagtcatgtaccacacagctatgtgactgagccacaggaggcgtcaccagggctgcactagaatgcggaaaaggggcgtggccttaatgctccaagcccattg

SEQ ID NO: 294179 - DNA, 122 bp, Homo sapiens
ccgttcccagaaatcaaggctcacaccacgtggagctgactggatgctcacggggacattcgatcccagcggcctggagaaaggacggaacaggaggaccctgtgcgggcgccattgttgtt

SEQ ID NO: 294180 - DNA, 122 bp, Homo sapiens
gacttccaccgccattcgttcattcattcattcatccactcaacaaataaggagcagctgcgttccaggcgctggttgtggctgtggcagggtgcagggagcagaagtacgcggtgagacgg

SEQ ID NO: 294181 - DNA, 122 bp, Homo sapiens
tcgtcccggccctaagtctcggagactggccaagatcaccgcttgcaccgcgctgttgggcgaggcccggtcccgtctctttcccaggcctgagattctcgcccggcacggccgccctgagc

SEQ ID NO: 294182 - DNA, 122 bp, Homo sapiens
gccgccgccaaagagttttaccagaagtacgaccctaaggacgtcatcggcaggtaaggccgcggccagggaaacggaggtccaaagaggtcgagccccagcattcccgcttccgtttgaag

SEQ ID NO: 294183 - DNA, 122 bp, Homo sapiens
tgagtgaatgaatgaattaatgaaggaacgaacgaacactgtgtgcttgtaggatcggagcggggggtgcacactcagtctctgggtaacctggttcaaattccatggctgtgcgacctcag

SEQ ID NO: 294184 - DNA, 122 bp, Homo sapiens
gcccactccccggggcggtggggcgaggacccgcgctccgggatccacgtactggggaagcggccgaagagcctgcgttctcacgcccactcgctgtctggtgaatcgaccgcgtcggccag

SEQ ID NO: 294185 - DNA, 122 bp, Homo sapiens
acataaacttgggaggatgaaatacatagggatgcccagataacctgcctactgtcattccgcagattgtgcctttaaaaaaaccaatttcaatagaaaccagcaagaaagagatacatcag

SEQ ID NO: 294186 - DNA, 122 bp, Homo sapiens
ccgggctggtctccagctcctgaccgtgagtgatctgcctgcctcggcctcccgaggtgccgggattgcagacggagtctcgctcactaggtgctcaacgttgcccaggctggagtgcagtg

SEQ ID NO: 294187 - DNA, 122 bp, Homo sapiens
ccaattgtcacctcatatgtgccacatctttatgtattatttcctctctgaggcttatctcgtgataattatttcaagaatgaaaactctctccataatcataatttacaactatctccatg

SEQ ID NO: 294188 - DNA, 122 bp, Homo sapiens
agattcaggaggaaccaatgtggttgtctcgcaggcttgacgagccagtgccttgttttccgagtctccatttccttattattcccctggaataacgccttcgccgcaatccgcagggagcc

SEQ ID NO: 294189 - DNA, 122 bp, Homo sapiens
aggtcattcagaacctgaaacccccagcggaggtggagagccggggtgagtcctggcgtccgagacgtggaggacccagcccccggagcgcgttccgttagtttacagagctttttcaaact

SEQ ID NO: 294190 - DNA, 122 bp, Homo sapiens
ctcacattaagttacattccactgggaagaaatcagtcctacagccacccctaactgcaacggagactgagagatgtagtataacttgagtctaggtccaactattaagacagaaagagaaa

SEQ ID NO: 294191 - DNA, 122 bp, Homo sapiens
ggggtcagctcctgacgggttcctgagccagtcttaacctgggcaaaggagatgaggagccgagcctgatgcattgtgatggccatctgcccagaattggcccaaacggacaaaagtgctct

SEQ ID NO: 294192 - DNA, 122 bp, Homo sapiens
accagagggcagattgggttgaactgtgtctcccaaaatagatgctgaagtcctaaccctcggtgcctgtacatgtgaccttatttgaaaatatggagtttgcaattatgattaagatgggt

SEQ ID NO: 294193 - DNA, 122 bp, Homo sapiens
gatcaatgctggctttatttcttcataagcagtaatttgggtctttttcattcaacacaacgcagcattttcataataaattcacaaaagacaatacaaagaaacacctactgaatagaact

SEQ ID NO: 294194 - DNA, 122 bp, Homo sapiens
ggcagctgtggtgattggcggggagacctacggcgtgagcctggagtccctgcagctggccgagagcactggtggcaagaggctgctgatccccgttgtgcctggtgtggacagcctcaact

SEQ ID NO: 294195 - DNA, 122 bp, Homo sapiens
agggctccttggtctagcggtgacgccagtgtctgggaagatgcccgttgccaggcggaccgaggtctagcggtagcgtaagtgtcaagggaaaacacctgctacttagcagaccgggaaag

SEQ ID NO: 294196 - DNA, 122 bp, Homo sapiens
aaagcgtttagaccagtttctccatcttacggagcggtgaacgggctcaggaatgtggagcgtttcctggcgtcaagcaggtcaaagtcagcgctgctttttttacagacactgcttttctt

SEQ ID NO: 294197 - DNA, 122 bp, Homo sapiens
tgatggaagatgggtctaggagtcactgtcctgaggatcttcaagtacaggaaatgttcacgtatgtctaacttctttccttctgaatcagaccactcagttggccaacctaccagccttca

SEQ ID NO: 294198 - DNA, 122 bp, Homo sapiens
tggccatggcggtgatgcagcggccggtgatgggcttctggcagccagaacacagcgagccgcgccgctcgtggtagtgcacctcacagtagggctgcccgtcgtgctcgaagaagctgccg

SEQ ID NO: 294199 - DNA, 122 bp, Homo sapiens
ctacctttggagctcttttctccctgtgcattttcttcccaactcaccttcccagttgctcgggtaacatatgccacttctcagcttggactccagcagggagccagggctccctgtcatga

SEQ ID NO: 294200 - DNA, 122 bp, Homo sapiens
aagaaggcaacttctgggcaatcttccattgtgaggtggggtccacgtccccacaacccacgaacttgggtggccgtgcggcatgtggcaaacctgaggggtgactccaagatgcttcactc

SEQ ID NO: 294201 - DNA, 122 bp, Homo sapiens
gactcagagacggctgaggatgacatcagcgatgtgcagggaacccagcgcctggagcttcgggatgacggggccttcagcacccccacgggtgagctcctggggtgtacaaagagcaggca

SEQ ID NO: 294202 - DNA, 122 bp, Homo sapiens
tgaagagcgtctctgcctggccgcccatcatctgggatgtgaggagcccctctgccctgccgccccctatgagaagtgaagagcccctccgcccagcagccgcccgtctgggaagtgaggag

SEQ ID NO: 294203 - DNA, 122 bp, Homo sapiens
gagctttcagaagcctcacatctcttagctgggttcttcttgtagtttcctttatttttccggttgggtgtcactgccccatctcttcccctgccaggtttctggctctttgaacgtggact

SEQ ID NO: 294204 - DNA, 122 bp, Homo sapiens
tctgctcgctcgctcatgcctaattatggtttatttcctccccgagtgacttctttgatacgtgaaggaaggggaaagaaatccttctcttataaacatgagggatgcagacagcctttttc

SEQ ID NO: 294205 - DNA, 122 bp, Homo sapiens
cccccgagatcccttctctgccgcgcctgcccccggcctggaatccagcttcctctcacacggctcccaggcctgtgcacgtgctctttgggaagagccatgcctaaagtaacttcccatca

SEQ ID NO: 294206 - DNA, 122 bp, Homo sapiens
ctgctggggctgctcggactgcggcggcggctggaagaaatccaagggctgagggtgctgcggcgcctgccgagctcccgggaccggcccgcggctcaggagcgccctgcatggcgggcagg

SEQ ID NO: 294207 - DNA, 122 bp, Homo sapiens
ccccggggcctccagacacatcctccaccccggccacccgcagcctgcagctcccgacaccgggcttctgtggacagggagagccctaaggcatcacacgtggcctgcagcgcaggtgctca

SEQ ID NO: 294208 - DNA, 122 bp, Homo sapiens
gggagagagtaggacaagggcaggtagtggaggtggtcttggcgcaaacgaatctaacagcgcccagtctccattgcagatggctgcatttctccacatgttatctacaagcaaaccaaact

SEQ ID NO: 294209 - DNA, 122 bp, Homo sapiens
ggggtctccccggatggtctccgagtggagctcttgccagggggctgctagctgggatcgcggcgggcgcaccggcttccctgggagtcttttagcaaccttagaaaattcactctcggaat

SEQ ID NO: 294210 - DNA, 122 bp, Homo sapiens
cctcgtggcattaatcagcgtggattcagcaaggttttgttcccttgtggcatcagtcagcgtggattcgcaaggttttgttccctcgtggcatcagtcagcgtggattcgcaaggttttgt

SEQ ID NO: 294211 - DNA, 122 bp, Homo sapiens
accgacccttggcccgggcgaggccacgtgtcccacaaaacataaggcttgggttagtgtcgggcacgcgggggaggtgcctgcctgcgtgaagactggtcacaagacaacttcccagttta

SEQ ID NO: 294212 - DNA, 122 bp, Homo sapiens
gaaagtgggaagaagaatttaccagcgataccacgggcaacctttcctctaatgcttgaacggccactattagcataatagaaacatcttttggaatctgggagacatttttcttagacctg

SEQ ID NO: 294213 - DNA, 122 bp, Homo sapiens
tccccaggccatggcaaaaacagaggacgatgccagcggcgcgttctcctggaaacggtccgcggcaccgggaaaagcgaaggcttcgtgtgtctcagcgtgggctgcggtctcccggttgt

SEQ ID NO: 294214 - DNA, 122 bp, Homo sapiens
gccactgcgcccggcctttttttttcctttttcgactagctgcaacccagagggagaaggcggtaaacccgccttaagactgagaaaaccgcagtccagaaaggctcccgagttcgtagatc

SEQ ID NO: 294215 - DNA, 122 bp, Homo sapiens
gcccccacggtcgggggtcagggtcagggtggcagggatgcgcgggcagagccccacagccgaggagggcaagggggacccctgcagggacgcgaccaccgtgggtacagctgcagacacag

SEQ ID NO: 294216 - DNA, 122 bp, Homo sapiens
ctcgctggttcccgagccttccgcggcttggttggggcttctcggtcttaacgtggttaccggtgcactgaaactctcagcagcggttggagggcgaggtggtttccgccctccctgctaat

SEQ ID NO: 294217 - DNA, 122 bp, Homo sapiens
tcatatgataaaaggagatgaatcactaatgacttaatagaaagtttaattgagcagatacgtataaattaggggttaagcccactctgccactggctgtgttaccttgagcacatgtgact

SEQ ID NO: 294218 - DNA, 122 bp, Homo sapiens
acaggttgggctgcgaggaggagaagactcggtccagcacttgcttccgcttcttgaagccgctccacctgctgcctgcaccactccccctggccggtgcattccctgtgcccaccgggggt

SEQ ID NO: 294219 - DNA, 122 bp, Homo sapiens
agtccctgcggcccgcccacgccaccctgtggtcccgtttttgcttgcaggaattttccgcgagagacacaggcaccttgctccaaagccggaagatttacagcacgcctcggatagatcaa

SEQ ID NO: 294220 - DNA, 122 bp, Homo sapiens
gggcgtcagtcgatattcccagggccgcttctcctgcagtctgtggagcgtccttgtccccgccgccggaatgaatgagcattctgcagcccgatgtccctgtcccctcctcgccgggccat

SEQ ID NO: 294221 - DNA, 122 bp, Homo sapiens
cggctgctcctcagacactggtgaagcctttgctagaggttgtcatgaaaacggagcgggcgatgctgatcgaggtaagggccatactgaaggctgcttctcgctctgccaccctccggtgc

SEQ ID NO: 294222 - DNA, 122 bp, Homo sapiens
ttcagggcctcccgtatagtttgcttaatatatgtcttccctaggcgactgtgagctccacgagggcaaggaccttgtgttttgtttcacactgtgcccgcaagtgcctgttgaatacacat

SEQ ID NO: 294223 - DNA, 122 bp, Homo sapiens
ataacttacatctagtttgccagttcacgtgatgctgggggcaggggttgaatcgagtttcgagggacagagattataccttccgaatctgcaggtctttgggaagggagctttcttgatca

SEQ ID NO: 294224 - DNA, 122 bp, Homo sapiens
acttccctttactccctcaagtgtctcctcccaacacccactttatttcacagcggctcgcgtccttcggagagcctgcctcccgccatgggcagcagggttcccgctgagctgggcccacc

SEQ ID NO: 294225 - DNA, 122 bp, Homo sapiens
gagccgggaggaatcggtccaattctcggccgggaagtctctggccgggacggggcagggcgaacctgccagtgactggactcagcttctttgcgtaaccaatactggaaggcatttaaagg

SEQ ID NO: 294226 - DNA, 122 bp, Homo sapiens
aaaaaatgcttactttaaaaaaagaaagaaaagaaaaaaaaaaaaaagaagggttcaggccgctgtgggaggcccagcaccacccagcacaagacagtacggtatcccgccgcgcgcccgac

SEQ ID NO: 294227 - DNA, 122 bp, Homo sapiens
ctcattaatcaattaaaatacaaacaagaatctgtcttatcctggaagcagattcgaatgcgacatcctacttctataactaacctgtttttttctacttacaaacctattgttattctact

SEQ ID NO: 294228 - DNA, 122 bp, Homo sapiens
gcaggagaagagagaggtaaactatccagacacacaagagtgatgttaggtcagaatccccggccatttgtattgcacaatttcagaaaataaaacctcacaggtgtgggcataccaggaca

SEQ ID NO: 294229 - DNA, 122 bp, Homo sapiens
tgctctcgagggcccaagggaaccctgggggtaagcgatccctgggagagttgtgatagacgcagaggggctgaagcaagataagggccgcctagtagggtgggttgtgtgtgggaagatcc

SEQ ID NO: 294230 - DNA, 122 bp, Homo sapiens
tcctcgcggaattttctgtcagactcttggctgcgcagctgctgttcctccctctcctggcggagctgttcctcctcgcggaattttctgtcgcgctcctggcggcgcagctgctgttcttc

SEQ ID NO: 294231 - DNA, 122 bp, Homo sapiens
cctgtgctgtgcagtctacctctatctgtctgtttgtccatgcgtctgttgatgggcacacgctcttggcactgtcctctgtgggatttctctgagatcttgtgatgctttacaagctgcag

SEQ ID NO: 294232 - DNA, 122 bp, Homo sapiens
tactcaggaggctgaggcacaagaatcacttgaacccaggaggcaggggctgcagtgagccgaaatggtgccattacactccaacctgggtgacagaatgagactcttatctccaaaaaaat

SEQ ID NO: 294233 - DNA, 122 bp, Homo sapiens
ttactttaaatatgtgtgcaaaaccttagctacattctcgtgggccagggataggcaacgcgtgcacctagacctcttgcttgcccccacactccgtctccccagggccaccccctcaaccc

SEQ ID NO: 294234 - DNA, 122 bp, Homo sapiens
gtgggggaagaagaagctcaatgatttttctcccaaagaaatctggcctagtgtcctgaacggaaaggaactagctaggtggattgttggtttatggaaacctaaatgcaggtaggatcctt

SEQ ID NO: 294235 - DNA, 122 bp, Homo sapiens
gcccttggtgggtccgcagtggatcaacacagacacggctgcacctgagattcagaagaacgggcggacggtgctttcctgcatgtgtaagaggaattcatggggcgaataacccaacagag

SEQ ID NO: 294236 - DNA, 122 bp, Homo sapiens
tgaatacatcagaagaatcacgaccgtgcctctgcccactgcgcccaacatacccattatcgattatgaggtgagcatgcagctaccacccgtgtttctgattctcgccttgttgatttaac

SEQ ID NO: 294237 - DNA, 122 bp, Homo sapiens
ggtgacaggcctctctagtgttaggaatgtggccaagagggcctgcctgtggacggagcccgtgtgtctcctatggtgagctctttctcctcctgctccagcggtcttggggggctcctagg

SEQ ID NO: 294238 - DNA, 122 bp, Homo sapiens
caacggcgctgcgagcttctggggcgtgggctgggcccaacatgtcagtgcgacccacagcggggctggagctgctgaatgtgcacaacacacttcacccgggcctggttcaggagcgggcg

SEQ ID NO: 294239 - DNA, 122 bp, Homo sapiens
ggtaagtgaagattttggatatgaagtctaggaactgacagcccaccggggtcaaggaaccgaaagaggatgagggtcaaggagccgttggactagagcctgttttgggtctgggtgggggt

SEQ ID NO: 294240 - DNA, 122 bp, Homo sapiens
cttcacatccttttatctatgtgagttaagcaaaaactcatcaacctagcactatacaatcggcttagctagccttttatctactctacatcctcaaagtaatctgcgtttgtcatttacct

SEQ ID NO: 294241 - DNA, 122 bp, Homo sapiens
tgcgaatggaggaaatcctgacatagatttcaacacaccttatgattaccagagcacagacgggtcagcacgttggggcgaggggggagcgcctgaaggtgagatatttccagtagaggcct

SEQ ID NO: 294242 - DNA, 122 bp, Homo sapiens
tgaggccgtcgcatcaaatcctcaatagaggctggatcctggaagtccggcctcggggggcgttgccaggaaggctagagacctggaagtttgtccccagcccctcctccctcagacactcc

SEQ ID NO: 294243 - DNA, 122 bp, Homo sapiens
acagacacagaatgggccgggaccagggacccaccagagacgtctgtagttaatagctggcgctcttccactaataaagttttattgaaataaagcatttaaaaaggcgcccgtcattcttc

SEQ ID NO: 294244 - DNA, 122 bp, Homo sapiens
cgcagcgtctgcgccgacgctgggcgcggaggcgtctgggggcgcgggaaggacctgcgccgtgctctggccgccttgaattgtgggagatgtagtctcttttgcgcgcctctttgccgtat

SEQ ID NO: 294245 - DNA, 122 bp, Homo sapiens
cccgtcgagcgagctcccctccctgaaatcctcgccccgagatctccggccggcgagctccgccccctgaagtccccatcccaagatccggggccggcgagctccgcctcccgaagtccccg

SEQ ID NO: 294246 - DNA, 122 bp, Homo sapiens
tccactaggtaatgggtgtgactgtaactgttaagtatatttgataatgtatttggcaaacgttgccatagaaacacaatttcatggaacaaagaaacactagcttaatctccaatgtaatt

SEQ ID NO: 294247 - DNA, 122 bp, Homo sapiens
ggcccacaccccaatcacacaacccaaggctgcggggcggacagttctgtgcccgtgggccggagatgccagaaggggcacccagggccccactctcgaatgcaggtctctccagggggagc

SEQ ID NO: 294248 - DNA, 122 bp, Homo sapiens
cgccgcgcccccagttgcctccgaccttggcccgcggccgccggtgagcctagacccgcgcgtctccatctacagcacgcgccgcccggtgttggcgcgcacccacgtccagggccgcgtct

SEQ ID NO: 294249 - DNA, 122 bp, Homo sapiens
ccgagctctggggcgtgggccggagcgcggttggccttgaccttcttggaaagcccttggcggcaggtgactccgcttagtcacggccccgggggcgggggctccccgaaggaaaggagccc

SEQ ID NO: 294250 - DNA, 122 bp, Homo sapiens
ctgagtcaccaggagggagctgtggccgaggacgccgaggcctggagtgggtggtagccccgagctgggacgctcctccctccacaatctccccaggtctgcagggaccgagggcctacact

SEQ ID NO: 294251 - DNA, 122 bp, Homo sapiens
tgggatgaatctcctgcactttgttgcacaggtatgtggaaatgattaggacttagagaacgcatatgaataccccttggaggcagtgaagtttttcccaggcataagatggtgtccagcag

SEQ ID NO: 294252 - DNA, 122 bp, Homo sapiens
gacttctcttataattttccattcacatgaagtcccatggcagtccaaggatgagatccgcgttatgacaagggccataggaaaagcataggcactcagctccaaagctgaaacatgccttt

SEQ ID NO: 294253 - DNA, 122 bp, Homo sapiens
atcataaagtccagttaccctctatctcctacaccacattgactccagcaagggaatttgcgtatcaaaactgcttctcacacacccatcctcttagctgccaaaactcagcatgtatttgt

SEQ ID NO: 294254 - DNA, 122 bp, Homo sapiens
ggccgggtgggcgccggcgggcagagcgccccctagggccatcccctcggggttcttgggcggaggctgaccgccggcttctcggcttcaccccccaggcccatctggcccgcggcggccgc

SEQ ID NO: 294255 - DNA, 122 bp, Homo sapiens
gccagggccttcttccttctttccttccttcccactagtgtcccagctctgcccatgggccgcctagcagaagacagtaaaaacaggccgacaagaagacacaaggaaacagaatccaggag

SEQ ID NO: 294256 - DNA, 122 bp, Homo sapiens
caccatcgaggcctccagaagcccagcaaagagaaagcccctccatcaaaatgaaactcgcgtctgcacttttcatttcgaactccacgccctgagtgaaaaccgcttccccgccaggggtg

SEQ ID NO: 294257 - DNA, 122 bp, Homo sapiens
ctactgattgtcaattaaagagagagcacaatctcatatgaatgtgaaggggtaaacacgcgtggggtttgtgtattaggtggtcttataggcccacctggggaggattaatgaccaaggca

SEQ ID NO: 294258 - DNA, 122 bp, Homo sapiens
ttcctgttctatggatcgacctattctggacattttatataagtggaattacacaacatgcgagcttttgtgcctggcttctttcacttagcatggtgtgttcggggtccatgcgagttgca

SEQ ID NO: 294259 - DNA, 122 bp, Homo sapiens
ctcataacccacaacacacacactttcatatacaagcatagcagaaatatacttcacaagcgttagcagtgcctggtgttcctgcttctctccattctccccaacgctggcatggattgggt

SEQ ID NO: 294260 - DNA, 122 bp, Homo sapiens
ctgcacatcctggtcagactcgagggggctcataaggtggcaatctcactcaggggtctgcggaagccctcagttccacagagattgatggaaaatggtaagtgtcacagaaggcaccgatt

SEQ ID NO: 294261 - DNA, 122 bp, Homo sapiens
gtccctggccttcggaggacacatcgcttttgcaagttacaactcgcccaggtaggcagtcgggctcagctgtccagccagggaagctttggggagacgcccgagcacttcctgatctcagg

SEQ ID NO: 294262 - DNA, 122 bp, Homo sapiens
gcaaccagtgagggcggaagtggctcagaagaccggttctccctaatcaggtgactctcccgcctcctgcacgtgacaccggagcccagaagcgcgctctacctaatcaagaccccacccct

SEQ ID NO: 294263 - DNA, 122 bp, Homo sapiens
gcctatatgcttacaagtcctcaggggactccggctaggaagtcaggagtggggcccgtgcgtccccggcaggacctagactgcctctcggcgcaggcggccctaacaaagaagcccacgag

SEQ ID NO: 294264 - DNA, 122 bp, Homo sapiens
ccgcgcggtctgcatttatatcaaagcgtgctgcgtcacgcgctgagagcgtcagattgtcgcctcccggaaaagaaagcgggaggagcgctgaggccggtaacccaggaaaccagtgcgct

SEQ ID NO: 294265 - DNA, 122 bp, Homo sapiens
tgagtttctcaaaggccagggcccgaactttccttaaggctgtgcacatagcatgtggcacgagataggctgtccaaaaatatttgatgggctgaactatttgagggggaaggagcatggat

SEQ ID NO: 294266 - DNA, 122 bp, Homo sapiens
gttcactgcagtggcaacctcccaggttccagtgatcctcctgcctcagccccgagtggccgggactacaggtgtgaacactgtgcccagctaatttattaaattttgttgtagagatgggg

SEQ ID NO: 294267 - DNA, 122 bp, Homo sapiens
ttgtgtttctttttcggggcctcggtttccccagaaatgaagtgatgagctaagtgatttcgtagggctgttctgagtctgacgtgacatacttattttccgttgctgccatggcaatttgc

SEQ ID NO: 294268 - DNA, 122 bp, Homo sapiens
aatcgagttcagcaacactgaggtccctcagattctctgactcaaatccagttatgaggccgggcatggtggctcacacctatagtcccagctactcaggaggctgatgtaggagaatcgct

SEQ ID NO: 294269 - DNA, 122 bp, Homo sapiens
ccccatgcaagctgggggtgggcgtatagggccaagtcgacttcccagatgaggacacaacgggaacagttgtcttagcctgtcccagttagtatctggggcgcggtgtgtggtgtgtgatg

SEQ ID NO: 294270 - DNA, 122 bp, Homo sapiens
gattaccttctggcaaaggagcgcgggagagcggccgcggccgaggcggcacccagaccgcggctttgtattcattaaacacacattggagcttatcagaagtaaaagccttgtcaggatgg

SEQ ID NO: 294271 - DNA, 122 bp, Homo sapiens
ttgtttaagctcccaggtaagtgtgatgtgcagccaagactgagactctttgctctagaccgtggggatgggcagagcaggagcttcattgttccagtgggttcgcctggcctggggcagct

SEQ ID NO: 294272 - DNA, 122 bp, Homo sapiens
gagcttgaagatacatagtttcttctacacacagcaggatgaggcaaatccttctgcctacgatgactaggacctgaggcatcctgccctttcttgctccttggtgaatgaaaaggagaact

SEQ ID NO: 294273 - DNA, 122 bp, Homo sapiens
ctgtgagcaattgatggggaatgttctgcagggacatctcaaagcctgggatgggtgggacggaaattactattctttggtgtggaatcttcattctctaggccagtgatgtcccctgctca

SEQ ID NO: 294274 - DNA, 122 bp, Homo sapiens
tccctctccatctgctccatatattgccctgatttcctctgcttcttcatgtactgccttcggtgcctcccatcctgtctataaacgcactcaactctccccgtcataaaaagagaaatttc

SEQ ID NO: 294275 - DNA, 122 bp, Homo sapiens
acagtttaggtttcataggtccaggctgtgggttctgcgatgtttgcttctttcctgcttcgcagtagtcaactccctggtggttcagcctcttgaaagaagcttgagagtaagcttccttc

SEQ ID NO: 294276 - DNA, 122 bp, Homo sapiens
ctccttctctgaggaactgggctgttagggattttccttaggccctttggtttccgcctacggagaggtttcccccattggttgctcttcctcagccagggttacttcctggtctgttcccc

SEQ ID NO: 294277 - DNA, 122 bp, Homo sapiens
agcacaggaagaagacgctgtcatacgggaccgatccgtgtccacatgaagtcatcagatcggtatgggtgagtggcaggcaaatccggtgtggggaagcggcaaagcctgaggagcctgca

SEQ ID NO: 294278 - DNA, 122 bp, Homo sapiens
gtcttaggtcatacagcagtgccggactctattttataatatctttcatcaaccggactccgaagccctgcctcaatgggcgttcagtaacatctgttgaatgaacgaatgaacaagcaata

SEQ ID NO: 294279 - DNA, 122 bp, Homo sapiens
ataatctcttctttcatcaggaaaaagatgtcaagtatgaaagtaaaaccagtttctcctcggcaagttgtggaaatatcatagaactagagatactaacaatggcaggtatctgaaagtga

SEQ ID NO: 294280 - DNA, 122 bp, Homo sapiens
ccctcccccggcccggcctggcccggcctggccagtccccgcggtctctgcccgggctgacgcccaggaatgtggtcgacgagaagccccaacagcacggcgtggcctctcagcctcggtga

SEQ ID NO: 294281 - DNA, 122 bp, Homo sapiens
tgcatcacctttctagtgacttaattctgaaagcagaggctcaacctgccgagtggcaatcgaagaaaacacactacacaccagaataagatgagggtcgggaaaaaaagaaaaaagcagct

SEQ ID NO: 294282 - DNA, 122 bp, Homo sapiens
gatgccccctgtggctcccagtaacctcacgtggggaatggtggtcagggaggagccgggcgcagacatcccagtgaggggcagagccaatggcctggccatggtgcccggggattgggtca

SEQ ID NO: 294283 - DNA, 122 bp, Homo sapiens
taatcaaggtgtgctgtgggcattcaggtgccaggcacctgcctaaggatcctgtggggccgataccaagcccagctgctcccgacgcatctcagccccaggaaggtgaagcgcagcagtga

SEQ ID NO: 294284 - DNA, 122 bp, Homo sapiens
tcgcccatagggggacctctgtcacgttgtttttgttttccttccacaccacgggtgcctcgacctcccctttcaagcctccctgctgctgtgggctgaccccgtgggcctgacgccctcca

SEQ ID NO: 294285 - DNA, 122 bp, Homo sapiens
ataattacctagagctccaccgcgccgccattacaccggacgtacgtcacttcctcttcccgagcaccgacggtaggaagaaggcgaatagtgaaatatttaaaaacttgacgctcaattgg

SEQ ID NO: 294286 - DNA, 122 bp, Homo sapiens
agacaccccaggattttaagtagggattcccaatttgcggttgaatggaggattccgggccggactgcagtggggagggggcccccagatcaccctgtgcccaatggaagggtatctgcgct

SEQ ID NO: 294287 - DNA, 122 bp, Homo sapiens
atatatggaatgcaaatatcctttcccatcctgtgggttgtttttttactcttcatatgtcgttcatcttaatgcttatatgctggagtttcttttcattgcatttttgatttatctccatt

SEQ ID NO: 294288 - DNA, 122 bp, Homo sapiens
ccgtaacagaaagagcgacggtcaggcagggtctgggaggaccttggccgaggttcctgacgggagcagttagactggcccccgagtcccagcttcggaggtagaagaccccaagacaggcg

SEQ ID NO: 294289 - DNA, 122 bp, Homo sapiens
ttgacattaaaatcaaagacttacatagactttgtgaaacatcttatctttaggagacaacgagcatttaataaattttaaagctgcttcattcaaaaaaaaaaaaaggctaataagaattc

SEQ ID NO: 294290 - DNA, 122 bp, Homo sapiens
aggtgctaggcagggacacagatgggagacggtggacagcggcagggggaacccagggagcgcgatgggctgcagggctgcatcagggctcctgccaggagtggccgtggtcctcctgctgc

SEQ ID NO: 294291 - DNA, 122 bp, Homo sapiens
gagaggctgtcacacctgaaaggctggagcaacccagggtgaggcgggccccacggacaccgaggccaccactagctgccgccagggggccagggcccacagtgagcccttgtctctaatgg

SEQ ID NO: 294292 - DNA, 122 bp, Homo sapiens
gaatcggacacattactttctagctgaacactcagcttcatccactccaggacagctgagcgtctgggtgagtaatttttccgaagaaatgtactatagctagattcacctccatagggtaa

SEQ ID NO: 294293 - DNA, 122 bp, Homo sapiens
ttataaaccaccgaaagaaggatacaggagtccaacaggctccctgccttcagcgaccttcgttctccagtgtgagatggataggtgaatgagtattgctggtggaccatcattgcacatgg

SEQ ID NO: 294294 - DNA, 122 bp, Homo sapiens
catatactttataaatccacctctcatctttcttctggacagaccacatctgacttcgaacgtacttactgcaatcaaaagtgttttgtaaaggaccctcctcaggaataaacaagctcact

SEQ ID NO: 294295 - DNA, 122 bp, Homo sapiens
cagacccattggctccgcccacctcacctcctcgcctatcgttagttctctgcgaaaccgcgaactgggggcgcggcctatcttcagccccgcccctgatgggcctatacaagggggcggtt

SEQ ID NO: 294296 - DNA, 122 bp, Homo sapiens
ctcaggatctcgctgtctttacgtgaaccgcctcgggcaggcagcgccgtcgcggggacgcgcccgctcacctggaccagcgcgcccgctcacctgggccagcaaccgtcccctgtgcgcct

SEQ ID NO: 294297 - DNA, 122 bp, Homo sapiens
atgcccaaaggctccccgttgccctacttctcctgctggctgcaaagggaccttcctcggcgggctgcaaatctccacccagctccgcactggaggcgtccccttgggctggttacttttct

SEQ ID NO: 294298 - DNA, 122 bp, Homo sapiens
gtggttagggaaactgtgggcccctgagcagaaggctctatggaaaacggcttttctctacggtctttttgatggctttctgttacatgggcctataggacagtgtgtctcaccttgtggag

SEQ ID NO: 294299 - DNA, 122 bp, Homo sapiens
caggagaacctcaaccacagcatcagagagcacgcgaggctcaagtgcagtgcgggattccgaagtgcgtccgaccaaaactccaaacgctactgaaagggtgtcagctctgcataaaggga

SEQ ID NO: 294300 - DNA, 122 bp, Homo sapiens
aatattctattggatactgtcttggccttttcaggcctgctccctgcagtgcctagcacacgctgggcacagagtaggcgctcgataaattttattctgatgacagaggagagctctgaggg

SEQ ID NO: 294301 - DNA, 122 bp, Homo sapiens
gaggcggcacaggtgagggtgtggctggtgcatattccgggtgagggcccaagacctctccgtggtcttggaacaaggactgagttctgccctctactagcatcttccctggtcccacaggt

SEQ ID NO: 294302 - DNA, 122 bp, Homo sapiens
cttcttccccttcatctcgagagggaaagaactcctttggggtaagtagcaaacacattgcggtcttctggccttataaagttatttttcacacttactaaaatagagggcataatggtagc

SEQ ID NO: 294303 - DNA, 122 bp, Homo sapiens
tagcgactaagcgacaggtagctgagaaactgagctctgactggaaaaaagggggaaacccgcacccccaagaggccctaacgcgcagagcagcaagaccctccggggcgccgcgggagcgc

SEQ ID NO: 294304 - DNA, 122 bp, Homo sapiens
gccctgctctattattaaatgtaatttaacaacttcctctgtactttaaattcagggcaacgtgaatgggagacataatgaaggaaaacagagtctattctccttattaaaatattacatac

SEQ ID NO: 294305 - DNA, 122 bp, Homo sapiens
gcctcatcacgcaggcgctggtaggcggcatcactgggcgggtcagaaaccacgcgcatgcgcagacaccctcaggcgactggcgggtcgcggcttccaagctctaaatggagagttgtccc

SEQ ID NO: 294306 - DNA, 122 bp, Homo sapiens
taacaatattataatagtgagtgtggagagtgttgaatttttttaaggatagtctatgtacgtgcctacaattccaaagtaggtaatttcacgaagtgatttaaataacgacctgtaatcaa

SEQ ID NO: 294307 - DNA, 122 bp, Homo sapiens
atgtttccgttcggcggccggcgtccctcgggtggtcgcatgcaatgagtgcatctttctcgagaacaactcttccgcggaaagtcattgctgacagtcctggcattccggtggctgcttct

SEQ ID NO: 294308 - DNA, 122 bp, Homo sapiens
tgtccaataccacacagtgggcagaagcatcaggactgaaacccaaatctcttgctcttccgaacaccattctttctgcaacaccaggctgcctcaatcaccatcattatcatgataataat

SEQ ID NO: 294309 - DNA, 122 bp, Homo sapiens
cagcggagggagtctatgcgagctggacagcagtgggaggtttgtgaggctcgcactggccgcagaccctcgggctcgatcgcccgggagccaggactcggcgacgcgaggctgccgggcta

SEQ ID NO: 294310 - DNA, 122 bp, Homo sapiens
gccgccgctgccatggtcatgcctgctgcctgctgccgccaccgccgccgcgccgctctgcgactgctgctgcccggcccaagatctacccgcgctctgccctgcaggagggcagctcctgc

SEQ ID NO: 294311 - DNA, 122 bp, Homo sapiens
aatctcatttgagcgaagctttcacacgcgaattccaagatgttgaaaattgtggacactcgttgatatgtaatgaatgtttgtgataattttttacttttttatttttttcaaaatcttgg

SEQ ID NO: 294312 - DNA, 122 bp, Homo sapiens
taaaacagcagcagtaaccaggtattcacacagtaggtcttgggtaagactgaggtatgccggcctcaggtgtgtctagcacattcactgctctgatggctacaaagagagacttcttctgc

SEQ ID NO: 294313 - DNA, 122 bp, Homo sapiens
cccctgggccccaccagctgaggagggagagacctggctgggcccgcaccctacacgagccgtcctgctcacagaccactcttgaccacgggcccagccgttggaggacggcagcagggacc

SEQ ID NO: 294314 - DNA, 122 bp, Homo sapiens
acagattgatggaaaggcacggcaccttggctggacaggctcgtcctgtttctgggcgggcggggcgcacgccttccgtgtttggtggagaagcagcctgtggtgaggagcgaggagccaga

SEQ ID NO: 294315 - DNA, 122 bp, Homo sapiens
tggggactattgaccggccgcctctgtggccaggcataggccagggagtgcagagaggcccgtcccccactgcaagcctgggatgcagcgacctcaccgcagagcagaaaggcctcactgca

SEQ ID NO: 294316 - DNA, 122 bp, Homo sapiens
cgggtagtggaaggacgcgtctggcaggcgcgcggaccgtccaaggaggcaccttgcccacgcccagccccgccgtcggagcagcttagactgggttttcccaaacctccttccgtctttct

SEQ ID NO: 294317 - DNA, 122 bp, Homo sapiens
tcacttttctaaaaagtgcagttatacttatgtatcttctcttactattcatcaaaataccgacaatattttgggctgaaatgttaataatatctgtatgaacctctgcttcaaaaaataat

SEQ ID NO: 294318 - DNA, 122 bp, Homo sapiens
catttaatatctgccacctttttgcatagattcttccttaagtgtcatgaaactagaatccgctgcttgttttcgtaaggtaaaagaagggcagttaatttcagcaccaaggcttggaggaa

SEQ ID NO: 294319 - DNA, 122 bp, Homo sapiens
tgggattagtgcccctataaaagggacactagagagctctctccccctctttcagccacccgcagatacaatgggaagatggcagtctatgaccaggaagaggttcctcaccataaccctac

SEQ ID NO: 294320 - DNA, 122 bp, Homo sapiens
ctcccccttttgagaataaggaggggctagggtgtgtcttggggcagagcaagaaagagacgtccatccacgtggataaagacacacacagacacacgatgggctttgtcacacacaatggt

SEQ ID NO: 294321 - DNA, 122 bp, Homo sapiens
ccttggctgtccccaggcattcctggtggctcaactctttcttctgctgttaccaacacccgcaacttctgttccacatctcgccaccgccccaaagctcaggtctgggagcttgacatttt

SEQ ID NO: 294322 - DNA, 122 bp, Homo sapiens
gcaagggagagaagcaaatgaggacctggggcaactccctatgacacctaagcactgactcggtccttgtgtgcagcgttgaaatcaaaggtgaaggacactctgcactagcctagattcca

SEQ ID NO: 294323 - DNA, 122 bp, Homo sapiens
cacagtaagtgaatgcaatttactctctgacagagcagagagtgagtggagaagagaggacgaatcaagtagtctgagaaggcctctctggggaggtgacatttcagtgagacctgagcgac

SEQ ID NO: 294324 - DNA, 122 bp, Homo sapiens
ggtttcctcgcgcgtgtctgggaggtctcgcggcctgcttctcggattgctaggagccagcgcaggcagatgccggttccggggcttggagaacgtggctcggtggcacagagccgccgggc

SEQ ID NO: 294325 - DNA, 122 bp, Homo sapiens
tctgatggtgaattgtaatcctcaatgttggaggtggggcctgatgggaggtgtttgggtcgtgggggtggatccctcatgcatggcatggtgctgttgtttagatctgattatctgaaagt

SEQ ID NO: 294326 - DNA, 122 bp, Homo sapiens
ttttgagaaatgtgaattagctacttgtaccccccgcgagccgggggtggcgggcggggacgtctgctcgtcagagtcattcaatgaagatatagccgtgttcgccaaacaggtcagcaaaa

SEQ ID NO: 294327 - DNA, 122 bp, Homo sapiens
cgtccgcaggtacacaggaccacctcaccagggagccccgtccggtcctcgtaactcctccgcaaacctgacactacttgaaatcaccaggtaaaaagagaaaagatgcggcccacccaggc

SEQ ID NO: 294328 - DNA, 122 bp, Homo sapiens
gaccaggtcttgctatgttgctcagactggtctcaaactcctgggctcaaaggatgcacccgcctcggcctcccatatgctgggattacagttgtgaggcactgtgcctggccagccatgac

SEQ ID NO: 294329 - DNA, 122 bp, Homo sapiens
gcaaagcccccctccaccaggcacttcgggcccgcctcctccccgttgccctagggaccccgcgatcttgggggccatacactccctccggggctacgcgtcctgccaaccggccgcagacg

SEQ ID NO: 294330 - DNA, 122 bp, Homo sapiens
gtcacttaaatgggaagtggcaggcctggggtcagaaacaaggctgctgggccccagatccgctgccaccctgaccctcctctaaaacccgttcagcaccaccatcagccccctgccccagc

SEQ ID NO: 294331 - DNA, 122 bp, Homo sapiens
tgggaacaagagccacatgttcacatacacatatctatcctatgttactcgtgtgtgtgacggaggcaaaaaaaaaaagcagtgtttttactgaaataaaaatgtacctgttttgttgcaga

SEQ ID NO: 294332 - DNA, 122 bp, Homo sapiens
ctgtccctggcaagccgccccacgctggagccaggctgccggcaaagcgctgctcactgccgctttcttcacatgtggtttgattgacgcaaatcaagaggcaagcaaatgattcataactg

SEQ ID NO: 294333 - DNA, 122 bp, Homo sapiens
atgtgccttaagcccacaggtgccctttaagcacctgccgtgagggcagatgtgacagatcgtgtttgctctctgggcagtgagtgggttttgggtagcttctctccaggaaatgatgaatc

SEQ ID NO: 294334 - DNA, 122 bp, Homo sapiens
tgagctccgtcagccgctcctccaccgtgttctccagggacgtgaagtcccgctcccgggcgtccttcaccacatggatcccatccgagaggtctttgagaatctcattctggagtttctgc

SEQ ID NO: 294335 - DNA, 122 bp, Homo sapiens
ctgttactgattttaaaataagctaagaatgtgccgtcaatccagttggctgctccctgccgcccacggagcctgtaatcactgccttacagctcacgagaacaatggcaacacaagcaaac

SEQ ID NO: 294336 - DNA, 122 bp, Homo sapiens
gagcccggccaggcatcttgtgaactgcacacaaaataactagcccaaggtcagagagcgcgccaggcccgccctgaaagtttctccgcaggaaaatccaccgccctttcccaaccacccgc

SEQ ID NO: 294337 - DNA, 122 bp, Homo sapiens
caaccctttctcatattcagacttccgggggtaacttgctacctttcaactgctgcctgccgtcaatctaaaccatactaatccaattcaaggtgatgtggtctttgagcacagagtggagc

SEQ ID NO: 294338 - DNA, 122 bp, Homo sapiens
cggctcagcagctgggcctcatgctcctggaactcctcctgcatctgcttgaggcgcaggcgctcctgccgctgcagatactgcttccggagaatgaagaagagggtggcacatgtggcaaa

SEQ ID NO: 294339 - DNA, 122 bp, Homo sapiens
cacctgcagaatccattaaggcctggaggcctaaggagttagtattgtatgaaatccctacgaaacccggtgaaaagaaaggtaagtagaataagtaagaaggccttttctttcacatatgt

SEQ ID NO: 294340 - DNA, 122 bp, Homo sapiens
gcatgacagcccagaatccaaggctctgctagatgaggctcaaagcagcggcgagctctccgagggacacagcttagtcccaggccgggggaaaggcaccgggctggcactgggaggaaatg

SEQ ID NO: 294341 - DNA, 122 bp, Homo sapiens
atcaccactgtccacgaacacgcccagccacggacagaatttcctcccccgtcaccacagcgaccacccagtgactgaacttacttcccagaacttggtgggctccggcctcatctctcggc

SEQ ID NO: 294342 - DNA, 122 bp, Homo sapiens
catcctggctaatatggtgaaacctcgtctctactaaaaatccaaaaaaaattagctgggcgtggtggcgcatgcctgtagtccctgctattcgggaggctgaggcaggagaatcgcttgaa

SEQ ID NO: 294343 - DNA, 122 bp, Homo sapiens
tggtagttaactttatcatcattacatttggctgagtcattcctgggccctaagtagagacggctagaattaccacgtgagtaaaacattataatatcaaaataattagattggccacaaaa

SEQ ID NO: 294344 - DNA, 122 bp, Homo sapiens
cggcggatgacgtcggtgcagtggggcggccctgggatggggaacggcgctggcttcccccgaggcttcggcactggcttccgggctggggccgcggagctcacagaggcaagacagaggat

SEQ ID NO: 294345 - DNA, 122 bp, Homo sapiens
ccctcactttgaagtctttcctggccaacgggaggcttctcagagcagctttcacggctccggggctgagtgaggcctgtgtctaggctcatcctgccctccggggcgtcccagtgtgcctg

SEQ ID NO: 294346 - DNA, 122 bp, Homo sapiens
cagccaacacaaacctccgtagccctggtccatgtcttcgacgcggcccaccagcagccccgtttactaggcgaccacagcacgcatgcgttcagcgcacctccgccatcgactactggaag

SEQ ID NO: 294347 - DNA, 122 bp, Homo sapiens
ggagattgggaaccaggaggacaagctagacggccgagagcgccgggtggcgggactcaccgtggcatttgatgtcgctctgggaatcctcccgcttgtcgagtttggtcttgctgtcctcc

SEQ ID NO: 294348 - DNA, 122 bp, Homo sapiens
acatgtatagtgcctacgtgggccaacagtgtggaaccacctgggaacttgttagatatacgctctcagaatctgcatcctaacaagatgcccaggtgatttgcacacaggtaaagcctgaa

SEQ ID NO: 294349 - DNA, 122 bp, Homo sapiens
ggtgcttgcctgtgctggggtgggcggagctaaacccggagcgggatgacgtcatgaggacgcagccgcagagcgattcgcgtcccggaagcggcggtggcggccgcggcgtaggcggagga

SEQ ID NO: 294350 - DNA, 122 bp, Homo sapiens
ccatactcaccgtgtacagcacgtacacatctcacacgttttaataaaggccctttaaaacggcaaagcccgacatatcatttataaatccaagcctcaccagggccatgaggaatagaacc

SEQ ID NO: 294351 - DNA, 122 bp, Homo sapiens
caccagaaccccgcaccctccccggcccggccccgccccgcccgccggccgcggcaaagccgcatcctcccggagcagaaccgctccccgccggctgtccgcaacctccgccagcgtcggtc

SEQ ID NO: 294352 - DNA, 122 bp, Homo sapiens
tgggctccaccgaagatcggggtcctaattgagcccacggggacaaagtcctggccgatccggccccctgggaacgggcgtcccgcgtgggtgggctccgtgagggacgggcccccagaaca

SEQ ID NO: 294353 - DNA, 122 bp, Homo sapiens
gcgggccgacctttactatcccggaagtacttttcctcctaatttccggcacgtgaaacgcgggggcgtggctaagggagggaagggtaatttgggggctcttgagagatgagagaaacaac

SEQ ID NO: 294354 - DNA, 122 bp, Homo sapiens
acgatgtgactcactggagccctgataagattattgatttcttgaggagaacaatgttgtcggaaaccttctccaactgttgctcacgggtatacagtcagggctgtcttcccagaatataa

SEQ ID NO: 294355 - DNA, 122 bp, Homo sapiens
attgtgctttacgtgtgcacagcactcaacagcttaagacgttgcgggaaagtccccgaacgctttgcattcagccaggctccaggttgggcacaaaccctatagcagagagctggcccagg

SEQ ID NO: 294356 - DNA, 122 bp, Homo sapiens
aatctgaagtttatgtggaagaataaacacacaagaatagccaagaaaaatgtggaaactcgccctggccgattttaagatttataaaaacgctgcagtaattggaacaatgtatgatcaca

SEQ ID NO: 294357 - DNA, 122 bp, Homo sapiens
ttcgagcagctcgtggagaacctcttctcactgcctctggacgttcccttcagtggcctacgcaaggtacggccgccccggctccagaccttcctccgaggctccgcggcgcgggcgggcct

SEQ ID NO: 294358 - DNA, 122 bp, Homo sapiens
actaaagggagctgggtcagcagaacggtaccccgagtctcagcaacaggacggcccgcgcgaggcaggatccaagcaggggagaaaaagagaccaaagcacaaggcgatcgaggctggcac

SEQ ID NO: 294359 - DNA, 122 bp, Homo sapiens
gggagaagagattcgattctaagtctcctactgccgggttctacggggagaaactgactgcggctcgaggccagaaatgcagccaaaccagctcagtcttcgtctcttcacaaaatggctcc

SEQ ID NO: 294360 - DNA, 122 bp, Homo sapiens
ctccccaccacctatggggtctgtccccgcccggccggaccctctttcgccctcctcacccgttcttcagatccacctccaggatcttcccgtagcccttaaagaagcgctccacatcgcgc

SEQ ID NO: 294361 - DNA, 122 bp, Homo sapiens
cgggagcccaggagctggcggagggcgttcgtcctgggactgcacttgctcccgtcgggtcgcccggcttcaccggacccgcaggctcccggggcagggccggggccagagctcgcgtgtcg

SEQ ID NO: 294362 - DNA, 122 bp, Homo sapiens
tcagtttgggatgatgaaaggtctagagatggatgtggtaatggttgcacaacggtgtgacgatactgaatgccgctgaactatacacttgaaactagttcaaatggcaaattttaggtata

SEQ ID NO: 294363 - DNA, 122 bp, Homo sapiens
ggctggggagagagcaaacctatgggctgccagtgctgctgctcagctacctgtgggtcccggcctgctggcgtcgtgggtcacaggagaggtaaaccgggcaccctgacactgagcatggt

SEQ ID NO: 294364 - DNA, 122 bp, Homo sapiens
agctactagagggagcccaggcttttacaatagcggccccagaacagcaaaggaaggttccgaataaagtttgaagggggtgggggtgggagaagaagcgcgtgtgcgtgagtgtgggtctt

SEQ ID NO: 294365 - DNA, 122 bp, Homo sapiens
gcccccattttcagaagataattacagagcaaggccaagaagcaaggtcatttaaagaaccgtatttagtccttaccttttagaattggtgactgttaccctttttcaaactttggtagacg

SEQ ID NO: 294366 - DNA, 122 bp, Homo sapiens
gcttcaggtgatccggccacctcggcctcccaaagtgctgggattacaggcatgagccaccgcgtccagccacagagaggttaattttgatgaagtccaatttatctaaatttttttcatta

SEQ ID NO: 294367 - DNA, 122 bp, Homo sapiens
catgcccggtatccggtggatgcgagtgctagtccagctgcagctgcatcttcacgaactcggtggggaacgggatgcagattttttttttcttttccttccttccttccttccttccaact

SEQ ID NO: 294368 - DNA, 122 bp, Homo sapiens
tagtcgcaggggctgcggggtggcagcctcagagccctgtccttccgcagccgtgggccccgcagggaccagccaagcagggcaaccaaaagctggaaccagcagcgaaaaccccgagccca

SEQ ID NO: 294369 - DNA, 122 bp, Homo sapiens
ccgaggtcccagccagccctggagctcgggagagcggcgtgcaccatcccagtttaaccgcgcctgcagtgcccagccgggatgagcacttggcccgaggctgctcaccaggcgcctcctct

SEQ ID NO: 294370 - DNA, 122 bp, Homo sapiens
tgagtcctaggctagtgactgtaattagccttcattctacacaatagctcaaaggagcagcgcgagagcgagcgtgtggccctgtcttgttgggaagggcggcggtgactactgtcgggtcc

SEQ ID NO: 294371 - DNA, 122 bp, Homo sapiens
taacctcagcatcgtggggcgaagcagagccattgtgcatcaaggagaggccggtgcctgcgctgccgtctctggcacctaacccagcagaccgctcaccccatcgggtaagccagtctctc

SEQ ID NO: 294372 - DNA, 122 bp, Homo sapiens
ccgaaggttggcaggctgaacagggcacttattccactcctttgcgtctaaccgcctgaacgcagacttctcacattatacaatgaaacaactgcttttgtgaagaaaagaacgctttttta

SEQ ID NO: 294373 - DNA, 122 bp, Homo sapiens
ttaaatgcactaaaccagccccatggaatgattacatggcagccttttaatgtacaaacacgaggattctaaaacggatgcacacaacccgtttatagaactccctctgtacacacacacac

SEQ ID NO: 294374 - DNA, 122 bp, Homo sapiens
gtgacggccgggaaggaggcggcacggtgggtctgtaaggtggaggcccacggcttctgccggcatcgcgggggctctgacaccagaatggcatgattcaggaaacaagtttaggagccaat

SEQ ID NO: 294375 - DNA, 122 bp, Homo sapiens
cctcggggcgagccaaggggtgtcctttggagcaggggccgttccctgtcgccacctccccgtttctgtgggcgggtggcctattgagaaactgacaggatccctttttcaaatggaggcct

SEQ ID NO: 294376 - DNA, 122 bp, Homo sapiens
ccccacggagactcaatttactttccatgtccacatccccagtgcttgcggaagatatcccgctaagagagagacatgtcaaaggtagggtagatcgacatttccaggcaccaaagatggag

SEQ ID NO: 294377 - DNA, 122 bp, Homo sapiens
gaaggcagagctgtctgtcctgcacctgccgcaacctctcccctttgcttctctggacttcgcttccatggtagtggtattgggaagggaagctgtcctttcacaaagtacacaagctcttc

SEQ ID NO: 294378 - DNA, 122 bp, Homo sapiens
tcattggtcctggggctcattcgtcactcagccgcgattggctgagtcggcacccagatgcgctgtcgcttctgctattggctggcactcggtggacggagacgggggaggggcttgcgaga

SEQ ID NO: 294379 - DNA, 122 bp, Homo sapiens
acaccagcgaaaccccttcccacattagcttgttgctgtgctactgacactgggcttagtcgatgttcacacctattacatttttccggaaagtgggaggagcagggggtagagaaagctgt

SEQ ID NO: 294380 - DNA, 122 bp, Homo sapiens
gtgggtgattagctcctggccgaatccagtcccggccggcgctttgaagcctgtgctgtgcgattttctcagcagtgaggtaggaatagacgcggctaatgacaggaaggtcgcgcgggtga

SEQ ID NO: 294381 - DNA, 122 bp, Homo sapiens
gtggctccctaacagggggcggaaacaacttttggttctgagtcaatctctctctctccccgggccctacaggaacacaagagtgagtcctggagcctctggagtccgcccctcaccgatgt

SEQ ID NO: 294382 - DNA, 122 bp, Homo sapiens
ccgccttgatcattcccgagccgttgtcgatcaccaccggtagctggcagtggttcatgccgccgctgctgccgccgcctcctgtctctgagccgctctagctacgggctcggccggggccg

SEQ ID NO: 294383 - DNA, 122 bp, Homo sapiens
actgatagcaagccaggagggcagtgggtgggctggcgggttcgtgggcaggcaggcaggcgtccgagggccacgggttgggctggtggaggagtcccggtactcacaggggggacgagggg

SEQ ID NO: 294384 - DNA, 122 bp, Homo sapiens
gtcgaagcgcacggactcctcctggttatagaagtatctgtccaggaaccgcacccgctccgtcccattgaagaaatgacactccctcttaggctgccacaggaaacgtgctgtggggacac

SEQ ID NO: 294385 - DNA, 122 bp, Homo sapiens
tgtagaaaaataacaaagctcgcgaagcaaactgctccctaacgtgacagtcttctcctccgacaagccgtagatttcctggcaaggaaggcagacaattagcaacatccacactaggaaga

SEQ ID NO: 294386 - DNA, 122 bp, Homo sapiens
gagaagccccggagaagcaccttcttccgcaggaactggcgcgggacctcgatgcctgtgcgggctgtgagcagcttgctagcccccttgagcagcttcccactgagcaggttggccagcaa

SEQ ID NO: 294387 - DNA, 122 bp, Homo sapiens
gtaaatctgtgatcctattctgttatttaattccgtgactctgtgttgacatagacgtgacggtgtccctggggcatttactcctaggtgagcttagccaaggcaggtagagaggaaccagc

SEQ ID NO: 294388 - DNA, 122 bp, Homo sapiens
cgttttacctaaccaccattttccgtcaagttttagccaatgagttgatttggagccatacgctccaaagtccaatagcaatccggacattctctaaaagaggaagcgaaggaaagaaaggg

SEQ ID NO: 294389 - DNA, 122 bp, Homo sapiens
aataaactgccacatttcagaaaacacgaagactgctgaagccgtttccagccttcgctacgcattagcagagcaactcaacaagcctgggtgaaaggcttctcgaagaaattcagttatct

SEQ ID NO: 294390 - DNA, 122 bp, Homo sapiens
ggggaactgtatctgagagagagcagccaattgggaccgctgactcgggctgggttcccacgccacgtccaacaatgcaagccttaaagcataaaaatattgaaatattatcaagtatcttc

SEQ ID NO: 294391 - DNA, 122 bp, Homo sapiens
atcacagcctaacacacctgaattctgcatcgagaacttcagctttctgtggtgtgtgaccgtataatacaagctacatatggtggtgacctaccagtttgggttgaattaaatattgaaag

SEQ ID NO: 294392 - DNA, 122 bp, Homo sapiens
gaggagaggctgatttccctacacgtgtcagggaaagtcccaactctgcgcagtgaccctcgcttgccattttcgccggtctctagggggcgctgccccgagactgggtggggagggaaaga

SEQ ID NO: 294393 - DNA, 122 bp, Homo sapiens
agggtggcctcatgcataccaatggtttttgtcatttatggctgggcaagatttatgactcggcgccccaaagctgtaaacagagcacaaaacagcaaacacttgctccttatggcatattg

SEQ ID NO: 294394 - DNA, 122 bp, Homo sapiens
aaattaaatttaaaagcaaaaaaataaaaaaaaagactgaaaacatcctaaatatccatccgcaggataatggataaagaatggtaaagtcacacaatgaaattatgcgcggcaataaaaag

SEQ ID NO: 294395 - DNA, 122 bp, Homo sapiens
gggcccaagccggagctgggagagccgcggcatcctggagcccggcgggcgggagagcctcgtcccatcgctccgggattcctcccagagggaagaaagcgtccgagggccacggcggccgg

SEQ ID NO: 294396 - DNA, 122 bp, Homo sapiens
ccctgcatcaggtggcatcacaagaacacaaagcgcttgcttgtgggacacaggattgctcggccggctcgtcttcacgcatgaatcaccacagcgagatgtgtgcacgtttccttcatgcc

SEQ ID NO: 294397 - DNA, 122 bp, Homo sapiens
ccccgcctggctctggattatctgctctgtgtttactgtttcggagggctttacgtgaaacgaataaatttttacttgctcccagggaccggcttgttgttttatggcatgtacttatttaa

SEQ ID NO: 294398 - DNA, 122 bp, Homo sapiens
tttcaggctcggttttcttcgtcttgccgaagctttgaatcgaatatattcggaaaccctcgaccctggtataaccataatcggagatgttcgtttatttccggacctagagatgaggcgct

SEQ ID NO: 294399 - DNA, 122 bp, Homo sapiens
agaaccagttgcagttgctcacattggcggggatgttgcaggccccgggcagggtgcagccgtggcagctggggggcacacagggccgggaggagcagctggtgcggcagctcaggctgggc

SEQ ID NO: 294400 - DNA, 122 bp, Homo sapiens
actgcctcgctcatggagttcggtctgcaacacacagaccgaacttgtgtgcttgtgcctcgccgtctcctggctatgcgtgttgggagtccctgggaaccatgacggataaagttcatctc

SEQ ID NO: 294401 - DNA, 122 bp, Homo sapiens
tcctcaatcctttgttttcaggttagaactctcacatttgttttgctggttcactctgcccgtgttctacaaaagccccagttgcagtctgagctgtggctcagcttcctctcctcatcata

SEQ ID NO: 294402 - DNA, 122 bp, Homo sapiens
gctttccttcaggcccccttcacgtttgctctgggctctacctggaataagttctggacacgtgagactgtgtttgtttccactgttgaccagtcaatcccctcccacttcactccccatct

SEQ ID NO: 294403 - DNA, 122 bp, Homo sapiens
acctccttgggctcaggggatcctccgtcttagttctcccagtagctggtactacagtcacgtaccaccacactggctctttattttgcattttttactttttatttttgtagaaatgaggt

SEQ ID NO: 294404 - DNA, 122 bp, Homo sapiens
ttgatcaggtcttggttaatgatcagctcttctcaatcttgcagggttagttcctggtgtcggcgtggctcctggagttggcgtggctcctggtgtcggtgtggctcctggagttggcttgg

SEQ ID NO: 294405 - DNA, 122 bp, Homo sapiens
cctccccgccctggcccggccccgccccccagctcgtgcgcgcgcgcgcgggagagcggccgctcgcccggaagtgacgtaactctacggcctagcaaccgttgccaaggagctcgactctg

SEQ ID NO: 294406 - DNA, 122 bp, Homo sapiens
cggtagccgctgtgtgtcctgaggccgtaaggcgcctgaccccacccctgaagctggcgacggagcagggcctgttttctctacactatagtgtaggttccagagacctgggcctgagctct

SEQ ID NO: 294407 - DNA, 122 bp, Homo sapiens
ttgaaccaattgtcagcataccacccaatgaggaaccagacgtacttcttcccaaagagacgctccttgtacacctgaatacagaggagaatggctgagtttttgtttgctcatttgtttgt

SEQ ID NO: 294408 - DNA, 122 bp, Homo sapiens
cccctccccccagcaccccctggattcctgaggcctggctcagttaataggagacaggtccgctggcccaagcaaagatgcgggtgccacgagggccaggcctcggccaagccctgctgggg

SEQ ID NO: 294409 - DNA, 122 bp, Homo sapiens
ctgaaggaagaagggagtgaatgaatgtcttctctgaggatagctgagcatccgtgcatccgtctggccatgagaacttggttgcgctcacatgaggatcctgagcaggtaattatctcggt

SEQ ID NO: 294410 - DNA, 122 bp, Homo sapiens
ccggtttccctggcctagagctcccagtgctggctttggcatgatgggcacctggagggccgcactcccgttccagccaggctgagccttctgtcccctgcctctggggcctgggaaccccc

SEQ ID NO: 294411 - DNA, 122 bp, Homo sapiens
tggaaggtaaatctcaaagcttgaggaccagccatcaaaacttttgtaaaaggttttccccgcgtttagggcctcatccatcaccactgagatgtaataacgtaaaaaccaagacggtttgg

SEQ ID NO: 294412 - DNA, 122 bp, Homo sapiens
acctaacctgcaatatctctgcgttatgcccttatagcgccgggagtgggtgccttccgccggctgtacagagcgccggcaggtggcgcccagcggcgagcttgttccagcttggtttgggc

SEQ ID NO: 294413 - DNA, 122 bp, Homo sapiens
gttccccgtggctccccctccccactggcctgtgaggaacgctgcctcctcgctcccgcccggttgagtcacacacctgctctgcagtttcatgtgttctgctgtgctgcctcctccagctc

SEQ ID NO: 294414 - DNA, 122 bp, Homo sapiens
tttattaggcaatagagatagtgagaaggtggggagtggttgttggccagcagcttgattcgcagcaggcttgcaagactgcattcttaggtgctagacttctcaatagataacttcaagga

SEQ ID NO: 294415 - DNA, 122 bp, Homo sapiens
caccagaaagcatgcttggccgatgagctcatccattcctgttgcccctgacgtttctgccggtttcttgtcccagcaggttgggggcgcctgccccccactaggccaagtggagggggtcc

SEQ ID NO: 294416 - DNA, 122 bp, Homo sapiens
ttgatcacacttgaggaatctgacccccaggacgcccagggacaagttgttcgattgatccggtaactctgtttaacctttggagacaataccaaacttgacagcggctgcaccgtttggca

SEQ ID NO: 294417 - DNA, 122 bp, Homo sapiens
cacacacacacacacacacacagaggcagcagacagtggaggtgggagtccgatggtgcccggtggccattagcccagatgatgccacacatggccagtcaccatggccagagtcttcacag

SEQ ID NO: 294418 - DNA, 122 bp, Homo sapiens
gccaccatgtaagaattccgttacatcttttcactcatctcagaccttctcagcgtgactcggtgaaaatgtccccgttctgaggatgtcacagctaaatctaaagcagatcatgtcagtcc

SEQ ID NO: 294419 - DNA, 122 bp, Homo sapiens
ttgtatttccgtactggagttggaacagtctgtttttctggggtgactttgaggattgtccgtcccatgggcatttcctgggattcgggagaaactgcaatctcagctggtgctgctgatgt

SEQ ID NO: 294420 - DNA, 122 bp, Homo sapiens
ccctgttccatggagatgtggtctgctgcaacaccatttgccagagcagctggacagatacgtctctctgagaggggggccaggctggatgtcctgtgggaaagggcacagcgtggtgggca

SEQ ID NO: 294421 - DNA, 122 bp, Homo sapiens
tcttaaaaaatcctgcacagagaaagctgggtatgttgagtgggccgccgtggggtcggccgtttcctgtccgggcggcgcggtgcggcgtgtgattgccgcaggaagggccttcgcggccc

SEQ ID NO: 294422 - DNA, 122 bp, Homo sapiens
ggacgagggctgcctggcatcagcacagctgagcatctactgaggtgaacttcccaggggcggagaaactgcgaacaacacaagcctgattaggaagaaaaaactaacttgaaacgagcctt

SEQ ID NO: 294423 - DNA, 122 bp, Homo sapiens
cttgttattttattcatctaaaaatattttgagaggggctttgtaggcttccccaggctgcgtcagggtcgggatctagagcgaggaccaggctggggcgagggcgccgtgttctcaactgc

SEQ ID NO: 294424 - DNA, 122 bp, Homo sapiens
caccacgcacacccaagcacaagcactcctcgggctcaagaaaggagtggagggtcggaacgttctagaaggcctcccaagggagaggggcttgtgcagatggggcactccaggccaggagc

SEQ ID NO: 294425 - DNA, 122 bp, Homo sapiens
tctattcaggttttcttattctcatgtctatcccatgagcataaaaacgcaattaactagcgtatacgtaggttaagcatttactgggagcgcaagccgagcccttttattggcaggatgca

SEQ ID NO: 294426 - DNA, 122 bp, Homo sapiens
cggctcccccaccaaggacttgggggaatcaatttccaggatgcctacgtgagccgggggcgaggtcagtcccaaggctcaaggcccactccaagctggaaacgtggtgtcccagctccaag

SEQ ID NO: 294427 - DNA, 122 bp, Homo sapiens
ttcccgtgcccctgtaaccgccaccggcctctgcgtccaccctgcacacccacagcagggcggcaaacccagagcatgccacacatatttgggtcgtctgtccacccttgctgtgccgtgtg

SEQ ID NO: 294428 - DNA, 122 bp, Homo sapiens
aaggcggccacctccgccgctccccccagcagcaggagcagccgcagctccgccgcacgccgaagtctggactgctctccgggtcccctcgcctgtgaggaacacacacagacaccgggggt

SEQ ID NO: 294429 - DNA, 122 bp, Homo sapiens
tgacaggaatgagggtggggcgcgtggagtttcccacaatctgtactttagttaaatacccgagaattcacctcctgtgtccacagctctccacgcccctcagccctgccccgcagccctgt

SEQ ID NO: 294430 - DNA, 122 bp, Homo sapiens
caaacgcagaaatgagcccctgacatcacttgtccatcaaatagccaaggtgggagctttcgcaggtgtgcagacagcagcgtcctgagactggactccatcaactccagcaaggtcagcct

SEQ ID NO: 294431 - DNA, 122 bp, Homo sapiens
cttgcacttcagtttgtaggtctccagctctatcttcagcaccttgttctcttgctgcagcgaggccaggcggttggtgagctcctccaggcggaacggcgagatgacaatgccccccgact

SEQ ID NO: 294432 - DNA, 122 bp, Homo sapiens
ggggcttctcagcaggagccaacaaaccagaaggaagaccccatacagctgtccctactgcggtcaacgtgaccagtgcatcccatgctgtggctccccttcaggaaataaagcaggtgaca

SEQ ID NO: 294433 - DNA, 122 bp, Homo sapiens
ttgccacccgtgccctcagttcttccccaatggagaggccatctgcacgggctcggatgacgcttcctgccgcttgtttgacctgcgggcagaccaggagctgatctgcttctcccacgaga

SEQ ID NO: 294434 - DNA, 122 bp, Homo sapiens
ctcactgcagcctcaatctcttgggctcaaggaatcctcccatgtagctgggaccacaggcgtgtgccaccaggcccagctaatatttgaattgttttgtagagataggggtctcattatgt

SEQ ID NO: 294435 - DNA, 122 bp, Homo sapiens
ggtagatcaactaaactgtccaagccttagtgtactcctgggtcaacttgggattagcagcgtgggcctgcttgcctcaggactgatgaagaaagaagagaggagggtagcacactgaaaga

SEQ ID NO: 294436 - DNA, 122 bp, Homo sapiens
ccaaagttagctgactagagtggattaagttcacatctggctaatgagactatccaaaaacgagtctgggaatgcatggaagcattcgacagtgctgtcattttggttctgtccttgtgagc

SEQ ID NO: 294437 - DNA, 122 bp, Homo sapiens
gcctgagggaggcgggggctgggggcgggaccccttcgtccccacgcggctaggagaattcgctgacccttgcccctcgccagatcctccgaccatcacggacgtgaccagcgcccgcaccg

SEQ ID NO: 294438 - DNA, 122 bp, Homo sapiens
ggagttccctcccctcctggcgaggacctttcccggcgcccgcggctccgatccccgccgcgctgcgcccgctctcccggccccggctgccccgctgagggctcccctctcccaggcaccgc

SEQ ID NO: 294439 - DNA, 122 bp, Homo sapiens
cgccgccaccaccgccaccgcccccggcagccgccacagtccggcccgccccccggagcccggctctcataggccccgagccgaagcccagccgcttattggccgcccgagctgctactcga

SEQ ID NO: 294440 - DNA, 122 bp, Homo sapiens
attggctctgtcaaaggtcgacttcgtgacgtcaaagagcctgggccaatcagagcacaccggactgcgttttcccgaacgcccgcagcagggtcagaagggaggtggccggtctccgtcgt

SEQ ID NO: 294441 - DNA, 122 bp, Homo sapiens
ctggtgagggtgccttgtgagtggagcctgcttgtgctgctgtgccccgctgcttccaggcggcgcggccctccgtctgattgctggaggactcttcggtgtggacacaccgtggtttgttt

SEQ ID NO: 294442 - DNA, 122 bp, Homo sapiens
cccgcccacggctcggggccggctccccatctcggtccaacgctggggtcgacggcagtgcgctgcgcccgcctcctgcgcccctctcagccagcccgggagcccgccaggggccggcggct

SEQ ID NO: 294443 - DNA, 122 bp, Homo sapiens
gggcggcagctctcgcaccccgggccagtggtatggtggcggcagtggcagcgggggggccgggcacgggcggcacagcgggcagcgtggccatgacactggcagcggcctctcagcccagc

SEQ ID NO: 294444 - DNA, 122 bp, Homo sapiens
ccccgggacatagtgatgaacagtttctgtcccagggccatccaccttgcctctcaggcacgtggtcagaattaatggccctaaaaataccgcccttcttgtttttctccctccggcatggc

SEQ ID NO: 294445 - DNA, 122 bp, Homo sapiens
caggtctggaccaccactttgaatgcattcattacctcccttcttcaagccccgatggagcggtaaagaagggcggccattacatctgccacctcattcttggtgcaacgtaattctcagta

SEQ ID NO: 294446 - DNA, 122 bp, Homo sapiens
cccagatgctgactctctttcttttcccagcaggcaccgcccctggggctgaggggccggcgcctggggactcccaggctgtgcgcccctacaagcaggagcccagcagccccccgctggcg

SEQ ID NO: 294447 - DNA, 122 bp, Homo sapiens
gaaaaattcctattgctagtgatgtggtcattgtaaagctgtagcacaacacattacccacgtttgtggtgacagtcatataaaagtatggtacatataattatgtacagtgcatacataat

SEQ ID NO: 294448 - DNA, 122 bp, Homo sapiens
cctcgcctccacttctcttcttgcggtaaaggtcctcctcgcccctcaaattcacgtaaccggtggccaaagcgcttgtcagggtggaagtcatctggtctgctgaagtcatcggggaagtc

SEQ ID NO: 294449 - DNA, 122 bp, Homo sapiens
acgcttacactcgagatttctcagaacataactctcattttcctatttggagagaaaatgcgggagagttttgggaagcacccctactgatgtgagaaagattctggcatggttctttttgt

SEQ ID NO: 294450 - DNA, 122 bp, Homo sapiens
cgggaaagcctcccctgaatgtggggcttcaaaggagaatcttcctggagacagtcccttcgctttcctctggttggggctgaggtggtactaagactcgattccccccatttctctgttcg

SEQ ID NO: 294451 - DNA, 122 bp, Homo sapiens
tgtccagggagggagagagcatgatattacgttcaatatcgcagtaggtgtacacccagccggtgatattgatcagaatataatctccagggggtggagtatgacgttactcccaatatagc

SEQ ID NO: 294452 - DNA, 122 bp, Homo sapiens
ggcaacaagaaaatgtgactatccctaggtaccatcatttgcaagcatctctttagtctacgtacctctactccatcgctggtttccctttgcttcgattatataatgcgaggaggtctata

SEQ ID NO: 294453 - DNA, 122 bp, Homo sapiens
gccagggtcttgtagtttcaaaggtgactttaaataaaactttgctcatgttaagagaagcgatgtggatacctgatgcaaaaataaaaaacaaaccaggtgcagtggtgtgcacctgcagt

SEQ ID NO: 294454 - DNA, 122 bp, Homo sapiens
gagattggagaaggagcacagactgcaagggaagagctcatgaacaaaggagtttggagtcgactcccaggtcagagaagagacagtggacaatgttcattgggtgagaattttggaaaatt

SEQ ID NO: 294455 - DNA, 122 bp, Homo sapiens
ggccccagggacggcccaccacagccctgcccaacgtccagcctcaaggtaaacagatggcgctggcccctgcgttcaagtccccgcccggaatgccccgcgaagtcgcccgcggctgaatc

SEQ ID NO: 294456 - DNA, 122 bp, Homo sapiens
cttcccacaccaccccatgcagggtcagcgatgagccgctggccccggccctgtccccgccgctccctcgtgcacatatcctgggaacacactggacgccgagcagcttcagttttcacacc

SEQ ID NO: 294457 - DNA, 122 bp, Homo sapiens
ctcgaactcctgacctcaagagatccacctgtcttggcctcccaaagggctgggattacacgcatgagccacagtgcctggtctattatgatttttaaagtagaaaaaaagactggaaggaa

SEQ ID NO: 294458 - DNA, 122 bp, Homo sapiens
tgagtatgtgcagtaggatggatgtttgagcgacacacacgtgtaacactgcatcggatgcggggcgtggaggcaccgctgtattaaaggaagtggcagtgtcctgggaacaagcgtgtctg

SEQ ID NO: 294459 - DNA, 122 bp, Homo sapiens
cagcctttctccgagacttccaactcaccgggcctggagctcgtccccttctcagcccagcgctgagcccccaagacttggctcccggctaccacatctgcttggagaagaaatgggtgtgg

SEQ ID NO: 294460 - DNA, 122 bp, Homo sapiens
ctggggccgcgcagggcgggagtcctgcccctgggtgggggggacatggggctgggactgcgggccgggtagaccaccaggtggggaaagtcaagccttctggaaccttccagccccgcgaa

SEQ ID NO: 294461 - DNA, 122 bp, Homo sapiens
cagctcaggctctgtgcacctgtaggtctctctggattattcctcatgcagatcttcccacggctcattaccaccactcaagtttcaggccacatgtttcctaaccacctacccaaagaaaa

SEQ ID NO: 294462 - DNA, 122 bp, Homo sapiens
gctcccgggggtcgtgcgcgggctgcggtcggggactccgggtccagccgcgttccgagacgagtgagggcagcgagtactcccgtgaagggtcccctccgatccagtgtccccactcccag

SEQ ID NO: 294463 - DNA, 122 bp, Homo sapiens
ccgctattcctccagatgtgcttaaagtcaaatgtggactggaattacttggtgtcaatgcggagtaactgctctttgctatttattatgaaggactttaactcaactctccatcttcctcc

SEQ ID NO: 294464 - DNA, 122 bp, Homo sapiens
ttcgaaacctgcagcagccatgttgtcgtgggtgtaaagtccagaatgactctggatgagcggcaccacgcagagatgagcacgaggtgctggagagggcgagagctgagccaggaaaggag

SEQ ID NO: 294465 - DNA, 122 bp, Homo sapiens
ggccccagcgcgcggcccccgccgagcctgagcctgcgggagggggagcccttcgagctgcgctgcaccgccgcctccgcctcgccgctgcacacgcacctggcgctgctgtgggaggtgca

SEQ ID NO: 294466 - DNA, 122 bp, Homo sapiens
aattaatttcatatgcactgggtacgtggttatagtcagttttaataggcaatatggggacgtggtgtaaattaggaaaatgcatcagaaccttccaagcaactagattagggggtcatgaa

SEQ ID NO: 294467 - DNA, 122 bp, Homo sapiens
caaactgtggggcttgggtgattttataggctagaggctggaaactggcagctgcaaggccgaatatgaccactaacacatttttgtttagtctgtgcattttttaaaaagtttgacttgac

SEQ ID NO: 294468 - DNA, 122 bp, Homo sapiens
ccgccaggtaggggtgaacaaacacgccagggaaatacagcagtgtggacccgagcccctcgagggtcctccaatactatgaagttcccccgcccagactcaggccccaacccgcgctccta

SEQ ID NO: 294469 - DNA, 122 bp, Homo sapiens
ttcaggagctataacgagttttaattcagggccactacaggtgtcctgaggtctgataaacgccatcttcattacggtcagtgcctttcggaggcttgtggccaccagacttgtttggagag

SEQ ID NO: 294470 - DNA, 122 bp, Homo sapiens
gagagaatgtaggaaacacgcagtggcgactgacgcggatctcctgtgtggtaagatggccggccaaagatgggcttgcatcctcctgcgaggagcgaccccgtgtgatcgtcagccattgg

SEQ ID NO: 294471 - DNA, 122 bp, Homo sapiens
gcttcagttttatcatttgtaaaatggatacaatcctgatgcctttggaccaagtggtcacggaaatgaaagagataagtatgaaaaaatccatgctcatagtagctgtggtttccaactgc

SEQ ID NO: 294472 - DNA, 122 bp, Homo sapiens
ggcctcccagttctctcatggaggctgagacgtctcaagagcgtttctgtactccagctgcgcgtccccaggcacgagcgctcgttaatttccctgagatgccgtgcctagtttgaatattt

SEQ ID NO: 294473 - DNA, 122 bp, Homo sapiens
actggctccgctgcctccgcccccgaaccgggccaggacccttggcgggggaggggaacgcgcacttaaacgctcctggcctgggggccgcggggcccagtcctacccgtgcggaccccgct

SEQ ID NO: 294474 - DNA, 122 bp, Homo sapiens
tcccaggggccccgcggtcccgccaggctgcagccggctccgctctcctgccacaatcctcgtccagggcgcagctgtctgactcctcacaggacaggtcctcctggcaggcgaggtggtcg

SEQ ID NO: 294475 - DNA, 122 bp, Homo sapiens
ggcctctgtgtctcacagctccccttcccctggttgttaaggcgaaaaactccctagcaacggggtttcctgaaccttcgggccacccgaatccaccttctcaggtatcagtttccttagga

SEQ ID NO: 294476 - DNA, 122 bp, Homo sapiens
cggctcttcgctgggcgtcgcgttccacatgctgccggctcagctgaacaggctctgggacgtgactgcgctgggaggctggaccgagctggctcccgaggaggtccgcttaggcgcgggag

SEQ ID NO: 294477 - DNA, 122 bp, Homo sapiens
agccgttgagatttgaactcggtatttgtggctttgcccgcgcgttgccagactcagaggcggccctttgcctctgcctgccggggattggccggattctccgccgacttgaaaactgcctt

SEQ ID NO: 294478 - DNA, 122 bp, Homo sapiens
tggagggcagatcccgtgcggcgttctcagctgtcgggagttctgatctgaattctgccccggctgactgggtgccctggggaaggcgctcagcttccctgaactgactgccttctgaaaaa

SEQ ID NO: 294479 - DNA, 122 bp, Homo sapiens
ccctcctgtcgtgcagggagttctgctcctggaaatattcctcctcttcatcgaagaagccgttctccagagcgtaagtgcagtctgggctggaggctgcctggcatgcccccttgtactcc

SEQ ID NO: 294480 - DNA, 122 bp, Homo sapiens
caatttgggctgcttagctcctcccctcccccacacttgaaacatctgcttaaataataacgatgacattaatgatcatcattcaagctgaaatacattggttactttactacatgatagac

SEQ ID NO: 294481 - DNA, 122 bp, Homo sapiens
gctttttctgcgtgttcacggagcgttaagcctttatcccacagaacggctctgtctgaccgggtcagacaaaagccaacttgcatcttccgctccgaggggatctgggcagagcccgggta

SEQ ID NO: 294482 - DNA, 122 bp, Homo sapiens
gagggctcgcgcagtcctcaggctccggataaacacgtgtgcccgcatccagctccggcgcgccctgcatttcagcaccgccgcctctggagagcgccttgctggcgggccaggtcagggcc

SEQ ID NO: 294483 - DNA, 122 bp, Homo sapiens
aagtctggaggtcaaaggagaatgcagtctgccccttccttgacttggtttggctctccacgcctcaggatttccttttgtaaagtaagactagccataggaatcaaggctttctactgagc

SEQ ID NO: 294484 - DNA, 122 bp, Homo sapiens
tccggggtaaggagagggaccccggggagggcaggactgcagaagatcccttttctttcacgtccagcccgacgatagcaggaggtcagggctcttggttcctccccacacttttctgcaag

SEQ ID NO: 294485 - DNA, 122 bp, Homo sapiens
cccaccccagcctccactgggaaaattagcccggagccaacgtgtcgcggatcccacagccgcctggagccctcccaaagccccgcgcccaggcctccccgggcacaggcggcgcccccttc

SEQ ID NO: 294486 - DNA, 122 bp, Homo sapiens
ctctgcacctcacctactgggacccctggcgggtcctctcactccctccctaccccaccccgccatgccccagaacccctaaagcctggccatggacaccccggctctggcgtggttcccct

SEQ ID NO: 294487 - DNA, 122 bp, Homo sapiens
ccttctagtctccgggcagcctggggagcggcctttaatcctggtcccttctccgggatacgtcgtcccccaggtgtctcagaccaccaaaactcaggttcctgggtagaccaggggggtct

SEQ ID NO: 294488 - DNA, 122 bp, Homo sapiens
aacgctctcctctctcagttatttgcttctttccaacgtttggcgcccagctcccgccatcggagcgccccgcccgagaccactgatctcctggggcctcgcagccttgcttccgaacgcca

SEQ ID NO: 294489 - DNA, 122 bp, Homo sapiens
cactagtctgtcacagtcaccatttctggaagttcagagataaagctatccttatcctttcggaacagtggcacctgctttgtcagctctaggtggtaggggtttccctaactgggttgccg

SEQ ID NO: 294490 - DNA, 122 bp, Homo sapiens
cgaggacaggcggggctctgcaggtccccaacccacgtgctcccggcctcctccgcagggcgccgccttccggctaggcgcaacacggactacatttcccagggtgaacagcggcggggcct

SEQ ID NO: 294491 - DNA, 122 bp, Homo sapiens
tagggctcagagtgagattggactctgcagtagcaaactgtggtataaacagccctcccccgggctgtgtaatctgacagatcccatgtgctaggaatatccacaggtgttaaggatgatat

SEQ ID NO: 294492 - DNA, 122 bp, Homo sapiens
gttgagtaccatctgagctgtcaaactttgctgccaagggggctgaatcaacctgcagcacgaagtgagtggggaggtaggaagcttctgtgacacagatttgcagcctgtgttcccaaggt

SEQ ID NO: 294493 - DNA, 122 bp, Homo sapiens
ctcactcttgggggtcctgatgaactcttggaccctgtggaagataagagttagagacctcggcctcctggtcagtggagcccttggcctcatgcctggtgggctaagcgggcccagctggg

SEQ ID NO: 294494 - DNA, 122 bp, Homo sapiens
ccagcagctctgctgacaagcgagaaaactgacaagtgagaaaagtcgtctgtcagcgcccgggctggtgtctgggctgtcaccgcgggcgcggagggaggggcgcgcgggcaccgccgtct

SEQ ID NO: 294495 - DNA, 122 bp, Homo sapiens
gccagaaaagatcgtgaaggtcatcgtagcccgcgtctaacccgttgagagtcgtcaggccggccagccccagttcttatctgttgtggcagatacgattgcttgctcatggttcgaccctg

SEQ ID NO: 294496 - DNA, 122 bp, Homo sapiens
tgccaaaatagtctgcacccgctgcagatcgtacggcagccttcagcgcggggagcacggcgccccccgtcaaaggaaaggtgcctctcaggggaggaagcacaggggctgggccgggcccc

SEQ ID NO: 294497 - DNA, 122 bp, Homo sapiens
agccccgcctggccccatcgcagagacccccagagcggcgggcttttgttggggggttcccgcttgtccctggctcctgccgtctctgtggagcgcggcaccgccttggatccagctccacc

SEQ ID NO: 294498 - DNA, 122 bp, Homo sapiens
ccttgaatcttacttaataaacattgctgctcccagggttgagttggttttatgtgtttacgataagttaggttcaaagcgcccacgtgcagtgccttatctatcctgccccggcctttcct

SEQ ID NO: 294499 - DNA, 122 bp, Homo sapiens
ggctgcggaaaccgctgggagcgataggacctctagggagacttggggtccgagttgggccgagccccctgggaggcgggccgttctttgctagccgctgtcagggcaccctgccctcgccc

SEQ ID NO: 294500 - DNA, 122 bp, Homo sapiens
ccttgaccccccacccactcccgctcagtgctccccttgaagaactcgatggatgtgatacgcaacttagcaccgcgtcgccatgcactcgatgccggtcttcacggcacgctggcccctcc

SEQ ID NO: 294501 - DNA, 122 bp, Homo sapiens
aaaggtaaaaaaattatatgggcatggtggcatgtgcctgtggtctcagctactgggagtcgggggtggtgttgaggtggaaggatttcttgagcctgggaggttgaggttgcagtgaggca

SEQ ID NO: 294502 - DNA, 122 bp, Homo sapiens
acaataggtcggtcagttccgcatctcagaggctgaagccaaggttttcatgcctttgtgcgcccctgagagtgaaccccacccctggagtctcagcagcacgcgaaaggggctggcgcctt

SEQ ID NO: 294503 - DNA, 122 bp, Homo sapiens
ctctccgtggagggtacaggagctgggctcacagatactaggtgaatacaccacaggccacgctcacctgccaaatcctcctgctggatctgaaacactgatcattcattcgagtgactagt

SEQ ID NO: 294504 - DNA, 122 bp, Homo sapiens
cggcctggaggctccctggccttcctgccggggtggaaacgggtgtctgctaccggggttcgtgtggagcaggaagggggaaggcgacgaggtggaaaagaccgctgggcgccccgaggagg

SEQ ID NO: 294505 - DNA, 122 bp, Homo sapiens
accagaagtcacataagtgccatttgtcaggccaaggcaatgagcccagttggtgacattcggagttggtgcccagcgctgctgtgaacatctggctatggaggtcagggggggctcttgct

SEQ ID NO: 294506 - DNA, 122 bp, Homo sapiens
agctgggatgacagctgagtgccaccacatccagctaatttttttttttttttttagtagcgacagggtttcaccgtgttaccaggctggtctcgaactcctggtctcaagtgatccaccca

SEQ ID NO: 294507 - DNA, 122 bp, Homo sapiens
gacagttctcaccagttcattcctagtggtgatttcaagctaaaataaaagagaagttagcggtttgcaggttcaaagatgtctaaaagagaatggccagaatgtatatatggatttaatag

SEQ ID NO: 294508 - DNA, 122 bp, Homo sapiens
gacggccgcccgagaacccccgagggacgctgcagtgcagcagggctcagtgaccaggtgcggccggcgctgcttacactcatgcgggctgtgcacccagacgggcctgcgccctcattcac

SEQ ID NO: 294509 - DNA, 122 bp, Homo sapiens
gcgagaagaaaccgcgctaactagtttgtccctacggccgcctcgtagtcactgccgcggcgccttgagtctccgggccgccttgccatggctgcccgtggtgtcatcgctccagttggcga

SEQ ID NO: 294510 - DNA, 122 bp, Homo sapiens
cggcttcacctctcactggcactcgccatgggacttcgtggcacctagcccgtgcactcccgcagcccagagggagctcatccctgattaagcccaccaggcggccgcgggctgcgcagagt

SEQ ID NO: 294511 - DNA, 122 bp, Homo sapiens
gccgccgcaacgaaggtggatccgcatcttgattgttctccgggagcctcctgggggctccggcggcggcgcgggcgcgacccatcccgctggcgctccccgctcgctgaaccccgtttgcc

SEQ ID NO: 294512 - DNA, 122 bp, Homo sapiens
ggaagggagactgtgggaatgagagagagaaaaccagaaagacacagaggagagagacaacggatagaaagtgataggcaaagaactaagcactcagtataggggaaccaagcacaccgcgg

SEQ ID NO: 294513 - DNA, 122 bp, Homo sapiens
aggggaagacatccagacaaagtgcttctgagcgagagatggacatttacagcaactatccggcattgatttctgctcgcctgaggtgtctcggaagacatggggcgtatgacacactgcgg

SEQ ID NO: 294514 - DNA, 122 bp, Homo sapiens
taggctcctttaccagcaggtggatctcccgcagcccggggccgccagcccggccgccggcgccgcccccaactcccgcgccctccgcgcagccgccccgcgccccctcccgcccccgcgcg

SEQ ID NO: 294515 - DNA, 122 bp, Homo sapiens
cctggagggatgaaatgccaataaaataggacgcagtcacagaaataggatttttctgtccggatccttgaatggagaatctaaccatgagccacaggaataaaccttatctagcataagga

SEQ ID NO: 294516 - DNA, 122 bp, Homo sapiens
attcgcgttttgttttgttttttaagtgactactagatactgtgattcacttaagtgaagcgaactgaagcccgtggtcaaggagagacacctgaaggtgaagggacaaagcgagcagggta

SEQ ID NO: 294517 - DNA, 122 bp, Homo sapiens
agctccacagacagccagcagcccacccgacagggaccaagatgacaaagtgctcagggccgccctgtgccccgggacccagctgcagcctcagcaggacagggctgggggcggagggtaca

SEQ ID NO: 294518 - DNA, 122 bp, Homo sapiens
ttaaactaaaattaaatagaattttagtccagattttctaagtgatcaaagaggaagctgcgtcagctgtgtctgcctgcccttggcccactccctgtgccctgggctctctgttacaggtt

SEQ ID NO: 294519 - DNA, 122 bp, Homo sapiens
agaagccttggggcccaaggacagtgtggagggaggagccctgtggcatgggcagtggcccggtcgggataccggtaatcctcagacttttccatgaggggccccccacatttccccagtca

SEQ ID NO: 294520 - DNA, 122 bp, Homo sapiens
tctggtcagttaggatgaagtagtggccattccaggcctgtcggtccttgtccagagtgacgtgggcgatggtggtgttgtactggacacggagccccagcgtgtccgcgaagtcacccagg

SEQ ID NO: 294521 - DNA, 122 bp, Homo sapiens
tatctcgactttgccgagtctgggcaggtctactttgggatcattgccctgtgaggaggacgaacatccaaccttcccaaacgcctcccctgccccaatccctttattaccccctccttcag

SEQ ID NO: 294522 - DNA, 122 bp, Homo sapiens
acttttaaacaagatctaatgggaactcactatcactagagcaacaggggggaaatccgccgccatgagccaatcacttcccaccaggtcccttgccaacactggggattataattcaacat

SEQ ID NO: 294523 - DNA, 122 bp, Homo sapiens
tacttcagccaccgcgtatctgttctgatgtgaaagcaaaagtggcaaatatgtcagcagcgaatctatgagagaattagtctgtaatgaattccaaacaccataaattaacctgacaagag

SEQ ID NO: 294524 - DNA, 122 bp, Homo sapiens
acacaaatatctgtatgaaaagcctggcaagaacagctctagctatttacttcttattttcgtgctcaatggatgccattctgcattccatccaagagcagcaccctgtcctgaaaggagat

SEQ ID NO: 294525 - DNA, 122 bp, Homo sapiens
cacttccccccacccccacagatgggacaaggacggagaccaggtcactccagggagagccgtggctagtggaacagctccaccgtgaaatgggttgaggtcgaatccaaaatctgaatgaa

SEQ ID NO: 294526 - DNA, 122 bp, Homo sapiens
agtgatccgcccgcctcagcctcccaaagtgctgggattacaggcatgagccaccgcgcccggcaaggaaaaacagttttttaggaaggcccctgtcattcttagtccataggaattttttt

SEQ ID NO: 294527 - DNA, 122 bp, Homo sapiens
tgctcagtgattatcattcccataacctttcttcttgccacaaagtttcccactcctatgcggtgaaaaagggcatttattgaatatctccttagaatgaggtggcttcacatgggttaatt

SEQ ID NO: 294528 - DNA, 122 bp, Homo sapiens
tccatctggtcctggagacgagatgccagggcgaggcctaacctgcctgctggcgcccaacgaagattttaacgttttctgttcccttcggggtggttttaccacgcttgagagggacgcct

SEQ ID NO: 294529 - DNA, 122 bp, Homo sapiens
cggagcatcgtagagggaaaatgccagaaagcaggcagtgcaccaatgaaaacaggctcgcgggagaaccaaagggtggcaagctcagcacggccagtagctttcaccctcggttgccagtc

SEQ ID NO: 294530 - DNA, 122 bp, Homo sapiens
ggcagtagctttctgttcttcccactccgccctgcatccccctccccgccccccgtcccccgccgcccctttcagctaggtccgtttgtgtgtttaaaacaaaagtgcttttttcccacccc

SEQ ID NO: 294531 - DNA, 122 bp, Homo sapiens
cgggaggaggggcgtgggagggccaaggccgccgagtccccgctgttcagccagcaggagcgccccgcagccctcccgggacacggtggacacgcttgtcccagacctgggcgccctcctgc

SEQ ID NO: 294532 - DNA, 122 bp, Homo sapiens
atattgcagcagcagcagcagcaacagtaccggcagcagtggcagggatggagagctgcacgtagcaagggtcaggacggccagcaggtggagacgtcagtcgcagccagctgcttcctcca

SEQ ID NO: 294533 - DNA, 122 bp, Homo sapiens
aggggtgtttcatgtagaatttttcttctaattttcatcaaattattcctttttgtagctcgatgaacttcgggatgaagggaaggcttcgtctgccaaacagagactcaagtgtgccagtc

SEQ ID NO: 294534 - DNA, 122 bp, Homo sapiens
gttgcccgtcccatctgaatgacaacagctctgctgtacagcaattatttactgagtttccgctaagccttttttgttttgttttgaaaaagggtttggtatggaaaggtctgaaatgtgct

SEQ ID NO: 294535 - DNA, 122 bp, Homo sapiens
tgaccagtctcttaaaggggtagtgcacttccagcagcggagtctggctgctcccccctccgcggagccacacgctccggctgcaaggctctagacaacctcagggtgcctgtcctttcctt

SEQ ID NO: 294536 - DNA, 122 bp, Homo sapiens
atgaagagaatattattggaaaagcaggttgggagtcatttgcagacctgtcagcagcatcggctgcagatacagcttacagaagacgggccagatcttcagaagacagaacaaaaacacat

SEQ ID NO: 294537 - DNA, 122 bp, Homo sapiens
tgcaatccttaaagaagaattaaaccaccattaagtaaatgcaggtgggtaagcgggacccggggtaacctacgtgacgctcaccatgataccgtgcgctcctctccaggacccaggcaaac

SEQ ID NO: 294538 - DNA, 122 bp, Homo sapiens
gtggacggaggacctgacttcccctagaagcatgccatgtttgtgatgaggattcctggacgatctaccacatctccaccccgagcagataaaagcagactccttgtgatgccagacagaac

SEQ ID NO: 294539 - DNA, 122 bp, Homo sapiens
acctaaggaaatagttaactcactacttctagaattgtttaagaagagaccagtgagcatcgaccagttgctgtccagggtaaaggtctgctaatgaattctcaggctccatacaaatataa

SEQ ID NO: 294540 - DNA, 122 bp, Homo sapiens
atcaaagaaacgggtgaaggacggcacctggagaatcgggtcactcccacccgaatactgcgcttttccgacgggcttacaaaacggcgtaccaccagattatatcccgcacctggctcgga

SEQ ID NO: 294541 - DNA, 122 bp, Homo sapiens
ttctaaatgtcaagcattttgtgttcgttttttaggcatagagagtgcattggggattttcgatgaggggagtgcctagcaagttgctgggtacatagtaggctgataatcaatcaatgatg

SEQ ID NO: 294542 - DNA, 122 bp, Homo sapiens
actgcggttcgtcctcagtccacgatgaagtcatagggctgtgggtccgtgtgtctgtgacgtcagaagatgggtcctgggatgtcactgcaggcccgggcggggacctgggctcacggaag

SEQ ID NO: 294543 - DNA, 122 bp, Homo sapiens
agggaggggtcgcaggcccaggcgctcggagcgttaccagggaaacaggtctcggttttgcggctcccactcagctgcgggagaaagctaagcagcaaaattcagaccaggctctgaacccg

SEQ ID NO: 294544 - DNA, 122 bp, Homo sapiens
gtcaagtgcctccccccgcagcccgcggagcccccggcggccttcgccctgcagttctcccgacctccgccagagcccactgcgctctgcctgcctcagcactggggctggggacagcagcg

SEQ ID NO: 294545 - DNA, 122 bp, Homo sapiens
tgaccgggtgacaagctgtcccttctgagagtgccagagggtgttccccgggtgggaggccggatgtcagtgccagctgtgctgtcctgggtgagcctgtgagggaccacatctggtcagac

SEQ ID NO: 294546 - DNA, 122 bp, Homo sapiens
atcctgtggaatttaagtgatccccgttttcattgcaacaggttcaggaccatgagagagcgccgctgtaagtaccttcccgcttcttccgaatcgcgaagagacggtactgatcgcgggga

SEQ ID NO: 294547 - DNA, 122 bp, Homo sapiens
gaaaccacgggcgcccgcccggctgcgcttccagagctgaactgagaagcgagtcctctccgccctgcggccaccgcccagccccgacccccgccccggcccgatcctcactcgccgccagc

SEQ ID NO: 294548 - DNA, 122 bp, Homo sapiens
aatgtttccatttcctccacacacatatttctgaagagttatgagcaggaagttttctcacgtattttcccaagtagaaaggcctccagctgcacacagactttcccattgccccagtatta

SEQ ID NO: 294549 - DNA, 122 bp, Homo sapiens
cagacgtctcatttgttcgcctagaaccatttatatttcattgaagccagctggtgtctccgtttgcaggcatgcatcaatgtctggtgaacaatctatgttcctgtaaacccttccccatt

SEQ ID NO: 294550 - DNA, 122 bp, Homo sapiens
tttttgctttctttagctaaagagaaacaaaaacgaggaaaggctgtgagacatttcagtcgctattaggaaggttattatccagagacctgtgcaatggtaaaaaacaaaatggaaaccct

SEQ ID NO: 294551 - DNA, 122 bp, Homo sapiens
cagtaactgtgggaacaagcccctccctccactgcctcagaggcagtaagaaagagaggccgacccaggaggaaacaaagggtgaatgaagaagaacaatcatgaaatggaagaaggaggaa

SEQ ID NO: 294552 - DNA, 122 bp, Homo sapiens
tggcctgaggacgcggttcattgtcctggatcctgaccgaggctggtgcacctgcagcgacgcgctctttttccgcttcctggggtttttgatcgtccggaatctgggcggatgggaagtcc

SEQ ID NO: 294553 - DNA, 122 bp, Homo sapiens
ggagccgtgtcaggtggtgacaggaggcgacgggtgaccatggcaacccgaggtgtgcagcggaccgacccagcctccgactcccggagtcacccacctgagggctccagggcaagcccgga

SEQ ID NO: 294554 - DNA, 122 bp, Homo sapiens
agccccaggaaaatgaaagacacgagagggaggggccagggaggaggcggcggacccgcgcgggacccacctcccagatgaggaaggagctgggtttacgggaagcctccaagtttcgggaa

SEQ ID NO: 294555 - DNA, 122 bp, Homo sapiens
caagcctaggcgaacaacatgcatccataaaaagagcttcccataaccacctaccctgggcgctcagttagtacggtaaacagagcgcgagcattaaggctttttatgataattccccacaa

SEQ ID NO: 294556 - DNA, 122 bp, Homo sapiens
ccccgcgctcgggccgcccctcgcctcctctccctccggcctctgcgcccgctgccgccgcgctccagccgccgggggcctcccctggacaccaagtttctccttgtgttgtgcgtttgttg

SEQ ID NO: 294557 - DNA, 122 bp, Homo sapiens
ctcttctggtctatgtttcttacggctcgaggtgagctttcgcttgccatccaccactgccgtttgccaccgtcgcagacccgcggctgacttccatccctcggatctggcagggtgtccgc

SEQ ID NO: 294558 - DNA, 122 bp, Homo sapiens
gggcaggacagacagctcagagcaaggggccttccgatgtctactgtgactggggggtgacggatggggggtgcccctcttcctgtagaaactgaggctcccgccctaggagcctcctgccc

SEQ ID NO: 294559 - DNA, 122 bp, Homo sapiens
tgcggctcccgcgccaggcacggcagccgcagcccggccttcccagttcagcccgctccgcgccccagcctgcaagcagaagggagggagggagtagagcacccgctctggggactggcctt

SEQ ID NO: 294560 - DNA, 122 bp, Homo sapiens
acgcgggtgctcggagccatgattttttgaagcgttcttgacgtctgtggctggtgcgggcgtttctgctgtgcaaggcctgcttccggggctctagtccctggggctcctggcaagctcca

SEQ ID NO: 294561 - DNA, 122 bp, Homo sapiens
ttgatttgtgtgatgcacagctcaacccttctgttacttgagaaggccctttgatcctaacgtcttggagtgtgaggcaggagaaggctaggtagaaaaaaaaaagagaagcaatttcagaa

SEQ ID NO: 294562 - DNA, 122 bp, Homo sapiens
gaggggggcgcagctcggtggagagggtggcccggaggaccgggaaccgggctggaggcgcgcggggctcacaccgcggggtccgcggggagccgggcctcgggctgcaggtgcaggcttgt

SEQ ID NO: 294563 - DNA, 122 bp, Homo sapiens
tgtaacatgtgcctaccattttccagataagaaggggccgtaccttctgacgggtctaggcggcgggcccgcctcccgtgtttggaattgttgtgcacaaacatgttgtctgacacggccag

SEQ ID NO: 294564 - DNA, 122 bp, Homo sapiens
tatatttccctcctgtgacgcactgcttccacagagaggtgcaaacgtgcaaacgctcagcgaccgcagcgctcctgcccctcccccaccgtaactccggggtcgcggatctgcccgccccg

SEQ ID NO: 294565 - DNA, 122 bp, Homo sapiens
ctggatctatgtcgcagcagaggagacggaattctcttgaggcatctgagcaggtttccccgtcaggtagggagaggaagtgtttgtatagagccacactcagatcctagaggaatccaaaa

SEQ ID NO: 294566 - DNA, 122 bp, Homo sapiens
aacctctcaaaacacagaactatcaatcaagtaggaccagactgtgcccccagggaaggtcgcagatttaaggctgcgaggacaagggcaaagaagtgcgaagcgttcgggtggacatgcaa

SEQ ID NO: 294567 - DNA, 122 bp, Homo sapiens
cctctctggtgctgatttcctcactttctggaaggtgttgatgatgcagccacctgggcccgggcctctgaggaccggttctgggaagcatcctgcttccttcccttctcaaggcgcactgc

SEQ ID NO: 294568 - DNA, 122 bp, Homo sapiens
tgacatttacactgagccaccagtctctgcctctaatccgggcgaaaacgattgtactgccgagttatggctgcagcgtatggggacgctgctgtccgcggccggacagagcccatcagcta

SEQ ID NO: 294569 - DNA, 122 bp, Homo sapiens
ctctcgtgggtccccttctcaaatcggactattgcaaaaagcaggcagaaaggaggcaggcgtccttgttgctcccgcctgcaattcactgcgatgagtttggcacctacattgctgtgcta

SEQ ID NO: 294570 - DNA, 122 bp, Homo sapiens
atgcaggagaggaaagaggaactttaaaggctgtacgtgtaggattttctttttctctctcggaggaaagaacagcaaaaagcgaagagtgggaaatgctggacttaaattcctttctttag

SEQ ID NO: 294571 - DNA, 122 bp, Homo sapiens
ccaaaggacagatgctggatgattccactgacgggacacagctagaccctggaaacattacgctgcgtgaaagacgccagacaccaaaggacagaatgtacgattccacttagaggacatag

SEQ ID NO: 294572 - DNA, 122 bp, Homo sapiens
cagctgggtgcggttcagccacagctcctgcaggccccccatctccccgaagagcacccccgggagctctgccagcgggttctcgaacagagtcaacagagtcagattgtgcgaatgaagaa

SEQ ID NO: 294573 - DNA, 122 bp, Homo sapiens
gcaccgtgagcacgatgccaatgggctgccggttggggacatcgccgagggccagacctgcgcagagcacacgggagggcggtcaggtcctcaagcactggccagggtgggcctgatagcaa

SEQ ID NO: 294574 - DNA, 122 bp, Homo sapiens
gccggggggcgccgggtgccgcagtaacggctgctgctcggccaggcggtaactgatgggcgccgccggcggcagcgacacggcgtgcgccgagttgggggacgtgatctcgaaagttggca

SEQ ID NO: 294575 - DNA, 122 bp, Homo sapiens
taaatggctcgggaaggtgctcgcctaatggctcggtatcgctgccgggcctgttgtgggcgaggcggcttggagggggcgcaggcgtcagcggggattcagagcggaaacgcatttcgcct

SEQ ID NO: 294576 - DNA, 122 bp, Homo sapiens
gccttggctgctgaggatgctgctgctctgagcactgggaaggctttaaagccacggaaacggaaaaacggagtgtgttcagggaagcgcggacagatcgcccgctggtgaggctctgcgtt

SEQ ID NO: 294577 - DNA, 122 bp, Homo sapiens
gtggcttaggcctgccctgcagagcatccctgtgggggactccggccagcttgagcgacgcggatcctgaaagtgctcccaggtaggcatttgccccagtggaacgcctcgtcagagcagtg

SEQ ID NO: 294578 - DNA, 122 bp, Homo sapiens
ttaactctgggcccaggacaatggcccagcctgtaatcccagcacactgggaggcccagacgtgaggatcccttgaggccaggagttcaagatcatcatgggcaacatagcaagaccaaaca

SEQ ID NO: 294579 - DNA, 122 bp, Homo sapiens
ctggataacactctatttccttaccttggtctgggagaaagcgaagtacattcccgcggacgcccagctcctttacgtagcataagtctcgggagaccccagtggtcgctgctgcctcgcga

SEQ ID NO: 294580 - DNA, 122 bp, Homo sapiens
gactgggtttctccatgttggtcaggcgggtatcgaactcccgacctctggtgatctgcccgcctcagcctcccaaagtgctgggattacaggcgtgagccattacgcccggcctttatttt

SEQ ID NO: 294581 - DNA, 122 bp, Homo sapiens
agagtgtgcctttcctactcagacctccagccagggaggtgggtctgttcactgtccttacgccatgttcatgcctacccctacccttagctcaacaagtcgccacagtcttcctcctgtct

SEQ ID NO: 294582 - DNA, 122 bp, Homo sapiens
ggcagagctgggaacaaagggttaaagggcgccatgtaagagagctctccattcccaccacggagacatccagaccccagcagaggcccaaactgactcacaaacacacagccccatctttc

SEQ ID NO: 294583 - DNA, 122 bp, Homo sapiens
cggtctgatggtcagttaaagttcaatatcggaagacggatgaaatagagcgttatttctcgatatacagttaggcactcagccgtagatcttacagtcatgcatcatttaagatgacagga

SEQ ID NO: 294584 - DNA, 122 bp, Homo sapiens
cctctaagaagcaggttcacctctgccaccgcactcgcatttttttttttttttaaagcccggcctttcctaggcggggtcaagggccccgcccaccgaagccacgcccagtagccgccccg

SEQ ID NO: 294585 - DNA, 122 bp, Homo sapiens
tccccctctgatacacttcctaatatccaggggaagagaggataattttactcccaatatcgcagaggcagtacaccagccccccacacccgtgatattgttcctaatatccaagaagggag

SEQ ID NO: 294586 - DNA, 122 bp, Homo sapiens
aaaaagcaggccctgctccttgcctgtgtccgagctggagacggtgatcgcgtcagcctgcggggaccccgagaccccgcggacacactacatccgcatccacaccctgctgcacagcatgc

SEQ ID NO: 294587 - DNA, 122 bp, Homo sapiens
gaactttgcagacttgttcctctgatacccagtacagcccagccacagaaacgaaggagtcggggagactacagcaacggggcatctaggcctattgttcagagggaaccgcaggaccaggc

SEQ ID NO: 294588 - DNA, 122 bp, Homo sapiens
gatcgtatctcctgtaaagacagccttgactcaagcatgcgttagagcacgtgtcagggccgaccgtgctggcggcgacttcaccgcagtcggctcccagggagaaagcctggcgagtgagg

SEQ ID NO: 294589 - DNA, 122 bp, Homo sapiens
gcgggtgctgtactggatcccggtggtgttcatcaccctcctgctcggctggtcctactacgcctacgccatccagctgtgcataggtgagtgcgccccccgccgcggcgcccccagcgcag

SEQ ID NO: 294590 - DNA, 122 bp, Homo sapiens
gtgcttttcaagggtcactatcaatttctgaccttgtctccttgttgacgcttgaaacttcgagggtcagtactaagggccacacaccacactgggagtcccacaccatgaagaatgattga

SEQ ID NO: 294591 - DNA, 122 bp, Homo sapiens
cctgccaggagcgacgtcctccttcctgagaagtttctcgtgggtgggagggatgggaaccggactcttgacacctccctggtgccccagccccaccctcgcaaggcggaccacccagaagg

SEQ ID NO: 294592 - DNA, 122 bp, Homo sapiens
gcaggcacataccttaattacataaaattacccatgcacaaagagttgtttacaaacacacgttggacaccaacacacaaactcacatccacatataacatacaaaacctatagaaactaca

SEQ ID NO: 294593 - DNA, 122 bp, Homo sapiens
caggtgcactccgggtgttcatacctgcgtgggcaaaggctagacgcacggacgatcacacgcgtggacccgcgttctcagcgccaagtgagccctgggccgcgaagccttttatgcccggc

SEQ ID NO: 294594 - DNA, 122 bp, Homo sapiens
tctccaaggggagggcggacggccgagcagggggaccaggctagggtcacacgtcgggggcggcccggggccctgcgctgcagcggggcatcttggcacccccgtcctgagcggaggaggag

SEQ ID NO: 294595 - DNA, 122 bp, Homo sapiens
ggaaatgggttattgatacctgggtatagatgaatattcccccagctgcctcctggataccgattaatattcccccagctgcctcctggataccgattaatatttccccagctgcctcctgg

SEQ ID NO: 294596 - DNA, 122 bp, Homo sapiens
gagcccacgccagtgggagaagcggccccgccccgcgcgcgagtccccggaggacggccgcgacctcttaccgtccatggccacaatgacaggagcagcactcggagagggagaagggacgc

SEQ ID NO: 294597 - DNA, 122 bp, Homo sapiens
ctctggcccccgccagtccagtgccgtttcttctacaccgaagtggtgttccaagacccacgctaggagtccttctcctgctccacatttcccagaacccacgctactctaccttactgaca

SEQ ID NO: 294598 - DNA, 122 bp, Homo sapiens
cagtacttgacagggctaaggtcataaaagacaagggaagatggaggagctgcctcagatcggaggagactaaagagacacagcaacttaatgcagtgtgggattctggtttgcgtcctgga

SEQ ID NO: 294599 - DNA, 122 bp, Homo sapiens
agttctgtgataatgacaaaggaattgctgttactgtactgcaaatatgctgtgggttctcggtgttcaaactcttctaaggaaggacacacagtagctctctgcttgctgatagatggttt

SEQ ID NO: 294600 - DNA, 122 bp, Homo sapiens
caccatggaggcgaacaggcacctccgcctcccgagggacacagatgtcgcttagacgcccggggtgtcttccctgcgggaagcctgcagggctgctcccgccttgttcccgagctgtggcc

SEQ ID NO: 294601 - DNA, 122 bp, Homo sapiens
tctccgctcgggtgaggcggcttggcttcgcttttcaggttaggaaagctccctttactgcgcgttggggggctgggggagctggcggagccccgttagggaggtcggtggcgccggggtgt

SEQ ID NO: 294602 - DNA, 122 bp, Homo sapiens
cggttcgcgctagactccatttcccagaaaccccggtgtcttggtggagacagcatttcccgggcgccccctcacggggcggggcagtgcggcgcggctccggttcccggcggccctcgcgg

SEQ ID NO: 294603 - DNA, 122 bp, Homo sapiens
attacagtatgacataatttttctctgccttaagaatgcacagcagctggatgtgagctgcgtggtgctgcccgggccacttggtataaagcagtgtctgatgctcagcccaggtctccact

SEQ ID NO: 294604 - DNA, 122 bp, Homo sapiens
aagatcaataaatgtttattaaatgaggcactttacttcacaaaggatatggcattttaacggttacaagcgttcccagtcaacgcatccacaaagcattaggccacctataaactaggaat

SEQ ID NO: 294605 - DNA, 122 bp, Homo sapiens
ctggcccagctcagggcagacaggtgagtccaagaatctttaaacctttccacccagaatcgctcagtccctagatcagggtaggcaataggctgaatgcatgaggttcaccagtgctggaa

SEQ ID NO: 294606 - DNA, 122 bp, Homo sapiens
tagatctcttgggctcaagtggtcctgttttttgggataatctcacactgtgacccagtccggagtacagtggcatgaacaccactcattgcatgctttgcctcccaggttcaagtcattct

SEQ ID NO: 294607 - DNA, 122 bp, Homo sapiens
ccagtggcggcggcggcggcggcagcggcagcgggcagcagctccagcagcgccagcaggcgggatcgaggccgtcaacatggcgagcgcctcgtaccacatttccaatttgctggaaaaaa

SEQ ID NO: 294608 - DNA, 122 bp, Homo sapiens
ctgcgagggactggggcaaaggcaggtgattgggcgagggagtcctggttgccacggcagcgaccagaggagaaggcttcgaggagaggaggaggctgctgtcagtcctcctcctggaggtc

SEQ ID NO: 294609 - DNA, 122 bp, Homo sapiens
cgctcccctccctccttcccgctcccccgggcaggaaggctcgcgtgcgcgaggccacagcgcaagcgggtgcagagcaggattcgaacagggttccatgcaactccgtgcccagggtccta

SEQ ID NO: 294610 - DNA, 122 bp, Homo sapiens
gcacaagcaggaaccggggctgcacgtggcgcttgcgggccagctggatttctgggtgggcgtgggctaggtggccccacactcggagcgtcgagccggccccgccagcccgggcaatgagg

SEQ ID NO: 294611 - DNA, 122 bp, Homo sapiens
ctgttgctgctgcggggtaagcgggaaagacaccacacattgcgcagtcgggaccatcgccggagcctgaggacacttctctgtcgtcacagttaggtaatccccttcgtccagacgccgcc

SEQ ID NO: 294612 - DNA, 122 bp, Homo sapiens
cccgcagtggatttcaccaacttcaggatcggagcccaggcaggcgaacgtaccttattgcgcatgctcgctagcccctcccgctcggagcggaagggggagcgctgggggcctgggcctgg

SEQ ID NO: 294613 - DNA, 122 bp, Homo sapiens
cactgaaaatatgagcatgcccgcctggctagtaggcatctgtaagagtgtcgccaggcccgcgccagctgaggcctcagactagccaggcaagagccgtctgaccagttggctggcggtgg

SEQ ID NO: 294614 - DNA, 122 bp, Homo sapiens
acactgaaattcatcctgagatgaggtgggttggcgactaaggcgcaccggtgggcactgcggggacagcagggccccgcgcgcagggaagccgcccggatcgcccggaaccgggcatcttc

SEQ ID NO: 294615 - DNA, 122 bp, Homo sapiens
cagtgtctcccatgacttttagggtgaggaccaaagccctcactgcagtctacagaccctcgaggatctgctgcctgcctgcctacccagcagaaggccagagcttgcccaaccttcctcca

SEQ ID NO: 294616 - DNA, 122 bp, Homo sapiens
ggctaatggtggggtgagggtgggggcctggcctgacgctggaagctcctgtacgcagggcgctagtgtcctcccaggccgcaccgggatcccaccgcagaggccccctcccgcaggccggc

SEQ ID NO: 294617 - DNA, 122 bp, Homo sapiens
gtgatcgcgggcctctacctgctgctggtgcccactgccgggctttgcttctgctgctgccgctgccaccggcgctgcgggggacgagtgaagacagagcacaaggcgctggcctgtgagcg

SEQ ID NO: 294618 - DNA, 122 bp, Homo sapiens
agccggctgccaccagggggcgcgcccgcggtgtccgggagcctggcggcgcctgtgcagcggccagtgcacctgctcctgccctcgcctcggtctctgccaggaccccgacgcccagccgg

SEQ ID NO: 294619 - DNA, 122 bp, Homo sapiens
gtagtttgtctttactaggccaccgtctcgtcagcgttacggagtattttgtccgcctgccgccgccgtcccagatattaatcacggagttccagggagaaggaacttgtgaaatgggggag

SEQ ID NO: 294620 - DNA, 122 bp, Homo sapiens
cggcctggcttgtcttgtcagtcactggggcggaggcagcggctgtagcggggctgtagccgggcgttgagcacagcgcgggccaggccgaacggaagggacctgccacagcccctcaactc

SEQ ID NO: 294621 - DNA, 122 bp, Homo sapiens
gccggtggctgcgccgcgtgcgttctcactctgaggaagtgcgtggggagccgctgactccggatagcacacccttccgaggggactccccgattcctgggctgggggcctgccgcctggcc

SEQ ID NO: 294622 - DNA, 122 bp, Homo sapiens
gtcttccctctctgggcttccttctctctggggtcttggcccctaaagtcgtagttactgcggtagcactccaacaccttcaagtatatttttatgctttgtacagctttcctcattatttt

SEQ ID NO: 294623 - DNA, 122 bp, Homo sapiens
attttacatgtcaacttgatgaggtcaaggtaatggcagtagcgggccatctggagtggccgctgtcatcatgctggccgctgcagggagcatgcagggaggaggcggacagcgccccacct

SEQ ID NO: 294624 - DNA, 122 bp, Homo sapiens
ctgccacgtggccacatcctctctagcagacaccacgagcagttccgagttcttcccaagcgctctgaaagggtgcaccagagtggaacctgaattccaagtgcgacaggacagagatggcc

SEQ ID NO: 294625 - DNA, 122 bp, Homo sapiens
cctgcaacctacagggagggagagtgaagtctccttgcatttcctgtgaatttgtcctctcggatttcagagaaacccaagtcaggtgcaggccctgctagtgacaatgccaggagagaaat

SEQ ID NO: 294626 - DNA, 122 bp, Homo sapiens
cggctcctgggacgggacctggaacgcggatgtggccggatgtttagtgggtgccgtgcacggtgtctgacacatcagatgtgatgtatacctcgcacgaaagacgttgtgttcatcaacaa

SEQ ID NO: 294627 - DNA, 122 bp, Homo sapiens
aagaacaatcctgtcctgaattctttgtaattttacaagttacttcttctcttttcttggcgcatggttttagttttctagtgtttatttatggaggatgcattcccttgcgtctctattat

SEQ ID NO: 294628 - DNA, 122 bp, Homo sapiens
cgtagaccgagctacccagtttactggtcgatttcggatccagttttccagttatagccacgttggcacctcttgaacctctgtggccgttagcacggttttctgcccgcgtgcccgagaaa

SEQ ID NO: 294629 - DNA, 122 bp, Homo sapiens
caaagaacatgagatgagggctgcaaagtggcaaagtggctttatgcgcaggctctgggccgagtaccaggagaaggtgcctccggaggaggccgggatgcggctggggctgtctggcacgg

SEQ ID NO: 294630 - DNA, 122 bp, Homo sapiens
taaatccacgcccagcccccaccctgattaatggttttctctttctgtcgactctttagtcgggagccgtagctttaaaatcacacagcctcggtgtattctgttacctagcaacagccata

SEQ ID NO: 294631 - DNA, 122 bp, Homo sapiens
accgccgggctgggaagggcgggaccacgcgtgctgcactggccctcagtacctagcccgcggtaggaggtccgccccaaccctggctagggtcaggtgctgcctgagcacagccccgaggt

SEQ ID NO: 294632 - DNA, 122 bp, Homo sapiens
cgaagatgacgtaggacaaaccttagctggggtctggggtgcagatggcatcctatactccgccgtataaacaagtgccccctccgggttctgtcacttatatactttgtccagtctcccta

SEQ ID NO: 294633 - DNA, 122 bp, Homo sapiens
agtatacatggagacaagtagatgattatgggagatattttagagagggggctaagaagacgtgctgttgaattggtatactccctgtggaattgattgaaaatggtttctttttccttgac

SEQ ID NO: 294634 - DNA, 122 bp, Homo sapiens
cacacctcgcggaggcctccccagaggggctggagtggaggcagagccacaaccgggaagcgcacttcagggaaccgcacttagggtccgatgggaaggagaatggagaccatcaggtcgga

SEQ ID NO: 294635 - DNA, 122 bp, Homo sapiens
ttgttttctaggtttgccattttcccattcaactttgcgcagtctcatccacgctgatgacgccacaaatccgtgtctctaacctggatccagctcaaaacccccagacccctatcattcag

SEQ ID NO: 294636 - DNA, 122 bp, Homo sapiens
cagtgtcatctgaatggggtgtgggttcagagactggcccgtcgaatcagtatgggctgccggctctcttattacatcctgagcatgtgtgtcttgggcccttacagatatacttgctgttg

SEQ ID NO: 294637 - DNA, 122 bp, Homo sapiens
ttgatcttatgttccacttagtggaagaaataagatttacagtccattatcaaacaatttcgtaacagtccagtcacatgcacacaaagtccagaagaatgtacaggagatttgtagtttgg

SEQ ID NO: 294638 - DNA, 122 bp, Homo sapiens
ggggtagaggggaggcgaaaggctcctgggacccgcgatcccccctcagccccctcagcccggcccctgcagccccgcccagcccccagcccgcgcccctagccccggccctgccgcgctca

SEQ ID NO: 294639 - DNA, 122 bp, Homo sapiens
gttcctaatccaaggaggtatgattgcaaataaggagacaccagcagacgaggagtttgacgattcgtcacgctttctattggctaccagggaataactcccaaagggcactggcaacctcc

SEQ ID NO: 294640 - DNA, 122 bp, Homo sapiens
tcacagtgttgtgcaaccatcactcctatttccaaaattgtttatcattccagacagaaacgctaaccattaagcagtaactccttacttcctattcccttctctgccaaatccctagtaac

SEQ ID NO: 294641 - DNA, 122 bp, Homo sapiens
ggttgcagtgagccgagatcgcaccattaaactccagcctgggcgacaagagggaaattccgtctcaggggaaaaaaagagaaagaaagaaaaagaggaagaaagagaaagaaaaatatgca

SEQ ID NO: 294642 - DNA, 122 bp, Homo sapiens
gtcctccgggctcagatctgacccacctccgggccccgagggtcagtccctcaccccccgcgcctcgcccgcactcttgactagctcaagggagctccacggcgcatgcgctcagggaggct

SEQ ID NO: 294643 - DNA, 122 bp, Homo sapiens
agtgccaagaggcagcctggctggcacaagggacgggcacatcggcctcagcaggggccgcgccaggacgcatggctgtgacacacttgggcacccctccgtgtgaggtcctgatggaggtg

SEQ ID NO: 294644 - DNA, 122 bp, Homo sapiens
acacactccatccgcgccgagttgcttccgggaaaacaagcccagaaggcggcggacactcgcataaagtcacgcagtagtactcggagcccggggtagaacctggacttcaaatctctgca

SEQ ID NO: 294645 - DNA, 122 bp, Homo sapiens
tctctctcatatctggcagtgggtgctggctgttggccaaggcaccttggtccatctctacgtggccttttgtcctccagcaggctagactgggcttctgcacagcaggtattctcacggtt

SEQ ID NO: 294646 - DNA, 122 bp, Homo sapiens
ccgccgagcggagctagcgccgcgcgcagagcacacgctcgcgctccagctcccctcctgcgcggttcatgactgtgtcccctgaccgcagcctctgcgagcccccgccgcaggaccacggc

SEQ ID NO: 294647 - DNA, 122 bp, Homo sapiens
gagggcctctctccaggacgaggttttggagattatgccggtgcagaagcagatccgcaccggccagcgcaccaggttcgaggcgtctgttcccaccggggactacaatggccacgtcggtc

SEQ ID NO: 294648 - DNA, 122 bp, Homo sapiens
actgtttttgtaaatctgtgctactctcgggtgtttcttcttggttatgcatgctctttccgtcttcctacataagcatgtaagatttgaccacttcagattgtatagccttgttagccaca

SEQ ID NO: 294649 - DNA, 122 bp, Homo sapiens
acaaacagaacacagcagaaacaggggagaattcccttcggctgcaggagcccgccttcgcggcttgctcagctatgcgggagctgtgccaaggaaaggtccgtgcagcagagaactgagcg

SEQ ID NO: 294650 - DNA, 122 bp, Homo sapiens
cccgcggggggttgtgggtatctcgaaggcgggtaaagctgcaagggaaggaagtaagggcgagcccgtcggactacgaagcgggacggaaactacaattcccagcaggccttgggcctcag

SEQ ID NO: 294651 - DNA, 122 bp, Homo sapiens
ggctgccctggcagtgtgaagacggcgctgcgctgacggggcagctgctcccgaaactctcgtaactagcgtccagtagcaagtgtctgtgggaaggcactggaggcgagggctccggtctg

SEQ ID NO: 294652 - DNA, 122 bp, Homo sapiens
cccctcagcgccccttcccgggcctcgagccagcggctgccgcaggagctggccccggggcgaggagcttcagattcaggtccctagccggcctcggtaaggagactggaaggattctccgc

SEQ ID NO: 294653 - DNA, 122 bp, Homo sapiens
ctcttcccctaccccatcccatccctgggcttctctctctcactctctgccagccccaggcgggctcctcgtggccccaggctctcttctgccagcagcaactcctgcactggcttcctgcc

SEQ ID NO: 294654 - DNA, 122 bp, Homo sapiens
aggtatccttcctaaatgccaggtccttttgtcaagacaaaggtgggtgaccacatatcgcgccactggtttaacttgattttcccatctgactctctcgggcaacgtgtatcctgaagctg

SEQ ID NO: 294655 - DNA, 122 bp, Homo sapiens
ctcagcagccacagcacagtgagaaaaacaacagccgcccgcagctgtctgtctctaacacgtatcagactttgaaaaacatatccggaggcaaaacaacctgcctcagagaagcccggcaa

SEQ ID NO: 294656 - DNA, 122 bp, Homo sapiens
cagtaaatgcccctctattaagggctgtttcctgtaaggcggagataaaaccaataagcgcggtttacttcttaggcgcgagcatcaatctcagccgcccatccttcctttagagctaattt

SEQ ID NO: 294657 - DNA, 122 bp, Homo sapiens
gggaggctctgagtaccaatgagtgcaaagcgcggagagccgcgtcggcggccacggcagcgcccacggccactcccgccgcgcaggagtcgggcaccatcccaaagaagcggtgagtagcg

SEQ ID NO: 294658 - DNA, 122 bp, Homo sapiens
aatcctatcaccgcttaatgggaaccgctgtcacatccatattggcgaactctcccgcttcgtgttcgcgagccaggtaacgggctcccgaggctgcgctgttccgtatggggcgattttgc

SEQ ID NO: 294659 - DNA, 122 bp, Homo sapiens
acggggcgatgaccgttggtgcgcttggtgacaggcgatgaccgttggtgcgcttggtgacggggcggtgaccgttggtgcgcttggtgacggaacggtgatcatttgtgtgcttggtgacg

SEQ ID NO: 294660 - DNA, 122 bp, Homo sapiens
ggcaggcagagcccagcgggtgaggacaggcaggcagaggtgagataggccggtgctagccggcctggagctcctctccgctggcagggccaagagtatggccgtagtctcctcacattctc

SEQ ID NO: 294661 - DNA, 122 bp, Homo sapiens
ccgagccaggtgcgggatatgatctcgtggtgcaccgtttttttaagcccgtcggaaacgcgcagtattcgggtgggagtgacccgattttccaggtgccgtccgtcacccgtttctttgac

SEQ ID NO: 294662 - DNA, 122 bp, Homo sapiens
tcgcttcagtagcggacccaggtggtgcaaagtgcgtgctagaagcacactgggtgattgcgcagccacctgtcccagggagtggaggtgaaaagatgagagaaaccaggactttgggaaat

SEQ ID NO: 294663 - DNA, 122 bp, Homo sapiens
ggccaaggtacagggagattgaccaccttggagacatcatgctgtagtggccacaagatgcgctctgacatacacagacctgagtctaaatacaggctccatcaattccaaattgtctgacc

SEQ ID NO: 294664 - DNA, 122 bp, Homo sapiens
ttagggtcaagatcgcgcccctcgggccttccaccgcgaaggcacacagcagccgcaggtcgaactgtggaggccagagtctcttgcactgccttcggccttcaaagcttcgacgcaggaca

SEQ ID NO: 294665 - DNA, 122 bp, Homo sapiens
gctttccattttgtgaagctcttcattgttaactcaacctgagagggaatttcctaaaaacgcttcccgctgacatcacagaactcttccatcttttagtttcattaaaacactaagaacca

SEQ ID NO: 294666 - DNA, 122 bp, Homo sapiens
agaccctcctcagtgaactaggaatgatagcagtgtctccctagtcttagggccgttgagcggattacacgagataaggtcagcaggtgtttagcacagtgaagcatttgctacgtgatgac

SEQ ID NO: 294667 - DNA, 122 bp, Homo sapiens
tgtcctatgaaacggcctgcggtgttgacttaagcacactcagccatcaggctgacctcgcgtgaaatggggaaagtgcagagacacttatgttgtgccgctccgtgttgacttgcagttat

SEQ ID NO: 294668 - DNA, 122 bp, Homo sapiens
gccctagcatgaccaaataaaatgacttgcagttttgcttccgagtcatatcattctgtgcggtgctccctccagctgtcttcctctgccagactaactgcaatggatccttgcagcgtctg

SEQ ID NO: 294669 - DNA, 122 bp, Homo sapiens
aaccaactacttgagcagaaattgggtccggtcacctccacaagaaggaaacaaaagtcccggaatgcctgccctgcacacgagccatgacgtgctccagccgtgcgatctggagggggaca

SEQ ID NO: 294670 - DNA, 122 bp, Homo sapiens
tagcttagacacggggcgtccggctaaggccggggacccagggtggtgggcggggtgtcccgcccgcctgtggaccccgcgcagtaactgcgaacatttcgctttcattttgggccgagctg

SEQ ID NO: 294671 - DNA, 122 bp, Homo sapiens
cactcccctcgcacgccacacccccgtcgcacgccacacccccctcgcacgccacacccccgtcgcacgccacacccccctcgcacgccctgagagggggaaaaggaactttacccgtttca

SEQ ID NO: 294672 - DNA, 122 bp, Homo sapiens
cttctgtgagggggacgcagccgggcctcccagacgcccgcgttccttacgtgagggggacgcagccgggccttccgggccttcccaagtcccgcgttccttctgtgaggcggacgcagccg

SEQ ID NO: 294673 - DNA, 122 bp, Homo sapiens
tcatgccagtctcacaaagtgaaagcattattctggcatcggcaggtgaaaactgaggctcggataggtgaagcagtgtgtccagcgtaacacagccaggaggtggcagtggtgaatctggc

SEQ ID NO: 294674 - DNA, 122 bp, Homo sapiens
gtggccggggcctggtttccatccaccctgaagggaccttttaaagacacttgacagccccgccgctttcctaagcagccaacaccagcgtgatcgagccttttcccggggactcagggcct

SEQ ID NO: 294675 - DNA, 122 bp, Homo sapiens
ttgttctgattaatgtgaacaaacaaaataatttgatttgattttgctggtggtggtccccgtcatgatgccatgattcatgaccatcaacaaatgacttaagtgacttatcgttctctgcc

SEQ ID NO: 294676 - DNA, 122 bp, Homo sapiens
atccgctcactcgtgtgtaggtacaggaacttgttgatctgggaggaggcgagccggtctcggacctccagctcctgcacgatgaacacctgacgggacagcggtcgctcctccagctcctg

SEQ ID NO: 294677 - DNA, 122 bp, Homo sapiens
ccagcccagcggcgagcgccctgcttccagctgcgagagacatgcagctggacctggccgcgccgcgtctttactgcgctgcaccccacgagccacgaaggcagagtctccattcacacaga

SEQ ID NO: 294678 - DNA, 122 bp, Homo sapiens
ttttccatcaacagcccctctcctgattgtgtgaacaatagtttaagacacccaaaaacgcgcactttaatttctcattccttctagaattaccccgccccaaccttgtctacacacacaca

SEQ ID NO: 294679 - DNA, 122 bp, Homo sapiens
gactccaccactcaggattcacgccgcgcttgtaaccccgaccgcgcttgtaaccccgaccgctgtcccgaacttggggtttgtttgactgtggttttcattaactctttcttagggtcaga

SEQ ID NO: 294680 - DNA, 122 bp, Homo sapiens
ctgtactttatcaaggcagcagtggcagggcttggaggacccaggcgagccagaaggtggcggcgaagtcaccttgggaagaggagaatagggtcaaagacaggacggcggaggggctgacc

SEQ ID NO: 294681 - DNA, 122 bp, Homo sapiens
ggcggcgctcagcgcacgcctggtcttggcaggagcagaagagcatgcggtaggtgtactcgctgggcacccggtcgaagaactggcgcagggccttgtggcacttgcggcggttgcagcgc

SEQ ID NO: 294682 - DNA, 122 bp, Homo sapiens
caaaattgcctcccaagagctaagattaggcttaaatcaatgcaagcaaagccattaaaccgtgttggggatattggcaccagggcagtctgcattcctcactctacagcactaaagaggtg

SEQ ID NO: 294683 - DNA, 122 bp, Homo sapiens
gcttactcactaaattttatttgtaaccccaaaatcaatcttaacatttttgtggtcattcgtgaacatgcacagagcagcaaaaagtaagagtcatggatgcacacattcccagctgactt

SEQ ID NO: 294684 - DNA, 122 bp, Homo sapiens
gggacgggggagggcggacgagaccactccaagccagggggcttctccgagacaaagttgcgccaccgaccccagaccctcgcgcggcgggcctcaccgtcagcgccagctggtggatgcgc

SEQ ID NO: 294685 - DNA, 122 bp, Homo sapiens
gtttcttcttattcttcttcgtggactcctctgcggtggcactattgttgtcattgtcctcgtcttcactgtgatcactctcagcataatttttggctcctccttccaaggtacagctccgg

SEQ ID NO: 294686 - DNA, 122 bp, Homo sapiens
gcacccaccacccacccctcgccaccaagctgggtgcagagaacagggcaggcgcacggacggttcttacggccccaggcgccagacccagggcacagaggccaggatctcacgcgcgaccg

SEQ ID NO: 294687 - DNA, 122 bp, Homo sapiens
ggagctggggcaagtgagtacagtgccagaatagggcggggcgcgaaataagatcccgaccggcgggcgcggggcggggcgatgcaggcagggtaaggggctggcagagtgagacccgcccc

SEQ ID NO: 294688 - DNA, 122 bp, Homo sapiens
tcccagggggaacagagctggaccgggacagcaggcagggtgccggccactctgcttcctcgaaaggccatcgctcgtgcagcctcccagctgtgctctgcgcaaggggctgtgtcacgggg

SEQ ID NO: 294689 - DNA, 122 bp, Homo sapiens
aggcccgaaccctcaaacaccgggaagcggaggtgggggccggctgggggaccggtccaccggctcccacctcggcgtacagggattccaggtcccggcgagcgctggcctagcggtttcca

SEQ ID NO: 294690 - DNA, 122 bp, Homo sapiens
ctgggcttgaatcctggctgtgctacttatcaactgccactttgaacagagacctctttacgtcttttctcatctacaaaatagagataactattgtacctacttcagagtcattgtgaaga

SEQ ID NO: 294691 - DNA, 122 bp, Homo sapiens
gcgggcagcgcttccccggcccaagtttttggtttcagctgcggaatctcccgtccccagcgtggcctgtcctttgttctagcaaacgccaaacacacgaggacccggcaaccgggggagga

SEQ ID NO: 294692 - DNA, 122 bp, Homo sapiens
agcttctcggcagcacctgcccaactctgtagaaggcgctcagtgtatacttttattaaacgattgaaaagactcgttaaatctctttcctacaaaccttttaagaaacatttttcacctca

SEQ ID NO: 294693 - DNA, 122 bp, Homo sapiens
acagacatggaatgagaaggctgtcagtgcaggacagggtgaggacacactcagcgggcacggctttctcccctaacagccactccacccaggggccagaaactgacttcacctctgcactg

SEQ ID NO: 294694 - DNA, 122 bp, Homo sapiens
gcagggctccggcgtgcaggtgtcacggtgtcgctgcttctcactaacgcagggctccggcgtgcaggtgtcacggtgtcgctgcttctcacttgtgtaagaagtgccaccgcagaagtacc

SEQ ID NO: 294695 - DNA, 122 bp, Homo sapiens
gtgcccttaatcagggcagaaatgtggtggctttgggatttacctatttcgtacaagttgcgttcttttcagtggcgtatttcccaggtcccttgcaagagctgttggacccactcccctct

SEQ ID NO: 294696 - DNA, 122 bp, Homo sapiens
aggagtgccatctaggaccaggggaataagcagccctccctggccagaaaaaagcccaagcgaaacaactgaaaacccagaaccagctcagatgcttcttcgtttctgtgcgtaacctacct

SEQ ID NO: 294697 - DNA, 122 bp, Homo sapiens
ccagggaacacacctctgtggcctcagggctatgtcctgaattctaaaacggggctctcacggctgacccgatgtcactgggtccccgtttgctgcttgagtctcttcggagcccagtgttg

SEQ ID NO: 294698 - DNA, 122 bp, Homo sapiens
gtttgtaaacttgctgatggtggtggtaagccatggcagatgataaagttgctatcttaacggatgatgaagaggaacagaagagaaagtatgtgcttgcagatccctttaatggtatttcc

SEQ ID NO: 294699 - DNA, 122 bp, Homo sapiens
gaaaagtattccatcttcagaatgcagtggctgctcaaattcagaaacatttatggaaatcgatacagctcaacagtccctagttactttgcttaattcaacaggcaggcagaatgccaatg

SEQ ID NO: 294700 - DNA, 122 bp, Homo sapiens
tggcggggccgtgggacccggccgccctttctcctccgtggctccccagccaggaggctgcgcttacctgctccgcacgacctctgcggcttgggggctctcagctctgtcgctgcggggct

SEQ ID NO: 294701 - DNA, 122 bp, Homo sapiens
agttttgttcttcgggtctcacgcgtggcggcatgtccagggctcacgtgacctgccccacgctgccgccacagcagatggccaggcctcacctcgtcctccagctccagcaccttctcccg

SEQ ID NO: 294702 - DNA, 122 bp, Homo sapiens
ccgcggagcccccggcggccttcgccctgcagttctcccgacctccgccagagcccactgcgctctgcctgcctcagcactggggctggggacagcagcgctggcccaaccgcgccgcaacc

SEQ ID NO: 294703 - DNA, 122 bp, Homo sapiens
ggaaataaatgacaaccattaaggggctaactggagctgttaatcgtttgagaggcctttcggtaagtcatccttccaaggcggctagatcattctggagtagcctcaaaggtgcctgctgc

SEQ ID NO: 294704 - DNA, 122 bp, Homo sapiens
cagcggggatgcagagaggtgaggccggaagaagccaagaggggcgtccccaaggcccctcggcccccagaccctgcctcccaccagcaggtcccagggcccctgccggagcaggagtcatc

SEQ ID NO: 294705 - DNA, 122 bp, Homo sapiens
gcctgggcaacagagccagactccatctcaaaaaaaaaataaaagaatatgagttgattgcgggtgttcgcatttggagaataatagttgtacaccaccttgtcgactcctttcttcattta

SEQ ID NO: 294706 - DNA, 122 bp, Homo sapiens
ctgtcagatataagccatttgttgggagatattacaaaatatataaatagtgccagcctacgagcaccaggaaaagcattatagcactggcttcttaagtggagaatattacaatctcacgt

SEQ ID NO: 294707 - DNA, 122 bp, Homo sapiens
ttgggacacagcgacgatgcagtttagcaaaagaaacatgacagcagcggttaacacctccgaacttgctggctacgccaggaagccaggccaagaatgccgcgaaattcccttcttcaaat

SEQ ID NO: 294708 - DNA, 122 bp, Homo sapiens
tcttgggggctggctgtgggggagggagctcaacagaccagcattttccccaggcttgggcgcaaccttgtgaaactactaatgtattaaagaacctcagctgggatttgctgaggacaaat

SEQ ID NO: 294709 - DNA, 122 bp, Homo sapiens
tacactttaattaaaaaatctaaaagtggaaagcaagtctaatcctggaagagcagttcccgtcgggtttaattggcccgtttggataacacgtgcttacgatgagcactgtttctccagcg

SEQ ID NO: 294710 - DNA, 122 bp, Homo sapiens
tcctgctcttcgcactccaggtctcagacaggagtcactcgcctcttcgtgccacgcccacgtctaagccgggtggaacaggccctgtgaggatggtcctggtgtccctcgtgctcgtgggc

SEQ ID NO: 294711 - DNA, 122 bp, Homo sapiens
tgtggggcacctattgattgcgcatgctggtccctcataaattaaaacagggatgccttccggttgctctgtagctgcgtagatggtgaaattggctcactaatacttcatgttcatggagc

SEQ ID NO: 294712 - DNA, 122 bp, Homo sapiens
tgctagagaaaatataaaaactcttcctcttccctagacttacaaaaggctagagttggccggggcggtggctcaagcctgtaatctcagcactttgggaggccgaggtacgcggatcacga

SEQ ID NO: 294713 - DNA, 122 bp, Homo sapiens
tgaaagtttttaataatagctgagtagcattgtataaagggaggtcttaaagagctgtgtcgttctataactgtggttactaggtgatgcacttcttacaaaaagggcttctgattctagga

SEQ ID NO: 294714 - DNA, 122 bp, Homo sapiens
gggcaggacatcatctctcagagggtcagaggctcagagctggtgcagctcagcaggtcacggccctccaccagctctgggttctcccgcatctgcagagacacaggaggctgccagaccca

SEQ ID NO: 294715 - DNA, 122 bp, Homo sapiens
ggtgagcgcggggaggccgccctcagggtaacgtggggagccggccggccggacagtgcgcgtgcacacactatctgcggcggtgtgctgacaagccaattgaggggactccatcttacaaa

SEQ ID NO: 294716 - DNA, 122 bp, Homo sapiens
agtgatgctggctaattcccttgctagggcaaagctgggatacacagcttttcttgttttcgtttttgtggtctccaattatttccactgctattatggaggtcccactgaggtatctgctg

SEQ ID NO: 294717 - DNA, 122 bp, Homo sapiens
cgtgatctgcccaccttggcctcccaaagtgatgggattacaagcatgagccactgcgcccggctcagaacagatttctgaagaggttgtatgcaaactgattattgtagactcaaaggctt

SEQ ID NO: 294718 - DNA, 122 bp, Homo sapiens
ctgcgggcgcagtgccctctgtgggcggcgcgtggtggctgtcctccgtttcccacccggcgtctactgggccttgtccagtatcactgggagctgcaggctcggctagcaggtggctcccg

SEQ ID NO: 294719 - DNA, 122 bp, Homo sapiens
tgtttctaccccttgctgcccaatataaatttttgtgttgcccaatataattttttgtgacgatggaaatgttctgtatttgtgttgtctgatgagataaccactaactgtagtgctattga

SEQ ID NO: 294720 - DNA, 122 bp, Homo sapiens
agctaggaaggtgacctttggtgacatacctcttccattcagcacatgtcacccagcacccggggctcttctctgaagttatgcatgtgaggcaaactttcctagcagggtgtgagggcttt

SEQ ID NO: 294721 - DNA, 122 bp, Homo sapiens
agtggagcagagtgagcacaaggaggagcattcggagatgaagtcagaggctgggccgtgcgccctgttgtaggtcagtgaaaggactttaggttttactctagggttaaaagtccctaaag

SEQ ID NO: 294722 - DNA, 122 bp, Homo sapiens
gcagaggacacaaggcaatgaagccctaaccccgcgctctggctgaagtgagacaaaggccgcgccagattccggaagccgccccttcctccctggctgcgcgcctgattggacagttccca

SEQ ID NO: 294723 - DNA, 122 bp, Homo sapiens
aacagaacatagtaaatccttaaacattaaaaattactcctcttgtaggttgtattggttcgtgctgttacaacaaattctttaagctgttccttgactgtaaatactgtacttctatatgt

SEQ ID NO: 294724 - DNA, 122 bp, Homo sapiens
aatttaaaagcttatttggttatcttcaatggattttgaatgtattcaatactagatttgcgagtgactatgcctttttagtaaacaaaagaaaggctataatgtagaaagtatatggaata

SEQ ID NO: 294725 - DNA, 122 bp, Homo sapiens
tgagaagctattggatatttctacggtatttgggaattttgttaagaatgttatccttgacgttgtgttttatgtttatcattcagaaaaatggagtgctggcatacattgggaattttcgc

SEQ ID NO: 294726 - DNA, 122 bp, Homo sapiens
acattatccactcccttccatgtgaccttggcctaatgtgcagtttcctatttatccaaacgactggagcaagaggagaaaaacatagctacagccaagggcagggaaagtaattctttcat

SEQ ID NO: 294727 - DNA, 122 bp, Homo sapiens
atgggacttggttgactacatttaaggtaaggtggacccagcaactcccagaaacaactccggggacaccactccccatcacactccacaccgagcctggtgcccggtctgtgcccgagctc

SEQ ID NO: 294728 - DNA, 122 bp, Homo sapiens
cttgccctgcccccgtataaaataacttaaaagcagcgtgcctggttacagctgtttccacgtgcggtgctcgtcgggagtgatcacctaccctacaggtgagttttcacgttcgtgcaaga

SEQ ID NO: 294729 - DNA, 122 bp, Homo sapiens
ttccagagctgcctgctgcagtcacacttaggtcatcttctctcacttttctccttttgccgattagtggacgtgacagagatgtgaatggggcagggatgtcctttgatggcatcaagact

SEQ ID NO: 294730 - DNA, 122 bp, Homo sapiens
attcccagcatgcgtcagaattagggccgtagagttttttaaaatatggactacaactcccggcatgccacaccaggattcgaggaccacacgcctcagccagccccggcaagggcctatca

SEQ ID NO: 294731 - DNA, 122 bp, Homo sapiens
attgcatcatcttcccaaactgtaaccttttcaatttcagtatctggaaataccctgggccgcagtcctgacaccactctcatttgttgcatcaccatagcaacttttaggggctgcatcct

SEQ ID NO: 294732 - DNA, 122 bp, Homo sapiens
cccattgggcagttccctgggagtgcagtggggaattcttacactttccctctaggtccccgaaggatctcgttttctcagtgtctctttcaggttggcaggagccttgagcctgacacttc

SEQ ID NO: 294733 - DNA, 122 bp, Homo sapiens
cagcttgcaggttactctgggtgaggacactgacatctacttttttttttttttttgagacgggatccctctgtcacccagactactactgctaagcctcacgagagtgagaactttgcttt

SEQ ID NO: 294734 - DNA, 122 bp, Homo sapiens
ggagtggaagagctggtaggagcccagggatccactcttaaaatactaattttgcgaccacgggaacaacgatttggagagggtcagcggcttgctcaaggtcacccagctggttagagcct

SEQ ID NO: 294735 - DNA, 122 bp, Homo sapiens
ctcaggcttgctctgctctttacctggggttgctgtcgaggaccctgtgcaagactcggccggtttttctttctccctgatggacagacccaaacatagccgcgcagcatcgtgaagggctg

SEQ ID NO: 294736 - DNA, 122 bp, Homo sapiens
gcgcccacgcacgctccgaggcacaagaagctccccctcgggatggcgcccacgcacgctcggaggcacaggaagctccccctcgggatggcgcccacgcacactccaaggcagcttcatcc

SEQ ID NO: 294737 - DNA, 122 bp, Homo sapiens
ctagattcctgctgcagcttccagcaggccttgcagaaagccagtgcccagctgaaggagcgaggccgcagcgtctcccgccagtgaaagtagctcaggtagcgggcgtggtccttgtccag

SEQ ID NO: 294738 - DNA, 122 bp, Homo sapiens
tggagcaacccctcgaagccagggtgtggctcagagatggggggtccggctggccctttacgctcctggcctcatccctgctcatgtgtcccaggatgatggcgtctgcggcagcagcggag

SEQ ID NO: 294739 - DNA, 122 bp, Homo sapiens
ccagctttgtgggtcactggaaaaaacaagacatggactctattgacctcaactgggaaccggccaatgagcaaatttgccattaggcagagggagctagttgaactgctccattttccttt

SEQ ID NO: 294740 - DNA, 122 bp, Homo sapiens
ctagtcaagacttgctttaagttttaaggtggtaggaaggagatattttagtaaagtatccgatgtatctttttggtgctatgctaattattaccaagagcctcagtggttttgactgcagc

SEQ ID NO: 294741 - DNA, 122 bp, Homo sapiens
tggggcgagggaagaaggctcctggcctgcaggggcctctcttccggctgtttttcctcccgaagacaaacactcccaacgcaggggcgcagagcctcggcttctttcctggccagctccct

SEQ ID NO: 294742 - DNA, 122 bp, Homo sapiens
ctcagggccgccgcgccatcgccggcccgcgcccccctccgccgccacagccgccacccgcgctcggccgccgccgccgccaccacagccgcatcccctgcgccgctcctcctcaggcggct

SEQ ID NO: 294743 - DNA, 122 bp, Homo sapiens
tggagcaaagaaatcctctttttctgcggtgggtgcggtgtggggtccaggtctgtggtgcggtgtgcggttgtgggtgctaggcgttgaggcagacgctggcaaaacgcctgtttatcacc

SEQ ID NO: 294744 - DNA, 122 bp, Homo sapiens
cccgcgggccccagacagtgaggggcttagcacccgggctagcagctaaggagggtgtgccgggaaccccagcagtgccggcccaccggcactgtgggctcctgcgcagcctgagcctcccc

SEQ ID NO: 294745 - DNA, 122 bp, Homo sapiens
ttagaaccaggtgggcttccaacatctcatctacagaagggtccgtcggtctagttgtcacgaggatgtgaactccatggaggcagagactttgtttggttttctggtctgttctcagcccc

SEQ ID NO: 294746 - DNA, 122 bp, Homo sapiens
aataataataataataataataataataataatgtaggggacttgatgaagggaaaggatcggagagattctgaaaagaaggtagtttggggcccagtgatgactagattttaagtttcata

SEQ ID NO: 294747 - DNA, 122 bp, Homo sapiens
tgtctcgctatccaacagcttccacattcagtgagttcccgagacctgaatatctggctgcgaagagccctcctcttcatagtcccacagcttctgtccagctcaggcccttgaccccctca

SEQ ID NO: 294748 - DNA, 122 bp, Homo sapiens
gtgcccagcccctgcccagccctggcggccaccatctgctttctgtgtgtgtggatttggcggccccagccgctggtgtagtggaaccacgtggcgtttgcccttccgtggatggcttgtct

SEQ ID NO: 294749 - DNA, 122 bp, Homo sapiens
caccagacgtgggagcttaggatgagagcggcctccgagcagatgatcaccctggaacgacgccaaacgcgacccctaccagaggactcgcgcatgcgcagcgcagcctgggccggcggcct

SEQ ID NO: 294750 - DNA, 122 bp, Homo sapiens
gcgctgagcagccaataggggtgctaggggcggggcgtgcggaccgcgggccaatgggggcgcggggcccgggtgcgccgcggcgctgggggcggcaggttgcggcggcgccggagcgggtc

SEQ ID NO: 294751 - DNA, 122 bp, Homo sapiens
tctgctggtactcagccaccacgcccaccagagccaccgcacttccggttgctgtccaggcggcttctgctggtactcgcccaccacgcccaccagagccaccgcacttccggttgctgtcc

SEQ ID NO: 294752 - DNA, 122 bp, Homo sapiens
gcacacagtaatttagtggtgatttagctccatgacagaaaaccgcaggaatttaaagtccgaggattaacaaagccgacctcgaaatgtgaacgcagctggactagacctcagaacccccg

SEQ ID NO: 294753 - DNA, 122 bp, Homo sapiens
aacaatggacttcctcctagaatagagaggataaaaagtagcaacacttccgcttgcacccggacggaacttcctgtcacggaaaagaacatcctgtcacggagaagaacatcctgcagaat

SEQ ID NO: 294754 - DNA, 122 bp, Homo sapiens
gggccggtgaaggaccgcgaggccttccagaggctcaacttcctgtaccaggtgagtctgcgacaagggccccacggggacggtgctcggcgtcccagagtgactgctcccctcccgcaggc

SEQ ID NO: 294755 - DNA, 122 bp, Homo sapiens
cctcatggtagatgaagatgttacgggtgctgttgtccttcaggtaggtgacctgcaggccgtgggggtggccgatcttggccggctggaaggtggcgttcaggtgctcgatcttcatcacg

SEQ ID NO: 294756 - DNA, 122 bp, Homo sapiens
gtgaatccaatggacgtctttcaggtcctatgttacttgacaattcttctgaattggacacgttttacttctggctctttgaaacattcccttcccttggcttcaattacacaactctctcc

SEQ ID NO: 294757 - DNA, 122 bp, Homo sapiens
tcaatcttctcagaagtttccaaggactccagatatgcagggaactggacaccaagctcacgtgaggaaggaatcaaagtgaatgaaacattgatcttgaagttagtaaaatgcagtaagtg

SEQ ID NO: 294758 - DNA, 122 bp, Homo sapiens
taacccagtcacacgcaagcattcatgcctgcgtgaagtgtgtctggcttcaccctgccccgccaagtggcctcagagagaggggacccacagctggaggctgggaccccacgcggacttcc

SEQ ID NO: 294759 - DNA, 122 bp, Homo sapiens
tcacaatggcccagcatgtgtatgttcagggcaagtaaaagggtcccctccactgggattcgatgactaaagattatgaagataccaaaaatgcaagaagtcacaggaatatttttcctcaa

SEQ ID NO: 294760 - DNA, 122 bp, Homo sapiens
cctaacgacaagcagcccctggaaacccactctctcccagggagccgtgaagctcttcatcgcaacactttctacaaggggagaactgaaccgaaggcttcacggccacagcagctccatac

SEQ ID NO: 294761 - DNA, 122 bp, Homo sapiens
catctggaatgggattctctggggttgggtcccaaggaagaactgcagctttgggccacccgaaaaacacaatgctatctttctttcaggtccatgaggaggcaagttcaggccagcggatt

SEQ ID NO: 294762 - DNA, 122 bp, Homo sapiens
tcattcccacttggaccaggccagcagcctccctggtctctctgaccctccccctgagttcgttcaccaaaggcagtaacggagacaccccctcaacacacacaggaagcagatggccttga

SEQ ID NO: 294763 - DNA, 122 bp, Homo sapiens
gctgctggcggctgtggctttggggggactgagtcacctccatcggggaggggtgccctccgctctgcctgctgcagccacacccagcacaccccactcttggccctgccgccagctgcccg

SEQ ID NO: 294764 - DNA, 122 bp, Homo sapiens
tgacgcctgagctgagtcacgcaaagaagttgggggaaagagggaaataggattccaagacgagggaacacttgacggctctgaagtggggagcagcttggcctgtacaatggaacctgagg

SEQ ID NO: 294765 - DNA, 122 bp, Homo sapiens
taattcagctgcgcgcttcctctgtgcgaggcattgccggagagcggggagcgaattgaacgtggaacctgccagtaggggcttgccgcccaatacgaaattcaaaatatgtattgtatgta

SEQ ID NO: 294766 - DNA, 122 bp, Homo sapiens
ggtctgcggccaggctcccggcggaaagattccggggagggctcgggggttgtcccagcccgcgctaagcgccgcagcctcgcccggctttcctgcttcctcggactgtgcaggggaagcct

SEQ ID NO: 294767 - DNA, 122 bp, Homo sapiens
gtttggttttggctttcactggagtctgcaacaagaactggcatcatgctgcccatttcccgcctctccccacccagacccctgcctcagggacgcctgtcctcagcccagccctcagctgc

SEQ ID NO: 294768 - DNA, 122 bp, Homo sapiens
tacccaaaacccctgcagttactgacctgttttccatgaatattgttttctttttgagaacgtcgaataaatggaatcatacagtatacaaccgtttcaaaaatgatttctcccattcagca

SEQ ID NO: 294769 - DNA, 122 bp, Homo sapiens
tttctgtgtaatgttgcacaaataattttccttcccactcctccacttctctattttaggcgtgaacaaacatcagtcatcttcctcacttgcagacattaaagagagttaatatgagcatg

SEQ ID NO: 294770 - DNA, 122 bp, Homo sapiens
aggttcactgcgactccgcttccccgagcatttcccccgtttcagcttccgtctggtctgcgcatcgcgagtggggtccaaaggccaattccacaataccagccagctccggagggacgccc

SEQ ID NO: 294771 - DNA, 122 bp, Homo sapiens
actcgtggcgcatttcctgcagttgacaggcatcctcctcgaagaaagtgtccctcatctcgtccatctcggttctcagctcatcgatctcgttctgaggcggtgacaggccgcgtgtcaaa

SEQ ID NO: 294772 - DNA, 122 bp, Homo sapiens
ctgcgtgagggtgtcctgaggggtggaagtgcatgcgtgcgtgcgcgggggctgtgtgtacgcacatgtatatgcacagacgccacacacatgcgcgtctcatgagaagatgtttatttcgt

SEQ ID NO: 294773 - DNA, 122 bp, Homo sapiens
gccacccacagcttcgggatcggggcgcgcagggaagtagccagcaaagcaggtaagtcccgggctgctcgcggcggggtcatgactgagggcacaggggtgaactccatggtgcttcctca

SEQ ID NO: 294774 - DNA, 122 bp, Homo sapiens
cactgcactgccaggcctctgggcaccgagggccgctgctccgccgtttctttctgctaccgctaattcaaaacagggcagggagcagctaggcagcagctgggagagctgcgggctcctcc

SEQ ID NO: 294775 - DNA, 122 bp, Homo sapiens
agtgtttgcctttgctctgtggcatgtgtgtgtgtgtgtgtttatgtaggcatgcctacacggctgcttgtgttaatacttagtataaagccttaaaatggataccagattggctatgtaac

SEQ ID NO: 294776 - DNA, 122 bp, Homo sapiens
ctggtctctcagcacatgtttggcaggttagggaggtcacccagtcccttctcacccagccgtggtctcttacaagaaaaaggagacacaaggtatctaggcaagcttgcacattctgacta

SEQ ID NO: 294777 - DNA, 122 bp, Homo sapiens
cggtaaaatgcagcactcgcagagcgcctgcgcggctttcaggccgggcggcggcggcggcggtggctatttatagtaggtgacgtcaccttgaaatagaccgttagggccggcccgccctt

SEQ ID NO: 294778 - DNA, 122 bp, Homo sapiens
acccagaaagcaacaacaatgtaaacatccatattcagtttatttttaaacagaggggcacgtacccacagagaagcaggactgagaaccatcatgggggcttgcttgaagtgatctgcccc

SEQ ID NO: 294779 - DNA, 122 bp, Homo sapiens
gaagttcagcaacaaaaatgaaagaaggcaaatggaggtgctggagagggtgacccaggccgcaccactaggaaagctgtgctgaataggctaagccaataaatatgatggttttagatcat

SEQ ID NO: 294780 - DNA, 122 bp, Homo sapiens
tccagagcctgtcccgtccaggctgcttcctgactctgcctttcttctccagcgccgtgccgtccctgcagtgacaccgaggtgctcctagccgtctgcaccagcgacttcggtgagtgtct

SEQ ID NO: 294781 - DNA, 122 bp, Homo sapiens
taacaagagaaggcctctggtagcactacaatccactgtctctcccaatagggcataacacgggtgaggaacgccacagatgcagttggaattgtgctgaaagagctaaagaggcaaagttc

SEQ ID NO: 294782 - DNA, 122 bp, Homo sapiens
ttttattttcgctgactgcagtccgggagaatgcgctcggtcggagaatctttcggggcgcggttgacagttctttttccaagaggggtccttcacatttatcatgcctcttcctcgggggc

SEQ ID NO: 294783 - DNA, 122 bp, Homo sapiens
cgttcccagcagcctctgcgcctcccgcgcccctaacccgacgggctgaggtagaggaagcgtacgtccgaggcggtcttgccacgtcctcactggcacttctggaaaagcagcgtctcagc

SEQ ID NO: 294784 - DNA, 122 bp, Homo sapiens
ctccgcctcctcccagacccttctccgggtgcgactgacgtggctccgcaccaatcaggacgccccgagccgcggtggagggactgtcctgcctgcacctatcagcagtgcggggccgggct

SEQ ID NO: 294785 - DNA, 122 bp, Homo sapiens
cagtgggaagaagagatgccgaggatgcagcagcaccatacgtgggaatggggacagctgcggggggctgggagcacaagtgagggacagagccagggcaggtgaggccagacgacggacat

SEQ ID NO: 294786 - DNA, 122 bp, Homo sapiens
tcccttgtccaccccccttgcaggtccttggagtctcgaggttgaaaccacagatctggacgttcacgtgcactctcttcctgtacagtatttattgttcctggcactttatttaaagatat

SEQ ID NO: 294787 - DNA, 122 bp, Homo sapiens
ggaggaaggtctggaagtgaaggggcctcgcagtgcctgcgctttgggcggcaacaagggcgccgggccggagctccccgccctgggcgcagtgggtgcaggtgcgggctgcgggcgcgggc

SEQ ID NO: 294788 - DNA, 122 bp, Homo sapiens
catgtttgtgcactaccccagccccaaccacagacatgggcaggaggaacagagctctaccgtgtagcgtcactgccagtaagagtctgactctcccatgaagcattactcttcctctgcat

SEQ ID NO: 294789 - DNA, 122 bp, Homo sapiens
gtgcttgctaaataagcaagtgaatgccttttctttgagccccgtcctctgctcccaagccgcaatcacaccatttacactgggcccatgtgggccctacggtaacccctgcccttgtcccc

SEQ ID NO: 294790 - DNA, 122 bp, Homo sapiens
tgcaaaaataagctccggtgtgaaacatagtaactatcagcagcaatgattatggggtggcggaccaagcaagggagaaaggtgagaggaagacttttcattgtattgtttatttatttatt

SEQ ID NO: 294791 - DNA, 122 bp, Homo sapiens
gactcaggccgcaagcgtcacacttggcctcttcccgcggtggccacgttgaccagatgtcggcctcgaaccgacagcctgaaaggtttaaggtccaccaggtggctctagcccgcagcagc

SEQ ID NO: 294792 - DNA, 122 bp, Homo sapiens
ttcaataaaaattgagaaacatttgggctgaaatcgctgctttatctggaggagccacagcgccgggagagaccactgctgcgcggggggagcccggggtctcagtggcccgggcacgcggg

SEQ ID NO: 294793 - DNA, 122 bp, Homo sapiens
tagctggacctgggtaggtcaccattactcactggggcttttgtctggcatgaaaggtgacgggagaaaggggcagatttttatccaggcagccaccgtgggtgtggacactgagtaataag

SEQ ID NO: 294794 - DNA, 122 bp, Homo sapiens
acccaggagtccaggccactcaataaatgttgttgattaatttgaggatgcagctgtgctcggggctagctctcagtcaatagcactgggaaatccatccctcgtccacttggaaacccagg

SEQ ID NO: 294795 - DNA, 122 bp, Homo sapiens
aatgttttgagaaggaggagcttcaggtgtcttctgtcagagctggaggggggccaggggcggagcctatgtgatctgctggaagcactcagttttctgttatttgggtgagagtagtggct

SEQ ID NO: 294796 - DNA, 122 bp, Homo sapiens
gccccgctgagcacctccagcagtggcacagcctctggaggggtccgggacgaagccacccgcgcggtagggggcgacttagcggtttcagcctccaacagccttgggatcgcctttggaag

SEQ ID NO: 294797 - DNA, 122 bp, Homo sapiens
gaggggaaggaccggagccgggggtagtgggggccaggtccgcgtccgcgtgttttgagccggtttgggggcaggggtagccacagccgcgaagagcggggtggaggggggcagaaaagggg

SEQ ID NO: 294798 - DNA, 122 bp, Homo sapiens
catcttgttgcacgtggcctctggcgtagaaactgctggatgagatgcaaagtcctgctacgcagcctcagtcctccgagagctccaggtgggtttctggaagggaataggggtcagaccca

SEQ ID NO: 294799 - DNA, 122 bp, Homo sapiens
aatatgttgcttttttgacaaattcctggcatgaggctttgtgatctgggtcttacctggcgcatttccttataattgtggtgcttaaaatccaggtcatcagtggtggtcatctcgttccg

SEQ ID NO: 294800 - DNA, 122 bp, Homo sapiens
atagctttcagtcccaaagcttcacacacttgtctggtgccagcgtgtgaatgcaaaacacgtcataagggaataaacatgcacattcatagatgtttaaaatatgctgctgaaaaacatac

SEQ ID NO: 294801 - DNA, 122 bp, Homo sapiens
ctaccccagctcatcagtgtatttgtttgttaattcattcattctttcattcatattctccgctgttgttaattttcccattgacagtaggcgcaaggggcaacgccactcgccctgtccct

SEQ ID NO: 294802 - DNA, 122 bp, Homo sapiens
ctggttggaccaggccaggaagagcagggcagcaagacggccccgaaacccccaggcgcacgcaccaccccgcgcctccccagcgagggcccgcggggccatgcccttcagtgggcacactt

SEQ ID NO: 294803 - DNA, 122 bp, Homo sapiens
gccagggtttgccactggcaagttggattttgtgttacgtgcctaaccaggagttgtcaccgcttgaggcttaacctggttctgggcggctcggtgtgtgtgtcccaaggccatgccacaca

SEQ ID NO: 294804 - DNA, 122 bp, Homo sapiens
cccatcctatcccatcccccgcccccagcccggcaatgaccacagcagtgctagccacatcgtcaggattcaagggaacagagaaaaagaggcaagaagagagagagaaactcgggagatac

SEQ ID NO: 294805 - DNA, 122 bp, Homo sapiens
gctctgcgcgggactgcaggttctgccccgcatcggagtgatcgctgagcctgacgctctcgaaggctgggcctggggcccgcaatctactccggaggctttcccactgggcagggtcgcta

SEQ ID NO: 294806 - DNA, 122 bp, Homo sapiens
gatgcccgggtataggatgtctcccttctccccaaagagggaaacagtcagctccgagggcgggactgtgccacctccgccttgccctgctctccgactgtaggaggctttggagagagtca

SEQ ID NO: 294807 - DNA, 122 bp, Homo sapiens
ccactcaaaggatagatcctgtagctgcaagcttggcttctctggaccgaggagtcctggcgctccgctggggaggattgcctggagagagcagacccagcagcaggacaatgagagctcta

SEQ ID NO: 294808 - DNA, 122 bp, Homo sapiens
ggcccactgcccctcgctggggcacctggggagggggcgctggggcacctggagagggcgcgcaggagcagcgggccgagccttctgcggggatggggtgggaagagaagaaatgaagacac

SEQ ID NO: 294809 - DNA, 122 bp, Homo sapiens
ccccctttccaaaaatgctccggaagtgccttcgccctccgtaaagatggccggggcagtcggcacgagggaggcggggatgcgcctgcgcaacaagttcggcggggaagatggcggatgac

SEQ ID NO: 294810 - DNA, 122 bp, Homo sapiens
ccgttccccgcggaagaggggtggagtttcaaccttttaactccaccttggtctgtgcagcgcggaccaacccaaatcgccagaaaggaggggcgtggcttgaagtcccctcctccatcccg

SEQ ID NO: 294811 - DNA, 122 bp, Homo sapiens
ctgtggtgcctgtcctcttacttcattctctgcacagcccgaccggtttcctgtgcgtaacgtcacacggttcattcaaaaaaagaagaaagaaagagccctcctctgagccacccgaccgc

SEQ ID NO: 294812 - DNA, 122 bp, Homo sapiens
gcgccggggtgtgcaaaggagcgtgtgtgcggctggagggcggcgatgcgaacaacaatgcgcccgcgcccggggccaggctgcactggcggccgcgcgggccggggtcgggaagccaggca

SEQ ID NO: 294813 - DNA, 122 bp, Homo sapiens
catatattcgttaatcatacacctgctttatctgccctcccagcctgcattccattcgggcggacagatgtccctgaaggcccgagggacaccagccgctatgccaggctccaaagaacccg

SEQ ID NO: 294814 - DNA, 122 bp, Homo sapiens
ccttttgggagagatcagcactgaccataagttttccttttctagagaactattttctctcgcaagccctcatcccttatcaggtccccagacccaacccccagcctcagctctagaaaagt

SEQ ID NO: 294815 - DNA, 122 bp, Homo sapiens
aagattcctgtcaatcccatctgcagggaactctgggaccttctctggtagctgccagaccggctggtggagaaacaggagacaatctggggactgaaccttacccagggctgtaggagtga

SEQ ID NO: 294816 - DNA, 122 bp, Homo sapiens
tctcaacctccatggcgagggggttctctctgcagtcagcccctccccagacagagccaccgcctggatccggggatctgaggatgaaatctctgagagcccctcgtgggccctggaggaca

SEQ ID NO: 294817 - DNA, 122 bp, Homo sapiens
gttggatctggaggtgatcctgtcactgtgggccaggctgacttcctccctcagtcctgtcgggggtgtgcatgtgagggagggggtttttgacgcatgtgtgccaggtacgggaacagccc

SEQ ID NO: 294818 - DNA, 122 bp, Homo sapiens
ggtggaggcaggaggcggagcggagccgggtgcggtggagcagcagaggccgagcggagccgtgggcggcgggccgggaccccggggccgggccaaggactggcggggcagccgcgagttca

SEQ ID NO: 294819 - DNA, 122 bp, Homo sapiens
aattggcatttctttcggttaggcagggaggccttctcgctcgcggtctcctactttatccgttgtactgactctctggaccccagtttttgcactgcaccatttgggttcccgcaatcagg

SEQ ID NO: 294820 - DNA, 122 bp, Homo sapiens
gccgggcacagtggcgtgcgcctgtagtcccagctactcgggaggctgaggcaggaggatcgcttgagcccaagagttcatatctagcctggtcaacatagcaagacccctgtctctatttt

SEQ ID NO: 294821 - DNA, 122 bp, Homo sapiens
ccaggtgtcacactcatctgagggctccagacacatggcctgtgcgtctgtcctgcccagcgtctcccacctgacgcggccaggtgcccagttgctcttcaaggccttttcaggtgctcctt

SEQ ID NO: 294822 - DNA, 122 bp, Homo sapiens
ccgtctgtagcaggagtgatgatgagacctttttaccgcccgttagggagcctttctttgcggactgagggggagtgaagtgaaagggagccatatttgggactcctgctaggttgtggaag

SEQ ID NO: 294823 - DNA, 122 bp, Homo sapiens
ggccaatcgtggcattacagccccgtgtgggaacgcccgctgggcccagagcagcgcggtcggccttggccttgggactccaacaccccagtctaaaggtcctgctcaaaatactttttgga

SEQ ID NO: 294824 - DNA, 122 bp, Homo sapiens
tcctagagactgggtagggctagcctgcaccttccgctccagattccttagtggctgacccggcccttggatggctttacagcctgcgcacccagggggaggccgggcagtgtcagcagagg

SEQ ID NO: 294825 - DNA, 122 bp, Homo sapiens
ctgtgcgaaagaacccaggctccgtgggaaccccacgccactcgcggagctgcgccccggcggccgccctcgcccctcgggcccctttaagtgccgcgcctgcccccgtccgcgtcccccgc

SEQ ID NO: 294826 - DNA, 122 bp, Homo sapiens
cccggtgaagaagatccgtaagcagatgaagctgctgctgctgctgctgctgctgagctgcgccgcgtggctcacctacgtgcacctgggcctggtgcgccagggacgcgcgctgcgccagc

SEQ ID NO: 294827 - DNA, 122 bp, Homo sapiens
ggcacacagcacattagacgagaggctgaagaggaagtcaagtttcaagtctccctcctgcgcagttctgtgcttcttgtgctgccttttccaagcttaaggggctctgctttttccccttc

SEQ ID NO: 294828 - DNA, 122 bp, Homo sapiens
attttaaccacagacacgtcgtctgcctcagaagatgagggctctttacggcgacccgggcgactcacctccactccgctccagagccattccagcgtcgagccctggctcgaccgggtcat

SEQ ID NO: 294829 - DNA, 122 bp, Homo sapiens
gagcctctgagctggcagacaaagggcgtgtgttctcatccagcgcacttcctgggtttccgttgcaggaagtttggcacctgccgatcggtgacatcgacacccgagctgctgcgggccag

SEQ ID NO: 294830 - DNA, 122 bp, Homo sapiens
aagaatgaagtcacggaccttcttcgcggtgagtgttatagttcttaaagatggtgtgtccggagtgtgttccttgcaatgttcagatgtgtccggagtttcttccttctggtgggttcatg

SEQ ID NO: 294831 - DNA, 122 bp, Homo sapiens
ctgctgagttccaagatgatatcgatcgagcagctgctatttctgcttcagcgaaagccacgatcccagcacacaggcacgcgctactgtgaggtcaggacgaggaaaagagccaggacctt

SEQ ID NO: 294832 - DNA, 122 bp, Homo sapiens
aatgcagattacggttcccgcctcacaatgcaaaggtcaacggtgacgccatctggagcgcgcttggaatccagcaggcggttgctgccgcgtcttccacaacctccgcggtctggagctgg

SEQ ID NO: 294833 - DNA, 122 bp, Homo sapiens
tctctttttccgatgggtgaaccattgaaacgccttttcctgggggagcccagcgagattcgccctttttcctctccggccctggctgctccatgcccaggcggtcgtcgcccagggggtgc

SEQ ID NO: 294834 - DNA, 122 bp, Homo sapiens
ttaatgaacataggacctggtaaaatcgtgcctcagtttttcctctgggtcacatggtctcgtggtagctcccctccctctgctggggagggcagaggctccctccacaggtgtgtgccagc

SEQ ID NO: 294835 - DNA, 122 bp, Homo sapiens
gtgagtgctgtaaaacacagggttctgcgcacggatttcttccataccattatattctctcggctgcgctcgcaggtactgtggcctgccgcggccctgaaagcttctcgatgccgtgaccc

SEQ ID NO: 294836 - DNA, 122 bp, Homo sapiens
aatctaggagacagatgaggccggacagcagaggggtggcagagaaaacccaccccattgcgacacctccgcggccctcatgcagctgtctccaccaaccggcgaagtgcggctgcccaaga

SEQ ID NO: 294837 - DNA, 122 bp, Homo sapiens
caggggtgctggtgctgggctaaggggcagcacatgacttaagctgggaggtatctgctgcgataaagacttttttttcctccctgcctgcttttcttctttccattaaatgaggcacataa

SEQ ID NO: 294838 - DNA, 122 bp, Homo sapiens
cttcctaggcacactctggtttctctaggtttggagctgcctcagtctggtttctcctttcgctttccgcttccccggctcacatattcaattgtgcaccaccttgggaggggacaaaagat

SEQ ID NO: 294839 - DNA, 122 bp, Homo sapiens
ggttgcgaaccgcccccgagcctggtacaggctgggattgtagtcctgcagccttgtggccgaagggctgggactggccatgagattacatgtcctagcatgctcagccaggcgcgcgcagc

SEQ ID NO: 294840 - DNA, 122 bp, Homo sapiens
cgcctctaacgttgctttggagccctggcagtcaaggctcaccctcccgcctccggaaagcgaactttatttttattggtgaaaggacatcttcctgtacacttgattgggcaaggaaagag

SEQ ID NO: 294841 - DNA, 122 bp, Homo sapiens
gcgcctgcgcactcgcggcaccaacggaccgttgactgaccgcgcatgcgcataacgctgcgcgtgcaatcgacaaatctcctaggagggtgaagacgtcctttcccatcctgctaaaatat

SEQ ID NO: 294842 - DNA, 122 bp, Homo sapiens
gatcgggggacggggaggagtgaagggagggtgatgatgacgatggacggggagagatttcgatgtggcagtgacagtctgcccccaagaaaacgcctccagaggtctgcagagtccccttc

SEQ ID NO: 294843 - DNA, 122 bp, Homo sapiens
agttctgtggccagccatgacacaagtccctgtcataggtccctgggggcagctccggtgcgctctaagagctataaagattaatatattttaaacatgacacgtaggccttattactactc

SEQ ID NO: 294844 - DNA, 122 bp, Homo sapiens
ctgcccagaggcattggcctgtgactctcatccctggccttcctgaggtcaggggattagcgattagttagacggggtctagggtagaggtcagcctgagggggcggctataaaacgagtca

SEQ ID NO: 294845 - DNA, 122 bp, Homo sapiens
agccgcggtcttccctggacttgctgtgcctgcgccctgcgctacacaggcccccagccgcggtcttccctggacttgctgtgcctgtgccctgcgctacttttgcctgatggtggcttcac

SEQ ID NO: 294846 - DNA, 122 bp, Homo sapiens
ttgaggtgggacgagcaggggcttggatccctgccggccgtctggtgtgtgaggcttgcacggcccctggctgccccgcgcctcgccggagcccgagggggcgcaggtccggggcgagggcc

SEQ ID NO: 294847 - DNA, 122 bp, Homo sapiens
cagaggtcacaggggcagagaagaaatactagacagaatctcggcagaaatgagatgatgcgctggagggactgtcctataaaattaggatggcacataatctgcagaactgcggcacagat

SEQ ID NO: 294848 - DNA, 122 bp, Homo sapiens
agccgggatcgggcttgaggggccctacgaaattcggtttgggggcgtgcccggtcggggcggaccttagtggggggttgggcttcgtgggggcaggacgcagtcccggggcgtctatagag

SEQ ID NO: 294849 - DNA, 122 bp, Homo sapiens
atcgtgcagcctgtggaaggcagcaggcgccgggatgccgaatggattgaatgagcttctcggggattccctgagcttggtgaacgcagagcccaccctgacggtcaggcctaaccccaccg

SEQ ID NO: 294850 - DNA, 122 bp, Homo sapiens
cgagagctgtcctggccacgcagcagtggtgtttgtatcgagtgctcttgctttgctcatcgtggttcacagggtgggtctctgtcctccgcaggtggtccaagatctattttgtattgtgg

SEQ ID NO: 294851 - DNA, 122 bp, Homo sapiens
cgttggtacgagatccaactccctacctcccgggggtgcagaacgcagggtccagggagacggcagccaccttggggaggattcggccttgtgagatagcaaggtccttccctcagtggtcg

SEQ ID NO: 294852 - DNA, 122 bp, Homo sapiens
ctagatctgtacctcacccttattcgggtgatgcttctccatcactgcccagtggttagacgtactacttaacctctgagtctgttcattaaaaaaattctattattgtgcagtggaataat

SEQ ID NO: 294853 - DNA, 122 bp, Homo sapiens
tctgctctccccacagaaccccgacatcgtcctggtgcactacctgaacgtgccggccatcgaggactgcggcaagccttgcggccccatcctctgctccatcaacaccgacaagaaggagt

SEQ ID NO: 294854 - DNA, 122 bp, Homo sapiens
ggagccacctctgcccccgcatgggctggcgaagttgggaggagcgagctggagccagagcgcgcgccgggcgcgccccgtcgctgcctgactcggcgcccgcagttcgggcgcagcacgcc

SEQ ID NO: 294855 - DNA, 122 bp, Homo sapiens
tctcccgcaggcaggtctcctcgccgagcctccgaaaaggggcggtcgtggcggccctggcgcccagctgggcaacgcttcgtggtatctcaccgcttctctctgttgtgcccagcgccccg

SEQ ID NO: 294856 - DNA, 122 bp, Homo sapiens
atagcgaacgtgaggatttatattctaaaattatcatcttcttttgcaggactctgccatcgtcctcaaagagtaaaaaatccagttacggaagggaactaacacttgctagatatggtgtg

SEQ ID NO: 294857 - DNA, 122 bp, Homo sapiens
ggaaggagctccgaggaaaacgggagagatgggggtgcagagagagagggaagaagaaagcgagttatggattgctggagggactgcaagcaattcgtcaaactgtgcaagtgatttccttc

SEQ ID NO: 294858 - DNA, 122 bp, Homo sapiens
gatgtaccagtttgtccatcttgagatggtgaggctgtcagtgtatggggcagcttccggcgggatgttgaactggtcattaatgtgtcccctgagttggagctcattctgtctcttttctc

SEQ ID NO: 294859 - DNA, 122 bp, Homo sapiens
catcccaaaccttcggttctggcagagttcttgccgcagaggttccttaggagcaccccgcgcggcccgcgcgagcgcgcctgcgcgtcgaaccccacccccttccccgcgggcctcggttc

SEQ ID NO: 294860 - DNA, 122 bp, Homo sapiens
ctctggcccatgtctgcgcactcgtagttccacccctcagccccagtgtttgttatttttcgggttcagcttgcttttgccccgtctccgtcgacgcaatcgccaccagtcaatggggtggt

SEQ ID NO: 294861 - DNA, 122 bp, Homo sapiens
cagccgggtccgccgctagcgccactgacacgcatgcgcagtctagccgccggttcagggcggcgagggagcggcccgacctcgcctctgaagaactacaatccccagcaagctttgcgcct

SEQ ID NO: 294862 - DNA, 122 bp, Homo sapiens
gactcaccaagtaaaatcgcgtttgtaaaagagatgtcttcatgtcttcccctaagaatacgcttttcctaacaggctactccttcctgtagagcagaaattgtattttgcacgaacatgca

SEQ ID NO: 294863 - DNA, 122 bp, Homo sapiens
ttttcactggggttcgctaaatgaatgtaactgggctgagttgagaatagtaaatgagaccgtctacgtaaggagatgatcatgtctcttgccatataaagtgcacttaataaatggcagct

SEQ ID NO: 294864 - DNA, 122 bp, Homo sapiens
cgagaccttgcgaagcacctttccctcttatatggccgaaggcgagcggctctacctgtgcggggaattttctaaagccgcgcagagcttcagcaacgtgagtcgagctctcaacctatcca

SEQ ID NO: 294865 - DNA, 122 bp, Homo sapiens
tagcctcacaccggcccctcccaggctgacagaggtcagcgtgagccccttgcctcacaccggcccctcccacgctgacagaagtcagcctgagccccttgcctcacaccggcccctccctc

SEQ ID NO: 294866 - DNA, 122 bp, Homo sapiens
ctagcaaagaaagatgctgcagtcggtggaactggaagcaaagcgcataagggcccagtgcgggggcagcgatccccgagcgctgagctggctgcgctgaggcctggcgtgcggagaaacaa

SEQ ID NO: 294867 - DNA, 122 bp, Homo sapiens
gccggaagaaagcttctccgctcactaatcactcggcggcttccggagagcccgcctcctcgctcggcattctgggattggtagttttagtccagattgtgacgtcaatttcggggtggcgc

SEQ ID NO: 294868 - DNA, 122 bp, Homo sapiens
cttccggggtgggatgggtggatgctcgtggttcattcccacgtgggattctcacatgctcgccctccggctgtcaggagcaatggtgagttctgccacacgtggaaaacacgttggcttct

SEQ ID NO: 294869 - DNA, 122 bp, Homo sapiens
cacgcccgcatcaccgtatgcacagataatcacatgcaaatatccatgtgaactcatgtccgtgtaagacgcatgatcgtgtgtgcacacatcgcatgcagatatccatgtgaactcgtgcc

SEQ ID NO: 294870 - DNA, 122 bp, Homo sapiens
tcacctttccctcgtatcattgtgtcaatactctcggatttacaaagctagatttgtcctcggcaatcatctgcctggaccttctgcccctttcagactcaggattatttaagtgctcatta

SEQ ID NO: 294871 - DNA, 122 bp, Homo sapiens
ggagcagcaactggctgtaaacaaatgttcagaacaaggtgcctcattactccccagctccgggggagttacaaggaggggaaacagcctaagtgctcggcttttccactggacagcgacac

SEQ ID NO: 294872 - DNA, 122 bp, Homo sapiens
taacgagcgggcattttcactctaaagccatgagaccaagagcactcgatgggcaccaaacgtgtctcagcagcactctgcgcgggccaccccgccttcgcccgggaaagctcattcaaata

SEQ ID NO: 294873 - DNA, 122 bp, Homo sapiens
acctgtgccccaggctgcttgggtcttttgaagtcttttctgttgtgcagatcccagccccgctcctctccagaacaccacagagggctccactccagaggctccagctccatactcatatt

SEQ ID NO: 294874 - DNA, 122 bp, Homo sapiens
aatctcagccaagcccaccaagcggctgcaggaggcgctgcagcccattctggagaagcacggcttgagcccgctagaggtggtgctgcaccgggtgagcttccgggccgcggggcggggcg

SEQ ID NO: 294875 - DNA, 122 bp, Homo sapiens
ggcgccccctggaggtgcgaagggccttcgggcgctgacagggagagcctggggccgggccgtgtggatgccatccccgagcgcggttcgcgctcggctgaggcgctggacaagtggcttgg

SEQ ID NO: 294876 - DNA, 122 bp, Homo sapiens
gccgcctgaagagctgcagccagaacaggtggctgagctgtggggccggggtgaccggatcgaatctctcagcgaccaggtgctgctgctggaggagaggctaggtgcctgtgagtcctcac

SEQ ID NO: 294877 - DNA, 122 bp, Homo sapiens
ctgaaattacagatgggccatgggagtttttccactacagatatttacgtttataaatcacgttgtcttcttagaaaagtcagaaggaggttaaaacagtcaagccacagacctgtagaaaa

SEQ ID NO: 294878 - DNA, 122 bp, Homo sapiens
tcccttcgccggggtcccagtttcccgcccaggaaacctcggtccctcctccgaggccgccgggccctcctccagagtcccgccagtcccccagagtccaggccagtccccgccgtcacccg

SEQ ID NO: 294879 - DNA, 122 bp, Homo sapiens
agggcctgagcgggttctgtgcctggctgcccaccggctctctgacctggacctcgccgtcgctggcccctgaaatccatcacttttgtcggctgttctgtgacgccacaacgaggagccac

SEQ ID NO: 294880 - DNA, 122 bp, Homo sapiens
cgtgccgccgcaaccgcggcacacgcggcccgtcatgccggcgaccgcgcgggcagcgcccggagcctcccaagactctcaagccacccgagcctccggagcagcccgcgccgcccgcccag

SEQ ID NO: 294881 - DNA, 122 bp, Homo sapiens
ttccttcccccacaatattgggacaccctaggcggtagaagcagccgcttttctgtcatgcgcattgcggagagtcgttcttccctctttcccgacttcaccactcactgggatcagacccc

SEQ ID NO: 294882 - DNA, 122 bp, Homo sapiens
gctggctcaggggtgaagctgcataccttcgcggtgagtgttacagctcttaaggccgcgcgtctagagtcgttcgttcctcccggtgggtttgtggtctcgctggcttcaggagtgaagct

SEQ ID NO: 294883 - DNA, 122 bp, Homo sapiens
ctcctggactctgtctgcctcggtctcccaaagtgctgggattatagatgtgagccaccgcgcctggcctacttgttcttgattgttgatttgatactccctataaggcccaaaagatgatt

SEQ ID NO: 294884 - DNA, 122 bp, Homo sapiens
tcctactacccggggctgtccgtccccggctctccccggagtttcccagggcctccgccacgtgaccccagtgtttgtctcccgcccagagcccgcgcccgcagccacagggtggggcaagg

SEQ ID NO: 294885 - DNA, 122 bp, Homo sapiens
atggctatcattcattgagaacttcctaggttctgattaaggacttaacatacatttcctcgtttaaccttatcaggtagatgctcttattatcctcattttacagatgacaaaacaggctt

SEQ ID NO: 294886 - DNA, 122 bp, Homo sapiens
cctgccttaactctggacttgcaggcagggtgagtgatctgctgctggattgagtatcttcggtcctcctaatcatactctactggagcagagcacccacggactcctggcctcagttgcct

SEQ ID NO: 294887 - DNA, 122 bp, Homo sapiens
tgctctgcgaggaagaggagtcgtgggcgggccggcgcatcccggtgtcactcctgtattcgggcctggccatcgggggcacgctggccaacggcatggtcatctatctcgtgtcgtccttc

SEQ ID NO: 294888 - DNA, 122 bp, Homo sapiens
ggagagtgggaatgtgaagagatgcgtaacatgcaacttagtaggaattttgatctgtttcgtgtttctctgggttgggcacagcttgacaggcttatatgtggatcaccacataccctcac

SEQ ID NO: 294889 - DNA, 122 bp, Homo sapiens
tagggaagcagagccatatcctaagcatattacacagtaagttttttcctaatttccattcgcataaagttaaggggtgaaaaaatcaaattctctaggacaactcagagtaggttattttt

SEQ ID NO: 294890 - DNA, 122 bp, Homo sapiens
ctgaagtagtacttcctgcctgggagcagccccgtcactgtgtacttgttgctgaagacacgctcggctgccgtgtaccaggtggctgtgcttgcatcccgcttcatgatgatgtagtgagc

SEQ ID NO: 294891 - DNA, 122 bp, Homo sapiens
acccgcccacccgcgcgcgtgcgcactgcgccaggccgcggccggggaggcgggagcatgcgcaatagggtgtgcgggcctccccgccccgcccccagttcctgtgacgtcagacttccgcg

SEQ ID NO: 294892 - DNA, 122 bp, Homo sapiens
ggagcagctccaggggactgctgatagagccattattactccgtgattacagcggcagatcgggcctgcctggcgggggtaatgtggtgaaaactcctggatcatcttttcccatttcaaaa

SEQ ID NO: 294893 - DNA, 122 bp, Homo sapiens
gacaagatggctgccacctcttcgcgcctcttagtcccacccactcagggcggaggtctgcgtcatgtgaccctccccttcttggctccgcctcctaccgcagtgcttgacgggaggcggag

SEQ ID NO: 294894 - DNA, 122 bp, Homo sapiens
gagcagcagcggaccgccccgcccagcggccctggcgatagcgggtgtccgttcgcagggcgcctttcccaggcacccagtgacggcagctgtcgtcatcgccactctgcagatgggaaact

SEQ ID NO: 294895 - DNA, 122 bp, Homo sapiens
ctgccctgccgcgcccctcgctacgttccccgggccccgctagtccctgggctctggcttcggctgctgggtacagcggggctggagcctaatcctttccggtgtttctagggaaaggaaga

SEQ ID NO: 294896 - DNA, 122 bp, Homo sapiens
ggcacctggtaggtcatgaggcctggctcccagcccgcccttccaagccagggctgctgccgtccatcaatgtcacctccttaggaatctctgcatctgagtggggcggagcacaagacagc

SEQ ID NO: 294897 - DNA, 122 bp, Homo sapiens
gtctcccaaaaccacaggcggatgggagtcagggaaaatcgaaattacacgcaccaaatacgcaaggctgctgacacacgttggcagtgatttacctttctattaattgcaaggtttcgcgg

SEQ ID NO: 294898 - DNA, 122 bp, Homo sapiens
ggaacagacagacccctcgctggggactaggagacacacggacggggagtgcggggcaggcggacggggagcgcgaggcaggcgcacggcgcggcgcgcggcgttaggcggcaggtgcacgg

SEQ ID NO: 294899 - DNA, 122 bp, Homo sapiens
gagaagaggcagtgccctaggaacccagatggctgccttcatctccgcagctctgagacgcgcctccatggatggagcgcatagagggctgctttcatctccgcagctctgagacacgcctc

SEQ ID NO: 294900 - DNA, 122 bp, Homo sapiens
gctgcagtcggggagtcagagccacgctggtgggcagagaagagatgcccaaggaggaggcggttggctttgtctgggtgcccaagcccagacccagatatccaggcctctgctcccttccc

SEQ ID NO: 294901 - DNA, 122 bp, Homo sapiens
cctgtcattttagaaatcaggaatagaagtctccacagttatgattgttcccaacttcctcgtttttgggttgaagtaacagaggctgagagatgtgagaatacttgcccaaggtgccctgg

SEQ ID NO: 294902 - DNA, 122 bp, Homo sapiens
acagagaagcatagcagaaaacacatcatttacatgacaggaccggctataactccgatacgtacatcagtttgggaagcaggtgacttctagacattcttagaaccttagacaatcctgaa

SEQ ID NO: 294903 - DNA, 122 bp, Homo sapiens
gcaacagaatatcagcatgcaacggcaagaaaaccttcgttgggtgtcagagctctcttacgtagaagagaaagaacaatggcaagaacaaatcaatcagctaaagaaacagcttgatttta

SEQ ID NO: 294904 - DNA, 122 bp, Homo sapiens
ggggcagggaagcagcatcctgggccttccctggggcctgtggtgctggcagcagctccacgttgaggtcgcctgcagcccgcaccgcggagcgctggaggttcctgagcccggtctgggga

SEQ ID NO: 294905 - DNA, 122 bp, Homo sapiens
gtgaaagagtgcaggaggtgaagtcacagacagtaagaaactgtattctcatgcagattccgttcctctgtggggtcttcacactggtgggtgtcattggttaaggatttcaaaaacatctt

SEQ ID NO: 294906 - DNA, 122 bp, Homo sapiens
ttctgtaggattctatgtatttaacattcaaaaaaggcaaaactattacatttagggatgcgtccttaaacgatgaaactataaagaaaaacaaggaaaatgattaacataaaagtaaggat

SEQ ID NO: 294907 - DNA, 122 bp, Homo sapiens
catcccgccccggcccccacctcgggagcctcccacggcccgcccagagacagcagccaccggctaaaacaccgcacttccgcctccgtcgccaccgccccggaagcactcgccgcaggccc

SEQ ID NO: 294908 - DNA, 122 bp, Homo sapiens
gagccgtcctgggtccctccctgcaggggcaccgattttagggcagtcagacgcagccctcgcctctggggtggcttttccaccacaaggccccagtagggcccgccgcggagtcttcctca

SEQ ID NO: 294909 - DNA, 122 bp, Homo sapiens
tgtttctcctctgcttccacagttgcaaaccctcgaagtgccacgacccctggggaaactcgatcttaagtcccatggccaaacgctccagcccgcggggctctcaggacaccacagcgatc

SEQ ID NO: 294910 - DNA, 122 bp, Homo sapiens
agaggaaggggcagggcggtgcgcgccgcgcctgatatgctgggagctgtagtctcttcacggtttttagccaatgagtaggtagcttcagaactacaatcccagtatgcatgggggcggtg

SEQ ID NO: 294911 - DNA, 122 bp, Homo sapiens
ctagccacatttccagttcaagagccacttgtatgcagatacagaacatttctgtttttgcggatacttctattaagcatcattgacataggagccacagttactaagaggacttctgagga

SEQ ID NO: 294912 - DNA, 122 bp, Homo sapiens
acacagccgacggcggtgctgcctggaaataatgcgattcaacaaagaaacatacgtttgcgtataacccgaaactggcctgcgtgtccgacaggtcagaagacacaatcgtgagaaatgct

SEQ ID NO: 294913 - DNA, 122 bp, Homo sapiens
ccgggatcagcggcgcggcaccgaccagcagctctcccagccccgctgccgcgcgtgtgccgcactcactcagccctccccggccggccccctaggagcagctctcacctgcgaggctcggg

SEQ ID NO: 294914 - DNA, 122 bp, Homo sapiens
agcccctgacgctagccccttcgccacctcccagaaccttctctccctctcccccacacacgcacactcacactcacacatgcagtcccatctgcccccgccagagccgctccttccagggc

SEQ ID NO: 294915 - DNA, 122 bp, Homo sapiens
agttggatactcggccatctgcccctcgaaagaactcatagcgccgccgatcccagagtccgggaccccaaaaccgcagctgaagccaaggccagccctgaccgcgccgccacttccgggaa

SEQ ID NO: 294916 - DNA, 122 bp, Homo sapiens
gaatgaatgcggtggtagtgatggtggtgatggtggtgcctgtgtatatgtgtgcatgtgcgtgtgtgaaaagaggcagagcaagaatgaaagcatctctaacaaaataagctgcttgaaaa

SEQ ID NO: 294917 - DNA, 122 bp, Homo sapiens
atcatcaaagctgtttaccgacttccaagagtcactgtaagtcccaagtgtggcgacaggcgtgcaggaaactcacacactataaattccctttcaaaagtcaagaggaagccgggggagtg

SEQ ID NO: 294918 - DNA, 122 bp, Homo sapiens
gtgccaccatgcccacatcatttttctatatatttttttctcgagacggagtttcactctcgtcactcaggctggagtgcaatggcacaatctcggctcactgcaacctctgcctcctgggt

SEQ ID NO: 294919 - DNA, 122 bp, Homo sapiens
tggctggcatgcccttccctaagaaggtgcagtggaggcctgtagccagaaaggccacaccggtattctgagcaggaataagtttcatgacttgaagaagcttcttactcattatacagggg

SEQ ID NO: 294920 - DNA, 122 bp, Homo sapiens
catgagagaacatgagaacatgaccagcagaggagctaattgccatttaaattctagagacggagtcaaaacatctttttaaaaaatacataagcccacaaccccttacaacaatactgaaa

SEQ ID NO: 294921 - DNA, 122 bp, Homo sapiens
tatttgttcaccaacattcattcaacaaacacttactgaggccaacactgggaatggagacgaacttccctgtcctcatggagcttgctttcaaaagggaaggaggcagacagtaaacaaaa

SEQ ID NO: 294922 - DNA, 122 bp, Homo sapiens
ctaggaatggcgcgatggcgccgcgggcgggagaccgctgacttccagccaatcgctgcgcggagagcaagttgactctctgctgattgggtcccagtgagtcagcgcctccacccacagga

SEQ ID NO: 294923 - DNA, 122 bp, Homo sapiens
gcagagggcgcggaggcccgggccaggcagagccccacgcgtgtccggccccgcgcaccgcggccaccaccttagttgcctcgtagggggctacgagagagagagaagagagaaaaaaaaaa

SEQ ID NO: 294924 - DNA, 122 bp, Homo sapiens
agggccccaaggcggcagcggcggaggtggcgatggcggcaggggcggtggtgggggcggcggcggcgaaggccccctctgatacagcagaggttgtggtggacgcggcagaaacggcctgc

SEQ ID NO: 294925 - DNA, 122 bp, Homo sapiens
tcctgtctggtggagcagcccagatcccctgcccaggggaaggagtgtgggcctcatccacgttcccagactgtgtccaaggacttgctaatccaaccctgagttgaagtctgtccagagtc

SEQ ID NO: 294926 - DNA, 122 bp, Homo sapiens
gacacccagctccatatcctcaacttagactgccagacttggcctgaattctccttctgccgtggcccgtaaactgatgacattgagctggtggattacagggttcttgtttgtctgctgcc

SEQ ID NO: 294927 - DNA, 122 bp, Homo sapiens
ggccgggagccttaagaggagagcagctatctcagtctttctcacttaatcttggcttcacgtcagaagctgtgcagcagtgcagtagaatagggcctggcaaaacctttgctagcaaagcg

SEQ ID NO: 294928 - DNA, 122 bp, Homo sapiens
agtgctgctgtgtgtgtgtgtgtgtgtgtgtgtgcgtgtgtgtgtgtgtgtgcgcgcgcgcgcgtgtgtgtgattagccagtacgcagtacttccccagggttgtgtttcctttttcctgag

SEQ ID NO: 294929 - DNA, 122 bp, Homo sapiens
actccattaaaaagtgggcaaaagacataaacagacaattctccaaagaagacatgcaagcgagcaacaaacatgaaataatgctcgtcatctctaatcatcagagaaatgcaaatcaaaac

SEQ ID NO: 294930 - DNA, 122 bp, Homo sapiens
tgcaacaaccacataatctgcaaagcctaaaacattaactatctggctctttccagaaaacgtacgcctgcctggcctacagcagtagttcttaaatcaccagggaactttgtaaaaatgca

SEQ ID NO: 294931 - DNA, 122 bp, Homo sapiens
gtgtgtctggattttaccacaagacccctggtcctcaaagcttcgcaggccgagatacctcgcccctttcttctctgtcacacgcgtgcgaacacaccctcccaacccacgtcgtagtagtc

SEQ ID NO: 294932 - DNA, 122 bp, Homo sapiens
cagtgtagcccgagtgcaggggggtctcatgtgtccaagtctatgtaagcatctgggaaccgcagttcagacacgaaagcaatgacgagcttggctcacctgtgagaaaactttaaaacgta

SEQ ID NO: 294933 - DNA, 122 bp, Homo sapiens
aagtgttcccactacccgtggagaacatatttcctgagagccgagtcccatgttcatccacgtagtagagtccaggaccctataagatgaaagatttcaggctgaaattggagaggaagatg

SEQ ID NO: 294934 - DNA, 122 bp, Homo sapiens
gggaaaatgggggagggggcgtgtcgccccgagtttacgtccctggaaggctgggggaggcgctggatgagcttccccattccggccgcagccgacctagatcccagccctgccctttgctc

SEQ ID NO: 294935 - DNA, 122 bp, Homo sapiens
tatttgaacattcaacacatgaaaggttaacaaaggctatgaacttggtgtaacttaaaacgtttcagatgtcggagttcaccagatgtaattggattcaggtggatcccgccgctcctcgg

SEQ ID NO: 294936 - DNA, 122 bp, Homo sapiens
caacctccgcctccctggttcaagcgattctcctgccttgagccacctcaaggtggctcccggcctgcccctacctatgtttgtattggaaacaaggtttacaagtagtacaatgcgcaatt

SEQ ID NO: 294937 - DNA, 122 bp, Homo sapiens
gttcgtgtggtgtgacatctgcctcggtgtttctgttttccttgcacaacacaggtgattcgacctcccctttcaagcattcctgccgccttgggctggaccccgtgggcggaggcactctt

SEQ ID NO: 294938 - DNA, 122 bp, Homo sapiens
taaacatgcccagcctgggcaagaggcatctgtagaaaggaacccctcaatatcaaacagcgaaaggcattattgggtggtccctgtttaagggctgaagagagtgagtggattcctattga

SEQ ID NO: 294939 - DNA, 122 bp, Homo sapiens
gggaaactctccagatccccccatcctgcaggccctgagaagagcagcccctccctactgcgcagttctccttgggaccctgtatgcaggagagagctgatactccgtgccccgtggcccat

SEQ ID NO: 294940 - DNA, 122 bp, Homo sapiens
ggtgactatggtgtgcagcctcctcctcaatactgtcagtgaactcagtgcttgtatcttcggtgtcatcccctgcagctgcacctggaaacaagtccagaaaagaaaagtgattcccttca

SEQ ID NO: 294941 - DNA, 122 bp, Homo sapiens
ggctaagaagtggaccgtagccctgtctgttcaaaggggttgagccaacaaaaggtctgccgaaacccgggatcgaaccagggacctttagatcttcagtctaacgctctcccaactgagct

SEQ ID NO: 294942 - DNA, 122 bp, Homo sapiens
aggcccaggctgggggtgcatacctgtgttcttcttgccgtgctttggggtagctccccccgcctttcctatctgcactggaacagtgtagacccagacattagaatgcacactgggccatt

SEQ ID NO: 294943 - DNA, 122 bp, Homo sapiens
cttcagccccgccccgcctggggccgcctcctgcccgctcccctcccctaggcgctgggccgctgcggactgcgaggttagcagttaaccacacacaccaataataataacataacgaacaa

SEQ ID NO: 294944 - DNA, 122 bp, Homo sapiens
caattttcttccggccaaatgaccctccctaggctaccaagaccctggcctaaggggagccgaggtctcggcccgactgcagacgcccgcaccctgactccagatgcctccgaggcatccag

SEQ ID NO: 294945 - DNA, 122 bp, Homo sapiens
gtggctcactcccgcaatccctgcactttgggaggccaaggcgggaggatcacttgagcccgagagttcgagaccagcctgggcaacacggtgagaccccataaaaaaaataaaaaaattat

SEQ ID NO: 294946 - DNA, 122 bp, Homo sapiens
aggtggccggcggggccggcgtgggggcgcagggatccccagggtgtggggcagccaggccgaggcgagagacacggtcgggctcagcccatccactgtcagccgggcacatgctggccctc

SEQ ID NO: 294947 - DNA, 122 bp, Homo sapiens
ggggaggtgctctgggaatgcggggaggctggcccggccgcggggaggcgccgtgagaaccgggcccgccgcggggagacgcagtgagaaccgggccggccgcggggaggcgcagtgagaac

SEQ ID NO: 294948 - DNA, 122 bp, Homo sapiens
ttcctcagcttccagattatacgtttgccattacgcctcatcaatatcagccatctcatccgcaaaatcctcgtttctgtgatgacctttccctactttacaggcctgagtatgctgagcgc

SEQ ID NO: 294949 - DNA, 122 bp, Homo sapiens
cagccccgcgtcggggctgtggtcacagtaaagcaaggcgatcttcgcacacagcaagtgcgaggctctgggccctgacgcagggctcccaagctcccggaatcggcgttctggctgcaggc

SEQ ID NO: 294950 - DNA, 122 bp, Homo sapiens
tgcatgtgtctaaaaggtggtaccaggcatccctttcctggcttatggccaagccctacccggccagcagtcgctgggcctctccctgccctgacacttgatgtgacctatgtgcttccctt

SEQ ID NO: 294951 - DNA, 122 bp, Homo sapiens
tgcggactgcgcggtatcttaaattacaaccacttcagtattaatgtaaagttccttatacggtcattttccagctcctgtcttttttttttttttttcagactgggtctcgccctgtcgcc

SEQ ID NO: 294952 - DNA, 122 bp, Homo sapiens
ctccgagtcccactcctcacctaggacgccccaaactgccatgggttagggtggggatcgcgacccgcgcgaaagaccagccctgcgcttccgccgggggacgcggagcccaaacgccgctc

SEQ ID NO: 294953 - DNA, 122 bp, Homo sapiens
actcttgtgtctctactgtttccgggtgcaattacctctgagagccagaactcaaagtcccggatgcttgtgttgaacctctgttgacgactggcctcattgagcttcttccctttgtcatt

SEQ ID NO: 294954 - DNA, 122 bp, Homo sapiens
tggaaggcgagtgaacaccccagcgcgcgtgcgggctgcatcagaggaagccatgtcttccgattcctgctcgcctaggtgggcaggctccaccacctcgcgtggcctagtcggcccgcagc

SEQ ID NO: 294955 - DNA, 122 bp, Homo sapiens
gatggttagccatagggtacaatcaacggtcgatggttttgattttaattccaaactcaccgacagcgttgaatgttcactgaagcaacctcaaaactcagaattctactcactttacagta

SEQ ID NO: 294956 - DNA, 122 bp, Homo sapiens
tctccggcgggcaggggccgggctgcgctgggtgggccagctcgccccgcgcttccccctcgtcctgctcgtccctccgcccacccggggcctgaggggtctccccgctccgagggaagggg

SEQ ID NO: 294957 - DNA, 122 bp, Homo sapiens
gacaggaacgtgagcaaagaaggtctgctggagcagagaaagagaaactgacaagacgaacgagaaaccctggaacaagtctgccggcagccaataaaaggtcagtgccctaaagaggtact

SEQ ID NO: 294958 - DNA, 122 bp, Homo sapiens
cctttaatcagcagatgcacgctgcaaatgacattgagtaagctaggggcttagacagagcgtgggagggtagccacaaaggtgaggtccaaggccagtgaatggagatccaggagaggatc

SEQ ID NO: 294959 - DNA, 122 bp, Homo sapiens
aaaacaatgtttcttgtgccaggtatgtatttatgcacaaactagtttgaaaggcttcagcgtgaatgcccaaattacaattgacctctgttagtctcagcagtagcaccaagaaatggagc

SEQ ID NO: 294960 - DNA, 122 bp, Homo sapiens
acacccagaccacgggttacagaggggtctgtccatggcgggcgcagggcgctttctttgcgtcggagggtgtctggagggaaggagaagcctctggagggagggagaagcctccggaggtc

SEQ ID NO: 294961 - DNA, 122 bp, Homo sapiens
tggcagctggcaaaggcataacagtttgtgtgggcatgaaggcggctggcggaaactgcccggccacagttggccagggctgctgagtggcaggaaagagacccggctggccccatgcgatg

SEQ ID NO: 294962 - DNA, 122 bp, Homo sapiens
cacgctcacgggcagaggcgaggggcgggggtgatagaccccggcggcgaacagacttggcgcaccgaagattcccaaaggcgcgtgctccgctccctctgggtcctggcaggccaggggcg

SEQ ID NO: 294963 - DNA, 122 bp, Homo sapiens
aagcacttggcaaagccgcccttgcccaaaaagcggccccacacatagcgctgccggctgcgcgggtccactaggacctccgggatctctttagccggtaaagcagccgccagagctccggg

SEQ ID NO: 294964 - DNA, 122 bp, Homo sapiens
cactcccccgccgctgctgtggagaaccggagccaccggtatggcctggccctgccctcccgaaggccgcagctcccgggcccgcctccccagctgaccgcgaactcctgcgtggggtgctc

SEQ ID NO: 294965 - DNA, 122 bp, Homo sapiens
gcgctgccttaagagctgtaacactcaccgtgaaggtctgcagcttcactcctgagccagcgagaccaggaacccaccagaaggaaggaactccgaacatatccgaacatcagaaggaacaa

SEQ ID NO: 294966 - DNA, 122 bp, Homo sapiens
gggggctgcgggggacgacggcgcccacgcggcgggggcgtagggtacgcagcgcgtgtgcgcaggtccggtgcctcagtcccaggaaggcgccgcgctcacatagacccacagacacacac

SEQ ID NO: 294967 - DNA, 122 bp, Homo sapiens
cccagcactccgccggaagccggaaaccggaaaccggaagccaccccagggcccgcccctcgcgtggccccgccccaactcttacaaataagcctgcagtctgcgccccctggcggttgcgc

SEQ ID NO: 294968 - DNA, 122 bp, Homo sapiens
accattcctgggattagagctgcctttcccagggaaaaagtgtcgtctccccgaccctcccgtgggccctgtggtgtgatgctgtgtctgtatattctatacaaaggtacttgtcctttccc

SEQ ID NO: 294969 - DNA, 122 bp, Homo sapiens
gaggacggaccagcaggacagaccgaccgggggcccggcgggcggagggcagcgcagccacgtcccccctggatccgccgtcagccgggcccggggctttcgacatgccccccaggtgggtc

SEQ ID NO: 294970 - DNA, 122 bp, Homo sapiens
ctctatctggggccgcagcgtcccccgagtgctgaaaagagttctcctggtgagcggcaccgtgaccttcattcttgaccgcgctgtccggatgagagtggcttgtccagacgagagtggct

SEQ ID NO: 294971 - DNA, 122 bp, Homo sapiens
cagcatgtggcccagcacccgcttttgccttttattccgcactctgatttttggggggatcgtttgttcccgctcattttctacaaacattacggtatcctgttagcattccgaacaagggg

SEQ ID NO: 294972 - DNA, 122 bp, Homo sapiens
cgcccgcgagccggcccgaatccccggggcagcgcccggcgccgtcccgccccagccggccgcaggacccgccttccatagggccccggggctgtcagtccgcccccaaaaggcgcgcgggc

SEQ ID NO: 294973 - DNA, 122 bp, Homo sapiens
caagcatcatatgctcttgcccatccgtagaccagaggtgaggtttgggtcacctagtcccgggtagtgctcacattctgggttcccactggggttggtgtaaggattagaataattactag

SEQ ID NO: 294974 - DNA, 122 bp, Homo sapiens
acccagaaacaatacagatgtccttcaaccagtgaacgaataaacaagtcccagagcagccgtgcctggagcatcactcagcaacgaaaagcagcgctgcgattcacacagccacgcggtga

SEQ ID NO: 294975 - DNA, 122 bp, Homo sapiens
ttcagtttgcccatctgtaaaatggagctgatactaggaccttttaggttttgggagaatcgaaagagataatgcctaacaagctaacatttgcccacagtgtttggtcaatgataagaact

SEQ ID NO: 294976 - DNA, 122 bp, Homo sapiens
ttctgaaaacggttctccgggacgagatcattgcttggcacaaaaaaacacaagaggacacgtcctctcctctctcggccgccgggcagccagagaacatggacagccagcaactggtgtcc

SEQ ID NO: 294977 - DNA, 122 bp, Homo sapiens
tctctccaaggccaggaagacaggctaaatggctccaaatctcaacctccaactgcttgtcggatgtggccacctgaatcccaacagcgcctttggtatctttaaaggtgagccatctccat

SEQ ID NO: 294978 - DNA, 122 bp, Homo sapiens
agtgctgggaaaagctcagcctcggggctggtgttggcccagatgccggaggaggagaggcgcagcgcccacacgccatcctctggccgcagggagaggtctcccttcctcttcacagagtc

SEQ ID NO: 294979 - DNA, 122 bp, Homo sapiens
agctgccctgcagggatcccctggccgctgcctatagaccagcatctccagcagccagaccgtgggctgctgtgccctcggaggtgccagacacagctaatcccagccctgggcggcggcac

SEQ ID NO: 294980 - DNA, 122 bp, Homo sapiens
tctgcttttggagtgtctttctgtgctcctatttttttttcctgtttctctctgtctcttcgtttcctcctggacacgcacgttcctggctcgggcccgggggccccatcgccgcccgagac

SEQ ID NO: 294981 - DNA, 122 bp, Homo sapiens
acctcaggtgatccatccacctcggccacccaaagtgctgggagtacagatgttagccaccgtacccagtgagagtttcagtgctctatcggattccctgcctactccatgttgcatgtaat

SEQ ID NO: 294982 - DNA, 122 bp, Homo sapiens
gaagcattttatttatgattttttttagtggttacgtagttttgggtattacatttaagtcgttaattcattttgagttgatttttgtatattatgttgttttggttagtatggctctgtag

SEQ ID NO: 294983 - DNA, 122 bp, Homo sapiens
cacagtttggttgcgcagtagaaagcaaaggaggggcagacgctcacattcgtggttacccgggaagggttaagtctttgttgtagagttttctctgtaaacttttccacttctccagctca

SEQ ID NO: 294984 - DNA, 122 bp, Homo sapiens
aagagcaaccctgggaggccgggggcagcgccaggggcaggcggctcccccttgagccttcgtctgacatgggccgtttgtgaagaagggaagaatgtgttagagggagaaggtggtcaccg

SEQ ID NO: 294985 - DNA, 122 bp, Homo sapiens
tgggtgtggtggcacatgcctgcaatcccagctactcagatggctgaggcgtgagaatctcgattcttgtgaattgcttaaacctagaaggcagaggttgcagtgagccgagatcatgccac

SEQ ID NO: 294986 - DNA, 122 bp, Homo sapiens
ggcaaaatgagagtctgattcccaggcatgtgcagcgcccattgggacataacggcagtgcggcgcgagccagaggaatgggctggaaccggatctgtttccagacgcagaatgagtggctc

SEQ ID NO: 294987 - DNA, 122 bp, Homo sapiens
gtggggctcaatctgcagtagattcccagaagcctcagtgagtttctgattctctaactgcgcatgcttctgcgcacgcgcaatagacattccaggacttccgggcacttcgtaaggtttaa

SEQ ID NO: 294988 - DNA, 122 bp, Homo sapiens
gctccaaaccccgctgggcgtgatgctctgtggtatgcctgcacttttctttcttcagtacgtacttattcccgtcgcaatgaatctccacactttgttctgctcatccatgaattccttct

SEQ ID NO: 294989 - DNA, 122 bp, Homo sapiens
gagtgtccatgttacctgcctgcccagcctggccggggctgggttgagggtttacactgccgggttggagataaggtcaagatgattaaacacaccgtccatttgtcctgggcctgagtctt

SEQ ID NO: 294990 - DNA, 122 bp, Homo sapiens
tcagtaactctgaactgttttgtttgccagctcaggttttaatccgtttcagcatcgggccgtgagcagtggccgcggggctagcaggagagccagaataagcagatttggcttctaatctg

SEQ ID NO: 294991 - DNA, 122 bp, Homo sapiens
aagctggagggggggtgtgctggaaggagtgggaggagagcggggaagggggtgggggaacgtgggggaagcgagtacaccattttaaatcaacactgcgaaaatgcaatctagcctggcgg

SEQ ID NO: 294992 - DNA, 122 bp, Homo sapiens
cgcacgcccgcaagaggcggcgaggtgacaagtttggagtgcgcccccttcagtactgcgcgttctaagacttttggcggagactttcttggcaaaacccattccccaaagctacgcttccc

SEQ ID NO: 294993 - DNA, 122 bp, Homo sapiens
tccctccaccccaccctttggggaaactgctttctagtaagcacaagcactactcattgccgccagaacacatgagagcctccattgtccctgggatggataccttgagagctgttcccctt

SEQ ID NO: 294994 - DNA, 122 bp, Homo sapiens
atttgggtcatttttatttttatatttttaggattacaggcgtgagccatcgtgcctggccgatttgggggtaattaacaagtccacgtgtttcatttgaatttaggatagctgggcctaat

SEQ ID NO: 294995 - DNA, 122 bp, Homo sapiens
aggtgaaataaacagccttactgctcacacaaaacctgtttggtggactctttacatggacgcacatgacatgaactactgattagaactggtggaaaaagttgtttattgcaactgcgagg

SEQ ID NO: 294996 - DNA, 122 bp, Homo sapiens
gaagcccatcccgcgtcatacactcaatgtaaacaaaagcaaagaaaacattgaagagctcggggtagtcttaccggaaaactgagaagaaaaacaacaaattgatagacaggtgcctgcct

SEQ ID NO: 294997 - DNA, 122 bp, Homo sapiens
tcacttcatttcgttcaatttcgttcaatttcattccttttcatccagcgccgggaggcccgaggccacaaggaaggggagggggtctttccgggcgaatttccctcatcttgtagatttac

SEQ ID NO: 294998 - DNA, 122 bp, Homo sapiens
cttttccttctacacaaacaccacttgagtgaggcccgggttctgcaaagggaaagtagtcgtcactttctaggccccaccatgagccggggctcaaatcccatcctggcctgctgggcatt

SEQ ID NO: 294999 - DNA, 122 bp, Homo sapiens
tggaggagtaaccccacttttaggaatccttttccgtgcgaaaggctgtttgagatcaggcgcaacaacttctcccgctcaggttaccctcagaaaggctatggaccccggactccgcccca

SEQ ID NO: 295000 - DNA, 122 bp, Homo sapiens
accccaccacttccgcgaggggcaggggcggggtcacaaaacgggccctcggcctaggggcggagtttctcgtaaggggcaaggccaaggcatcttgtattggggctgacaggggggcgggt

SEQ ID NO: 295001 - DNA, 122 bp, Homo sapiens
gtctctattgccctcttggcagctcctgggatacaagagggtgcaggacagacttcaacccgcagcaggatccagcgcggaaagctctgcagcaggatccagcgcggaaagccccccgcagc

SEQ ID NO: 295002 - DNA, 122 bp, Homo sapiens
gaagaagttcatatttttgagctggcttctctagtgcagctgaagacgagccatctactgcgagcaaagagaggcgaggtggggctggggacttggggagggtggagttggtttggagctcc

SEQ ID NO: 295003 - DNA, 122 bp, Homo sapiens
taatctttggctccccttatttttggtcagccgctgtccctcggtctctctctgcctttgcgtcctctgtgactcagggctctgatgtgagtctctggctcagggtctctgttccgggcccc

SEQ ID NO: 295004 - DNA, 122 bp, Homo sapiens
tggctgacagtgcggagggcagggggacccccaaggaccgaccagcagaggcggacagtgcgctgtctgcgggacacggtgctgctgctgcacggcctatcgcagaaggacaagctcttcat

SEQ ID NO: 295005 - DNA, 122 bp, Homo sapiens
atctctgtgttttaatagataaaacgccttctctccccacccgtggggtgcaaagcacagcgcatggggctggtggcgcccgagagcatcacacaacgcatgcgccagtccgcaggtgtggg

SEQ ID NO: 295006 - DNA, 122 bp, Homo sapiens
ggtccggctgctgtcccccggcatcccattgtgtgacaaacgactgttgcccctgtggcacgtggcccccattgtcccagggtctcagtgcaattgtttctgcagccccccggctgccaccc

SEQ ID NO: 295007 - DNA, 122 bp, Homo sapiens
gccatacctgctattttcagagagctagagaaacatcctattggaaaacacactagtatgcgcatttagtggcaattcagtgtcaacatgcagaataatgaagcagttgaaatcatttcaag

SEQ ID NO: 295008 - DNA, 122 bp, Homo sapiens
cacctccacagctggcttcacacccgcggagatggaaacccgtgcacgaggctgagagcacgagcatccaacaggctggggtttgaatccctgcgcagctgcctgcacgaaggcgtgggcct

SEQ ID NO: 295009 - DNA, 122 bp, Homo sapiens
aaacacagcaagggccccactagctgaaaccaagttgcagagttttgagggtcccaccgccgaccgccggcccgccgcgagccctgccccctgcgcggccacgcccccttgctccccgcggc

SEQ ID NO: 295010 - DNA, 122 bp, Homo sapiens
ctccgctgctggtggtggagttggcatctcagttcgcaggcgggagctggggatcgttcacgtgttactctgagatggggccttcaccctgcacaaatgctgtcactcacgtgtctcccccc

SEQ ID NO: 295011 - DNA, 122 bp, Homo sapiens
gttacatctggctccggagctcagagccgagaagcctctggctgcagaacctcggccgcacgcctcctctgagaggggctgggacttagagccgagagctcctctgggagccccactccggc

SEQ ID NO: 295012 - DNA, 122 bp, Homo sapiens
ctacacagagcactctggctgactgagcaggtgtctcagggaataaaggggagaggttgtcgcatccttcacaaaaaggaaatgtgagggtgaatgtcagagtcacaccaaaccccagaaag

SEQ ID NO: 295013 - DNA, 122 bp, Homo sapiens
gagcttatcaccctggcaacagcaacacattgactggaaacctaggagagtcctccacaccggaaagagtttgtatgtagatccagggttatttgtttgtttgcacttaaaataaaaccttt

SEQ ID NO: 295014 - DNA, 122 bp, Homo sapiens
aggatgcgttggatgctgggccatacccttggcgatgcacactggagacccgctcggatacggactccattaacatcaaacggagcgtgttagaggatccgagtttactgagcactttctag

SEQ ID NO: 295015 - DNA, 122 bp, Homo sapiens
aatggctgaattccggcttttaattaaaaacagcctataatcgaaaacgtctcggcgtcccgggctcccccgccgcctgctgggaaccgagagaggaaccgccgcccctcggccgggccagg

SEQ ID NO: 295016 - DNA, 122 bp, Homo sapiens
gcaggcccctctgctttggttccaggacccacagaaacctgctccaccttgggagaagcccgggtgggagatcagacatggtgctgaggccgcggggcaacttctctgacgatggctatttc

SEQ ID NO: 295017 - DNA, 122 bp, Homo sapiens
cccacagagccttgcagattgtggctggatatcagtaagccaagtacctttcattagacccgctcaaggttgtgctacttctagaagggtgttttcatcatcttctagcccattggtaggtc

SEQ ID NO: 295018 - DNA, 122 bp, Homo sapiens
ggagggggaaggggcgtgcccttcattgcgggggcgagggcggactgccccgggagaccgcgacccaacgctgcccgcccgagccgtgccgcggtcccctccagcccaaagcctccccgccc

SEQ ID NO: 295019 - DNA, 122 bp, Homo sapiens
ccaaattcacagagttaagtcctagcccccagttcctcaggatgcggcagtgtttggagacgggggctttacagaggtggttatgttgaatgaagccttcgggggggccctgtctggtctgc

SEQ ID NO: 295020 - DNA, 122 bp, Homo sapiens
aaggcgctctcaacgggaatgtctgagatagcgaactgcggctgcagagcaccagctgaacgcacacacacaagtgtcttctcacggtatgattagtgttcacaggtttcgtctagctcatc

SEQ ID NO: 295021 - DNA, 122 bp, Homo sapiens
tgtctgtcctcaccactcactccctctgtgtccctgtggagggagataaaacccagcctccggtgccagggggacagctgagcagtggggccagctcccgcccacccccaggagactggtga

SEQ ID NO: 295022 - DNA, 122 bp, Homo sapiens
cccatcctgaatgtcttcatcgggcatcctgggtcctttgcagccgcggcatgaacttcccgtgcccatcccccatcaaccccacacccattctctgcactcccactaccgggctgaccctg

SEQ ID NO: 295023 - DNA, 122 bp, Homo sapiens
cgccgcccgccgccccgcgctcgcctccagccgcctggggttccgcggcggccgtcagcgcgcacctcatcaataaggcctgccaggcgccggccccgcggccatccatcacccgggctgca

SEQ ID NO: 295024 - DNA, 122 bp, Homo sapiens
atcagccaaccaacagggcatggacccaggcaggtctgacctcaagcccactgcatatggcgccttcactgtctggccacggttgtcccagggatatcacaaaccacaacaggaaggagctt

SEQ ID NO: 295025 - DNA, 122 bp, Homo sapiens
gagctatgtagatttttccgacttttacatgtggtaaagaaggtagtgccagcgcacgctcgtacaggatagaagtgtttttgtttagggcagggacagacacatccagctgccttagaatg

SEQ ID NO: 295026 - DNA, 122 bp, Homo sapiens
cttttttttttttttttttccctttccccgcaccgtcacctggtggcgcttactggaagccgcaccgaggcgtgtgctgtattttaaaaatcccatttctggtcaatttctccacgtaatca

SEQ ID NO: 295027 - DNA, 122 bp, Homo sapiens
ccatccagggagggtgggtgaggtggaagacaagggatcgggcctgcgccacgatcgtcacgtcccatcgaagctggagcggatccgggcacccggagcccccattccaacccctcccggcc

SEQ ID NO: 295028 - DNA, 122 bp, Homo sapiens
agaggggactgtgagattaagaaccaggggtcactcactctgttgtcctctctagttcgtcggtaggatgagattcaagggcttccagcctgagggggagaagaggatctatctgtccattt

SEQ ID NO: 295029 - DNA, 122 bp, Homo sapiens
atatattaaccattcgtgggagggcaggggcaaggcctggggtgggatcagaggatctggcgtggcatcccgtagccagtcatgcctgcctgagacgccccgcggttggtgcccatctgtaa

SEQ ID NO: 295030 - DNA, 122 bp, Homo sapiens
acctctgcagctgccctttgaagcatttctccagagtggtgactgtcattagctgtgctgcggcttggctgttctccctgccaactgtggttgtgtctgccctcactttccataggacgtgc

SEQ ID NO: 295031 - DNA, 122 bp, Homo sapiens
ccccgccgccggggttgccatggttcatttcttgcacccgggccacacgccccggaacatcgtccctcctgacgctcagaaggatgccctgggctgctgcgtggtacaggtgagcaccgggg

SEQ ID NO: 295032 - DNA, 122 bp, Homo sapiens
ccagaaacagaaaatacagacaattcttttgattttacttctttcatttcatgatgaactcgtactgagtagccaggataccacaggtactcagattctagtattaatagcattagcatttt

SEQ ID NO: 295033 - DNA, 122 bp, Homo sapiens
ggcatgagccaacacgcctggcccctttttttctcaatttaaaatttttttagggccgagcgtggtggctcacacctgtaatcccagaactttgggagaccaagttgggtggataacctgag

SEQ ID NO: 295034 - DNA, 122 bp, Homo sapiens
gcaggtctgtggcggcgcgccgggacgcgcgggcgagggtctaccgagagggcgggcgggcgccggcggaaccctcggctacagccccgagcccctggggccgcccctccccgccgcgtggc

SEQ ID NO: 295035 - DNA, 122 bp, Homo sapiens
taaaaggataaattaggccacaataccagcattcctccactactgtattcaatccatggtcgaatctctgtactttagaaatactgcttccagtataaacctcctctttgagaaacttacaa

SEQ ID NO: 295036 - DNA, 122 bp, Homo sapiens
tgtggaccccgatgacatggcactttgtttctgaccagtcaggacacacaagaggcccggcgcaaacacaacaaagcccgcagacattctgtccccacgaagaacggacgccactcgacttc

SEQ ID NO: 295037 - DNA, 122 bp, Homo sapiens
cctctccatgcagtgctccctcaatctctctctgttctttctctttctctctctttctcacgcgtgcgcgcgtctgcacacacacacacacacacacacactctctcactcaccaaccttat

SEQ ID NO: 295038 - DNA, 122 bp, Homo sapiens
aataaacaagaagcctgcttttcttagtgttgcgctagctctcttccgaggcggaatctacgcattcccacagacgtgtctcctttgccagattcgctcagttcgaatggtgggaagaatgg

SEQ ID NO: 295039 - DNA, 122 bp, Homo sapiens
agccatctaggcgctgctgggttgttccgggcagggcattcttgtcctgagtgtgggggacgggagggtgacggagccgggatggggaaaggggtgcggggtgggggtgaagggaacgggga

SEQ ID NO: 295040 - DNA, 122 bp, Homo sapiens
agaagggcgcggcggtgccaggaagccgccttggaggctccaagattagctcactcagcgcggccaagcgcaggtgcgggggccctcgccgccaccctgcttatctggggacagtcccggaa

SEQ ID NO: 295041 - DNA, 122 bp, Homo sapiens
tttaagcatgcagctgcgtgaaactcacagggcagacttagcaagcttatagaagcagaacgaaggcaattaatcaaacagtgacaagtgtatgactcaaacctgcctggtgacctctgctg

SEQ ID NO: 295042 - DNA, 122 bp, Homo sapiens
ggggtgtgcgaatcttagctctccaaaagctgggacccccttcgattatccatgctgccccgagaaactcctaggctaatagtctgagggaggagataaagccctttcttctcccgggaaag

SEQ ID NO: 295043 - DNA, 122 bp, Homo sapiens
ctggcttgtgggaagggctcaatgcacggcagctgagtacgtaaaaaacaggtgaattcccgtattccaaagtagcttcagtggctccctgctttgtagtttgtcatgcaaactcttccacg

SEQ ID NO: 295044 - DNA, 122 bp, Homo sapiens
tataacacaaactcagttaccaccccgtatgtctgggataggcactgaaatacagcacatcgtccctgtgagtgctaccccatcctcctgctcaggaaaggaagtgggcagctgtatcaacc

SEQ ID NO: 295045 - DNA, 122 bp, Homo sapiens
agcccacgcccagcttacaggtgggagaacgacccccagaggtgagcagttgcctggtgacgtctcagcccatgctccccccgcccaccgacaccgtgggaccctcagtggccttgtgagcg

SEQ ID NO: 295046 - DNA, 122 bp, Homo sapiens
aagccatgggaaatctagcaacaggaattgtgtgtgagtcaatgcttggactattagaagcggaagatatgtgcagaaataaaaaaaactcaccttgtagcaaattaagagcattgattgga

SEQ ID NO: 295047 - DNA, 122 bp, Homo sapiens
ctcagcttcccatcattgccacagacccgacatgtaaggaccaggggggcctagcttgggcggtggctgaaggaatacaagtcagaaaatgaggaagactttgtggctaggaagaaagacct

SEQ ID NO: 295048 - DNA, 122 bp, Homo sapiens
atcgctctgcagagaagacaacgacatggacgccatcggccacggccccccatcaatctgcggagaagacaacagccacccatcactcttcagagaagataacggcatggacgccatcagcc

SEQ ID NO: 295049 - DNA, 122 bp, Homo sapiens
gccccagcttggcgtcctgagaaatggtgagtaacggtcccaaccgctgctcggagctggcggaattcatttcccccgaaacacacgccacctccgaccagggccgactccaattctgaact

SEQ ID NO: 295050 - DNA, 122 bp, Homo sapiens
atctacgctgagcccactgcatctgcgcggctctgaattggggttcctgttcagttaccacggacccagggatgactgaagctgagctccttcctgaggaagacccatatgggctccgtctc

SEQ ID NO: 295051 - DNA, 122 bp, Homo sapiens
gctttagtgaccatgactgcttgagcccaaagtaagatggctggtggctgtgtttctggacggggatataaaatgcataggttaatgaaagttgttcacaattcagaagctaaaacgagaaa

SEQ ID NO: 295052 - DNA, 122 bp, Homo sapiens
tatgcagcccccagtgagcctgaacagcgggagactgagcttgcagcagaaccatgattacggctctggacggggctcacccatggcgggaggaggcggtcccagggttcgcccttggaaag

SEQ ID NO: 295053 - DNA, 122 bp, Homo sapiens
ttctttgactcggaaagggaactccctgaccccttgcgcttcccaggtgaggcaatgcctcgccctgcttcggctcgcgcacggtgcacacacactggcctgcgcccactgtctggcactcc

SEQ ID NO: 295054 - DNA, 122 bp, Homo sapiens
tcagcccggcccttttcgtccggcgtggagagttccagcctttacggttgtccagggccgcggaggtagccagggcagcatcctgttccagcacatctcagcctccctgggacaggggtcgc

SEQ ID NO: 295055 - DNA, 122 bp, Homo sapiens
ggtggggtggtccattagggtcccctggcgagggggcggctttctagtgtgtgagggcgacgccctagaagctccccttcaaagttggccccacgcgctgaatgtggaaagttgactgggac

SEQ ID NO: 295056 - DNA, 122 bp, Homo sapiens
ttctgccaatagaattcaatctcaggcccccgagttaccaggacactgtcttctataaatcggggctctggggtttcttgttcccaggcaacccagggccaccaaggcctaagcttgcttgt

SEQ ID NO: 295057 - DNA, 122 bp, Homo sapiens
cgagtaagggagtctgactggagatgcaggtggcagcggagatggccggaatagagcactcgtttggaggaaaagcggacaggtcgacaggatggatgtgatgggggccccgaaggagagga

SEQ ID NO: 295058 - DNA, 122 bp, Homo sapiens
atgtcggcgcctttgtccacgggtgtgcgccgacttgtgtcctggggcgggggatgggtccgtgagcggacgctgccgcgtgggggaaggggcgggtgcgagggcagcccagagcgtgctgg

SEQ ID NO: 295059 - DNA, 122 bp, Homo sapiens
ccaggagtgtagcgtaggtcgtgaccaggagtgtagcgtaggtcctgaccaggagtgtagcgtaggtcgtgaccaggagtgtagcgtaggtcgtgaccaggagtgtagcgtaggtcgtgacc

SEQ ID NO: 295060 - DNA, 122 bp, Homo sapiens
ggaatacaagcacccgtgtcgctcaggggtcctcgggcgcgaagctctccaggaaggaaacgcacatttcacacgttagcctggcgggacctacagccggcgctgtaaggcggcagctccgt

SEQ ID NO: 295061 - DNA, 122 bp, Homo sapiens
gactaagtcgcagggcaagggcaactgcatagtcggggacctctagggaatcctgagtcccggcattctgggctggggtggagcccactacagccccgcccctatctcctcctttatggccc

SEQ ID NO: 295062 - DNA, 122 bp, Homo sapiens
aaatgatgttgacaagacacattttaactgctttggcattgaaacacctggtcacaccagcgatgtgcgattagttacaagccctcctggctttccctgacttcactatctttaagtattta

SEQ ID NO: 295063 - DNA, 122 bp, Homo sapiens
ttgctggcctccctctcagccccaggaccgtgggcaacttgagtgtgtccatctggtacacgcagatggctcatagatccccagaagagcagggccctcaccctcactgaatacactggctc

SEQ ID NO: 295064 - DNA, 122 bp, Homo sapiens
tgggtatgggtttcatgtgtcttagtccccgagagcagcacccttgagagagatgtacggcgtgtgccagttttggggccagatccaccccgccactccatacggctggctagacagcagtt

SEQ ID NO: 295065 - DNA, 122 bp, Homo sapiens
gttctgcgccttctgccagcaatccggcccctaccgagggccgaagacgccagggaaaagcgtcatgatttgggctcgtaaaatgccacatgccttggggcctgtttctcttcccattcctt

SEQ ID NO: 295066 - DNA, 122 bp, Homo sapiens
ctagggaacatcttgatggctataattactgtcatgttatgggaacttaaaaaaaaaaggcgccagagttccaaataaaacataaaatggctttgatataataaatgttactatcattgttt

SEQ ID NO: 295067 - DNA, 122 bp, Homo sapiens
gaggaaccctgaaaacggatccgctgtttggtacagttctggctggactgttcccttcagcgagaaatgccccaactctggagagcaggtgactgcacagcccctaccaggccctctccacc

SEQ ID NO: 295068 - DNA, 122 bp, Homo sapiens
gactcggacccgaggtgcggtctgcgctgccattcacgggcaaaggagggcctgtctctgcgaaggcagcgtgtagaccctcgtccacccgcaaagcagcacatggagacgcttccacggtg

SEQ ID NO: 295069 - DNA, 122 bp, Homo sapiens
cgagctcctgggctcaaggaatcctcccgcattggcctcctgaagttcggggattataggcgtgagccacggcgcccggccatgaacccctaactcttcaatacaacaaggccctgggtgag

SEQ ID NO: 295070 - DNA, 122 bp, Homo sapiens
gggcgaagccggctccgggaggcctcgtctcccttccctgcggcgctggcccgcgccccccggtctaatcgcgcgccccgctcccggccccccagatgcccgcacgccccccgcgcccgggg

SEQ ID NO: 295071 - DNA, 122 bp, Homo sapiens
cagccaacatagaaaagcagcggagttcattctgctgtccggttgctgcacgggctccagcgcttcgcaactttggtttttttccacagatccagtggggtccggacactgggccccgcagg

SEQ ID NO: 295072 - DNA, 122 bp, Homo sapiens
caaaaggcaggtgggtagaaagaacagcagaggaggtggagggtggcgtcagtgccttgacggaatatgggcctgcgccttagttgcacgtgagatgatcctggagacagtgccgggtcatg

SEQ ID NO: 295073 - DNA, 122 bp, Homo sapiens
caagatgaagggaagggggcgaaacctcggctggatgtcatcctaccaaaggcgtggcggcgtccttcctccctggccctcagcccttcccggagctccggggccagcaggggcatccagca

SEQ ID NO: 295074 - DNA, 122 bp, Homo sapiens
ccccgacagcttccagctgagtcctccagcaacatggccaagttgatcactccaaggcaccgacttcccagagcccctcctcttcccagctgaaggccacagatgcctaagcaaccggcctc

SEQ ID NO: 295075 - DNA, 122 bp, Homo sapiens
tttccctgaacacagacaccctcatgcgtgctgacaggtttataaggatgcggtggcagccgcgggttctgggagctgctagacggccgagtttgatttcttgcagtcctgagcgatggagc

SEQ ID NO: 295076 - DNA, 122 bp, Homo sapiens
aacaaggtcccaggctgaaccactgattaacaacattaaaatgattctttttactgacttcgggataaaactacacacctgcaaattccttactacctttaattatgaactttgagccaatg

SEQ ID NO: 295077 - DNA, 122 bp, Homo sapiens
ctaggtcattaattaaaccctgtgtacaggcatgcacacgatatcatcatacatagcatacggagccataaacactatgtggaaccagcaactataaattatgagtgtataattcccttgag

SEQ ID NO: 295078 - DNA, 122 bp, Homo sapiens
cactctctaatctttccacgaaatagctgtcaccttgctccggtgctgaagttcgggatgcggaactagctgagcatgcgtacttcctccctgccggccctccctccgtcccgttggctccg

SEQ ID NO: 295079 - DNA, 122 bp, Homo sapiens
cgcgcgagacgtggcagcgccggaaccctgggtccggggctgggtcctggagtccctgagcggcctggtacactcgggatcgcggcttcccattccagacgcaccaggaaagtcagaagtgg

SEQ ID NO: 295080 - DNA, 122 bp, Homo sapiens
caggaagggtccaacgcaaaggagagctctttgctgtgtgccaggcagcagcctccagagcgaggcccgccatctccagcaggatgtgcggcctccaagggaggcccccgtacgcagcagga

SEQ ID NO: 295081 - DNA, 122 bp, Homo sapiens
atcgccgccgccttcgtctactgcgttcggacggagtaacgtgcccgttagcggagggggcgggcacagaaggccgccatgttgagcgagggcaccgatgccgcaacctgacaggcaatgac

SEQ ID NO: 295082 - DNA, 122 bp, Homo sapiens
catcaacttccagccatttcccatgaaggccatgaagatctccagccacagcagcaggaacgcatggccaacagaaaccaatgccatctgtcagtgcttcactgaggctttagattgagaac

SEQ ID NO: 295083 - DNA, 122 bp, Homo sapiens
agttaggacacggccgttgatcactacagacccttagtcactgtactcacaccaaaggcacgcggaccacagacagggggatcacagactcccaccaggtacctcccaaatgcctatacccc

SEQ ID NO: 295084 - DNA, 122 bp, Homo sapiens
caggtagtaattcctccttttctcttgccaatgcaaagaaatgtttcattatatgtttggcgttttatacggcctcaatggtatgatttggggcactgattgattgaagacttgatactgag

SEQ ID NO: 295085 - DNA, 122 bp, Homo sapiens
aaggtgagtataatctcagtccatgagggtgtaaagtgaaatgagctggctggctggagacggacagggtgccagagactactagccagtcagggtcacagctgtattggtcgattgctggg

SEQ ID NO: 295086 - DNA, 122 bp, Homo sapiens
gttccaaatgcatagcctggagcatagcaaaatatgtaattaaagacccgcgcctgatgtcggggagcctcgatgtgcgcatgcgtcccaggctgaggccgccggaagaggtcaggcggttc

SEQ ID NO: 295087 - DNA, 122 bp, Homo sapiens
ggaagttgaggctgcagtgagcagttcctgtgccactgcactccagcttggactatagagcgagaccatatatgtatgtatatacatatagttctatatcagaacaagagtccagtgaagtg

SEQ ID NO: 295088 - DNA, 122 bp, Homo sapiens
agttgtgcaactgagccagaggaggtgtaaccagggtcccactagaactcagaataggggcgtggccttaatgatccaagctcattggtcgatgagaatgatgaatgcgaaaggaggtgtgg

SEQ ID NO: 295089 - DNA, 122 bp, Homo sapiens
ggcaggagaacctgcaggagatcctcagcaagcagctgcttctgtgtcagttcctcatggcgctgtccattgtccggacaggtgacacttcctcagctgtctcctcaccccaggacccactt

SEQ ID NO: 295090 - DNA, 122 bp, Homo sapiens
caaatcttttcagactgttttgtgaattaatagctagtcagcttacttaagaccaacatccgtttgtcatagtaccttctctggccttctttgaaattctgactttgtactgatagactcct

SEQ ID NO: 295091 - DNA, 122 bp, Homo sapiens
tctgtgctcccagccctacccactgctcggtcaaaccttcacatcgccttctctcctgcgcgcagctggcggcttctatcttctgacccaccccagcgtgcctaccggctttcctcacacct

SEQ ID NO: 295092 - DNA, 122 bp, Homo sapiens
ctggtaactgtctgagggtgacatttgcagagtgaaggctgccgagactaaggagagagtcggcagaattgagctggaacaaccctccaaccctcgccgtggccctccccgctgtgtacttc

SEQ ID NO: 295093 - DNA, 122 bp, Homo sapiens
gggaaaggaggctgttgtgtaaactggtggaggcgcgcctggcccctgggcccggcaacccgaagagacacgcctgagacctcctgtgttagaaaatctgcactcaggactttgaagaagtc

SEQ ID NO: 295094 - DNA, 122 bp, Homo sapiens
ttttccgcggcttgtagtcgaggaggagcccacgaggctttagctgctgcaagatccaagcgcgctcccgcccagcggtggccccgggctcagggaaccagcgctgcttctctccgaggctc

SEQ ID NO: 295095 - DNA, 122 bp, Homo sapiens
ccaccacgcccggccaagacctttctcttctaaagtgactggtgatttgctgaccagaggcgcttgtcatgggaccagggagggaatgcatcattcatcagggtccattcccgtggtgcctt

SEQ ID NO: 295096 - DNA, 122 bp, Homo sapiens
acgactagagcgcatgtcctgtctcatctgcgaaaatattccatagacacgttgtcacttcgcaataaatctatggttgcaactcaggcttaaaatgcaaatgcttttattaaaagttgtcg

SEQ ID NO: 295097 - DNA, 122 bp, Homo sapiens
gtgtccacaccacggggcggtgagcctgcgggtcctccagggccggtctctccctcctcacgtggctccctgagaagctcgtttgagcattatgtccccttgaaaatcagactgtaaagaac

SEQ ID NO: 295098 - DNA, 122 bp, Homo sapiens
tcctgaagcagcaacctctcgaagtggggaagcaacacgagaacatcttgctctcttgagcgactcccaccaagtgagctgtttacggcgctgactctaggatatgggtgcctggttaccag

SEQ ID NO: 295099 - DNA, 122 bp, Homo sapiens
ccttaaagattatagatctcagctacaccgggacactagcctcttgtagagacgctctagcgcctccttctgtcttctgggttgtacacagttccctcttgtgttttttctttcaggtgcga

SEQ ID NO: 295100 - DNA, 122 bp, Homo sapiens
gcaaaggaggcctggggaccctgcgagcggggccgggggtgcagggagctgtcagctcctcgcagcggcctccccaggacccccctatcccctcgctcgccctgaaatgtgtgtccctctcg

SEQ ID NO: 295101 - DNA, 122 bp, Homo sapiens
cactacggtacatatggaagggtcaaagtttctaatacgaccgtcagggtaaagtctaaacggtatttatgacaaggtgtgtgctaaaatcagctcacttgcagcaatggcttggattagat

SEQ ID NO: 295102 - DNA, 122 bp, Homo sapiens
acctcaagtgatccacccgcctcaacctcccaaagtgctgggattacaggcgtgagccaccgcgcccggccaggattcttttaatcaagtatgatgcagccatcagggttggagcattctag

SEQ ID NO: 295103 - DNA, 122 bp, Homo sapiens
gtctcttgcctgggccctgtggacactggaaccaggtccttctctggggtggggccatcccgggcactgcaggctgatgctgagcagcgtccctggcctccacccactccatgccaggagca

SEQ ID NO: 295104 - DNA, 122 bp, Homo sapiens
aaacaccctatttctctccggattgctaagcgtcgttgactgtgcggttgccgtggaaaccgttactaggcaacgaggaagtggcaggcagcaccgcaaactaggtctcccctcttccctct

SEQ ID NO: 295105 - DNA, 122 bp, Homo sapiens
cggtcggcggcgcggggttggggatggcgccgctcgggcttgccttcggctgtggcttggcggtagctttccagccaggagccgggtccgcgctgccaagtgaagctggggaggggggcggg

SEQ ID NO: 295106 - DNA, 122 bp, Homo sapiens
gtgggaagtggctgtggcgggactcaggcctcccggcagtcagctgcacaatctgcgccccgagttcttgcccagctgggcctcagtccccatcagccttaagatggcggctgcgctgacag

SEQ ID NO: 295107 - DNA, 122 bp, Homo sapiens
ttagagcttggaagttccaagaaagacacagattcgtcccccgctaagccagcacttttacgggatcgctgtggggccggatggcttctagacttccgggtgattccgggagatgggggacg

SEQ ID NO: 295108 - DNA, 122 bp, Homo sapiens
agtgaacactattacctacatgcactgtgctaagcagctttcatatattcatttacttatcgattcagcaaatatttcctgaatacctactatgtgccaggcactagggatacactggtaaa

SEQ ID NO: 295109 - DNA, 122 bp, Homo sapiens
gataatacgtttatttattcacacttgaattgcatttgtgatcaaaataaatgtttaaatcgctaaaggaaaatacagtaagtgcttgaaagatgaaggaccaaaaggccaaaaaacagtga

SEQ ID NO: 295110 - DNA, 122 bp, Homo sapiens
ccaggacaagggcgccctgaagctggctgaggtgggtgtgccgatcaggtggggcaggggcgtgggcgggccgagggagccgaccctgactacccaggcgtccgaccgctgagcgcccgcct

SEQ ID NO: 295111 - DNA, 122 bp, Homo sapiens
gacaggagccagggaaaccacagcggagggctggaggctggggtgctggttttgctggctcggcctggttcccagaatgcaaagcccatttttcttttttttgcaacctccacctcctgggt

SEQ ID NO: 295112 - DNA, 122 bp, Homo sapiens
ctcctattttacccaatctcagcttcctgctctcacggccaacactggaggccacatatgcgaattgtctcataagcatatttcatgatttccaagcacttagtcttggaggtgtccctact

SEQ ID NO: 295113 - DNA, 122 bp, Homo sapiens
gctccctccctccgtctctcgccctcgccctgcctgcctgcctctctccgtctccgccgccgccgccgctgcctctgcgagctcgccttaccttcgccgctcaccatccggaaccccagggg

SEQ ID NO: 295114 - DNA, 122 bp, Homo sapiens
atgtaccagtggtggaagatcctgtccggctgcaccgaggctcacatcagaagccggcttcggtttcaccacaaaataaggcatctagtgcccgattctgcctccaaagcagccctgggtca

SEQ ID NO: 295115 - DNA, 122 bp, Homo sapiens
cccccaaatgcaaggctgttgtggggggaggggctcaggaatcaaagctgactccaggctcgattcatcgccttcgtttgcatacggcgatgctgacagctctccaactctcccctaggatg

SEQ ID NO: 295116 - DNA, 122 bp, Homo sapiens
tttctccgcaggaaaatccaccgccctttcccaaccacccgcgtgggtggctcggaaatccgccaccctggggacacagctccctgcccatctctgtggcccgcttgtgccccgtgccgctg

SEQ ID NO: 295117 - DNA, 122 bp, Homo sapiens
acctcaagtgatccacccacctgggcctcccaaaatgctgggattacccgcatgagccaccgcttccggccaaattctacttttaaataaggtaaatgtgggctgtgttttagaccttatta

SEQ ID NO: 295118 - DNA, 122 bp, Homo sapiens
atgaggaggctcaggacccctctgctctgataaattcctagtcttgggctgcctgggactcgcacatcaccaacccggcagctggaagaacaagcacacgaggaaataaaaggtgcctgaag

SEQ ID NO: 295119 - DNA, 122 bp, Homo sapiens
gatgttctcattaattcctcaggcagcagtgtttgcagttgggagacatgacttccatcccgctccttataaagtcatatgtttttcttgaataaatgctaaatcaaactagtctttctgtt

SEQ ID NO: 295120 - DNA, 122 bp, Homo sapiens
ccggcccgccgaccccgagatttccagggagaggatggcaaagtggggtgccaggctgctcggtccttctgctgggctcccccgccctagctgaagcccggagcctccaccgcataggcgtc

SEQ ID NO: 295121 - DNA, 122 bp, Homo sapiens
tcattgcagtctcatctgaaatcacatattcttttgcaataaaacacatttctttgaaaacgcaactgcaggaacactgttaatgtctggcaatttgtgaaacagagtaagcaggttaaacc

SEQ ID NO: 295122 - DNA, 122 bp, Homo sapiens
acagcccaaactaggatgctagaatccgagggcagagggcagtagaaaagaacaacctggcggaattgtgtaggactagaggatgacagccgagtggcagataccagggtcaagcttgcggg

SEQ ID NO: 295123 - DNA, 122 bp, Homo sapiens
ctgaacaataagaccttctattgtgattattcctggtaaatagcaattttgtttctccagcggtttccatttgccaaacagtcatgacagatggttgaacatggtggctactgctttcaggg

SEQ ID NO: 295124 - DNA, 122 bp, Homo sapiens
cggcagcaacagaggcagcagcagcaatcgcggcagcagcggcagaggcggcggcagctgcgcgcctcgggcccaaccccgctcggctccccctctcgccggcgccctgcctgtcttgcgtg

SEQ ID NO: 295125 - DNA, 122 bp, Homo sapiens
taactcaggttcagaggtgacgtcagcagctggagtgcagacgtcacagaagtggtaaagcgaggaatcgaacccagggccatctgactcgagaaaccccatgctttctgcaggggcggcct

SEQ ID NO: 295126 - DNA, 122 bp, Homo sapiens
gacgaggaggctgcaaaaagcaaaccttgttagctggtggacctggccaaggtacgccttcgccttggatctcatttctcatttgtaaaatgggcaggggttggacaaaatgagctgaagct

SEQ ID NO: 295127 - DNA, 122 bp, Homo sapiens
cctgtttctgctaaaagaaggtaagttctaccaaggcggtgtcatgccagctttatttcccgtggcacctggcacactgctaagcacttacatgcttaacaactagattgggaatggtgctg

SEQ ID NO: 295128 - DNA, 122 bp, Homo sapiens
ggcctggactggttctacttgtgttctgaggtccctgaccaccgccttgggtccagccctcgtccagggggcggcggtgcaggggagaccgcgcggcccggcctgaagcgcggccgccctca

SEQ ID NO: 295129 - DNA, 122 bp, Homo sapiens
tgaacatagaaacaacatcagaatgataaaatgggagaaggactcaactggccgtttctgcgtttgaagatggaggaaagggagcatgagtcaatgaatgcaggcagtctctacaagctggg

SEQ ID NO: 295130 - DNA, 122 bp, Homo sapiens
catgcgcagtgggcagcccgcgagacgcagcccgcagcggcgatcccgggtggccgtcaacgcccactgtcccagcggtgaccctgccctggcgcttctgccaggtcctcggccagagtcca

SEQ ID NO: 295131 - DNA, 122 bp, Homo sapiens
gccgaagaatgtcgtctgatactgaatgtaactttagcaggaatgaatgggatttgataacgaatgggtctgtgttgatggacactggggacaaggtagctttgtgatcttctttgtttctg

SEQ ID NO: 295132 - DNA, 122 bp, Homo sapiens
tcccatttcttctcaacctgtagctagaccatcagttacctctgtgaaaggaaaataaatcgtggggccccaaaatcactaagccacaagggaaagtcaagctggaaactgcttagggccag

SEQ ID NO: 295133 - DNA, 122 bp, Homo sapiens
taaatatgcaaatgcttggaaagctctaagcaaaatacctgatacatgatagttgccaaacgatgttttttcttcatgtttcctatggagttggtggagctgtttctgcatgtatataccaa

SEQ ID NO: 295134 - DNA, 122 bp, Homo sapiens
ccgcgaggccgtggcgggggctcccagtgcagtcactgccgcttcacttccacatggtgccggtctccagttaggtcccctggcgtttccgcgccctgccgccctcgcagggagccccggcc

SEQ ID NO: 295135 - DNA, 122 bp, Homo sapiens
gagctgtcccccttgagaaatttctcggcgaaccagcgattgaagcactggtcgtactcgcgcttcatgtccgtgcatgcctcccccacactgttcatggcgacagtggtggcggcggcgac

SEQ ID NO: 295136 - DNA, 122 bp, Homo sapiens
gttaaactctccgctccttaaaaccactccacgtgtctccatgtcatttttaatctaattcggcacaaggaccaagaaccctggtgttcctccattcattgcagccatatcaaaacaaccca

SEQ ID NO: 295137 - DNA, 122 bp, Homo sapiens
ttgtaccaaacattttgttaacatttttgatagtgttgatgatgaaaataaaatttcacacgtgtgtgctaaaccatgaccaagggaagaaataaaagagatgctgtttatgattctagagt

SEQ ID NO: 295138 - DNA, 122 bp, Homo sapiens
cggtgcatggtctgtggcgcatgcagtgtatcagcccgggcgaggagcctcagcacaagccggccacagtttctacggcaaccgacaacaccgggttgccggggcgaccgccgcgggagagc

SEQ ID NO: 295139 - DNA, 122 bp, Homo sapiens
cccttcacttcctgaaggtggacctgggcttgggcctggctcttcttgcctgtccgcctccgacagctcttccggtagagacagaaacagcagctgaagatgaggaggcctgagaccagcac

SEQ ID NO: 295140 - DNA, 122 bp, Homo sapiens
actaacatatgcacagaacacgtcctactaacaaaaacttcttttcgctagggtttcagccgtgcctccgagccctctcccgaatcctctctccctttccactttctttccctcgcccgccc

SEQ ID NO: 295141 - DNA, 122 bp, Homo sapiens
aggctgattttgtcgcgtaggcccaaagaaaagtgtcaagggcggcccaaaccctgacctcgagattaaggctcttaaatgtctgacggttttgagactcgtctgtagaatcgatcccgcct

SEQ ID NO: 295142 - DNA, 122 bp, Homo sapiens
gagcggagccgccgaggccacccgtctcctgagcggctcccacggccgctccccccaccgcgcgccgtcccccccgcccacgcggctcactcagtgtgggtctctttgccttggctgtggta

SEQ ID NO: 295143 - DNA, 122 bp, Homo sapiens
agtagggcaagattaacccaggtccctgttcatccaacatcagagagcctaatacacccacggtagctcccacgtatctgaggtttcatctacccgtatccactacagtccaaaaatagtaa

SEQ ID NO: 295144 - DNA, 122 bp, Homo sapiens
aggcagggcatttatcccaagggctcctcgcattgtgatatttcgttggtatctccactgcgttagtgttcctcccgtcgtctatcggacgtgcttcctattaagagtcgacaaggatttaa

SEQ ID NO: 295145 - DNA, 122 bp, Homo sapiens
acccactctcaaatgaatcatggaaatttgagccctgagggcctcccccagtgtttgcatcgtcttcagctcctgatttctgagcatgctcccctcccacccctcagctagggctaattctt

SEQ ID NO: 295146 - DNA, 122 bp, Homo sapiens
aaagcaggccgggtaccttccttcagcacaactcacctttgctcactcaggagtggctgccgcccacagtcaggcccctggagactgggtcccagtgggttggagttggggtgagctgggcc

SEQ ID NO: 295147 - DNA, 122 bp, Homo sapiens
gggacgctcgtgccaccccgggtcctcctaccgtctctatcatggtaaccccttctctgccgctgcacctcccagtggcccgagtccaggtgccttagttactggacagagaccccgggttc

SEQ ID NO: 295148 - DNA, 122 bp, Homo sapiens
tggctacaagatgaccactgaggattacaagaagctgtgagtatgcaacgccaggctcagcgtggttccctcctccaaggaacaagtccaaactctgggtccactgaaggcagctgactact

SEQ ID NO: 295149 - DNA, 122 bp, Homo sapiens
tatattgcccctggacaataatcacagagttttctatagtcaggccttaaacaccatcctcgagacttggccagacagcagcactgacctactttccacccccactgggaatcaggggttat

SEQ ID NO: 295150 - DNA, 122 bp, Homo sapiens
gaaggttctgctgtggaccctgtgggtgtgtctgaggcccacagccacctaggagaggggcgagcctgctgtcacggcgccattggccagaggcaggctctgcggtgggtgccgcgtgcgtt

SEQ ID NO: 295151 - DNA, 122 bp, Homo sapiens
catgcgcaacagctcccgtttcctctgcgcgtccgagtgtttcatgttttgagtcccgcccgagtgacccaagccagtaccggggtgggcgctttccacccaacctccacttgaggacccag

SEQ ID NO: 295152 - DNA, 122 bp, Homo sapiens
gcccgcccccggaagtccctcctgtctctgcagcttgttcccggaagttttgctgctagtcgcggacgcaatggcttcaaggttacttcgcggagctggaacgctggccgcgcaggccctga

SEQ ID NO: 295153 - DNA, 122 bp, Homo sapiens
tgtgagccactgcatgcggccaggagtttttaactttgataaaattgtcgtgcatattctcgtattttttgctttggtttcctgtacctttgatgtcatatccaaggaatcattgccaaatt

SEQ ID NO: 295154 - DNA, 122 bp, Homo sapiens
ggggccacgcctcccccggaggctgtaactttgcctcgcttcgcgcctcctttctttggccgcaccgcgacccgtggccccgcccactcccctacgccaaccaatgagacggtcgtcccggc

SEQ ID NO: 295155 - DNA, 122 bp, Homo sapiens
tactggacgctggacccggagtcggccgacatgttcgacaacggcagcttcctgcggcgtcgcaagcgcttcaagcggcagcccctgccgccgccgcacccacacccgcaccctcacccgga

SEQ ID NO: 295156 - DNA, 122 bp, Homo sapiens
ggcatctggataaatggttagcatcattgtggtccggtccttggcggccctcctggaggccgggacctgggggtccaccgggggcctgggtttgcaggagacaggaaggggctaaaggggca

SEQ ID NO: 295157 - DNA, 122 bp, Homo sapiens
atagctagggtttggccgcaggctcagagaagcgcatgaatgagctaaagccacaaagcgcggggctggaggtttggctcccaagaagcgaggaaatgggttcggaactcttctgccaagtc

SEQ ID NO: 295158 - DNA, 122 bp, Homo sapiens
gcacgttggttgccgtacaacgtggtggttccctgcatctctgcccacgtcggagaggtgcgtcggcttccgtacaacacggatactctctctctgacgcaacttcctgtcctgcgcaattc

SEQ ID NO: 295159 - DNA, 122 bp, Homo sapiens
cacgccaaaggagagcccggctggcacgcccaaccccacgcccccgtccagccccagcgtcggaggggtgccctggagggcgcggctcaactccatcaagaacagctttctgggctcacccc

SEQ ID NO: 295160 - DNA, 122 bp, Homo sapiens
tcacagacggaccctagtactgaaggagaaggggttttaggcagatgtgggtgggcaggacgtggctctggctgattgacctgcccacactttcctggcatttgatgcctgctgaccccagg

SEQ ID NO: 295161 - DNA, 122 bp, Homo sapiens
aaaacaagggatgggacagtatgcctttcctttaaagtctgctaaagacaggtggagcgccgagccaatgttgacacctccatctgttgtacataccctggcattttgtcgcaggttgcatg

SEQ ID NO: 295162 - DNA, 122 bp, Homo sapiens
ccaagggccctctgcgtattcccttctctctgaggaattgaaatttttgtctctggtgcacgtaaggcagaatgttccctgacaccagtgtgtggatttttaacatcaccgtgagtctgaaa

SEQ ID NO: 295163 - DNA, 122 bp, Homo sapiens
actgtgacactcgatgaacaccatgaccgtgacacccgatgaacatcccgacaatacattcgatgaacaccgtgactactgacatttgatgaacactgtgactatggacactgaatgaacag

SEQ ID NO: 295164 - DNA, 122 bp, Homo sapiens
ccaggtggaggtcgagcccccagccccgtcggcacctccaggcttccgaggccaccggaacggaggaggcttcggtggctctttgtctacctgctctgggtgttaaagagcccgctcgcagc

SEQ ID NO: 295165 - DNA, 122 bp, Homo sapiens
aggcggatctaagtcctagaccccgcttcctggcgaccccacgcgtccccggaactcccacgtcccagctgccccctcgcatccctggaccgcccacaacccgccagcccccgcgcgtcccg

SEQ ID NO: 295166 - DNA, 122 bp, Homo sapiens
aaaggctccttaacacatggaaagggtaagtgagtgacccccactgatgcacattttcatcgtggacttctgcttcctagccattgggatgcttctagactctcacagacccctcgaggcta

SEQ ID NO: 295167 - DNA, 122 bp, Homo sapiens
aggaacagactggcaggaagcacaccggggttaacactggttgacttgaataggattattcgatttttaaaaatacttttccatgttttctgagtgctctatgataaatcagttgcatctgt

SEQ ID NO: 295168 - DNA, 122 bp, Homo sapiens
ctgagccccacccagtattagaacgggacctgagatgcggaggcctgccaggagcttctgcgaggaaagtggtgggtgcagagtggctctgtgctttgcaaggtcaccgtagccctcgacct

SEQ ID NO: 295169 - DNA, 122 bp, Homo sapiens
catctcttgtgaggagacgcatcccactgcctcattgcagctgcctcaggagtgagggatcgagacccacctggcgtgacgaataaacccagactctcagcaacatgggaggaaaaggccta

SEQ ID NO: 295170 - DNA, 122 bp, Homo sapiens
cgggccccgcggccgtcggtcagtcagccggcggcaacacgagcccgcactagacccaagcgccgcccgtcggtccccactcccgacgggcctcgcattcctggtcctccaccttctgccaa

SEQ ID NO: 295171 - DNA, 122 bp, Homo sapiens
gccagagaaacatcacactccgtgtatctcacttcttggggtggtggcacttggtggtgccggggactcccacatgtacttgtgagaagtctcagttccccatctccttctagccacctctc

SEQ ID NO: 295172 - DNA, 122 bp, Homo sapiens
gccgccgggaagcccgccggacgccgggagcaccgccgggagcgccgggcaggggccgagcgggacccggagagcagacgcctccgcccctcagtcctgggcccgctgcatgccgggcgggt

SEQ ID NO: 295173 - DNA, 122 bp, Homo sapiens
tggcagcgacgaagccgagcaggctccgcagcggcctcttccagctcagcagctcgtcggcgcggcagcccagccacagcaccggctccccgagcagccaggttaccgcggccgccgcccgg

SEQ ID NO: 295174 - DNA, 122 bp, Homo sapiens
gacgcagcacccaccaccacccgcaggagcctcaggccttcctgttaagcgtcgccactccgctatctgctgaccttcacgctcactccaactccaaacctgggcctggtctctcacacgtt

SEQ ID NO: 295175 - DNA, 122 bp, Homo sapiens
ggccagaaaaaattactaatagcaacacaaatcctctccatcaactatgtgatcccaaagcgccatatttattctaactttctaaaagcaaaaatgcagtcagggtgttcaaaatgagttct

SEQ ID NO: 295176 - DNA, 122 bp, Homo sapiens
tccagaatctgagatcaatcacctcttttgtatttttttcaaatgtcaccttttcagggccgggcatagtggctcacgcctgtaatcccagcactttgggaggtcgaggcgggtggatcacc

SEQ ID NO: 295177 - DNA, 122 bp, Homo sapiens
cgccccagcgaatcggtcgcgtcacttccggagcacgctgggaactacggcaggctagggcgcaaagagagcagccgggcggccccctggtgccacctgctggcctcccgtgtgtggcaagc

SEQ ID NO: 295178 - DNA, 122 bp, Homo sapiens
cccatgtctaatgagtggtgtgaccacagagggacagcttacagtggctgtggggcttttcgtcatcatcttaaagcagccctcaactctttgaggcctttccttgacatccatgaggggtt

SEQ ID NO: 295179 - DNA, 122 bp, Homo sapiens
aagagacgaaagttgccattttgctgctgagcgccaagagagaaagagcacatatttctccgtgggacactccttgtattggcaagttttccttgggtgatattagtttgtaaccttccccc

SEQ ID NO: 295180 - DNA, 122 bp, Homo sapiens
ggggctggcctgagagagaaggttctctgggacccgcagcatctactcagtcccagcgtgcgccccctagggaaaggcagcaggcaacagtggagggaggccttgggagcttgtctgacagg

SEQ ID NO: 295181 - DNA, 122 bp, Homo sapiens
tttccctgcagtaactggagtcctcctcgtcgtcttccagctcctccgggtaagggtaatcgaagtcatcgtcgtcctcctccatctcatcctcctagttgtcctcagactcctgggtctcc

SEQ ID NO: 295182 - DNA, 122 bp, Homo sapiens
tttttctcaccaaggacttgcagggaaatgttatgttctatggcaattccatcagttatacgaatacacaaagcaatgaagcctgcctattttttaggttttcagacactcttaaaaattcc

SEQ ID NO: 295183 - DNA, 122 bp, Homo sapiens
cggcggcggcctcggagctggcctgggcggctacggcgcgccgggcgtggccggcctcggcgtgcctgggtcccccagcttcctcaatggctccaccgccacctcgcccttcgccagtgagt

SEQ ID NO: 295184 - DNA, 122 bp, Homo sapiens
caggatacttagccccaaaatgggttattgtcagcatctagcagatgtgagctgatgacacggtggcaggtcatattccccactagatttggcagtccttagagtaatagaagccaaggcat

SEQ ID NO: 295185 - DNA, 122 bp, Homo sapiens
acggcagcgcctgcgtccgtgcccgccccagccggtgcgcgggagccgcgggggcaaaggcgcagtggccagcggaccatctctcgtgccctcgctctctgcgctccggggcagctgagccc

SEQ ID NO: 295186 - DNA, 122 bp, Homo sapiens
gtttggagatgtaaacctttgctctcaagacagctgcaactcttagagtgctttaaattacggggtctccgttcttattgtcatagacatttatggaagaaagagatcaccatggtctggga

SEQ ID NO: 295187 - DNA, 122 bp, Homo sapiens
actcagtttccctgtttctgtgccagagagagtattcatgacctcatcttactgcaggaacgtattttgagagagaaagtggtatttggcccaaagggttttaaacccaaagtgagcgaata

SEQ ID NO: 295188 - DNA, 122 bp, Homo sapiens
aggcacatgacccgtgtttcctcacaatcacagttaccctctcatactcacatgcaaggacgaggaacttgtttcctattacttcacacccactccctggccatgcacacaatacagtgcag

SEQ ID NO: 295189 - DNA, 122 bp, Homo sapiens
gcgttgtcagacgtttttttctggcttggtctttgaattttcttaattaagtagaatccacgtttattaagttcagttttttttttctttttcctttgagacagagtcttgctctgtcatcc

SEQ ID NO: 295190 - DNA, 122 bp, Homo sapiens
atgggagctggaagtccttcttgccatcacccttggtgtcctcctcgcgacctcagtttccggttaagttgcggttctttcccggtcaccaggcaagaagggtctccgccgctgcccccagc

SEQ ID NO: 295191 - DNA, 122 bp, Homo sapiens
ctaaattgaataaatacaactcccagtggtctgctttgggatgtctacatttgtttgtttcgtgtgtgtgtgtgtgtgtgcgtgtgtgtgtgtgtgtgtgtgtgtgtgtgtgtgtgtgtagt

SEQ ID NO: 295192 - DNA, 122 bp, Homo sapiens
gggcgccagcgcgggctcggcgaacgtgcgccggcactcggggcagtcgcgggcgccctgcgcctcctgccgcacccagtgctccgtgatgcagcggcggcagaagtaatgctcgcagccca

SEQ ID NO: 295193 - DNA, 122 bp, Homo sapiens
tttagacgaggctgcaagtctgggccagcggggacctgagggtcccttgcaaccagcacccgcgacggtgtctacactggaattccaaggaaaagagggctccaggggcgcgaccaaggttt

SEQ ID NO: 295194 - DNA, 122 bp, Homo sapiens
cctacagcaagggcagccctcaaggctgcaccagggtctcaaatgggtttaaaaggagcccggggaaaggcctgcactgcaccctgctctggaacattatggcaagcctcccttccggtctg

SEQ ID NO: 295195 - DNA, 122 bp, Homo sapiens
ggggatcattactccagtgtcacaaaggaggcaagtgaggcgcgaggcctcacagctggccggtgaccgggctgggattcggaggctggtctgtctgacgctcagtcccatgctctcttcac

SEQ ID NO: 295196 - DNA, 122 bp, Homo sapiens
gggagctcattccctagcagcgggccagacccaaggtggggtcgtgagccccgagaggggcgagggtggcaagagcgggatggcagaggtggcagccgggaccggagaggggaagaggcatg

SEQ ID NO: 295197 - DNA, 122 bp, Homo sapiens
gtgagaagcgctccacaggacacagctggagaatgtgtcacaaaggaactcagaggggggcggtcagggagggctctcccaaacctgaaggatgacatggagccagccacaggcggggggca

SEQ ID NO: 295198 - DNA, 122 bp, Homo sapiens
gctctggcggcactgggggctgggctgtgcggcgcattcttttaaaaatcaggcgagccccgcgggcactcgaaggcgcctcggggccccgggccgcccgccccgcccccaccgccgcgggc

SEQ ID NO: 295199 - DNA, 122 bp, Homo sapiens
gtgcttggattacaggcgtgagccaccacgcctggccccagatttagattttaaataaaacgtgaggtactgggtcaaagggggctctgcaggtcgatgatctcctcaaacctgcaaagaca

SEQ ID NO: 295200 - DNA, 122 bp, Homo sapiens
ggccggatcccccgctccaacggcgccgccgattggctgccaggcgagacaatgaccgaccgggggcagctgctttaaaggggaagatacactctattaagcggccaggaggagatggggca

SEQ ID NO: 295201 - DNA, 122 bp, Homo sapiens
ccatttgctggcacgatgctttgtcaactccagtgagtgagcacgtgggctggctctgcacgtctagcggcccagaaatgcacaaatgcccacctcaccagctgggctcgacacccgagagc

SEQ ID NO: 295202 - DNA, 122 bp, Homo sapiens
cagctcgcctggcggaattgcacgcggcggcgggagctggaatagcagaaggaaccacctcgtggagtcgggccggagccctgcagtggctcagacggttgcagggaccgccaggtcggtgc

SEQ ID NO: 295203 - DNA, 122 bp, Homo sapiens
gctaaccacagcccatcagtcctccccagctggaataagacaacatgggaagcagagccacgctcccagccaaataaaagcctgtttgcccagcctccctggctgtgagtgctgtaaaacac

SEQ ID NO: 295204 - DNA, 122 bp, Homo sapiens
aattttccagattgccctttgacttcatcacttctctcttttggggctgctttgccctaacgcattggaaagattcctctcactgcagtttaagttattcctggttccctttgttgatttcc

SEQ ID NO: 295205 - DNA, 122 bp, Homo sapiens
tgatcttcgaagaggtccaggaccctaacgttgtggggatctggttgtgtcaccttaccccgccttttgggattatgcgtttctggtctctgcaggttggagaccttctcgcctctctgtca

SEQ ID NO: 295206 - DNA, 122 bp, Homo sapiens
tttgttcgccgcgccccccagctttgttactcgctgatggaggctggttttgtcatctgccgtagctgtcttaccggtctgaccgttcctttacctatccttcaaatgagcagaagaataat

SEQ ID NO: 295207 - DNA, 122 bp, Homo sapiens
ccggcaacagcggcggcgctccgctcccagaactggaggtggcggcaagaggtcagaaagcggcgcgctttttccaccaagaaacctttacgtcatcacgtatccttgcaacgtcactacgc

SEQ ID NO: 295208 - DNA, 122 bp, Homo sapiens
aaacctcttctgctatgggagaataatctcctcttctctaacagtatcctccaagtcactcgcctcttctgtcaaccttatcctctttcttattcttttacgataatcttttggtgtattat

SEQ ID NO: 295209 - DNA, 122 bp, Homo sapiens
gtccgcaacagtggcacctggagccagacccaccgctttctggtgtcgcgcctttcaacccgggggggtaggaagctttctgttgctccgcataactgtggtcagctaatagctgctggtaa

SEQ ID NO: 295210 - DNA, 122 bp, Homo sapiens
gtaactgggcgggtctgggagccgccacacccctccttgcagtgcagatcgtctatggggcgacagacatctgggattccccagaaggctctgacaccctctgcccgccctgtagctgtagt

SEQ ID NO: 295211 - DNA, 122 bp, Homo sapiens
gccccagacgcccacctgtgcctcagggcaccgcctgccgagcagagaaggcacagcagccgtcagagtccatgagaggtgaaaccacacagcagggatgtccaatatcagaactattaata

SEQ ID NO: 295212 - DNA, 122 bp, Homo sapiens
tatttcattattatcctgtccggagtcggcaaactacggtctactatctgtcttcgtatacgtcaaaagctaagaatggtttttacatttttaaatgactggggagggagggccagaatcca

SEQ ID NO: 295213 - DNA, 122 bp, Homo sapiens
tcgcgctctccggaggggactgagcaggtgaacaggcccggagcctgtcgtggaggggcccgggaaggcctcgctgcagaagcaggatgggagcaggatccgcagggatgcgcagcggggtc

SEQ ID NO: 295214 - DNA, 122 bp, Homo sapiens
ctggtgctgaggcagagctggttggcgtccctggtgggcaggaaaggaaggcacgccagccggcaggcacactgtcacggctgttgtcatgctgtcgggagcctacagtccacccctgccct

SEQ ID NO: 295215 - DNA, 122 bp, Homo sapiens
ttttgtttttttccagtgggcctcacttgggacatatggcatttccttgatgtgtgtgtgcgtgtgtgggtgggtgcgtgtgcttgcgtgtgtgtgtgagaaagagagagaggaagagcgag

SEQ ID NO: 295216 - DNA, 122 bp, Homo sapiens
tggcgtgatctcggctcggcctcccaaagtcctgggattacaggcgtgagccaccgcgcccggcccgaaaaaatttttttaaaagaaaagggaaacaaaacagtctcctacaccttcggacc

SEQ ID NO: 295217 - DNA, 122 bp, Homo sapiens
ctaatataactttagaaatcattgtgttttcctactagtgagttgcatgcgttttcattgcggtaatgacatatggttaccatttctactcctccaagtgtgtgtgccaaaatccccacaag

SEQ ID NO: 295218 - DNA, 122 bp, Homo sapiens
cgatcgataacttggagagaacaggcggcggcggctcctcttccagccggggatcgggagcgcgggcgcatctgcgtctacaagccggaccctgcgccgcgaccctcgcacccccgcgcccc

SEQ ID NO: 295219 - DNA, 122 bp, Homo sapiens
cgtcaagaaggattttcggagtgtccgcttgcgggacctggggcccggcaaatccgtccgcgccattgtggatgtgcactttgaccccagtgagacctgcaccctggacccttcctgggagg

SEQ ID NO: 295220 - DNA, 122 bp, Homo sapiens
gtaataatttcatagccactgcttggtgcaattgcagcgagcttaagtgttgccagtattcgctttaagctgtgtaatgctaatcatctctgagtgagcagttcatctctccagtaaattgc

SEQ ID NO: 295221 - DNA, 122 bp, Homo sapiens
aaaggaaacgaagaatgccgcaatgaaaaccgctctgccctcccaaaaacacatcttggccgtgtgtccggtgctcctgcagctcgttgcacccacggacgtgggctctcactgtggagtgg

SEQ ID NO: 295222 - DNA, 122 bp, Homo sapiens
tcgggcggcggctccgccggcgcaggggggcggtgcccgtggcgcccccggctccgcccccgtccccgcagcctcctgggctgcccgggcctccccacattgccgcccgccccgggtcgtgc

SEQ ID NO: 295223 - DNA, 122 bp, Homo sapiens
taatggcatggcgagttcctctcctagagtggatagtctgtgctcattgctcagtggcatcgctctagtggggccgaaggtctttaaggtcattggctcacccactgcccagcctgtggtgt

SEQ ID NO: 295224 - DNA, 122 bp, Homo sapiens
ttctgcccaccctcctgcagccgaggcaggaaaccctgctggatcgagggttccagtcagcgctcctttccctgccaagctgggcccttcccaggtgagctgtgggatgcctggtggggaag

SEQ ID NO: 295225 - DNA, 122 bp, Homo sapiens
cactggatcaaagtaagacggaactgagaggaagcttcacctccagcgggaggaaggcagcggaatcactcatgcggcggctccatgccacacagctctgtcttctcggggcacagaggaca

SEQ ID NO: 295226 - DNA, 122 bp, Homo sapiens
cgacattgttcaagggcctctttatagcgacagacttcatgctcctcggccccaaaactgcgaacggtctgcagccctccaacggcttcccgcaccacctgccccgccctggccactgcatc

SEQ ID NO: 295227 - DNA, 122 bp, Homo sapiens
cttgaatcgcattgatctttccttcttcctgtcgatttagtaaacgtattccaggtaactcgccgggtgcagtgcgtattaccccagggtgtgtgcagagagatgtagtttccggcaggtat

SEQ ID NO: 295228 - DNA, 122 bp, Homo sapiens
accaatagcttggacttctgcacccagaggcagctgccagactcctcatcctggagctcccgggggctgtcaggcccctcggagaacagtgggccatccagcatcctgccccaccccacccc

SEQ ID NO: 295229 - DNA, 122 bp, Homo sapiens
gccgtcgggggctgcgccctaccccgcggccaggctctggagggaccctggaggtgccgccggcctcagcccatggcccaaaggtacgatgagctgccgcactacccaggcatcgcggatgg

SEQ ID NO: 295230 - DNA, 122 bp, Homo sapiens
gagcccccaagattccttttctgttctatggagtgggcccgcgcaaaggactccatttcccggcgtgctgccatccgtcgggtcgcggcagccattttgttccgcccgaggagaccctaaga

SEQ ID NO: 295231 - DNA, 122 bp, Homo sapiens
ctgctgatgcatgtcggatcacccgcacagagagatcacatggcttctccaaaagtcaaacgatcaattcgcctcgttttggctctgtacttaatgcacaaacagtgcgatctgcggggctg

SEQ ID NO: 295232 - DNA, 122 bp, Homo sapiens
aacgtggcgaaacccagtctccaccaaaaaatacaacaatcagctgggcgtggtggcgcgcgcctgtgaagtgggaggatcgtttgagcccggatggtcgagactacagtgagccgagaccg

SEQ ID NO: 295233 - DNA, 122 bp, Homo sapiens
cccccatctctctccagaaatgtaccgagagtctaactgctctatactctgggaggaacacgaacatgattccacctcagttccaagctttctgagaaccatcctgggaaccagcaagcatg

SEQ ID NO: 295234 - DNA, 122 bp, Homo sapiens
ctccgcgaagatgcagctcaagccgatggagatcaaccccgaggtgagcgccaggtgcaccgctacccggagagcgcgaggccgagggagggggagccgagtcgctgatcggttcggttttg

SEQ ID NO: 295235 - DNA, 122 bp, Homo sapiens
ggcaccctgctgaccggtgccagcctcagcagggagacagaggcagcagatggcctggcccgggggtgcctggcacgagcagacaagatccccaggccttagagccactggcagaggagagg

SEQ ID NO: 295236 - DNA, 122 bp, Homo sapiens
agaagagggaatgttagctctctcatttgaggatattaaactcctgccgtggttgaggcacggtgtgagcaccctacttcctacctagactgttgggagttacctggaggcaatgaggagaa

SEQ ID NO: 295237 - DNA, 122 bp, Homo sapiens
tctcctccacctcttcctcctcatcaggaaaacctcagcttttagccaagacttcaaacacgggtagggtagtgtagaaagccctcatcaggggttgggcttggttgggatcttgggatggg

SEQ ID NO: 295238 - DNA, 122 bp, Homo sapiens
gacagtgctcagtaatcaatagtctgcagttctgcacccacgtgctcctgggtactctgccgtccccacagggtcctcagctcagcccctgtcactgcctctcctgccaccctttgtccact

SEQ ID NO: 295239 - DNA, 122 bp, Homo sapiens
ttaaaaccctcaaataggtttatgcattcaacaaatatttgttaatcccttaccatgtcacgcactgggctaggtagtaagaagagttggtgaataaacaatcctcatgaagcacactgtgt

SEQ ID NO: 295240 - DNA, 122 bp, Homo sapiens
ccgagtttgtgctgcgtctgggcatctaggtgtcgagttcttccctagtgttttcagcctcggcttcctcctctgtaaaatgggagtaactgatacttttcctgtctgggtgggaaaggaac

SEQ ID NO: 295241 - DNA, 122 bp, Homo sapiens
aacaactcaacaggccattatgagtatgagcccatcacagccaaaatcctcaactgtgaccggcaggaccagcaagggggggtgttgaaggggttatgaacagcaaccataaagaaaggaat

SEQ ID NO: 295242 - DNA, 122 bp, Homo sapiens
ggccacttggatcaagctttcgcccgcaccctcctcagaaaccgcccttgccaatgtcaccgggaacttcagcaattctcacccaaaggcgaagacctcgcctcacctcatctgcccccgga

SEQ ID NO: 295243 - DNA, 122 bp, Homo sapiens
cgcagggccgccctccagggcctcccctccgctaggctgggcacctgcgccagcagcccacgcaccagagcatgcacctggtggggaagggggcagacttcagcagtcaggcctcctccacc

SEQ ID NO: 295244 - DNA, 122 bp, Homo sapiens
cagcgggctcagggatgatgggaaaggagccatccctgcggtgctgatttgatttcctcccgcaccaacccacaaggtgggctctcttacccagtttgacaaacgagagcactgagcctctg

SEQ ID NO: 295245 - DNA, 122 bp, Homo sapiens
aaaagacctgggaaacacagccaaggaatgaaatggagttgttgtgtatcaaagaattggcgatagatttgggagccgtgactgaaataaggcagagatccaagaaagatagattcttcaag

SEQ ID NO: 295246 - DNA, 122 bp, Homo sapiens
cgttcgggtaggtagcgcaggacaggaactctgggcggttccgccggggcgtccaccggccggctccaatgaggtcgctgcgcccagccctcgcccacttgcagcctctccaccgaacctcc

SEQ ID NO: 295247 - DNA, 122 bp, Homo sapiens
gctcagactggttgaagacaagtttccccacaggcatgtcttatgcaaaagaataggacgcgctgagctcttcttggctgagttgctttatttcttttttttctttttgagacggagtctcg

SEQ ID NO: 295248 - DNA, 122 bp, Homo sapiens
aggaatatacccgccacactctcggctcccaaaccgctctttccctccctctgccggccacgcctcttataggcccggaagtttaccccaccctgcaccgtgattcaccggaagcgctctag

SEQ ID NO: 295249 - DNA, 122 bp, Homo sapiens
aactgattgtctagttattaaattctgtgttgtaaatctgacttgcttagcttccagtgtcgaattatctgaagccattctgattttcagcctttgctttgtggctcatttgttctctgaag

SEQ ID NO: 295250 - DNA, 122 bp, Homo sapiens
gccaatatggtgacaccccgtctctactaaaaatacaaaaattagccgggcgtggtggcgcgcgcctgtagctactcaggaggcagaggcagaagaatcgcttgaacccgggaggaagaggt

SEQ ID NO: 295251 - DNA, 122 bp, Homo sapiens
cgatatgctaatcacccgagccgggtagccaatggccgcctccccctcgcgtcgcccctccgcctgcctctgacaatccctttaatgtggaaaggcttagaggggaaaacaagaaaggaaaa

SEQ ID NO: 295252 - DNA, 122 bp, Homo sapiens
agggcaataagacagacgatcactgtggggcctctagcctcaagaaccacacaacagacccggaggagcccgacgtgggagtcttggctcattcagacccaaaggaagaattaaagtcattt

SEQ ID NO: 295253 - DNA, 122 bp, Homo sapiens
ctgcccgtgccatgctcgaattctcgccaggcttcagccgcctccccgcggggcagggctcgggacctgcagcctgacatgcccgagccccacccctgccactcccgtgagctcccacgtgg

SEQ ID NO: 295254 - DNA, 122 bp, Homo sapiens
gggcccggcgggtaggggggctgggccactggtcctccaagggaagaggggctgctgtcacgcctgccgccactgagcactcatgcaacttcagggcatcctcaaagggtcctgcaggccag

SEQ ID NO: 295255 - DNA, 122 bp, Homo sapiens
cggccggctttgggctccagccagcggtccgcggagactttggtctccgaaggcctttgacgccgggcatttcgcgagctgcgcgcccctctcagccgcgccacctgcgcccggagttttgc

SEQ ID NO: 295256 - DNA, 122 bp, Homo sapiens
tcccagctgtgcctgactaaccgtgtttctcttgtatctaggagtgctcccaccccagcccgttgctgcccagctattggaacactgtataacaccaacacactcgagtctttcaagactgc

SEQ ID NO: 295257 - DNA, 122 bp, Homo sapiens
atcactcccacggcattggcatcttggcagtagcttattcctcagcttctctgaactaggcgtggaactccagttacttcccatatatctgatacatttaggctgcaacaaattcaagtgct

SEQ ID NO: 295258 - DNA, 122 bp, Homo sapiens
cagaaacacagaaaaccatgcggctataaactatccagtcaactcggattttttaaaaagcgaaaacctagccctatcctccccaaaagagaggtgaggaggggagagaagtagtacaaaat

SEQ ID NO: 295259 - DNA, 122 bp, Homo sapiens
aggtagaggccggcccgggggtgaccagtggggctccaggtggtagtggggattcctaagcgggtcaaggtgaagcgggttgctggctaaggagtaggagttggggagggggcgaggcgacc

SEQ ID NO: 295260 - DNA, 122 bp, Homo sapiens
gcactgcgggggactggggtcgcagagtcccttaccttggcgagctgcggaagtcctgcgcgaggcggcccgcggtgcacggggccggggcagctaggcgcacaccccggcttcggagcgca

SEQ ID NO: 295261 - DNA, 122 bp, Homo sapiens
ctaatactcacactcccttgaattcaattgttaaaatttaattttccagcctgggcaccacggcaaaacctcttctctacgaaaaatacaaaaattagccaggcatggtggcgcatgcctgt

SEQ ID NO: 295262 - DNA, 122 bp, Homo sapiens
gcagggggaagtcagacttgggtctcagtctggagccggggcatccttaggtgttggtcgcgcagcgtggttactgtagacgtctgaggtcccgaaacctgccttcgtgtcctagtcctggt

SEQ ID NO: 295263 - DNA, 122 bp, Homo sapiens
gggcttcccgggattcgtctgcgcatgctcaagattcaggcggagcgccgggctgcagtgcgcggaggcccgctcccgggactcattgatgcgcatgcgcagggcttcagcctgcacgtact

SEQ ID NO: 295264 - DNA, 122 bp, Homo sapiens
cattccagctggcgttcagaaagacccacacaggtgccccacaaggctgcgaccgccgcccgaggaggagaagcttgtccccaagtgccagaaggggccagccctggtctcggggcaagcca

SEQ ID NO: 295265 - DNA, 122 bp, Homo sapiens
cctcaccagtctggggctaagattcactcctcatcagtaaaatgaatactttggatgagacgggaggttttcccattctgatgctaggatcttgttcatgagttaatgaagacagttgagga

SEQ ID NO: 295266 - DNA, 122 bp, Homo sapiens
gtagaaggggcaggaccctccgcagcagtagctcagcgattggccaggagctggagggagcgtggccttgggaggcggggcggagggggacggacagggcagctcaagacgctgaggtggtg

SEQ ID NO: 295267 - DNA, 122 bp, Homo sapiens
ttagccacggcccaggaccccagggtgggagagtgaacggaaaggtactcgtgcctggagcggttgcaacatcctctgtaatgaggaagatacagctcagaggcactgggtcgaaggacccc

SEQ ID NO: 295268 - DNA, 122 bp, Homo sapiens
cgcctggcccgctccccctacccctgcgccagcgagtcggggccctcggggctacctggacgctcggccaggacctcagtgagtccagaacatactgagggaaagggccgctcggaaagatc

SEQ ID NO: 295269 - DNA, 122 bp, Homo sapiens
ggccaggaccgaccctgtcccgacaaaatggagttccccgtgtggcttcagctcgcggcgcgttcccagagctcctcagtgatccggctttcggattgttcgcctttcatctcatttgccgt

SEQ ID NO: 295270 - DNA, 122 bp, Homo sapiens
gaccctgcaaaagcgttatgacctaagaagcacgttcttcacacccacctccccccgccccgcccccgggcccccaggttttgacatctcatggtaccactgtgggttacatgtattaacat

SEQ ID NO: 295271 - DNA, 122 bp, Homo sapiens
caccttcacctgggtctagctccgcctctgcctgggttaggcctctcctcccctcagccccgccttcactcaatcccgattggctggaggaagaaggaggcccgaccattggcccctttctg

SEQ ID NO: 295272 - DNA, 122 bp, Homo sapiens
cagatgccccaatcatgactcatgatcccctctaacaatctctaccccgttggaaagtctcgtggtcccttagctccttggacctgataatagccctgtctcactccacaatttccccgagc

SEQ ID NO: 295273 - DNA, 122 bp, Homo sapiens
atgtgaaagggcctggaggtggctagctctccagttagtatctcgcagagcgtaaactgccgaatgagttggggggtaggtcatattttaaagtgttttatcagcgttctaatagcaagata

SEQ ID NO: 295274 - DNA, 122 bp, Homo sapiens
tttctcaagctgctaaagcaaaatgcctgataactcttaaaatgagagatgctcaaggaccgcagctttaatattttctcctcttagcacccctacccctcctattttctgaatgtgtcccc

SEQ ID NO: 295275 - DNA, 122 bp, Homo sapiens
tggggagccgatggggatgctccgggctcgggagaccgagggggcggacgggcgggaccccgcagccccgggggcctctgggaacccgtcccccctcggccccgccccctccccgggcgccg

SEQ ID NO: 295276 - DNA, 122 bp, Homo sapiens
cacagccacagtgtgtgggggcctgtcatgtgagggggctgtcacctgagggggctgtgccgctggctcagctctgcctgctggccggggccctactccctctcagagatgacacacaagtg

SEQ ID NO: 295277 - DNA, 122 bp, Homo sapiens
tttttttttttttggtgggtattggtgctggagaagagaggtccggtggggaaagaatcccggccctggagattatatatccgccttcgcatcagcggagcagggacgctgggagcgcgcgc

SEQ ID NO: 295278 - DNA, 122 bp, Homo sapiens
accggccggcgaggagcgccgcacaaagaagccccgtgggggcggggggtggcaggaggacggacagaccgtcggaccgacgcgggacgcgcggccggagcagcggggcggccgggcccagg

SEQ ID NO: 295279 - DNA, 122 bp, Homo sapiens
atcaggtaggtgtccagctcctggcactggtagagtgctacactgtccaacacccactctcgggtcaccacaggtgcctcacacatctgcccaattgctggagacagagaacacaagcagag

SEQ ID NO: 295280 - DNA, 122 bp, Homo sapiens
ccatggagaacaacaacatttaggttgtgtactgggttgaatagtgtcctccccaaaattcgtgtgaacagaaatcttagaatgtgactatatttggaattagatcctttgcaaatgtaatc

SEQ ID NO: 295281 - DNA, 122 bp, Homo sapiens
agtgagaagactgacacagatgcttggcatgtgaggagaaatccctgaggcgttcagagacgtttctacttacagttagggaggactggttgcctcagacaaacccaacaaaaatagcccaa

SEQ ID NO: 295282 - DNA, 122 bp, Homo sapiens
cctctccatcaaggtggagactgcctcatggttttccagctcgtagagacgaacaggtcccggctcttggtcagccgaaccatgagccggcccacatagaagccactgatttggcccacacc

SEQ ID NO: 295283 - DNA, 122 bp, Homo sapiens
ggaaacacaggcctgtgattggctaccgcatgacacccaagggacaagttgctatggcaacgcgtgggcgcgctgtgggctcgtagaagccaggtgcggacgctgaacaggcaggcgaagac

SEQ ID NO: 295284 - DNA, 122 bp, Homo sapiens
aaaagcagatggcactgtggccctacctttagggtggaagaagtgatgtacatgtccggacgctaattggtgactggtacaccggctgctgcttacacctttgcagaggtggctggttgctg

SEQ ID NO: 295285 - DNA, 122 bp, Homo sapiens
ggaaggaagcccgtggcttctgctgcgctgcgagggcttgaccgccatgtttgaagcgggcggaaaaaaattatggggcgtgcagtgtcacgtgactgctcggatttttgtcacgttgtctg

SEQ ID NO: 295286 - DNA, 122 bp, Homo sapiens
ttgaggctgacttcccccagctcaccaccctcctctccgaacgccagctaaccggttacccgggcaacccagctgggaggccgccagttaccacggcaacccagcatggccgccaggctgcc

SEQ ID NO: 295287 - DNA, 122 bp, Homo sapiens
gggagcgcaaggccatgagggtcctgccggtggtggtcggtgggttcctgtcctgaggggcggggaggagaggagggggggggtacgaggccggctgggcggggggcgctaacgcggctctc

SEQ ID NO: 295288 - DNA, 122 bp, Homo sapiens
gaattgagacgctccagcaccaccttggattttgccccactgtctggttctgtgaaagagcgaaaaaagtcaggatgaatgaaccagtgcatgaacaaatacatcatagccttccttcctcc

SEQ ID NO: 295289 - DNA, 122 bp, Homo sapiens
tgtcacctctatcactgggtttttccacacgtattactgctattgttatttcaaaatgttcggggccagaagtttctgccaactcctgtaccaaaaaggctcctgtccttccctagtgacag

SEQ ID NO: 295290 - DNA, 122 bp, Homo sapiens
agccctaccccaccgggctccgaggtcagggatccagggatcgttgcgaccaaaaccagccgctgtgctccgaagccgcaaggctcagcccggatccactaggggagaggcagtccagaggg

SEQ ID NO: 295291 - DNA, 122 bp, Homo sapiens
cagctaacatacttgagactcagaattctggtgagggcttcctgtcacaaatctgggaaacgataatatgggacattccacgatctaagaaaagggtccggccgggcgcggtggctcacgcc

SEQ ID NO: 295292 - DNA, 122 bp, Homo sapiens
ggtagggagagtagacacaagtgtagattcgagaggggcctagcgctacagaactgaggccgccccaaagctatctggaaaagggcgacaggcacccagccccagtgggtacccaccccaaa

SEQ ID NO: 295293 - DNA, 122 bp, Homo sapiens
cagcccaccagagagctcccatgtctaaagccagcagcaggagtttggggctgcaggaagcgcagctgtttttagggattagcgagcattgccagcacctgcttgggttgtgcttcctggcc

SEQ ID NO: 295294 - DNA, 122 bp, Homo sapiens
ctgagctggcggagctgggcgcctaaatggcccaatggggggccgcgcgggatcagagcccgccctgcctcctggcgccgtcgcgggggtggggactttctaggccacgccccgggggcgga

SEQ ID NO: 295295 - DNA, 122 bp, Homo sapiens
gtacgagaggtacaggggaggtgtctggacttctggaggtagaagcttccaagtgctaagcgaccaggttactttggtaaatagaacactcaggtttcacttctgagccccagctgtggtat

SEQ ID NO: 295296 - DNA, 122 bp, Homo sapiens
cggccgcgctgctccctgagaacgggtcccgcagctgggcaggcgggcggcctgagggcgcggagccatgaagctgtacagcctcagcgtcctctacaaaggcgaggccaaggtggtgctgc

SEQ ID NO: 295297 - DNA, 122 bp, Homo sapiens
acctggttgaccactaggaaggaatagtttagagggaattcaagcattagttaggtgatacgattaggtttacctgttgtgtgtgaaaatttcagggtattacccaaaggttcaaacccgtg

SEQ ID NO: 295298 - DNA, 122 bp, Homo sapiens
tgttgcaactggaacataatttgataacactcgcaaagccagaactggaagggactgtgccgagcaatgctctttattttagaggtggaaaaactgagttacagaagccacgtgttagttaa

SEQ ID NO: 295299 - DNA, 122 bp, Homo sapiens
cctcgacgcagtgggtgagtgaggccttcctctcctgtctctgctttcctcattgcctggcgacgctgtctggctgccctcgagggtggagcaaatcctgggacatgttgaaatcctccagg

SEQ ID NO: 295300 - DNA, 122 bp, Homo sapiens
ccaggagcccaagttaataaattacagctctaccgacataatgtggaatcacagactaatcggatacttattaaatgcccacctgtgcttggggctacaccttgtagaaatccagctgaaat

SEQ ID NO: 295301 - DNA, 122 bp, Homo sapiens
aactgtgagaacatgggcaatggattttcggacgactaggatcttagggagcttggaggccgcaccgcctgtcactttggcgacacgcagctgggacagctccaccttcaggtcgtccagct

SEQ ID NO: 295302 - DNA, 122 bp, Homo sapiens
agggacattcagcctggagaccttggagtcctggagcttcctggggctgtgggggtggggcggggctgggggacgcagtctcacggtcgggtgcagaggcctaggtcggcggggaaggagtt

SEQ ID NO: 295303 - DNA, 122 bp, Homo sapiens
cagcaaacgcgccgaagtcaggcagcaagtaagtggcagcaccagaactcgaaactgcctcggagcatgcactcttcaccaccccgttccaccttgaggtcggattccgcacgccgttcgcg

SEQ ID NO: 295304 - DNA, 122 bp, Homo sapiens
ctgaggcaggagaatcacttgaacctaggaggtggagtttgcattgagctgagaccacgccgttggactcctgcctgggcgacagagcaagactccatctcaaaaaaataaatacataaaaa

SEQ ID NO: 295305 - DNA, 122 bp, Homo sapiens
attgaactgggctgggggcgcaggggacaaagcccgaactaaaaaccttgcagcatggagcgctcggacaccagccctgcacgcggtggaaggagagagggagggaggtggaggaccatgga

SEQ ID NO: 295306 - DNA, 122 bp, Homo sapiens
ttgtgggtaatcttattcatagcacctgcctcctctgtgggtgacctcatcaaaggctcccgaagcttgttccctctcccatccatcctgcgactgacactgaatattaatacagcttcaga

SEQ ID NO: 295307 - DNA, 122 bp, Homo sapiens
gataaggccagcacactgaagagttgcagaaaatgcaggcggtcaggcgcaggtctgctgcgggagcacctgccgtgtccgacagctgcactggaagaggggcgtgtgtctcccagccgggc

SEQ ID NO: 295308 - DNA, 122 bp, Homo sapiens
accgtggggaggtgggggccagccccacacaggcgggaggggtgggagttgggggcgggccgggcatcgcgatgggccctgatgccacccccactcctgtgtcccagatcatcgaccccttt

SEQ ID NO: 295309 - DNA, 122 bp, Homo sapiens
ttatttttattttgtagagactgggtcccgctctcctggtctctcaaagtgcgatccgcccgcctcgggctcccaaagtgcgtgagccgccgcacccggccataaatcttaaacctaacgtg

SEQ ID NO: 295310 - DNA, 122 bp, Homo sapiens
acttgtctacaaacttaaaaaaaatccaggggccagccacagaagagcccactcagtcatcgtcagtggtaggtatctctcagatcctaataggtgaacatgtttcctctgtggcattgtag

SEQ ID NO: 295311 - DNA, 122 bp, Homo sapiens
gaagtggtatatttcacattcttggaagaattccttggttacctttatttaagcaatcaacggacaaaaacacagctcatcagccctcatgggcatctgactgcgtagccaaggggctcgtt

SEQ ID NO: 295312 - DNA, 122 bp, Homo sapiens
ggcgtgaaggcagaggttgggggagtgagggcccctaaaatgaaatccactcagggaagccgtgagctgtccaccctgatcgcatggagaacaaatcccctagggtggatagaaacagaagt

SEQ ID NO: 295313 - DNA, 122 bp, Homo sapiens
gcaggcctccagccaggagtgcatcaacgtgcttctgcagtacggctgccccgacgagtgcgtgtagttctgttttatttgactacagtctccttggtgcaaaaacaaaatgggaaaaataa

SEQ ID NO: 295314 - DNA, 122 bp, Homo sapiens
ctcacgacagctaggcggggagcgccgcctcaaagggtgcaaccttgatttcccagaggacgagtctgtctcagtatctacgtcattccgtagcctccgctgccgccatctttgttggggct

SEQ ID NO: 295315 - DNA, 122 bp, Homo sapiens
gtgctcaaactggaatttgtaccttttacttttctctctgaaaatgaagggcaccaaaaacgaaggtgccaagaatgaaggcagtgagcaatgccagaatcgtcaggggcttttgtgatttg

SEQ ID NO: 295316 - DNA, 122 bp, Homo sapiens
cgcgggttcccggcgtctccaaagctaccgctgccggaagagcgcggcgcccgacggagccgtgtggaggccaaaactcctcccggaagccgctactggccccgcttgccaggcccagcgtc

SEQ ID NO: 295317 - DNA, 122 bp, Homo sapiens
gtattttagcagtagataacttattttgacttcacagactcacagctggagggaacttgccgtgggctgagtcatgccctgagtctcactcatatctgtttagatgagactctggactttaa

SEQ ID NO: 295318 - DNA, 122 bp, Homo sapiens
acggggcatccccagcacaaacatcagctacagcaaaggcccaggtaggactgggtttggcgaacagcaaggaggccctgtgtcgggagcaaaattaaagagagttgtatgaaatgtcagtc

SEQ ID NO: 295319 - DNA, 122 bp, Homo sapiens
ggacgatggcttcttggacagactacataaattgaatattttataaacattctaatgctgcgttagggagccttggcgaggtggtgggtcgggtccctgcacggcccgggatacagccttga

SEQ ID NO: 295320 - DNA, 122 bp, Homo sapiens
caaggagcacggccctcctgtcggcaccatcagcgggagagtggcgagcggacgcctagacggaggggccctactcagaccccatcgagccagttcccaagcttttccctccgacctgctcc

SEQ ID NO: 295321 - DNA, 122 bp, Homo sapiens
tttccattcaaatccgcacttgctaaggatgcagcaggaagccagtggtgttctaacaaacgtgcaggacccgggaacctgtcatgtcctttcttacttgtgcgacttctctgtgttagccg

SEQ ID NO: 295322 - DNA, 122 bp, Homo sapiens
actgtttctcacttgccaatgcatttcatgatctgtcccctgcctactgtaaccccctctcgtgcagtaccactggataatagctatcattactacaggatgaggccatgctcctgagaatt

SEQ ID NO: 295323 - DNA, 122 bp, Homo sapiens
atgggagcccgaggtgattggagggtcaaggggatgtgacgcgtcccgcgccgccgccgccgccgctgccaggactctcagtgccggttttaatgggcagctccctcttcgccgcccccctg

SEQ ID NO: 295324 - DNA, 122 bp, Homo sapiens
cacggcttggggcatctgctctgtgcaggtcccggtgagcagaactgagagctggcaggccgcctggctgtcctgcagaggacggattggaattgccaccgcagggccggccagtgctgtga

SEQ ID NO: 295325 - DNA, 122 bp, Homo sapiens
ttttttccggcccagacgagggctccagcccactcaccagatacacttaaaatgtaaatacgagcttccagaacaaatgctacaacacaaaacagaaacacatgtgcggccgcgcggcaagc

SEQ ID NO: 295326 - DNA, 122 bp, Homo sapiens
cccgtgaagtgcattgggagggaggggacggggacacggcgctattgaaggaagctcggtcgaagccgcctgtttgacacacaacaccggctggagaaaccgttcagctggtattttcccag

SEQ ID NO: 295327 - DNA, 122 bp, Homo sapiens
tgaattgagggaaggtgagagcagaagcaatccgggcctgaagggcgattattctagggtcggccgaggggttcaggccaaagttcattgaaatcctagctgggtccctggaggacgagaaa

SEQ ID NO: 295328 - DNA, 122 bp, Homo sapiens
gatcattggaccgtttgcgcgaaaccagagtggccgattaagggatggggctccgagcaccgggggtggtggcgactgtgggcgaggggaggtgggaccgacccccacccctacactcaaaa

SEQ ID NO: 295329 - DNA, 122 bp, Homo sapiens
aacccgggaattgcaccctctgcccttggcaaggtgtgagcttccaggatctctccgctgcgacttcgggtgttagggtttttgggctctttccgggacccaagttccagggcaagaaggtc

SEQ ID NO: 295330 - DNA, 122 bp, Homo sapiens
gatgggagagctcggagctatttcggactccaggccaacatccacggagaccttgagttacgtcatcggaactgtctggactttggtccccttatgccaaatgcggtttccagaaaaaggat

SEQ ID NO: 295331 - DNA, 122 bp, Homo sapiens
atgtgggcggggccacagactcggccggatgtgggtggggccacaagcttcggtttacttcgtagatagttgggtacaagtgacgctaggatgataggcggagtcaacaggttcgccagata

SEQ ID NO: 295332 - DNA, 122 bp, Homo sapiens
atgggccccagggaaatgccagtaccccgggccggagagtagccgagccccagactgagtcgttgctccatgggccacaaaagctggttcccgcacagcagccgccctgggccccggcagac

SEQ ID NO: 295333 - DNA, 122 bp, Homo sapiens
gcggttttctcgtttcaacaaggatgctcattttaatcacttgccccaagatctccagaccgagcctggcgggactttggaacttgcctgctccaaatccgccaaatttcgctctctcctcc

SEQ ID NO: 295334 - DNA, 122 bp, Homo sapiens
tccagcgcgctcaccaccgccaccgccgtcgtctcggctttatttacccagcccggcgcgcgccgcccgggaacaggaatagcgaggccttctcatgtttcctgactgccggtcccagccgg

SEQ ID NO: 295335 - DNA, 122 bp, Homo sapiens
gttttcaccctttccaagctgcatgagctccagccacccctaggaggagacaacatatcacgcatctcaagtgagtggctgtggggaggggcaagctgactgtttggataggtggggcctaa

SEQ ID NO: 295336 - DNA, 122 bp, Homo sapiens
ggcagatccaacaggaggtggagctcaggcagtaatgctcactggcctgcagctcactcccgctgtgaggcctgtttcttaacaggccacagactagtggcaggggtagggggttaaggacc

SEQ ID NO: 295337 - DNA, 122 bp, Homo sapiens
agatttgtgccgtgttttgcgttttaaaggctctggggaagatgacctgttctctgctcccgggtgagcctgcgtggcagggctttgcaggtgcttgtccagcccgtcctcaggtgttgggc

SEQ ID NO: 295338 - DNA, 122 bp, Homo sapiens
ttttccttccaaactcaccagggccctcgatggtgacctggaggtcggtgaggtcctcctcgttgggaaagaccttgatgccatcgggtgggtctgcggtcagtgtcgtcacctccttgtac

SEQ ID NO: 295339 - DNA, 122 bp, Homo sapiens
gggtcagcgcgcgcgggtggggctctggccatgggcatggggcggggccgtcagcgggggcgtggtcggggtgtcgcgcgggaacccgcgcgggaggagagcggggattccggaactagagt

SEQ ID NO: 295340 - DNA, 122 bp, Homo sapiens
agcggggttactttcgaccttgacaagacgtattcagaagtccgtgtggaaaaataaacacgaaggaagagccggcatttttggcagagtgtagaagaggctccagaacactgcggactcac

SEQ ID NO: 295341 - DNA, 122 bp, Homo sapiens
tctagatctgccacttccaattagatctacagtaggggcgggggagaggagatcgggcagcgattctaacttttgcctttcggagatacagtggcggggcaggccaaacggcatctctgcag

SEQ ID NO: 295342 - DNA, 122 bp, Homo sapiens
tctgcccactctaccctcaagccaggatgcccggagcggtccccggaaatgcgtgtgcttcgggtgatttaactgattattgaataggcccgcaggaggtgtgtcctgcccccgaggccgca

SEQ ID NO: 295343 - DNA, 122 bp, Homo sapiens
aaaaaggctttcaaaaaaattaagttggtaaatttcctgtttgtttcatcttggcttcagcgggccacccagtagtttcttttgcacgagagaggattaagttacttgaccctgtgacttta

SEQ ID NO: 295344 - DNA, 122 bp, Homo sapiens
cctccaagaagtctctgctcctttatcaccatgtgcccaatgcacatcaagcacctgctacgtgctggagccttgctggggctttcatagtcatcatctcagtcctcacctctccccttgca

SEQ ID NO: 295345 - DNA, 122 bp, Homo sapiens
catacttttactgtgcgttttctatgtgtagatacacaaataccactgtgctacacctgtcgtacagtccagtaaccttctgtagaggcttatagcctagaagcaacaagctagaccatatg

SEQ ID NO: 295346 - DNA, 122 bp, Homo sapiens
gcgcccgctccgcggagcccaaggtcgctgcaggtgcggagcgtcccggcttcccgcccgcgcccaaagtggcaccgcggagacctgatcgccgggtccaccctgcaggaactcgccccggc

SEQ ID NO: 295347 - DNA, 122 bp, Homo sapiens
ttacccgtccgcccattattgggcctgctctgtgtcaggcactgttctaggttcccgggacgcagctgcgagacagggctccgctcacgtggcgagggtgctgcactactttaagagttaag

SEQ ID NO: 295348 - DNA, 122 bp, Homo sapiens
gttcgtagtgaagctttgcgattagacaggattagccattggtcgaggctccacagttaacgaagagctgaatgcacaggcgtcccccccttaccagggggacacttcgaaggtcctcagca

SEQ ID NO: 295349 - DNA, 122 bp, Homo sapiens
atgagggaggcgactgggagtaggaggaggggccgccagggcacatctggagggacggaacgcacatgcaggttcaccgcacggagcacacacgtgctcccagcccagaactcgtgctcatg

SEQ ID NO: 295350 - DNA, 122 bp, Homo sapiens
aaaacatgcaaaggcagagcaggggtggccctgccccgtgaaatcctcttgttcaagggccgctgtccccacaggaaatcagtgaggaaaggaccaacctgctgggcccctttattccctgg

SEQ ID NO: 295351 - DNA, 122 bp, Homo sapiens
gcagcgggtcctaagaggacggctgccacagcctcatggagtacgcgtggggtcgagcagcgctgccatgcttttctggggcgtcagcatcctggtgatctgtttcatcctctccttcttcg

SEQ ID NO: 295352 - DNA, 122 bp, Homo sapiens
ttatataccaactttaaaatatgtctcttgacacaatgtacaggataaatgacatctgtacgttgttaagttccaagataaaaaagtgcaagaaccttgaacctcaactaagattcataaaa

SEQ ID NO: 295353 - DNA, 122 bp, Homo sapiens
tctctctagcggagcaaacagctgggctccagctggccctggcttctgcaactgcgcagtcggcgctgtgacgcccggcgcggctctgtgacgtcacgaatcggtcctctgtaagaggggag

SEQ ID NO: 295354 - DNA, 122 bp, Homo sapiens
tatccagtaaaaggtccaattccagcagctctgccagaagctacagccttgacaactgtacgaacatttggcactggtgctgcatgaggggcgggaacataccaagcacagggttaaccagt

SEQ ID NO: 295355 - DNA, 122 bp, Homo sapiens
agctaaggggggtgactgatgaggacattcacacgccagtggggagactgtggggaaaaccggggtgtcttctaggctggacctgggggggcctcagccttgttggggggtctcctcacatt

SEQ ID NO: 295356 - DNA, 122 bp, Homo sapiens
ggctgaaggtccctgtgggtggaatgcagggaggttcccggcacccctcactcaccgtgacggggcccaggctgctggagcggtactgagccgcaaaggcgatgaagttggtggcctgggct

SEQ ID NO: 295357 - DNA, 122 bp, Homo sapiens
tagttgcctcttcctgatggggaagtgagctctctccagttctctggctcacagcatacgcgttgacatccctgggccacctctttcaggagcattacctgccgggtcctacagtcagttga

SEQ ID NO: 295358 - DNA, 122 bp, Homo sapiens
ctcaagtgatctgcccgcctgagtctcctaaagtgctgggattacaggtatgagccaccacgcttggcctaaagaatttctgaagatgctttacagtaccagattttgataatctggatcag

SEQ ID NO: 295359 - DNA, 122 bp, Homo sapiens
gttgaaaaagctaagtaattctgtaaaaatgtctactttctcattacagtaagatgttttcgcagagttaacagtgctctggtgtagataaccaagactgcttctgtaaattaggcctactc

SEQ ID NO: 295360 - DNA, 122 bp, Homo sapiens
aaaaaaaaaaaaacacgccaaacaacgataatacagacacacagacacagatggaggcaacgatacaaactcggaggcagagagggacaagatggctcccctcagttcgggcgaggctgcgg

SEQ ID NO: 295361 - DNA, 122 bp, Homo sapiens
gatgccgcagggagacgcaggcctcaggatggagtagccgcaggcagacgcagtcctcagcgcgccagggatggagatgccgcagagagacgcagcccatagtgtgcccgggatggagatgc

SEQ ID NO: 295362 - DNA, 122 bp, Homo sapiens
cctcctccctgcgctgctccccaggagccagtggacacaagcagagggatacaaatttcgcgcgggcagcgctgaggtgggccgtaaagaggaacggaccggaagtggtggtggttatagca

SEQ ID NO: 295363 - DNA, 122 bp, Homo sapiens
cagtgatgtcctgcatgtgtcccacagggctaagtgtccacacctcagttctgtcttgagcgggaggggctcagccaggcctctcagccctgctctgctgggggcctccacacctgcagagc

SEQ ID NO: 295364 - DNA, 122 bp, Homo sapiens
cttaagagctgtaacactaccgcgaaggtctgcagcttcacttctgaaccagctagaccacgaacccaccagaaggaagatactcggaacacatccgaacatcagaaggaacgaacaactcc

SEQ ID NO: 295365 - DNA, 122 bp, Homo sapiens
gctggcttcacccagtggatcccgcacccaggctgcaggtggagttgcctgccagtcccgcgccgtgcgcccgcactcctcagcccttgggtggtcgatgggactgggcgctgtggagcagg

SEQ ID NO: 295366 - DNA, 122 bp, Homo sapiens
cgggctgacctcaccttctggaaggtgcacctgtgtgcgcaggcatccgagtccatgtcacgtgctggcacggcaatcgccatcctttcacaacaggtcacgaagccgactgattttgaatg

SEQ ID NO: 295367 - DNA, 122 bp, Homo sapiens
cagcaacggcgacgaaagcagcgatcccgggccccaacaccgtgcccagggccccgggcccgagcccaccttaggtcccctcacccggctggagggcatcaaggtgaggacctccctgcccc

SEQ ID NO: 295368 - DNA, 122 bp, Homo sapiens
ccgatggcgcacagggggcaccttctctgggctgtaggccccagggcctggcgtcacctccggacctgagagagtggggaaggaaaggtggcactgatgtcctcacctgcccagagacccgg

SEQ ID NO: 295369 - DNA, 122 bp, Homo sapiens
actcaggtgtgcagtcatgacagaatgcatcagagcgtaaaagaagctgatgagccaggccgcagctgccaacagaatacacacctgggggttcatgatgacagtgtagcgaagaggattgc

SEQ ID NO: 295370 - DNA, 122 bp, Homo sapiens
ctcaggcccaaagtggacaccggtgctgcctgagggtcagagtgtccacctccagcagcccgggcaccgggcaggattcaagctggagggggctggggcgggcgaagccgggcacggggcga

SEQ ID NO: 295371 - DNA, 122 bp, Homo sapiens
ggacccccacgggagatcccggccggagaagcgcccccattcaagcccagagaggggccacgcctgtcggaccccccgtcccacgccaacttttcagacacagcagggccccgcgcagccgg

SEQ ID NO: 295372 - DNA, 122 bp, Homo sapiens
agtgtgggtcaggaccaggtcctatccctacctgggctggaagtgggtgagtccagggaccgagactcgctgccgccacccacgctgtccacatcgctgcccggagtggggcctggagtccc

SEQ ID NO: 295373 - DNA, 122 bp, Homo sapiens
agccaaagtgccattaaagctcggggcggagaggatgcgttacctgggtcccgtctgctgcgagaggcagggcaagctggaggattccctctgaatgattaagaactccgcaattcgcctct

SEQ ID NO: 295374 - DNA, 122 bp, Homo sapiens
accaagtttttgtaactgtccctgttattcttattctcttgtgcttcgatctacagccaacggtttttttggttttttgtttttgagacagagtctcgcttcttcacccagtctggagtgca

SEQ ID NO: 295375 - DNA, 122 bp, Homo sapiens
agccttcacaaggcatagcacattttcaccaccctggaaagttccctcatcagttcctcacgtgaatcccttcccagtctgtctccctgccagaagtgtctgtcaccacagaatagtttcgc

SEQ ID NO: 295376 - DNA, 122 bp, Homo sapiens
agtctcttcttttggctggggtcctgggacagcacttctttccctgggtgtctggatccccgccctaagcctcttgccactctggggatcagcgctttgccagctttcctggggtccaggag

SEQ ID NO: 295377 - DNA, 122 bp, Homo sapiens
aaatttgaaagctactgaccagaagaaacttgcgctgtgtacaaaagaaatgcccaagaacgttcccaacaaaacacagtcctaagggccccaacctggccaaacactcatccacgggaaga

SEQ ID NO: 295378 - DNA, 122 bp, Homo sapiens
ttctgtgacagttgtctagaatttggctgctctttattctccctagaattcagaagatcccgcggttgttggtgggtgccgccgacgggtacctgtacatgtacaacctggacccccaggag

SEQ ID NO: 295379 - DNA, 122 bp, Homo sapiens
acattattggcttttgagacccacaaatttagtccagctccacaaacatttactgggtaccgggtaggtgctgagaactcacaggaggtgagaggaactcactgtctacctagaatgtccca

SEQ ID NO: 295380 - DNA, 122 bp, Homo sapiens
gacagtccacacatcccagtccaccccacacccagtgaagattcttcagatgctgagaaacgtgctggggctgaggtgtgcatcccagaggcaggaggatgggaggacaaaccctccccggg

SEQ ID NO: 295381 - DNA, 122 bp, Homo sapiens
tagctatgctggaacctcccctagcaacaatctgtattttgtaaataaacggcgccgcagcgccagcccagaacacacaccctgcgccctttgttaacactgctaacctttcccccgccctg

SEQ ID NO: 295382 - DNA, 122 bp, Homo sapiens
actggtgtgtgcccagcacggagcccaagaacacgtccacgtaccgcgtcagctaagggccgccgtgcatctgcacctgagaggacggactgccgcctctgggtccccccaccgtggtgccc

SEQ ID NO: 295383 - DNA, 122 bp, Homo sapiens
catcagcttgtcaactggtcatgtgctttaagatcagccatctcggacattgaggtgaggcggagagagggaagcaggtttgtgagagctctgaggcagagtggtcaatgattaagagctca

SEQ ID NO: 295384 - DNA, 122 bp, Homo sapiens
aaacagaacagtaactcagggctcataaggatggatcttcagtgttattgaaataacagccggctaacaggaattgttcagctcactagacagttgcaggtttaacataggggggtaattga

SEQ ID NO: 295385 - DNA, 122 bp, Homo sapiens
ggtgtgtgttggattgtgagctgtgcatgccaacaaggctgtcagcaagaatgtgttgaccgaggcgtgtatgacggcgtgccactgcgtgtgatgagcgtgtgctagcggttgccagtgtg

SEQ ID NO: 295386 - DNA, 122 bp, Homo sapiens
gccgcagccgcagcaagagcggcagccgagagctagcgagagagcgaaccaacgagagcgcgcgcgcacgcggcgcccccgccctcgcgtcgcgcgtttgaaggagggcggttgcggcacgc

SEQ ID NO: 295387 - DNA, 122 bp, Homo sapiens
ctcgagcccctcggggttcaggctgcctgccaccccgagacccagaagacgtaactttcccgcttgagggtttctgtggggccttctctaaatacataatgtcctcgggaagtttcgtgatg

SEQ ID NO: 295388 - DNA, 122 bp, Homo sapiens
tcccctaaagcacgggaagcttcgtgttttatgtttgggctgaatgaaaagaggaacgcacgctctttcctgcccaagccaacaaaagagaaaatagcgggaaacgtccctgacctgagaaa

SEQ ID NO: 295389 - DNA, 122 bp, Homo sapiens
gcaccccgaatgcaagtgcggttcgctgcgtggccgcgtgctgggatggatcgcggaactcgctagataattgaagatctcgaggagctctgaaatggatcttcggtttctacgacaaaccc

SEQ ID NO: 295390 - DNA, 122 bp, Homo sapiens
tattatgtgtctagcactgttctaagggtattaatttagtttttgctggcaacagccctacgaggtaggtaatatgattacatccattttgcagatgaagaaactgaagctagagaggttag

SEQ ID NO: 295391 - DNA, 122 bp, Homo sapiens
caaattatttcacttttcgaagcttctaaccttcaacttaatgacttgggaaaccaagcccgcctcttatggtcgctatgagttttaagaggaacgaaggcaaagcccttggcacaggaccg

SEQ ID NO: 295392 - DNA, 122 bp, Homo sapiens
catccccaaccatccaattctcttctcaaaaggcaattttgggtcaggcgccgtggttcacgcctgtaaccccagcactgtgggaggccgaggcagatggatcacttgagtcaggagttcga

SEQ ID NO: 295393 - DNA, 122 bp, Homo sapiens
gcctcgaccgagtcctgggccttgtcaggggcggccgtgaggcgccggttgctgggggagcggtgacgtcgcggggtgaaagttgaggggcggtgacgtcgggccggcccgggcggaggctg

SEQ ID NO: 295394 - DNA, 122 bp, Homo sapiens
taaggcttttgttgaagaatcgatttgcatccccattgttcctatagataggatcactgacgttggaatcataaggcttttgtttaagatttgcttaagatgtttttagctcttgagttcca

SEQ ID NO: 295395 - DNA, 122 bp, Homo sapiens
cgcagcagctgctggaagggcagcgagccgagggccgggcaagacgacatgccagggctgcgacgcgaatgcccaggacccctgccgccttttctggggcccgagtttagtttgttattgtt

SEQ ID NO: 295396 - DNA, 122 bp, Homo sapiens
gcttcccacacacggctgccttcagcgtgcacccacccgagtccacgcgtgctctggacacggcatgagccgccctacatgccctgtgcaaatactctaaggcgcctctgcctgccccgcgg

SEQ ID NO: 295397 - DNA, 122 bp, Homo sapiens
cggcgccatgtttgaattggtcgcagcgcctcctgcaagacctggaagaaagaaaagtaacgattcttctcggccagagagagaagcatgaccggttttgcataccctgtccccagaaaaag

SEQ ID NO: 295398 - DNA, 122 bp, Homo sapiens
tctgagaacaggcattttcttctaagtcttccacacacagcgtgggaatgtgtgggaggccgggcgtctgtgcttgagtgtaagtcggggcattgagagaatgacgccgtgtgtgataggcc

SEQ ID NO: 295399 - DNA, 122 bp, Homo sapiens
cttgtcttcttatgcggataaaatttctcaggtaagaaaagttagctctgagcagccctccgcctgatactaatactttaccaatggagattttccttttcttttctgtttttgagacaggg

SEQ ID NO: 295400 - DNA, 122 bp, Homo sapiens
ggcagctccgtgtgtgatgaccctttgtgaacatgcactctgtggcagcttcagctccaccgaggctttgggagagcggactacggatgcccggcgcggcccagctgtgaaggccgcgccgg

SEQ ID NO: 295401 - DNA, 122 bp, Homo sapiens
caggaggcctggcctggcaataactcatttgaatcatttgatcctcaaatgggatgggggcgagtgggcggattctgaggctgcctttggaatgcgtttctgtgatcctaggagggaatttc

SEQ ID NO: 295402 - DNA, 122 bp, Homo sapiens
cgctggtaggaggcaggtcccaggcctggcaagggttgaccccggagggctgggccggggcggcaccccaggagcacctgcccacgaggcggctgcgcggacagacgttccagcccctcccg

SEQ ID NO: 295403 - DNA, 122 bp, Homo sapiens
tccggcccatgagagcagggagggcacgaagcccaggtctggggtctttctccgcctgagcggtccctcaagggaggcacgcacgtgctgcagagccgggaatctggcctttgacctgcgcc

SEQ ID NO: 295404 - DNA, 122 bp, Homo sapiens
agaccgtaagccttccccactgtccctgggcacaatctgctggcgaatcctggaggtctgcgccggctgcccgtggggaggtggatagcatgagtgtgactgcagttgaatgtgtgtgtctc

SEQ ID NO: 295405 - DNA, 122 bp, Homo sapiens
cctttcctactgctcattccacaggaggaatacaataccagagaaaggagaggtgcttcccgaactccctgcacctggggaaacagggatgtctttaaaaagctaggtttgtgctaaggata

SEQ ID NO: 295406 - DNA, 122 bp, Homo sapiens
cgcagcagcacccggagccccagtcccggtttccccgcggtgccggagcccggagctcgccgccgcccaggcctcaggaatcgagtaagtaacccctgtttggccccgcgctcctctgccca

SEQ ID NO: 295407 - DNA, 122 bp, Homo sapiens
tcacccaactatgccggtttaggggaatggtcatctccatggcagtgacgttccacggtgcgaatgggcagagagagccagtggcttccggccttacataaccttctcacctggtaggtagg

SEQ ID NO: 295408 - DNA, 122 bp, Homo sapiens
cctgcgattgcaggggtgcaccgccacgcctgacgggttttcgtatttttttggtggagacggggtttcactgtgttggccgggctggtctccagctcctaaccgcgagtgatccgccagcc

SEQ ID NO: 295409 - DNA, 122 bp, Homo sapiens
gagatgaaaaaaatgccatagaggagacgcgaacgtactggttgggatgcaggagaaagacgggtgagcttgaggccgcagcaacagaaatgaccaacgtgaaaccagggagactccatagc

SEQ ID NO: 295410 - DNA, 122 bp, Homo sapiens
tggcacacactgggatgccgcagcctggccggctgtggggtggtttgggaggatccatgtcggctctgcctgcagtgaccagtgctctgtggggcagaggagctgaccagggagggaggtac

SEQ ID NO: 295411 - DNA, 122 bp, Homo sapiens
cccagcctgatccagctggctccccgcagcttcctccactcccaaagagcaggcccgacacgggtgggggtccctggctgtgcccccaccccctgccatcaccatctgggggttgtttatca

SEQ ID NO: 295412 - DNA, 122 bp, Homo sapiens
agggggtcaggaacatgtcagtctacctgtctcccaagaaaccagatgcccacactaggccgctcaaaaactcaaaggccatcccatgcacttccttggggttgtgacctgtacttcagcag

SEQ ID NO: 295413 - DNA, 122 bp, Homo sapiens
gtggagggggagagcagcccagcagcgggcgagtggctcagaggtgaccgatcggagccccgcggccctggagtggcggtgatgcctggagccaggcgggcgtggccgggcccggctcttgt

SEQ ID NO: 295414 - DNA, 122 bp, Homo sapiens
gtaatttccagaggtggagaagatattactgacaataacgtgaacacgctgtgtgaccaccgtggatcgtcatatccagggggggagagggggtgctgatatgactccccgcatcgcggggg

SEQ ID NO: 295415 - DNA, 122 bp, Homo sapiens
ttccagaggcttctgcagaagcgcactcactcctctggagacagctgatgaagcagagcccgtgggtaaaactctgaagtcatggacttgtcaaattctcctagcggggtcatttgcccaat

SEQ ID NO: 295416 - DNA, 122 bp, Homo sapiens
tgctcctggcagacgagacaacggtctgtgcctcatcagagagcggcgtctccagttaggcgctaatgctggatgaattagtcttgaagtggccactagtaggtctccttgtgggagggctt

SEQ ID NO: 295417 - DNA, 122 bp, Homo sapiens
aggcctgggcatggtgcgttgcaggacgggccgggcgcagggaccgccccccgcaccgtgcgccccacccagctgtccagaaacggtcagggtcaatgtcatcagcttctccatggaatggg

SEQ ID NO: 295418 - DNA, 122 bp, Homo sapiens
ccacccccgtcgccaaaggagctggcctcggccctcaggcccccgacagccaggcttccccggctccggccccccaggtagagggaccccagcagcctgtgtccgcagcacagacccagcct

SEQ ID NO: 295419 - DNA, 122 bp, Homo sapiens
acaaagggtaggggcagcccccagcactcccgccgcggcaggccaggggaggggctgtgacgtttggtggcctcatgcagctgagaggaagtagctaattgccaacctgatgactggcggct

SEQ ID NO: 295420 - DNA, 122 bp, Homo sapiens
agggaggactgcatcaccctgccatggcgactgtctactcacatcagttcctatgcagcccgcccacgggtgaaagtactgagaagtgggcagtcatgtttcccatgcttctaattgctgac

SEQ ID NO: 295421 - DNA, 122 bp, Homo sapiens
gtgctgagagggcatcagaagtccttgagagcctccagagaaaggctcttaaaaatgcagcgcaatctccagtgacagaagatactgctagaaatctgctagaaaaaaaacaaaaaaggcat

SEQ ID NO: 295422 - DNA, 122 bp, Homo sapiens
ctcgccagcgctgcgcttggggtagccggtgtcccaggaccgcatgacctcgagggtgtgcgggtccagccggctgaccacgatgttgcccgcgttctggttggtggtgtacacagcccaga

SEQ ID NO: 295423 - DNA, 122 bp, Homo sapiens
gggacaccccagccctgcctcaacacctgggtccctccataactaccacaggcaggtgggcgaccccaaagaagatcccaggactcacaataccccctgagaacacggacactatgtggggg

SEQ ID NO: 295424 - DNA, 122 bp, Homo sapiens
agcgatttgtctgcctcagcctcccatagtgtggggatcactggcatgagccaccgcgcccggccacttttgggttttctgtgaaagcgatggtctgaggtggctgaagacgtacatgtaag

SEQ ID NO: 295425 - DNA, 122 bp, Homo sapiens
tttcatgtgcttgtggacccattcaatcattctttttttttcttttttgagactgagtctcgctctctcgcccaggctggagtgcagtggcgcgatctcagcgcgctgcaacctcctcttcc

SEQ ID NO: 295426 - DNA, 122 bp, Homo sapiens
aagctggggcacgggagcagtcgggaggacagaggggtcccgctgaggctggcccagtggcggtcacggtcgggtttgccacgaaggatccttccaaaggcctattaagtgaattcctgtag

SEQ ID NO: 295427 - DNA, 122 bp, Homo sapiens
cgcagtcgctgaaacagtcacacatgcctgtctgccagttggagttctggggggccggaccgggaccgactccaggttgggtcacaacgaccaccggcgcctgagcttgcattttcagtgca

SEQ ID NO: 295428 - DNA, 122 bp, Homo sapiens
ccaaataggccacacatagaatttcagttttattaaaataagcacaatgtataaaagcaccgtggtgttgtataaacgtctgcctgacaaatgcaaatctattttctttatgtaactcaata

SEQ ID NO: 295429 - DNA, 122 bp, Homo sapiens
aaattcctgattagatttgagcattggcaggcacagtgacccacaggaaatatcatagcacgttaaggaatgtgtgtttataaattccttcttctgtccgtgagggagaatagttccagctt

SEQ ID NO: 295430 - DNA, 122 bp, Homo sapiens
gacacaaaaactgacagggcggaaccgcgacacggtgcctgatgatatcaaaaggtctcacggctccggagggacccagtcgcccacagccgccaggggcgccgccggctccgagcccgttg

SEQ ID NO: 295431 - DNA, 122 bp, Homo sapiens
ggcagacctgggaggagtagtgagcagcccgtccctaaaggagtccaagcaaagtttctgcgcaggatgcctttggctgtgtggtgggaaggaggtgtcttgcagcgtggttcactgcccag

SEQ ID NO: 295432 - DNA, 122 bp, Homo sapiens
tccacttgtcatgacagtgagcggccaagctggatgtgaacccaggtttttgtatgctgccgcccggtggggttggggaggacttagtggcacccactgacctcccactggggatcggggtc

SEQ ID NO: 295433 - DNA, 122 bp, Homo sapiens
acacgcccccactgatattgtttctaatttccgcgtgggagaggatatgacacccaatatcgcagggagtagaaacacccctgtgatactgttcttcatattcagggagaaagaggatgata

SEQ ID NO: 295434 - DNA, 122 bp, Homo sapiens
tttaccttctctctacgctaggaggatacttggtgacctcattcttgttgcttaaatacccgaccttgctgcaccagagaaagaagcagcgattcctcagtaaacacatctctcaccgcgga

SEQ ID NO: 295435 - DNA, 122 bp, Homo sapiens
ctaaatttgttattgtaattgtttatgtgctgtttcatcttccctctgcaaaaatagtgacgtcctaagttagaagagaccagatcatatttatctttgtgtcctcaatgtctagaaaagtc

SEQ ID NO: 295436 - DNA, 122 bp, Homo sapiens
tcttctattggcaaagccagtgcttcaagcctgtatcctctgccctgttaaatttggtcccgcgttctcctggaacaacccatgctgagtcagatgaacaacccatgctgagtcagatacac

SEQ ID NO: 295437 - DNA, 122 bp, Homo sapiens
gagtgagtgagtaagcgagtgagtgagtgagtggggagggagtgagtccgtccacgggggcgggccctctccatgctgcggatctcttaggagatatactgcgcacgcagaggcccggaagg

SEQ ID NO: 295438 - DNA, 122 bp, Homo sapiens
gccccgccccatcccgggcaggttgcacggctattggctcctctggagcggagtggcaggcggggtttcaggtggggaccgggtggccggcgaggcccggccgcaggagcgcgccccgcctg

SEQ ID NO: 295439 - DNA, 122 bp, Homo sapiens
caggaaaatatatggaaggcctagaagggaaggagtttagtggagacacgggattcttcacgtaaacaaggagctaagtgccaataggtgactcgtgaaagacatttaagtgtcagaaattg

SEQ ID NO: 295440 - DNA, 122 bp, Homo sapiens
aggggaaacacagccggtcagggatggagaaagataatgggagagacacatagagagagacgggtgagaaaccatctctaatttgaggggcaagagaggggctgtatctaggccatctgccc

SEQ ID NO: 295441 - DNA, 122 bp, Homo sapiens
aatttttggaaatctctcttttttcctccctcgctcgctgccgggcatgtcctgatctggcggccgctcctaccaccctgggcagccgagcagagtcgtccccagcgggtctccctccctgc

SEQ ID NO: 295442 - DNA, 122 bp, Homo sapiens
gcagaggccccagggtcaggctctaggacaaccggcgaaaaagcgggaacctctactccacgcccttggtttttcgccccttgacagcttgaggctccgccccgctttgccccgccccccca

SEQ ID NO: 295443 - DNA, 122 bp, Homo sapiens
gttggtctcaaactcccgacctcaggtgatctgctagccttggcctgctgggattacaggcgtgagccaccgccccgccagcatacatcaattgtcagtaaatttcttcttcgcctactagt

SEQ ID NO: 295444 - DNA, 122 bp, Homo sapiens
ctgtaaagaagatctgaagttagttctgtaaaatttctgtatatagaactttattttgtgcggcgtatcttttgaacatcatgacttcccagattcacatgcagagaatcaatgcatcaggg

SEQ ID NO: 295445 - DNA, 122 bp, Homo sapiens
acttggggctcccgggcttctgagcggctcgggttccgcgctgccggcagggcttgggggcgccttagagccgaaccccgttttttcaggaaagggcgctgcgaccacccccgtcccgggcc

SEQ ID NO: 295446 - DNA, 122 bp, Homo sapiens
ccaaaaggaagcgacttctggactctcaccgggacgtcaaattttgctctggggattagccgggcctggtggcgcatgcctgtaatcccagctactcaggaggctgaggcaggagaatcgct

SEQ ID NO: 295447 - DNA, 122 bp, Homo sapiens
gggggcggcacgactggaggcacaaggaggacgccggcgtcttctgctcaggtgagcggccgttgggtatggaatgatcatgctgttttattacgtacagtcatgcgcacttgctttccaga

SEQ ID NO: 295448 - DNA, 122 bp, Homo sapiens
ttctaaagctggtaaagcctcggatcatcagccagtgtcaggtgtcacagcatagccaagcgaccagacgagcagatgagaccttgttaatctccagtggtgatgagtaaccgttctctcta

SEQ ID NO: 295449 - DNA, 122 bp, Homo sapiens
aggcgaacttgccagggggcctaccaggggcagaatggggtcctccggaccagccagccgcgtctcagccacctccgcagcccccggggccctgaaccccggccgcgttgacgcgcgcttct

SEQ ID NO: 295450 - DNA, 122 bp, Homo sapiens
tgtttagcaaccgctgtagccccaggtgcattgattttctgggcctctttcctttatcagcgccagtgtctctgcaggagtggcgtgagcggcggccgggacagctcctgacagatgggcag

SEQ ID NO: 295451 - DNA, 122 bp, Homo sapiens
aagtacataactaacaataagcttcaaaaattcaatcataaggcccggcaccgtggcttccgcctgtaatcccagcactttgggggatcacttgagccccggagtgtgagaccccgtctcta

SEQ ID NO: 295452 - DNA, 122 bp, Homo sapiens
ctgcccgccttggcctcccacgttgctgggattacaggcgtcagccaccgcgtccgaccccggccccctagttatgaaaaccaagtatgtctccagagattgccacatgtcaccagaggggc

SEQ ID NO: 295453 - DNA, 122 bp, Homo sapiens
atacataggctcacataagtgacacttactatacttttttgcctatgtaatgagtgttggcgaagtacgtgagtgggaaattcagtcttttgcattcaagctctaagtaattctaagagacc

SEQ ID NO: 295454 - DNA, 122 bp, Homo sapiens
ccacccctgttactctgtagccccatgtcctgctttatttttctccaaagcatttatcatcgctgggtttatatttatttctcttcgggcttttctcactggatcgtaaactccatgaggac

SEQ ID NO: 295455 - DNA, 122 bp, Homo sapiens
tacagcggcagcgagggcgactcggagtcgggcgaggaggaggagctgggcgccgagcggcgcggcctgaagcggagcctgagcgagatggagatcggtatggtggtcggtgggcccgaggc

SEQ ID NO: 295456 - DNA, 122 bp, Homo sapiens
catttttcctggtgtggacgctccgccttcttactcattcctctgggcaggggtgctgttcgcctcccctgcctggacgttgtgagtgggctgcatgaacaggcagtcgggcaccatcttcc

SEQ ID NO: 295457 - DNA, 122 bp, Homo sapiens
tcctcggcgccgctgcggggctgctgggctgcggggctgcggggctgaggagctgcggtccgcggcgtcaggggtgggcgagggtgagcagcgcacgaaccatccagagcccagaaagtctc

SEQ ID NO: 295458 - DNA, 122 bp, Homo sapiens
agtaatgggctaataatcctccctttttttcttttcattttgtagagattaagaggcgctcgtagcagaacggccttgccttcagctggtggcgaggataggcaatctcatggaaaagttgg

SEQ ID NO: 295459 - DNA, 122 bp, Homo sapiens
tctctgcaggcatccaaggggcgtatcttcagatcttttcaaatgtcagaaaatggcaaccgggaattattatgccagcattaccacgttggttgtacgatctaagaaaataaccacgtcac

SEQ ID NO: 295460 - DNA, 122 bp, Homo sapiens
aaattctctctgctaagtgtgctatgtttcctaaatttccagaccaggcctggcacccagcgtgtttcaaaagatatttgcacttgccctgatttgatggctcctgcatttcttacggtggt

SEQ ID NO: 295461 - DNA, 122 bp, Homo sapiens
tggccagatggcgagagtaaattgggggaatttctttcgtttccatcgaaccccacactacgtctactctttcggctttctcagccgttgtcccccaactcttgtttctttttcacgtcttg

SEQ ID NO: 295462 - DNA, 122 bp, Homo sapiens
agcatcctgcagatcgaaggggacgcacacaccgtgccactgcgggaggtgtgagctccacgctgcaggctgtgtgagagaggggtgagccggcgcccccgagtgaagacacaaagaatccc

SEQ ID NO: 295463 - DNA, 122 bp, Homo sapiens
catctatctatctatctcctttaaatgtttacaacctttgacttaccaatatctccttttcgactttatcctaaataaataatttttaaaaggcagatgagcctttttgtgccctgccagat

SEQ ID NO: 295464 - DNA, 122 bp, Homo sapiens
cctgagtttcacttggcatagctgatagctaagcagaatgtgtctatgtgatcaaccacccgaaaaaccttggaccctgagactggcatgggtttcctcgggtcttccacacatgtccttgg

SEQ ID NO: 295465 - DNA, 122 bp, Homo sapiens
tcctctccctgtttcaagtcccctttcttattccgaacacactcgcaggctcttccgacgcgcacccgggggtcctcactggcccactccgggagtcctctgcccgcttccccgacctcgag

SEQ ID NO: 295466 - DNA, 122 bp, Homo sapiens
tggcgtcggacacgtgtccatgggtgttgcaccgtgaccggatgggagccacgtccgatacgttctccccaaccctgatgctggtgtcagacacatgtccgtgggtgttccaccgtggccgg

SEQ ID NO: 295467 - DNA, 122 bp, Homo sapiens
cacaggcttcccgcacatattccagctgtagcatgtcggaggccgcgtacaggcgctccacgttggcctcactgagagacacacgacccgtgtagcagtagtcgaccaacacctcgaaggac

SEQ ID NO: 295468 - DNA, 122 bp, Homo sapiens
gcggcttttaaatataaaccctaaggccccaccttgatttaggaataggaaatccctgtccgaatcgggaattggcattccgtaagggagcggagggcctcaggccactaggcagctccgaa

SEQ ID NO: 295469 - DNA, 122 bp, Homo sapiens
taggtcagaaccatgcaacttgtctgcagtggaaagcaggataaagcaggtattttctctcggttgcttgaaacaactggtataaagtcatgatggttgtatttgggaaagtaagcagagtg

SEQ ID NO: 295470 - DNA, 122 bp, Homo sapiens
ggcatcttgacaacaacgctgttcttgtgtggctaaggagcactccaaaggtagctagttcgagttgaatcgtgcacgtgctgtaagtgtgaaatacacctaggtaccaaagagtccgaaga

SEQ ID NO: 295471 - DNA, 122 bp, Homo sapiens
cttaaaagctacaaagcaacttcaccagaatacctggctctctgccacataactaattgacggtggcattcaaagcccagcaagaaaccttacacctcctctaaggatttattcctgagata

SEQ ID NO: 295472 - DNA, 122 bp, Homo sapiens
cgatgatgttctgctgtggcagatggaatcgatcggctggtcctgcatcaggcccccgcacgcagcccagcctgcctgccggtcatggctcctgcccgacgttgtggttcttcagtgtctgg

SEQ ID NO: 295473 - DNA, 122 bp, Homo sapiens
tcctgtaatggcgcctgcgtcagacactaacatggcggacatagtcgtgcgcggcgcaaacgtcagcacctctaccccagccgctcagaaacagcagaggagagcagggccgtgctcactga

SEQ ID NO: 295474 - DNA, 122 bp, Homo sapiens
gccgcctggaggccgcagtgcggctcggaggccccaccggccgcccccgcagggctgcggcgcctttaagcccaaaggccctgagtcacgaggaggctccctgcccccctcgccctccaccc

SEQ ID NO: 295475 - DNA, 122 bp, Homo sapiens
gcggccgccggcgcgaaggccccagccgaaggaagctgcgcccccgcagggccggagccgcggctactgctccgagagccacgcagagcctggccttggccttggcctcctggtgctggggc

SEQ ID NO: 295476 - DNA, 122 bp, Homo sapiens
acattccagaggttgtgctggagccagaaggagcgctttcttatgctgctgtctccttcccgaactctccagagcctctggagtctttcaccggggcctccccgccctcgctccctcttggg

SEQ ID NO: 295477 - DNA, 122 bp, Homo sapiens
tttggtagagacagggttatgccgtgatagccaggctggttccaaactcttggcctcaagcgatccaccagcgtcagcctcctcaagtgctgggattacagatgagagccacgatgcctgga

SEQ ID NO: 295478 - DNA, 122 bp, Homo sapiens
aaccacaagagctttttagggaaaatgtgcctctgccagctggaggaagtgtgggtgtaccggggtcccggtgacaccttgtgatgtcagtcacccccagcctgaggttgattggctatgaa

SEQ ID NO: 295479 - DNA, 122 bp, Homo sapiens
cctcgtcagcacccgcgtcctctgagcacgtccagtgtccccagcctggcgatcaggtagcgaacagcgcaactccgaaatgctgcggctcccgcctgtttctgagacggcgagttgtagtt

SEQ ID NO: 295480 - DNA, 122 bp, Homo sapiens
ccactgacaaagccccccgaaaagggcaaaggtgggtatgtgcagggaccgggcctcacacggaggcctcacacggagctgctcacggagtgctcactgcatccgagaaacctgcgcttcct

SEQ ID NO: 295481 - DNA, 122 bp, Homo sapiens
tcttgacgtggctcagctgggtccctggttagggtctctcctgaggcttcttgaaggcgccggcctggccactgccgtctcaaggcctgcattgctggggggtgtgcttccatgctcctcat

SEQ ID NO: 295482 - DNA, 122 bp, Homo sapiens
agttaggaagggctacaaggtagtatttgagcttgaccttaaatgtgaatagggtttgttcgtatgtgaaagggcagagatgacgttccaggccaagagaacaatgtgagcaagcgtgtgga

SEQ ID NO: 295483 - DNA, 122 bp, Homo sapiens
gctcaccatgctcgcagaaggtgcccctccagccggccgggcaggtgcaggccccgctgacgtggtcacaggctgctccatgctgacactggcaccgctgctcacagccgggcccaaagtgg

SEQ ID NO: 295484 - DNA, 122 bp, Homo sapiens
atatatctggtgaggctagaaaaggaatagaaaccgccctgaagaaaggcgccttggcaccgcctcggtgcccaccagaaggtgcccggattgcctcttttgcgcaaagacaaagggggtaa

SEQ ID NO: 295485 - DNA, 122 bp, Homo sapiens
ccctttcctgggcagggtgggcctgactgcctgctccatccaagcactggggcctcgggccgcgcggaggtcccacaggagggtcagagcggcatcttcccttcagggccctcgcccgggca

SEQ ID NO: 295486 - DNA, 122 bp, Homo sapiens
agggacggggagaaggatcaagctagctcttcattggtcccttcccctcggtgttggccacgaatccgcccctctctccaagttccgttagctcgcggcttcgctcctctcccagactctcg

SEQ ID NO: 295487 - DNA, 122 bp, Homo sapiens
ctaactccagaaatcacttgctagagaagcagcccttcactgccttagtctgagcacccacggaaagcacgtgtcggagactctggcaaggcccgcgcagccgcagtagagggccagggggc

SEQ ID NO: 295488 - DNA, 122 bp, Homo sapiens
cgatccacccacctcagcctcccaaagtgctgggattacaaacgtgagccgcaccatgcccggccttctgttgtgttttgatgtgacaagtgcagtgaaaaacacaagagtggaataaagga

SEQ ID NO: 295489 - DNA, 122 bp, Homo sapiens
ggcccagaggccagtgggaggggcgcggggggcccccggagcgagcatgtgacccgaggccgcgcgctcggaaccagccccggcccgacgcccttggctggcacctgcttctcccccaccgg

SEQ ID NO: 295490 - DNA, 122 bp, Homo sapiens
gaatcccaggagtggaagtggaaggcagtagaagacagggagggcacgcctctgggaacacgggaacatgggtgggcatgagatccttgaataagacagcctgaagttcggaagagaccaag

SEQ ID NO: 295491 - DNA, 122 bp, Homo sapiens
cgcgaaggccaagggtgccagcggggtggtgcgggccttccgggtctcctgtgttgtcaccgtcacatttgatcacacccagagaggaagctgggtggcagggctccaccaaaggagacctg

SEQ ID NO: 295492 - DNA, 122 bp, Homo sapiens
atcctggcctcctacggtgccgtggcccgagctgtctgttgcatgcggttcagcggaggccggaggagggcggtgggcacgtgtgggtcccacctgacagccgtctgcctgttctacggctc

SEQ ID NO: 295493 - DNA, 122 bp, Homo sapiens
taaaaagtttttattcagagaaaaaatatttatggaacccctaccaggggccgggcactacgatgtgcacggaaaatacagtggtaagccccatagacatcccctacccttctggagcttag

SEQ ID NO: 295494 - DNA, 122 bp, Homo sapiens
actaagggacatgaaagaccaagggacagtaggcattgctgaccccactttcaggcctcacgctaactccaaccccaatcttgaaagactttcactttctacaaccttcatgtctgcactgt

SEQ ID NO: 295495 - DNA, 122 bp, Homo sapiens
ccccggtgggcgggaccgtggtcaccgaggtgggcggtgccagaggatctggcggcggggcggggcggggcgcgcgtcctggcttcgcccttccccggggcggggcctccggggaccgcggg

SEQ ID NO: 295496 - DNA, 122 bp, Homo sapiens
ctcagacccgcagtgaggtctgacgtcatttcctgccgtaagtatacagtgcctccgggtcgcggtcattttgagcccctgtctggatgacttcttgcggctgttctacccctccccctccc

SEQ ID NO: 295497 - DNA, 122 bp, Homo sapiens
acttgcgctgttcagaacggggattgaggggaacgagatcagaggcgtggagcccaattccgtatttcctcttgaaatagcgatagggagagagggaaaggatagaaaaactggaaaaggag

SEQ ID NO: 295498 - DNA, 122 bp, Homo sapiens
gctggagagaccgcacctcccaggctgctgcaggggcacaggtggcttcctgggggacagcgtgacagtctctatccagctttatgtcttcccagcacccacctccaggagtccaggcccct

SEQ ID NO: 295499 - DNA, 122 bp, Homo sapiens
taaagtagcatgagccctcttgacactttattttctccccttgttccctacagaaatttgcgcacatttctggctcaatcacttcacccattagatcctctccagaaagaagaaaattataa

SEQ ID NO: 295500 - DNA, 122 bp, Homo sapiens
cctcaggaaacgtatggactacaagtcccgaaatgcctccggcacttagctacgactgcacgtgcgcgcacagctgcccgccggaagaaccgagcttggctgtgtttatctcgttggggact

SEQ ID NO: 295501 - DNA, 122 bp, Homo sapiens
gagctctcggatcctctggatgctggcagaaacgttgcttgcaggtcgcttctgctcaaccgtacgaagctgatccaggagctgagggacaacctcggtcagatttcttactgcagttaata

SEQ ID NO: 295502 - DNA, 122 bp, Homo sapiens
ctctccctccctgggtccctctctccttgaagatcctgcctagggtgaccaggtgacccgcgctgccctgagctgggggtacagtgctctgccccttgcctctctgctgcaccaactaagcc

SEQ ID NO: 295503 - DNA, 122 bp, Homo sapiens
cttgcaggatttcaggacctttggttgagtggttttagaaaaggctactcaggggctgggcgcggtggctgtggctcacaactgtaatgccagcactttgagaggcctaggcggggggatca

SEQ ID NO: 295504 - DNA, 122 bp, Homo sapiens
gccctcggaaagaacggatattgctgtgacaccgcggggacgctctgaagggacgagtgtcggtgtggcaccggtgcacgctgaaggagccggcggaaccgggtggccatggggatgtgggc

SEQ ID NO: 295505 - DNA, 122 bp, Homo sapiens
cctggacgctgctcccgggggcagcccccggccagggccaggcacacccgattcctggagcgtcctaggttcctctaaacccgcggccagcgcagtctcgggtttccatgacgacgacgtcg

SEQ ID NO: 295506 - DNA, 122 bp, Homo sapiens
cactccttctcacagctgcttcccagcctagcctgtactggaaactccccaggcccttcccggcatagccagagccaccgccttcagaggcctccctgatttccctgccaaatgcctcccac

SEQ ID NO: 295507 - DNA, 122 bp, Homo sapiens
actgttttgggccaagcctggctttcaagagtcccctctagtggagataacctgctacttcggcttctcagttcagcccagagcctccctggccagtgaagattcagaaaacccccttctgc

SEQ ID NO: 295508 - DNA, 122 bp, Homo sapiens
acggagtctcacttacacagtgctcaatgtcgcccaggctggagtgtagtggcgtgatctcggcttgctacaacctccacctcccagccgcctgccttggcctcccaaagtgctgagattgc

SEQ ID NO: 295509 - DNA, 122 bp, Homo sapiens
cccagggaacatttggcaatgtctggaaacgcttttggtggtcaggacttggggggtggccgggcgcggtggctcaagcctgtaacctcagcactttgggagttggaggcggggggatcgct

SEQ ID NO: 295510 - DNA, 122 bp, Homo sapiens
tgagaccagcctggccaacaatgcaaaatcccgtccgtactaataatataaaaaattagccgggccactgcactccagcctgagtgacagagcaagactccgtctcaaaacaaacaaacaaa

SEQ ID NO: 295511 - DNA, 122 bp, Homo sapiens
cctgtctgtcttcttgagtgttttccctttccactcctgctcctgtggtacccctctggccgggacacccaggagaatgtgtcaggaggaacttcatccacacagggcaggggctctgagcg

SEQ ID NO: 295512 - DNA, 122 bp, Homo sapiens
ccttgagaggtccctgggcagtgagcctgtttatagacacccttctcccttccttggtgtcgcagacatcgcagtccctctgaggggctgacctgccccccaccttctggaagctgggaggt

SEQ ID NO: 295513 - DNA, 122 bp, Homo sapiens
ctggggctgggccctacttgttgcgggcaggcagggtggccgaagtccggtggggagggccgggcctgcggcggtaggagcggtagtgctgctggatgagcacagccgctcggcggctctgc

SEQ ID NO: 295514 - DNA, 122 bp, Homo sapiens
gattttacttattctacaaatgttcactgaatacctaccaggtaacagctgctgagtgtacggtgatgaatgaagcagaaattctcctcgccttgcccagtagaatacttcagtggagcttg

SEQ ID NO: 295515 - DNA, 122 bp, Homo sapiens
aacactactgttaaatatgctggataaatgaccggtatgcccaatgtcaggcgtgaaaggcggcagcctccactgggctctcctctgctccctgtgtgttttcctctcctctgggggcttaa

SEQ ID NO: 295516 - DNA, 122 bp, Homo sapiens
cgtgggttctgccctctcttctcagtcccaactcttcattctccttagccagcccactctcggtccctgtacccgaagcttgccagccgctagtacgcccaacgcaactctcacctgcattg

SEQ ID NO: 295517 - DNA, 122 bp, Homo sapiens
taatctctatttcgtatacctcctcctacagcgaaatttgtgaggcagtcctctgaagcacggccaatctggtgaacttttcctaaaatgagccatcgctaccagctttagtgagctaagac

SEQ ID NO: 295518 - DNA, 122 bp, Homo sapiens
ccatcccccgcccagtctgcacgtgaacaggaacatgtacctgcacgtataccaggtacacgcagacagatgcgggccatccccagagccgccgacagaggtcgctgcgagacggtacccgc

SEQ ID NO: 295519 - DNA, 122 bp, Homo sapiens
ggcgccgcaggttgttggcaagcctggtccggggttttaggttgagcccaagcggcaatgcgggatcgccaccgggccgcgcgggcttgggagggtgacgcccgcgaggacactgcggcgtc

SEQ ID NO: 295520 - DNA, 122 bp, Homo sapiens
tgtctgcacgtggaacagcccgtggctgccttgagtcagggcctgggaagatgatggtatcgtctttccttccatgtccctccatggcacgtggggctgtgggaaccacccatctgaagagc

SEQ ID NO: 295521 - DNA, 122 bp, Homo sapiens
ttagggtcctgtctgggacactggccttcctgcttacctgctctttccttcctccttggtcggaggaggggctggctcactgctctggcttcattttccagagctgcctgctgcagtcacac

SEQ ID NO: 295522 - DNA, 122 bp, Homo sapiens
catcggagaggaagggaagggctgccgggaggggaccctggagggcattggagtctttatcgaatatgaggacaggacgtccggttttgaaactatgcactgatcctatagtttccatggta

SEQ ID NO: 295523 - DNA, 122 bp, Homo sapiens
cgtcggtgctgttctgttctgggaaccaggtatatggctgtggacagaagccatgcctcccgggcttctcttccattaactggaggggttcacccggtcaccttcaagggccaagcactttt

SEQ ID NO: 295524 - DNA, 122 bp, Homo sapiens
ctatttttgttctggctctttaaagaaaaataattgggcataaaattttcaagactaaaacgatacaataacacatttggaagaaagcactgaattagactagaagacgatgaagaagaatc

SEQ ID NO: 295525 - DNA, 122 bp, Homo sapiens
cggctctcggcttgcaaagtccctctccccagtccaacccccggcccccacaggcctcggcgccccgccccgccccaggccccgccccagagagttctataaagttcctctttcccacctcg

SEQ ID NO: 295526 - DNA, 122 bp, Homo sapiens
ccactgtgtctcaagcattgtggaaagttctggggataaaggatgacatcttactatcctcgccctcatacagttaacagagaattacagtacaagtgaaaaatgtatggtagaaatagtca

SEQ ID NO: 295527 - DNA, 122 bp, Homo sapiens
tccagcgtccacgatagcagcccacgggacagcccacaactgagcatcattcacagagagcgagcgagatccccaacatggggcagctgggagggcgccggcggcctgcgagtgaccggcca

SEQ ID NO: 295528 - DNA, 122 bp, Homo sapiens
ggttttgtaactgaagaagcccagtgtgagcttctcatcttttcatatacctctaacccccggtactcattgaatcattgatgaggtatctcaattgagatttgcaaggactttgataccat

SEQ ID NO: 295529 - DNA, 122 bp, Homo sapiens
ttaactgattcattaatactcacttcctgtcgcaagagactcatgccctagagataaagccgtcggaggcagagtgcaggcctcgaagcagctggtcatgtccacgccctctgcaggcctcg

SEQ ID NO: 295530 - DNA, 122 bp, Homo sapiens
cctgcggaggcaaatggaagaaagagcccaacaggtggaatcatattagagagtcttgaacgccaagatgaagcaagcttttcattcggtaagtaagaggaaatggtttattcttttggcca

SEQ ID NO: 295531 - DNA, 122 bp, Homo sapiens
cggaaaaattaggcagacccggagctcccgtaggctgaaaaacttgctcctcttccccctcgggctatcctggcctagtaatggagatctgaaaaaaatctagacttctttcggggtctaaa

SEQ ID NO: 295532 - DNA, 122 bp, Homo sapiens
ggggcggcgcggcgctgacctggatggtgcaggtgtactcgctgtcgtccagcagccgcacggtgcagctgtactcgcgctccaggctcctgctgctgccgctcatcaacctgctcagcatc

SEQ ID NO: 295533 - DNA, 122 bp, Homo sapiens
ggggagttctctgagacctaggagctggggtgtacggagaagcggggccctggggagcctcggagattcctggtgggaaggcctgggcagaacagaaggcttgtcaagtcagagggccacct

SEQ ID NO: 295534 - DNA, 122 bp, Homo sapiens
cgttctgctggccgacggcctcccagcgtgctggcatctgttgctgtgctcttctgcctgcgtgctcccctttgtcaggcctctgagcccaaggtaagccatcatatcccccgtgacctgca

SEQ ID NO: 295535 - DNA, 122 bp, Homo sapiens
cctccccacccccagcgtcatctcgcgcctggagccgggtcgccgctccttccgaagtctcgctggaaacttcaagggctgatggttctgtgttcttgacgtaattaggaggccacgcagct

SEQ ID NO: 295536 - DNA, 122 bp, Homo sapiens
acagccagtgaagtttaagaacattcattcactgagtatggttctgtatggatcatcctgcggaaaggagttagactccaggtttttcccagtttcacaatcagatagtattgtgaatgaat

SEQ ID NO: 295537 - DNA, 122 bp, Homo sapiens
ccaaagggaggggaagcaccacacactcccaaggaccaggctttcagcatattcttaaggcgcatattttgaggaatgacaaaagggaagcaggaaatctcgatgacggtccaattatccac

SEQ ID NO: 295538 - DNA, 122 bp, Homo sapiens
gctcctgaggtagagccggcctccttggtaacacatgggactgggacttttaataccacccgacaggcccagcttgtctcgtcaagcgctaagtaaatggactcacgtcctatatgagggtt

SEQ ID NO: 295539 - DNA, 122 bp, Homo sapiens
tgaagaggaagccgggctcgataatgatcttgccctctttgtcatgaaccacagggactccgaggcgccgggccaccgggggactatagtagactcggatgcccgtcttgtcaggagccgtg

SEQ ID NO: 295540 - DNA, 122 bp, Homo sapiens
attcggattccgatgtgactgctattgtccttaacacggactagctccaggtgagtcccccggccccgggggtgtggcgggcgtcacccgttgtccgggcacacaccccgcagacccaatcc

SEQ ID NO: 295541 - DNA, 122 bp, Homo sapiens
cccctgaggcgccggcgaagaggggctgcagtgcagcggctacccggccccctccggctacggccgaggacacccatcccgcccgcctcccggagcccacggaccttgcagagctgctggcc

SEQ ID NO: 295542 - DNA, 122 bp, Homo sapiens
tcagtgacattagctagatgtggtgggcacttctcactagaaaaacaagaattaaatcaacgtgaggtccagaactggtgtcccctgttggaaaaataaattgaaactaatgttctggcaat

SEQ ID NO: 295543 - DNA, 122 bp, Homo sapiens
gcatggcctggcctgcccggcctcacaggactccggaccccacacaccacatgtcctcgccggacacctgtgcccacgagctctgcctcgggccctagtggaacccctggcctgtgtggact

SEQ ID NO: 295544 - DNA, 122 bp, Homo sapiens
agggacaggcgctagcagaaactatagccaatcgtatatagtcatgtgctgtgtaaggaacgttttggtcaatgatggactgcctaagattgcaatactgtgttttactgtaccttttctaa

SEQ ID NO: 295545 - DNA, 122 bp, Homo sapiens
ccagggggttggggacccctggtcaacggtagctgttgcctggctgctagagcaaaagtccggagtccagctcactcatgctttccttctgcatttgcaattttttttttctcctctttctc

SEQ ID NO: 295546 - DNA, 122 bp, Homo sapiens
atgtatataggaacgggagaaggtgcaaggaatgtgctgaataacatccaaactgcatcgcgtctctgccccattcctgaaagcacacatctagttggagcgtcagttcctctccttagata

SEQ ID NO: 295547 - DNA, 122 bp, Homo sapiens
actccgcttctccgggttttccgtgaagctccagccaacagcggccgtcaccggaaaaaacggggagcgaagtttattcagcgtatattccagcaaattgttgaaactgaaattttaaaaga

SEQ ID NO: 295548 - DNA, 122 bp, Homo sapiens
tcaggcagttgccttccgcgtggggacactgggaaaggccttgccgcagaacagcacggacgggctccgcaggctagcgcacctgagtaacaactgggcgggcagccggcctctgcgcccgt

SEQ ID NO: 295549 - DNA, 122 bp, Homo sapiens
cttccgaagcggctccggggcgggggcggggcctcactctgcgatataactcgggtcgcgcggctcgcgcaggccgccaccgtcgtccgcaaagcctgagtcctgtcctttctctctccccg

SEQ ID NO: 295550 - DNA, 122 bp, Homo sapiens
gtactgacaggaggaattgggaggagtgaatctgcttcacgctcttggaagcggcagtcccgttactagagctcccatcttccttgactgctgggccttcgctaatttacttcacaagctga

SEQ ID NO: 295551 - DNA, 122 bp, Homo sapiens
cttttgaaagagagatcttaaagagatcagggacataattcattgcccttgtcagggaaccgcataatggggcagtctccaaaagggagcctctgacaatcctcaaaatgatctcaagagac

SEQ ID NO: 295552 - DNA, 122 bp, Homo sapiens
gggaccagagaggaagagatggacagagttttccggacggtgggctgggtccgaggcccgcggaccgtccgaggggggcctctgggttcgaggccgcccgcaccgaccagtgctgtggctcg

SEQ ID NO: 295553 - DNA, 122 bp, Homo sapiens
tccaagaagggtagctctgggatcccgggcaggaaattggtgacaaggtgacaaggtgcgcgtgtcacagctgcccagttcacggcttattcagtcttctccctccccccactccccaccag

SEQ ID NO: 295554 - DNA, 122 bp, Homo sapiens
tcaccatcttcatgggcggcgtgagcaccaccccgtagaggcggatgaggtttcggtggtcgagcgagtgcatggcattgacctcccggatgaagtcgtccatggcttctggctggctcagg

SEQ ID NO: 295555 - DNA, 122 bp, Homo sapiens
ctcctgagtttaagtccacgtttacgcccaaccacactcttcacggttcaacgctccacccgccctccactgactcatctagaggtcgagtctcgaggtttctttaaaacacgtaagtgtct

SEQ ID NO: 295556 - DNA, 122 bp, Homo sapiens
aatgactctttcctgtttgagccacatcacccttcgttgtatgaaggcttaagtggcttccgtggtgagaatcttactctgtgtcataccctaattgaccttggagctggctttgctgtgta

SEQ ID NO: 295557 - DNA, 122 bp, Homo sapiens
cagcggctggtcccgcctccagcctggggctcgtcccggctccgccccgcccgggcctcccggctccgcccctcccggcccactgaggagcccgccccagccgcggccctggccgccgcctc

SEQ ID NO: 295558 - DNA, 122 bp, Homo sapiens
gcacggtgtgggagcccaggctgatggtgctgacagtcgggtagtacagtggtccgtcctcgtggggctagggagtgggcaccagggctgggcagggcaggagtccacaacccccaccctct

SEQ ID NO: 295559 - DNA, 122 bp, Homo sapiens
gcagctttgagaactagctctacataacaactacctgctgttccatgtcaactccaaagacgtcaaaggtgttaacatctttcccctaccccggggttcacctagctcagccacagaacaga

SEQ ID NO: 295560 - DNA, 122 bp, Homo sapiens
cgcatctccttggtggacgcgggcagccggagtggggactcacccgggtgaccgagcctccgccactgaggatccacaagagctgcttcccgcgcttcggctcgctcaccacactgcgcctg

SEQ ID NO: 295561 - DNA, 122 bp, Homo sapiens
cagcacagcccggcgttggctagcggcccagagtcggggcagggagggttcccgtgcggacgggggctaagaggccgcctccagcccggggcagtccgcgcacccgagcctggagcccggag

SEQ ID NO: 295562 - DNA, 122 bp, Homo sapiens
ctccttcgagaagtcttctaagattttccttaatttacagtgatcaaagctctcaggccacgcagagctcagtgacctcgggcttaactggagggagctgtcactcactctctcctctgcag

SEQ ID NO: 295563 - DNA, 122 bp, Homo sapiens
agcacttgtcctggctgtagggaagtcagtgttgtggcttgagagcctatctgactggaccgtgatttaaccactgctatagccctggagccaagcacagtagctacccagggcaggtaccc

SEQ ID NO: 295564 - DNA, 122 bp, Homo sapiens
tctgtgactcttgggcctctgctctggtgggaacttacttctctatagcccactgagccccgagacagagaacctgcccacagctctccccgctacaggctgcaggcactgcagggcagcgg

SEQ ID NO: 295565 - DNA, 122 bp, Homo sapiens
gatgagaaaactgcccagctccaggcaccatggcgccccagtgatgtagccgaacacccgcgcctctaacgtcgccaacggcccacctctatggtgtcggcgaagacccgcccttgtgacgt

SEQ ID NO: 295566 - DNA, 122 bp, Homo sapiens
tccacctgccgcggcctcccgaagtgctgggattacaggtgtgagccactgcacccggcccgaagctctacttagaaggacagcagtgctctatgttcaagacagagcttttctctgtgcct

SEQ ID NO: 295567 - DNA, 122 bp, Homo sapiens
tggaaactaatagcagcattttcaaagctgagatgaaatttgtgtaaacacacactggcccgcacagtggacatgcacttctgttggctgggccctccccacccagggatgaacagagtgcc

SEQ ID NO: 295568 - DNA, 122 bp, Homo sapiens
cagatttttcatagcagcctttgattttttttccaccatcagtccatcatcagaaactctcgggccaggctgttgaatctcctatcagatttatgtgattattcctcaaagcttcctgtgtt

SEQ ID NO: 295569 - DNA, 122 bp, Homo sapiens
ctccgatgccctcgcccctgaagccgtacccgccagctccaggatgtgtcgcgctccccgcggacatggcgaccgcttctactcaaccacccgccaactatccgactaccacctctcgtcac

SEQ ID NO: 295570 - DNA, 122 bp, Homo sapiens
aagattgacctataggtccaacatgaaaagttctatattaatagctatgtcatggccaggcgcagtggctcacgcctgtaattccaacattttgggagcttgaggtgggtggctcccttgag

SEQ ID NO: 295571 - DNA, 122 bp, Homo sapiens
tctcttcagagagggttgttgggcaggcagagcatcccccgaggggacaagtcaggcctacggactcctggagccaggacctgccgtaggctggttagggcaggatgcgccctgtcttcgtg

SEQ ID NO: 295572 - DNA, 122 bp, Homo sapiens
tctgactccaacccacaaattcttcacctggtctcgaaaagaggccctggcaacctactgcgcaccagaggggaacccgcccgccgtcccaggccgggctctccctgctgcggagcggcccg

SEQ ID NO: 295573 - DNA, 122 bp, Homo sapiens
tagtaaacgccactccatagaagcggtgaccggttaccatagagaccgcgtcggggtgggcggagcgtcgcttctgagctgtgccacggccacatcagctcggccagaaacgcgaacacgtc

SEQ ID NO: 295574 - DNA, 122 bp, Homo sapiens
ctatattccctccccggaattccttcccaaccttcaaggaccatctgccccaactagtggcgaacatcgaggctgtcgtgactgtgtagatacttatttgacctgctcccttggcaaacact

SEQ ID NO: 295575 - DNA, 122 bp, Homo sapiens
aggtggcagcaggtcggccgccctcccgtcctcccagagctgctggcgctgaggtcagagcgggtctgatggggagctccgtctcaccggccacccgccgtcaccatggcagatgcccttgg

SEQ ID NO: 295576 - DNA, 122 bp, Homo sapiens
acggtgagtatcctgggctgataggaaacccagctgggatggctgagccacactcacccccggccttcagagtgggatcagcagaggggcatcaggcgaaaacgttctgttgctggtacttg

SEQ ID NO: 295577 - DNA, 122 bp, Homo sapiens
caccgcgagagatccaggattccctatagatctgggggctataggcgcccttcctgtctgcgggtgacgggactgaaggaagccgtctgcccagcacccccacccaccctccccgcctggcg

SEQ ID NO: 295578 - DNA, 122 bp, Homo sapiens
tgccagtacatcatgccaaaggtgcagagccacagcactgcccagaaggccgtcttcatgcggttgtgctgggagcacaccaggcggatggcgccgtggatggtggtgttgttgcagaagaa

SEQ ID NO: 295579 - DNA, 122 bp, Homo sapiens
gtgagagggtacctcaaattcttgctaattttgcttgctgagggcctggtaggctgagtccggctaagagcctggttgtaccaggctcgcttgttaggaggctggctacaagatcccgtgaa

SEQ ID NO: 295580 - DNA, 122 bp, Homo sapiens
gagctgcgccccgcgcgcggcccgcgccacctgtgccgccgccgcctcagccgccgagggcgaggctcctcccgcggcgcgcggcagcctcagcctccacctaaacctcggcggccggcccg

SEQ ID NO: 295581 - DNA, 122 bp, Homo sapiens
gcagttcccacgaggaaagtcccattgatgcgagttggcagtgtagaggatgctcccctccggccgccgcggaagccgtcgtccaaatgcaggcgagcggggaggaggaggccgggatgcgg

SEQ ID NO: 295582 - DNA, 122 bp, Homo sapiens
aaaggaaaaactaaccaacctcaaccaaccagcccccgagccacccggggcgccctcccgcgccctcttgcaccctcgcacacacaaaaggcggcgcgccggagcccgagacccggggagcc

SEQ ID NO: 295583 - DNA, 122 bp, Homo sapiens
cccgcctgagctcgtccacggtgatgtggccgtcgccatcctggtcgaaggcgcggaaggcgacctgcaggtcctccaggccggccctggccttcttcgccgccgtcaggaactcctggaag

SEQ ID NO: 295584 - DNA, 122 bp, Homo sapiens
ggaaacccattccatcgctgctgcatgtcccaccggccctgcacggctgggactcacaggcgtctcgggccaggctctggctgcagcgggggccactccagccaggctcacacacacagcgg

SEQ ID NO: 295585 - DNA, 122 bp, Homo sapiens
ctctatgctaagtgctaaaatgaaagacatagtgttaactaaatgcagaagtgaaaaatgcgtgattacaatctttaagaaatctattgtcaggtccagacaggggctggatcatggttagc

SEQ ID NO: 295586 - DNA, 122 bp, Homo sapiens
agtctggtgggcttggccctgacgcgacttcctccgcccccttccctcccctctgccatccggacttcggcagtctcaacttacaagtcaagcctctcggtccctggcggatcccgccaggc

SEQ ID NO: 295587 - DNA, 122 bp, Homo sapiens
aacacaggtcatccctcctggggtgagattagctctgggacactggctcccccctctccccgcacagctgcttacatggattgctccacgtgttgtatgggcatgaggctggggagagtgga

SEQ ID NO: 295588 - DNA, 122 bp, Homo sapiens
gcagtttcggtgagtggaggagccggcagcatctccaggcatttccatgtggggggcacgcgcctgtgtaagtgccttatcgccctcacgctgcaaacagtgctgcgaagtcggcaccagta

SEQ ID NO: 295589 - DNA, 122 bp, Homo sapiens
agagaaatctcagcttggtattggtaatggtggtgataatctccacctggagacactaggcgtatgttaaattatcgagcttgttatctttcctgggaagtgattatcatttgtttctcttg

SEQ ID NO: 295590 - DNA, 122 bp, Homo sapiens
gtcaaatgacagtgaatttaaacctaaaacatgactactgagaccacactttgtttaatccgtcagaatttataattgctttgaagctgtcacattttaaacataaccctacaaccataaaa

SEQ ID NO: 295591 - DNA, 122 bp, Homo sapiens
ggtcctggggcggggccaggcgtcggtggccgtgactggagactgttactgagggcggcccgggcagtaagcagtctagagccaaggtgccggcgcgctgtccgggcggggtgccccggtcg

SEQ ID NO: 295592 - DNA, 122 bp, Homo sapiens
gggcagggagaggccttgggcagctcctccgctgggccgggctgcctgcctgctggactccgggaaggaggcagtgaccgcacccatctggaagctgtcaggtccctcaaggatgagggcgt

SEQ ID NO: 295593 - DNA, 122 bp, Homo sapiens
cttcagaggatgccatgcctgtcttggggctcagcaactccactacccttcctccactcccgcgggctcttaggctgccggctgccacctgtgggccctgtgccccccaacccgtactctct

SEQ ID NO: 295594 - DNA, 122 bp, Homo sapiens
gaagcctggcagcgcagccaccccgtccctctgaccggccttttggttccctgccacacacgtcctgactcccagccacactcctgggcctctagggagtggttgggccgggcctccctttg

SEQ ID NO: 295595 - DNA, 122 bp, Homo sapiens
gtgtgcgtggcctgagccgtgcgggtgactgcttcagggcttctccgcgactggaccgggcgccgctcgaaagcacgccctccattcgcactgcttgttgggctcatcatgaagcgcttggg

SEQ ID NO: 295596 - DNA, 122 bp, Homo sapiens
cgagacttaagctctgcgtcggtcaataagcatcacgacgcaggcattcctgagcggctacgtcctccggttgctttctcggttttttggaagaggcagcgttgcctcccatttattcagtc

SEQ ID NO: 295597 - DNA, 122 bp, Homo sapiens
ggaccggtccctgagcgtggggatctgagcaagtttggttccttagtgcctgctgggtgccggcccagcaccctggaggagcttagagcttgggatgagatagatatggaccattaatctga

SEQ ID NO: 295598 - DNA, 122 bp, Homo sapiens
cctctcccaacctcttcagctccttaaaaggagtctgtaaaggctagactgggggggcggcgggggtcctgcttcctcttccctcagtttcttccacctgccttgctgctggtggggatcct

SEQ ID NO: 295599 - DNA, 122 bp, Homo sapiens
ggccctgcgtgcccagcgagccggtgctctcattgcgcacgcagtagtcagggctggggtcgatgtagaccaggtcttgtgtggtgggcgagttgaagcggctgttgacctgtaccaacttg

SEQ ID NO: 295600 - DNA, 122 bp, Homo sapiens
aaagccagatgagggtcttttagactcaaatggccctgttatgtcctcctgcctcactcacgcacctccccccactgctgttctgagaagctgcaggaaaagacagcgtctctcttggggtc

SEQ ID NO: 295601 - DNA, 122 bp, Homo sapiens
gaggggcgtgaatgaagcaagaggagggagagcatgtatgggatttctggaacctagtcccgcttaggctgcatgactaacaggcaagataagacaagtctttcaagttctaaagactacag

SEQ ID NO: 295602 - DNA, 122 bp, Homo sapiens
accattcaacagggttaaaatccttagaccacagaggatttggtggacaagtcagagacgcgttccgcagagctgaagcctttcttcaagaagcctacaagaaaggaactatggagaaccaa

SEQ ID NO: 295603 - DNA, 122 bp, Homo sapiens
cgaggccggagagctgtccttcttcaacgtgtccgacggctcccacatcttcaccttccacgacaccttctcgggcgcgctctgtgcgtacttcaggcccagggcccacgacggcggcgaac

SEQ ID NO: 295604 - DNA, 122 bp, Homo sapiens
ggtcaagcgggagcccttggactcaccccagtgggctactcacagccagggaatggtgcccgggatgttgcccaaaagtgccttggccacgctggtcccgccccaagcttcggggtgcacat

SEQ ID NO: 295605 - DNA, 122 bp, Homo sapiens
ccccctccccacatatcaaactgggcagctccatgtgggccccttgccctgcaacctgctcgctgtatcactggcacctaaactagcatgaaaggctgagccccacagggtctcctgccccc

SEQ ID NO: 295606 - DNA, 122 bp, Homo sapiens
acccggcgatcctgaggggcgcgcggggcacggggccgcgcggggcgggggcgcgcagctcgcacagcctctctggccccggctcctcgcgtgggcgcccgcacagctctagggtccgcgca

SEQ ID NO: 295607 - DNA, 122 bp, Homo sapiens
gaacgttttttcctgtgagaggaacattaagactcctgggagggctggggctaacgcctccgagagccccacctggtcagcctagggttagacgtgtagccagggtgctgggagggggccgc

SEQ ID NO: 295608 - DNA, 122 bp, Homo sapiens
tgtgactgtttatgtctttttgtgagtgaggacctgtctgtgtgatcacatgagtgtgtacgatctgtatttgagagtgcatgtgtgtggaagcatgctaattgtgtgggagaggtgaaaga

SEQ ID NO: 295609 - DNA, 122 bp, Homo sapiens
gtgacagtgatggagcccgctcctgcctggtttgagtgtgagacctccatcccctcagtgcggccacctaagtggctcctggggaagacggtgttgcaggctggggggaacgtgggcctgga

SEQ ID NO: 295610 - DNA, 122 bp, Homo sapiens
cgtgcgagaacgcggtgcactcacccaccggcctagggctccgggcactctgcggaaactcgaccaattagagcccgactctggtctgacgagcatcccgtccgaccaatcagtgtgtcttg

SEQ ID NO: 295611 - DNA, 122 bp, Homo sapiens
tctgaggctcatctctaggcctcgacttccctactgctaaaatggggctgggctatagcccgtgtccaaagcctttcccagcccagcagcttctggtcccaggaggccagcttactgtcggg

SEQ ID NO: 295612 - DNA, 122 bp, Homo sapiens
ctcccatctccctcaccagccggaaagtacgagtcggctcagcctggaggtgagtcggggcggggagggccgggcaggctttgttcctgtgtaaacggagcgcacgtacctggagcgcggcg

SEQ ID NO: 295613 - DNA, 122 bp, Homo sapiens
ggaggtttgggcccaagcaatggagagggcaccatgtgtctcctgattgttcaagtgtgtcggagatatgcggggtatggatggtggcccaccaaagaaagcatgtgactcaagctgtgatt

SEQ ID NO: 295614 - DNA, 122 bp, Homo sapiens
cccacggagagaggctatttacatagacttggggagtaagcagtggagaccgggaggggccgcatccaagcacacaccaggctccatgtgggctccgggagtgccaggtcctgctgcagaca

SEQ ID NO: 295615 - DNA, 122 bp, Homo sapiens
tgtgcgcccgtccctgccagtcttaatgtcttcatctcctggacacgtagaatagtgggccgggatctccctgactttgctggcgatgcggctgggccttttgtagggcggccgcagtgacc

SEQ ID NO: 295616 - DNA, 122 bp, Homo sapiens
cccagtgggcaaaaggaaatccacaggtatggagccatcagatgctatctgtgaatccaccgcccagatgtcaaggatgtctgccatagcaggaggcattatgaaactgaagcacattcata

SEQ ID NO: 295617 - DNA, 122 bp, Homo sapiens
taagttgagatggagaaacacagcccctcagtacagaatgttatttggagagttcccttacgtgtggggaagggcagcaacaggcacaactattaatctcagatcatggctgttcctgccaa

SEQ ID NO: 295618 - DNA, 122 bp, Homo sapiens
tccagatggttcctgtgtgcgcccgcgttcgttagcatgctaatttattctgactcattccggagctggcgcgcgggctggcgcacacctctatgccagcacgagtccccgaggcccgcgat

SEQ ID NO: 295619 - DNA, 122 bp, Homo sapiens
agaataaaaggggttgttagtctagttcttggattgttgtttatgtcaatcaggtttccccgattgcaagcaacagaaccaactctgactatcacacaggaaagaaatatgttggtaggact

SEQ ID NO: 295620 - DNA, 122 bp, Homo sapiens
cggcgctctaggctaccgggccgtccccgccgagctgcggctgtcctcactcatcctcagcgagaagcaggtcctgccgactgagaagatgaaggacgaaacctgccccgctgagtgcggga

SEQ ID NO: 295621 - DNA, 122 bp, Homo sapiens
gatcgtgatgttgatccgggactcggtgtggtgacggcccgccctgagcacgaaagtgcacgctcttgacaacttccttatgtttggagctttctccaccaccacccccgcccattttcttg

SEQ ID NO: 295622 - DNA, 122 bp, Homo sapiens
ctggaagagtcttttaccaccatgtggaggagaactagagcactcatgttgaactattaccgagaaaagtaatcaacttcttttgtgttaagtcactgaaaggcaagtgttgatttgttgca

SEQ ID NO: 295623 - DNA, 122 bp, Homo sapiens
gcacggtccgcgggggctggtgagggctggcggacctccttcagtgcgcgggggtacacacgcgacgcgggaaccgctggcggcggcgggccgctggagcgggttcgggccgctgctcctgc

SEQ ID NO: 295624 - DNA, 122 bp, Homo sapiens
gtagcaggccggcccgggccgccaccgcccatcccagaccatggagcgcgctgggaaggacgcaccaaagccgggagctctgccctgcagggagttgccccaaccctttccggaactcagtc

SEQ ID NO: 295625 - DNA, 122 bp, Homo sapiens
tgtgggacaagctgtcacacccccggggtcatcgtggggcaaggccatttcctggctttgcggggttcgtcttttggctttcgtggagaaggtgggggtgtctgggcctcagaatattcggt

SEQ ID NO: 295626 - DNA, 122 bp, Homo sapiens
aacccccctcccttttgaagcagatggttcttcccgttgtccctgctctttcagtttccgcgctttggagtcacaaagcgcggggtcacgtgggcgggccgtgcgctttgtgacgtcagccg

SEQ ID NO: 295627 - DNA, 122 bp, Homo sapiens
ctaacttgcaaatcttgccttatcactctccagcttaaaaattccttaatggcggccgggcgcggtggctcacgcctgtaatcccagcactttggaaggccaaggcgggcggatcacgaggt

SEQ ID NO: 295628 - DNA, 122 bp, Homo sapiens
tctccacgccctctgttcccccggccgtcggtcccccacccgtccgtccctgagtgcccgcgtccagccccacgtccgtctctacccgcacgcggcacacctgcggagactgcagactcggg

SEQ ID NO: 295629 - DNA, 122 bp, Homo sapiens
ctatggagacacttggtggcgctgcaggataacatcgtgaaaaatatattcactggatggcgttgtgaacactgatatccagtgcacacagagaatcagaagacagaaacaacaagccttca

SEQ ID NO: 295630 - DNA, 122 bp, Homo sapiens
gagcggactgtatgcctcgtgctaggacgtagtctcaaaatcagaccacagcagcagaggcgccacctgtgtgcacagcctggactcagagcttagggacccaagccagcaaacacctggcg

SEQ ID NO: 295631 - DNA, 122 bp, Homo sapiens
ttacagatgagaaaactcagtgccatatatctttggagtctattgtacaaaaatagaatacgttgaacatggaaagtggctttctatttatttatttatttttgagagagtctcgctctgtc

SEQ ID NO: 295632 - DNA, 122 bp, Homo sapiens
atttgtccatgtctcggacagagcctgggaagctgccagtgagatttcagagaccaagagcgcgaaggggcgggcgatgtggcaatccgtctgggatgtgaaaagcgtggagcgcatttaga

SEQ ID NO: 295633 - DNA, 122 bp, Homo sapiens
aggctgaggctgggacaagattcaaccctggaatgccttctccaggaacacagggcactccgagtggactcagtggtggctggggtgggcctgcaggcccaggcatgaaggaggaaggggca

SEQ ID NO: 295634 - DNA, 122 bp, Homo sapiens
ttcagtcaagaaaaattaatttaatccctacaatgaaccaggtgtgccctcatatgcttacgtgcctgacattccagaagcttcacaagaccaaggtggagccagtggaatgttttaggtgg

SEQ ID NO: 295635 - DNA, 122 bp, Homo sapiens
ggtggcgaaggtgcaggagcgggcttggctccagccatctctgaggagcgtaggccaagccgagcccgcagaagccccagaggcctggcctgagcccgggagggacgcggggtccgggagga

SEQ ID NO: 295636 - DNA, 122 bp, Homo sapiens
accagcacaaagagcgcgcagcgtgccagcaggtgaaccagcacgtcgtcgcccacgcggcgcagcagcagcccccacgccccgctcccccgcagtgcgtcggtcaccgtgttgggcaggta

SEQ ID NO: 295637 - DNA, 122 bp, Homo sapiens
cttgaccactcagggtgccactgtgccgagccgggcaggacaggatgaggtggaccgaagcgcccaggtgccccgccttccccccaacccggcacggagcgcaagcggaggagccagaccgg

SEQ ID NO: 295638 - DNA, 122 bp, Homo sapiens
tgggatcggaggggagatgaaggctgtgtagccagcccatgagccctcggtgcccaggcacgctcccgttctgttttgggggaggcagtcccggcaccgagccagagtgactacaggagggc

SEQ ID NO: 295639 - DNA, 122 bp, Homo sapiens
acgcagtttcattgcagcctgcgtgggtctgacttgcgggtcactcatattctgcgaggtcgattgacccacgctgaaacatcaagtgaatactggccaacaattggtccccagactaaaag

SEQ ID NO: 295640 - DNA, 122 bp, Homo sapiens
gcgacctcggagtataacctaacctccgagcaacatatgctgagactataccagtcaaggcgaatatccacatacaattgacccaataatttgaccaacggaacaagttaccctagtgataa

SEQ ID NO: 295641 - DNA, 122 bp, Homo sapiens
tgctcttacaggccctgcacagagtagcactcattaattcttggttaaggaatgaatcaacgaatgaatggctatgcatggacctctgggcagggagacctgggtcttctctggctgagagg

SEQ ID NO: 295642 - DNA, 122 bp, Homo sapiens
ggacgcggacggagagcatggtggtagcgcggcaaaggagagtgaggggccgggaccgggcggctgggatggggtgcactgaaaatgtctcatttttaagacaaatgattaacaagtgttga

SEQ ID NO: 295643 - DNA, 122 bp, Homo sapiens
ctgttactaaatcctccttttggatgattctggaacagcttcatagccttcacactgagccggctgtctatgaaatgcaaaactcagaggaattagaaagacattaaatgaactcacataac

SEQ ID NO: 295644 - DNA, 122 bp, Homo sapiens
gttggttgttttttttttgcgcgcgggaatcttccttctctcgagtaccccaacccgtctcgaacctccagggctgctgtcatgtcaccctggtgctcacaaagccaactcactcccacccc

SEQ ID NO: 295645 - DNA, 122 bp, Homo sapiens
cataatttgagccatctttgatctatttttaactctgccttggcactcaagaaaaactcacgggaaaaaaaatgattcaataaaaagcaatatcctcatgggaagataatcaaataaagctt

SEQ ID NO: 295646 - DNA, 122 bp, Homo sapiens
ctcttttctacagaccccagaacctcatagcacagagccagtctggaacaggaaagacagcggcatttgtgttggcaatgttaagcagagttaatgccttggaattgttcccacaggtaagg

SEQ ID NO: 295647 - DNA, 122 bp, Homo sapiens
ggccttttctgtaccctttgcacatagaagctgagcaatatggccaggcatggtggctcacgcctgcagtcccaacactttgggaggccaaggtaggaggatcagttgagcccaggagttca

SEQ ID NO: 295648 - DNA, 122 bp, Homo sapiens
ccgccccctagcggcgcctcttccaatcagccctcccgctcttcagcgacatcccatcttcgttgatgtgactgggagggactctgtatcctgaagcactttggggtcccaaggcgttcatt

SEQ ID NO: 295649 - DNA, 122 bp, Homo sapiens
cccaggaacttatcacctcctcgttcaatcccagagctgccattctccaagtgattctggcgcctctcacaagatatcacaccttctattatgctcttaaaaaagtatccaccagaggggag

SEQ ID NO: 295650 - DNA, 122 bp, Homo sapiens
tctgtatataggtataaaagtgagagagggcaaatccagcattgcttctggcgatgtgatcggatagtgagaacttgactacaaattctatgaacacaagtgctttcatcctaaaaagtctt

SEQ ID NO: 295651 - DNA, 122 bp, Homo sapiens
ctctactaactttgctctaagtagacctgggggtcttgcctttgtcacaaaacaccgggtcggatcctgttggcttccttctcctggtgcccgaattctgtcttggtctgaggcccctctga

SEQ ID NO: 295652 - DNA, 122 bp, Homo sapiens
tctatttttagcccgtcaaggcctagtgagggcactggcttagcagaactctccatcacgcgcatctgtttgggttatgcccaccaataaggacttgattccagtttaaataggactttggt

SEQ ID NO: 295653 - DNA, 122 bp, Homo sapiens
cttgtataaaactgtaagtgccatattagatttaactaggagaagcagggggttgtcttccggcaagccagagttgtaggaatgatgcaaatgagcagtcacataagaatgccatgtttgtc

SEQ ID NO: 295654 - DNA, 122 bp, Homo sapiens
tgccggtgttggtggacctgcttcagcaccttgtacaagtacacggagcagctctccttgcggctgcgctttcgcttcttgccttagtaatagtcttcttggaaccctttttcggggctgtg

SEQ ID NO: 295655 - DNA, 122 bp, Homo sapiens
tgaactcctgggctcaagagatctgcccgccctggcctctcaaaatgctgggattacaggcgtgagccatggtacttgaccaggaaccttattttttaatcatgacgtatcatggacatatt

SEQ ID NO: 295656 - DNA, 122 bp, Homo sapiens
acattagggaaggcaggcagacccgctgcttgttccaagtgatttttttccccactgtcccgagaagggcagttgagcctctctctccaaattggaggtgccactttccatccgcctggtgg

SEQ ID NO: 295657 - DNA, 122 bp, Homo sapiens
cagagccaaccatgctctgtccaaatgatttaaccagtgagtttggcaacagtcaggtaacggccccagcgggtagggggaacctttccattgagctgtagaggggcagatgatgtgtagct

SEQ ID NO: 295658 - DNA, 122 bp, Homo sapiens
agtttctgttaggggattggctccagctccattgtccctcccccatcattcagtagtctccgcgaaagcccttagagccggtgttgctccacaggaagccaagaagcacacaggaaaaggag

SEQ ID NO: 295659 - DNA, 122 bp, Homo sapiens
tgtcccccaccccctcacagaagaggaaaagttcaggagtggcctcctgaacacctgagacgcacctcagggatctgtattttaaattaggggtgctggggtaagaagacataagaaaagct

SEQ ID NO: 295660 - DNA, 122 bp, Homo sapiens
ccaggcaaaagaatgaatgatagagcactcaccaatagcgagtggagaagagtattttgtcgaagtttgcaaaccaatctttgggagccagaggtgggaattttaaaatgaggtcttttcct

SEQ ID NO: 295661 - DNA, 122 bp, Homo sapiens
tgtgcttctgttcactttccacctcactttcaagctctctcacctggaagggaacaaagacgtttaccagtttggctgtaactggccacaaggaattgagtgaagttgtggagacctaccct

SEQ ID NO: 295662 - DNA, 122 bp, Homo sapiens
tggagaggcagagcctgtcggaagaggtggaccggctgcggacccaggtactgtgcagaacgcggcgcaggtgggagtccttgggcgggcgtctacaggtggatcttttatgcacctcaaca

SEQ ID NO: 295663 - DNA, 122 bp, Homo sapiens
attggcgagaaacggaaatacccgctttcgagaaaaccggaagtgcgtggtcacgccccgcgcatgcgtgcatcggggcagctcacgcttcctaaatcccgtcatccagtgagaaagcaggg

SEQ ID NO: 295664 - DNA, 122 bp, Homo sapiens
cgggacccacccaggcggaggcaagggcaggggcgctgggggcccagagagagggcgccgcgatggatgaatgagctgtttccagcattcctgtgcgtctgctggttgtagctgcagtcaag

SEQ ID NO: 295665 - DNA, 122 bp, Homo sapiens
cagcctgggcaacagagcgagccagacatggtggcatgcacctgtattcccagctatttgcggggctgagttgggaggatcacttgagcctgagaggttgaggctacagtgagccggcccgg

SEQ ID NO: 295666 - DNA, 122 bp, Homo sapiens
aagggaagaattgaattgctggaaataaatgaagatcaaccaaatgagaacaagcaaagacgattgattcagagcttgctatagcaagggagttggccaccatcacttgtgttttgacagag

SEQ ID NO: 295667 - DNA, 122 bp, Homo sapiens
agatttcttctagattcggtttctttacccatcccaccatcataacagcaacccttcctgcgaaatttatattccctgagaattggaggattattgggcatcttgagggataagtagaaata

SEQ ID NO: 295668 - DNA, 122 bp, Homo sapiens
ctaagcattctttattgtatacacagttgatcatcctggactgtataagaggcacatgttcgaaaaaaaaaaaaaaaaagaagaagaacaagctgctgttttcactccagggattattttac

SEQ ID NO: 295669 - DNA, 122 bp, Homo sapiens
tgccatatttctgtttgtttgtttaatagattgaggggattcatgtacagatttgttacacgaattatgtacattatgtaatggtgaagtttggggttctagtgttccatcgccaaaataat

SEQ ID NO: 295670 - DNA, 122 bp, Homo sapiens
ggactccagcggcaggggcctccccaggctgcggctccgcgccggtgacgggggctctgccgaagggctcctgcccctgcctagcctggcccatgctggtcgcatcaggggctccattcaac

SEQ ID NO: 295671 - DNA, 122 bp, Homo sapiens
agtgacatcctggtcagcaggctcctagtcagagggagcccaatcaataaacctggtcatcgggggcctggtcagtgaaaacttggtcggcagggttggtcagtgtgtcctggatattgggg

SEQ ID NO: 295672 - DNA, 122 bp, Homo sapiens
tggaaggagagagccacggcgaggagagggtggctccttccagggggcggtgcgctctgccgttccgcgtcatatcccttggcagtattgtaaacacaagtccactgtatgtttttaaaacg

SEQ ID NO: 295673 - DNA, 122 bp, Homo sapiens
tgatagtattttgggcaataaaccctacagcaaaaaggactacagatcctaagccgcccccgcccgcctgctcggacagtttccgttccctcctagtctctgttcgctcgcttaagctgttt

SEQ ID NO: 295674 - DNA, 122 bp, Homo sapiens
ttctgctccctattggcaggggcgggaaagtcgaccgggcttcccattggctgtgagggccgttcgtcaaaagccgcccgctgctcgacctcacttctctccccgcgccttctgaactcgcc

SEQ ID NO: 295675 - DNA, 122 bp, Homo sapiens
cgcccgcccgcccacctgcctcccaccgcccgcccgcccgcagcccggcggcggcgcggccgccacttgcaaaatagggcttacttttcccgagcctgcccatccgagggcaccgccgagcc

SEQ ID NO: 295676 - DNA, 122 bp, Homo sapiens
gtgtccctggcggggaacaccatcatgcggctggacgactccgtcttcgagggcctggagcgtctccgggagctggatctgcagaggaactacatcttcgagatcgagggcggcgctttcga

SEQ ID NO: 295677 - DNA, 122 bp, Homo sapiens
agagtcaggttctgaggttgggccaccgaggttactgacgccttcctgctctggttaagacgtgggtggctgcaccttggagttgagagctggtcctcgtccacattcacagtatgactctg

SEQ ID NO: 295678 - DNA, 122 bp, Homo sapiens
aactcgtttctccacgtcggtgcgcgcttgcatccctggccccgaaagcgtgggaatgtccggaaatgctggcgtatgggagttccttaattagaaatgcgttagcgaatattatacgctta

SEQ ID NO: 295679 - DNA, 122 bp, Homo sapiens
ctgcccttctgctttccccatccttcctatcccctcttctctcccctccctgccctcctccgctccccgcccccgccccaggcagaccctacctgagtgaggggcccacgaggagcgtcagc

SEQ ID NO: 295680 - DNA, 122 bp, Homo sapiens
cacaacctgggagagatggcaaagccctgtgtcctcacactgcctcaggcacagcgcggccgccacgcccctctccagctctcccttccacggtcacctggagatggcagctcctctggacc

SEQ ID NO: 295681 - DNA, 122 bp, Homo sapiens
caagtccttctgaggtgttccttcttgtttatgtttattgggccagtcactagtatttttcgaacccatttccttcactccctcctccatctcacaccaacacaatagtaagctgcttcctc

SEQ ID NO: 295682 - DNA, 122 bp, Homo sapiens
gggcccaggttcggggccgccccggggagcccccggccgcctcctccgccgccggcgacgcgggctggcccaacaagcacacgctccgcatcctgcaggacttcagctccgacccctcctcc

SEQ ID NO: 295683 - DNA, 122 bp, Homo sapiens
accaacatgcaaatctcagcgcaggctgttttgttttgttttagtacagttccctagtttcgttaatgacctcaccatccaatcaattgcttgaactagaaatctcagaataattctcaact

SEQ ID NO: 295684 - DNA, 122 bp, Homo sapiens
cgctgtcccggcggtcgcagctctgtctttggggctgcgggacaggaagtctggggtggccggtcctcgctgcccggtcgccaggcagcgacctcgggatgtggagtcacagcctggagcga

SEQ ID NO: 295685 - DNA, 122 bp, Homo sapiens
aagcctgtaacaacaacaataaacacactaagaacttaccatacatcaggcatagttctgcgtatactacatatattaactcatttagtcctcacagtgaccagataagttagagaccttta

SEQ ID NO: 295686 - DNA, 122 bp, Homo sapiens
ggcccagcctccgcccccctcgccgctccacccaccgccttggctcggccccttcctccgcgcccacttctacctcaacccccgggccgcccgcccggcaggcctggcccgcgcgccgccct

SEQ ID NO: 295687 - DNA, 122 bp, Homo sapiens
ccctgggtcccagactgaaacaccccattgtgatactgaacaatgttgcacaaacttacccgcaagccgaagtagagaaggaagaacacgttgaaagccatgtcgatctgtaatgtgaaatc

SEQ ID NO: 295688 - DNA, 122 bp, Homo sapiens
ttcatgagccggacaaagctgtatccctccatttccacctgccaacaccacggaagcagtcgtccgttaccactgacctgaggcctgcctgggtccaagctcacacttggagaaccttctgt

SEQ ID NO: 295689 - DNA, 122 bp, Homo sapiens
agataggactttttggcctagaattctagaagttgcttatgcagccaaggttgtctgtagcggacattttgccccaaaacaggatgtacaaataaatacaaatggtgtccaagtccttggga

SEQ ID NO: 295690 - DNA, 122 bp, Homo sapiens
agtgtgccctcgaagctaactaaaggaagtttcaaggagatagcaacccagtgtgttccacgcactggggacatggccctcacagaccctcctcctagtaaggagatccagacagcaaacaa

SEQ ID NO: 295691 - DNA, 122 bp, Homo sapiens
aaatggggatagataacagggcttccttcacagggtcgtggcgaggattcaatgagataacgtttgcaaggcaatgggcaggcagtaagcactcaaatccgacaggagctactgtcacgaaa

SEQ ID NO: 295692 - DNA, 122 bp, Homo sapiens
acctgagagcggcggcgacagctgctggtccccgtccccctgcgcttgcctcatactgtccgcaacatccgggacctgcgggaccgccgatacacaaatacacacacactcggagcgcgcac

SEQ ID NO: 295693 - DNA, 122 bp, Homo sapiens
aaccactgattgataggtgtggatctgaaagaagccagacacacaagactacaaactatacgattccatttatatgaacccttaggggtgaaagtctaatccatagtgacagaaagatcagt

SEQ ID NO: 295694 - DNA, 122 bp, Homo sapiens
gtcagacttgggtgtgtcccggtcccaggactactttaagtctccctccagttctctgcacgggtgaggtgtagaagcctcagcctgaccttcccaccagcggccccgagagcttcccagcg

SEQ ID NO: 295695 - DNA, 122 bp, Homo sapiens
ccgcggcccgaatgtcgtccagggtccccgcccatatgacaaacactttccgccggaaggcgcccgtggaatcctgggactagtagtctccgtgccctgccttctgccttctccatccttca

SEQ ID NO: 295696 - DNA, 122 bp, Homo sapiens
caaaatagaacgaactctagcccgtccgcaagagtgataagaaatcgcagtgtgggcccacgcgcgccgcacggccgggtcgccgccgtaccgtggtgtacgtgcagaatgcgcagagcgag

SEQ ID NO: 295697 - DNA, 122 bp, Homo sapiens
gctgcccaacagctggagggggtgtctgctttccctcagcagcgtgaaaagccctttaatcgggcatgctgctgtcaggctctgtcgcagaggtgtgtggaggaagagcagatgctgctgtt

SEQ ID NO: 295698 - DNA, 122 bp, Homo sapiens
ctggagcggggagtggccaccgcaggattcctgggtgcagctgagacagctggggcggggcgtgctgggctcacactgagttcaactctccaaatagccctcgcgccactgtccagaacaga

SEQ ID NO: 295699 - DNA, 122 bp, Homo sapiens
tgaagtcctcgatggacgtggccggcgtgaagacgtccagaagcccgatgacctaggtggcggggggcgtcagggccgggcgacgaacccccggctgtcgttcagctccccccgggccacgc

SEQ ID NO: 295700 - DNA, 122 bp, Homo sapiens
aactggggtgagatgatacatcacagtgattttgatttgcatttcccggatgattagtcacggtgagccttttttttttgttgtaattgttggacatttgagtgtcttttaattaggaactc

SEQ ID NO: 295701 - DNA, 122 bp, Homo sapiens
agagccaccactctggccggtaacctggcagcgacagacaactccccaaagtgccctgcgcgcggtggagagagggtctgctgagggtactgggtctcccacttgctacttttatattaact

SEQ ID NO: 295702 - DNA, 122 bp, Homo sapiens
ctcaggctctgggatcccgcggggacgagggcggagttggcgagtttggctgtcagcggccggtgttcctgcaccgccctcgctgcagcgccgcgcgccattggccgccgcgcgccgccccc

SEQ ID NO: 295703 - DNA, 122 bp, Homo sapiens
gtaccgcatcaccagctgtggaaggataaggggctgggtatcccagtggcctagtctgcccgaccttgggagacccagacccagatctgcccccaccacaggctagcctgcaactctccccc

SEQ ID NO: 295704 - DNA, 122 bp, Homo sapiens
ttctggacggttcagcttgaatcgatcactctagaaaggttgtgagccccttcgctgaggcgtccttctgttttccagggctgaagaagatgcagagcagcctgaagctggtggactgtatc

SEQ ID NO: 295705 - DNA, 122 bp, Homo sapiens
atacttttgaggaacatttattaagcaaccactgtacgacagactctgtgctaggtaccacggatccaaagtaaatatttatagagagagcatatacagtatatggtatggtttgcaggaac

SEQ ID NO: 295706 - DNA, 122 bp, Homo sapiens
gattttgctccttagctcggctacgtccaggttcttgcctcacgacctggaaaaatgaggcgtgcggacacgagagagtaagtggagtagaatttattatgcgaaagggaagctctcagcag

SEQ ID NO: 295707 - DNA, 122 bp, Homo sapiens
tttatctgtattaacttattcaatctcatggtagcctgcgaagtagatatagacattatgcgtgttataaaggtgaaggaactaaagcacagaaaagtaacttgctcaaggtcacacagcta

SEQ ID NO: 295708 - DNA, 122 bp, Homo sapiens
aaaagaatgttctggacctatcccagtacacttccaaaccccacgccttcctgggcaagtcggggctcagagaccaacaaacccaacagacttcagcagcagccagggagctggcagcctct

SEQ ID NO: 295709 - DNA, 122 bp, Homo sapiens
cagcaggcacgaaagctaccaacctaaccaactcgcaattgacaacaacctcctcagccccggagtaaactgcagcaatggtgctggagccgcagatctgatttaggagtggaaagcgaaca

SEQ ID NO: 295710 - DNA, 122 bp, Homo sapiens
ccggaatacggccagaagcactgggagatcagcagcacttttgagctttgcagcagacatcgctaggcaccgtctaagcctcggctgcagctgcgggcttcgtggccgccgaatgccccgct

SEQ ID NO: 295711 - DNA, 122 bp, Homo sapiens
gcaggagtatgtgtgtgtgtgtgtgtgtttgtgtatgcgtgtgcaggtgagtccagctgtcgtgtaaatgtgactctacataagcttgttgctgtgtaaatgtgttttttcttggtataggc

SEQ ID NO: 295712 - DNA, 122 bp, Homo sapiens
atcatcctctcacctgcctgcttactcaagccagaactgggttgaggtgtgggcaactaccggatgtcatgtagcctcctggcacaatagcatgaagtgagctgagaggtcatggaacaaaa

SEQ ID NO: 295713 - DNA, 122 bp, Homo sapiens
gtgtcttaagtgatttataaaggaaaactagattgtcttggataacagcttctgaaggggcgtgcccaagggtttcatggtctgcaaaagagtgagaaccacgtaaaataactccatggcaa

SEQ ID NO: 295714 - DNA, 122 bp, Homo sapiens
ccttctctactgtcctctgccaccagctgtgcatcttctatgaggggtgaggttaataaacgtgagttgctaatttgtagaacatgaaacaggtgtccaaaacaaaccttaatttgctgtgt

SEQ ID NO: 295715 - DNA, 122 bp, Homo sapiens
gctacattggaattcccattactgactttccagaagggcactcccatccagccaggaaaccgccggactacaacgtggcccttcagagatcgcggatggtcgcacgatcctccgacacagct

SEQ ID NO: 295716 - DNA, 122 bp, Homo sapiens
ctgctcaagtacctggtgtacatccttcgtaaggcagcccgcaggctggctcaggtctctcgggcagcaggtgtgcgggttgggctgctcagcagcccagcacccctcgggggccaggagac

SEQ ID NO: 295717 - DNA, 122 bp, Homo sapiens
ggagggtggccaggaggagctgcgtgcacctctaccgagagggacgttgtaaccctgctccgcggtggagggagctgtggctccagctagaagggagtagctattcagcaggattcagcagg

SEQ ID NO: 295718 - DNA, 122 bp, Homo sapiens
aagtaaaatcagaaaaatctctagccttgtggagcatgtgttccagtgggaagaggcagacggtacatacactctaatatatgcagagtaaatgaggaaagtgttagaaggtgataagtgct

SEQ ID NO: 295719 - DNA, 122 bp, Homo sapiens
tgatggaatgatgagtgagggagaggcagcgtgtggctctgctcagcctcctgtttctgtcgttatgggttccaggagacagggccagaagagaaccagacagagatggagtaagtgccaga

SEQ ID NO: 295720 - DNA, 122 bp, Homo sapiens
aagataaaccttgagctcagaatgacatatccctatgtgtttgttttttagttgacttcacgtaaaggcatggtttgttacacaaagaatataaatatttaccatgtctgttacatgtaaca

SEQ ID NO: 295721 - DNA, 122 bp, Homo sapiens
gcggggaggtcgctcttaccagtccccactctgacgagaagactgcccagctccaggcaccgtagggccccagtgacgtagccgaacacccacgcctctgacgtcgccagaggcccacctct

SEQ ID NO: 295722 - DNA, 122 bp, Homo sapiens
ggggaggcggacccagccggccacaggggcaggttcgcggcgctgtgaggcggggctgggcgtgcgccgccgccgccgccagattcgtctactccagtgaatcggcacgggagaaagccccg

SEQ ID NO: 295723 - DNA, 122 bp, Homo sapiens
tcccacaaggatgcagtaggccaggaagccctaagggatggggagtgcgtgagtgacacccgccatggtgggggcactagggagtctcctggctgctccctgtatccaagcacagagctgag

SEQ ID NO: 295724 - DNA, 122 bp, Homo sapiens
agcaggcctgaacatagtgactaccatgcattcatctacaatttgtatctctgattctaacgtgcttacaccttaaattagtattatttcttccatttcagcaagaaaaatccaagactact

SEQ ID NO: 295725 - DNA, 122 bp, Homo sapiens
cttgcccaaggtcacaaggccagttagtaactaagaggccaaaattgggtttactgattccgagtctattcaaaatagttttcaaggtcctaagtgttgggggaattccagaaaaacccaag

SEQ ID NO: 295726 - DNA, 122 bp, Homo sapiens
gaagccttccaaggtccttggtttcctggaatgacatttgaggcatatttaagtgccttacgatattcctgggtttatttgggttttggcccatatgcattggtggtaagtccctgagaggc

SEQ ID NO: 295727 - DNA, 122 bp, Homo sapiens
cccctcaagcctccccagctccccagcaagttcttccagtgtgcctttctccaccgactgcgaggactcagacatgctacatacgcccggtgctgcctccgacaggtctgagcatgacctga

SEQ ID NO: 295728 - DNA, 122 bp, Homo sapiens
aatctttgtaagaagaagtggaatgctaatggttcctggagttttgcaggaatattccaccggccccatttctaatctcccactcactccctccccaaagacactcctactagaaagcttat

SEQ ID NO: 295729 - DNA, 122 bp, Homo sapiens
ttggtataattcagtacattcacaattcgcctctgcatttcatggaagagcagaagcatacgctcagtggccaggctttcagagccactaacgcagttcccattttaacattcctagggaac

SEQ ID NO: 295730 - DNA, 122 bp, Homo sapiens
ggggccgactcccagggaagggtccccagcccaagagaccaccaagggtcggcggctacgcgcccgccgacccctgccagcctcacagccccccacccgccgccggacgccgggcgcccgcc

SEQ ID NO: 295731 - DNA, 122 bp, Homo sapiens
ttcctgtgcctctccgcgagctgcctggagagctgagcccagcgctctgcctttaaggagcgggcggggagccgaggggaggagggcgcccggcggagcgttgaatggggcgcagcaaggct

SEQ ID NO: 295732 - DNA, 122 bp, Homo sapiens
ggcctcgggcctctagagagcgggagtgaccctcggtttctggcctccgaggggcgggagcgatcctcagccatgtccctagtctctggcttgcggctgatttttaaattttttgtagaggc

SEQ ID NO: 295733 - DNA, 122 bp, Homo sapiens
ttactccttgtttcttcataatccctagtggagctgggtcaatttcaggcacagcccatccgagtcaggcgaggtccagaaaggcctgactcgcctggcagcctcaacggacttgtccccgc

SEQ ID NO: 295734 - DNA, 122 bp, Homo sapiens
aagttggataccagcctgggcaacataaggagacccccttctttaccgctcccccactcccgccaaaaatttagccgggcaatgtggcacgtgcctgtagtcccagctactcaggaggctga

SEQ ID NO: 295735 - DNA, 122 bp, Homo sapiens
gttgaaatcatgttatgttccatgatgtcaattagctattccaggaaaccaatggaaagacggaaagatgttacattaaaacaattcactgaaatatttcatttgaaagactttaggagaca

SEQ ID NO: 295736 - DNA, 122 bp, Homo sapiens
ctcggctttaccacacacttactgtgcaacactgggcatgccactgtctctgagccttaacgcttatctcacagggcagttagggaatcaagcagtgaaatgctgtacagatttatatcatg

SEQ ID NO: 295737 - DNA, 122 bp, Homo sapiens
gcgtgcgcgtccgtgcggccgcgacgccgccgccggtgcctctctttctagacgtgcgcgcgcccgcagctcgcccccctgaccgtaaagaggcccggctgtgtcgtgaaaggggccgcaac

SEQ ID NO: 295738 - DNA, 122 bp, Homo sapiens
tgcagggtggggacaaccacagcctgtcacaagctcaccgtcagcctctctggagccattcggcagcatgaagtccctatcacccacataataatgagaataataagtaaaataataataag

SEQ ID NO: 295739 - DNA, 122 bp, Homo sapiens
agggattccctgcccgattcaaactttcctccctcccaaggaggcaggagggaaacgctgcgagagccagctcgctggaaatctgccagggaaactaacttatcttggggcggcagcgcccc

SEQ ID NO: 295740 - DNA, 122 bp, Homo sapiens
aacatcttcattactctccttcaatcaagtgtttcagtttgtttgatacagagaatcttccgaagtgcctgatgcacctccttgttcctcatggtatagatcacaggattgaagagaggggt

SEQ ID NO: 295741 - DNA, 122 bp, Homo sapiens
aggagggctgatccaggattggcatagcagggagagctgcagggacaagctgggggtggtcgccagctttttagcttaaatttaagattctgagtgacaggagagtcgggtgcagagaataa

SEQ ID NO: 295742 - DNA, 122 bp, Homo sapiens
aggagttggaggctgaagtgagctatgatcaggctactgcacttcagccaggtgacgaagcgagacactgtctctattaaaaaaaggaaaaaagaaggcaaaggtgaaactagataaaagac

SEQ ID NO: 295743 - DNA, 122 bp, Homo sapiens
acatggtctggcggaagctgagcgagggcatggactcctggttgttctccgagtcgttgtcgtccatgagccgctcggcgttctccctcttgcggtccttgtactcctcgtagcagcagtcc

SEQ ID NO: 295744 - DNA, 122 bp, Homo sapiens
tgcttcttcatcaacccatgtctgccaccaggcagagaccttgttttaatcatcattgaacgtccagaacacctaattaagagaagctgctcaatagatatgtgagcacaaagtgaaagaat

SEQ ID NO: 295745 - DNA, 122 bp, Homo sapiens
acatggtgggcgctgtggctgcggctgcggctgcagcggccccaggtgcaaacagactgccgccgaatgtgagcagcgaggcgaggggtcgaggtagcgaggagtcagggtggcccgcagca

SEQ ID NO: 295746 - DNA, 122 bp, Homo sapiens
gatgcgcgggggctgggctagcaagggcagtggcgcgagcgggacgcaggatacaaagcccggagccacgaggctggcggcggggcgggggccggagcgatgaatgggcacggccgggccaa

SEQ ID NO: 295747 - DNA, 122 bp, Homo sapiens
gcaccaaggacttctggtcaaccccaggacagcggacagcgggccgggcacttccaaaggcgcaggagcgaagcagccctctccagccgtgcactgcacctccgcggcccgcgggcgagatt

SEQ ID NO: 295748 - DNA, 122 bp, Homo sapiens
gggcccggccctggacccgtcaggtgcctgtccccagccccaaccccactcatgccccgtcgtcctcccagacaaatgaaaccacgctgcgcttccgatgcccccgcttgccgtgtaatggt

SEQ ID NO: 295749 - DNA, 122 bp, Homo sapiens
tctcgggctcccggggcagaaggagggtcgaggcccccttccttactcccgagccctggccgttccgtcctgttcgggggcctttcccagggccgcccagagaccctctccgaaagtggccc

SEQ ID NO: 295750 - DNA, 122 bp, Homo sapiens
tctggggttgtccattgtgacttgccagccccaagcaagacatggccagccttggcaccacgttacctcagcagctccatctcatgacagcacggcttgttggtgaatgacaagttggctca

SEQ ID NO: 295751 - DNA, 122 bp, Homo sapiens
aatgaaatcacagcttgcaatgggcatttggctcccattcttctgagcgtggtgctcccacgctgctggcttcgtgtggtgactcacggcccactcacgtctctatgtttgaatgagcaacc

SEQ ID NO: 295752 - DNA, 122 bp, Homo sapiens
caagttaatacatctggatacaagccttttatcatatatgttttgaaaatatttgctccccggctgaggtttgcctttttattttcttaacactatcttatgaatgcaaatttttaaatttt

SEQ ID NO: 295753 - DNA, 122 bp, Homo sapiens
acagagtctgccaagtgtgctgtggtgctctcagagcctggcctggtggggaggctgccccgaggaatggttcccccgagggcagaacttagggaatggcctggcattggcctagtgatgtg

SEQ ID NO: 295754 - DNA, 122 bp, Homo sapiens
tacagccatcactggaacaaattgaaacctccccgccccgttttctgcctttggtgcaggcggggccgcgttcccagataccgtgagaggccttggggcgcggaggttgggggcagcctcgg

SEQ ID NO: 295755 - DNA, 122 bp, Homo sapiens
aagggagcaggtccatgacctggctcagacgtccccaacctactcagtgagaactgtgcccgcatccacccttcacctctgccatgatcagcagccccaaggcctcagccttctccggctca

SEQ ID NO: 295756 - DNA, 122 bp, Homo sapiens
gagttaataaaatgtagaccagtggaccttgaaagggtttaatttcataacaatcaagaacgccccctatcccacctccattccattcatccaaggcttctgggctcgcttcttctcgtctt

SEQ ID NO: 295757 - DNA, 122 bp, Homo sapiens
taccccactcgcctccgcccatccggcaggggctgggccgaccacagcttcccggggttgcggccctgcctcctaggcttctgcggagattttgttgttgtttggggttttgtttccttcca

SEQ ID NO: 295758 - DNA, 122 bp, Homo sapiens
ctgagaagcgagtgagtggaccacagaggtcatttcccagccacgtggccaggcccagcccgaggcaggaccgggctcagggtgggaagcagggctactcagaggagccaggatggggcggc

SEQ ID NO: 295759 - DNA, 122 bp, Homo sapiens
cgccggcgccggcggaaggggcggggcgcagataggggtagcctggaggcctgcagtccgcgcggccgcggggagggacgagagggcctgacgtacaggtgagtgcgcctctgctggcgcgc

SEQ ID NO: 295760 - DNA, 122 bp, Homo sapiens
gtcatgtgttccatcagtcatgtcgttcatcatcccaagcatgtccacgaagccacccgacgtttccagcatccccaagggggagacagccccagcctgcaccctgcagctgtgatgccatc

SEQ ID NO: 295761 - DNA, 122 bp, Homo sapiens
cagcccacctacctcgtccaggtctgctccattttccaggctctttccttagtctcaggacgctcctcacccgggaggggaagcagcctgggaaaatgagaagccttgcccacgaatctcca

SEQ ID NO: 295762 - DNA, 122 bp, Homo sapiens
atctggatcgtgcttatgcaaacctccctcctctcactctgaggtatatacataataatacgttaataataaaatgttaaaagagctaacacttatgcagtgctatctgccaacaatctttc

SEQ ID NO: 295763 - DNA, 122 bp, Homo sapiens
ctagttgtctgatacctgtctctcagattattaagacaggagaatattgactgggagtatcggggccatgtgacagccagaaaaaaagaactcattctgagtttgggctctggtttggttag

SEQ ID NO: 295764 - DNA, 122 bp, Homo sapiens
ctggaaagggtgctgggttgtggtccccagtgaggtgctgccctggccataagacccatccggatgccttttaaacacagaggctcacattccctgcccaagtcagtatgaccatcctcaat

SEQ ID NO: 295765 - DNA, 122 bp, Homo sapiens
cccaaacacttctgagagctcagcagggaggccctggctggcagacagagcaggaggccccggactcttcagaaactgaaattggaaattggagatgctttttgtgtctaagtcttcatcct

SEQ ID NO: 295766 - DNA, 122 bp, Homo sapiens
ttggtttaaagtgattcttttcagagacatcctttgagaagttaaaattgcagaggcttacgctttcttttatttcaaatatgcatagtgattaaccaggaataaggattctcccatgttct

SEQ ID NO: 295767 - DNA, 122 bp, Homo sapiens
gagcggcactcacacccggcggcgcgcgctggttctcccgctccggccgcgggactggtgcgcacctgggacgcggccagagaggctgaacccctaacgttttattctgatgaatttagatt

SEQ ID NO: 295768 - DNA, 122 bp, Homo sapiens
caaattcttagcctccccctcctttcctccccgtactggcgctatagggttaaactggggcggagcccagggatgaacgacagcgccagtcaccaactggtacggggcaagcgggaagagct

SEQ ID NO: 295769 - DNA, 122 bp, Homo sapiens
cggcgccatgggtttgcccgatttctgctgtaaagaataagactaggtcaggtgacctttcggggcttgagtgtgggaggaacggagacaatcctccatccggctccgttatccagataatc

SEQ ID NO: 295770 - DNA, 122 bp, Homo sapiens
cattcataaggtttctccccagtatgaactcgcttatgtccaatcagagctgagccctgacggaaggacgtgccacactcactgcaggtgtatggcttctcaccagtgtggattcttttgtg

SEQ ID NO: 295771 - DNA, 122 bp, Homo sapiens
gctctgggcggcgggcggcccgggccccggcggaggcgcgccccccggctgggcgccgcgcgcaccatggggctcccagcgctcgagttcagcgactgctgcctcgatagtccgcacttccg

SEQ ID NO: 295772 - DNA, 122 bp, Homo sapiens
tactggtcactttgtcaaatggggactccatggagtactgaaagtgaaaggcgatgggatcggagtgaagagaatatgggagggaaggaagtctagacagcaactatagacaatttttgaaa

SEQ ID NO: 295773 - DNA, 122 bp, Homo sapiens
tttggcaagagggaggctccgtggcacgatcacacgtgcaggagctgggggctgccagagcggctgttcaagatggacttggcaaatcacctctttcaagttgccggctacccggctgccgt

SEQ ID NO: 295774 - DNA, 122 bp, Homo sapiens
cctgcagctggctgccggcccgaggttctggggtgtctgaggtctcgggcggggcgaggacgtttctccggctcagcccccccacctcctgccctgccgccccccacacccagctccccacg

SEQ ID NO: 295775 - DNA, 122 bp, Homo sapiens
cagctacaattttaaccgtgttccaagttaacactgccgggtccttcttcctctttgggccgtgatagagcagttaggaccacacgtggccttcactgcacacaaccagcaaccaggatgca

SEQ ID NO: 295776 - DNA, 122 bp, Homo sapiens
aggggtggccttgccattgctaaattctgtggacgctccgtagcccttgaatcactgttccggaatctgacaagtccaaccgcaccctccttcctggagtccagacagcaccctccctggtt

SEQ ID NO: 295777 - DNA, 122 bp, Homo sapiens
gcacaatgggaaggcggggaacggcagctgtaattgcagggtgtgccagccctggggacgcgcagggggagggcattaagacgtggaggcaaccacctatgtgtgagctcccgtcgggtggg

SEQ ID NO: 295778 - DNA, 122 bp, Homo sapiens
cgattttcctctcagccgctcgccctccggaggcagctggcccaaaagaggggcatcgggcgtcctcctccacacagccttagagggggaggtcggcaccagcatctttcccacgctcctgg

SEQ ID NO: 295779 - DNA, 122 bp, Homo sapiens
gcaccagtatccagatgagaaaagattagggtggagataggtcccattttgaaatgccagcgagccacctaagaggagatatcaatagacagctggctactcaaaatagagatgaccagcag

SEQ ID NO: 295780 - DNA, 122 bp, Homo sapiens
actttgagctgcagggaagaggcatccaggtcgtagagttcccctgcaagggccaggcgccggtcagagagagggcccctccgcacctccgtgtccgggtccctcaggcgccgctcagctcc

SEQ ID NO: 295781 - DNA, 122 bp, Homo sapiens
aaggctcctgttttgcacagccaaatttaaaactgttggaatggatttttctttaactgccgtaatttaactttctgggttgcctttatttttggcgtggctgacttacatcatgtgttggg

SEQ ID NO: 295782 - DNA, 122 bp, Homo sapiens
ttctgctccacgcagatctgccccacgcgggccagcaggtcatgagggggcataaagacccgggagctcaggagaaaggtgaagatgtacgtcctctgaaggcaggagacggagagagggcg

SEQ ID NO: 295783 - DNA, 122 bp, Homo sapiens
gacaggatcaggttatttacttttttacttatttatttttgagacagagtctcactctgtcgcccaggctggagcacaggagttgataaataccaggcgcccaacaagctccgctcccgact

SEQ ID NO: 295784 - DNA, 122 bp, Homo sapiens
ggactcccgtccaggcgcaccggccggcctcggagctctaccagcaggctttcatgggagcggaggtgcccacgtttccattgtgcggtaaccgcgcttcatcacagccacctccaatcgag

SEQ ID NO: 295785 - DNA, 122 bp, Homo sapiens
tatgtaaaaccacactctataccctcatgatcagagcattctgggagcatcctccataatcggactccaggcttgaacaagatacagacaaaagagcacattctgaggccatcaggctctga

SEQ ID NO: 295786 - DNA, 122 bp, Homo sapiens
tgaaggcaggacgtgtgcccgtggacttgcacacgcaagcaggccgaggggagagcagcccggcagagaccttggtggtccagggctgagcaaaggcttcccccaccggtccatcccagtgc

SEQ ID NO: 295787 - DNA, 122 bp, Homo sapiens
gaggggacactgttgccatggcagcgcacgtgcgctcgctggcgcggcccggcacccctgcgctcttcaccccggaacgcgcgtgccccttcagccaggcccctgcccgcctgcgccccgcg

SEQ ID NO: 295788 - DNA, 122 bp, Homo sapiens
cctgcctttgctttcggtctctgtgcacgctgcctcctgacctgatggtccagttgcctgcggaagtaggtctgtgcacagtggaccttttaaaagagacacgaaacctgggagggcctggc

SEQ ID NO: 295789 - DNA, 122 bp, Homo sapiens
gccccaagctgatcccgacccttggtccatctgtcacctccacaccctggcaccctcccccgggtctctctcgggggatcctgcagaaccaagcctcatccccccgccaggccgacgctgcg

SEQ ID NO: 295790 - DNA, 122 bp, Homo sapiens
gcgccatcccgatggcacgtgtgctgctcgactccctgccgggtaggtccatcctgacggcgcatgtgcccctcagctccccccactgggtaggtccatcccgacagcacctgtgctgctcg

SEQ ID NO: 295791 - DNA, 122 bp, Homo sapiens
gaggaaattgtctgtggttgcagcggtgggctggcccttgccggctggggtcggtgtggacgggctactgacctagctttctctctccgcagtgctggccgactccctgcacgtgggcccca

SEQ ID NO: 295792 - DNA, 122 bp, Homo sapiens
ggcgcagttaccaggccagtcaacccaggctgtttaaggtcaactactgggggacttccacgtcacctcgatatatacgtaacgcgtgtgtgccgtaacccgtgaactatggaatccctaac

SEQ ID NO: 295793 - DNA, 122 bp, Homo sapiens
cactacctaccttataggtagttgtagctatgtagttaacatctcctagttgttacttctcggagcagtgcctggtgcatggtaagcactgtgtgaaggtctagggttctaatctttctgcc

SEQ ID NO: 295794 - DNA, 122 bp, Homo sapiens
ccacctcctgggttcacgcaattcttgttccttagcctcctgagtagctgagataacaggcgcccgataccacgcccggctaggtttttttttgtatttttagtagagatggagtttcatca

SEQ ID NO: 295795 - DNA, 122 bp, Homo sapiens
gagttgggtgcctcccaagtccttcccacgccactgccctgtgccagcccctactgcatacgtctatcaacgacttggaggaagatggtggcgtggtgctggagattattctccttggggtt

SEQ ID NO: 295796 - DNA, 122 bp, Homo sapiens
tatgtctaacttctagtttctttaaccaacccttccagataaaactccataatcctgtctcgtctctaagtattttattacaaccccttaacagttgtacttgaaatagtcatctacttgtg

SEQ ID NO: 295797 - DNA, 122 bp, Homo sapiens
agggaggcatccagcagccaacacctggaggacgttgtgcaaaacccattgccaacttcccgcacccaggtccccaaacccagcctgccacgtctcccagcaggcaaggaagaacaaactgc

SEQ ID NO: 295798 - DNA, 122 bp, Homo sapiens
ctggagagaacgatccctcctctcctgattggtcgaggttggcagtctgtcctgtgggggcgcggcttaggcggacctcgattgggtggcccgaatccccgcctttccgagcggggacgctg

SEQ ID NO: 295799 - DNA, 122 bp, Homo sapiens
gtcaaactgcgcggcgcgcctccttcccgaggcccggccccctccccgcccaaacccgcgcgccgccacacactcaggtgagcaaggcgctgcgcgagtgtcaactgccccacctaaggcgc

SEQ ID NO: 295800 - DNA, 122 bp, Homo sapiens
cctgagaatgcagctcctttcgggctctgtctctggaagcctacatttaggggctccagccgcccctgggtccttttgctcacttcatcttcctgtcgtctccctgcactcagtcagaacag

SEQ ID NO: 295801 - DNA, 122 bp, Homo sapiens
tccgtcgcagccggggttcaggagccagcgcgtgtgttgaagtttcttggcccgctcacccggccggcggggaatcctgcgtggctatgaggttttccgaggcccggtcgcccgcctggtct

SEQ ID NO: 295802 - DNA, 122 bp, Homo sapiens
ctcgggaggcgctttgcctttgaggaagatggagaggagtcgggagaagcgcctagaaaccgcattgatttagacatcaatcctggccggctccctccgcctgccgagctgcggggccgcgc

SEQ ID NO: 295803 - DNA, 122 bp, Homo sapiens
gggacagagcttctaggtccagactgccgcgcacagatgaggcaggtagaatggcggccccgagagtgatgtgtatccagaaggtgagaatgggaccccatggacaaaagggtctgcacaga

SEQ ID NO: 295804 - DNA, 122 bp, Homo sapiens
tcattagctcaactccaaaccaatctgtgccagaagactgaaatgggcctatgtgtctatcgttcaaagcaagacctggccaggcgcggtggctcacgcctgtaatcccagcactttgggaa

SEQ ID NO: 295805 - DNA, 122 bp, Homo sapiens
ttagttggtaatcctggcatttgctcaaattaaattgactaataactctaaggagtgaaccgcaaatagataagagattcataagccaactgcgccacatcaaacatttcctgtgaaataca

SEQ ID NO: 295806 - DNA, 122 bp, Homo sapiens
tagcctgggggaggagtggggtgagggaccttctgcaggaaagagacatggatgttgctgcgtcactaccacagagatgccctgacaccgagaagagcaatgtgtgcagaatcatcatcttt

SEQ ID NO: 295807 - DNA, 122 bp, Homo sapiens
acagcatctctgtgtggtagggagggagctgcgggtgagcagccagtagcactcgtctcacgccctccccaaggccatgtgtgtctatgtccacgtgtgtctgtaggtgtgagcgtgtctgc

SEQ ID NO: 295808 - DNA, 122 bp, Homo sapiens
agtccacggccagctggtcgaaaagtgaggatcttgccccctgccctgaggacgcggctgcgggccaggttggtcacactcagcacacacaccttcagtttgggcacctcctgaacccgcac

SEQ ID NO: 295809 - DNA, 122 bp, Homo sapiens
ggtaatccgcccgcctgggcctcccaaaatcctgggattacaggcgtgagccaccacgcccggccagtgttacttaaaagtattacctcgcacctgtaactccaggaaagagccggggcaaa

SEQ ID NO: 295810 - DNA, 122 bp, Homo sapiens
gagaatgaaggagcagttggggaaaagaaaactgaggctctgacatgggtatatgggtggcgagtgactcaccacccactgagaggagaacctcacaagctctgacatgctctggttccagg

SEQ ID NO: 295811 - DNA, 122 bp, Homo sapiens
tttgtcaaacttgtgtgaatattcatgttttgctgcagaaatgcaaatgagctcgatgaccggctgctgccccaagccctgctgggaggttatgtgacctacagcaggtgtgtgccccatag

SEQ ID NO: 295812 - DNA, 122 bp, Homo sapiens
atcaagcaaactcttgggttaagacggtgcagagggtcctagattctcatatctaaaaggcgcctcagagagcatcaagttaatcattttgtggatgttgaaaccatgtcctgtggtaattt

SEQ ID NO: 295813 - DNA, 122 bp, Homo sapiens
tgccatcccacctgcagctgccctggaattcccttcgctgtttgccttcatctccctccacgtttgagaggctgtcaggcagcagcgaaagcttgttaggatgtcctgtgctgcttgtgatg

SEQ ID NO: 295814 - DNA, 122 bp, Homo sapiens
tcttcgagaaatcttctgatatagtttggatatgtatcctctccaaatctcatgttgaaacgtgatcctcaattttggaggtggggcctactgagagatatttgggtaatgaggttggatcc

SEQ ID NO: 295815 - DNA, 122 bp, Homo sapiens
ggtcattggtctcggccccttacctagcggagggtctcctgaattcacggtcagagagagcgtcgccatctccaccagtccgctggtccacctgtcagtacgcctggctcgtgccagaacta

SEQ ID NO: 295816 - DNA, 122 bp, Homo sapiens
agaccaagctggtttcctctccggtttcctccggggtggctgggtcccaggtcctgcccccgcctcgccctgtgcaagctcggtgcagtgcagcccctccggctctcgccccacaatgccgt

SEQ ID NO: 295817 - DNA, 122 bp, Homo sapiens
gggggaagagggtctcagtgcagacagagttctggaaaagactgttgatatcacccgagccgcagggcaagctgggaaaggtagctcggcacagtccggctgctggactacaaatcccagca

SEQ ID NO: 295818 - DNA, 122 bp, Homo sapiens
accaggagctggaggcgcggggaaggaccctcccctagagcccgcagagccagcccggcccgccagcccacaccttgacttcagactcctggcctccagaaccgggagagaagaaaggccgg

SEQ ID NO: 295819 - DNA, 122 bp, Homo sapiens
tggtctcatttacggaactcaactgtatgtttgactgagatgaagcaacctgttgatctccggtggggccgacagggagaggggagcagaaagccaggcacgggctgggagccctcggcggc

SEQ ID NO: 295820 - DNA, 122 bp, Homo sapiens
tggaagtgggttagagagaggtgggggtatggaagaggtgacttctttagatggggtgatcgggaaaggccttcccagagagggtgacttttgagctgagtcttgaaagatgagaaggccac

SEQ ID NO: 295821 - DNA, 122 bp, Homo sapiens
cggggccagaacacaaagctcattgtgatgtttgtgcttctattcagacgccacgtggtacggactccacgccaacctgcagactggattcttttcttccccctcagtaacaaacatacaca

SEQ ID NO: 295822 - DNA, 122 bp, Homo sapiens
tgcacggtgccagcgggtctaaatgtatgaattcttccattggacggctccgtgcccaaacgccctcataaccacgcgcttctaccgcaggttttgttttttggtttttcatgttttttttt

SEQ ID NO: 295823 - DNA, 122 bp, Homo sapiens
ttcctccgcgaggacctggtgacagggaagcgagaggttctcgcgtgcggcagcagccagcggacgtccagtccccagcacgcggctcctcaggccctgcaactcagaggcccgcgcggtgc

SEQ ID NO: 295824 - DNA, 122 bp, Homo sapiens
caaaagtgggcagcctgacagctctcctgacaagggaacccctgcactctatttttaaaccgacctgtgtaatttaggagagaagtcaccatgtctcctgataaaggttttgggggcggctg

SEQ ID NO: 295825 - DNA, 122 bp, Homo sapiens
gcagtttgcatacttttaaaaataactattagctttttctggcgcccagcctaacggccacgggaggagaaggaatgaggaccaagccccagggggcccattccgggcggcctccaaactcc

SEQ ID NO: 295826 - DNA, 122 bp, Homo sapiens
ttagcaagggtcagaataattcttttacacaaaataagaaagagaggcaaaaacaggatccgtaacattgccgcaggccaaaattagacatttccaaatgccaactgcgtagctgcatagag

SEQ ID NO: 295827 - DNA, 122 bp, Homo sapiens
cgacttccgcccgtcagtaggcctggacctgctggcacccgctgtcaagatagggcctggcgtcgcggcgaggcatcagctcgggcagaagcacagcccaggaagtgggcgcgtcgcaagct

SEQ ID NO: 295828 - DNA, 122 bp, Homo sapiens
ccacctgctcacgagcctcagggtcccttggtgaagtcctgcagccgctggtgccctctgcgaccagctacgttcccactcgttctgacagcaccagcgccccaggggcagctcgcaaaccc

SEQ ID NO: 295829 - DNA, 122 bp, Homo sapiens
aatccccatgtgtctcatacccaaatctaggattttcctcttcccacctggagtatccggcgtgcatggtttatccacaattaaagcagactgcaggctgctcccctcaccagaaagccgct

SEQ ID NO: 295830 - DNA, 122 bp, Homo sapiens
ggaagaagaaacttcaaataaatgtgcccaagttcctggtccggtactccctggcggatccgtcccccgaaagctcgcgaaaatggctggcgagaccccagaggctctctcggacgcccttg

SEQ ID NO: 295831 - DNA, 122 bp, Homo sapiens
gtgtttctgcagctgctaccgctgctgctctcgagggcccaagggaaccctgggggtaagcgatccctgggagagttgtgatagacgcagaggggctgaagcaagataagggccgcctagta

SEQ ID NO: 295832 - DNA, 122 bp, Homo sapiens
gctgctcatccagaagttcctcagcctgtacggcgaccagatcgacatgcaccgcaaattcgtggtgcagctgttcgccgaggagtggggccagtacgtggacttgcccaagggcttcgcgg

SEQ ID NO: 295833 - DNA, 122 bp, Homo sapiens
tcatactaggcattaagaatagtagttattattacctgggcattctacagctgaacatgtcgtaatgaaacaaccaaaaactcagctttcctgccctatactgttcccttgcattgtttcct

SEQ ID NO: 295834 - DNA, 122 bp, Homo sapiens
tagagccggggcccaagacgcccactggagacagggtcgggtcccactaccgcgcaggcccggctcgcccccgacgtcaggcacggggcgggacccttgcagctgtccgtccagtcccgttc

SEQ ID NO: 295835 - DNA, 122 bp, Homo sapiens
gtccaccgggggcctgggaaacagccacccccttctgctccggggccagcggcctgtcctcgggttcactgctatttctgccaaaggggagaggtaattatagcctggccgctgccagctgg

SEQ ID NO: 295836 - DNA, 122 bp, Homo sapiens
cagatgggcacaatagactggaatgaaaagctaatattgaatcaatgctgtccctgtccgcgccgctgcgatgccaccctttgttgcgcacgccgcccccggcaagctgctggcggccgggg

SEQ ID NO: 295837 - DNA, 122 bp, Homo sapiens
gaatgcccatcaggcactgggaccctcctctgcatccccggcgtttgcctaaaccccagacgagcagggccagctgctgttccagcatctgtgctagagcttggctcacactgttccactgc

SEQ ID NO: 295838 - DNA, 122 bp, Homo sapiens
tctggccctgagcaggtggcacccctctcttcctctctgccctctgtcaagaccataccacggctgttttgactcctgggcttccgccctttagtttacacatttgatgattccgtttgaaa

SEQ ID NO: 295839 - DNA, 122 bp, Homo sapiens
tggcctcgtctaaatgcggagccgctgcctccgccccccgggtcagggcgcccccgccctcgccccccgctccgtgcaaaatggtgtttaccaaagtcaatattggccgcggcgcccgcccg

SEQ ID NO: 295840 - DNA, 122 bp, Homo sapiens
ggcgaggacgaaggccttggcccgcggagacgcaggcacccgcggagaacgcttcggatccgtcacggttttgcctcatttggaagatattacttcgcccctgaaaaaaaaaatacaaaaaa

SEQ ID NO: 295841 - DNA, 122 bp, Homo sapiens
cgccacacacatcctggcccgctcctcctgggaaacgggtctgtactgcctggtgctgggcgggggcggcctcgtcatcctccagtcacatttttccaagcacactgtggtcgagccatggc

SEQ ID NO: 295842 - DNA, 122 bp, Homo sapiens
catgcgctcacaagaaccagactacttgacagtattcttttaaaacaggcaaatgaaagtcgcaggtgggttctgccgccgtcccgttctcacatctccctctccgtcgcagatgcagaagc

SEQ ID NO: 295843 - DNA, 122 bp, Homo sapiens
caggagcattttcccccagcctaaaatcagagaaatgctctctaaacaaactgaacaatacgcccaggaatgtcagagttcctagcatgaatgtgcacaccacagaattaagtgcttcttct

SEQ ID NO: 295844 - DNA, 122 bp, Homo sapiens
ttttcctggaactcctggtcttctttctgttgcacaaaaaggccagatcaatgctcacctcggggcctttgcaatcgctatttctgcaccaggaatgatccctccgccccggtctttccttg

SEQ ID NO: 295845 - DNA, 122 bp, Homo sapiens
tttgggccaggctgttccccgaggcgcgtggggaagcgggcgtgacctcttctgaaaaggcggtaggctcgctccacccaggccctagagcccacccttagagctgcgcgctttagggtgag

SEQ ID NO: 295846 - DNA, 122 bp, Homo sapiens
ggaatggcggagccctggaagtccaggaagtggcgggcgtacgacatgtccacgatggcccgggccccggtgggcaccagccgcagcatggcctgcgcctccgcccgctctctgcgccgacg

SEQ ID NO: 295847 - DNA, 122 bp, Homo sapiens
atgtgagaatttgagatactttacatccttgccaatcctcagtccttttaactttggccacgctggtgggtgtgtattgtgattttaattttaattttcctgatgaataataatgttgaaca

SEQ ID NO: 295848 - DNA, 122 bp, Homo sapiens
agggcggcagccctgtcactcacgtgttccaaaagtgcttcccctgtgccctgatggcctcgccatgtgtctcatcatgccccacgcgctcccactgtgcgccccacctcgcacccgtgccc

SEQ ID NO: 295849 - DNA, 122 bp, Homo sapiens
cttttctgcctttctagtttttgggttaccagatagaaggcttggcctcagttttggcctcgcctttttgctctttctaacgagcacgaaggggcgatagggacgcggaggacacctttatt

SEQ ID NO: 295850 - DNA, 122 bp, Homo sapiens
ctctctctgcattgctcagccctcggttgatcccttcaatgaccttctcaatggggtcatcgctggccgcccatccagacagggcccccagtagcagaaggagggagcaggagccgaccaga

SEQ ID NO: 295851 - DNA, 122 bp, Homo sapiens
ctggttaataacctacagggcaataaaactacattctttggggttatcttctctaccagacgataatcgtttacagctttactggacaaaaaaaaaaaaaaatcattgacaatttattcgtt

SEQ ID NO: 295852 - DNA, 122 bp, Homo sapiens
ggcaacataacaagaccctctccatgttggggtctctttaaaaacacacacagctgggcgcggtggctcacgcctgtaatcctagcactttgggaggccaaggcgggcggattacctgaggt

SEQ ID NO: 295853 - DNA, 122 bp, Homo sapiens
tcataagaagatgagggcagagatcgggtgatgcttgtacaagacaagggacaccaaggacggccagcagccacgcgggtcaaggcctggagcacgcccttcccgctcagcctcaggagaaa

SEQ ID NO: 295854 - DNA, 122 bp, Homo sapiens
agggtgtgggcggccggcagggaccgcgggtgagcggtgggcaggtctcaggactctctccggacgtgcggtccggggccgcgccgggtgctgggcgcgctacccagccaaggtgaggcagg

SEQ ID NO: 295855 - DNA, 122 bp, Homo sapiens
atctctttcccaagcctcagagtacctggaggcggggcgcagagtcgcctgctctggatccggcgcaggcaattcaggaggagccgcaggagccctcgggagagcaggaggctgcatagggt

SEQ ID NO: 295856 - DNA, 122 bp, Homo sapiens
accctgccctgtggatgccccgccgaggtcccgcggccggcggggccagaggggcccggacgagctctcctatcccgaagttgtggacagtcgagacgctcagggcagccgggccctggggc

SEQ ID NO: 295857 - DNA, 122 bp, Homo sapiens
acggcatctgcttctgggtcgctcgggtgctcttcagcctgggctccaaccttatctcatcgtggcctacttgaaccgagtgtccgatctcccctacccgctgggtatccagccttagcgcg

SEQ ID NO: 295858 - DNA, 122 bp, Homo sapiens
ggggtgtttgcggagggcggggcatcgcctcaacagctgggggctgcatcatggcaggaacgagtttccctgagccacggagctgcaggtcgcctcctctactaccctgctacccggttacc

SEQ ID NO: 295859 - DNA, 122 bp, Homo sapiens
gggtgaaaggggggcctggctttgagtcaaagggaggagaaggagattataaagctgaaacgtctaagagagtttgtggtctgagcggttctactgcggcaggtgcttctgagaggcagagg

SEQ ID NO: 295860 - DNA, 122 bp, Homo sapiens
gagtcatcatgcccggcccacattttctttattagcaaaatccactggaagcgtattcctcgaatgctctgtattctgaattcagagaaccaccctaaattctctttcttgagaattactca

SEQ ID NO: 295861 - DNA, 122 bp, Homo sapiens
cccgccgggctctgcgctacccgcaccggaggctccaggcccgggcaccgccagccccgtcgtgccacccacagaagacttcctgccgctgcccaccggcttcctgcaggtgccacggggtc

SEQ ID NO: 295862 - DNA, 122 bp, Homo sapiens
ggcctccagccagagtgacggcctgcgcggactcccgccttagtgggcggagttgtgccgcgtctgatgcgcagttccctttatagcgcggcaagccgaatcctagaggctaacccggcagg

SEQ ID NO: 295863 - DNA, 122 bp, Homo sapiens
agggaggtttaagcggaatgtcactacattcaaatatgggagggagaccactttcaaaaacgaacttaaatccagagaaccatggttcttctatggtatccagtaaggggcaatgggagttg

SEQ ID NO: 295864 - DNA, 122 bp, Homo sapiens
attctgggatcccccatccctggtctctgtcctgcacacggaggggcagagtggagattccgagagtggcccggccggcttttcggctgccgcctgcgcacggtgtcaggcggcgggtgatg

SEQ ID NO: 295865 - DNA, 122 bp, Homo sapiens
caaggcccctggcaccgccacagcaagggaaaaaactttgcgcgtgcagcccctcgatttcgcttcatgacaaccgtgctagagattggcgcccccaattttctgatgagctaacggaggct

SEQ ID NO: 295866 - DNA, 122 bp, Homo sapiens
tggtaactgagcagatttaaagggctagagtcccaatttgaagggtgccagtgctgctgccgtggctgctgccgtgtctgctctggctgctgctcctgctgctgggaaagcttcctgcagcc

SEQ ID NO: 295867 - DNA, 122 bp, Homo sapiens
ttgtgccaccttcccccacgttgcaattcttttattaagctctcagcgctgtaggaaacacgtgttcttagacaaactgtattcaaaattggcaaagcccataaacactgactttttaaaac

SEQ ID NO: 295868 - DNA, 122 bp, Homo sapiens
aggcactgaggcctgaaaaccgcgaggccgcccacgcgcgcctgacccgcccccccctcccgcccgccccaggccccgccctcccgcgcccgcccctgcgccggccccttttgttccctccc

SEQ ID NO: 295869 - DNA, 122 bp, Homo sapiens
tgacaagtgctcctccagccgtgagatgagccagaggatggaatgccacaggccccacttcgtctcccagcccttcatctttcttccatgtccaaaggcggctccccagaggccaagggctc

SEQ ID NO: 295870 - DNA, 122 bp, Homo sapiens
gagaggccagtcatagagattcccattggaagaggcatgaacaggaagataaaccaagggcgagggaccaaagagaaagaagtgacagagtatggaaaagggagaaagatagggagaaatat

SEQ ID NO: 295871 - DNA, 122 bp, Homo sapiens
cccgctggctctatgaatgagagtgcctggaaatgaacgtgcttttactgtaagcccggccggaggaattccattccctcagctcgtttgcataggggcggccggcggccaatcacaggcct

SEQ ID NO: 295872 - DNA, 122 bp, Homo sapiens
gctctgagaaagttcggcagtggccaccacatctggttctcgttaacttttctaaggcagcggccgctggagcagcggggctggcggggtaaaagctcctggccagggctgcctggagctgc

SEQ ID NO: 295873 - DNA, 122 bp, Homo sapiens
ttcgtttatttccggacctagagatgaggcgctggggcgcttgggtgtttggggcgggtccgaggccggaagtgcgtgggctgccgggctggcccagcttagggttttcaggaaatttggaa

SEQ ID NO: 295874 - DNA, 122 bp, Homo sapiens
gtgagccaccgtgcccggccgggaggtcactttaaggagggctgtccaactgcaaggagccgcaagcaggaagtgaaaccacagcacttcaaaaaaagagggagactgggacaagcgtatct

SEQ ID NO: 295875 - DNA, 122 bp, Homo sapiens
tggctctcaagggacgcgcagccctggttcccagcccgtacctctccctctttacctccccgcaagcagaaggagccagctccgccctcggccagcccagagaggggctcccacagtgcagt

SEQ ID NO: 295876 - DNA, 122 bp, Homo sapiens
atgacgacccgctatgtggatggaggctttggcatgggcaagtacaccacgcccctgacccgtggggtggactgcccctacttggccacctacgtggactggcacttccttttggagtccca

SEQ ID NO: 295877 - DNA, 122 bp, Homo sapiens
ccggggaagagggcctgacgcgctgcggggcggggccgcggggccgggtcgcgcgagcagcggagcaccaagggaacggaaaatggcgcctcacgacccgggtagtcttacgaccctggtgc

SEQ ID NO: 295878 - DNA, 122 bp, Homo sapiens
ccggaaatcgtggtatccatagagacgctatcggaagttggggttgctaggaagccgcggcgcgtctgctaagctgcaaatggctgaagtcccggaggattatgattccggcccagatgaag

SEQ ID NO: 295879 - DNA, 122 bp, Homo sapiens
gaaaaagaaaaaaaaagctctcggggtcggggcagggggtgccctctcagcatcaggagccggcagctgcctttccctccggcacttttcccttttctcctctctgtgtcgtaggcgtgcca

SEQ ID NO: 295880 - DNA, 122 bp, Homo sapiens
ctgcacggtcgtcaggaaagcggctcatctggtaacggcgtccatgtaaatgcaaaaacacgctcacgttcagctcctccataagaggcttctaaaagcgtcgctgctggcgccttctctcc

SEQ ID NO: 295881 - DNA, 122 bp, Homo sapiens
catgttgaggggcccacgactgcattaggaatgttggaagggattggtggttctgcagatcgcagctcattagtagctgtttacttgtagacctggtgatggtgctgaggcagtgttgactt

SEQ ID NO: 295882 - DNA, 122 bp, Homo sapiens
tgtggcactgcggagacaggacagcctgagtggggcctacacgaggtcagggggctgggacgatggcctcacaatgtggctgcccctgggctgggcactgtgtgtcatgcccaggcacttgc

SEQ ID NO: 295883 - DNA, 122 bp, Homo sapiens
aggatggatttggcaacaaaaaagtcaccggtgactctggagagggtgtgggtagaaaaccgcctgcaatgagctaatgggtggaagggaagacagtgaatgcagacatcatttttcaagaa

SEQ ID NO: 295884 - DNA, 122 bp, Homo sapiens
ttctttgactaggaaagggaactccctgaccctttgcgcttcctgagtgaggcaatgcctcgccctgcttcggctcgtgcacggtgcactgcacccagtgtcctgtgcccactgtctggcac

SEQ ID NO: 295885 - DNA, 122 bp, Homo sapiens
gcaacagacccagctaatgaaacagctgcagcagcaggaagtttggggcaaagcagtggccgagatggcctgccaaaagttgcaggagacccaggggagggagctgccaaggatggggctgt

SEQ ID NO: 295886 - DNA, 122 bp, Homo sapiens
aggcgaggtttccaggatgtgcgggcgtgcgtgtcatgcgtgtaaggacaccctgcacaccgggtaagccccgctgtgttctcatacccgaacggcaggaacacaggcaggggctcacgagg

SEQ ID NO: 295887 - DNA, 122 bp, Homo sapiens
tcaccccaggcacctgggctcaggatcaattgcagtagatcatggagatggagtggggtgcggtgattcatcactgtcagggctgtctaagagctctggggcggacctgctacctggccctg

SEQ ID NO: 295888 - DNA, 122 bp, Homo sapiens
ccagcaatacagtctgggatagtgcccccaaccggctccccgccaaaggcagtgcagccccggtttgggcccccaaaccatccccccgtgcaggcagcacagccccagatagcacacccaac

SEQ ID NO: 295889 - DNA, 122 bp, Homo sapiens
tctccctgccttgcacttccagggcatttagaattggtggtagtccctcatcaaactggacgtccaccactgcgccaatgaccgccacgatgcgcccggtggcggcgcctgcttttggcgaa

SEQ ID NO: 295890 - DNA, 122 bp, Homo sapiens
cccacagccacctaatgccctcccgcggggaagcctcggccctgccccaaccccagcggccgtggcctccaagatcgcaaccgcctggaaccgaaggccgggccttttacgtaacgtccacg

SEQ ID NO: 295891 - DNA, 122 bp, Homo sapiens
caataggatatcccagaaatcggagggcagagttctcattcgcaagcccagccccaccctcgtgcagtaagatactatgtctagtgcttggggtagaatggagaggcccccaagcagccaga

SEQ ID NO: 295892 - DNA, 122 bp, Homo sapiens
ggagtttaaaggcaagaaggctagggtcacggagcaactgctatgggaaaggtgagccagcgcgacagcccccaccccagaagaggcccggggcaaggggatgcctgcagcttggctggtat

SEQ ID NO: 295893 - DNA, 122 bp, Homo sapiens
tggggacagggatgcgcatttcacttccccgagctccggagagggatggcggggtgtcggcgagttcactgctggacacagttactgtaagtgctgtttccaggggtggtcaggaatctccc

SEQ ID NO: 295894 - DNA, 122 bp, Homo sapiens
agaactagaggtattccccgggcggctggaggactgagtcgagccgggacccgagtcctccggtatcccagcagccaccggaggcagtgagataatggaggaagaatgtagggagacctcca

SEQ ID NO: 295895 - DNA, 122 bp, Homo sapiens
gcgggggcgctagggccgagatcatgtctgactgggagaggtttccttggcagcagaggacgctaggtttgggatgaaagaagctgggcagatgcaaaatctggagagcgcgagggccgggc

SEQ ID NO: 295896 - DNA, 122 bp, Homo sapiens
tgttgagaacgatatcacaagggcggtgtacaccatctgcgataatgggagtaatatcatcgtcactccccctggatattagaaacaatagcacaggcagattacacacccgctgcaacatt

SEQ ID NO: 295897 - DNA, 122 bp, Homo sapiens
gcatcccggaacctggcccggaggctgctgtgggatccacagccctgcgcgctggggaggcgctgcaatgaccctgcggcggcgccttcccccggcgtccccaaatagaaacagcactagtg

SEQ ID NO: 295898 - DNA, 122 bp, Homo sapiens
gtgaggtcaggtccagcgggttagggttacgaggtcagggtcgaagtctcagaattgactcgggagtatgaccaataagcccaagagatttgtggaggccacgcccagaccatgcctaccct

SEQ ID NO: 295899 - DNA, 122 bp, Homo sapiens
cactagctggttgctcgtctaagccctcaggtctgctgctcttgttctatcccaacagttcgcttcaatcttagtgtgggtaaaattgcttttcaacagttgctcccatgttgagtccttcc

SEQ ID NO: 295900 - DNA, 122 bp, Homo sapiens
gtctctatcaacccacaagagagctccagggcatagactgcctgttaaaggagccgctcacggagcagaaacagctaagccctgataccacattttcccacttcacctacttcacgtccctt

SEQ ID NO: 295901 - DNA, 122 bp, Homo sapiens
taggtggtgagcccagaccggcagatgcacaaaaggcagcggaggcctttgcactcgccgcgtgggccatgcccaccttgctcacgagcctgggccatggtgcgacgttgtgctacggtgca

SEQ ID NO: 295902 - DNA, 122 bp, Homo sapiens
aacccaccagaaggaagaaactccgaacacatctgaacatcagaagtaacaaactccagacgcaccaccttaagagctgtacccactcaccgcgagggtatgcggcttcattcttgaagtca

SEQ ID NO: 295903 - DNA, 122 bp, Homo sapiens
aaagaacattattgggataagttacaaaattgcaattatggcctgcgctttaaagtactgcggcaatgttatatttattgaatttgataactgtgcagtggttatctttatattagagaata

SEQ ID NO: 295904 - DNA, 122 bp, Homo sapiens
ggaggggccagggcggccgcaccatcacgctcccgtctctgcccttcccagctgccctgccggtctccctcccagggagggagcgtcctctcggatagcccaaatctttgcctctccgtgga

SEQ ID NO: 295905 - DNA, 122 bp, Homo sapiens
ggggtggggggtggtgaggaggggccttccagggagctgattggtcgacgcggacgggggcgggacttggccggcgccgtccctcccctagacctcagaggccctgcccgcagatgtggcgc

SEQ ID NO: 295906 - DNA, 122 bp, Homo sapiens
ccattggatttttttttttttgccatggtggcggcactctcattggtcctggggctcattcgtcactcagccgcgattggctgagtcggcacccagatgcgctgtcgcttctgctattggct

SEQ ID NO: 295907 - DNA, 122 bp, Homo sapiens
gaaagaatttgacacactttaaaaactatggctggaggccagatgcctgtaatcccagcacgccaggaagcaaagccaggtggatcacctaagttcagaagtttgagaccagcccggccaaa

SEQ ID NO: 295908 - DNA, 122 bp, Homo sapiens
gaaagaaacttctgcaccgcgtggcagcagtctttcttccaacaaaagcggctgtggacacgatgaaataaacactgagtgcctagtcagcaagtgtatgggcactctaaaatcatcaaaca

SEQ ID NO: 295909 - DNA, 122 bp, Homo sapiens
tgaaggcagcgggtccggagcaatagtgcctttaaacaattgccaggcatgggtggggaccgctgaagccgcatagacctgtctctccgggccggattaacctcgcacgcctcacatagctc

SEQ ID NO: 295910 - DNA, 122 bp, Homo sapiens
ccctgagatcacctaaaaagctgctaccaagacagccacgaagatcctaccaaaatgaagcgcttcctcttcctcctactcaccatcagcctcctggttatggtacaggtaagagcaacgcc

SEQ ID NO: 295911 - DNA, 122 bp, Homo sapiens
ctggggtgaggcgaccgaggcacccaggacgcacgtgaggaggcgctcactgcacttgcgcgaccctgagtcagtgctcctttacactttgtgccttgggagccttactcacctcaccctag

SEQ ID NO: 295912 - DNA, 122 bp, Homo sapiens
aggcagcgaatctcaggtaaggctcaccacacccaggtaggggcaagaaggggcaagaatcgggcttctctgatacatctcttacttctgcgtgtccagggggcctcagaatctcaggcccc

SEQ ID NO: 295913 - DNA, 122 bp, Homo sapiens
tgcagcagttgcatgtggcttgtggctccagtattggctagctcagatacagaacagctccgtcattagacaacactactaaagatctcaaatggtaaaaaaaaaaaaacaaaaaaaaaacc

SEQ ID NO: 295914 - DNA, 122 bp, Homo sapiens
gtgtgaggaggtggagcccagctgcagaccacccaggggctgagggcagcttctgtcatccggccttccccgctaggcaggaaggagcagaaccctggccagacactccagaggctccaggg

SEQ ID NO: 295915 - DNA, 122 bp, Homo sapiens
gcagcatgaccctctcctgctcagcaaatgtgggcaaagctcgaccgcagcgtgtgggagcgctcgtaggtacccagggccaagggtggcagtgtcctagcccgggaatgagcttctgggac

SEQ ID NO: 295916 - DNA, 122 bp, Homo sapiens
agactataagctgtaggtggggggacagagggaggaggcaggttactagggccaaggagccggggtcaccaatggaaactggagctctgagacttccctgaggcagagtgggagggggaaag

SEQ ID NO: 295917 - DNA, 122 bp, Homo sapiens
gctggagtgggtctgcaccccggttctccccttagctgtggtaatagaggcctcggaacacgtccccttgactttggagaggacgttgtaattcctaagagctctttacaaattttctagtt

SEQ ID NO: 295918 - DNA, 122 bp, Homo sapiens
cctcagtttgcccatctgttaaaggagcatgttgaaccagaggacccgccaagccccttccgagtgcctacatgtaatcctccctcctctctcctggaccacagcgcccgctctgacagcag

SEQ ID NO: 295919 - DNA, 122 bp, Homo sapiens
tgcctgaagctctgaaactttcttgccatacataggccctaggaaccaagatgagtttcccgctcaaacagagaaaatgttcaaaaccccattgcttctgcctgttcccacctcatttccaa

SEQ ID NO: 295920 - DNA, 122 bp, Homo sapiens
tgggccgccgcacaccccgcagtgtcctcgttctttattggtcctcgacggaccgcccatcggacttttattggtccatttgaaaggcctgtgggcacgcgccgcccgcagccttaaagggg

SEQ ID NO: 295921 - DNA, 122 bp, Homo sapiens
cgggaaggatgcaggcatcggggtccacagggatcacgggggaaggctggtcaccgtcctcgctgtccctgtcatcctggctcgtagacctttgagaacagggacgcactggtcaggcctgg

SEQ ID NO: 295922 - DNA, 122 bp, Homo sapiens
ttcctagggtacctgttgtttttctccatccagcctccattcttttttctttttttgagacgtagtctcactctgtcacccaggctagagtgcagtggtgcaatcctggctcactgcaacct

SEQ ID NO: 295923 - DNA, 122 bp, Homo sapiens
ccgcccgcagtacatagaactcatctgtgagccgcacgaagaagtccttgaggatgggcacgaaggcctggcactgtggacaagccccagcaccaaagaacagcagcaccagccggttctcc

SEQ ID NO: 295924 - DNA, 122 bp, Homo sapiens
ccgttgctgcaggtggtccaggcttgggaccttgacgcgaggcgctgggtccgggcgctgcggcggagcccagtgaaagtggtgtttccttccggagaggtggtggaacagaagcgcgctcc

SEQ ID NO: 295925 - DNA, 122 bp, Homo sapiens
ggatgtgcgggccaccccacgatggggaggaggcaccgacagctcggcaggaaggaagagcggtgccactggcagcaggaaggggctccgtgccaattgtgtgcaaatggcctgcgcggccc

SEQ ID NO: 295926 - DNA, 122 bp, Homo sapiens
attaggaattcccaaactgctctttttattggctaggaaaagaacaccttacagggaatccgataggttaattcacaatagtgttaggctgtaatgtcattctttaagaatcttttccagta

SEQ ID NO: 295927 - DNA, 122 bp, Homo sapiens
cccccgctcccctggccccagctgtgaccgcgcagcactttgccaggaaggggggctccgcgacccttacaacacagaggtgtctgggggcttaactgcccctggagggtgggagggggcca

SEQ ID NO: 295928 - DNA, 122 bp, Homo sapiens
gggtgggggtgccggaggaggtgacggtcctgaggagcctgctttgcccagcctggagggcgtcagtgaaaagcagtacaccatctacatcgcacctggaggcggggcgttcacggtgagag

SEQ ID NO: 295929 - DNA, 122 bp, Homo sapiens
agcctcctcccttctctctctcctcccaccagaggggccgcagcccctccctgctgagcccggttgttgccacaggttgccgctcaggctactgtgtgagagtatgaagaggcagatcgtgt

SEQ ID NO: 295930 - DNA, 122 bp, Homo sapiens
gtgcccaggaggaaatgtacaattcacgggaaggatacagacacccaaaaccagtctccacggtccctttgggggcaaacatctttcgagccccaggtcccagtcgatccccttccaaacct

SEQ ID NO: 295931 - DNA, 122 bp, Homo sapiens
gaggagcacctctgcccggccgccaccccgtctgggaagtgaggtgcgcctctgcctggccgccctgtctgggaagtgtacccaacagctccgaagagacagaccatggagaacgggccatg

SEQ ID NO: 295932 - DNA, 122 bp, Homo sapiens
tcttcagtctctgctcaccatgacagagtcacagccacacccgggacagaacctgggctccgggcagcaggtaataggaggatattctacccagggccggaacaagccaggtccagcctcaa

SEQ ID NO: 295933 - DNA, 122 bp, Homo sapiens
ggcctatgtaccctctacctagcacactgaagtgcagcttcctgcacctccagggcaagacggctacctccattcctttttaaatgtatttttaccttcctgcctggcactattaagtgcta

SEQ ID NO: 295934 - DNA, 122 bp, Homo sapiens
ttgcttgactggtgttctttctgccctcactggaatctgcttggcagccgagggcggtgacgttcctgtagcttccgtggggaattcaggtgcgtgtgtgtgcgcgtgtgtgtgcgtgtgtg

SEQ ID NO: 295935 - DNA, 122 bp, Homo sapiens
cctctctgaacagggacctctggctcccgaccgtcccggcagcctgggagcgttcgcctgcggaaagctggcagtggccacagaaggaatcgttattaacaagcctgttcatctaagcttct

SEQ ID NO: 295936 - DNA, 122 bp, Homo sapiens
ttaaaaacaaacgagaatagaaagctctcagttgccgtggaagctcctcgtaaccgcagacgtgccctcggtgccgtcgggttattttagtacatcctttgacgcggcccctttcccgcttt

SEQ ID NO: 295937 - DNA, 122 bp, Homo sapiens
agtctgtatttcaaatgagcccctcaacccaggtgacgcaggcggtgtggggaccgcatccggagggcgacctggagccgactgacttcacaaaggcctcctgccgcaaaccttcagcggcc

SEQ ID NO: 295938 - DNA, 122 bp, Homo sapiens
ggtatgaaattgttaaactctgtggattttaaatggccttttgaaattatctgtatcaaccgaggtgatgttaagatacactgagatcattttcaattaattgtacttcagccgatgttgag

SEQ ID NO: 295939 - DNA, 122 bp, Homo sapiens
ctgaggcattgttaccctgagagtgggtagactgaacaaaaacggcgggtgcacttcctccgatcacagttaaccacacgccagtgcaaacaatctttgcatttcttttggttcttagagtc

SEQ ID NO: 295940 - DNA, 122 bp, Homo sapiens
cagccgggcgcgcatccccgggcgccctgcgcggtggagagcttggcgggctgcgggtgccgcaggacaggagtggacaaagcaagatggcagggatcttagcctggttctggaacgagagg

SEQ ID NO: 295941 - DNA, 122 bp, Homo sapiens
ttctcccttggccagctgctcacaggaacttctttttctggagccttgtagaagattcatcgtggtcccagcacttacacatctgagccagctcaggctggatggaaagttttgagggccac

SEQ ID NO: 295942 - DNA, 122 bp, Homo sapiens
atgcaggcgaaagacagaggtgcagggagatgcacctgtccagagcagagcaggcccagtcgccggcaggttcagggcaggagcatcggccaaggagagttggctcgaaaacttacaatgga

SEQ ID NO: 295943 - DNA, 122 bp, Homo sapiens
gattttatgaattctatactttcaaagtgggtgaatgtcaagttcagctgtgactgttaccgagctggatgaagctgcccagatgcagcctgcagatggtgtggaatgaggggctcagtgca

SEQ ID NO: 295944 - DNA, 122 bp, Homo sapiens
aagggtaagagtacatctagttcagttcctatgaggtagctgtaacccttaaaaatgaaacgtcaactctagggtacatttgacattgaaagaatagttaggaaataacttggttttgatag

SEQ ID NO: 295945 - DNA, 122 bp, Homo sapiens
gtgtggccgccgattggttttgccagatttccctgtcggcttccttactcgaggtagagccgcacggcagcgtgaggttgcatcagccggggcgggggggggggggggggggggggggggaa

SEQ ID NO: 295946 - DNA, 122 bp, Homo sapiens
atgagtctggactcagaagacagccaggaactggagatgccgatctgggaagcttccacacgcaggtgtcctttgaagatatcagagaaaataagatcaacttggaaaggtgtcagtgagaa

SEQ ID NO: 295947 - DNA, 122 bp, Homo sapiens
cttggagctgagacctcctcgccccctccgagcttactgagcacccggccggcagccccccgactccccaggatgctgccttgaccccacctaatctggtcactcacctcctaacctttcag

SEQ ID NO: 295948 - DNA, 122 bp, Homo sapiens
gcatgggggggtggtgcagggaggtcctggtttcctgcccgaggcgggctggaaaccccccgctctccccggcgcctggcgccagcagcgctggggtagggcagagcgcggagccggaggca

SEQ ID NO: 295949 - DNA, 122 bp, Homo sapiens
ggcctaactcttggcactattttcaaaataccagtcttcttaacctgggtttttctttctcgcaggtgtctccagctcctgagagcactgcccttctctctagtccctgccccatacagact

SEQ ID NO: 295950 - DNA, 122 bp, Homo sapiens
ggtttcaccttgaccctcctggacttgtgcaagcacagggagatacaggatcatgctggacggagcataacttcagttgccagaggagttcttagtcctcagctctttattattcttgtgca

SEQ ID NO: 295951 - DNA, 122 bp, Homo sapiens
cgccagggttcagtccctgagctgggctccatgctagggggagcacgggggcctggagaacggctcagacctcagcagtggctcccaggaactgaaaggggagaaaggaagatccctgccga

SEQ ID NO: 295952 - DNA, 122 bp, Homo sapiens
cagtgctcagtgcgatgggaaactcgggctgggtctctgtggccaatgactcctgagcctcgccggcacgttttattcccggctgtccttccagtccggaagcctgaagtggacaccgagga

SEQ ID NO: 295953 - DNA, 122 bp, Homo sapiens
ccgtgtagcttggcctaacaatatgcctgtttttagatgaaaaacctcctctgcccaacacgacccatcccttagagttcaaaaccaaactcacctggaccaaacctgaggccacgttgaaa

SEQ ID NO: 295954 - DNA, 122 bp, Homo sapiens
aaaaaaatttgcttcagcctggaatctttgcttttggtgcttcggtgcagagacagaaaacgggcactcagagtcacactggtagttgcacactgtatctgcagagggcgtgtctcatctgt

SEQ ID NO: 295955 - DNA, 122 bp, Homo sapiens
gtccaggtctgcctcaggcacagccagctccaatgccattgagagaagagatctcagactcgggagctgatcttgagttatttaacatagccaaggaaactatctggcctcaagtcatcaca

SEQ ID NO: 295956 - DNA, 122 bp, Homo sapiens
gccaggggagggagcgtagcttggttgctccgtagtacggcggctcgcgaggaagaatcccgagcgggctccgggacggacagagaggcgggcggggatggtgtgcggggctgcggctcctg

SEQ ID NO: 295957 - DNA, 122 bp, Homo sapiens
gctagagggcagcgctctcctgcgtaggctgggcttgcggggactggggtctcagttctccgcaggcctcaatgtgcgggcttgacacgcagccctcggattagccccgaagctgcacccga

SEQ ID NO: 295958 - DNA, 122 bp, Homo sapiens
ccaagaagctgcagcccagtggggagacaaatacgcaaacaagtaattacagggaagaaacgagtggtgcaaactctttggcaggagcctgaggcaagtcattctgacccgggtgaggaagg

SEQ ID NO: 295959 - DNA, 122 bp, Homo sapiens
gatgactcatgttcctgtgtctgtgagcgttagggagaatgacagagctctccggaacagcgtcctcagggcctgcagcactactcagtggggtctgattccttctgctttttatagtgagg

SEQ ID NO: 295960 - DNA, 122 bp, Homo sapiens
caacctccgcctcccaggctcaagcaagccaccctcccacctcagtctcctgagtagctgcgactacaggtgcctgccactgccccaggctaatgtttgtaatttttgtagagatgaggttt

SEQ ID NO: 295961 - DNA, 122 bp, Homo sapiens
tggccttgcctgagaaaatctgggacgtgggtgatcttgggggaggtgaaaagcaccccacgtctgcaggcaggagactcaggtggcaccatgctgtgccacaactggttgtatacccttgg

SEQ ID NO: 295962 - DNA, 122 bp, Homo sapiens
tgcggacttaccacaattccaacataaattccgccaagacgcctacctgcagacttaccacgattccaacataaatcccgccaggacactgacctgcggacttaccacaattccaacataaa

SEQ ID NO: 295963 - DNA, 122 bp, Homo sapiens
gggctggccccacagccaccgggggctggaatcggccaagaccaggcctctctcatcccccgacgggggtattaagctctgtggattccaaatggcaccatcaggctgcattcctccatgag

SEQ ID NO: 295964 - DNA, 122 bp, Homo sapiens
ttctgcaacccaaattccgtggtctcctcatagggcacgagggccattccgcctgcaccccgccctctgctcagacctgccgtgcaaaagaatcctgggtgacgctctggccaaaagataca

SEQ ID NO: 295965 - DNA, 122 bp, Homo sapiens
tcaaagcgccctggagtctcctcgcatctcccttccctgggctccacccttgggggcccccggctgtggctcccactctgggcctcagctcccgggaacccaacccactccctttcgctcct

SEQ ID NO: 295966 - DNA, 122 bp, Homo sapiens
atgtccacaaagacattgaagttctagagaatactacagtaacattcttgacaatgaaaacggaattcatatataggggttcagctgagggtagtataaacaaagtatcaaaccatgttttc

SEQ ID NO: 295967 - DNA, 122 bp, Homo sapiens
cacacacacccgcgccctgtactgacgccttcatcctctacccgcaccacgcccgcacctcgcgcacgcaggccacttgctgctgccgacccctcgctctcacataacacagaagagtgcac

SEQ ID NO: 295968 - DNA, 122 bp, Homo sapiens
gcttcccaagccccgggtgaggtcccctacgtcggcacagccttaggagctgcaaagcagcgcgcgcctccggggctcctgcgcgccccttgaaccccgcctcccgcatcctcctgcaacag

SEQ ID NO: 295969 - DNA, 122 bp, Homo sapiens
ctccctttggtgctgtttccacccgtgtgcgttctgtccagaggcctgcggggaccaggacgtggccctgcttgggggcctgcccctgctgccctggtttcctccctcccgtgggctgcttg

SEQ ID NO: 295970 - DNA, 122 bp, Homo sapiens
aggacgtttggactcagggttccgaggaaccaggagcgatccttagtgggccgagacttccgaatttgatcaaaggtaaagagggactggagagcggtccatctgacttctgtgggggatgg

SEQ ID NO: 295971 - DNA, 122 bp, Homo sapiens
atagtatagcgtctgagtctagggtagtagttgaaaaccactaccctaactaatagttctcgaggtgtgatccccagaccagtacatctgcatccccagggacttgctagaaatgtcagttc

SEQ ID NO: 295972 - DNA, 122 bp, Homo sapiens
ttggccctacggggcctctgtcttcaaccccacccctccgcagcaccttcacggcccagacggactgatccagcgggtggaagagcttgaagcagaagccgtccttcttggagggccgctcg

SEQ ID NO: 295973 - DNA, 122 bp, Homo sapiens
gagatccttaattaaatctggaaagactctatttccaaataaggccacattctgaggttccgggtggtcgtgagttttggggggacattagttaatccagcacagctgtctagactccggcc

SEQ ID NO: 295974 - DNA, 122 bp, Homo sapiens
tgcacgcccgcccgggccctcccggggacaactgcatgggaggaaccccagagccgcgaccgcgcctcggagaaggtgccccacaccggctcgcccgacccacccaccaccccccttccgcc

SEQ ID NO: 295975 - DNA, 122 bp, Homo sapiens
tgaataacttacccaacctggtaagtggcagggctggccaggtcagtgcaacttcaaagtcgatgttgtcagtgaatgctccagatggattgcagagaagaccaaagttcatgtctcggcac

SEQ ID NO: 295976 - DNA, 122 bp, Homo sapiens
cactttccggaccaccctgcactgcagcctgggccggcccagccgctggttcaccgccagcgtgcagctgcagctttgccaggaccctgcccccagcctcctgggccctgccacgctctgac

SEQ ID NO: 295977 - DNA, 122 bp, Homo sapiens
tgctcctgacagaagggacactctaagagcagcccaggaaccggtgcacttgggcggcctcggaagaagccggggctcctggaggcggaggcgaggcctgggacccaataagaagggcgcgg

SEQ ID NO: 295978 - DNA, 122 bp, Homo sapiens
cacgtacatgatcccaaatagcctcctggaatctcaccccacatcgtccggtgctccggacgttctctgtgtatggagtcacacctcacgttttgttaggcagaaggtgcgggtgttatgaa

SEQ ID NO: 295979 - DNA, 122 bp, Homo sapiens
gagggccccgctttggtcgcgatccggtggacaccatcccggcggggaggagccttcccacgaggacagatggcgacacacacgcctgttggagcatcctgaggcccgcctctgtggcttct

SEQ ID NO: 295980 - DNA, 122 bp, Homo sapiens
gccagaccctcagtggcaggggtggcctgcatgccccctgagcttcgggctctccccagtcgggcctcgcgtagtagcgcgcgctcttccaactccagcaacaggcgtgcagcaggactacg

SEQ ID NO: 295981 - DNA, 122 bp, Homo sapiens
tattttttatttttagtagaaacaaggtctggctatgatgcccaggctgtcttgaactcccggcctcaaacgatcctgtcacctcggcctcccaaagtgctggagtaccgctaatttaaaag

SEQ ID NO: 295982 - DNA, 122 bp, Homo sapiens
tatcttaaaaggtacaagcaaatagttatgatagttttatatctcctccagcagtctgcacggcgaaggactataatagagtccttgtggtgactgacggattaaccactattctgaggcca

SEQ ID NO: 295983 - DNA, 122 bp, Homo sapiens
gcacatgctgcatgatattaacacttcctgtttacttgttggacttcccctagagcccagcgtgatgactccatcagtatctgtgacagtttcttgtgtgttctgtgtgccgagcttagtgc

SEQ ID NO: 295984 - DNA, 122 bp, Homo sapiens
atatccagtgattttgctcctttcaggtttaaaccatttctcccattgtcagttgactttcgttaaaccgtttctcccattgtcagtctactttcgtggtcattatttctacaaagtatatt

SEQ ID NO: 295985 - DNA, 122 bp, Homo sapiens
taatcaggctgtgctttgactcacttctttgtaaccttaagtcacttatgtagcactagacgcttaccatttacatccccaatgttccttttcagaggttaagacttttgtttaaaaactgc

SEQ ID NO: 295986 - DNA, 122 bp, Homo sapiens
ctgtggatatatcaagcgtgtgggtctttcgcctgctgaggggcgtctgggctatgccagcgtttgaagttgggaatacgctcagactttgtgactttaccttgcagggcgctgggcatctc

SEQ ID NO: 295987 - DNA, 122 bp, Homo sapiens
ccgtctgagatgtgactcaggcaacagggggtggaacctcacaaactgtccaattggagacgccgccggagcggtgggtggggccgccctgtacaaaggcgcgtggatacggtggcgcgatt

SEQ ID NO: 295988 - DNA, 122 bp, Homo sapiens
tcgtctgtgcacccgtgctgtggtgtgcccgtcgtctgtgcacccgtgccgtggcgtgcccgtcgtctgtgcacccgtgctgtggtgtgcccttcgtctgttccttttattgccgggcaggg

SEQ ID NO: 295989 - DNA, 122 bp, Homo sapiens
caacataacccacgcccactgagaatcgtcctttcccagactggctcagattccgctttccgattggtccctacagcaagagggcaaggacaattgcttaagttgacctctgggtccggaat

SEQ ID NO: 295990 - DNA, 122 bp, Homo sapiens
gccgtggcacctagccgtagagccagggcaggctttattagtaaactgctcgctgggccacggacactctgcctccaattcgcactagcatctgttgctgtattttaaatcttcatcccaca

SEQ ID NO: 295991 - DNA, 122 bp, Homo sapiens
tcccaggcagaaaagaggcaggctgcagggaagtaaggaggaggcatggcaccttctcatcgggcatcacaggtggggttttgccccacccctgaacgccctctgtggcgccttccacccac

SEQ ID NO: 295992 - DNA, 122 bp, Homo sapiens
tttcttctccgtttggcagtgaaacacatctcagaaaggtgggagggagagactcacgtacgtccacaaagttaaatggcatagtggtgttccctgtgtcaagcttggtaaatatccggaat

SEQ ID NO: 295993 - DNA, 122 bp, Homo sapiens
agggtggccctgtttggggccgcacaggaccctagatccccgggagaggctccttctgggcgccccccagggcccggcgactcctgcagctgtgccgctgaccgccaggggtcagcagaggc

SEQ ID NO: 295994 - DNA, 122 bp, Homo sapiens
cgattagaacgggttccagtcgcttgggggcgttggggggctggagggcaagaggttacgcgccccagctcccaccttgggtccttcgcctgcacccagtctaacctggcacctaaaggttt

SEQ ID NO: 295995 - DNA, 122 bp, Homo sapiens
tgcgaaaagactctttgtctgtttacattgcacaacgaattgtccctctgattgtcctagcgttggtgcatgcatggatccaggaagagcaggtatttggacccaacgagacaggttcatct

SEQ ID NO: 295996 - DNA, 122 bp, Homo sapiens
gacccttggccttttcgttgtttcatgatgagcccgagctcttcttcaccagctcaactccgtctccagcacctaagcagtatcctcccgccatccctccccacggcgcctgcgttccccgg

SEQ ID NO: 295997 - DNA, 122 bp, Homo sapiens
tgtgacgtcacagagcgcccttctgacgttctcacggacccgctttgcctcgggggcccacgctggagcccacccagtactactaagaaatgaggaggaaaaaggggcgccggctctcgtag

SEQ ID NO: 295998 - DNA, 122 bp, Homo sapiens
ggctttgggcaatccaactccctcccgacggctggctctgtgggcggtggcatgggcagacggaacccgcgccagtaccagatcccctctcggaacgtcccttccgcccgcctgggcctctt

SEQ ID NO: 295999 - DNA, 122 bp, Homo sapiens
cctgatttcccctcgtagaatgtgtgacagggatgtggctcgcctgtttcatggccctgccgctcaaaccccaaggaggagcatgcagacaggcaggtgcagaggccagggcaagtgctttg

SEQ ID NO: 296000 - DNA, 122 bp, Homo sapiens
gacgggagggctggtgagaagcgcaaggggcgagccctggagccgccgaggggactaggccgagcgggcccgtcggggcctctgggcgcggcggcggggttgggaggagggcgcgcagccgg

SEQ ID NO: 296001 - DNA, 122 bp, Homo sapiens
tcccatctcgccccctgcgctgggagaaatgggcgtcttgtcttcgctgcgcattgcatgcggaggagcagatgtctcagcccaggccctagccttgcatcgagccctgaggaatcagaccc

SEQ ID NO: 296002 - DNA, 122 bp, Homo sapiens
tcctcggttcggggtggacttggggttccaaaacagccccagccggtggcggagtctttacgacagggaccagcgggctcgcccttgtccttgcagcgggccccggatgtgggcctcaggcg

SEQ ID NO: 296003 - DNA, 122 bp, Homo sapiens
cggaatggagcagaaacgtctcggctgggaatcgaacccagggtcagtcagtagcggccgcgttttaggacccggcggtgcaccgaagacccggcggaacggcgcgcaccccgggcccagag

SEQ ID NO: 296004 - DNA, 122 bp, Homo sapiens
attgcaggagaagcgacaccagacagccagtgccagcgtgccagggctggctcagatgcccggcagctgtgggggaagcattgtctccacttccaggacaaggagaggcagccgaggacgtt

SEQ ID NO: 296005 - DNA, 122 bp, Homo sapiens
actaagtgagccataaggccttcttcaaggtcatctgtcccactgatttcagactcagggcggagtgtgaaatcatctgtcccccacagtgcactcagaaccctgtctggactagggcacac

SEQ ID NO: 296006 - DNA, 122 bp, Homo sapiens
ccatcagcaggcggcattggagtctaggagctcagctgtgtgtccatcaacacacaaattcgtaaaaaacacacatggcctcgccatcgtgggtaaaatcggccccacagcacgtctgcacc

SEQ ID NO: 296007 - DNA, 122 bp, Homo sapiens
gcccattaaaaaaaaaatccttcccaatttttgaggcttgtgccattgaacactgctgcccgcggctcttcttcccacttggctcgacaaacgcgtcttttattatgactcagcccagcccg

SEQ ID NO: 296008 - DNA, 122 bp, Homo sapiens
tgcttgttcaagttcgcttaagtgttcactcagcccaacacgcgggttgggcttgaggttcggcacccgggcagcctcaccccccgcgtcaggcgcgcgcacacagtaggtccgcgaccctt

SEQ ID NO: 296009 - DNA, 122 bp, Homo sapiens
ggagaatgttgcaagctgcagacaagagctctgtttcattgacagctggacaagaatgctcgcaaagacttagcagaaacacagaagctgtgtccaaaaactggaagtctggtagacagggg

SEQ ID NO: 296010 - DNA, 122 bp, Homo sapiens
ttcccattgggcgaatctggatgctgtatacacagccgacacacgcacattaggctggggcgtcttcgcgcctgcgcagctgcgctgtcaggcggctgaaaacgggggggttggggggaggg

SEQ ID NO: 296011 - DNA, 122 bp, Homo sapiens
tgtgcctgcgagccaaggtgtccgagtctgtggggcgggaagggcccccaaacaaggaagcgtcgcctgcagggcctcgcccctgcccccttggtgaagggtggaccccctactctctaaac

SEQ ID NO: 296012 - DNA, 122 bp, Homo sapiens
cggcgggggcgccggggcagggcagaggccttccttctctatagaccacatcatgggccacggtggcggcggggcagcacccccgggcgccggcgagggctctccgggaccgccattcgcgg

SEQ ID NO: 296013 - DNA, 122 bp, Homo sapiens
cactgtgcactggatgattaagagacagctgaggtcatctccttggacacctttgagtttcggattgataaacacatctaagctgctcagtatcagtccacatgggttgaactttggccaaa

SEQ ID NO: 296014 - DNA, 122 bp, Homo sapiens
cagaacgtgtgggtgaggcggcagccgagagcttcccaggggagggtcctgtggaccccgcgggggtgcagccggggtgagccaggcccagaaggcaggatggcgctgggcgtgttgtgtgt

SEQ ID NO: 296015 - DNA, 122 bp, Homo sapiens
acgtgcaaagagtggagagccagggcttcctgcacacacatgggctcccagtcctgacatcggccattctgtcggtgtgctcattctgataaatcctccaatccttaacctccctgggaaac

SEQ ID NO: 296016 - DNA, 122 bp, Homo sapiens
tgtgtcttgcttggatactggtaatagcagcagtggaccaagctggtgggtgggttcttgcgcccctgggaaactggcatgggcgatgacaatagcagtggtgggatgatactctgggtcct

SEQ ID NO: 296017 - DNA, 122 bp, Homo sapiens
gccggggcaggcggcaggcaggggtcacgggctggggctcggcgcgtaccccgggaggggcgcgggtgcactcaccaccctccagccgcgggggcgcgggcgcgtccgggccgaggcagcgt

SEQ ID NO: 296018 - DNA, 122 bp, Homo sapiens
caaagggaatgtagcctacgcaacctccacaggcggtatcgttaataaaatggtcggccgcgttggggactcaccgtgtctaggtaggaccaagggatgcctcctgccccttcccctcttct

SEQ ID NO: 296019 - DNA, 122 bp, Homo sapiens
gccgcggcgtaccaagggttaagcggcgcggctcgcggccctcccggctcccctcccctgcgtgttgattttcaggcccaccgagccgcccgagaaagttttcaattcgatggggctgcagc

SEQ ID NO: 296020 - DNA, 122 bp, Homo sapiens
ttctttcacggcgccgcagggatgggcgcagcacagctgacttctgtttgtgcttgactccgggggtggcagccagagaccacagctccaggggcttccaggcctcctgcgtgtctccccca

SEQ ID NO: 296021 - DNA, 122 bp, Homo sapiens
tacgaatcttccctgctaggggactccctccttcagacctgacctatagaaggagacttacggtagaagcttcatgaaatgataaactctttgtaaaactcataacaggcccagttaagaat

SEQ ID NO: 296022 - DNA, 122 bp, Homo sapiens
agccacttctccccacgggcgctaccacctcccgggtccaaaccgcccccatctctcacccgcggagctgcagcgacctcctaacaggcctctccgctccgactctgcctccccacccacat

SEQ ID NO: 296023 - DNA, 122 bp, Homo sapiens
tgcacgcagtccatgttataaactgtcccataacttagcaaattcgaacctgcatccattcggccagcaagactatgttgggttttggccaactgtctgtctaataagaccctagcaggtcc

SEQ ID NO: 296024 - DNA, 122 bp, Homo sapiens
ctaactttggcgtccctgtgggcggcctttggtgtgagacgcgtggtattctgggaacgtcggagacggaagttacttcgtctttagctcctggcgctgctggcttctgggcggtttttgtc

SEQ ID NO: 296025 - DNA, 122 bp, Homo sapiens
tttctttatgacagggtcatcttctgattccagaaacttcttgatggccacaatctgacccgtgtccctgtttctacatttgaaaacaactccataggatccttctccaattttcccaattt

SEQ ID NO: 296026 - DNA, 122 bp, Homo sapiens
cgggtgcaagcgacgccccggcatagcggcaccattggacacttcctgcgctgcttcaatcgccgggattgcctctttgaccttgaactagtattcatttggcctcctgttgggtctccaat

SEQ ID NO: 296027 - DNA, 122 bp, Homo sapiens
agataatctggagcgttttcattggtccgctaaagataatgacccgcccctttctcgatacgtaaacatctagcgcgctgacgctttccaagcacgcatgcgcagttgtgaaatattgcgga

SEQ ID NO: 296028 - DNA, 122 bp, Homo sapiens
ctctgattctgtaacagacttacactttgcactggctactaggaagcttaaaacaaatttcgtggcccattttcagcaagtaaatgggggccttgtggtatgttttgcttcctgaccttact

SEQ ID NO: 296029 - DNA, 122 bp, Homo sapiens
gcctagaacgcgagccgagcgctctcgcggatccggcgaccgcggaggggagaggagcgccggacgctctcgcacgcccgcccgcccgcccgcgcacctccaacccacctgccgccggccag

SEQ ID NO: 296030 - DNA, 122 bp, Homo sapiens
aaacatgcatattagccatgaaaagcttttatatagagggtacaaaaggttggatttaaacgagcgaatggggagtgaaattgtacatccatggtcctgttacagccatcactgaattaact

SEQ ID NO: 296031 - DNA, 122 bp, Homo sapiens
gccctctttggtcactatgcagatccggagtgcgtccccagtgtacacatctctctcagccgcagaaatgaagacatctttcaccagccgcatggctctgtccaaggacagcggaacatgct

SEQ ID NO: 296032 - DNA, 122 bp, Homo sapiens
tgcggcggtcggcggagatgagcaggcggcggtgtgcggtcccagggtccagggtcaggtcggctggagacggggaggcagggagaggacctcatgagagagttttctaaatcacaggcggg

SEQ ID NO: 296033 - DNA, 122 bp, Homo sapiens
tttggcgctgccatttgagcctgggctgaaactgcgggtgtgacccccccgtggtggctccgggtgtctgcagtggagctgggggcggaagcatgaggctaacggcttggcttcagtgaacg

SEQ ID NO: 296034 - DNA, 122 bp, Homo sapiens
ttacagctaggagcctctgaaactgacagctggttttcctttgcttgtctgcctgctagacgtggacatttttcatttacggttctgcacgttacctcggatgcctgcttggctttccttaa

SEQ ID NO: 296035 - DNA, 122 bp, Homo sapiens
tggcacaggaagctttccatgagcttgttcgggagagggagactcaccctctcctgctggcgcttcaccctgtactgtttgagctgctcttccagccacttccgagcctgaagtcggacctg

SEQ ID NO: 296036 - DNA, 122 bp, Homo sapiens
cttggagcctttttgtttcttagcaacccgggtgaaggctggggtgtcgagtgtcaaaagcggccggcggtgctcgcgcgggcccgctcgccccgcgacctgccctgctttcaagtttcctc

SEQ ID NO: 296037 - DNA, 122 bp, Homo sapiens
ccggtgaactcctgcgcgtgtgcgcctctccctgggtgcgtgttcgcacatgcgcgctgccgccgcactgccatcgcttcctgtgtgtcctcaggtcaccgcttgctctagttcccaggctt

SEQ ID NO: 296038 - DNA, 122 bp, Homo sapiens
ggggaggacgctgcccgtcttcccctatggtctgttttgcccctggacttggaagggtatcggcggggtcggtggggagccagggctgttaccactggaactcgggcggggggtacgctgcc

SEQ ID NO: 296039 - DNA, 122 bp, Homo sapiens
aggctccgggagacagtcccggacagacaccacgtgtttcttcttcacattgccagcacccggaaaagtgcctggcacttggcgagctgtgcccttacctgggcgctactgacaatggctac

SEQ ID NO: 296040 - DNA, 122 bp, Homo sapiens
ctgggcaggggcagtggttccagtacagccgctccctggccacagtttcccggtctatatcgggcctatgatgcgtcctccaacctgcgcagcgccgccccctcctacacccttcacccacc

SEQ ID NO: 296041 - DNA, 122 bp, Homo sapiens
aacagtctaggccccagcctacgggaagtttcagtttgcagagaaggggcggggcgggggcgggaatgacgaataaatagttaccgtaccgtgtggtaatagctgtaataaagtctcactcc

SEQ ID NO: 296042 - DNA, 122 bp, Homo sapiens
ggattctggccagatgcggcaggcagggatgaagtaggtgcctctgcatcttcctggggccggtaaagaagccattgagacctctctgctattctccccggactactcctgtcctggctgaa

SEQ ID NO: 296043 - DNA, 122 bp, Homo sapiens
tcagccggtacctctggcggggccatgggggccagaggacagcgcggggggcggcgagcgcggttgctaagctctccaaggcctcggagggacaggatctgggcgcacctcaccggttgcca

SEQ ID NO: 296044 - DNA, 122 bp, Homo sapiens
cttaaatcatcaaacaaaaatagcaaaatgttttgttaagacaaaccatctgttccaaagcgtcggaaggagaaagactgaagaagtctccaggaaggctcctggaggttcaggggtggaca

SEQ ID NO: 296045 - DNA, 122 bp, Homo sapiens
gactaagagaagaaaattctcacatgtgtgtgcctgcacctgtcactgcatgtatgtgtgcgcctgcacctgtcactgcatgtatgtgtgcatatgcagtcatgtacatatgtgtgcctgca

SEQ ID NO: 296046 - DNA, 122 bp, Homo sapiens
tcctgggcccggggccccggacgctcggacaaagccaggcagcgttggcagccccagacccgaccccaaaggcctgagactggggtgactgggacctaagagaatcctgagctggaggtgag

SEQ ID NO: 296047 - DNA, 122 bp, Homo sapiens
ctgagggcggccccttcagactgtggcttctgctgtcagggccccagtgtgcacaggagacgtgcctgccccgccgtgcacagacctcagcccccaggagacgtgcctgccccgccgtgcac

SEQ ID NO: 296048 - DNA, 122 bp, Homo sapiens
acagccacctccggagcggcctggccgcagcccagaggaccactgcgtggctggatcccgcgggccctgggttttgcttttttaaggaaaatcaggaaaaggccttgtagaaaataatccta

SEQ ID NO: 296049 - DNA, 122 bp, Homo sapiens
tgacaggcgtctccacatctggctaacaaatctcttcatggggagtccgaatttccaagacgggggccctctagattcctccttcattcagatgattcgatctgcctgacagtagtcaggga

SEQ ID NO: 296050 - DNA, 122 bp, Homo sapiens
aggactcctcggccaggctgaaggcgttctccagctcctccagcgcacccacgctcccgccgctctgcttgtgcttctctttgagctgtgaaaagaccaccacgcctgaccctggaccccag

SEQ ID NO: 296051 - DNA, 122 bp, Homo sapiens
agtatgccctagggcacttgtcatcaaagtatggtccctggtccagcatcactttaggaacgtgcaagaaatgcacattctcaggcccaccccagaactctactgagtcagaaactctgtca

SEQ ID NO: 296052 - DNA, 122 bp, Homo sapiens
gtcccggccctcccctcgctcctgacagaggtcgccgggtccctccgcagccccagcccgcgctctattctcctggggtggtgctgaagcgtttctccgggagacaccggttggtgggcgtg

SEQ ID NO: 296053 - DNA, 122 bp, Homo sapiens
tgacttccggtgcactcctgcgcgtgtgcacctctctctgtgtgcgtgttcgcgcatgcgcgccgccgctgcactgccctcgcttcctgtgcgtcctcaggtcaccgcttgctctagttccc

SEQ ID NO: 296054 - DNA, 122 bp, Homo sapiens
tggcgcggtcgtttgtgctcagaggccaacaagcgcgtggattttctgcttcagtgcgcccgggactgccaccccggccccggggatgtcggacatcgtactccagggtttcgagccctagc

SEQ ID NO: 296055 - DNA, 122 bp, Homo sapiens
cctcgccaagcccccgtgatgtgggaagccagcgtgaggccggtggggcagccgccttcccgtggctgtgccaagtccccccggtcctctgcacatcatgcctccttccacaccctgacagg

SEQ ID NO: 296056 - DNA, 122 bp, Homo sapiens
aggtgtccctgtagggatgacggcgcctcttgcgtaggtcctgaggagacggctcggctccgccccctggagccgcaggccgtctgtgccggaacccgggcgccgcttgaggttctgtgagg

SEQ ID NO: 296057 - DNA, 122 bp, Homo sapiens
tgtccgcagagccggggccggggacttcatgcgctaccactacaatggctccttgatggacggcaccctcttcgattccaggtcaggagggtcttgaggtgggagggcgggggctgggtgaa

SEQ ID NO: 296058 - DNA, 122 bp, Homo sapiens
ttcgggggcggagtcagcagccccacccaccctgttgtcgctcccaggcgtcatttccctcgctccgtccccaggtttccggcaggcttccgcactcacagccttggcaccgcccccaagcc

SEQ ID NO: 296059 - DNA, 122 bp, Homo sapiens
cctgccgccgcggcctcctcttgccaggtcgcctgcgcactgagggcctgagggggtgcgcgccgggcagttagggcggagcggcaccaacggccgacccggcgcgcgggcagccgggcggg

SEQ ID NO: 296060 - DNA, 122 bp, Homo sapiens
actcacctgtaggcttctggggacccgccctcggcgcggcctcctgctacagacctggcgcgtctgggccgctctcccggcagaaagtctaaagagtttcattgcaaagtgtggctcgcgac

SEQ ID NO: 296061 - DNA, 122 bp, Homo sapiens
tgagcaaaatggcactgtaacagaagtaataattcagtttatttttttacagttttatgtcgggaaggaaatctgatgtcaaagagagggctgttcaaatggttcattagaaagtccggtcc

SEQ ID NO: 296062 - DNA, 122 bp, Homo sapiens
aacccacggaagctgattgaagtgaagttctcccacctgagcagaaatatgaccatgcagcgcaccatgaagctctaccgactgccagaggccagtgctgccccgggtggtgggcagggggc

SEQ ID NO: 296063 - DNA, 122 bp, Homo sapiens
ctcaagggggcccgagggtacgctgtgctgcggagcatgcccaccaggtggcgatgccagcggcgggcgggcctggccggattggccgcgccgctcttgccgtgggtgccgacggcggcgcc

SEQ ID NO: 296064 - DNA, 122 bp, Homo sapiens
tccgccaaatggtgagcgcggcgctggcagcagggcccgcggggtgaaggcgctcatggacggaagacccctggctctataagctgaattatggcagcccagtcaaggtaagccgtgcaccg

SEQ ID NO: 296065 - DNA, 122 bp, Homo sapiens
tacagcatggcccggccccgccccggctctttccagaggtccgcagcctggccggcccagcgggcggaaccgatagtgtctggcacttggctcgcccggactctgaatcctggagcaccagg

SEQ ID NO: 296066 - DNA, 122 bp, Homo sapiens
cccctctctatgcagatctggacgggttttttttttgttttttgtttttttctggacggacggaaggtgtgtccagcccatccattcatgtcaccagccccacaaagtgacagacgcggcca

SEQ ID NO: 296067 - DNA, 122 bp, Homo sapiens
tggctcaggtcgaggttctccagactgggcatcaacgatccagagctggaggagtagctgcggcgcacggacagcgaggaagacaccggcgccgagtagctggagtaagctgagcgtgcggt

SEQ ID NO: 296068 - DNA, 122 bp, Homo sapiens
acatcaagtgatctgcccaccttggcctcccaaagtgccgggattacaggcataagccaccgcacctggcctaaattcaggggtgtttcttgtacttaatatccctcattaaggttcactga

SEQ ID NO: 296069 - DNA, 122 bp, Homo sapiens
ccataagaggcccaaggctgggatctaggaagcctttcttccctcactgtactttgtgggcggcacaagtacgaggacctccagctcaggcctagagctccccgcagggccttctcacctgc

SEQ ID NO: 296070 - DNA, 122 bp, Homo sapiens
tcggccaaacccacaattaaaacagccctccccctagtctcggtgtgactagggctctcccggggtaggctagctgcctgcctttctctttctctcttctctctttacttccctcttttttc

SEQ ID NO: 296071 - DNA, 122 bp, Homo sapiens
gccaccgccgcgagctcggccgccagtggtcctcggactttaggtgtctgggttgaaggtcggtccggacatcggacccagtcagttcccagactgtccgggcggcagcggacgccgctgcc

SEQ ID NO: 296072 - DNA, 122 bp, Homo sapiens
tcccaggcggggcctttaactgggtgactgtggtgcagatcgcagtttcagagatccctccggaaagaagcgccgttgggtagcagcttccttccagcgccgcgtcccctccttgtcacgac

SEQ ID NO: 296073 - DNA, 122 bp, Homo sapiens
gacataggcggcagggtcggaggcgcgcacagtgttcgccacctccatacagcaggccagcgtctgccagggttcctccgcgcccatccaccactttcggcccgtcaagggttggtccgcgg

SEQ ID NO: 296074 - DNA, 122 bp, Homo sapiens
cttcaagctcctctacttttcaaccaggtcactagcccttgactcctcttatcaaacttccggaactgccaccccaccagtgactccacaggcaccagggcatgcaacagggctgggacagg

SEQ ID NO: 296075 - DNA, 122 bp, Homo sapiens
aaccctggggcctcagtcagcctctggtaatcccttctgtgcccagggcaccagagctgacgtttcccttcagcaaggcaggggccgaggctgccagagccctgctggcgtcatcctgcctg

SEQ ID NO: 296076 - DNA, 122 bp, Homo sapiens
attaccacaccaaaactgtgctcatttcccaaaaagatcttcagcggatttacccacaaacggccttccctcttagccttcccaggccgctcttgtcctgaagtgtggatctggagttcccg

SEQ ID NO: 296077 - DNA, 122 bp, Homo sapiens
tccacgggaggctggataaacctgtggaacattcttccgatgggacaattggtgtgagcacgacatggcagctctcacgtgcgttaggctgggtcaagcaggcatgcaccaaggactaagca

SEQ ID NO: 296078 - DNA, 122 bp, Homo sapiens
agaaggacagtgtgctcggagctctgagctgagccgtgcacggcagccaggcccaggctccgggacagcaggaagctcagccctgcctcgctctcaagtcaaggcttgaggggaacacccgc

SEQ ID NO: 296079 - DNA, 122 bp, Homo sapiens
cctgggggccagggaggccagtgctgccgattgcggccagggccacgtggacttcaggaccggcctgaagttatttttagataagcgacctctggcgccacggacatcttttcctaaccttg

SEQ ID NO: 296080 - DNA, 122 bp, Homo sapiens
ttagcttcccgatttgcttcaaggctctatagctctagattttggtggtagcaaatttatcgggtggagggattgatcggagagggcagatcctcaggttcaacacaagaactggattggaa

SEQ ID NO: 296081 - DNA, 122 bp, Homo sapiens
ggtcggcccgcgccggaggcggctgctatgccaggaatgtgagagtttcaggttccccctcgggatcaaagcgaaccacaaataacctctcagcgcaccgccctcctccgccctccgccttc

SEQ ID NO: 296082 - DNA, 122 bp, Homo sapiens
cctaagccgtacaaccctaggaagtgcacttttggggtgcctatgggcatctctctgctccgtagccggcaaagcagcctgtgagccacgcagcttcagatgcgatgagctgggcaggggca

SEQ ID NO: 296083 - DNA, 122 bp, Homo sapiens
gcggtgactgaggatagagagccacagcacgaggagctgccaggcctggacagccagtggcgccagatagaaaacggcgagagtgggcgagaacgtccactgcgggccggcgaaagctggtg

SEQ ID NO: 296084 - DNA, 122 bp, Homo sapiens
aggtcggccgctccaccacaccagggatccccggcccacccgtggactccctgcctcgcacgccgcgcccggctgcccgccgcttaccttctgcagaaggtcaatttcctgctgcttggcac

SEQ ID NO: 296085 - DNA, 122 bp, Homo sapiens
gcccacaggcgggaggaaaaccctcgcctcgcggaacatgctgagggccgcgagcgccgccggctgtcaagtggatgcccagagcccttcgcccgcctcggctcgcctagtctcctcagccc

SEQ ID NO: 296086 - DNA, 122 bp, Homo sapiens
aacttaatttttaaaaattagcccctccataagcccttccccaaaaaatccccctccccccgtgccaaatagatgttgagctccttgagatcaaggattttgttttattcgggcttcttttg

SEQ ID NO: 296087 - DNA, 122 bp, Homo sapiens
agaaagaggaactgggccagggagagctgactcagtctctctggtctcctctctggtccccgccggcaggaggctgggtctccgtgctcccgcccgccgcctccctccccagacccctcctc

SEQ ID NO: 296088 - DNA, 122 bp, Homo sapiens
cagattaatttcctcatttttatccgcattcttggcattctcctgtccaagctgaggacacggcaaatgcgctgccgggattaccggctgaggtgagggcatgcgttggggaccgaggggaa

SEQ ID NO: 296089 - DNA, 122 bp, Homo sapiens
ctgcagacaatttacaagggtcatctctggcctggtgttctcaaaggcctccggatttgccgttcatcaggtaagatgaacagctttgcgttgctaccttcaaaaattcttttttttttttt

SEQ ID NO: 296090 - DNA, 122 bp, Homo sapiens
aacaggcaatgtttttctgtggctcgctttgagagaacggttatctgggtcccgccgtcccgtgcgtcccacacgaaggccacaggagaagcgaggcagcggagaccctctattccagcaag

SEQ ID NO: 296091 - DNA, 122 bp, Homo sapiens
ccagtgagtcggagatgagaaagacctcaaactcctgcatcatggaaaatgggcaccagccgggggcaggtagggctgacggcagaggaggggtggctgggtaggtttgggggttaagtaag

SEQ ID NO: 296092 - DNA, 122 bp, Homo sapiens
tcttgcggtaaagactaatgcttttgaacactgtcctcatgtctgtcgtcgatgaaaaaacgtgcagccccagagagctgactatactggtgatcaaacccaagaccttccgcctgtggaac

SEQ ID NO: 296093 - DNA, 122 bp, Homo sapiens
tggagtctccaggccggctgaggcgtgtgtttaatggaggccggctgtgcaggtagaggacggaagtgtcgggagccctccctgcagaagaggtgtgtcgaccccacagctgccaacgtgtc

SEQ ID NO: 296094 - DNA, 122 bp, Homo sapiens
cacagagaaaaaggttattggttggcagttcagccaatgagcgggcctgttactagtttgcggcatcctgtggtataggggaagcgctccgggcctggaatccctacgcgtccctttgggtt

SEQ ID NO: 296095 - DNA, 122 bp, Homo sapiens
gcggcccgaggcctccggggcggggtgtccccgagacgggaacccgaacccgacggcctccgttccgcctgcgccccttcaaggctcccggacgggcctcagtggcttccccgcccctcccc

SEQ ID NO: 296096 - DNA, 122 bp, Homo sapiens
tctcgtgacagctgctggcctcgcaggcaggatgtccatacggagggtcgcctgctgcagcgggagccggccgaccacacactcgggctgtgcattcaacatcgcctccgtcaactgtgccc

SEQ ID NO: 296097 - DNA, 122 bp, Homo sapiens
ttggctggcgtcccgcgtaagtatggggcctagcttgcgattatttctgactggtttttgcgtctacactaagttgcgcgtcccatgttttatgttgttgttttttttttccttgctggcat

SEQ ID NO: 296098 - DNA, 122 bp, Homo sapiens
agcctaataaaagacacctggattttcacatctgcttctgcagtgaatctgttgcaatatcgtaagtctcgcagactctggtaaactccatcatacacttatgagaaaatgagagtggaaaa

SEQ ID NO: 296099 - DNA, 122 bp, Homo sapiens
ttgttgtttttttccacttaaatcagtaacaaaccactaaccaactcaacccaaaccttccgccttcccaaaaagagcagtttagattgttttctggaaatcataggctgctgggttaatat

SEQ ID NO: 296100 - DNA, 122 bp, Homo sapiens
ccaggtggagaagaggcggaaaatgagagaggcggccggccattagtgtttgaggcgggccggtggccacagggggcctgaagtctgagtaagagacctgattttttctgctagaactttct

SEQ ID NO: 296101 - DNA, 122 bp, Homo sapiens
tcaaaacatttgagtgcgtaccatttatattattcaaatacgaaaagggaaagcggtaggcgcacatttcaggtactcgtcaaagatgagttggacgctggagataaaataaaaaatgggcc

SEQ ID NO: 296102 - DNA, 122 bp, Homo sapiens
taccgagtacttcagtgaattccttagtgcaggggaacggagtcttgaattccagggatgcggcaagacacacagccggagcgaaacgctacaaatatctgagaaggcttttccgctttcgg

SEQ ID NO: 296103 - DNA, 122 bp, Homo sapiens
ataaaagtgtacagtaacaaaacaaaacaaaagatgaaagtattatggtaagaatccgggcgcggtggctgacacctgagtccagcagatctcctgtcaggagttcgagtccagcctggcca

SEQ ID NO: 296104 - DNA, 122 bp, Homo sapiens
gggtcagggcaagacaacttcttgtgcccagagctgggtttggagtacactgataagagtcggagcaggagagtggggtttggagtgctggtggtaacaagggaggagtacacctgggcaca

SEQ ID NO: 296105 - DNA, 122 bp, Homo sapiens
agaaagaggaggaagcaatgcagtgggcaggaggcgacaaaggccgtgagagatgaaccacggacgcccaggcacgctgcggaggaaaacaaggacttcattctgcacgcaataatgagcca

SEQ ID NO: 296106 - DNA, 122 bp, Homo sapiens
ggacagtcgaggttagggtgggcgttttgggcctgtgggcctcgcagaggtgcagaaagccggcggcaagaaccccgcggggctggcgcgggaggggcgttaccggagcgcggggcggggcg

SEQ ID NO: 296107 - DNA, 122 bp, Homo sapiens
tttttttctctctctctaacaagctttctccttttccttcctcaaagaatcggaggctcacggccagaggctgttttcttggtaaagaaatcgggagtgttttccttccactattgtcccca

SEQ ID NO: 296108 - DNA, 122 bp, Homo sapiens
gcctcctgccttccctttaaagaagccgcacacaagggagctgcccgggagttcaacttccggccacatagtgagaggatgttttcctactggagctgagccgcgggggcgcgccccccggc

SEQ ID NO: 296109 - DNA, 122 bp, Homo sapiens
ccgtggaagaagcggacagctggctctcacggaattgatgttagtgttcccactgtagcgcgagtttggctgaatagagggatcatcagaaaaatgaggctggctggggtgtgggaacattt

SEQ ID NO: 296110 - DNA, 122 bp, Homo sapiens
ttgtatcacatgcattcattcactttgtgatcaatctgcatgaccagatgatatcatgcccgataaaattagatagcaaaatttattgtggattcaaagcacttatagaagcatggttttcc

SEQ ID NO: 296111 - DNA, 122 bp, Homo sapiens
tatcaaaaaggaaatcctgaagacatccctataaacgcagcggggaggagaacctgccgacgccgtaaacttacacgatgtggtgaagtcagatgggccatctgcttcgctccccaatccag

SEQ ID NO: 296112 - DNA, 122 bp, Homo sapiens
gccacagactcagactctggagaaagatccagaaaactgcccgtttaataaacatttgggcgattcttacggcctctaaagaccaagaaccactgctgcctagagctctgctctcttcattg

SEQ ID NO: 296113 - DNA, 122 bp, Homo sapiens
gcccagcaaggcatcccagaccatactaggctgttgtctaccacatcagcctaggcgccccgagtcccagaccctactctatagagggcttccaggggaccatttttctcttgatgctgttt

SEQ ID NO: 296114 - DNA, 122 bp, Homo sapiens
ctggttccccagggagaaggtaaccctgttcactggaggtctcaagtcagtggcagaaggcggggctgttgaggtctctcagaagtactagatgaggtggttccttagggttcttcatgagc

SEQ ID NO: 296115 - DNA, 122 bp, Homo sapiens
cttctgcttgcatcatgtttgctaatatcctattggtcaaagcaagttacacagataatgcgtaggggaccacacaagagcctgagggataaaaggttgattgattgctacagatcagcagt

SEQ ID NO: 296116 - DNA, 122 bp, Homo sapiens
gaactcaaatttggagccccctctccagaagggtctgtgtggagatggtggctgtggcagcggcagttcccaggtgcagagggtgggcagaggcagcctcaggctaaggggtctcccctact

SEQ ID NO: 296117 - DNA, 122 bp, Homo sapiens
gaggggagcaggggtggaagggagagaggcatctccagcaccatccgctctcccagcattcgctcagccaccctggcccatgtctgagccatgaggtttgagcatagctgcttctccacatg

SEQ ID NO: 296118 - DNA, 122 bp, Homo sapiens
cccagcagctccactcccgaccaccatctccacaggctgcagtctgggtgacacctggttcgtcgtgctgggtgaaagccgccggctgctgggcactgagctggagggaggcctggcagcag

SEQ ID NO: 296119 - DNA, 122 bp, Homo sapiens
catggcggcgtccgtgaggggctcctttgggcaggggtagtgtttggtgtccctgtcttgcgtgatattgacaaactgaagctttcctgcaccactggacttaaggaagagtgtactcgtag

SEQ ID NO: 296120 - DNA, 122 bp, Homo sapiens
cggttagcgcggacccaggcgcgccccagaggtattggaaagtgctgggggtggcagcttcgctaggcgcgcaccgcgaacgcagcttgaattgagcgaagcaaagggcgaggagcccccgc

SEQ ID NO: 296121 - DNA, 122 bp, Homo sapiens
tgtgctctacggcggagcgggcgaaggccctcctctgccacaagcgctcagggctctcggcgcacaaactttctggacatggggcagtttttcagctggacccgtgctcgagcagagcgccc

SEQ ID NO: 296122 - DNA, 122 bp, Homo sapiens
ttttcccttagaggccaaggccgcccaggcaaaggggcggtcccacgtgtgaggggcccgcggagccatttgattggagaaaagctgcaaaccctgaccaatcggaaggagccacgcttcgg

SEQ ID NO: 296123 - DNA, 122 bp, Homo sapiens
cgtctggtgagtagtgtatggctaggaatagtcctgtgatgatttggaggattaggcaggcgccaagaaatgagccgaagttccatcatgtggagatattggatggagtgggaaggtcaata

SEQ ID NO: 296124 - DNA, 122 bp, Homo sapiens
tttgaacatttgccactgctgacatcgtggccacccacctggggccagaaagagcccctccgctgcccccagagcatgggtgaagagacgaacgcttagcctactacctcctctcatgccag

SEQ ID NO: 296125 - DNA, 122 bp, Homo sapiens
ccggagcagtgcaaatcaactcccccagcctagcggcgcgtgcgcgaagtgaggcggccacgcagccacctaacccgccagcgacccgtgtcctgaaagcaagccgcggctctgtgccgcag

SEQ ID NO: 296126 - DNA, 122 bp, Homo sapiens
ctgggaagcctctctctggctgagcgaacggtgggtgctgcgcatgctcatctacagaaacgccgcttggcctttggactacaccatctgtcgctcgctctaacgagccggcgttgccgcca

SEQ ID NO: 296127 - DNA, 122 bp, Homo sapiens
ccgcctagatttcagaagatgtatgaaaatgcctggaaatccaggcaagtttgctgtgcacgggagcggggggccctcatggataacctctgctagggcagtgtcaaagggaaatatggggt

SEQ ID NO: 296128 - DNA, 122 bp, Homo sapiens
ccccggttatttttgtttgggcagttaactctgagcattcggaacattcgccgagtggaacgtgtgtgtcgtcatcccctcgaaggcttggctgattgagccagtaaacaaaaagtgcattc

SEQ ID NO: 296129 - DNA, 122 bp, Homo sapiens
tcgagcagaagcggcctcctggctaccctactttccaattgagaacagccctggtctgtccgggccatctgcgcgccacgtcgagactcagcgtcccaggcagccgcgtcccaacgtggcgc

SEQ ID NO: 296130 - DNA, 122 bp, Homo sapiens
ccatgggtaagaatgtgggtcaccaaactggatattgcctgtatcacacaacaaatatgccgaattggggggaaattaaaagaactaaacaactgggcaacaaaaccaggtagaatgacaaa

SEQ ID NO: 296131 - DNA, 122 bp, Homo sapiens
agggtgtctcttgcgtggtgcatctccgcacagtaacgcccctcgtgggcgttgtcctgacgcaggaggccagggcagcctgccggatgctccaggtcacctgcccaggacgggccggaggg

SEQ ID NO: 296132 - DNA, 122 bp, Homo sapiens
cccgctcccagaccgccgccgctttctcctcagccccaggcagctacccgcctcaactcacgggttgttattactcattgtaagtaacaagctgctgaggagccgcacgttggagtgcagcc

SEQ ID NO: 296133 - DNA, 122 bp, Homo sapiens
tttctgggtgaggtattcctcccagggctgaatctggatcttccccatgaattttccattcgaatatcgtgagctagtttgttttccagtctggaatttggacgtggtctgttagagggcca

SEQ ID NO: 296134 - DNA, 122 bp, Homo sapiens
ccaccccatgacctctagcaccagtctacataagaatacagcaacttctggaatggattacggaggggcactggaagagtattagaagtagactagtaaaaaggaaaagaaaaaaaaaaaag

SEQ ID NO: 296135 - DNA, 122 bp, Homo sapiens
tcagtcccgaatcccgacagcgaagagacttgtatgccacctgcaggccggggagcggggcgcgctggggctgcaccaccccgaactttgtaacaatctagagcaccacagagtgtttccag

SEQ ID NO: 296136 - DNA, 122 bp, Homo sapiens
tcacagggtcacagctccagcatgaggatttgccgggacagagttcagcctgtactgagccgaacagaaaatccccggcacgctgtctcctccagcctccagaccacggtgggtggggaggc

SEQ ID NO: 296137 - DNA, 122 bp, Homo sapiens
catacccgctcacatctgagataccgatggctctccctctcccaggctaggaaactctgtcgcaggagtcctccccacccaccagcagaacccccggaccccctgcccttccggtgagccgc

SEQ ID NO: 296138 - DNA, 122 bp, Homo sapiens
taaatacatgagcacctggtagtgcatcccttctggatccaaccagaggagacaagctcccgcctaccctctctatatcacatttgcccaacacctgtcacttgctttgaattaaacctcct

SEQ ID NO: 296139 - DNA, 122 bp, Homo sapiens
catttaaaaaatcagatcaattgccccccgggctctgggatggaaggcggtgtgcgcctgcgaaggtcagaggcccagcggcgccagggctcctcggcggagagccgcccgggtccggcgct

SEQ ID NO: 296140 - DNA, 122 bp, Homo sapiens
ttcttttggggaaagacttttaaccaattaaataaagaaagcgtgagtggagggtgtgcacgcaccatcttgtcgggggtgttgaggtacaggtccaccacgtaacggatacgcttctgcag

SEQ ID NO: 296141 - DNA, 122 bp, Homo sapiens
aggagctctcctgttgggtacaaggacagagttatcacccagccaacacagcaggggcctcgaggcccccagtgtactcccacctcccccaccaggaccataaggcagagcaacagggttgc

SEQ ID NO: 296142 - DNA, 122 bp, Homo sapiens
ccaccgtatggaaggaccacactgtgtccatccatgcatctgtccacagacgctggggtgcgctcacctctgggctaccgtgagcgaggctgctgtgaacgtgggtgcccgtatccatgagt

SEQ ID NO: 296143 - DNA, 122 bp, Homo sapiens
ttggtttggggccagagtgggcgaggcgcggaggtctggcctataaagtagtcgcggagacggggtgctggtttgcgtcgtagtctcctgcagcgtctggggtttccgttgcagtcctcgga

SEQ ID NO: 296144 - DNA, 122 bp, Homo sapiens
ctgcgccgcggaggttggtcatgctcaggtcgagctcgcccctcgggatctcctgggagccgcgttcccccggaggcctctgccagctgcagctcgcgccctccgcgtccccgcccctatcg

SEQ ID NO: 296145 - DNA, 122 bp, Homo sapiens
attatctgagacttcacgtcttcaaacagttggagacatgacctgcgagaggccggtctgcgttgctttcatggtgctgtcctgggatgccagtgtcagttccggggtctgtgcacttggca

SEQ ID NO: 296146 - DNA, 122 bp, Homo sapiens
aatgctgaactgaaggaaaaacttctttagtttccctcatcaagtgtgtcctcaagagggcgctcctgatacagtcagctcccacttgctcagattggtcaaggctgaggggaaggcccttg

SEQ ID NO: 296147 - DNA, 122 bp, Homo sapiens
cagggtaggacctgaaattgcagagacatagaaaatcaatacgtggtcgggagtcaactgcgcgcgaccaagggctctgccctccctctctccgttgatttggacgctgggaagctgcccgc

SEQ ID NO: 296148 - DNA, 122 bp, Homo sapiens
tgggtataggttttagaagctttgttgagcctgtagggagaggccaagtaggcagtctcacgtaggagggtgaagtcctagcttgagaccttcactggcatggtgaccactgagccctgaca

SEQ ID NO: 296149 - DNA, 122 bp, Homo sapiens
acgccacagaagccgtctgccgtgtgtgaggagcatacaatggactttctaaagataaggcgtgggcttccacagtgtctgccagagtttagttctttataccttactgaaaaatgcctcgt

SEQ ID NO: 296150 - DNA, 122 bp, Homo sapiens
aatcctctcccccactggtctgtcattgccagtggaagccattgcccagtgtgttggccccgcgcacattcactgagccagtctccctctgacccctcactcggctggtttcttacggtgcc

SEQ ID NO: 296151 - DNA, 122 bp, Homo sapiens
caccgctcctgccactgcagtgctcgagccccgtgcaggggagcttgcgggaggatcgaccgacagacggacgcacgccgaggcactgcgcccccagccccgcgccggtgccaccgcagccc

SEQ ID NO: 296152 - DNA, 122 bp, Homo sapiens
tgtctttctggttttttacactgatgtttctcaagcacatagaatagcatctggctcaagcgggtcctcaataaatatttgtggaataaatgagtcatttgtgaatatatcttgatgtgcta

SEQ ID NO: 296153 - DNA, 122 bp, Homo sapiens
gacgcaagccatgcatctggctctgcatcctcgtgcggttctccaaggcggggtaggtaccggccgtggttgacgtagggcacacatgccacacggtaaagcctcgacagccaaacacagtt

SEQ ID NO: 296154 - DNA, 122 bp, Homo sapiens
agtgcgatcgattcagcccgaggagaaggagcgcattggccagttcgtctttgcccgggacgctaaggcagccatggtactacaggtcttttttggtatttagagcctaggaagcagatctt

SEQ ID NO: 296155 - DNA, 122 bp, Homo sapiens
agctgcccggcagcgagtttgccccgctgccgaaagaaggcgggagccggcaggggccttcgaaaccccctggcaacccaggcccggagtccttggggagcggctgtttcctgggacgccct

SEQ ID NO: 296156 - DNA, 122 bp, Homo sapiens
ctgccctggccccacatctgccctcttcacagggagaaactctgaccacccaagggaaagcgtgtcccatccctgctcaaaacactgcagaaatgcctcatctcgttcagtctaagagccaa

SEQ ID NO: 296157 - DNA, 122 bp, Homo sapiens
gaggtgggaagggcatactcactttccccttgtcctgggaggcccacacaccaacattgccgccaccgctgccacctgggagcacagccaaagtagacacacacaggaaaaggggaagggtt

SEQ ID NO: 296158 - DNA, 122 bp, Homo sapiens
ggctgcccatcccctcgcaggaggagctgatgaagctggtgcggccaccctattcctactcggctctcatcgccatggccatccacggggcacccgacaagcgcctcactctcagccagatc

SEQ ID NO: 296159 - DNA, 122 bp, Homo sapiens
cctccacagccgtgccccgtgctctggccctggcagcctggaggcggcggcggtgatcaccggtctgttctggagagagggcagctactccatggcgccctcttggagaaaatttcatgaac

SEQ ID NO: 296160 - DNA, 122 bp, Homo sapiens
tcccagtttcttaggaacttgtgggccttatttgcctggccaactattctgcatcctttacggctcaaatctgccaccagagctgtccccaaggcctctactatcagcccttctgcttgtgt

SEQ ID NO: 296161 - DNA, 122 bp, Homo sapiens
ccccaggatctccgtcagataattgtgcccccttcaagggcaaatttggcaatgtcacaacgctgctaagttggtttaggtagaatcctcaattttgtcctccatatctgattgggtttctt

SEQ ID NO: 296162 - DNA, 122 bp, Homo sapiens
tcgttagcaggggttcacggcagtcgttttcttccgtttgcttgtgtctttggaataaaacgtccaaaaatgggatgtatggaatcttgctataggagttcccaacttacagcgatgacgtt

SEQ ID NO: 296163 - DNA, 122 bp, Homo sapiens
gggcttgggacctgcagcccgccgtgcctgagcctcccacccactccatgggctcctgtgcggccccagcctccccgacgagcgccaccccctgctccactgcacccagtcccatcgaccac

SEQ ID NO: 296164 - DNA, 122 bp, Homo sapiens
gggtcggggcagcagtactcgcagcctctacacctttagtaccttctctgcccaggagggcgagctgtgagaactacaccatggctcacccccctgcgggaatggggcacagaaaagacaca

SEQ ID NO: 296165 - DNA, 122 bp, Homo sapiens
ggcagagacagctggggtggggcgctccttggggggttcagatgggagttgaggcccaagcgagtgtctgtgcctcggttttgatccagcgtgcccatgtcatgtgaatattttaaaacctg

SEQ ID NO: 296166 - DNA, 122 bp, Homo sapiens
gcctcgggcgcaagcgtttggtgtgtctgcgtcgggggcggagcctcttgtccctctgcgcggcccgttccgcctctcttctcccaccgcctgtcggctgacgtgtctgcagttcctccgcg

SEQ ID NO: 296167 - DNA, 122 bp, Homo sapiens
gctcccgacgactgcagctgcctcctgggaaccccaggggggcaaactcaggcccacccccgcctgtgtgactcaaaccccccagccaagtgcctgtgggaggacattttagtgggtgggga

SEQ ID NO: 296168 - DNA, 122 bp, Homo sapiens
ttctggtgaaagtctttaatctgcagaactgatgaaactgtcatcgaaggaatctgttagcgcatctgtgtcttctgttctggtcattgcccaggcagccgatctcttcccatggctgttgc

SEQ ID NO: 296169 - DNA, 122 bp, Homo sapiens
gagcaggcctgggaccggctccacgcgcagccagtggggcagagcagcaggcggattatgcgcagggagaaaaaagttcaccaaccgcggtccagagtcgcaagtgcggctcgctcggagcc

SEQ ID NO: 296170 - DNA, 122 bp, Homo sapiens
ggcgagatccgcgcccgggaaggcggaggggggcggcaggcccttctctgacaccctcgacgagcgaccgccgcaggggcctaggccacccctgcccacctcggcctggcccgctcgaaggt

SEQ ID NO: 296171 - DNA, 122 bp, Homo sapiens
gctccagcaggccgaggtgcctgcacggtccatggagggtcctgacggctgttctggactcgggggtgtcactctgcgcccccaggacctttgggttcttcctgtggggagagccttgttgg

SEQ ID NO: 296172 - DNA, 122 bp, Homo sapiens
gcgcctgacgctggggggccgtgtgggccctgacttccggagggctgggccctggtcctccgccaccgcgtgcgccccttaaagacccctgcccgccgcccaggacggatggcgaccccggc

SEQ ID NO: 296173 - DNA, 122 bp, Homo sapiens
cctcacccatgtattatgatgggttacccctgaagaaataataccatagcctttaggcatcgcaagaatgatcgcagtattcaagtttggggataaagagccttaattaagacctctcaaag

SEQ ID NO: 296174 - DNA, 122 bp, Homo sapiens
cgtgatccgcccgcctcggcctcccaaagtgctgggattacaggagtgagccaccgcgcccggccgcaaaaatcttttagagtgtgtacttggctgaacttgctccacgcaaaatggtctta

SEQ ID NO: 296175 - DNA, 122 bp, Homo sapiens
tcaaggtccgagtcgtggttctgccccttagcagctgcgtgactctggccaagctcctcccggcaacaggcctcagtttccatatctgtggatggcactaatcacgatgatgacctgaggag

SEQ ID NO: 296176 - DNA, 122 bp, Homo sapiens
agatagccatacaactctttcccacaaaacacttctacgattttggtgctgtactctacccgaggttttgaagagcaaaaatgaacaatgggcaacttagaaattgctcttgcaattacatt

SEQ ID NO: 296177 - DNA, 122 bp, Homo sapiens
tgaatgtattcttcaagaagagccatgtcctaaaagaaaagaaacagttactcatctccacgcaagacttcagaatacagttaatgattgtggaagtcggccagctcttatgggctacctcc

SEQ ID NO: 296178 - DNA, 122 bp, Homo sapiens
attgtgttcgtgactgtgtgtgactgcgtgtgtgactgggtgtgtggctgtgtgactctgcgtgtgtgattgtgtttacgactgagactgtgtgtgactgattctgtgactgtaagtgtgac

SEQ ID NO: 296179 - DNA, 122 bp, Homo sapiens
ctagaagcaaagcaggcagaagaggcagatagagcatagggggccaggacagggatcccccgtcagcacagcaggagtcactgctgtgtcatctgtttcactgccacatggaaagctcatgg

SEQ ID NO: 296180 - DNA, 122 bp, Homo sapiens
tggggaccccgtcctggggagttcctgggtcccgacagcttcaaggcctctggctctgggcggcctcagcattgtagtgtcacccgccgccggcttcccgcacagtcaggacgaccccgcgt

SEQ ID NO: 296181 - DNA, 122 bp, Homo sapiens
ggccggagccttgtgagcggggcgggccgcgtgtgcggggtgggggcggagccttatgagcggggcggggcaggggcgtggtcggggcggggcgcgcgggcgcccgcggcggccctcacttc

SEQ ID NO: 296182 - DNA, 122 bp, Homo sapiens
accccggaccctccgtgcctgccagcttgatgtccatgttgccatccagcaggaggttctcggtcttgaggtcccggtggacgatgtgatggtcgtgacagtactccacggccgacaggatt

SEQ ID NO: 296183 - DNA, 122 bp, Homo sapiens
gcacagccattttttagaggtctctgggtggctctgaaaagagcctttggggctttgttgcggttttcacacgccagcttcctacttctttttggcagccgccttcttggcctttgcagctt

SEQ ID NO: 296184 - DNA, 122 bp, Homo sapiens
gtttgggaccatcagatccagcaattgactctcaaaggctgcggactggaattagtacgtcgtgctgccgttgccaggcattttatattttcctaggctgaggcttcccaggctgttgcttt

SEQ ID NO: 296185 - DNA, 122 bp, Homo sapiens
cagcaagcgctgtgcttaggcctggggtgggggacggattctccctgaaggcaggtctgacgcgggcgggagcacccaccccgctgggttcttacggcggatccgttacctgggtctccaga

SEQ ID NO: 296186 - DNA, 122 bp, Homo sapiens
ctgcgggacgctctcggggccgcccaccccgcggtcccagcccggaccccgcccaccccacggacccagcccggaccccgcccaccccgcggtcccagcccggaccccgcccaccccacgga

SEQ ID NO: 296187 - DNA, 122 bp, Homo sapiens
tgagcccgcggagcacgttcactgacggaccagggaggggtccgcgccgagacccgcctccgaaccaggccccacctcctgagccaggcccccgcccccgattctgactccgccctctctgt

SEQ ID NO: 296188 - DNA, 122 bp, Homo sapiens
cgccaggtgccagcccggtgcaagtgggactctcctcccaggcggacacctgagcacgggcggccccacccgggagctccctgcagccccacccccactgcaatctcccgcccactacactg

SEQ ID NO: 296189 - DNA, 122 bp, Homo sapiens
tttaaaaaattgaattcatgattaaaaaccttcccacaaagaaaactccagttgaatactcgctagtgaattgtaccacttaagaaattataccaatttatcatgggatgaattgtacctac

SEQ ID NO: 296190 - DNA, 122 bp, Homo sapiens
gcagctgacccgctggcggtgggccaggtcgcggcggggcctggaggcagcaacgtgcggcgcggcatgtcgcgggcgccgcggcagggaaatgtgggggcgggccggcgcgccccctcccc

SEQ ID NO: 296191 - DNA, 122 bp, Homo sapiens
ttaggccacctataaactaggaatttaaaaggcaccaaaatcctagaagtcctaggagggcgtggtgacgcaagcaggtgaacgctggccgatgctgacaacccactcctgacgcgcttccg

SEQ ID NO: 296192 - DNA, 122 bp, Homo sapiens
ctcctggaagatcctccatgcagtcttgctggccagaacccgggtcccgctcagggccggcggcctgttcaccttgtcgaccaggctgagccccttcagcggcgagagctgcagctgctgcg

SEQ ID NO: 296193 - DNA, 122 bp, Homo sapiens
cgcggcaccgcagaccctcactcagccgcaggccgccagggaagacgaccagagctgggtcggactctccaggggggagggaggacacgactctcacagccagggacaatgaccaggccctg

SEQ ID NO: 296194 - DNA, 122 bp, Homo sapiens
aacactagctgctgttgctgttgttatgactgtcactgttaacagggagactttgtggctcgcctttttatcctgaacaacacattcctttgctagggccagaaacaggcacagaacctgtt

SEQ ID NO: 296195 - DNA, 122 bp, Homo sapiens
cttcgggacgccgatgaggaacgggtggatgattccttcaggacgcagatgagggacgggcggatgacttccttccagacgcagatgagggaggggtggatgattccttcaggacgcagatg

SEQ ID NO: 296196 - DNA, 122 bp, Homo sapiens
ggccttataaaagggaattgaaggaacctagctagcccttctccttccatcatgtgaggacgcctggatgccatcatctttgaggaacagccctcaccagatacccaatttgccagcaccct

SEQ ID NO: 296197 - DNA, 122 bp, Homo sapiens
tacgcctgctttaggcgggagagagaggcggagcttgatccgtgcgcctccagccagccccgggcaagttaggtttgctagctggttagctttctctggggaaatgtgtcctgtcccagcgg

SEQ ID NO: 296198 - DNA, 122 bp, Homo sapiens
gcctgcaggatccgggctcgcactgccgccgccgccaatagcgccgccatggctctcggccgccctagctccgcaccccgcgcctctactgcccagaagcactacagctgccaggcctcgcc

SEQ ID NO: 296199 - DNA, 122 bp, Homo sapiens
tggaccgtgcggagtgtaccgggagctcttttgtaggggattgtgagaaagcagagtgatcgtacccctgaagttctgggggcagcaggcacaaccctccctgtgccaagtcaggcagatgc

SEQ ID NO: 296200 - DNA, 122 bp, Homo sapiens
tggagaaagaggggcgtgcagaagccgagtcacttccgggagtggctggaacacttccggcgccgctagcgctgcgagatattcagggcagaagttacgataactcggggcggaaatagctt

SEQ ID NO: 296201 - DNA, 122 bp, Homo sapiens
gtagggggtgagcggtggtaggcggaaatgagaactgccaagagaaaaggatggtagacccgtggggtgggctctgaggagtggaaacaacttcacattcgagacacagacggtatttgcca

SEQ ID NO: 296202 - DNA, 122 bp, Homo sapiens
tccctgtagacgcggcgccccctccccgtggcttccggcagctccaggcccctcccgccgcgcgtctccacgggttcccagacgtgcagcccccacaggccccggctccagacgcgcggccc

SEQ ID NO: 296203 - DNA, 122 bp, Homo sapiens
gcacatgtaacccaaaacttaaagtatagttaaaaaataaataagagctgccccccgccccgctcagctggaattgtctgagaacccatttcgtggcattcattgtaaactataagctctgc

SEQ ID NO: 296204 - DNA, 122 bp, Homo sapiens
cgagggaagtggcgggcggggactaaggcggggcgtgcaggtagccggccggccgggggtcgcgggtatggccgaggccaggaagcggcgggagctacttcccctgatctaccaccatctgc

SEQ ID NO: 296205 - DNA, 122 bp, Homo sapiens
agtgtgcttcacagacatcgtgcccgccttgcttccctcctctgtttttcccttgggcgccgatctacaaggtgttcctctgggtgattaatggagacaggcctccacttccatgctgagca

SEQ ID NO: 296206 - DNA, 122 bp, Homo sapiens
gaagcttgtgcagacgactgtggccccaaaccgctttgcttggctgggctaattctagctcgggtaacagctgatctaggaattaaaggggcgagagccagggcacagaagggggctatgag

SEQ ID NO: 296207 - DNA, 122 bp, Homo sapiens
ctgatacgtttctaagaacatctatgaacatctatgaagaacatctatgaagtctatgaacgtcgacttcacatgcttactatgcggcaggcagtgacatgcatcagctcatttaatcctca

SEQ ID NO: 296208 - DNA, 122 bp, Homo sapiens
cggactcggacaacttcaagtgagcccagaggcaatttcttttcctttctaactgtggcccgcgttgtgctgttgctgggcaggcgttgggcgccggcggtcttcgagcgtgggggcccgct

SEQ ID NO: 296209 - DNA, 122 bp, Homo sapiens
acacaattatgtaattacatgattaagttttccacgaggtaaataataaggaaataatgacgtggtggcaatgggccttcagcagggtataaaggaggctatggacccagaagacttccaaa

SEQ ID NO: 296210 - DNA, 122 bp, Homo sapiens
gtagggaggcaggaaaggtgggatttgaaaacaccaggctgagccagagcctggagcagccgggacctcagcaacactgtggctgcccatggaaaccatcccaggtaagatgatggtccccg

SEQ ID NO: 296211 - DNA, 122 bp, Homo sapiens
tcccatccccacctccaggaaaagtagcagagggggaggtgagggcccagtagctgagagcgagtagggaaggggaggtggcttgtccatttatagtcttgctctttgggatgctgaaggtg

SEQ ID NO: 296212 - DNA, 122 bp, Homo sapiens
ctggtgagcctgatctaatcccatgagcatttcaaagccagagagttttctccagctgatcgaaggagtgcatgtcagaggtatatgctctggctgacttggaagacagcaggcatccatac

SEQ ID NO: 296213 - DNA, 122 bp, Homo sapiens
tcaggcacggggtatgtgctgtcagcgtctgctgtgcagctcattctcaaggtggccagccgggcaccccttctcccattagaggatgtctttgtgggggtaagtgcccgacgaggaggcct

SEQ ID NO: 296214 - DNA, 122 bp, Homo sapiens
cgcccagagccgtttctcggctctttcgcggttgccggcgcgctcgggacaggaggaacccgcagcccgcgggagtcagcggagacccgaccagcactatccagccctctgcaccgcccccg

SEQ ID NO: 296215 - DNA, 122 bp, Homo sapiens
tcagcctttctcttgggcatggtgacggccacgacggtggcgggatgtaggtgctggatgcgggatgcagctgcgcgcgggctttggtcagtccgggggtcgttctcgcctcttcttcgtca

SEQ ID NO: 296216 - DNA, 122 bp, Homo sapiens
gtagtaagttaacatagtattattgtcacacacaatgctttttttggttaaatgttgatacgaagcaatgttttggaattactttaattgatggagtagtggtggtagagagaaattaataa

SEQ ID NO: 296217 - DNA, 122 bp, Homo sapiens
tagcatcgtggcagagaggaaaaggaactaagggaagcggaagtatcagtaaggagcctccgacagaaatggtaggctggcaacatcctgatcagcagcagaagtgattttcccgtgtcccc

SEQ ID NO: 296218 - DNA, 122 bp, Homo sapiens
gactgtgctgcagacctcttgggcggaagccccgccacctcttccaggatgtggcagagccgggcgtcctcgccattctggatggcccaccgcaaggcctggatctccagttctcgctgtct

SEQ ID NO: 296219 - DNA, 122 bp, Homo sapiens
cgcctacttcccgacagcctccgggcgccgtcacctgcagcgcgactgagcgcgggaggacgctctagccaccctagagacatcgaaactcttcccaggccttgcagcacccgtagcggatt

SEQ ID NO: 296220 - DNA, 122 bp, Homo sapiens
gcgcagatcagggatcgcgattgcgaatcctccgctgaggtgatttggatatccctagaacgttgagggcacgagtcgggtcctgagaccaggtaagcatctgcggagaagccaggtaaccc

SEQ ID NO: 296221 - DNA, 122 bp, Homo sapiens
ttgagcccagtagggaaaagggctccctttttctaaaagaaaaacaaacctcttctccctcgcagcggcggagaaacgtttgagtggccttgaacagaatccctccctagggagaggctgcc

SEQ ID NO: 296222 - DNA, 122 bp, Homo sapiens
agctacagaaatttgtaaaaatagtacagataatgcctgtatactttattatctggttaacgtattgctttactatggtgtgtttgttacaactaaggaatcaacattggtatgttactgat

SEQ ID NO: 296223 - DNA, 122 bp, Homo sapiens
gaagatagcaagagaatgtagagggaatctggaaaatgtgtagcccccaaaggatgagcacgtggtgcagaggacagaaaatacctgcacacacacagaaaaggacacagccagtgttgaaa

SEQ ID NO: 296224 - DNA, 122 bp, Homo sapiens
cacaagaccccttttcccaggaggacgtatgggtttttcctgtcgctccagcttctctttcgcggcccttccacgcttgtcacttacctgagcgcagccaatcagcacctagaggttgggct

SEQ ID NO: 296225 - DNA, 122 bp, Homo sapiens
ttgttttgtccaaggagcaagtagccaagagggaaaaggagaaggcacagcagttgacatcgtcaccatgatcagctaatgtgtgaatcagtttcaccatgttctttatttgaagaaaaaca

SEQ ID NO: 296226 - DNA, 122 bp, Homo sapiens
cgcgctcaggacccagtcagtgagccaataaggaatctcgcgagtgttgaaagtcggtggcgtaggtcgtcgtcctggatgctggcgagatagatgttatcttccagaggaagaggaggagg

SEQ ID NO: 296227 - DNA, 122 bp, Homo sapiens
gagcgcgccgcccgggagtctggcgggcagatcttggcagacacctgtcaccttggcccgcgctaccttctggagattttccccagtgacgactgagccctgggagtagtgacaatgagtga

SEQ ID NO: 296228 - DNA, 122 bp, Homo sapiens
tccctccctgaagagcaggcggattggggcagcagggtccctgtcaccgggagtttgacacggatgaccatttgggcagtggatcccccacgctgtgctctcgagggaagctgcagccggga

SEQ ID NO: 296229 - DNA, 122 bp, Homo sapiens
tgtgaagattgaaaatactgcgtggaaaacactcaccgcttcctgggaggaggtgcgcttcgtcgcgtaaccgaggccttgtgtggcagcttcccctgggctggtcgaggcacccgctggaa

SEQ ID NO: 296230 - DNA, 122 bp, Homo sapiens
ccaagaaactgacagagccaccctgccactggtaccagcattgacacccatctagaggtccgaggggcagccccagggcagaggagattttgagagcccacacccctgacctgagtggggag

SEQ ID NO: 296231 - DNA, 122 bp, Homo sapiens
gttaaatatccaacagtctactttgacatctttacccaattgttccacagacacataacacgttaatattcatcttccctcttaaacctctagtaggttccaaactcatttggtgcagcaat

SEQ ID NO: 296232 - DNA, 122 bp, Homo sapiens
tagagcgctgcaggtgagcatgccggcggccaggtgcctccgagttcctcggttacccggcgctcaggcctgctcctcactagggaccacttagctgagccagagagattgcagtgttgact

SEQ ID NO: 296233 - DNA, 122 bp, Homo sapiens
aaacgagcaggtcgatgcctgaggatttaatggagaaatcccaaagtgagccggggcgcgcggtggaggaggggcgcgccgcagccggggccgctgggccctgatgggcgggagcggggtgg

SEQ ID NO: 296234 - DNA, 122 bp, Homo sapiens
gcgcctgcgatttcagagtaagagctgtttctgcactgctccagtcctgcatttaacagacgcttatgcagcacctgctgagtaccagggtctgtcctgtgtgctgggtgttcagccttcct

SEQ ID NO: 296235 - DNA, 122 bp, Homo sapiens
ttttggtggtttttttacacaaaataaagaaactatgcacatggcctcggcctccgggtccggcagacggcatggctcccaccgagggccctgggtcccggcccagctggcagccgccccta

SEQ ID NO: 296236 - DNA, 122 bp, Homo sapiens
tacacacacaggtagcgaggaggccggggtgttaatacacacacaggcagcgaggaggcccgggtgtctaatacacacacaggtagcgaggaggccggggcgttaatacacacacaggtagc

SEQ ID NO: 296237 - DNA, 122 bp, Homo sapiens
aaaccctggattaatgtaaatagctttttggggaacggattctaatgtcacgtatgtgaccgtgtggactatttcaaggtgctgatgcaacactaataaacctggaggggccggcccccgcc

SEQ ID NO: 296238 - DNA, 122 bp, Homo sapiens
tccacgcgatgcgcaagtgggagtgtgtttagtgccctaagtatttaccctgctttaacacgcttacccatctttttaatggtttaaaacaacaaatcgatgaaaaatatatttcattcttg

SEQ ID NO: 296239 - DNA, 122 bp, Homo sapiens
aagaatagataaatagatgaaagtatacgcatataatggaatatcatgcatcagaaagaacgtggatacaaaaacataaactgcataatcacgatgtggaatgaaagaagacccaaagagtg

SEQ ID NO: 296240 - DNA, 122 bp, Homo sapiens
ctccattgcctgtgctcgccctggctgggaggcgaactgaggcctctgtttgggaccacacgctgttgccgtggaaagtggggccgcggggccaagtcgggagcagccacttcagattccag

SEQ ID NO: 296241 - DNA, 122 bp, Homo sapiens
ccgcctctcctctgacccaggtgctgaagctgcgagaagtgaggctgaagccctgcatcccgcttcctgccttcctggagcaccggttgggcgaatggatggctcacctgtggccgagcgcg

SEQ ID NO: 296242 - DNA, 122 bp, Homo sapiens
gccagagagagctcggggctgccagaggcgaggtcttgaggaggcggggccgggaggcttcggagcccaagaggcggggccagaggcgtagggggctgcgaggggcggaccttgggggcgtg

SEQ ID NO: 296243 - DNA, 122 bp, Homo sapiens
tgcatgtgctcattctagttctctacgatacttaatgtgcacctaagtgtgtgccaacaccgtattataagggctggaggtgctcctggacattttagcgctgcggaggcagcacagcacag

SEQ ID NO: 296244 - DNA, 122 bp, Homo sapiens
tgttgctgcagtgtgaatcagaaatcaatagcgctgccctaatggagactccactcggcacgcggcaaggcagctgcagtctcctctctctctttctctctctctcttgcacacacacacac

SEQ ID NO: 296245 - DNA, 122 bp, Homo sapiens
cttatacgcagtttcttttatatagaatctctctcacacacacacacaaatcacgctcagcgtctctctcacactctctaacggtctcttacgcacacacaatatccctcatacatacacac

SEQ ID NO: 296246 - DNA, 122 bp, Homo sapiens
gtggctaggaagaacttctcctagccggagcaggttgttggggctaggaaagtagaggggcgctgcaggagaggagactaaacgcgagaggaagattgcatttatgattttaaagggggttg

SEQ ID NO: 296247 - DNA, 122 bp, Homo sapiens
caggcgcggctccgcacggcgggcgcactcacctcctccgtggaccggccgctccgccgccggctgtcactgcagcccactccctgccccgcgccggctctggatgctatttaaggcgccgc

SEQ ID NO: 296248 - DNA, 122 bp, Homo sapiens
cgttcctggcgcatcagcagaccatgcaggatgagctgcttctggggctgacacagcagccggcgcggccgctttcgggggcggcggccacggagaaactccccgaccaccaccccggcggc

SEQ ID NO: 296249 - DNA, 122 bp, Homo sapiens
aggtctagcttcacacgagcaggattttgcctttccggcggcactaggcttccgcctcaccgcagtggggtttttccagcctaccttgtgcagctgcggttctcagcatccgcgggcggagg

SEQ ID NO: 296250 - DNA, 122 bp, Homo sapiens
atctgcagctactccctctgctcctttctcgccgagcgttacctgtgccaggccgtggcgcgttacagcaccaggccatcactgacagaaacgtttacttaacgaatgttcttaaaccagtg

SEQ ID NO: 296251 - DNA, 122 bp, Homo sapiens
catttccattcttcattcttattgggctgttgactttgagacatttttggtcagcaccgccgttgggcttgagttccatggcatcacggttgttctgcttaagggattcactggttttcaca

SEQ ID NO: 296252 - DNA, 122 bp, Homo sapiens
agcggtccaggtattccgccgtcaagagctccctgtgtccacttcggatgtggttgctatcgactgccaatatcttgtttagtaactgggttcagtctgtcgcagacaacatgttgactccc

SEQ ID NO: 296253 - DNA, 122 bp, Homo sapiens
ctcatgactccggctgaagacgggggccagggagatgtctgggtccactccctggggccccgggccatcgccctgcctgatggcctcctgaccccctccctagaataacacatgtagatgtg

SEQ ID NO: 296254 - DNA, 122 bp, Homo sapiens
ccgatgacagaactaaggctcagaaatgtgaaataatgtgcccaagattacccagctgtacgcagtggaggtgagattggcatccaaaaccttccctctcaagctctatgccactccctttg

SEQ ID NO: 296255 - DNA, 122 bp, Homo sapiens
cgcccggcccgcgcccatgcaggccatcaagtgcgtggtggtcggcgacgggtgagtgcgcggcccggaggccgcttggctgggctgggcgggaggggggctcgggggctcggggcgcagcc

SEQ ID NO: 296256 - DNA, 122 bp, Homo sapiens
gcaggcctgggaccgacttcccgagctacttcgcaggtgcgtccccggtacttcgggggccgctgagtgggctctgcctggggtacccagacagcatcctgccactagtatcccgccatccc

SEQ ID NO: 296257 - DNA, 122 bp, Homo sapiens
caactgtgggaggatggcagagtcctcggataagctctactgagtggagtacaccaagagcgggcgcacctcttgcaagaaatgcagcgagagcatccccaaggactcgctgcggatggcca

SEQ ID NO: 296258 - DNA, 122 bp, Homo sapiens
atcccaaagtgctgggattacaggcttgagccgccgcgcctggaaggacactttggagcgcgttttaggggagatgatgagtgccacctcgccacggcgtcctcctgtccgtggcgtcgtcc

SEQ ID NO: 296259 - DNA, 122 bp, Homo sapiens
gcatggttaataaacctctgaaaagagattcaaaatatgtattttgtaaagcagggtcgtcgcagtaaacaaggtaaaatacacatctgaaaagagattgagatatatttgaaaaaaagaga

SEQ ID NO: 296260 - DNA, 122 bp, Homo sapiens
agtggctgccaggtgagttgaacagtccgattttcactggggtcccacacagatgggatacggcttaggaggaatcccgggctgcgggcattccttggcccagtggccagatttccgtcaca

SEQ ID NO: 296261 - DNA, 122 bp, Homo sapiens
gccctcttcacctgcccagtccccagtgcccagcacccagtgctgagctggtgaagatcccgtggccagaggcacacttaccatatacatcatgactcagatcccatttgctgacttggaac

SEQ ID NO: 296262 - DNA, 122 bp, Homo sapiens
ttttctctttttttttttgagatggagtcttgctctgtcacccaggctggagtgccgtggcggtggcgctatctctgctcactgcgagctccgcctcctcggttcacaccattctcctgcct

SEQ ID NO: 296263 - DNA, 122 bp, Homo sapiens
atagtccagcagggctcagggagcaaagcaacaggtctgtattttccagggactgggacacggtgaactggggagggcctctgggatctgctgcgttgctacacaaatccaggggttcccat

SEQ ID NO: 296264 - DNA, 122 bp, Homo sapiens
gcgcgcagacgctcggagggtgtgtgcttgcgtctgtcagtcccggagccgaggggatgccgtgggagggtgagtgggtcgcggagctgcaggagggtgatggatgggcgaagggggtgggt

SEQ ID NO: 296265 - DNA, 122 bp, Homo sapiens
ctgggaaccctcaaaggtggggcgggctgagcagctgtctgctaagctggctgtctacctcgtcctccctgcccacagaggacatccagcacatcttggagcgcctccaccgtgcccagctg

SEQ ID NO: 296266 - DNA, 122 bp, Homo sapiens
cccgcgggctggaggtggagtggccgggccggaaccagtgcgcaaagcagatggcgagcgcggaggtcggttcggccccgccgcgcctcaaggcagcagccaccctggggaaggtggatgcc

SEQ ID NO: 296267 - DNA, 122 bp, Homo sapiens
ccagggagcccagtggcgatgagggcactgctggcgctttgccttctccttggctggctgcgctggggcccggcgggcgcccagcagtccggagagtactgccacggctgggtggacgtgca

SEQ ID NO: 296268 - DNA, 122 bp, Homo sapiens
caaaaaagaggccggctggtctttaactcccgagggttcgcgaagctcagctggggggaccggaggaggggctggaaaaaagcaaaggggaaggggactgggagcgggcggggcccccttcc

SEQ ID NO: 296269 - DNA, 122 bp, Homo sapiens
ggaccaagatttccaggaagactacacagggccttcctcacttaagcctgtcgcttgggccgtgggattatgagtgaattttgttcatggtactacttttagtttgcagggtggtcatttaa

SEQ ID NO: 296270 - DNA, 122 bp, Homo sapiens
tttgtaacgttcggtttggaggaaaaggcgggagggtcggaaggaaatgggaggagcgcacgatccatcagcgagtttcatcgcagcgtttcatctccttcgtgaactgggctcagggaggc

SEQ ID NO: 296271 - DNA, 122 bp, Homo sapiens
ctcacaactctaagggggtgcgcgtgacagagtcgtgattgattgagcaagcagcgggtacgtgacggggggctgcatgcaccagtaattagatcggaacaaaacaggatagggattttcac

SEQ ID NO: 296272 - DNA, 122 bp, Homo sapiens
tacctcactctctcttcgggttgcattcgccataagagagccggtagacccctgaaatcccgggaccgcctcccacgcaaaacgtgagacaaacaaaaggaaaggcggaaacgcagaaacgc

SEQ ID NO: 296273 - DNA, 122 bp, Homo sapiens
ccgcgggcggcctacgcaggcaggggccgtgcgggcgctgggggctgaacccgcgggctccgcctccccgagtcctcggggcatcttccacatggtccctcttcagaaggctctccttcatg

SEQ ID NO: 296274 - DNA, 122 bp, Homo sapiens
tggccacacaccgccccgatccacctctcgctctcagctgccccccgcaccagctgccgccggccacagatctcagcaaacccgccgccgagctcgtcaaccacacgtcaccccgcctactt

SEQ ID NO: 296275 - DNA, 122 bp, Homo sapiens
ccccgcgggccccggctgggggcagggcccccaacgagtgcagagacacaatcagtggagcgctccccaccctcaccccacccccagcccctttagacccacagctgatgaggcacgtggag

SEQ ID NO: 296276 - DNA, 122 bp, Homo sapiens
cctgggttagggcagttctatgttgaataatgtttttaataatctgggcatgtctttctccgtgacttgaggcagttagcctcagaaagcctagattcacatttgagttttgccactgcctc

SEQ ID NO: 296277 - DNA, 122 bp, Homo sapiens
accaacgatttcagttcactgagattttaggaactactccatccacgcctgccgacactccgttcttccaattgcagataatgccatttccaccgcttcacaataacccgcggactatagtc

SEQ ID NO: 296278 - DNA, 122 bp, Homo sapiens
taaggggccctcccgggtgctgccctcagttatcaacagtgctgggagaaggcgccaaaccgcattccacgacccctgagtaggggtctgaataggtatcagacctctgccctcaaggagtt

SEQ ID NO: 296279 - DNA, 122 bp, Homo sapiens
agtaactgcgcctgcgcgagcaggtgggggcgtggccctgcggggcgtggcctgtgcgggcgtcgccatggtgaccggcggcccctccccccagcgcgagccgcctcaggagcgcgagaacc

SEQ ID NO: 296280 - DNA, 122 bp, Homo sapiens
aggaggaggacactggggaggaagatctctgggatggaaaatgaaaatggttgtaactttcgccccattggtttactttaaatccagcctgtagaatgagagagtgttttttgtcgttggtt

SEQ ID NO: 296281 - DNA, 122 bp, Homo sapiens
ctccgcctttagtgacagcaacgacgacactgcctacgcggggtgaagaggcgtcctgctcgctcttccgcaccgtccttcccggttaataaaatgccctgtacgcttcacgtgggtcgggg

SEQ ID NO: 296282 - DNA, 122 bp, Homo sapiens
agatctgaattagaaacattttttcaaattagagcttcaaaatctaatgtgttttggcaccgtctcccaagggcagccagagaaggcctttgaagagctctgtgcagccttggttggagcca

SEQ ID NO: 296283 - DNA, 122 bp, Homo sapiens
aatcctttccttgcttcttctagcttctaatggtggccagcattctctgacttgtggccacgtcactccaatctctgtctctgaggtcacattgcctccttctgtgtcaaatctccctctgc

SEQ ID NO: 296284 - DNA, 122 bp, Homo sapiens
ggtcgggccggctgggccccgggcgcagtggaagaaagggacgggcggtgcccggttgggcgtcctggccagctcaccttgccctggcggctcgccccgcccggcacttgggaggagcaggg

SEQ ID NO: 296285 - DNA, 122 bp, Homo sapiens
tggcacagataaggcctcaataaatggtattgtttgcattatttaaaaatgtatcccagccgggcatggtggctcaagcctgtaatcccagcactttgggaggccgaggcgggcggatcaca

SEQ ID NO: 296286 - DNA, 122 bp, Homo sapiens
gagccgggaaccagacggcttggggtcagtcaggagtcctgggcctgccccacctgcgcccggctcacctgcgctcacctgcgggatcgcagcatccagcctcaatgtccgtcagctgcgcg

SEQ ID NO: 296287 - DNA, 122 bp, Homo sapiens
ttataacaaaattaagatgttagtacaatatcgtgtttcgccgccgggcgcggtggctcacgcctgtaatcccagcactttgggaggccgaggcgggcagatcacaaggtcaggagatcgag

SEQ ID NO: 296288 - DNA, 122 bp, Homo sapiens
aggtgacgctgagcaggctcagggtgaagcccagggagatgcccacggccacgggccctgcgggccgcagcaccgacagcagcagcgatgcccgcatggcgcccggaccgcgggtccccggc

SEQ ID NO: 296289 - DNA, 122 bp, Homo sapiens
cccagcccagggcctgcggggccgagtcgcctcccggcagctgagtggcagcctcggctgcggacccaggcgcagcttcccccagaggccggcgctattaactcccggggcctcctgcggcg

SEQ ID NO: 296290 - DNA, 122 bp, Homo sapiens
tcttttcttcctttttcagacaggccaactgtatttactgattattccccgtccctggttcgtggttggaccatcaggggattggcattcctagggttagtcaggaatgagaaatacagaaa

SEQ ID NO: 296291 - DNA, 122 bp, Homo sapiens
aactaaaatgatttccttctggaatatacttgtagtcttgttaaggtttatgtgtacacacgctggtcacagcaagcagataaaatgccctcatcatttcacaaactattttctactggaaa

SEQ ID NO: 296292 - DNA, 122 bp, Homo sapiens
gagacactgaattgatgcgtctaaaaaaaatagatacaacgggccgggcgcggtggctcacgcctgtaatcccagcactttgggaggccgaggcgggtggatcatgaggtcaggagatcgag

SEQ ID NO: 296293 - DNA, 122 bp, Homo sapiens
ggtggcagcggcggctccctcacgtctctcccgggtgtcctgtcagccagcagtttcccccgggtccgcagcgccgcctccgccgctgctgccaccgcctctcccacatccccggcctccag

SEQ ID NO: 296294 - DNA, 122 bp, Homo sapiens
atatgacttagaggaaaacacaagactgttgttatagttttacaaagtggagcaacttcacgggtgatattgcggagctattgctgaatattatgaaaatgctgcagtttgtcatatgctgt

SEQ ID NO: 296295 - DNA, 122 bp, Homo sapiens
cacttagccggctctaaagatgggtcataatgagagcatttaagagggagcgctctccgccgtgacagggaccggggtaataaggagagcttgattaacgtggtgcacttgggggagagatg

SEQ ID NO: 296296 - DNA, 122 bp, Homo sapiens
cctaatcacaccaatgacagtcaatcaccaccaaaatacacaaactatactttcctgtatcgtcatctcacacctaatatacagtcttggctaattcattatttataaatcttctttcccaa

SEQ ID NO: 296297 - DNA, 122 bp, Homo sapiens
atctctgtgggggtaggagctcggcatgtgtgtattgacagacaggctcatgccctttctcgtggctattttcagctctctggctttatgtttcactttctcttcttaattagatactagaa

SEQ ID NO: 296298 - DNA, 122 bp, Homo sapiens
ccatcccagaagggggcagcagagggaaggtctggcgctgggcagcctctgggctcaagacggaaatccaccaccagtgaagaccagggtcctccctgacttaatgcaccaactgctgagaa

SEQ ID NO: 296299 - DNA, 122 bp, Homo sapiens
agatagcaggagccaggcaccaccggtggcttggtccttactctaagagcaacagaagcacggtagagttttaagtgacaaatgctgacttacgcttttggaagggcccttgggctgccagg

SEQ ID NO: 296300 - DNA, 122 bp, Homo sapiens
aggcaggtgaacttcttctcccgggtgtgagtgcgcacatgacgctccagctcatccgaacgagtgaacctcttgccgcagaagagccagttgcagacgaagggcctctcgcctgtgtgcca

SEQ ID NO: 296301 - DNA, 122 bp, Homo sapiens
tgattcaattatctccctcccacaacatgtgggaattatgggagctacaagatgagatttcgatgtggacaaagccaaaccatatcaatacctttcgagttcttcaccatgattttttcaaa

SEQ ID NO: 296302 - DNA, 122 bp, Homo sapiens
ctctacagattcttccaagcagctggctgagcccacacggacaaacaaagagtctgggcacgaagcggggggaggggagggaaatgccaagtctgcagaggaccccccatctgtactccctg

SEQ ID NO: 296303 - DNA, 122 bp, Homo sapiens
ttcagctggttggttttgtttctgccctatggggtgattgtaaatctaatccctcttcaacgtgacagcttttcaaatactgtaggttaagatccttgctgtgtcttccctgagttttcttt

SEQ ID NO: 296304 - DNA, 122 bp, Homo sapiens
taatgagaggtgccctatggacttcaggactgccacgtagaaaagggattaaattgattccgagtcattgcagacggccagatctgagatagaatgaagttacaagaaggctgaattgtgcc

SEQ ID NO: 296305 - DNA, 122 bp, Homo sapiens
ggagcctcgcgagcagcagctgcccgggccgggccgcagccggagcctgagccgcgcgcgcgtccttcctccgcgccggccgtactcgcctcagcagagtgaaggctgcatttcccagggcc

SEQ ID NO: 296306 - DNA, 122 bp, Homo sapiens
caagatgaggaccaaggtgtggctgcctgactaggaacgctgtgggctggcccaggctctcgccacacatcctgggagaactgccataggccctagaaggagggatgaaaggcgtatgggag

SEQ ID NO: 296307 - DNA, 122 bp, Homo sapiens
acatcaacaaatggacatttgttaagcattccagacgaaggctgcaataccccctgtattcgtccgttctcatgctgctaataaagacatacctgagactgggtaatttataaagaaaagag

SEQ ID NO: 296308 - DNA, 122 bp, Homo sapiens
gaagaagaggagcggaactcccgcacatgacctcccaccctaggagggagggaaggacaccgtcctagggtataacctggcaataaaccgtgcctctcactgtgcctgttgctctagctgtg

SEQ ID NO: 296309 - DNA, 122 bp, Homo sapiens
tccttcggagccgccgtccaggctcgggccgcgcagagtcgcttgtccctcggcggctgccgtgcctccctttacgtggcagctgcgggagcccgccaatccactgcgcccgcatcagcccc

SEQ ID NO: 296310 - DNA, 122 bp, Homo sapiens
ctcgggccgggcgtcattgcagtgcttggcgtgcacggagcgggtggtgttgtcgtgtagcggctgaatgcagcgcacggagcgcacctgcatgcctgtccgcccacaggtctggctacatg

SEQ ID NO: 296311 - DNA, 122 bp, Homo sapiens
tctggggagaatgtgagtccgggtgggtgactggggactttagaaccgggactgcggagacgctgattggcttctctagaacccgacacccaatgggagtgggaattggggacgcgtcatga

SEQ ID NO: 296312 - DNA, 122 bp, Homo sapiens
caataaataacattttattaatcacggttagctctgtctcctttactttcctgcaggtatcgcggtatcttatgatgccaatccgtataaatattcaacaccccaacatttatttggagaac

SEQ ID NO: 296313 - DNA, 122 bp, Homo sapiens
gaaggacctggatggagttcttagcgcccagagtttctgcaaagtgcaggcagaggactccggcttcttaggggagaaagctttttaaaacccaaaggaaaggggatctttctgctggctat

SEQ ID NO: 296314 - DNA, 122 bp, Homo sapiens
ccagccgtgcaagcttgggcaacttagcacacctctcaacatgtgcacagtggggagaaccggacccacctcctagggttgttttaaggatatgtgaggatcaagggagctcatctgtgcag

SEQ ID NO: 296315 - DNA, 122 bp, Homo sapiens
atgggaaggaggcactggtttggggaatgggggactcacccttggcccaggcgctgttggcggcctttctgcccagcccagtgaggagcagagcacgaatcagggtggcctgagtcctgcag

SEQ ID NO: 296316 - DNA, 122 bp, Homo sapiens
cccggcagagccccgggaccccctaattggctgcgggcgctccccggctccgcccgtcgccgcagggcactctggaaactgtagtccccccacaccacgctccgcgagccgcgggctgggct

SEQ ID NO: 296317 - DNA, 122 bp, Homo sapiens
aaaacacaattgcatgtcaacattaaaagcagtagccttgtacggaatggagggaagcggcgctccaggcccctgagttcctgtgttttgttattaggattctaagctcccaatccagttgg

SEQ ID NO: 296318 - DNA, 122 bp, Homo sapiens
ggatccgactcggttggttcggccgccgccgccgaggctgctccgcacctccctggccgccgctctcaagcccgcctccaatgagtagctggttgagacccgcctctagcccagcgcctgct

SEQ ID NO: 296319 - DNA, 122 bp, Homo sapiens
tgccaccgccgggggccagggaacccctggtggccgcaggaagcccactgcagaggggaacggcggctgcagacgcccaggggctgggctgtccccgaaagcccaggagaggcaaagcaacg

SEQ ID NO: 296320 - DNA, 122 bp, Homo sapiens
ggctagcgtgtagggctggcggcggcggcgctcgggtcacctctgggagcggagtgggggcggagcgagacggaagcagctcaggagacttgaggcgtaggctgcggtccccaaggtgaccg

SEQ ID NO: 296321 - DNA, 122 bp, Homo sapiens
gccctccgggagcttcatgtccacttggccagcctggaccaccaggtctgcagaagggagcggaatgcagaggtccgtggtcttgaggtccccctgcatggaggggaggctcacttcggcct

SEQ ID NO: 296322 - DNA, 122 bp, Homo sapiens
atgcctacctctgagggccgacagaaatgtagtaatgaatgctggaaaagccacttcaggcgctacaggattggatgcttttactgaaacctgtcccactcaacaaattttacgattaacag

SEQ ID NO: 296323 - DNA, 122 bp, Homo sapiens
gtggatccccgctgacaatctagaaacaagcaacagaccctctgatgtagccatctgtgccgcgcctctccgcaccgcccgccacgccttggtccctggagaccaccctccagggcaggggc

SEQ ID NO: 296324 - DNA, 122 bp, Homo sapiens
ctgacctagcagtcaacatgaaggctctcattgttctggggcttgtcctcctttctgttacggtccagggcaaggtctttgaaaggtgtgagttggccagaactctgaaaagattgggaatg

SEQ ID NO: 296325 - DNA, 122 bp, Homo sapiens
atacagacaagcaaggggccatttcccacaatcatttccacggaaacaccacgtcggatacgtaagtctgattgcaggacagggactgtgcttcagagatgcagctttcgcagctggacgaa

SEQ ID NO: 296326 - DNA, 122 bp, Homo sapiens
aaaaggggaagatttattaactcaaatgacaaatcagagaacagttgtgcaacaggatctcgggggtgatgcaaattagtaactcacagatggcctgtttactctctgccctttgtgatggg

SEQ ID NO: 296327 - DNA, 122 bp, Homo sapiens
agagaagtccacgttggataaacaaagccagcccagtagtaacctggctgtcacagtgaccgtgtgtccgtcttactgaacctgggtttacgtgactaggatgctgacacaagtgagtttgc

SEQ ID NO: 296328 - DNA, 122 bp, Homo sapiens
cgcgagaattgaccaaacgcagctcctccaatcaggagttcgaggaggtcgtgacgtcaccggggtggccggtagcaatccggtttagttaaccagccactgtaccgtcagcgccgcgcgtt

SEQ ID NO: 296329 - DNA, 122 bp, Homo sapiens
ctcatggggtctccctctgggccaccctgacttgccattctgggcacccacatcctgctgcgtgaccctgtgagtctacaggctcaggccccagcagcagaaccatcctggctctggtcgtg

SEQ ID NO: 296330 - DNA, 122 bp, Homo sapiens
aaccaggtatccattcatatcacatatgcatattcatttcatgaattaagaaattgacagcgttagggatagagtggaagtcaagaattcattcactcaaggccagatgaggtggctcacac

SEQ ID NO: 296331 - DNA, 122 bp, Homo sapiens
accactgagcagcggggctgatcctaacccagttccacgtcccgggagggtgaagagtgacgttgcactgggcctgggtcctgcctccctgctgttctagcacccccagccccctggcccgc

SEQ ID NO: 296332 - DNA, 122 bp, Homo sapiens
ggattacaggcgtgagccaccacgaccccccgggaatgtggtgttctttgcactttctcccggcagaatatgataggggtgtttctttagttgcgcctttgtccgttttgtggtcaggtggt

SEQ ID NO: 296333 - DNA, 122 bp, Homo sapiens
caaactcctgacctcaggtggtccacccacctcggcctcccaaagtgctgagattacagacgtgaggcactgcgcctggcacattcctttaattaactgtgaatttaatactttttaaatac

SEQ ID NO: 296334 - DNA, 122 bp, Homo sapiens
catgtcgtcccctcgcgctactccttgagaacatcgcggagggcccctccgcctgggagccgttttcaaccagccccgttagtggttgggacgtaagcctaacccccgctcatcccccaggt

SEQ ID NO: 296335 - DNA, 122 bp, Homo sapiens
tcccctccatctcagttctttattcagtgatcaggcaggacactgatgaaaggctagtcacggcttccccccatggtatcagtgtggtggcatgtgatgattcacatggggtgtgtttgatc

SEQ ID NO: 296336 - DNA, 122 bp, Homo sapiens
cgagtctatgagccccgagtccatgagccccgagtctatgagccccgagtccatgagccccgagtccatgagccccgagtccatgagccccgagtctatcagccccgagtccatgggccccg

SEQ ID NO: 296337 - DNA, 122 bp, Homo sapiens
cgtagggccgaggaatattcccgagggtcctgaatgtcaacgaagtgcgtttaaagcctccgtcagccttctgtctttggcttttcctgccaggcttctgtaacttctgtgtttttaccctg

SEQ ID NO: 296338 - DNA, 122 bp, Homo sapiens
ggcgcgcggcgctgacagctgagtcggctcgcggcctcccggccccctcggcgcccggcccgaccctggcctggcctgccctgccccggagccatgagccccgggctgctgctgctcggcag

SEQ ID NO: 296339 - DNA, 122 bp, Homo sapiens
ctgggcaagccaataaaggctgcggcgcgcggctgcgcgggactcggccttctgggcgcgcgcgacgtcagtttgagttctgtgttctccccgcccgtgtcccgcccgacccgcgcccgcga

SEQ ID NO: 296340 - DNA, 122 bp, Homo sapiens
catcgcctaccggaagggacgtgcccccgctcccaggtgagtgggaccctgctctctgggcggtttgcgccgcggtctctggcacctcttgttggcagcgtcgccgttgcaggcacagggca

SEQ ID NO: 296341 - DNA, 122 bp, Homo sapiens
caagggagcgaatcagtcccatcgcactggcctggagctgggtggggtgagtgtgggagccgcaggtctgcagcggtcccccagccacactctctgcctgtctccgccacccattgcttggg

SEQ ID NO: 296342 - DNA, 122 bp, Homo sapiens
accaatgagaaatgcccttccccgacgtctttttacctgattggtgcgctcatcagttcccggaatacctttcctacaacagattggccatcgcggtggttggcctcgccccacaaagcgag

SEQ ID NO: 296343 - DNA, 122 bp, Homo sapiens
tgtcaggataagactccccacatctttagttgagtctaagctttctcttcagcagcccagcgctgggcagtgggatgacagcaggaattggccttcccatgatcctgccctgcccacagaat

SEQ ID NO: 296344 - DNA, 122 bp, Homo sapiens
ctcgtggtgcgccgttttttaagctgttctgaaaagcgcaatattcgggtgggagtgacccgattttccaggtgcgtccgtcacccctttctttgactcagaaagggaactccctgacccct

SEQ ID NO: 296345 - DNA, 122 bp, Homo sapiens
gcccccagcctctgtggccctcacattgtcagacactggccgcgggccaccatctggacgcgatcccccgctagggcctccctggtctgggccaaagttggtggccaccttcgcgcgggctg

SEQ ID NO: 296346 - DNA, 122 bp, Homo sapiens
tggggtggggtagggatcaaatactcacttttgggaaacatgggcgaatacagtgggagtcgtgctggaagttacgagcagaggagcctgggtggggacttatattggccttgacggcccgt

SEQ ID NO: 296347 - DNA, 122 bp, Homo sapiens
cccgcccgccgcgtcgcgggggcatgtgagcgggaagcctaggctgccagccgcgaggaccgcacggaggaggagcaggagcgcggagccgcgagccccgagccccgagcccggcgcctggc

SEQ ID NO: 296348 - DNA, 122 bp, Homo sapiens
aaaccaaagaattagtgtgggtcatttctgttcacaagcatctgccttcagtaccatcaacgctactaagattaatttttctctgtggatgatgagaatgatgccaacagacccatgctttc

SEQ ID NO: 296349 - DNA, 122 bp, Homo sapiens
ccacctaccgaacccaccccccaccgaaccaagcctggcggatcctgcttcatcaaaccacgtccactcggtggctcctaactgggccaaagcccgctgcccctccgcaccagctggggtcc

SEQ ID NO: 296350 - DNA, 122 bp, Homo sapiens
cggagccccggagccatggccctgagcgagctggcgctggtccgctggctgcaggagagccgccgctcgcggaagctcatcctgttcatcgtgttcctggcgctgctgctggacaacatgct

SEQ ID NO: 296351 - DNA, 122 bp, Homo sapiens
ggccacacgtgaggcggctctcccctgggcacccagtgggtgtggtaggggtgctgtgcccgtgcaaattgcttgcttcaggctgagcacacacaccagcctgtgggcccttacagtttctc

SEQ ID NO: 296352 - DNA, 122 bp, Homo sapiens
acctgaggtaaaccctattctgagacagcttttttaaactgtcagaagaatgcatgtcttcggtaatgggagggtcgccttcaaccaaagagagaactcaggcaggagaatgcatttgcaag

SEQ ID NO: 296353 - DNA, 122 bp, Homo sapiens
tgaacattatgtatttttttctttaaccctttgccactcccatttcgcagatgaggataccgaggctctgagtcatacagttagtgatttgaaaccagatctttctgactgtaggatctaag

SEQ ID NO: 296354 - DNA, 122 bp, Homo sapiens
caccgcatccccgcagaggtgccagagattctaggaagcctgcacgacaggggagcagcccgttcctcgggccccatgcacgcgaagacattggagccggcccaggcgcctcccctctcccg

SEQ ID NO: 296355 - DNA, 122 bp, Homo sapiens
attgttctgcctggctctgacatggacttttcatctctctcctctctccccacctagccccgtgcattccgattccacagcccccccaaaatcggaggctcgcggagaataaaggagcgtgg

SEQ ID NO: 296356 - DNA, 122 bp, Homo sapiens
gggctgcggccaggcagagggcgaagagtcctagggagatgcctcgggtcttcctcctcccgctgggcagaggcctcatgggcgagcccggggcctcgcgggccggggtgtgtgctggccgc

SEQ ID NO: 296357 - DNA, 122 bp, Homo sapiens
ctggtctgccccatggggcctcttgggtcacccaaactggctgagatatgggaagactgccgctctgtctctaactcctaactgaattgtcgtctgagctgaagaaagctcttcctgaaagg

SEQ ID NO: 296358 - DNA, 122 bp, Homo sapiens
aaacaaatttctaagattagtcagtttccccttgcaactatgaagttggttcagggcctccggctgacccttctctcagtatttccctctcagagctcagctttacatcataggcaagataa

SEQ ID NO: 296359 - DNA, 122 bp, Homo sapiens
cgccggccgcggttccctccctgctgcttactcggcgcccgcgcctcgggccgtcgggagcggagcctcctcgggaccaggtgagcgcctcccggaccccgcaccctggaagccgctcggcc

SEQ ID NO: 296360 - DNA, 122 bp, Homo sapiens
gatcccgtctcccggacgtgaccccggctggtcaggggtcgtcgcggagggcagtgtagccgaggtggcagcgcagggcagcagcagactccgcccctactaaagaattcaagaagacgttc

SEQ ID NO: 296361 - DNA, 122 bp, Homo sapiens
gaaaaaggtgaattcttgaatgaaatgtcagtttttctggaaggaggaatagatgctgggcgggcagccaaccaagagcactgcagtagtccaccctaccctaatcctgggttttgttttct

SEQ ID NO: 296362 - DNA, 122 bp, Homo sapiens
ttaccctggattcacagctgttttccaaacttcccacattgagtccttctgccgaggaaacgcctcccctaatcttctgattttcacaggctcacttccccaattttttgagttgtctctct

SEQ ID NO: 296363 - DNA, 122 bp, Homo sapiens
ggaggaccgccggggcggggatgggcagatcaacgagcaggtggagaagctgcggcggcccgagggcgccagcaacgagagtgagcgggactagggctgcgcctgctgcctccagccctgag

SEQ ID NO: 296364 - DNA, 122 bp, Homo sapiens
cgggcgggcggcctggcccggcagggagatgaggtcccctttcttaacagcaagctaacgcggcggtcccctggagctgctcagcgtcccagcttctaaccagctcctatggaatccaggtg

SEQ ID NO: 296365 - DNA, 122 bp, Homo sapiens
cttcaccaacaggaactatgacctcgactacgactcggtgcagccgtatttctactgcgacgaggaggagaacttctaccagcagcagcagcagagcgagctgcagcccccggcgcccagcg

SEQ ID NO: 296366 - DNA, 122 bp, Homo sapiens
cggcccccaccatcgcaggtgcgagggaggtggctcccaccatcgcaggtgtgagggaggcggccccaccatcgcaggtgcgagggaggctggcccccagcatggcaggtgcgagggaggcg

SEQ ID NO: 296367 - DNA, 122 bp, Homo sapiens
actggcctctgtgccacatttgtgttcagtggatttcactaacattaattcagcaccaagcgtatgtcaaacatagtgttagcccttaagactggtcactcccctcagcaacccgttcatag

SEQ ID NO: 296368 - DNA, 122 bp, Homo sapiens
tgacatcactatgcaggtgtctcgggcaggggctggcgtggctgtcggcgtgacggggcgcggcgcgtgggacgccaagctgacgtcactgtctgtgccggtgtctcgggcgggggccagtg

SEQ ID NO: 296369 - DNA, 122 bp, Homo sapiens
catctcaaggtgctagaagttcccttcctttttcttgattctgtcattcttcctgaccgacggggaagaaaagtcacctcgttgtgataaaagaacctgaattttgctggttagagacactt

SEQ ID NO: 296370 - DNA, 122 bp, Homo sapiens
agtttatccttgcggacaggctcaacccagcggctccttgcttttaagccaccttgctgacgctcctgtctgaaacctccatcctggttcagttttcagctctccaagagcatgggctgttg

SEQ ID NO: 296371 - DNA, 122 bp, Homo sapiens
ctcaggctgaagtgcgtgcgcttctggttcatgctggccaggtgtatccaggtgttgaagcggggatcgtatctggaaatgatagagaaggtgtaacagctttgtcggcggcagctggggac

SEQ ID NO: 296372 - DNA, 122 bp, Homo sapiens
tctacataagacagaagtgagacaccgggttcagggaccaggggcactcatgcctggctccgctgtgcccacggggcctccaccagagaagtgtgagactccgggttcaggaacgaggggca

SEQ ID NO: 296373 - DNA, 122 bp, Homo sapiens
gtgagggagatggcatgggtcccagggaatgaacagacagtgagggccagttcattaaaccgaaagctgaagggacagggtctagtcattctgagaagaccagactttaggggaacttgcag

SEQ ID NO: 296374 - DNA, 122 bp, Homo sapiens
ttatttccggttctgaggacgccgcggaagcgggacgggattggagtgctctgctccggacgcactacgtaggtgggcctgcgggagttctgagtgcgacggcgcaggtctgcaccatggcg

SEQ ID NO: 296375 - DNA, 122 bp, Homo sapiens
gcggccgggtggaggccggcacctactaggaggctgggctggtccgcaggttctcaagcccggctgagcccgggcaagcgtcagagaatcaccagagcagcttgtcgaatacagattcccag

SEQ ID NO: 296376 - DNA, 122 bp, Homo sapiens
ctggcgggaccccccccatccccagctcactgtgacagagtcccctgcacagtcctgggacggctccaggtcgaagtcctggaagacgagcctcacagcaaagccctctggagccttgatgt

SEQ ID NO: 296377 - DNA, 122 bp, Homo sapiens
ttatgtcagcagaagcacagatgctcctgccttgccaaaagccacagggcctgaacaacccgagcatctccagaagcagcctgtgcgatgggagcaccacacagcaggaagactggtggcaa

SEQ ID NO: 296378 - DNA, 122 bp, Homo sapiens
ggtggcaccagaagccggggcggttgcagacttgggtcttctgagcagcacgttcctgtccgctttaactccggctgagagcggctgacggacaggatccgtgtcctctcggggaggcccag

SEQ ID NO: 296379 - DNA, 122 bp, Homo sapiens
tcagatggccctcgggttacctccggggatgatttttgcaggatgacggatttgaacgagcgtgttgcctcttgttctagtcttcagcctgcgttctcgcctgctgtattttctgacaactt

SEQ ID NO: 296380 - DNA, 122 bp, Homo sapiens
tggtcgcggggccgaatcggccgcggggaggggcgccggggcagcggccgggagctgcgccgcattcgcccgggacccctgctcctaggttccctaccccgggacaagagcaccttctgttt

SEQ ID NO: 296381 - DNA, 122 bp, Homo sapiens
tgaagtgctttgagatactcaaagaaaagaaacatgacacagccttttattatttcagatcgtgagaccaggtcagaagggtcgttacgctcatcatgatactactgctttgaataccacac

SEQ ID NO: 296382 - DNA, 122 bp, Homo sapiens
atctgtaatgtcacctgagctacttgaattgctcaacaaatatttattcaacattatgggcgcaggcttgttctgggccctagggatgcagtggtaaataaaagagaagtccctaatgttat

SEQ ID NO: 296383 - DNA, 122 bp, Homo sapiens
cctctgagtagcagacaactgaagaggcgtcttgccggcgtgtcccaataaaacccggtgcgattggctcccgccttaccccatcgcttatgcctattggcttactttgtcaaaccgggctt

SEQ ID NO: 296384 - DNA, 122 bp, Homo sapiens
cccactccaccccctccttaaatggctggctccccagtcctgtgaggagagagcttgatacggggaagccctcttgcccaggggtcagaaagacacggactctggcctggctctgaagcagg

SEQ ID NO: 296385 - DNA, 122 bp, Homo sapiens
agccttctggtcttgctgggccactgcaccacattgggggcgccaggcccggtcaggtggcgccacaggctgcgagcccgctcacgtgcgaactgcctgttttctcagcggatgctgcatcg

SEQ ID NO: 296386 - DNA, 122 bp, Homo sapiens
actgtgaggatgtaaatttctgttgtttaagccagctcatctgtggtattctgctatggccgtcctagctggctaataccatctgcaatccagattgcttatttctgttcttatctgttgat

SEQ ID NO: 296387 - DNA, 122 bp, Homo sapiens
tcgggctccggcaggtccccgaagaggtccatggcggaggctgggtggaggcggcagcagcgacagacactcagcccgcgagcagcggccgggctccacaccccgggcgggcggcagcagcg

SEQ ID NO: 296388 - DNA, 122 bp, Homo sapiens
cgcaggccacccgggggcagagagtgggcgcaaggggtgaacgttcgctgcctccgatcccgggggaaacggagcgccgagaacgtcgacgcccttccgcgcccgtcgggcctgggactgat

SEQ ID NO: 296389 - DNA, 122 bp, Homo sapiens
ttaaatgcttggcccattctgctccttcaggacttggctcaaatgctacctccttacagacgcctccatgacctgccaccctgtggaacatggtgcctcccagttcctggcattagcaagta

SEQ ID NO: 296390 - DNA, 122 bp, Homo sapiens
ttctgatggacaaaggaagcggcgatggccagaatttgcagggacgctaaatgtccaaaacgtatgccttaaggcatttctctccctgatgcgtggattattttggttactagcccttcata

SEQ ID NO: 296391 - DNA, 122 bp, Homo sapiens
tggactaagggatgttcccctaaaccacaccaccccacctcgttcagattctgggaaacccggcacgcacataccctgcacaataacaggcagggtgaggtctctaagccccgaagatcgct

SEQ ID NO: 296392 - DNA, 122 bp, Homo sapiens
cacacgtgttcagcggcaacatcgtccccaggagcccgaggctgacagaactgaagcatccgtcagcggataggtggacgagcggatcgtagtgctgctgcgccacggaatattccgcagcc

SEQ ID NO: 296393 - DNA, 122 bp, Homo sapiens
ggccctggcccgcattgtgtgcggcgggaggcggcccggccattagcatgcggggggcggcgcggcggggctgggagccgcgcgggagccgggctctggctccggggacagggagctgggga

SEQ ID NO: 296394 - DNA, 122 bp, Homo sapiens
ggatggattatactatccactgtttcaggcttctactggggatcttggtatgtatccccccgtggttaagggggaactactgtattttgttaacctccagcactttacacaaaaggggaact

SEQ ID NO: 296395 - DNA, 122 bp, Homo sapiens
caaaaaaaacaaaaaaaacctttctggatctgcctttaggttctgcatgccaggcaggcccgactgcacagggagtgagccgtggcgctcaggacgtccacttcctgggacaggacggccgg

SEQ ID NO: 296396 - DNA, 122 bp, Homo sapiens
tgggcacatcagaggactccaagggggaattccttacattttgctcaacaggagtggctacggacgtctgagtaatctaagcatgaccagcatgggatgaggtgggagagggggactgcctg

SEQ ID NO: 296397 - DNA, 122 bp, Homo sapiens
gccgcctttactatttactcccactgaagccatgatcatccaggccctcagcaatcagcacgtgattctcaactcaccccacctggacgcaccgtggtgagcccaagaaacaagagagacca

SEQ ID NO: 296398 - DNA, 122 bp, Homo sapiens
tcggctgggggaggggcgcgggcgccatagagacctcgggagccgaggcgtggaggagagcgcggacgcgggcgcgcggtgcatgtcacgtgatcgcgccggcttaccttggtgcccatatt

SEQ ID NO: 296399 - DNA, 122 bp, Homo sapiens
gggccaagcaaagggaatgtcctttaagggtgaaacctgaaatccagccccgcatgatcccgcacaggcgagctgcatccgggaggcgcgagcttcagtgcggaggccagtgtcaccttaga

SEQ ID NO: 296400 - DNA, 122 bp, Homo sapiens
agttgtccagggaagcctggacagcctaccccaggcagtgagggagtttctcgagaataacgctgagctgtgtcagcctgatcacatccacatctgtgacggctctgaggaggagaatgggc

SEQ ID NO: 296401 - DNA, 122 bp, Homo sapiens
ataatttacagccatcttggggaaaggtttgggtgtccgctggggaaaggtttgggtgtccgctgggcaaagagttgtttttaataacaatttcattgaaatataattcccataccatacaa

SEQ ID NO: 296402 - DNA, 122 bp, Homo sapiens
tggaacaggagcactaactcacaacaccgatttaaaagaagtcagctgtatcatggagaacgcaagtcaaagaggagttcttttcaagctcaagatgcaatctgctgcttttcctcagcatt

SEQ ID NO: 296403 - DNA, 122 bp, Homo sapiens
tttcattcccatccagatatctcaatcttactgcaaacttaatatatccacagtcctaaacgtatccttctccaaagccctcctccaaatctggtcttcctcctttgtttccagtcttagta

SEQ ID NO: 296404 - DNA, 122 bp, Homo sapiens
tggggagggtcgcgccggcggggtcaagagaacctcctctagggtgggaatcagagcctccgggccgcggtgtttgagggtgagtggaattaatcccgtgatggacgtggggccttctaagg

SEQ ID NO: 296405 - DNA, 122 bp, Homo sapiens
ggctcctcccaggaaatagcgtcaaggaagtgggagggagtggcctcggcctcgcccccgcgccgccttgcacgactgccttgaacacccgggttgttgcttcctttggttaccgacttggt

SEQ ID NO: 296406 - DNA, 122 bp, Homo sapiens
atcctatggtaacagcattgtgaaatgtagaccagggaagctcattagaaaagcagcacccgaggtctttgctgaggtctggttgcctaggtactttctgcctatcatgtacccaaatccga

SEQ ID NO: 296407 - DNA, 122 bp, Homo sapiens
tgtctagatcttgggaagaagacatcagtatgtttgcaggaggatcatgaagcacatgatcgttgcatgaaaaatgttgcttcctgcctgttcaaactgtccaattttggagggtggggtgg

SEQ ID NO: 296408 - DNA, 122 bp, Homo sapiens
ggcgcttcctccctgagagcaattccatctgggttaatggcccagcccatctaatgtgcccggtaatccctctgaagctgcctttgttcgtctcctctggttaatccagccccagcaactga

SEQ ID NO: 296409 - DNA, 122 bp, Homo sapiens
gcctgtgggcgaggactgggaggccaggggttctcggcgaggcggtcccaggaggcggcgcggagccgctgcgaggccgcagggccgggtcgcaagatggccgggccggcctcccgcgcggg

SEQ ID NO: 296410 - DNA, 122 bp, Homo sapiens
tgggtggggttgggttgtggatccataaccaggattagaaccagatgggcacagggcgcgcgcgcgcacacacacacacacacacacacacacacacacacacagacacacacacccctgaa

SEQ ID NO: 296411 - DNA, 122 bp, Homo sapiens
aagtgcacggggcgggcggccgaaccaggcgggcaggcgcacgactctgctcagccaaggcgctggtagaggacggacacagaggctgcttggacgtcaaactctgcaaccaaagggcgccg

SEQ ID NO: 296412 - DNA, 122 bp, Homo sapiens
acccgattctctgcaacaaagatggcaaagtttgcaaggagtgaaaatcatgtaatacttcggggaaatgcaggatgcagctgctgctccagcctgtaaattggactgcactgacattcagt

SEQ ID NO: 296413 - DNA, 122 bp, Homo sapiens
gctccgcccgacccatacctgcccgcgaggctgctccgtcacctcggagccattggcagccgtataggtctctgtgtagccggagcccagcaggtccctggaaaagaagtgctgtgactgcc

SEQ ID NO: 296414 - DNA, 122 bp, Homo sapiens
tgtggagacctttgtaccctgacatggaaagatttccgagacagatgcgtacatgaaaaccgggaagacacaggacagtatgtagaagaaccggcttttcctataagaaggatggaaaaaat

SEQ ID NO: 296415 - DNA, 122 bp, Homo sapiens
gcacgtcctgaggcaagcactggttatgatggctacatacatgactttgagctgaagtaacgcttaggtgttgacaatgatgtgctaattcaactcctctttggagcacaggattaaatatg

SEQ ID NO: 296416 - DNA, 122 bp, Homo sapiens
ttgggggatgattttgtcacccaggggacatttggcaatatctaaagacatttttggggccgggtgtggtggctcatgcctgtaatcccagcactttgggaggccgaggcgggcagatcact

SEQ ID NO: 296417 - DNA, 122 bp, Homo sapiens
ggaaggagaagagaaacgggcaaaaggagatgcagaaaatgacccagtcaaagagtatgacgagagaaatctgagagaacagaatgacatctggaggaaaagagggggccagagagacattc

SEQ ID NO: 296418 - DNA, 122 bp, Homo sapiens
tagcgctgtggcgttagggcctggcaactgccccgtgagcatgaatatcacgacagtaagcgttacccgttaacacaagtcaaacggtgtcgagttcaaaatattgttcccacagccctgga

SEQ ID NO: 296419 - DNA, 122 bp, Homo sapiens
ttactggaaagctgcttcctgaagctccgttgtgctcctggcaggctcgggctcaaagcccgtcaacgcttccccatcactcgcaaaggcagacgactcagcctggcttccagggccctcca

SEQ ID NO: 296420 - DNA, 122 bp, Homo sapiens
tgtgtgtgaccacgagtcagctgggtatgtgtgcttgtgggtatcaggtgcatggctgtgcgtacatgtgtgcgtaagagtcggtgcatttgtgtttcagcgcggctaaggccctgactgag

SEQ ID NO: 296421 - DNA, 122 bp, Homo sapiens
cagccctggagagccagagacagagtctgttgcatccacagcactcagcactgcttgccacgtggtagccattcaataaatagtaaatgctcaaacagtatttgtagatagatggacagatg

SEQ ID NO: 296422 - DNA, 122 bp, Homo sapiens
ccttggagggggacaggtgccaagcaggatgcccttgggtttgctagagagggcagtgctcgtctaggggcccaagcaggcaagggaaggcagactcaacaagggatcaaagggtgcagagg

SEQ ID NO: 296423 - DNA, 122 bp, Homo sapiens
caagaggcagaaagggcactccgggtctgggtcccattctacctagagaaaacatgcaagcgcatattgattgagggctttctacacggggggttttgataccatttgttgcccagaagata

SEQ ID NO: 296424 - DNA, 122 bp, Homo sapiens
atatttaaagcagacaccctgtgagcggctgtggaggcggctctttgttaatatttaacacgagctgggcagttgccgggaaaacagctgtttacaggagagattaaccaatattcatcatt

SEQ ID NO: 296425 - DNA, 122 bp, Homo sapiens
cagcacccgctacacggccccatcaccacgaagctcagacacagaacagcacccgctacacggccccatcaccacgaagctcagacacagaacagcacccgctccacggccccatcaccacg

SEQ ID NO: 296426 - DNA, 122 bp, Homo sapiens
ttacacgcaaggatcagcttagaatgacccctaacacttggtttaaggctctgcttccaacgactttaaatccttaataattttttaacaaggggccccacgttttcattttgtactgggtc

SEQ ID NO: 296427 - DNA, 122 bp, Homo sapiens
gcgccttctgtaagcagcactttgtcactgggacaggttgccagctgctcctacttgactcgagatctgaatccttctcactatttcctctgtctccacttgtaagtggttatttagtattt

SEQ ID NO: 296428 - DNA, 122 bp, Homo sapiens
atgttcagcgtagagtcgctggagcgggcggagctgtgcgagagcctcctcacttgggtacgtgggggccgcgggccggcgggaagaccccctccccccgccacctaccgggaccctccacg

SEQ ID NO: 296429 - DNA, 122 bp, Homo sapiens
tttgtctgagaaaaagcctatattaagttagcaaaggattggctgctgctagttttattacgagaaaagccaggaagcagtgtaattctatctgtcggcttctggttactgtcttggcagat

SEQ ID NO: 296430 - DNA, 122 bp, Homo sapiens
gcaaggagagatgaataaaagagatgaatccacagcttcatgttgtcatgtgatgaaatccgattctgtaaaataaaacgcaatagcaagggactttagtgggcagaactggggaggagatg

SEQ ID NO: 296431 - DNA, 122 bp, Homo sapiens
gaagtacaaataagacttgctcgcagatcccgcaatcccatcaatacgaggcgtaaaagccgggtcctccactggctagggccgaggaggcaagcactcaagctgccacagaggcgaagctt

SEQ ID NO: 296432 - DNA, 122 bp, Homo sapiens
cccaggcgcgcggggaaagatgtgtctgccacaccttttgcgagcccaggaaacttgaaccgctcctgaaaatcctgatattttttcccgctgcagcccgcacgggtcaagcgcgcgggggc

SEQ ID NO: 296433 - DNA, 122 bp, Homo sapiens
tccgcggttggcagaacgtgggaggaagaggacccgcctaactcggggtaggtggggacgcgctgctcactgtggtgaggttgacacttgggccctgggtttcacttgcaggtgctgggcgg

SEQ ID NO: 296434 - DNA, 122 bp, Homo sapiens
ggcgtaggaccctctgagccaggtgtgggatataatcttgtggtgcgccgtttttaaagccggtctgaaaagcgcaatattcgggtgggagtgacccgattttccaggtgagtccgtcaccc

SEQ ID NO: 296435 - DNA, 122 bp, Homo sapiens
acctcccgcgtccattccccgctccctgctttccctctgagtccttggcagtgaacgtgtcgcctttaggtcggggctgggattcccacactgtttctcagagcaggcccaaccctctttga

SEQ ID NO: 296436 - DNA, 122 bp, Homo sapiens
cgttggtgtctgccaagacagaggcccaagcaggccagggcaggcacggctttctcttcccgactatcacacacaggtggaacttaatccatgattccctttatttctgaaacaaatcttta

SEQ ID NO: 296437 - DNA, 122 bp, Homo sapiens
cctggggcaggagggtacagggagttggccctgagcccctctgacctcagagccgaggcgcggcttccactcggcacatgctctacgtgacactcgggggcaggtggcgctcgctgtgcagc

SEQ ID NO: 296438 - DNA, 122 bp, Homo sapiens
ctggtttgcattgtgtggtggtggcatcccccatggagatggatccctcacacaggagtacgcctgggtggagaaaaattaaatgagtctgtctcccaaagtgaaatggaattctgaccttg

SEQ ID NO: 296439 - DNA, 122 bp, Homo sapiens
ctaggtagaagggaagggtcccgcgtgggataccagggcccgggcctggctccctgaagtcgccgagcggaggggtcgcatgggcgttttcatctacagcctccccctgtggctccacgcac

SEQ ID NO: 296440 - DNA, 122 bp, Homo sapiens
ctctggggcagacaccccggtgcctcccgacccctacatcccacaggtggctgccacagccgggcagcccaccccacccagccagaggaaccgcggggacccaggggcctgcctggaaaatc

SEQ ID NO: 296441 - DNA, 122 bp, Homo sapiens
atgaccctgcctggccgctaatgctgaccctgacccccgccccccaggctgctgggctcacggtcctcacgtcatcagcttctgtcacggcccacctgccccaccaccctctccccatgact

SEQ ID NO: 296442 - DNA, 122 bp, Homo sapiens
cgctgccgcttggtgcgcacagacacccacagcaggctgtggcctgggtgctgcttaattcgattgccatttgcctctgtttggtttggttcagtggtgagtcataatgccccaaggaaaag

SEQ ID NO: 296443 - DNA, 122 bp, Homo sapiens
gggtggcagttgttcatctgcagatcctgaaggacatggaccctgtgcctgagattaggacggccgcaccagcctgggtgcaggctccctcaagtgtccttcctcatggacccgcggaccct

SEQ ID NO: 296444 - DNA, 122 bp, Homo sapiens
ggcaatgacgtaacgatctaccaatagtcgccgtctaaaggtgggctctatagaggcgaccggcaagctggaacaccaacctggaaagagagtgagccacaaggaccaattggaagcctgtg

SEQ ID NO: 296445 - DNA, 122 bp, Homo sapiens
acactgttttatatgaacatgtacattagcattattttgcttggattcatcagtttggatcgctatataaaaattaatcggtctatacagcaacggaaggcaataacaaccaaacaaagtat

SEQ ID NO: 296446 - DNA, 122 bp, Homo sapiens
aacccaaaaggaaactcccccacctctctgggagtctgtttctgatgtggcaaccctggacgctggccaaaggcttggcctaacccctggctgcccaccaaactgtgcccaacttgcagtct

SEQ ID NO: 296447 - DNA, 122 bp, Homo sapiens
atgttgtagaggatgctgccctgccactggtggttctcgcccgccatggcccgcggcgcccgtagcccagttctgcccagtggctgcctcctgggacctatttatacctagcgcgcacgcag

SEQ ID NO: 296448 - DNA, 122 bp, Homo sapiens
ggcgaggggcgtgccctcgccgaagagcacagcccaggaggcggggcccggggcaggccgcgctgtcctcagtggggagggcctgagagcaggactaccagcagcccccacgccttctctat

SEQ ID NO: 296449 - DNA, 122 bp, Homo sapiens
aactcaaacaaagcccaagttgatcttgcttcaaggagtccgccacaacaggtccagggacggtggtgcacgcagagcctgtcttacctgcctccaggtgcctagatcaaagggtgcattaa

SEQ ID NO: 296450 - DNA, 122 bp, Homo sapiens
accgggggggaagtacagtcacctaataagttgccggcgcccgcgcccccattggccgtgcgcgtcacgtgcccgtccagcagaacaataacgcgtaaatcactccgcacgctattaatggt

SEQ ID NO: 296451 - DNA, 122 bp, Homo sapiens
ccctttacacagcagagccccaattctgggaagccggggtcaccccgagcctcccttccccgtgacagctcggccggtgcatcaccttccctcgcggaccctttcagcatcaccacgcgtgg

SEQ ID NO: 296452 - DNA, 122 bp, Homo sapiens
taggaccctccgagccaggtgcgggatataatctcctgctgtgcccttttttaaacccgtcggaaaagtgcagtattcgggtgggagtgacccgattttccagatgccgtctgtcacccctt

SEQ ID NO: 296453 - DNA, 122 bp, Homo sapiens
ctcacggagctgcggggcttcccggtgcctgctcagaggccaggcagggcatctccccgccgtgcccgtgcctccccccgggctcctgggagaccccccatctggccttcctttctcattca

SEQ ID NO: 296454 - DNA, 122 bp, Homo sapiens
aatcaccccgctgtgccagcctctccggggcctgacgcttgtacaccacatggggctgggcgtggccaggccgggccggggcactgtccaggggctcaatgaagtagtcctcgttggagagc

SEQ ID NO: 296455 - DNA, 122 bp, Homo sapiens
ctgcagccgaggttgggataaggaaacgaggctttcctgtcaaactaaacctggccgccccggaccccgaagaagcagccaagagttaagacgcaatctgcatgactgacgcacgctccgag

SEQ ID NO: 296456 - DNA, 122 bp, Homo sapiens
caggcttctctctccacacacctgggctttgtcagtgggtgcagtgatcgagggcataaccgggctccatcccaatgctgcctcatccctgcagtcaccccgcacaggtgacgcaggcttca

SEQ ID NO: 296457 - DNA, 122 bp, Homo sapiens
tctgttccattcatgtgaggggctcctggcagccccgacagccccctgagcccgacccagcgctgcaccttaccctctgtgagctacttggagacagggagggggcggcaataccagctgtt

SEQ ID NO: 296458 - DNA, 122 bp, Homo sapiens
gaccccaaggattggatctgggccgcaaccatgatcaccagcctgtcacccctttcccatcgaggccaagtgagtgtagttcaacaaagacatctcgagtcccactctgtgtccttcatcgt

SEQ ID NO: 296459 - DNA, 122 bp, Homo sapiens
acgcacgggagaacaggcgccctccagcccaccgcgccgcgtgcaggcacgcatgctgagcgccagcaccatgctggtgcagtgggagcctcccgaggagcccaacggcctggtgcggggat

SEQ ID NO: 296460 - DNA, 122 bp, Homo sapiens
agaaagaggaaatgcacttaaaaattccgcgtcggagctttgcgggtcttgccttccagtcgcccccagaagacaaccaattcctgcgcattccgctccgctcaccctccttcccagcttct

SEQ ID NO: 296461 - DNA, 122 bp, Homo sapiens
agagaccagaacagtcatctaatttgagtggagttttggagtccgtggtcagatggaattcgattactcatcaggactgaaaagagctctccgtgtggacactgattctctccatgcccctg

SEQ ID NO: 296462 - DNA, 122 bp, Homo sapiens
tcggtcaggcagacagcagcagccacccagggtccagagccagtctctgaggcagccagacggggtcagctagtcagacaacaggctggcctggctcacagcctcctccagcccctctctcg

SEQ ID NO: 296463 - DNA, 122 bp, Homo sapiens
tgaccaataggagcgcgaccctaatagttgctcttgtgacttttcccccttttggacacgcgttagccacttctctcttccaccggtcggtgcgctcctccgttactcacgcgtaaaaacca

SEQ ID NO: 296464 - DNA, 122 bp, Homo sapiens
ccctcccccgggcgtcccctccccctgccccgcccgggccccagcacacccacttctccccgggctggcctggagtgcctccgcccagctccttggcctcccccggctgtgggctccgaccc

SEQ ID NO: 296465 - DNA, 122 bp, Homo sapiens
gcccagagggtctctggtttccctgcgaacccccttccctggtggggaggagccctggaccgaaggagaacacacctggtcttacttgaggctctgccattatcgtggcactttgagcacgg

SEQ ID NO: 296466 - DNA, 122 bp, Homo sapiens
gtcccggtgcctggagggcagggcccctgcggtctggggttggggtttgtgttctggctccgcgcggtggtctggaccgcgcccgccctgcctgggctcccagccggaaggacggagcggtt

SEQ ID NO: 296467 - DNA, 122 bp, Homo sapiens
aaaggagtttttgttgctatctggttgcgtgtggaacctgacggaactgccacggtgagtcgggaacatgttttccaggcctaattgatcagaatgtatccattttcccccagaggtctaaa

SEQ ID NO: 296468 - DNA, 122 bp, Homo sapiens
acaacaacaacaacaacaacaacaacaaaaaccagctgagcagcgcgggccttctggcagcgggtccagctccagggcgccctagggcagcggcgtgcagtgttcgggtaataggacgcaga

SEQ ID NO: 296469 - DNA, 122 bp, Homo sapiens
ttcccctttgtgaggagagcagaccctgcatcatcagcaaccagtgctccctccagcctccgcgcatttcagctggcgctgcagctgctgcacagagacccacagaggccaccctcggaacc

SEQ ID NO: 296470 - DNA, 122 bp, Homo sapiens
cccccgtgcttgcggccgcctgcgctttcgcttcgcgccccctcctccgctggagccacacgtccccgcctccccggggatgcccaagttgcacttgcagaaagtttgagcctggcctgcgc

SEQ ID NO: 296471 - DNA, 122 bp, Homo sapiens
cccagcctccttctcccagatccccttccctgaccctcggaggcccctcaatacctgaatcggggcctgttccatgttgatgtgaacatccacagcagagccgtcactctggggaaagggta

SEQ ID NO: 296472 - DNA, 122 bp, Homo sapiens
tcaggtcggtgaggccaggacagctctgctgtatcccatctcaccccatcccagggggcccggcacctctgtccagcagctgtgcacacctggagtccaaggggcccagatagaggcggacg

SEQ ID NO: 296473 - DNA, 122 bp, Homo sapiens
tgcaaagccagttgcacccaccaaagaggccgcctctgaaaccaaaggtagccaggataccgtagtgttgccccagtggcgctttagaccccagcgtggacttgccgctcacccctaatcct

SEQ ID NO: 296474 - DNA, 122 bp, Homo sapiens
aattcaaattccagctctgtttccagctagctgtgtcatcctgagcaagcttcctaaccacgctgaatctctattttcctttcttcttacctggaggacatagtacctactgcagaaggttt

SEQ ID NO: 296475 - DNA, 122 bp, Homo sapiens
aataattggctttaggactgaagaagccaggtgtcccgagcggggcgaggcctcctccagcgaggctgggtcggggtggcctcctttcctcacatcagggagggaggaactagcagggtggg

SEQ ID NO: 296476 - DNA, 122 bp, Homo sapiens
tgctccggttctgtgccgacctcttccgcctggtgccgttcctcctgttcgtggtggtgccgttcgtggagtttctgctgcctgttgctgtgaaactcttccccaacatgttgccatccaca

SEQ ID NO: 296477 - DNA, 122 bp, Homo sapiens
ggagacggggtgagggggcatcctggcttctagtgggctggggcctagggactagaaaaccgcggagaggaagggtgcgaacgctgagcgccattggagaaattttccaggaggagggatat

SEQ ID NO: 296478 - DNA, 122 bp, Homo sapiens
tcggctcgaaccaggaagcgcttcccttccgatctcccaccccgccccccgccccccacccgcccagccccgccgacccccgccctgcgcacacgcccttggcgggccctggcctcgctctc

SEQ ID NO: 296479 - DNA, 122 bp, Homo sapiens
gataacaccctgcagactctgagcacctgcggccacgcctgcaggcagcagcctcacctgcgctcacgctgcgccctcaccggagcacctgccaacccagcagcccacttcccctaatctcc

SEQ ID NO: 296480 - DNA, 122 bp, Homo sapiens
accgaggaggcccttcccgggagtgcggctgggtggttatgtttataacccaggcagcagcgccacggcaagcggggacaggcgagagggtggtggttacctcggtcggcgttggcgagagc

SEQ ID NO: 296481 - DNA, 122 bp, Homo sapiens
accggcgctgaacgtttgtggcttctccgcagctcgcatgtggaagactctcaccttcttcgtcgcgctccccggggtggcagtcagcatgctgaatgtgtacctgaagtcgcaccacggag

SEQ ID NO: 296482 - DNA, 122 bp, Homo sapiens
gctctccccccggagccggcaggtgcccaggtgagcggggcctgcggaggcagcgaggggcgccggccgggaaccggcagaacgcgtgcagccagaagacaggagagataatacattccctt

SEQ ID NO: 296483 - DNA, 122 bp, Homo sapiens
cagaaaagggcctcccctcccccttaccctggcggtgtttttcagttttattccactttccgcccttttcccttaatgaacacagggctaatctcgggccttgtcgaaggaagaggctgcag

SEQ ID NO: 296484 - DNA, 122 bp, Homo sapiens
gtaccattccattctcacactaactacccagagttagcacagccccaacaggttaagagccgactccttcacaagactgctcccacctcagatgccagccacaaatgttgagtatctccaag

SEQ ID NO: 296485 - DNA, 122 bp, Homo sapiens
tgcccaccctgacgcccgaggatcggggagaggctgggccagggaaaagccgggcgagggcggatcccccgagccgatcccccagaccagctctctccgggcggtgcgaccccacactggac

SEQ ID NO: 296486 - DNA, 122 bp, Homo sapiens
ctgcgaaggtctgcagtatcatttctgaagtcagggagaccaccaacccaccaggaggaacgaacaactccacacgcgccgcctttatgaactgtaacactcaccgcaaacgtctgcagctt

SEQ ID NO: 296487 - DNA, 122 bp, Homo sapiens
tatttgtgtttgtacagagctgagaaacaaagtctaaaatgtcctaccatcaactatggtcgaaagagcttgctatatctgccctgaggcacacagggccgagggaaggacaggcaaagggg

SEQ ID NO: 296488 - DNA, 122 bp, Homo sapiens
ggccgtgctaacatggccagcccaagtagcacgcaacatgtgggatcccccaggagccagcgcagggtcaaggccacagcgactggccacactggctgccccaggccccagagcaggagcag

SEQ ID NO: 296489 - DNA, 122 bp, Homo sapiens
ggtttagctgcgcggagagctcagcgagctcttctgtgtctgtttggggcgtgtgggctccgggagcgtgaggaccgggaagctaggaggctccttcccttctggcggctccctcactgaga

SEQ ID NO: 296490 - DNA, 122 bp, Homo sapiens
atcgccagcaccacagcaactcaataggcttctatttccatccaccaaggccaggacactcgtatgctcccggacgccctctccggcgtcccttcgctgagcccggcctggctagcccgcca

SEQ ID NO: 296491 - DNA, 122 bp, Homo sapiens
ctgggtcggtgtcccagtcggtcacagtcatcggatcctcctgcagagcagtagaaagtccgggaggggcccgtgcccatggctccaggaaaggagcggccaggtacctgccaggggagacc

SEQ ID NO: 296492 - DNA, 122 bp, Homo sapiens
gtgcagaaacctacccaggcccacagagcacctgccagaggcccagcccccaggggaaggcgcaggagcccgtgagcttcgagccatattcaaggtcagccagactgccctgaacagagctg

SEQ ID NO: 296493 - DNA, 122 bp, Homo sapiens
ggaagaagacacaattgtcaccgtgagcttttcaattactcctggagactaagtgtgagacgcagtagtgcaggatgattggattacgcaaaacgagacagatgccatctgtgagccacgcg

SEQ ID NO: 296494 - DNA, 122 bp, Homo sapiens
atgtggtacccaaaacattaaatgacaacagtcatttaatggctaaaatgtgtgcaagtacggattccaaaatcaactgtgtgattctcaaagagttggacattattaaaggtaatcattct

SEQ ID NO: 296495 - DNA, 122 bp, Homo sapiens
gaaaagtcagtgggttgaggcgcgggaggtggatgcagccgggccactcctaggtggccccgcggtgcgcatgggacagagctccgaccgcgccgggacgcagcattaggccgctggtggtc

SEQ ID NO: 296496 - DNA, 122 bp, Homo sapiens
ataactttgtcttgtcaccatcagggtctaattggacaaatgcaagtgaatacatttaggcgaataaacttgatgtggtggtgaaatttctctggcttgaagatttgccttagcgttggtat

SEQ ID NO: 296497 - DNA, 122 bp, Homo sapiens
ctgagaggagctctttaattccgggaggtgtgcgactagcggatcagcgggctggctttccgtgctgtgcggagcctttgggcggcggtcgtcttggaccggaggattccaagggctcgggt

SEQ ID NO: 296498 - DNA, 122 bp, Homo sapiens
ggagttgcggttggacaaaacctatttgttggttctggaatggtagggccctactgggcccgccctgccttggcctcctctgcagttgtaggtctgccccttgtagtggggaggagaaactg

SEQ ID NO: 296499 - DNA, 122 bp, Homo sapiens
agggtgtgtcctggacacaaagccactggcagacgcttccccaggagtctgcctaccttgcgcgtgccctggtggcacggacctggggagctgaaagggcaacacttacagaactccacaaa

SEQ ID NO: 296500 - DNA, 122 bp, Homo sapiens
ccccgacaccgccccctcccccggccctgggcttccagtccctgacagtccctgggacgccgccccacaacgcccgccctctctggaccctaggacggccccgggcacctgcatatgatgtg

SEQ ID NO: 296501 - DNA, 122 bp, Homo sapiens
tgatccttactccgtgagcgctgggcgggccgggttgtgttcatgttggtgaacccgcttcgttcttgcccgcgtggatggtccgtggactccgggaaaaccttctcgtggctcaaagtcca

SEQ ID NO: 296502 - DNA, 122 bp, Homo sapiens
cccgccggtggtgctccgggcattaggaacgtctctgctctcctacgatcgctgaggtatcggacagtcagtgcccgttgccaacacggagggaacgggccgagactgcgggcaacacgtgg

SEQ ID NO: 296503 - DNA, 122 bp, Homo sapiens
actttccaaattcagcacagaaatggctcagccccacctcttccagtgaaaccgaaacagcgcctgtgcaaactccacgcctattctcctcacagtgacccaccccgcccccaccaaggtgc

SEQ ID NO: 296504 - DNA, 122 bp, Homo sapiens
ctcccgggtctcctttggcctggggtaacccgaggtgcagagctgagaatgaggcgatttcggaggatggagaaatagccccgagtcccgtggaaaatgaggccggcggacttgctgcagct

SEQ ID NO: 296505 - DNA, 122 bp, Homo sapiens
ggcctctcccacctctgtggcagcctgaatgcccagggcctgtggccggccagcatgagccgttaggatggagttgagctgcaaggaacagaaccagcctccccacagtagtggctaagatc

SEQ ID NO: 296506 - DNA, 122 bp, Homo sapiens
gctggtgcagcctccccgcctctgaaataccgtcctccaggtattttctggggacaaagacggcgttttttgttagcctcctgtgaaagtaatatttgtgggaaatcttagttggaactgta

SEQ ID NO: 296507 - DNA, 122 bp, Homo sapiens
tgtactcctgcgggcctgggtgaagccgacccagcagaaagggtgcgcagcagcggccagcgagactgggacctgaactccccatctcccgcacacagaagagcgtactgtggctctttgga

SEQ ID NO: 296508 - DNA, 122 bp, Homo sapiens
cgtccagatgtgtggatgatacgcacacgattgctgatcactgccatgctttattaccgccgagatgtgtggatgatacgcacacgatcgctgatcactgccatgctttattaccgccgaga

SEQ ID NO: 296509 - DNA, 122 bp, Homo sapiens
aagacctggcctccgcctcggagtgggagtgggtctgggagctgagcgcagagctcagagcgccctctgtccccgcccgggcgtcgaggtcacccagcaagcgcagatcggggtgaggctct

SEQ ID NO: 296510 - DNA, 122 bp, Homo sapiens
acgtgtcgaggcagcaagtctaggcggcagtggcaaagcctactctgttgttgcccaagtcgtagacggaatagtaggacctgaggaagacatccccgaggatccacaggggctggccgttc

SEQ ID NO: 296511 - DNA, 122 bp, Homo sapiens
aaagaccgtagtgagtgagtgaccccaatctgtgagcattgcactgatagagaagttccacgagatggcagcatcggcccatgagccttatgcctggcgctctccgctccgcccgtcgcacc

SEQ ID NO: 296512 - DNA, 122 bp, Homo sapiens
gcccaggcccctcgggaactgttcacactgggctgtctagtaaaaatcagctagacaagtcgcctaactgccgttctcttgtgtttacaagttctgagttgtagggcttggaattctttgct

SEQ ID NO: 296513 - DNA, 122 bp, Homo sapiens
tggcggcgcgtggcacccgtgttggccgtggcggcggtggtggggatggctgcgcttccgcgtcagccgagagctcaggatctctaagaccaagaagctggtgcgatcgcgggcgcccagac

SEQ ID NO: 296514 - DNA, 122 bp, Homo sapiens
taaagtcaaaagtggcagcaaaggaggaattatatttgtcaccgcctctctgtataaacacgccactaatggtgtcattattcattatcatgcaaaaaagtgggggtggcttcctttgtgcc

SEQ ID NO: 296515 - DNA, 122 bp, Homo sapiens
gtcctgtccccaggttttcaataaatgggagttgaactgcctgcattttgccggggaccgcgatgcaaaccaaagcgacgcagcagccgtgtggaagcattcacggagagaagggacggggc

SEQ ID NO: 296516 - DNA, 122 bp, Homo sapiens
tattactgcggacacttatgtaacctggggtgtatataggagcctggctgaggacacactcgccagcctgtgctttgccacctgagcgccgctccctctcaggatgaaggtgacggtggtga

SEQ ID NO: 296517 - DNA, 122 bp, Homo sapiens
ggcccgaggtgtggaccagatggagcacttggtgggtggtgctggggggccccctggtgccgtgggctgggccagtggggctggtggggctggcgtccaggccgagctggcccagggtggag

SEQ ID NO: 296518 - DNA, 122 bp, Homo sapiens
aaaggctgcgcgggagaagccgctgttagcatctgccagggtgaccctttacagaaactgcgtcagcctgaggacgcagggacaggctgtgcggagaagccgctgttagcatccgtcagggt

SEQ ID NO: 296519 - DNA, 122 bp, Homo sapiens
accacctcctcttcctctggaacaagggcttcccctggaagctgctgcagtggtttccaccggcccttaaataaattctgaagtaatcacgtctttgctctcctcctcacgcacacgcgccc

SEQ ID NO: 296520 - DNA, 122 bp, Homo sapiens
ctaggtttgtgtaaatacactctatgacgttcacacggcgttgaaatcgctaaacatgcacgtgtcagaacatttccccgtagtgacacctcacgtgactgcattggtacctctctcatagt

SEQ ID NO: 296521 - DNA, 122 bp, Homo sapiens
ttcaagtgagaggggaaatcagcaaccaaatagatgtggttcttgagggatatctgtgcccgctacttgtctcgatcttggttaggttgatgctaattttcctaaagcattttttaggcaat

SEQ ID NO: 296522 - DNA, 122 bp, Homo sapiens
ctttgacactttttaaggttgatagaaaattattagtgtacctatttcatgacctgccatcgcctaaaaggaagtcacctaataaagcaccaatttaaaaccatatttttgctactcctatt

SEQ ID NO: 296523 - DNA, 122 bp, Homo sapiens
ttatgtccctatagttgcaagagcaccctcaacccaaaatacctgtgctggagacgccggcgatgttgctgggctcgctgatcagatcctgcatgacggccagaacccggaactcataccac

SEQ ID NO: 296524 - DNA, 122 bp, Homo sapiens
ctccgtaggcaccaactgcaaggacccctccccctgcgggcgctcccatggcacagttcgcgttcgagagtgacctgcactcgctgcttcagctggatgcacccatccccaatgcaccccct

SEQ ID NO: 296525 - DNA, 122 bp, Homo sapiens
gcataaaagatgagtaactgaatggcatcccgggtcctgtagccacgccctccagatcgccgccgcaaaggacctggaacctcaggggcccactgtatgccatgaagaaggcgcagtcgctg

SEQ ID NO: 296526 - DNA, 122 bp, Homo sapiens
gaattccagccagccaacagtaaaagccagagtctgcctgagagagaattgagctcccagcgggaggatgactgttacctctgtggttcagttgactcagccattctagcttgcggctttgg

SEQ ID NO: 296527 - DNA, 122 bp, Homo sapiens
aaaggcggccgatgagatggagtgcttccttcacctgtggtgggtctgtatccatgaaatcgcccactcacaatcgctttttgtagctactggaagcactaggcgtctgacctgccatcatc

SEQ ID NO: 296528 - DNA, 122 bp, Homo sapiens
ggagaaacggagccccaaggtaaagacgggggctcgggagacaaaggagcctcgaaactccgatagggaaagacacattcccgcatggagggtcaggaatctcaagggacggggattgcagc

SEQ ID NO: 296529 - DNA, 122 bp, Homo sapiens
ccccttaccactgctattcatcatcttactcctacagataccccctcttcgtggtggcaccgggcactagtaactcatggctgtaaagaagagctgagaacaaaacaggaagaaaagaggtt

SEQ ID NO: 296530 - DNA, 122 bp, Homo sapiens
tagtcacaactgcttctcctgttcttgttcttatatgtaggtggtggcaggaaggccaaacgtagaacaacagatatgtctgtgtgttttcagaggtaaatggtagaaccatatcagaaaag

SEQ ID NO: 296531 - DNA, 122 bp, Homo sapiens
agcccaaatgaatatagtgccacttgtaattcccagtgtagcttacttttagaaatacaacgtataatacttacttttgaagagccacactaaaacttgtgggcttcctgagaacaaagccc

SEQ ID NO: 296532 - DNA, 122 bp, Homo sapiens
acgccaactccagaactgcccaaaacttggaagtatccccagtgcccatgaagagtgggacggacactcagcactgacacggaggccccggcagccgccccgcgaagagtgggacagacact

SEQ ID NO: 296533 - DNA, 122 bp, Homo sapiens
ggcggccccgaggttccccgggctgggggatgcgggagggtgggtctccggcgagcagcgcgcggccaagggcgctgccacgggggcggcgcggggggagcagcggggccccagcgcgtcga

SEQ ID NO: 296534 - DNA, 122 bp, Homo sapiens
ggtctcagtggccttgggctctgcttgggccgtggcttgaaggttggaggtgtcgcggtgcgcttgggttttttcgctttctttcaaacgcttgcttcctggcgctccccaccccccagcgt

SEQ ID NO: 296535 - DNA, 122 bp, Homo sapiens
tgcgcaggcgctctggccgaaaaggccttctgggatttgtagttctttgaacaggagtaccgtttgtattctgaccagaccaagcggttatcaaggaataatctcttcagctagcaacaaat

SEQ ID NO: 296536 - DNA, 122 bp, Homo sapiens
tgacagcagaaactccaccacctcctcatgctcattcttgcaggcctcgtagagggcagacgcgttgtcgctggcctgcgtgttgatgtcagcacctggggaaggagaagagatcagcaagt

SEQ ID NO: 296537 - DNA, 122 bp, Homo sapiens
atgaggcatccagtttagcaacagcagagatgacgactctgcgattctgagagtccctggcgagcccgggctagcgaaaagtgggggcagaacgaactacatctcccatcgtgccaggaggc

SEQ ID NO: 296538 - DNA, 122 bp, Homo sapiens
tgagcctccagccgcgcacgcgcaccggcccgcgcccagcctccgctaggggaccccctccgtggcttcccaccgggttgttccaggcctcagcttcgccgaaaggcctcaccacctccgac

SEQ ID NO: 296539 - DNA, 122 bp, Homo sapiens
ccagtggactgaagcacagctaagagttcctacctgggcccactggcccagttccctccccgccacccccaggtctctccagatggctcgatgaatgcaagatgcttccttctgtaatggat

SEQ ID NO: 296540 - DNA, 122 bp, Homo sapiens
ccaagggatgcctggagccaccggaggctggaaaagatgaggaaggatcctcccctagaacgttcagagggaacatggccctgctgacaccttaatttcagacttctggcctctaggggtat

SEQ ID NO: 296541 - DNA, 122 bp, Homo sapiens
catcacagcttattcagaaattaaatacttgtgcttcgccaccacaaacgcaagtgctgccgcttatcttttttctcacgaaaatgtgaccttgggctcagaatggtgctgacccaacgtct

SEQ ID NO: 296542 - DNA, 122 bp, Homo sapiens
cagacggggcggctgccgggcagaggggctcctcacttcttagacagggtggctgctgggcggagggtctcctcacttctcagatggggtggctgggcagagacgctccccacctcccagac

SEQ ID NO: 296543 - DNA, 122 bp, Homo sapiens
caggcagcaccgtcagagctggcgccacaccgcaggtttgcgcgatttcaaactcgacaccgcggagccaccagaccccgacatgcctggggttttccaggctgaacccaggccgagcggac

SEQ ID NO: 296544 - DNA, 122 bp, Homo sapiens
ggctgtacctcctccatcagtgtgcaggctccttggggacagggtaggtggaagcaccaccgctctgtgacgtcaggagctccttccctcaaggcagacaaccttcacagcccatctctaag

SEQ ID NO: 296545 - DNA, 122 bp, Homo sapiens
aacgtgtgctgctcattgcttcctcggcctcacagccttctagatgtcccaaagaaacctcgagtcatcataacatctactgaatttcccaaccatccccagcactactgctcggcttgggc

SEQ ID NO: 296546 - DNA, 122 bp, Homo sapiens
gccgtctgggtcactaatggtgtcccagttctgggctcttgctgtcaggggctttagagacgctcatctctccttgaaagcaggggtttgtgctgctttaaagtagatggaggaggtgggaa

SEQ ID NO: 296547 - DNA, 122 bp, Homo sapiens
gtgtgagctgggtgctgggcgccatcaggacagtgctcttcacctgcctcttgtagaactcgtccatggcctctgtgatattctcttggtaattccccccacccccgtcacacaaagatgaa

SEQ ID NO: 296548 - DNA, 122 bp, Homo sapiens
gtagtgagaggtggtagggaagcagaggtcgcagctacaaaataataacttgctcatctccgtttctccgctatcttatgagcccttgtggggctgggacagaattttattcatctttctat

SEQ ID NO: 296549 - DNA, 122 bp, Homo sapiens
tttatttattgcttggccgccctgcacccagatccttcacgccgttctggttcccactcccgccattctggttcctactcccaaaggctggggacgtgtctttgagtcctggcccgcggaaa

SEQ ID NO: 296550 - DNA, 122 bp, Homo sapiens
ctaaacttctctgatcctgttctgccctctgaagaaggggaaaataatacatcctgtgtacgattgttattgggaatcaatgagctagtgtatggaagaggctgcatgtggttcttggtaca

SEQ ID NO: 296551 - DNA, 122 bp, Homo sapiens
ggtcctgccaggtggtccttctatgtaatttctccctttctccctaaggttaaggggtgacgcccagctgctgctaacctcggggcactgcaacatcccttgttggcttccctaaaccctct

SEQ ID NO: 296552 - DNA, 122 bp, Homo sapiens
catccatctttcctctgccctctgtgtgcccactagagccaggccctggaggtccatgtgcggtgatgttgtccctgctgtccaggcatacagcctgctgggggagcaggagagagaagcat

SEQ ID NO: 296553 - DNA, 122 bp, Homo sapiens
catcgatttcccggatgaaactctgtcattcatcaaatctcatcccctgatggactctgccgttccacccattgccgatgagccctggttcacaaagactcgggtcaggtgagattgtgtgt

SEQ ID NO: 296554 - DNA, 122 bp, Homo sapiens
cggggcgaccgccgcgggagagcgcgtcgctattggctgtggggggtgcctgttgctggacggcacattcggttggtcagcgcagccgcagactccgcccacaatcccgggccgcgctctgg

SEQ ID NO: 296555 - DNA, 122 bp, Homo sapiens
tttcgcagtggccagaaaacgaatgtcacctccccgggtgccttataatcgctagcccttcgggggcaattcttcacgaaggaaaaagtgatcgtacactcccacattgaagatcgtaaagg

SEQ ID NO: 296556 - DNA, 122 bp, Homo sapiens
tttgttccttctccccagatgtggtgaacaattcctctccggcactgggaggcaccttcccgccagccccctggtggccgcctggcccacctcccaccaacttcagcagcttgggtgagcaa

SEQ ID NO: 296557 - DNA, 122 bp, Homo sapiens
cttggatgtgaaagtgcttcataaattccaccttgctgtgcaacttaaaaaaaaaaagtacggtcgtttaggttttcgaggtgcccaaagcaatgcgtcataagcctatttttgtctccgtg

SEQ ID NO: 296558 - DNA, 122 bp, Homo sapiens
gtcacaggcgggagctgacaccacaatgctactgacactatcgctgggggaggcgattggcgcgcgccaggccgggggcgggaggaggccgcgggttgagcgagcggagagagagcgccacc

SEQ ID NO: 296559 - DNA, 122 bp, Homo sapiens
aaatacttggagactagaaatgtgttcctctggaaaggagctgcaaaaataacaggaggccgatttagcttacagagtttgggctatgacttgcaacagtttagggggcaacaaacatagtg

SEQ ID NO: 296560 - DNA, 122 bp, Homo sapiens
cctctctagtatctcccagaagaacttacttaatgggtcggcagcagtcaattatactaacgtgtaaaaagaagcaatgtgcttaatatagcatcataaaatgttagaatcagaagagactg

SEQ ID NO: 296561 - DNA, 122 bp, Homo sapiens
aatctattttcattcatctcctattctggtctgtagccttgattccaaccattgaatgcacggagacagcccagtggcttgtcagattggtaaataatgacacctggtggataaatgttaca

SEQ ID NO: 296562 - DNA, 122 bp, Homo sapiens
cagtgagtcgtagatgattcctccagatcttgacgaggcccacaggcccttgtttaagaacgtcgcttgctgctttgctgcttctatggggcacattctggtgataaaggccagctgttttt

SEQ ID NO: 296563 - DNA, 122 bp, Homo sapiens
tagcatgaggaagcctggacgggacagccagcagtcctctttatatggtgccatcaagcacggcaaagtggcttatccacctccgcaacactcccagtgcaactgtctgaacgcacacatgc

SEQ ID NO: 296564 - DNA, 122 bp, Homo sapiens
ccaagtctcctccgcgactcccaaatacagcccccacccccacccacccactgcaagcctcgactgctgaaaagatgctcgagaagagcagcccgcaagcacccaccacatccattaacaaa

SEQ ID NO: 296565 - DNA, 122 bp, Homo sapiens
ccctaccctgccctccccctcccccaccttctacctggaagacgtcctgcctccctcgcgcgccccacctagcgcgcgcctaaccctccagcgtccttgagctcccatcgggcacgcgccta

SEQ ID NO: 296566 - DNA, 122 bp, Homo sapiens
aggcactcggtgaggctccgtggctcctggtcctccaggtcctctggcagctggaagttgcggtccagcacctcggccgcctcctgccagttggcgaagcaggcggtgcccaggcgctggat

SEQ ID NO: 296567 - DNA, 122 bp, Homo sapiens
ctgataaattaagaggcaggtcatcattgattacacccgtactgatgcagatgaggtccccgtaccgtgcctcagcctgtaatcccagcacttcgggaggccgaggcgggcggatcacctga

SEQ ID NO: 296568 - DNA, 122 bp, Homo sapiens
cttccttgaagagctggagattgttcaaagggcactagaccccggctaagggctcctgggcgctcggagcttccttgggagagagcactcccaggactggtcacctgggcagcttcttttct

SEQ ID NO: 296569 - DNA, 122 bp, Homo sapiens
gtctttacactgtaggagcaacatttgttctgtgtactgtgtgatcacctgcccacatgccgtttacctaaaatgaagggagcagacattgcccagggtgctcagagacctgacttctgcca

SEQ ID NO: 296570 - DNA, 122 bp, Homo sapiens
tgaggcacacgtctgcacctcttgccatggaaggttggcttgtcttctaaaaatcgtatccgaggaagattctaccacttcctcgataaaccactgacagccttgaagttttcttcatgcct

SEQ ID NO: 296571 - DNA, 122 bp, Homo sapiens
ctggctggccacccaggtattggcaaaagtgactgttgggctgctggcccggcccccgcccgccgtccctggagcactcacgatgcggtccggcggcggcgtgctccggatgaagcacttga

SEQ ID NO: 296572 - DNA, 122 bp, Homo sapiens
cagcctgggttacagagtgagaccctgtctcaaaaaaaacaaaaagacttacccactagacgctgattaggtctttgaagaggtgagaccacgccgggcatagtggctcacgcctgtaatcc

SEQ ID NO: 296573 - DNA, 122 bp, Homo sapiens
gaccagctgcacctgctcagtgtctggcagttcccaccaattccaaatcagatgatgcaccgcctcacaggtagggatgcaggagagactggcttgctgagaaactgtcaagctggtcaaat

SEQ ID NO: 296574 - DNA, 122 bp, Homo sapiens
ataagacttttatatatctttctctgaatgagattgggagtgacagcaggacttgcacaacgaataacaaaatgtggcttttgttttaaaaggagtgttctggttttacatagagaaaagac

SEQ ID NO: 296575 - DNA, 122 bp, Homo sapiens
agcactaggcaaagtcgtggccatgtgattggctcccaatgctgggctggggctggcaaccgccctccggcctccacgcagcgcctgtgaaactcttcattcagcagaactggggaccagat

SEQ ID NO: 296576 - DNA, 122 bp, Homo sapiens
agccttcctcccctgcctgggtgagctcagtttgggagccagagctgggcctgacaaagccggtttcctcttagcagcttctctcattctggccctaatgtgggaccagggttccttgccca

SEQ ID NO: 296577 - DNA, 122 bp, Homo sapiens
tcgtcgggggatttcatgtcgtgccgagcgcgggactgggagcggcaatgcgggcggtgacggcgccggctctgctcctcgtggccccggcgcggcctttatagctgcccctccccgccccg

SEQ ID NO: 296578 - DNA, 122 bp, Homo sapiens
cccgccttcacctgggcggggagactcttgcgcaagggagaggcgggcatttctcaaacccgaccaaaccagaaaagggaacgtcagccttccaaactcctggggaagggtcttgcctttgt

SEQ ID NO: 296579 - DNA, 122 bp, Homo sapiens
acccaccaggaagaacaaacaactctagacgcggtgccttaaaagctctaacactcaccacgaaggtctgcagcttcagtcttgaaccaccgagaccacaaacccaccagaagaaaaaaaaa

SEQ ID NO: 296580 - DNA, 122 bp, Homo sapiens
caggaacagatagctgtgaaaccatcccagagttaagtgagagtgggggctttccaggaacgcagaatgtgtgtgtgaccctagtcagcaaatggctgctaggtcctactttgaatttaggc

SEQ ID NO: 296581 - DNA, 122 bp, Homo sapiens
gactcaaattgaggcccgtttgctggcaaaccagttctatctttaaattttacaattacacgattccttaccaggtattattctgcaaacagcataaacaatagaggcattgaagctgagaa

SEQ ID NO: 296582 - DNA, 122 bp, Homo sapiens
gagataggctgaaagcagctcgcttttaggcggcgacgcaaacacacgtagccagctgagcgacagcaagcaaccaaatggctttgctggaggccccctgcgtgcacgggtaaagctcgttg

SEQ ID NO: 296583 - DNA, 122 bp, Homo sapiens
gagtgtgcgggtggcagggagggaggcgagccagggcccgggcccgagctccgtgtgccgcggccctgtcaaagcggcctcctcgcgcctcagccctctagcgccagcgttttgtcacatct

SEQ ID NO: 296584 - DNA, 122 bp, Homo sapiens
cccagcttcaaaatagccagtgggaggtgcattaactggcgatgctttggggacagctcccgccatccacagccctggccatcttagtttctttcagttcatcccatcaaatgccctccttt

SEQ ID NO: 296585 - DNA, 122 bp, Homo sapiens
tgctttacattaccatatcctatgaggcctttagaaacttgcccaaggttcacactacaccgagggcagagctggactccagagctcttgctcttatgagaccctgactagcagaacaggtt

SEQ ID NO: 296586 - DNA, 122 bp, Homo sapiens
cagtacgacccccgtgggccccacgcaggggctgctgggaaggcacttttgtccgtttctcggccacgccattcttttttccttctacaagtgactcgacctcctctttcaagtcttatctt

SEQ ID NO: 296587 - DNA, 122 bp, Homo sapiens
cttctttaggccttgttactgtgatgggggaaatactccaaagtgccaggaaaccctgcccgggcagggagcaggacttctcagtatcccagggattcggatctcagccccctgcagccaat

SEQ ID NO: 296588 - DNA, 122 bp, Homo sapiens
tgattggtgatggctcaagtgtgttaatgtgtgtgtgccggcgcccggcctcgcctccaccgctcctcactggcccattagcgaagcctgacctctgtcatcatcctccagcaaaacacttc

SEQ ID NO: 296589 - DNA, 122 bp, Homo sapiens
aaatctatctatggacttgattctgtagagcaattagtggacttaagtagctattttagacgtgttagtgaaacagatttttttcatctgtagaggatgaaaaggacaccatatctggagct

SEQ ID NO: 296590 - DNA, 122 bp, Homo sapiens
gagagggtggcggtgggacaataggcgtggcttgagctctgatttccaactccaccagcacgtttttaattccccctggctgctttgcatgtgctgggcatgggctcagtatgtttgcacac

SEQ ID NO: 296591 - DNA, 122 bp, Homo sapiens
agagcaacgcccagcgcgtgccaggccccgagcaggggaggcgaacgccgcgcctcccgccggcgctgcagagggcacctgttcagccagggcctgcagcccctcgcctgccgccagagcag

SEQ ID NO: 296592 - DNA, 122 bp, Homo sapiens
tctgttcatttgccctgaatccaactgcaggctgtggtggagaaacaactgtggaaggaacggggagtgaggagacatgagctgagccgggaggccttccttagggaggtgtggcagtggaa

SEQ ID NO: 296593 - DNA, 122 bp, Homo sapiens
cactctggggggccgggcgggggctggagggcacccaaaagcagcagagcctcctcacctcgtggctccttggcccgcggaggctcccgcttgcgccgtttccgagacggcttcacccatgg

SEQ ID NO: 296594 - DNA, 122 bp, Homo sapiens
tccgcctgatccgcgcgagcggggccgaaagccgggtcgggggcgcggcctggccacctgcgggcccctctgggccccgctgcctccttcgctgttcgccgtcccggctccggcgacagccg

SEQ ID NO: 296595 - DNA, 122 bp, Homo sapiens
gcccccaccccgcagctctgccccgcctcgcctctctgcggcaacgcccccctcttctcgcgacaccaaccagtcccacagctcagctgcgcccccttaaggcattgccccttcctcaccca

SEQ ID NO: 296596 - DNA, 122 bp, Homo sapiens
gcgcggcagcctgaggggctcgccgggaaatgtggtttagcggccctcacctccgcggggcgcaaaccctgcagctccggggcaggctgcggggcgcgcgggccgcactttaaaggaatctc

SEQ ID NO: 296597 - DNA, 122 bp, Homo sapiens
tgacacaggaagtgggcgcatagcacttgctgtggaaatctgtgcctgcccccctgcctacgctggtgactcttgtcaggtaggaagttttcccatccgcaacatttccctagggagctcct

SEQ ID NO: 296598 - DNA, 122 bp, Homo sapiens
cgtccaaagccagggtcaggcagcctcgggtatggttggctcagggtcctgttcccaggacgctcctgccccgggtggccccgagctggtccggcctcgcgttgaggggtccagtggtttaa

SEQ ID NO: 296599 - DNA, 122 bp, Homo sapiens
ggtgaggtggatggggttaatctggaggagatccgagaatttgccaaagcttttaaaatccggcgcctgtcccttggcctgacccagactcaggtgggacaggctctcagtgctacagaggg

SEQ ID NO: 296600 - DNA, 122 bp, Homo sapiens
cccgcagagttgccgctggaggaccgaaagttttgcaggcagcccttgcttccagcttgtcgctctctccccgcgtccctgtcgcccaacgcgaggcgcccccgctggggtcccgacggctt

SEQ ID NO: 296601 - DNA, 122 bp, Homo sapiens
tcttttctttttttttttcttagacatagtttcacggtactcgtgagaatgtgttacattcgtataaccaaatcagggtaattggtatatccatcaccctaaatatttatctcttctttatg

SEQ ID NO: 296602 - DNA, 122 bp, Homo sapiens
tccttaccctccctcttcatgccagtggccaggcacttctgatagcggcagtactgacagcggttccgctggcgcttgtccactgtgcagtctttgttgtcccggcaagagtatgtaaggtc

SEQ ID NO: 296603 - DNA, 122 bp, Homo sapiens
tggagagacaaaaaaggaggcatagaaagtgccaacatttggctacacagggaagaaagacgtaaaataataaaaacattggcatcacctgtagactcaaatcctgtgagtgaaggacctga

SEQ ID NO: 296604 - DNA, 122 bp, Homo sapiens
gagagtcccctgcctcacttagccacttccttcaacctttcaacttcagcttcctttggacgctgtcatctcaccaaagtcaagggcagaggaaggttggcttttagggaaaaatggagctt

SEQ ID NO: 296605 - DNA, 122 bp, Homo sapiens
tccctccccttccccgccccccagcgccttctctaacgccgcatcgatttgtttgggctacgcagcagaaacagagcccagcgatccataaacattctattaagcaaaaatattcccagcga

SEQ ID NO: 296606 - DNA, 122 bp, Homo sapiens
tccagcctccggcaggaaaacaaacaaaaggctgggtggcttctactggggacgaccggccgctttccctgggaaaagttaccctgcagctcccctcgctggccctgcgcgtccctgcactg

SEQ ID NO: 296607 - DNA, 122 bp, Homo sapiens
cagagccaggttcacttaaattcgggactccgaagtgtggagaccaataccccttaaaagcgtcccctggggccgaggcgggtgtggggaggggccgccaccgtccacctgcgccttcaggc

SEQ ID NO: 296608 - DNA, 122 bp, Homo sapiens
caaaggctgtaagagtaagaggtacctggcccaagccttaggactagaacccgggccaggcgggagtgaccagccgggacactcagggcctccgcgcgttccagctgggtgaccttgaccct

SEQ ID NO: 296609 - DNA, 122 bp, Homo sapiens
ccatttaaaaaaatctgtcaggctttgaacttactagtcccggttaaagttaaaatgccacgtgctttagagccaaaggtttgcagtatatgccagattcttgttaactatagtatcctgtt

SEQ ID NO: 296610 - DNA, 122 bp, Homo sapiens
gaccagccagcagcagctgccccttcctggggtgccatctcccctgtccctcctgccctgcgcctgcccagccctcctgctctggtgactgaggaccgccaggcaggggctggtgctgggcg

SEQ ID NO: 296611 - DNA, 122 bp, Homo sapiens
cctcgccccgagacgctcgcggggatcccaaagggtcctaatcatggcagacgccgcgagcgaaatagaaagtgggtgctgagaccgtatatgggagcagggccactggattgtggccagga

SEQ ID NO: 296612 - DNA, 122 bp, Homo sapiens
ccacgaagaggactcaaggttgacatgtgctggagccacgggaagcggcagttcgtgctccgcgatgcgtgactgttacttcactgtgactgcccacgtctgccctgggtcctttcactgtg

SEQ ID NO: 296613 - DNA, 122 bp, Homo sapiens
ctcagacacaccacccagagccagaaccagactggaccatcagccgcagctccaggaagccgcctgtgaccactgccagctgggcccgggcccctctcggtcacggcgcctctgagcatcct

SEQ ID NO: 296614 - DNA, 122 bp, Homo sapiens
acacacacaccccttgcttatgtcctccacccgtccctgaaaacatgaggtctgcgaagacgtctttgagtctgtttggcatccccaagtgcagcggtgaaccagagagagagggagcattc

SEQ ID NO: 296615 - DNA, 122 bp, Homo sapiens
cctcgggtatggggcattgccaactcctgattgtgcccacggggaggaccccatagtcgtcgccaagaagtggtggtcgccactcttcccaggggcgaggaaaaatgaatggcccagtgcag

SEQ ID NO: 296616 - DNA, 122 bp, Homo sapiens
ggaggctgaggcaggagaatggcctggatgcgggaggcagagcttgcagtgagcctagatcgcaccactgcactccagcctgggggacagagcaagactccgtctcaaaaaaaaaaaaaaaa

SEQ ID NO: 296617 - DNA, 122 bp, Homo sapiens
cggtgaggagctctgccacctgcacgtgtctagctagagatgaaaatgatatgcattgcccgggaatggggaaggaacagggaggcataaataagaaaatatctatcctcaccccactgctc

SEQ ID NO: 296618 - DNA, 122 bp, Homo sapiens
tttttttgtccatcttgtttcatttgcttgccccgcccccgagacggagtcttactctgtcgcccaggctggagtgtagtggcatgatctcggctcactgcaatctctgcctcccgggttca

SEQ ID NO: 296619 - DNA, 122 bp, Homo sapiens
attacccatttcagaggcacaagacgaagagcacaggcggtgtcaggacatgttaggatccgtccccagcgctgccgtcctcgtccccacagcgccccgggacacctgtcccccacagccca

SEQ ID NO: 296620 - DNA, 122 bp, Homo sapiens
catggcagcatctaagtgaccagagctgggatgagagaggggaaggggcaatgtgagtggcgctatgggacgggccagccctgctcctgagccagccccgccctctgccccctggccctggg

SEQ ID NO: 296621 - DNA, 122 bp, Homo sapiens
acctcatgatctgcccatctcggcctcccaaagtgctgggattacaggcgtgagccaccgcgcctggtcagtggttaccttttgagtattgcctgggaaagggcagtgtgcaaaccttccaa

SEQ ID NO: 296622 - DNA, 122 bp, Homo sapiens
cctctggtccccgcgcagcgaaatgcgcttggggaagggagcaagtggtggtggcggcggcggcaacctaagaggcagaagggaagaaacgtgcaaggcctgcgagagttccccatggaagg

SEQ ID NO: 296623 - DNA, 122 bp, Homo sapiens
ggaggatggtgcaggctggggagatgccggtacctttccctgggtcatggtgccgtctctcggggaaggggtccctgaggcccgggtggccgcttgggtaaccgcagcctgcctgcgtctct

SEQ ID NO: 296624 - DNA, 122 bp, Homo sapiens
cactcacggcctccatggcaccagggacaacgctgtccccgcagcagcgcctcctcccggcgcccgagagaccggcacgccacggcccctcccccaaggaacagagcaaaggatggtggccg

SEQ ID NO: 296625 - DNA, 122 bp, Homo sapiens
gggtggtgcgtctggatcttaagaagggcaggaggccctccacgcggcagagcaagcgcccggaccaggctgttgcagggtctcccaggagcgaagcctggtttcccagacccaggcagagg

SEQ ID NO: 296626 - DNA, 122 bp, Homo sapiens
gctcagcctcccctcgccctgcagggctgcaaaagtgagactgtcttcacacctctggctcgttgtcttcctggttctggatctctcagttcctctgtgtctttttctcccatttcctatcc

SEQ ID NO: 296627 - DNA, 122 bp, Homo sapiens
cccagcctgcctcaatgtccttctgaaagcatgtaagcctggcatcctgtctccgtcacccggggcgacttcatgccgttttggggtgccccccacgcaccctggggtgggagccagggact

SEQ ID NO: 296628 - DNA, 122 bp, Homo sapiens
ctcagcaagcaaagcgcggtccagccccgcggcatcctgggccctgcgcgcgcgcccctgcggaccagcatccttcccgcgcggctcctagagagacgcaccgagtggaagacactactcgg

SEQ ID NO: 296629 - DNA, 122 bp, Homo sapiens
cacttgcgggagccattgagtttaacttcactcagtcccccaacacagaaccggcaaatccgaatgagatggacgtcacactccctactcaaaagaatgcatcaaatatccactccgtaaca

SEQ ID NO: 296630 - DNA, 122 bp, Homo sapiens
gccacagcgtctcctcagccccagcaagtggcctttggtctagagttggtccatctggcccgcacaaggctcgaatccagccctagagacgctccccgcctgctccaggtggccggcaccct

SEQ ID NO: 296631 - DNA, 122 bp, Homo sapiens
tttccttccttgttcccagcagaatagtcaaagccaagggaacattcctcagagagctgccgggtaccagcattcctttctgcctacacaatgaatggaggctttgtatattatctgacttg

SEQ ID NO: 296632 - DNA, 122 bp, Homo sapiens
gggtcccccgtctgggttcccaccccgcccagaactgggctaccgtcgcgccccacccggcgaccgccgcccaccattcccggagcccgaccccaacccagctaccgtgcgcgggtcgtacc

SEQ ID NO: 296633 - DNA, 122 bp, Homo sapiens
ccgcctcgaggcccctctctgcccgcccctccatgcccgactgtgctgctcccccagcagcggacaactcagcccgaccccatcactgcggctcccagggcagtgggctctgagggactccc

SEQ ID NO: 296634 - DNA, 122 bp, Homo sapiens
cgtcttttccctataccaaggtgaagaacttttattattcacttgattttggacccacttcgtgtttaatgcacctggcctaagatgcagagttgagcccagggagaagggacgggttgggg

SEQ ID NO: 296635 - DNA, 122 bp, Homo sapiens
gggagaggggctgtgtgcgatctgccaaggtgcgcccgtgtggccctccggcgggctgtgcggtggcatgtgacttcactgagtaggtgtctttgtatgtctgaaatccagcgagtgtgtgg

SEQ ID NO: 296636 - DNA, 122 bp, Homo sapiens
tttggaggggggtggtgggtagaggcagggtctcgctacattccccagcctgggctcaaacgatccttctgcctcagcctcccaaagtactaaaattacaggtgtgagccacggtgcttggc

SEQ ID NO: 296637 - DNA, 122 bp, Homo sapiens
cgcccgcgggtcccggattcaccgcccgcccagcctggcgcggcgccctcacctcagaaacgctgggtggacttcgcgtaacttcccattcacagggcagccggcagccgcgccgccgcgcc

SEQ ID NO: 296638 - DNA, 122 bp, Homo sapiens
tcacaccgagcccgtgccacgcagggtgtgtgtgtcacctgccgggtcttccaccgagcccgtgctgcccaggatgtgtgtgtcacctgccgggtcttccaccgagcccgtgccacgcaggg

SEQ ID NO: 296639 - DNA, 122 bp, Homo sapiens
tcgctgaccccggtgaagtcgggcgagcacaaggacgaggacaggccgaagcccaaggaccgcatcgcctcgtgcctgctggagtcatggggcaagggcgagggcctgggctacgagggcct

SEQ ID NO: 296640 - DNA, 122 bp, Homo sapiens
atgatggtcaagccggtgtcaacattcgtctcggcctcaagcttctgaaagctgttttcccggttgaggaccttcattctggccccggattcaaggtgatgagaagacaggtgcaggtgggc

SEQ ID NO: 296641 - DNA, 122 bp, Homo sapiens
cgcccggctgccgcctaggatgaatatcatggacttcaacgtgaagaagctggcggccgacgcaggcaccttcctcagtcgcgccgtgcaggtaccctggtgctggggggaaaaggggtggc

SEQ ID NO: 296642 - DNA, 122 bp, Homo sapiens
accggtagcccggcagcgccctctggtggccggtgacgctcagccagcgccgggaatcgccgcccaggccccaaggaccagaatcaggagcaggatcagggccagggccagggccagggcca

SEQ ID NO: 296643 - DNA, 122 bp, Homo sapiens
cggccggggaggtgcaggagacgtgggagccaatgggcacgctcgggggagccgggctggcggcggcggtggcggccggctgggcgcgcactctcgggatggagggcgagcgccgggcatcg

SEQ ID NO: 296644 - DNA, 122 bp, Homo sapiens
gtccacctgcctcggcttcccagagtgctgggattacaggcttgagccactgtgcccagccgcataattattttaactggttcataataatgagccagagttgtgctctgtcgcccaggctg

SEQ ID NO: 296645 - DNA, 122 bp, Homo sapiens
agtgcaggggtgggcaggcaccacaagcgggacacccccaagggtgcacacggctgaaggcgcaacgggcacagggcattctgtgggccacgctcgcagcccaagaacacagacgaggaggc

SEQ ID NO: 296646 - DNA, 122 bp, Homo sapiens
tgtattctgcaactttgctgaagttatttatcagctaaaggagcttttgggctgagactacggagttttctagatatagaatcatgttgtctgcaaacagatatagtatgacttcctctctt

SEQ ID NO: 296647 - DNA, 122 bp, Homo sapiens
ttgtcagttacttttactctcacttctgttgataccctccagtgagggtggggggggaggcgggtgaggagctaaggtggcttcactgtttctgttgtgtcccaggtagatggtcagatatt

SEQ ID NO: 296648 - DNA, 122 bp, Homo sapiens
ttaggagtgctctctattttgggaagatttagacactgcctctcctctaagaactcaaggcgccatagcaaaaccagctccaatcctattagggacccatcagtgagagattacaattggtc

SEQ ID NO: 296649 - DNA, 122 bp, Homo sapiens
ttcataggacactgaggaatgaggaagaaaaataggtgtgaaggtactttttgaaaagcacgaagttctagcaggtatcaggggtaatatttaccggaagaacattatggtgccttgctcat

SEQ ID NO: 296650 - DNA, 122 bp, Homo sapiens
tcctactcccaggagtgtgctctaagttgaaagtagatgccccaccccctgagtcagcgccggcaggacttctcaccaagcccttctcccccttttccgctccctgttcctggttcctagga

SEQ ID NO: 296651 - DNA, 122 bp, Homo sapiens
cattgccatccaccagctccatcagaacacggcccacctgcacccgggcgctgcctccctcggtgactggtcccaccacgcacccacgggagggtaaaactggctctgcggacatcccgaca

SEQ ID NO: 296652 - DNA, 122 bp, Homo sapiens
acagcaagggtctggcaccggggctcatgcttttaataccaacattttgggaggccaaggcgggagaactgcttgagcccaggagtttgagaccagcctgggcaacacagcaagacctcacc

SEQ ID NO: 296653 - DNA, 122 bp, Homo sapiens
gtggatggaccatctgggactgacagcctggtctgctcacagacctcaccagtcccacagcggaggcccatgttgatacctcccctcccatccgctgttctgttggtaaggcctgcctccgt

SEQ ID NO: 296654 - DNA, 122 bp, Homo sapiens
ttcgtgacccaccatgtcttccctagttgtgcttgatggggaggtggggagcagggctgtcgtgcaactgggcaggtcagcagttcatttctctgactgcttccttgactctctctccaggt

SEQ ID NO: 296655 - DNA, 122 bp, Homo sapiens
cagggcggccggcggtcggcccagtttccatgatgcggggggcgggttcgggggaggcggcgaccgatttccaggctcagcggtcaggccgggccccccgggaggaatttccggcctaggat

SEQ ID NO: 296656 - DNA, 122 bp, Homo sapiens
ctacgtactccaccccagctcctaaggcaccggatatacacagtgatctaaggagagggtcgctttggaaagaaaaggcattgactgcccaagggcaggagggaggtctgatgcggtctcct

SEQ ID NO: 296657 - DNA, 122 bp, Homo sapiens
gcactccgacgtagggaggggctgtgcccctcttctgggcaccctcctgtgggagaggcccgttccgaggcaaggggtactcgtggcggccgagggcgttgcgtcccggtgtgctggcttcc

SEQ ID NO: 296658 - DNA, 122 bp, Homo sapiens
cccctcagcgcccccagcacgccgccgagtcccgctcgccatgggtaagtcccgatcgggcgctgcctgctggaagcccgaccccttcccagggtgtagacaccgcccccacgctcccctaa

SEQ ID NO: 296659 - DNA, 122 bp, Homo sapiens
gagctcccacccctgggcacaacgggcacctggccctagggcctgggcttcttgggagcccggggccttggctgcacacagaccatggccctgggtcccaggccaggggtgtcctctcagcc

SEQ ID NO: 296660 - DNA, 122 bp, Homo sapiens
actcggcaggcgtggatcgcgcacctgccctgggccgtgggtgtgccagcctcgaggcctcgtggcccctgctcgtgcctagaactgtgcctggcatggagagagcgctccccactgtgaag

SEQ ID NO: 296661 - DNA, 122 bp, Homo sapiens
cggaggctttcacagctgccactcaaacgccagtcatcttgccacccccctggaccaatccgtgtcctcccatctggggataggttgttcttaccctcagcagcctctgtgtcacagccctg

SEQ ID NO: 296662 - DNA, 122 bp, Homo sapiens
cgctggtgatgatgatgggaactttggccttgaggctggtcagggaccagggcaggtgcacggtggtgaccagctcgtagcgagtgtgcatgatctcaccgtcctgcgtgctgctgctcacg

SEQ ID NO: 296663 - DNA, 122 bp, Homo sapiens
tgagcttagacctgagggagcgcgcagtagccgggcagaagtcgccgcgacagggaattgcggtgtgagagggagggcacacgttgtacgtgctgacgtagccggctttccagcgggtatat

SEQ ID NO: 296664 - DNA, 122 bp, Homo sapiens
ccgtcttgctgctctctccccaacagctaccctacaggctcatcaggcaatcttcctgctcgatgttgccaagccactgcattcttctggatgtttttaaacccaggtgtctttgactgcct

SEQ ID NO: 296665 - DNA, 122 bp, Homo sapiens
actacctccttgtagtcagttgcatactggagtcttcagctcctctgcctccgttgttctcgtttctggagtagggatgaggcatttatttcttagtttccgagcgggaaacagccccaccc

SEQ ID NO: 296666 - DNA, 122 bp, Homo sapiens
ctagcaaccaggaagtgtaagttaaaaccacaatgagatacaactatccacccaccatatcgataaaaataatctgatgataccaagagttatcaggggatgtggagtaacaggaaactcat

SEQ ID NO: 296667 - DNA, 122 bp, Homo sapiens
tgggctccagcgagacatcggggaagaactcggcgctggcccaggcgaaaaggtacaggccggctctccacccgtaggctttctctgggcccaggagctccgcggagcggatcttgaagacc

SEQ ID NO: 296668 - DNA, 122 bp, Homo sapiens
aatttaggggctgtccccttgcgagggcactaggacaacaggaggggcgcacctgcaatacggatgagttcagagtttgatcccttggggcctttttctcgcacttgagatttcactatcat

SEQ ID NO: 296669 - DNA, 122 bp, Homo sapiens
ccccggggacctggccggccgctgcccgcacttcctgccgctggtctcccaggcgcgagccgccgcttgcagcacagaacccgttgagcttcgtgcccggcagcacccccggtcccccgcgc

SEQ ID NO: 296670 - DNA, 122 bp, Homo sapiens
ccccctccagatagttatcccccagtcagtcagttccccctccagtcagttccccccagtcggtgcccccggagtcagtgccccccccaagtcagtcagtgccccctccagtcagttccccc

SEQ ID NO: 296671 - DNA, 122 bp, Homo sapiens
tgtgggggtcaccctctccccgggagtgtcacccctcgggagggccagctgcctgttgaccgtgtgaccccttgctaggctttcctacctgtgaggtgctccctggagtcttgacctccggc

SEQ ID NO: 296672 - DNA, 122 bp, Homo sapiens
aggggggagctcctgggggaaaccccgagggcggggcggggtgctgagcgcgggtcccggcgcatcgcttctgcctagaaaactctcattgtcatcagattgacctcaccgcgggggccggc

SEQ ID NO: 296673 - DNA, 122 bp, Homo sapiens
gagggaggcgcgagcgctgagcccagcgttgcgagcccggcggtagagcgcgcagcgcagcgaggtccgcgccccctgctccaggggccctctttgccgcccccgcttgccctcccttgcca

SEQ ID NO: 296674 - DNA, 122 bp, Homo sapiens
agagtagaaatctacgtagcattagggcatttaatcatagagtgcaaagcttggaaggggcgttagaaactattgaatcaaacctgctcaatttaaaagattggaaactgagccccccaacc

SEQ ID NO: 296675 - DNA, 122 bp, Homo sapiens
tgaggagcttctctgcctggccgcccatcgtctgagatgtggggagcacctctgcccggccgcgaccccatttgggaggtgaggagcaactctgcccagccgccccgtctgagaagtgagga

SEQ ID NO: 296676 - DNA, 122 bp, Homo sapiens
gatgtaggcttgatggcacgcacattgcagacatatccaacagagatacgtcggtgccttcgggtttttaaatttatatcccagaggacactctgctctgtcaggagtgagctcaattcacc

SEQ ID NO: 296677 - DNA, 122 bp, Homo sapiens
ggcacaagcaaatagctaacaatgactcctcaggaagcaatttgtttttgaaaaatgttccggatctagcccagagctcatgaaaggaaaaggtataagctctgtgactcaagagggacaga

SEQ ID NO: 296678 - DNA, 122 bp, Homo sapiens
tctttaggcccagcacctgcagccccaaccacaggacccagcttcaagctcttggcctcgcggggctgcagctgagaaatgtacttcccagggcagacaggtgtactgcaggaacggcagaa

SEQ ID NO: 296679 - DNA, 122 bp, Homo sapiens
gcgtgtgcaccccagccccgggttgagaggccactgtgtgcctgtgtgtgcaacagcctccgtccagccttgcaccctggcctcacctatggggccctgcagcccttccccctccccgtccc

SEQ ID NO: 296680 - DNA, 122 bp, Homo sapiens
gggaaatccgagctaactgaattacttcctcattaaagaggcgggcagattcttgggccccgcgtgcagccaccctcgctgcctccctccccgccccgctccgccctgctggtcccgcctgc

SEQ ID NO: 296681 - DNA, 122 bp, Homo sapiens
agacagggtgtggtacaaagatccatgactctgatttaggacacaggaagtttgagattccgaaggacatccaagtgatgacagtgtgacacacgagtcctgagtggggagaagtcgggctg

SEQ ID NO: 296682 - DNA, 122 bp, Homo sapiens
cgctgtccagagtccagtggggaacccggtagcccagtaggggctgtagagtgagtgtttcgggcagcagaagggttaggggaacagctttatcagagattggtcgttattcagaatatagc

SEQ ID NO: 296683 - DNA, 122 bp, Homo sapiens
ttttgcatgtgctcatgttgtttaggaattgttagtctgcctgggctgggctaaacggaacgcagtaaatttgttgttgctgttgttatttacaacagagcaggacactggacactgactgt

SEQ ID NO: 296684 - DNA, 122 bp, Homo sapiens
gcaggctccaccacctcgcgtggcctagtcggcccgcagcaccaagtccgccgcggctcacggccaaccgcgagccctggccaccctgaacctctccacaactccacttaccggccagaacc

SEQ ID NO: 296685 - DNA, 122 bp, Homo sapiens
tcacatttttgcacacgcttgttttttgtatgtgagtgcaccatcatgagaatgcttcagcgagcccttttgagcactctggaaagaagtgggaagatggaaagaatgcatcgtgtggtttg

SEQ ID NO: 296686 - DNA, 122 bp, Homo sapiens
ttggagcttggagcttggagcttggagcttagagtttggagcttgaatttcgctcactcccgccccgcgcatgctctgtgcgccgtggagagggacacagccaaccgacggcctcgcggccg

SEQ ID NO: 296687 - DNA, 122 bp, Homo sapiens
tttgcaaagagcagacacttgggggctttattatgccactttgacaaaagctgtgaagctcgttcccacagcctgtctggtgccgccttcgcaaatggggccctggtgatggggccttcgga

SEQ ID NO: 296688 - DNA, 122 bp, Homo sapiens
aggggagaaagttctcttttgggttgctatccacattccaacctcctgttcccacctcttcgtctgcatgcctaagaaactgttttacaagtaaataagggacgctttgtctaggctttgga

SEQ ID NO: 296689 - DNA, 122 bp, Homo sapiens
gccgagtccggcagcctggagatcctgcagctgctgctggggtgcaaggcccgcatggaacgtgacggctacggcatgaccccgctgctcgcggccagcgtgacgggccacaccaacatcgt

SEQ ID NO: 296690 - DNA, 122 bp, Homo sapiens
ttattcagcaaactagaggtctgtatcctataaaaccaattagtgctgataggaatgatacgtttaaccttcatagatgagggctcagacctgtgggtgcctttaattactgaattaaggcc

SEQ ID NO: 296691 - DNA, 122 bp, Homo sapiens
atccacttgttagctgtgtgttttacataagtaatttaacctctctgtgtctcatttcctcgtgtaaaatggggaggatctccgtagcaccaacccacaggggtgttgcaggggtatgcaga

SEQ ID NO: 296692 - DNA, 122 bp, Homo sapiens
gcctcccggcactgagccttagaggggcggtgctccataaacatttgctacatgaatgaacgaataaactatcggattttggggtgggtcgggacagctcggttccagcgagggctccgccc

SEQ ID NO: 296693 - DNA, 122 bp, Homo sapiens
ccgagtgcacgcgcagcgcgcgcaggaagacccagagggctagcgcgttgagggggagcccggcagccagcaccaagctgtagaccaccaagtgcaggcggtgggtaggtcggtagtcagga

SEQ ID NO: 296694 - DNA, 122 bp, Homo sapiens
gatatgcacgccagggtcagtgggaaccaacagccgaggggtgagcggggctaggggccccgggccgccggcggggcaaacgcggttcagaaacgcaggccgcgctctggcccgccccctgc

SEQ ID NO: 296695 - DNA, 122 bp, Homo sapiens
ggggagcgcggcgggggccgccccaggcaggctggcttcattcccaggctgctgccgatgcgtgtctggccgagtgatctctgctaaacagaagaatctcaagaaatggcaagggatggagg

SEQ ID NO: 296696 - DNA, 122 bp, Homo sapiens
ctgtgctgagtgtggtgagggatgctggatttcagtcaccataggtcttgtctcttagcacggtctgatcagtcttcatctggagggctaccaaggagattagaataattccatacttgact

SEQ ID NO: 296697 - DNA, 122 bp, Homo sapiens
ccccgccggcctctaccctgtacctctgggtgtctgtgggcagggagggagactgtgctgcgttccttcgttctcggcgccactggaccgtggctcaccatggtgagcagctgtctctgatg

SEQ ID NO: 296698 - DNA, 122 bp, Homo sapiens
agaagcttccatgatgcccaggtccgcgggcagggcgagggcacgggccggggaagcaagcgttgccgcgccgctaccgtcgggggccggcccccgggctgcttttcgtgcgcggagcagct

SEQ ID NO: 296699 - DNA, 122 bp, Homo sapiens
atggcatctaatttcattaagccttggaaacagtgacatcacaagtgcctgcccggtagccgcccacatatggcgaaccacagagtgatccgagattcgtctgcaagaacaggggagaacta

SEQ ID NO: 296700 - DNA, 122 bp, Homo sapiens
ttgaatttacttaaactacaaagtttatttgtccatcctgttcatctatttttcccttttcgctgtctgaaaatattaggtatttcttcctattcagacatagcagagagacttagtgacag

SEQ ID NO: 296701 - DNA, 122 bp, Homo sapiens
cactgagcaaattttcaagcgggtgcctttcccaattttgttgagcctctgataaaaacacgttgaagtaaaatgtccactatagtatcaagtaaaaattgagaccgtaagatatagcaaag

SEQ ID NO: 296702 - DNA, 122 bp, Homo sapiens
ggaagcagcccctatcttcatcctgcacatctcaaagggcgtcagacgtcagcagaggtacgaccacttccttcctccagcgcttcacctcccttctttccagaaagaggaaatgatgcgag

SEQ ID NO: 296703 - DNA, 122 bp, Homo sapiens
aaaggaaaccagggcagtagggtcccaaagccacaggaagtcaggcttccaggggaggagcggtggccggcagggatgctgctgaggaaccaggtgagatgcatattggacttggggacccg

SEQ ID NO: 296704 - DNA, 122 bp, Homo sapiens
gagccgccctcgacctggcctggtcggtcctggcccggcgtaggtgacgatggcggggaccgcgaggcgccggacacccgaggccacgagcagcgtcgcccctcgctttttcgcgcccctcc

SEQ ID NO: 296705 - DNA, 122 bp, Homo sapiens
ccaggccccgcccgccaccccgcgccagcccccgcccgccaccccgcgccagcccccgcccgccaccccgcgccagcccccgcccgccaccccgcgccagcccccgcgtccgccccgcgcca

SEQ ID NO: 296706 - DNA, 122 bp, Homo sapiens
tgtgttaccaacagaaaattttgaccactataaatgtcaccaatttcatagctcttgtcccggcagggacaattgcaactcaatgatcagacatacaatattatgagtcagttaaacaattt

SEQ ID NO: 296707 - DNA, 122 bp, Homo sapiens
tgatgacaaatttataacacacattctatggtcctgttacatcagtgtatcatgcaaaggcgcatacacatgtgttctgtgaactgtgactgggaaaacacagcaaacaggccaattcagtc

SEQ ID NO: 296708 - DNA, 122 bp, Homo sapiens
ctccttgtgagccgggcgatcggccgggtcgctgcctccccctatccccacccgcgtcggcgccttcaggccctttttgttgttaatagtttttctgtgttaattgcagggagcctgggggc

SEQ ID NO: 296709 - DNA, 122 bp, Homo sapiens
cctcctccgcttcctccctggccgccgcctccgcccctggttggccagcgccacggctgtcgcacattttgcctgtcatcgaggtcgcaaagcgccgctttgcggctccacgtgaccaccct

SEQ ID NO: 296710 - DNA, 122 bp, Homo sapiens
ctgcatgcagcctggagtgccagcccagccaggctggaaaggtgaggcccgagctcaggccgaggcagtggggctggagagaagcgcagacaatgcgaatctgttgatttatttacggctcg

SEQ ID NO: 296711 - DNA, 122 bp, Homo sapiens
gggaggggagtgagagaaggagtcagcctccatttttaggttgaattcccttttggaaggcgccctgtctgtctttggcaaggatgcagagaggggtggagcacaacccccgcagggcagct

SEQ ID NO: 296712 - DNA, 122 bp, Homo sapiens
cccagctcacgccaggggctgatagataagcaaggccgcagcccactcccagcaggcaggcggggcgctgggaagcatggcgtccacccctgcggatgctgcccccaagtcgggagggggac

SEQ ID NO: 296713 - DNA, 122 bp, Homo sapiens
ctcctggtcttgggagtcaggcctttaaggtgaatctgatctgactttcctgtgtgggcacggacaatgggcctgttcgaaaattctagggctttggaaaaagggggcataaagctagttcc

SEQ ID NO: 296714 - DNA, 122 bp, Homo sapiens
ctgttacattcctgctctgccatgaagattgctgatggaacttcagataggcaagtgaggcgcagatatgacaaacaagatgtgaggtcaccacggcgttggcttagttggcgtaggtgaca

SEQ ID NO: 296715 - DNA, 122 bp, Homo sapiens
tacagccctccggcttccaccacagctcagatggaaagggagagtgccctggattggccgcgggccgagcaggggccatgccttcatctgcctagggctctaattcaccccagcctgtaatt

SEQ ID NO: 296716 - DNA, 122 bp, Homo sapiens
catttgaaggcttagggcattccaggccccccttcccaggcctcccctcaactcctatcccggtcagcttaactaatcacaaatccagatcttacttgtgaaggagacagtgacagtaggaa

SEQ ID NO: 296717 - DNA, 122 bp, Homo sapiens
cgggggagttgggtgaagagccagcttccgagccaggcctgctggccgcccctggttttgcgagcgaatgtcagggcaggatggaggtgccgaactccccgccagctcctgagtcctgaagg

SEQ ID NO: 296718 - DNA, 122 bp, Homo sapiens
ggtccgcccgcctgcaagaccgccagttggccgagggcgagggcggggaccgggaggctccgcccgcggcccggcccctgctcccaactggcccgggccctgcaggggcggggttggcaggg

SEQ ID NO: 296719 - DNA, 122 bp, Homo sapiens
gctccccagcaggacgacttggactcacctcagcagatcagcatcagtaacgcggaggcccggcaagccctgccgcacagctactactggagcgcgccggctccctatctgggaaacaaagt

SEQ ID NO: 296720 - DNA, 122 bp, Homo sapiens
gtattcatccactataatagggtatgttccatagaatttgtctttctgttgttaaaatcacgtcagtcctttttagggccatacctagcgtctgctttctgatctacaagtagagtggagct

SEQ ID NO: 296721 - DNA, 122 bp, Homo sapiens
ctggagggcagcggcctggagtccatcatcagcaccctggctgagccacgtgtgagcgtgcgggagggctaggccctcgcccccacctgccactggagaccgctccgccatccccacctcac

SEQ ID NO: 296722 - DNA, 122 bp, Homo sapiens
ctcaagtcaccaaaccttctcaggaaaacccttagtaatattaaggcatcaggttacttgcggttatatttgaaatgtattttaaatatttgtcaagcatcgctgctgatgcctaaggaacc

SEQ ID NO: 296723 - DNA, 122 bp, Homo sapiens
atctggacgcgatcccccgctagggcctccctggtctgggccaaagttggtggccaccttcgcgcgggctgcgccctccttctcttccctgccctcctcccccggggcccgcgcccgctgcc

SEQ ID NO: 296724 - DNA, 122 bp, Homo sapiens
cgcctgtaatgccagcattttggtaggctgaggcgggccgttcacttcatgtcaagagttcgagaccagcctggtcaacatggggaaaccccatttctgctaaaaatgcaaaaattagccgg

SEQ ID NO: 296725 - DNA, 122 bp, Homo sapiens
gagatcgtgtgccgggcacttggtttcgtggtgggcaactgtgctgctgtttcttttggccgcggacaaggtcggcagaggtggacccctgcttgggagagctcttctcgctgtgctgacac

SEQ ID NO: 296726 - DNA, 122 bp, Homo sapiens
ctcctcacctgggacatctgcggcctcaggttgatctccttcaggttgatggagtgcgcccggaggttgttaagcagctggcagagcaggactccatcgcggagggtctgcgcaaggtcgaa

SEQ ID NO: 296727 - DNA, 122 bp, Homo sapiens
ccgccaacagccaggtgatgggcagtgccaactcgaccctgcgggctgaagacatgtactcggcccagagccaccaggcggccacaccgccgaaagacggcaagaactctcaggtctttaga

SEQ ID NO: 296728 - DNA, 122 bp, Homo sapiens
aacacagccaaagacgctcaggttccaccgagagggcacgccaacatggtgacagccaaccgcaccgagctgagtccagtgcaatcacagattctgctcacttaattcccctgctggtgtcc

SEQ ID NO: 296729 - DNA, 122 bp, Homo sapiens
ggattcctgtctggggcccctggggctcctttaagggctcctgggtaaatttaaaggggccgcgcgctatttcctcctgccagctcgcggggggctggggggaaaggcgggaggcaacgagc

SEQ ID NO: 296730 - DNA, 122 bp, Homo sapiens
ggttcccctaaccccagagtgcaggactaggacccgagtggacctcaggtctggccaggtcgccattgccatggagacagcaacagtccccagccgcgggttccctaagtgactggttactc

SEQ ID NO: 296731 - DNA, 122 bp, Homo sapiens
acctttaaatgttgacaagtacattttcccataatattttgcaggcctaaggaaacgtgtcgtctggaatgggcttgggggccacgcctgcacatctccgcgagacagagggataaagtgaa

SEQ ID NO: 296732 - DNA, 122 bp, Homo sapiens
tctgatctgaactagttacctaacctttctgagctcaagaaagacctgccactgactgaccgtggggctctccagattactccccgtccttccgttcccccacattcctcagatgcctgcct

SEQ ID NO: 296733 - DNA, 122 bp, Homo sapiens
ctccaaaagttgctgtacggtattttattttaaagtagaaatctgtccgcttttcacttacggaggccttacagtgtgtgttctgtgttacttgagtttatacgcactgcagaatttgttta

SEQ ID NO: 296734 - DNA, 122 bp, Homo sapiens
aggagttcgagaccagcctgggcaacatggtaaaatcctagtggcatgtgcccacagtcccggctactcaggaggctgaggtgggaggatcacttgagcccaggaggtcaaggctgcagtgt

SEQ ID NO: 296735 - DNA, 122 bp, Homo sapiens
gagaactgcggacttggcaggagtcgcctgaggagctaagatcccggagactcttagccccgtggtgcttctctacgggagggagggagggagaatccggccggacagatctgcgcgtatcc

SEQ ID NO: 296736 - DNA, 122 bp, Homo sapiens
atgtggaaaatattacacggaaaacaaaagaagagtaactttttcccttttggtttatcccgctctggtcctcagggcgatagctaccacctgacacacagcgacctgggaaagagggaaac

SEQ ID NO: 296737 - DNA, 122 bp, Homo sapiens
aatataaacaggacatttcttattgcctagtttgtggactgagagtcaaacccattagttcgactttattattttctgcgttgaggaaagcaaagatcacctggtggccatcaggcagacca

SEQ ID NO: 296738 - DNA, 122 bp, Homo sapiens
ccttcggcctgtatgataggctcttcctccatttccggcttctgggactcgggtgcaccacggcttccggtgtcatggctgcttgaagtcccgggagtcggtgaggcggctgcaggtccctc

SEQ ID NO: 296739 - DNA, 122 bp, Homo sapiens
tggcttggagccccaatccagagactcagcagccctgccccggcagagcctagcggagcacgttgggaaccctgtggacactgcacacagcaccctctgtcctcacggagcctggggctgct

SEQ ID NO: 296740 - DNA, 122 bp, Homo sapiens
aaacagtgcagactggccccgtgtaccctttgcctagtttcccccgacgtttacatcttacgtcacgaaagtacaacatcaaaaccaggaaactgacgttgggacaatccgcagaccttatt

SEQ ID NO: 296741 - DNA, 122 bp, Homo sapiens
acagctgctccccacaccggttcccaggttctttagcggagagcagagtggctttgttttcgggggtgacacttgtgtatgtctgtgcttttgcagtgtgtgacgttcctctgtatgacatt

SEQ ID NO: 296742 - DNA, 122 bp, Homo sapiens
tcccaggctccactcagacctggaatagaatctgcatttgaacaagatcaccaggtggttcgcatgcacaggaaaggttcaggagcagtgggccaccagtggtttccaaacctcattatcat

SEQ ID NO: 296743 - DNA, 122 bp, Homo sapiens
ggcgcggggaccggccctaaaaagagcaggaaatcttgtttaccgcccgcggagagaagccgatcgagcctttgtctggaaagtcagcatctccggctccggctgcaatgtgttcctggtga

SEQ ID NO: 296744 - DNA, 122 bp, Homo sapiens
cgtggtgccataaagcccagctggaaggggcctgtctcgggagtgtccagccccaggagccggggaccgtccgcgtcgcgagccgggccaaggcagtgggcagagggcagagggcagagggc

SEQ ID NO: 296745 - DNA, 122 bp, Homo sapiens
tggtgtgtctacatggtcccagtgtgagtgagtgcaggtgtgttagtgtgccccacgaggcgggggatggcctcctgtgcaaggtgggttcccctgagccaccaggataggctctggctaac

SEQ ID NO: 296746 - DNA, 122 bp, Homo sapiens
attacagatgtgagccactgtgctcagccatggaagctttcaatcatggtgcaagggggacgggaacaggtgtgtcaaatgggagagaggggaggaagtgccaggctcttttaagcaagcag

SEQ ID NO: 296747 - DNA, 122 bp, Homo sapiens
gttcccacgcgcaccctgggcccgcaccccattcccacgcgtgccccatgcccgcacccacgatggtgagcatggctggggcaggaggaaccagcgctgccttcctgcccaggacccacacc

SEQ ID NO: 296748 - DNA, 122 bp, Homo sapiens
ggttggagggacagagggaagtgtgggaggaggcagggagcagaaatgccgcgcgggctgcggcaggagggaaataaggaaaaaaacaactaagggcagtgagacaaggccacttcccaatc

SEQ ID NO: 296749 - DNA, 122 bp, Homo sapiens
tggagcccgggaagcgtctgttaccgagagtttaagattcaagagatagcaggaaatatgcgagacagagaaactcagagagatagcaagccagagagaagctgaggaggaaagatggaaac

SEQ ID NO: 296750 - DNA, 122 bp, Homo sapiens
tcctgacctagaacggggggcattccccgacaacttcaacccccttcccccgaagaaaggcggctccacagagccctgccccaacctgccccgacctggtccctgaggagtccccaaacatg

SEQ ID NO: 296751 - DNA, 122 bp, Homo sapiens
ggcatttatggagaacctgctcttgttagaccctctaccatgcctttcagtcctcacaaacgtcagagaccacaagcacaaagttacaggtggggagccccacggggatcccgctccaacca

SEQ ID NO: 296752 - DNA, 122 bp, Homo sapiens
cggctccctgagaagccagagcggtggccaagtgtgtgctgcagccctgctggtcccacacggaagaggggagcgtgcgtgggttctgtggtcaaagccttcgagtcaggcaggcttcccac

SEQ ID NO: 296753 - DNA, 122 bp, Homo sapiens
agcgttaaaccagacaagggtccatgaaggcttgaagcaagccttcacgggggaaagtgccgggagaaaggagatctctctttgggtcccatgagtgaaccatccataccaggttccactta

SEQ ID NO: 296754 - DNA, 122 bp, Homo sapiens
cgggcaggcccagctgggttctcaacttacagcctcacaaaccccaatccaggtgtgggccgggctgagcccttgccgggagggtctgcaggaaaccgctccatgctcactcggggtgtggt

SEQ ID NO: 296755 - DNA, 122 bp, Homo sapiens
tcctggccttgcttttaggggtctaagttatttggatgattgtcttgacctgactacatacgtattcaggtacacaggcatagtccatatatttttaggccatatagatgatccaaataatt

SEQ ID NO: 296756 - DNA, 122 bp, Homo sapiens
caacatggtaaaaccccgtctctactaagaatacaaaaattagccggggatggtggcgggcgcatgtagtcccagctactcgggttcaaagagaatcgcttgaacccgggaggtggaggctg

SEQ ID NO: 296757 - DNA, 122 bp, Homo sapiens
caactagcccgtgtgagcacttcactttgggaggagcacttcactttgaggagcacttcccgttgagtgagcagatacaactgctgactgctcaggcaacagagatccatttttgtctgtct

SEQ ID NO: 296758 - DNA, 122 bp, Homo sapiens
gggtggacaagccgcggggcgctggcggacaagaggagacaagcgacacacctgcgggcccggctgccaggagctgcccatccaaagtcccggagcaccctgggtgggagtgggggtcgcaa

SEQ ID NO: 296759 - DNA, 122 bp, Homo sapiens
ccctggcctagttgaggcgctgaagtagcccggggtcaggtcctggagggaaatgtattccgtcaaatacagcattaaagtagcttcttggccgggcacagtagctcacgcctgtatcccaa

SEQ ID NO: 296760 - DNA, 122 bp, Homo sapiens
aaccctcctgcctcccacactgaactttcaacagtggtgctgccactggaaatgccaatgcgatgctcccacggcggacctgcggccgtgggctcagggtcagggagggcagcggacgccca

SEQ ID NO: 296761 - DNA, 122 bp, Homo sapiens
atcctcagtggcacccacgttgtgtccctgcggtgacagcagccacgtagacctgacgaccgaaagagcagtcaggagaaagaaaggtcactttggccgttgatggcaaagacgaactctgg

SEQ ID NO: 296762 - DNA, 122 bp, Homo sapiens
aaagctgccactggagatgttgcacaaaaacctggaatcttttaggagtctcctcccagtcgttgaaggtttggggagcagctgatacagcaaggagggctcttgcaaggattcaaggtaac

SEQ ID NO: 296763 - DNA, 122 bp, Homo sapiens
gccctcggctgcagtcggggcagctccagggggccgcgtacctcccgcttcacggctacgcgtgggggcggctccgtcctggcctcaccagcctccccggagcccctgccggtccccagcct

SEQ ID NO: 296764 - DNA, 122 bp, Homo sapiens
ctggggctgtcctggtcggccctgccctgttctatggaccgggaggaggtgaggctcagccgccagacaccccaggcttttgaggcccagatagggccggcccagaacaggcccagcatggc

SEQ ID NO: 296765 - DNA, 122 bp, Homo sapiens
aggccacgtcactggctaccttttcctttgaaggttttcttaagagactctggggaaacccgttggctggtatctgtttcctggctgaaaagaactgacaaactgttctcgttcaccttcct

SEQ ID NO: 296766 - DNA, 122 bp, Homo sapiens
gcgatcacggcccggcgcgtggctcgggctcgggcggagctggagacgtgtggagctgttcgaggactcgcgggtgtgcaggtctgagtaccactccgatccctggtggaggtccccgcgcc

SEQ ID NO: 296767 - DNA, 122 bp, Homo sapiens
ctctggatttgcccactctggacgcctgtcgtgagtgggcacatagtgcgtgacctttgacgtgacctttggtgccagcatctttcacgttcaaggtgactggtatcgtacagtgcgtgacc

SEQ ID NO: 296768 - DNA, 122 bp, Homo sapiens
aacacattctcatgctccgccgacgcgtgacccacggcacgttcccgcgctccgccgacgcgtggcccacggcacgttctgacgtctgccaatgcgtgacacacggcacattataatgatgt

SEQ ID NO: 296769 - DNA, 122 bp, Homo sapiens
tccctgtcccgcgccgcgggctcccgccgcgctcccaccccggccgccgcacgtgcccgccgcccttccccgcacctcgtgctccagcttgtgcaggaggcggccccagtaacgttcgggga

SEQ ID NO: 296770 - DNA, 122 bp, Homo sapiens
gccgcacctgtgcctaggactttacatgtgtatctcatttcatctcttaaatccccgatacgaggtaggttcagttatgatgatcccagttttacaagagaaggaaccatgtgcacagaggc

SEQ ID NO: 296771 - DNA, 122 bp, Homo sapiens
tatacaaggccctgtatggggtactcgatgggattcaggcattgattggttaggctggctcgtcttcaccattgagaggaagagacacacatctgtgtgatgacaaaaggtggtaggagaaa

SEQ ID NO: 296772 - DNA, 122 bp, Homo sapiens
gaagggacgtggtcaatgctgggacctgggctctgggcccacgcggaggcccgactgccccggaaatggccaacaatgtccccgcggtcctggatgccacaacctgtcatgaggttcgcaga

SEQ ID NO: 296773 - DNA, 122 bp, Homo sapiens
cttgacactgattttgattgcatgtgattccctgggggagggctctcaggagggaggatacgcaggaggtagaatggaaaggtggctaagctggatgtgatctcagctgcagtctagcccta

SEQ ID NO: 296774 - DNA, 122 bp, Homo sapiens
gcggcgagggacttgcgggtttgcggcgagtggtccagaccgcggggcggaagtgaggggcgcggccgcgcgtccggggcgcgtctacccctcgctcccactcggctccgcgccgcgaccac

SEQ ID NO: 296775 - DNA, 122 bp, Homo sapiens
tttcaagaggcagtcaccccagcatctctctacatcaaaatctctgctaaagccatggcccggtgacctttcccaagcaggtcagcgaagactctcatagcatcacagtttgggagaaaaac

SEQ ID NO: 296776 - DNA, 122 bp, Homo sapiens
ctttgttatgtctatgtcctcatcttctcttcttataaggacaccagtcgggttggatttcggcccactgcatgaactcattttaccttaattccctctttaaagaccccatctccaaatac

SEQ ID NO: 296777 - DNA, 122 bp, Homo sapiens
gggcaaggtggctctctttggctgggggcaatctcttaggaatggcttagctgagaatggcgactgccaacactcctggaagctggaggaatgaatacctcagttgtaaagggagcatctgg

SEQ ID NO: 296778 - DNA, 122 bp, Homo sapiens
gagctcggagggggcgccgggctccggctgcaaagctgtccgcagccggctgcccgcgcgcggtcccgcagggtctgggaaaggctttgtttttagattcagttgctgttgcgaggggcggg

SEQ ID NO: 296779 - DNA, 122 bp, Homo sapiens
tggcgcggagcagtgacggctgcgataatagcgaggcagcagtgcagctttcagagggtccgggctcagaggggttatgattcggagggttctgccgcacggcatgggccggggcctcttga

SEQ ID NO: 296780 - DNA, 122 bp, Homo sapiens
accctgcggcttgaattgtagaggctagtgtttcttctgaccctggaatacatgcagattcgcctccactgccactccctgagcctccacacctgaggcattccaaagcacccagggacacc

SEQ ID NO: 296781 - DNA, 122 bp, Homo sapiens
cccactcagtccccgaaaccttgtgtgtcgtcactgctgtgcgtcggcgggagcattttgcgagtgtccgggggccttcgtcacttccgcccccgcggcaaagcagggaggtcggaggactg

SEQ ID NO: 296782 - DNA, 122 bp, Homo sapiens
tctgttcactcacaccaatcctgttgtttgatctttgtgactaagcaccaccataaagcacgaagctctgaaggaaggtggcggcagagctctctccttaaccccaggctgccttggggtct

SEQ ID NO: 296783 - DNA, 122 bp, Homo sapiens
gtacctcaacgttgtctcctgtggccaagctagtctcccgggtatcactcgggtccgctccgtcccgcccccgcaggccctgccgaaggccccgtcccggctgcagccccaccccctagccc

SEQ ID NO: 296784 - DNA, 122 bp, Homo sapiens
agatgctgtcagccggcagcagtccagagctagcaggcataaaccccgtcactgccgttacgttaacttaggtgtcaccttactttaacgtgagctgtgcatctctgatgcccagagtttgt

SEQ ID NO: 296785 - DNA, 122 bp, Homo sapiens
cccttgcggtgactgcggagactgccaccccttggaactggtggtgagagacagccttggcggtggctcggctgacagcaacctctctactccacccaaacggatagagcccaaggtggaat

SEQ ID NO: 296786 - DNA, 122 bp, Homo sapiens
ccaggccaggtggttgcggggaggaagcctcaggtcgctcccctccggtgccggggtgggcgcgtcgggacccactggcctcccagtcccaggagaggaaggaccagggaaaccagctgtct

SEQ ID NO: 296787 - DNA, 122 bp, Homo sapiens
gcgcgcccctattacataagcgcgagggggcgggccctggctgacacaaacttcaggggacgtcgccttctgtccccaggcgcccctcctctccggcgcgctcggtccgggcggcttcttca

SEQ ID NO: 296788 - DNA, 122 bp, Homo sapiens
cggccctgacttgcctgcgggcaccacgcacacggcatgaaggtgccctggcccggggcacggacacagccagagccaccgcgctcctggctgtcatcacgtcgttggctttgcgatctaaa

SEQ ID NO: 296789 - DNA, 122 bp, Homo sapiens
gaggcccacaaagctaccccgcctttgctctcccaggtcccactgggaatgggcaggacccggaacttccaaccccaggtcatttggagagaaagaggagagagcaggatgggcggtggggc

SEQ ID NO: 296790 - DNA, 122 bp, Homo sapiens
cagcagggcttgggcgtggagcagccaaggcccacgtagcagtggcttcatgtacggagccgagggggaggctcacaggttggctgagggtgtccagcaaggcagtggctcagttgcatgtt

SEQ ID NO: 296791 - DNA, 122 bp, Homo sapiens
aaaagtaaataagtaaataaataaataaatggcaaatcagaggacatgaagactgtgccacgaaaaccctgactgtgccagaaccactccatggttggtggtttcttatcaggaaatacctg

SEQ ID NO: 296792 - DNA, 122 bp, Homo sapiens
caaagcacagacgctgctgggtccatgctcagtggaggttctgacgcccctttccatagccggtgggtgaaggagacagaaactggtgatgagaatttgtgcacacgagcgtgggtcaggag

SEQ ID NO: 296793 - DNA, 122 bp, Homo sapiens
tggacctcgaaatgcctctgctcgctttcctctgcgcttatgccgccatgtacgagtatgcgctgtttccaggtggtttgttatacagcagtagataactgatacatcccttttcactaata

SEQ ID NO: 296794 - DNA, 122 bp, Homo sapiens
actggaaatgctcctgtggttggtttcagtaccaccaaagggagctgggggtggcattgacgcagatggcaagaaaggccgatcaagtggaatgtgattggtttgcaaaaaggagagaccta

SEQ ID NO: 296795 - DNA, 122 bp, Homo sapiens
gcagcgggatcaaagctcactgcagcctttttctgtctataaatcttcaacacttggctgcgctgcaatctctctgagcctgcccgattcgtgaatcattctttgctcaaaatgttaaattt

SEQ ID NO: 296796 - DNA, 122 bp, Homo sapiens
agattgtacaagcacaagctgggacgcaatgtgtgtccctctatccctacattgactttgcgggggtggggatggggtgcggggtgagtgagggaggactgcaagtgacaaacaggattcgt

SEQ ID NO: 296797 - DNA, 122 bp, Homo sapiens
gttcacgccccacgtctgcgcccaggcgaggggatttcctgccaggcgaagtacagagagcggactctggagaccccctgaccttgcccgatagtcgcgctgtcacctgttcactccttggg

SEQ ID NO: 296798 - DNA, 122 bp, Homo sapiens
tgaaatgactatttaaattgcaccttttctgctagatttaacctctacgaaggctgacaccgtgtctactaattcacagttgtttcactagcctctagctgaatgcctgacacgagtagact

SEQ ID NO: 296799 - DNA, 122 bp, Homo sapiens
aaaactcaagagtcttgagtttgaagaaaggaagccgggtcctcttcagtggcagccacgcggcgcccctcccgggagccccagagtagggatcagacgccgttcagccttctccccgcggc

SEQ ID NO: 296800 - DNA, 122 bp, Homo sapiens
tgttgaagcccagctttttcgctcccgcacaggtaagaagctgctgatcttctgcagacccgccatgttggggcccagctccccacgccaagtcagaagctgctcatcttctgcaacagggt

SEQ ID NO: 296801 - DNA, 122 bp, Homo sapiens
gaaggctccgattgatgatccttgggtcggggcgaacagtgggtcctcaaacagggcccacgtttcaagtcctggaaaacccacctatcttagcgggcaggtatatccgatgtctccgttga

SEQ ID NO: 296802 - DNA, 122 bp, Homo sapiens
atgcatgctgatgtgagactcctacaagccatgagacaaaacagacttataaacatgtaacgtgttgtgttgacacaaggaaccaagcagtgatgaggaatgtgccaatggctgagatggag

SEQ ID NO: 296803 - DNA, 122 bp, Homo sapiens
cccgaagcgtcggagggcctgaccccacccccgggaccctcggccgcggccaatcacgaacgccgcctgaaacacgacttccgcaccccgctcacgtgaccagggcatatatctctctctct

SEQ ID NO: 296804 - DNA, 122 bp, Homo sapiens
cccatttttacaaatgagaaagcaaaggtccagggcctttaagtaacttgccaaagatcacgccgtcaggaagcgacagaccccagatccaatagcagcacgaagcctgagccactgaatga

SEQ ID NO: 296805 - DNA, 122 bp, Homo sapiens
tatattgtgttctatttgtttccaatgtcttgaaaagttcaatcacttctccaaattctccgaataaacataagaaaatatctctccccagcactacccggtcccccagtatcaccatccta

SEQ ID NO: 296806 - DNA, 122 bp, Homo sapiens
ctgcctttccagcctgcagccagtgagccgtgttgaaacggcatcatattaagctcatttcgttatgagacctccaccccgctctgggtcgcctttcattcttgcattgcggatctttggat

SEQ ID NO: 296807 - DNA, 122 bp, Homo sapiens
tttgacattagatcatcttgacctgtgggcctcattttgctggtgttttatgtttacacacgtccccagccaccgtttcagggctcccttcacctcactgttcttcacactgtagatgaggg

SEQ ID NO: 296808 - DNA, 122 bp, Homo sapiens
gcgaatggatataaacacctgcttacgacaccctctggattgctagtctcccgagtcaaccgtactgcacgtgcagttcagaccccgcctggtcctctacaggtccctgtcccaggcaagcc

SEQ ID NO: 296809 - DNA, 122 bp, Homo sapiens
acaacagcaccaacaaaaaccaacaaaaacagaggctcccgagaaacaaacagtttttcccgaagggcttgcagtgcctaactgagctgccagggccgtctgtctgtctgttagccaggaag

SEQ ID NO: 296810 - DNA, 122 bp, Homo sapiens
ggtcccggtacaccacgttcttctccgagtgcaggtagtccagggctgacacaatctcagcgccatagaagcgggcccggtcctcggagaacacacgctcccgggacaggtggaagaacagc

SEQ ID NO: 296811 - DNA, 122 bp, Homo sapiens
cacgcagcctggttccgattcaagcaatgcttgagctgtctatctttcaaatatgctccccggagatgcacagatcagcatcctcttcacagctccttggctgtccattatctcaactgacc

SEQ ID NO: 296812 - DNA, 122 bp, Homo sapiens
cgcaggggagccggccaaagttcctcgcaaagtggcgagcgaaggagcgctgagcactgacgtctgggctggggaggagcgggtccgagcgaggacggagaggggacagagggaaagggagg

SEQ ID NO: 296813 - DNA, 122 bp, Homo sapiens
ggttgagctctgaaatcggacgattctgtgtttcctgccgcatggagggcgtgtgtggttcgcaggctgtggggggcttcttgcagcgggggctgctgcctaaacagactccgcgggcccca

SEQ ID NO: 296814 - DNA, 122 bp, Homo sapiens
gcaaaataagggtcaaggcctggaaacacaagtgctttgactgaagctccacttggcttccgaagcccaagctgggttgtaccaggttccctagggtgcaggctgtgggcaactgccaggga

SEQ ID NO: 296815 - DNA, 122 bp, Homo sapiens
agtggatatttggagggctttgtagcctatctggaaaaagaaaatatcttcccatgaatgcgagatagaagcaatctcagaaacttgtttatgctgtatctactcaactaactgtgctgaac

SEQ ID NO: 296816 - DNA, 122 bp, Homo sapiens
cgcccaccggcgggtgcagctgagggcgcggccgaaggtgcccgacgccgcccacgagctcgactccacgctcggctactaggaccttctgcacttgcaccgagcaagcagcgaaatggctg

SEQ ID NO: 296817 - DNA, 122 bp, Homo sapiens
tccctattggctctctctaccaggggtaccgtctggggaacctctggtcaccttgtcctccgcgcgctctgtggcgaaagggacctgcgcaggcgcgtgaagggcgccttcagggcccgcgc

SEQ ID NO: 296818 - DNA, 122 bp, Homo sapiens
cccacacaattgggaaaacacttttgtccttgagaaaagcgggcttactcttctcccactcggaaagaaactaaggtccccacgaaatccccactttgagatggggctgttgcccctggatg

SEQ ID NO: 296819 - DNA, 122 bp, Homo sapiens
aacaataacatacctgttagataagaggtaaactgttttggaccacaacgaatagcgtaacgtgtagttgttctcacagcttttggttcagtctgcaatgcatccctgggacaaaagagggt

SEQ ID NO: 296820 - DNA, 122 bp, Homo sapiens
ggagaggcagctggcaagccgaccaggagtaacccctatccctggcattgcgactttgggcgtatcattaacttgtggggtccttacctaaaatacaggataaatgctcatatttcccctgg

SEQ ID NO: 296821 - DNA, 122 bp, Homo sapiens
aatggagtcctggtggccgggagctgaccactgggtctggctgaggacgcagctccaggccgggacattgtcgctccctgctccggctctcagggcctgcctgtctcagcagctccacctcc

SEQ ID NO: 296822 - DNA, 122 bp, Homo sapiens
taacaataaaaagcaggaaggcaaagacaatgctcggtcttcccagtcaaaaaccattaccggtaaccagcagtaaaaaagagaagctcagaggcactgaaattgcaaccggctcctttaat

SEQ ID NO: 296823 - DNA, 122 bp, Homo sapiens
actctgagcctgggtcttgcagctggcatttggctgagaataaatatttttggagggatacggggttaaatctgaaaattagtaaaaacacccaatgaagatggtaattaaccctagcatac

SEQ ID NO: 296824 - DNA, 122 bp, Homo sapiens
cccggagacgccctttccgtgtgcgcccgggacttggtgaaactttgcaggcgccggctgcgaaatggatttaatccgaggcgtcttgctccggctcctgctcctggcttccagcctcggac

SEQ ID NO: 296825 - DNA, 122 bp, Homo sapiens
ccttttttattcatcatggtcaattggctgtgacagagtatagaaattttatagagctatcgttggtgcaaggtacatagtctgaaatgatcaaggctagattttgattttagaatatatga

SEQ ID NO: 296826 - DNA, 122 bp, Homo sapiens
tgaaccccatcacatctgtttgcagttcacccgcaagcaggcgctttatattctttagcacgccacctggtatctcaaagagtctttgtgcacaacaaccattgcctgaataaacaagaaaa

SEQ ID NO: 296827 - DNA, 122 bp, Homo sapiens
ccgacactgggtgattctgcacgcccggctcggaaccctgtgcattgcccatctgtgagccgacctcctgcctgaagccaccttctcatagcgctcagtactggggaccctggccgggaagt

SEQ ID NO: 296828 - DNA, 122 bp, Homo sapiens
gcccagctggccgccctgcaggttgaggaagcccaggctggagaggttctggaaggctgccggggggacggacgagaggttgttgccgtccagccacagggcttgggtgccgcccgggactc

SEQ ID NO: 296829 - DNA, 122 bp, Homo sapiens
agcaagaaagaggtacaatgtggataactttaatcagcccagaaccaacacaaagcatagcgaagaggtttggctgcactttccagaaactccagatgccaaacatgtttcacccatttttt

SEQ ID NO: 296830 - DNA, 122 bp, Homo sapiens
ggcggggcggggagtgaaacagcataggctccgcccctcgcggcgcttcccccggaatagcgtcatcagttctataagagagcgtgtgccgaaggcctcggcctttcacattcgggaagcgt

SEQ ID NO: 296831 - DNA, 122 bp, Homo sapiens
cttaacaatctttttgcaggtgagggtggaaggtgggtgaagaaaccaatatacaggcaacgattaggatcattatttggctcaacccccattccagtaacatgctgtgactgcaggggaaa

SEQ ID NO: 296832 - DNA, 122 bp, Homo sapiens
gatgcaggaggtggtacagaagaggggataagagcaagagccttgcagcttgagtcctagcgctgccacctgtgtgagcttgggcagactgctcacaccctctaagtcatggttttcttttc

SEQ ID NO: 296833 - DNA, 122 bp, Homo sapiens
tcctgagagaaccacagctaagtaacatgtcaagcactctttcactgctcttaccaaaaacgcatacaaaaaaaaggttactcccatttataaaaacagaattcttacagaaagaaaactgc

SEQ ID NO: 296834 - DNA, 122 bp, Homo sapiens
cttaaccactaatatactgccattctccagagagaatggaaacaacagctcgaactaaaacgagcccttgctagaggcaggagtgtttcatcttggcacaggggcagtactcacttaaattt

SEQ ID NO: 296835 - DNA, 122 bp, Homo sapiens
tctgcctcctcccgggctctgggcccagcgcgcccagatgccgggcaggacccctccgcccgctgctggaacaccaatagcagcgttggagcctctgggccggaggaactggggcctccacc

SEQ ID NO: 296836 - DNA, 122 bp, Homo sapiens
ctgctgctctgggtgcagaacctctaccccaagtgagcagaccaggggctgggcccgggccggcagggagggtgtcctctgtaggaggggtgtcgaggggtgtcgaggtgtgccgccggcag

SEQ ID NO: 296837 - DNA, 122 bp, Homo sapiens
tcacggctgcaccatgagaacattgtgcgctactacaacgcctggatcgagcggcacgagcggccggcgggaccggggacgccgcccccggactccgggcccctggccaaggatgaccgagc

SEQ ID NO: 296838 - DNA, 122 bp, Homo sapiens
cctggctccggctggcccggcacacgagcacggcgacagtggcaagactgggagggccggcgctgcctccttgggaagccccggagagacgcaaccctgagaggctgggccttcccaccccc

SEQ ID NO: 296839 - DNA, 122 bp, Homo sapiens
ctctagggcaggatccctttgtctacccatccaggtgagtctcttgctcagagcagcacccgtggtcctgatatccagcctagaggcacttgcccctagaggggtgaggccgtgtgggcatc

SEQ ID NO: 296840 - DNA, 122 bp, Homo sapiens
ctgcaccagctctcctgggggggagggggaaggggggagcccacgcaggtctctgaaccacgcctcaggctgcagcagccgcattactcatactcagcggacaaaggatcactcagcattca

SEQ ID NO: 296841 - DNA, 122 bp, Homo sapiens
acttggtcagagacactgagcggctggtcaatatatttcttacaaatggggctttgagagcggaactagcagctgggtgccaagaacacagtggctctgctcacatctcacatatgcccaga

SEQ ID NO: 296842 - DNA, 122 bp, Homo sapiens
actcgggagaaccaatcggtcgtgagttcacctcagtcacttccactcacacatccggtacggcgctgctaggattcccttctgcatccgggctgtgaactcaaggagtccggtgtctgggt

SEQ ID NO: 296843 - DNA, 122 bp, Homo sapiens
gtgggggtgttttttagttactctttgctaacttcatgcgtccttgggtactttatggtccgatagtgccctcttgtggcacctagttaagatcatgtagctcagccacagaaatatgacct

SEQ ID NO: 296844 - DNA, 122 bp, Homo sapiens
cccaccctgggacctcagagatggtctgtccgtgcagcctccacaccccagtgttcgcaacggtagtggcaatatgaatcaatatctccttcggggtggtttgatttaatcagggacgtgaa

SEQ ID NO: 296845 - DNA, 122 bp, Homo sapiens
gccatctgcgaccgtgtttttttggcagaacttaatcagtgtcccctaaaacagcttgaacgcattattggaagagctctgtcacctctgtggggcaggaaagctgactccaaagcctgtag

SEQ ID NO: 296846 - DNA, 122 bp, Homo sapiens
cctggaaagctggggagggatggatggggaaggaggccaccggggctccccccttcgcaccgcccctaaacaatgaaaggagttgacttgacccccagcccccggcaatagagggaggtgac

SEQ ID NO: 296847 - DNA, 122 bp, Homo sapiens
ccctgtcgcatcttttgttccctgtggcgcgcaggtcaccctccgttttcttcatggggacgcggtgctggcgcgcagtttcccgcagaaatcctgtggaggggtctgagtggcgctacagc

SEQ ID NO: 296848 - DNA, 122 bp, Homo sapiens
gccaagtcatgtgcatctcagctccaaaggagaaagtgaccattctcattgaattctcatcgccacaaccttgggactgcctgagataagacactccacttccagggcccaccctgagtttt

SEQ ID NO: 296849 - DNA, 122 bp, Homo sapiens
tttcagagccaaacacatctgggttctcatcgtggctccacacttcgctgtgtgagcctgcgtaggtcattagcctctctgcacctgtttacctgtgtggagaagggaataccacctgccac

SEQ ID NO: 296850 - DNA, 122 bp, Homo sapiens
acactaagcctgctgaaaacctcttcagagaaacaaaagccatagaggtcttctgtgtctcgtgtttttcccaggcacacacttaagctctggctcaataaatctcaattgacaaggattca

SEQ ID NO: 296851 - DNA, 122 bp, Homo sapiens
caaaggcacgggcgacagagctccctctgtgctgtcccccagcgtctggaggcccgttcccgccttgctcagaagcacagggcacttaccaaggggccatccgtgaccagcagtcaggggca

SEQ ID NO: 296852 - DNA, 122 bp, Homo sapiens
ttccgcagaagtcgcgcgtgacccggggcgccgccctcctcggggcccattcggatctgccgcccgtcctctccagagcgccccctggcgccctctaggccatcttgattccaccgccgcag

SEQ ID NO: 296853 - DNA, 122 bp, Homo sapiens
aggaacaggaatccacaattctttcttggtattaaggtatcattgacttgcctgatggctcgagtatgttaaccccttgcttcatggctggaattttaattacccctcctggagcttttctg

SEQ ID NO: 296854 - DNA, 122 bp, Homo sapiens
tagaggatgcattagagtctgagggtctaaatagcgtaaataataaataagtaaataaatcgatagtagtgtactccaaacgaggctggaatagcttctattgttgtttcacactggacttc

SEQ ID NO: 296855 - DNA, 122 bp, Homo sapiens
gcccagcccccagtggcccactttgcagcctgggccagcctccagctactgtaactgatccgtgctggtgacatgcccagagccatgggtgccagagtgaatgcaagttgagattctggagg

SEQ ID NO: 296856 - DNA, 122 bp, Homo sapiens
acccccccggagtttgtagatgtggcccccgcggtgtcggcggcgggggagcttggtgctcggtgggagaaaacgcaagtctatgagaaaactcaagtctatgagaaaagttctttagcatc

SEQ ID NO: 296857 - DNA, 122 bp, Homo sapiens
atggccggtcccttgcagggcggtggggcccgggccctggacctactccggggcctgccgcgtgtgagcctggccaacttaaagccgaatcccggctccaagaaaccggtaaatgggtggtg

SEQ ID NO: 296858 - DNA, 122 bp, Homo sapiens
agacccctcagaggtcccagcctccaggatgcagtgttcagagcaatacttctcagtgcacgtctggctgtgtccctgcccagcgctcccagggtcacccctctctctagactcactttctg

SEQ ID NO: 296859 - DNA, 122 bp, Homo sapiens
tcctggcgggaaccgggacagtctattgtgctggcctggctttggctgactggctctgaccgcgctgccgccagtccctgcgcacatcagtccacctgccgtccatcagcccgagcaggtcc

SEQ ID NO: 296860 - DNA, 122 bp, Homo sapiens
aggactgatcccatactgacatcttgtggttacaagtgtcatgacacttacgttgtcctacggcaggcatggacatgcatattcgtacaacaaccatgtcttcatttctcagcatttcaaaa

SEQ ID NO: 296861 - DNA, 122 bp, Homo sapiens
gaaaggagatgcctgcctgcctgcctgcctgcctgcctaccggtctgccttttggtccgccgcttggtggggccccaggtgtaacctctggctgtctcttctgcctggtttttgttgagctt

SEQ ID NO: 296862 - DNA, 122 bp, Homo sapiens
ccgcccggcgtcagaggctcgttgcggacgctccgccctcgccgtccgcgaattggtggacgcggccgccactctgggtcgaccctgttattcattgggcaacgcgtcttttgaaaccgaac

SEQ ID NO: 296863 - DNA, 122 bp, Homo sapiens
tgcaggtgcatacaactcccgccattctctgtgcaaaaatcaacaaataaacagaggcaccgcatttcggattctgttacgcactgtttgcaatggcgcccggtattcgtagtttctgcgag

SEQ ID NO: 296864 - DNA, 122 bp, Homo sapiens
ggcctgcccaccaggcacttacgtgttggccaggtgggtggtgaagacatatacgaactgcgagggaggctttccggggacgcccccgcccccgcccccgcccccaggggcatcaggccgaa

SEQ ID NO: 296865 - DNA, 122 bp, Homo sapiens
cgcggccagggagaaaggccggtgtggcggctggacccgcaaactccgtcccaagtggggcggaggctggaggggaggggggctgcgagggtcacagtcaaggccaactactcacaacagaa

SEQ ID NO: 296866 - DNA, 122 bp, Homo sapiens
ttggtggagctgtcccacctcctctgccttgtttcctctttccagagccactagggaggacggtccagggcaaaggctgttcaacttacaagtaggaaggctgtttcttgtttttggtctgt

SEQ ID NO: 296867 - DNA, 122 bp, Homo sapiens
cgtcagagcaaagccaggctactaccgcaggtaccaagacagtggcaccgcccgcgcctccggaacaggaaaccgagggaattaaaaagcaaacctgagaaagctgggccaagggagggaaa

SEQ ID NO: 296868 - DNA, 122 bp, Homo sapiens
agcctagcctgcagagctgccccatcacacctaggccgtcctgaaccaccatgtccagcccggaggctcaggccagcccttgctcctcagaccctcagcatctaacttggttcttggggcct

SEQ ID NO: 296869 - DNA, 122 bp, Homo sapiens
gcagccgccctgccactgttgggccgggtatggtgtgtctggcttccctctgttctgggccggctccgaaacgcgctcaagagaaatcggaatcagacacggggcagttcagctttggaaat

SEQ ID NO: 296870 - DNA, 122 bp, Homo sapiens
actctgtccacagctgctggcccgggtgctaagctcctcagtgcccagggccagtggcaccgaccgggtgctctgagtggggggccttctgagcgtgcgcccacccagaactcgcggtggcc

SEQ ID NO: 296871 - DNA, 122 bp, Homo sapiens
gtttttctttaaaaagtttgttgaaaaagcaaaagatcttgtacttacatatcagtgactcgttcgggtctctgtgtagtagctgtgagtagttgtccaaactgaagtaagttttaactgtg

SEQ ID NO: 296872 - DNA, 122 bp, Homo sapiens
aaggtgctaacttagcctcggatcagaagtgctctctgctaatgccttgctggtgaaaagcgtatccagtgtaagccctcagaaatcccagaaaacaaagaccaaaagaaacggcgccttgt

SEQ ID NO: 296873 - DNA, 122 bp, Homo sapiens
ggcgcgagtacgttgcaagcaacgagcaaactttgaagggtttctacttcactgcctccccgtccagccccctccaccgccccccgcagcctgagatccgaacacactcggtgccgaaccga

SEQ ID NO: 296874 - DNA, 122 bp, Homo sapiens
tggtcagctacatcaggcccccaaaggtgtgcacatcctaatcccacgaacccgtgggcacgttaccttacatgcaagaggggctctatggatggagtcgggataagtgtctagagattggg

SEQ ID NO: 296875 - DNA, 122 bp, Homo sapiens
ggcctcctccccagacccatcttttactgcagtttccccacgcggatgcctggagacaagcggtccccccggatcaccgggctctgtcccttcggtccccgggagatcctggtggcggatga

SEQ ID NO: 296876 - DNA, 122 bp, Homo sapiens
gtgcgtttctctaatgattattgatgttgaacatctttccatgtgtttattggccatctgcgtatcttgtttggagaaatgtctatccagggccttggtccatttttttagcattttggttt

SEQ ID NO: 296877 - DNA, 122 bp, Homo sapiens
acagaaagagaagatggcgttcttgcctggtatccgaccactaagcatgtactccattcacgcaaggatttggtggttcctaaaagtaaatactgtgtctctgatatgaataaaactacaat

SEQ ID NO: 296878 - DNA, 122 bp, Homo sapiens
cgctaagccttcgggaacaacaagcacagaacttttagggtgctgtctcactgatgtcggcgttagctctggtagtccaggtcaagattataccaaagattcaggacttaaattcctgcaga

SEQ ID NO: 296879 - DNA, 122 bp, Homo sapiens
cgaccggacactccgcggcccaggcccgtacaaccggacactccacggcccaggcctatacgaccggacacactttgacccagccctgcctgtacgaccggacactctgcggcccaggcctg

SEQ ID NO: 296880 - DNA, 122 bp, Homo sapiens
gatcttcagatcttcagctcctgacacttcctcctttctttgggaatggtttttataatacgtgacctgacctttgacctcagttaattgagctaggactggggatttgatacaaactgggc

SEQ ID NO: 296881 - DNA, 122 bp, Homo sapiens
gtcgcgctcccggccttgcgccatgggcagtgttttcctcaggcgggagcaggcagcgcacgcagcaccccagggcgggtcggttacctttccgccgccgcggggctgcgggccgcgacgcc

SEQ ID NO: 296882 - DNA, 122 bp, Homo sapiens
agctcccaggatgtacggcgatggcacccgtttcaactccgcccctctgagcgtctagagcggttcccccatgcggaggaggtcctggctgttccgaaatctcgcctgcctgcggggagcaa

SEQ ID NO: 296883 - DNA, 122 bp, Homo sapiens
cttcatttatttcatatgaggatgaagaagaggattatgtgatcacaggaatgttgcatgcgggataatccaaagctggttatctccaggccctcactctgccaagagatctctctggaaga

SEQ ID NO: 296884 - DNA, 122 bp, Homo sapiens
agtctgggtttggagtctggtcttagccggtagcaactgacgtggcctgaccacccggcccgtccaggtccacgggtgaggggccgcggtgggggtgctcccagcccagcaggcagcgctgg

SEQ ID NO: 296885 - DNA, 122 bp, Homo sapiens
aatttagctaatgtttattaagcatcactttatgccacgggctgtagtttgcactttgtacgttcttaatgcagggagtagacatccactcttagaactggatagtacccctatttcacact

SEQ ID NO: 296886 - DNA, 122 bp, Homo sapiens
acggtgcggccttggccgcggcgcgtacctttaaatagcccgtgaggtcggcagaaagggcgcctgcggttggcgcgccgctgcgcgaaggagccttctgattggttgcgctgggggtgccg

SEQ ID NO: 296887 - DNA, 122 bp, Homo sapiens
tttgctcacaaaggtggtctctggggtaggctcagagaggcccccagcctctgaatttcacgattgagataaagactcattatgtggagtctgatctggttccattagcaaaatgatttctg

SEQ ID NO: 296888 - DNA, 122 bp, Homo sapiens
ggacgagagcgcgggggtggagcgttgtaggcgcagagacgcacgtcctcgggggcgcggcgcagagacgggttgaacctcagtaatccaaaaagccgggctcgggcgccccctgcttgcag

SEQ ID NO: 296889 - DNA, 122 bp, Homo sapiens
cagcaaatgttttcttttaaaaggtcagggaaaggtcgagagcagctttttcatgtgttacgcacaggccttctagaaagggctggtaaagtgtggtgggcatgtccagtgggacaaacttg

SEQ ID NO: 296890 - DNA, 122 bp, Homo sapiens
ataatgacgtaagctgtcccctctctctctccgcctcggctaccaaacagggaatggccccgttcggtggacacatgactcgcgtgaccttacccttacattggactttacattggagatga

SEQ ID NO: 296891 - DNA, 122 bp, Homo sapiens
gggtccgggcctgcaggcgcgacctgaggccgccagggaggctgggtggcgagggcggggcggctgccgacttagccggcctgactggtcgggcttccggggtcccgctgctccctaggccc

SEQ ID NO: 296892 - DNA, 122 bp, Homo sapiens
gccgggtcacactgctgtggggcccctggactcacctacgatgcagaaggtggcagcaaacgcttccacgcaggaaagtctgtagggccggccatagttcacggggttggcggccaccaggt

SEQ ID NO: 296893 - DNA, 122 bp, Homo sapiens
gtttgcctgcgtctctcgttttctttgctgggttctctgcagaggcggtatccttgggatcgtctgtgcccatcttccacgacaagcgtcttttctgtaatttcctccgttagtgctttgct

SEQ ID NO: 296894 - DNA, 122 bp, Homo sapiens
tcccggcttcccataggccaggacgaagtagggggcgggctcatcttgcaggagcgtccacgtattggtggagccgcggacttagagctgcgattcgctgcgcgaaattgccgaaagccctc

SEQ ID NO: 296895 - DNA, 122 bp, Homo sapiens
agccaggtttccttagctacacactagtgacaggacaggacgctgccctaaagtgcctgccgctgactcagggaggaggcttggaacacacagcgggaggtgggaatggcttctgcctcacc

SEQ ID NO: 296896 - DNA, 122 bp, Homo sapiens
cagcttggtggtccctgggtttagtgggaactccccagccatggttaataccatcctctgcgtccgtggtgacactggttcatggacttgcctctttcttcattcccttttacagaaggctg

SEQ ID NO: 296897 - DNA, 122 bp, Homo sapiens
cgcccacgctctcaggggctaccccagttaaggaggcgctgtcctggcgtcggatggggacggggaacgcggcgagggcgctgcgacctctgcccacctggcccggccgcagtctcggagtt

SEQ ID NO: 296898 - DNA, 122 bp, Homo sapiens
caaaccctggtctgccttaggacctatctgcttccgtaaagcttcggtttgatggtgttgcgtttagcttgcgtgactccatctgggtttggtctggtccgttggggcctcttgcgggagct

SEQ ID NO: 296899 - DNA, 122 bp, Homo sapiens
ctctgagcccgagcttcctcatctataaattgaaggatccgtaaacaggaaggccctcatcgagtggtcaaagctggtttcggcgcccacggcacctctccttagggctccgttctacccta

SEQ ID NO: 296900 - DNA, 122 bp, Homo sapiens
ttccgttggggttaatgttggccacctctttctgtttgtctctggcagaaatcaccaagccgccctcagacgacagcccggcccacagcagtgccatcgggcccgtcattggcatcatcctc

SEQ ID NO: 296901 - DNA, 122 bp, Homo sapiens
gccttgccccagaggacagggacaagcctgcacaccaagcaagtgaaacagagctggctgcggccatcggctccatcatcaatgacatttctggggagccagaaaacttcccagcacctcca

SEQ ID NO: 296902 - DNA, 122 bp, Homo sapiens
cactggtgtctaccgacaagtggtccggatgtgcctggcacgcagaaggtgccctgtgggcgcttgctgctgttctcagggtgatgcactccagctccacgtggagaaaaagcagcgccctg

SEQ ID NO: 296903 - DNA, 122 bp, Homo sapiens
tcctctgcaaatctgacaagttggcatccaagcaaaatttaaatgatcaccttgccctttcggccggaaccgccatcttccagtaattcgccaaaatgacgaacacaaagggaaagaggaga

SEQ ID NO: 296904 - DNA, 122 bp, Homo sapiens
cccagtcagggaggacctaggccagggcctcctcccaaggctgtcatctggcggggcaaacgctcttctctcattccttcgtctcccttccagccctcgcatcctttccttctttctgcttc

SEQ ID NO: 296905 - DNA, 122 bp, Homo sapiens
gactttcagagcagcattcaggcaggagtggcacaagcttgtgactcttaacccacccaccggaacctatccaagtgtcccaaccctacttcccgggatttcaaatctgagacataagattc

SEQ ID NO: 296906 - DNA, 122 bp, Homo sapiens
ctgccccgccgcatttctgcatggcccttgtgtgggtaccgacccctggccttggaatggcgaggaggagccatatgaaggactttcagggcgcctccgtgggatgggggaggtcagagttc

SEQ ID NO: 296907 - DNA, 122 bp, Homo sapiens
ctggaagcaaaagaatagctgagccagagcgaacgtgagtgtgaaacctctttaagacaccgttgggctgcttggttctgacattctggactgcaaaacagttctactaggatcctggggat

SEQ ID NO: 296908 - DNA, 122 bp, Homo sapiens
ggccagcaggaatatctctgaaaagccatcagtgccgtcagtcctgagcaggcgtagcttcgtgggcatgtgacctatgcagtcacacatgccctgggctcgggagggccctgcacttggtt

SEQ ID NO: 296909 - DNA, 122 bp, Homo sapiens
ggagcagggttccccacagtttcagaggtggtccaggaccctatgatatttctcttctttcgttcttttttttttttttttttgagacagagtctcgttctgtcgcccaagctggagcgcaa

SEQ ID NO: 296910 - DNA, 122 bp, Homo sapiens
aacaaagcaaaacattctggtcttacttcaagctgcctttgcactgttattcccttgttccgctcatttcacgggattgggttctcctaacttcattgtttggtgagttgctttgctttgct

SEQ ID NO: 296911 - DNA, 122 bp, Homo sapiens
acagctcccagcgtgagcgacgcagaagaccggtgatttctccatttccatctgaggtaccgggttcatctcactagggagtgccagacagtgggcgcaggccagtgtgtgcgcgcaccgtg

SEQ ID NO: 296912 - DNA, 122 bp, Homo sapiens
gatgcagcggaacctgaagatggagatgcttgccgggtgtggggctgggatgtgccaggtcgtggtgacctgtcccatggaaatgctcaagattcagctgcaggatgctggacgcctgggtg

SEQ ID NO: 296913 - DNA, 122 bp, Homo sapiens
atcgggtaggcggctctttgtcgaagctagaggaccggcaggcggcagcagcaactacggcggcggcggcaggtgagggaggcgggagacttaggtggaggccgcgcccggaggggaggagt

SEQ ID NO: 296914 - DNA, 122 bp, Homo sapiens
accctggctccccgccggcagccggcagccagcggcagcggatcgaccccgttctgcggccgttgagtagttttcgatttcggctgatttttgtccctctgcgcttgcccccgctcccctcc

SEQ ID NO: 296915 - DNA, 122 bp, Homo sapiens
ccctccagagggggcctccctcctgcgcggaaagcgtcccggtgcacagcgcccagctcccgggtctctgtcggacctgcgactcccggcgcctttctggtgccctccacgccctccacggg

SEQ ID NO: 296916 - DNA, 122 bp, Homo sapiens
aaacataatttggggtgctgtccttgtatcatatgacgtcactttagaacctatgttgatcggagccatagtggacatctgaccaaggtaagcccatcaacagactgcctggtggcctgtca

SEQ ID NO: 296917 - DNA, 122 bp, Homo sapiens
gctggggtgtgtggccggggtcgctgagtgcgcccggaaccagcaccgccggtggccccgcgccgtcccatctgtgcccaggaaggtactcagcctggctcccccgacggcgctggtctttc

SEQ ID NO: 296918 - DNA, 122 bp, Homo sapiens
cgaattgttttgtttgatgttttgaagaatacgagttgggtcacgaggagggagaaatggcgtaggatctccccaaatgtgtatttatgtaggctaaatatttgtcagccctggaaatgaga

SEQ ID NO: 296919 - DNA, 122 bp, Homo sapiens
ttcacccttcaaatctcagtttttgcttgggcttgaaggaatgggccagggtatcgtggacggagagtcttacaaaatttgagtttttgaggtcagaatttaaaagtagctgccgaaacccg

SEQ ID NO: 296920 - DNA, 122 bp, Homo sapiens
tggagtttgttggggcatatggaaaccacagtctctgttctcagcaagtttgcaccaaagcgtctgagtctatttactcacaatttgccgatgttttgacatttccttgctgatttgcctca

SEQ ID NO: 296921 - DNA, 122 bp, Homo sapiens
gcctccttagcgtcgactgctcggaagcgggaccgggggccctgggcctggaagctgtctcggactcgggaacaaaagccgaagtcagtattcagaacaacaaagatggcacctacgcggtg

SEQ ID NO: 296922 - DNA, 122 bp, Homo sapiens
cttaacctcctgggctcaggtgatcctccctccttagcctcctgagtagctgggactacacgcatataccccactatgcccagcaaattgattattgttattgtgtgtgtggagataggatc

SEQ ID NO: 296923 - DNA, 122 bp, Homo sapiens
ccctgagccaggcaatgctaacagctctcatccttgcccatgacggaggcgggtgagtggcgacccagaggcctgagaagagctcaggggcagccttcaacttcttgggtcagattctttac

SEQ ID NO: 296924 - DNA, 122 bp, Homo sapiens
gcagagggtaaacctccggattaccttaagtgaggatttaaacagacactgagcttcgtgcgttcgggagtggctgcgcgagggcgtgggcaaagggcagagggttagcctcgggattacct

SEQ ID NO: 296925 - DNA, 122 bp, Homo sapiens
gccagcgataggaactgatctgcccagtgagggtatattctcataaagaacactggtggccgatacaaggtcaaggtaacttaagtaggagcccagagcagtaaagcaggagtggtattatt

SEQ ID NO: 296926 - DNA, 122 bp, Homo sapiens
ccatcgacatcccgacaaatgccagagtacatctctccccaggcagcgatgactccatggcggtctcatccctcactacacttttcctagtgctggcatggtaaaaggcaattaactataaa

SEQ ID NO: 296927 - DNA, 122 bp, Homo sapiens
gcggcgctctcccagcagcggaggacccaggactatcccttcggcgagacggatggaaaccgagccccctggaggacctgcccctgcagttctgcctcacacggctcaagtcaccaccgtga

SEQ ID NO: 296928 - DNA, 122 bp, Homo sapiens
ccgagcgtaagcaccgggaaaacggcagcactgaggcctcagcaggctgggctgcgtggacgggcagtgtgcagcagagcctggggcgggggtgaaggagcatccagccccaccctgtccat

SEQ ID NO: 296929 - DNA, 122 bp, Homo sapiens
gaagcggggcgcagaggggcgcagagggaggcattgccctccaggagtatctattcccatcggggtatggtgaatgccatctaggcccatgctccattcccagggccccctcggttcctcca

SEQ ID NO: 296930 - DNA, 122 bp, Homo sapiens
gacgcgcgcacacacgcccccgacgcgcacgcgccccgcgcgcactcacactcacccccgcgcacactcacccccgcgcacactcacgctgccgccgcgctgaggtgcagcgcacggggctt

SEQ ID NO: 296931 - DNA, 122 bp, Homo sapiens
agggctggggagggcgaggggctctaggacccttttccatcagtcacatggccttagtctcgtctgctctggaaagctactattataccgttttgcaaggggcagcatttccagagatcctt

SEQ ID NO: 296932 - DNA, 122 bp, Homo sapiens
ttcaatatggttgttccatccaatcccacagccagccacccaaaaggaaacttcaagaaacgaagttttttcgggtaagtaaagcaatttggggttgcaaaacgtgtctttgggtgtatact

SEQ ID NO: 296933 - DNA, 122 bp, Homo sapiens
aaagaccaccttccacccgccctctcttcggttcagctgcacctctctactccaataaaccgtttgcattccatctggtgagcgtttgctctgaagacatttccttgtcaatctctcccgcc

SEQ ID NO: 296934 - DNA, 122 bp, Homo sapiens
ccggtgcctgctctcaacctctctctcctttttcctaaccacagacctgaccctcctgaccgtgttcgcgcttgttagttcgcacagatccttctgccaacctccctgtcctgttagattct

SEQ ID NO: 296935 - DNA, 122 bp, Homo sapiens
tcgcccgcgccaccacagacggcctccacctccattctcgcgcctcctcttcccgccacccgaggcaccgccccttgacgccgccacgcaagccccgccccctggcttccgccgggcgcgag

SEQ ID NO: 296936 - DNA, 122 bp, Homo sapiens
ttactggcgggtgggctgagccggcccagctgctcggaggctctggcatggtaacatccccgcgcgggggtggaggggctcggggcggtcccacagcgccccctgcggcccgggccgtggcc

SEQ ID NO: 296937 - DNA, 122 bp, Homo sapiens
cctccttcttacagaagtattttaattcaccccacactagaaatgcagcatctttgtggacgtctttttcacaagcctccaaggctccttagattgggtcgttactaaaagtacattaaaac

SEQ ID NO: 296938 - DNA, 122 bp, Homo sapiens
gcttccctctgccctcctggagcttggccgtctcagcacacgcactgccatcctcccaatcgctcagcccaaaccttggagccgtgctgcccgacacaattcatcatgaatcccatcagctt

SEQ ID NO: 296939 - DNA, 122 bp, Homo sapiens
agccgggtgacaaagcaagactccatctcaaaaaaacaaacggccggctatggtggctcacgcctataatgccaccactttgggaggctgaggcaggcggatcatgaggtcaggagttcaag

SEQ ID NO: 296940 - DNA, 122 bp, Homo sapiens
agcggagcgaggaggcgcggaggagagccggcgagcaggggactgggctggcacgacctccgaaggctgagatctcattattaatatcactatatttttggagggagaggcacctttctcat

SEQ ID NO: 296941 - DNA, 122 bp, Homo sapiens
agctgctcccttgaggagcctgtcttcacagcaaaggaatgaaggacaaactgccattgtcgcagggtcccgcatctattattttgtgaccagaggacatgagaacattgctagtctagatg

SEQ ID NO: 296942 - DNA, 122 bp, Homo sapiens
gcccctagcctttgcacatgccatttttttctagaatattccccccatttcccacccctccgtagctttgcttggttaactcctagatatcctgtatgtctcagattagtttcctttttgtt

SEQ ID NO: 296943 - DNA, 122 bp, Homo sapiens
gtttcagaaaacggtcaacatcggcacagttagggctttataaacaggctatccagagttcgactcctcctcctgcactggctagtcttgagagcctcttcccgggaaaaactcgggtggaa

SEQ ID NO: 296944 - DNA, 122 bp, Homo sapiens
tgaccttgagctttctttctggtactgcacacataaatggaaaaaaatgagaattgtgtacgtgtgggctggggccagccatcccaatctggcatgagaagcatgtgcaaacgactatggga

SEQ ID NO: 296945 - DNA, 122 bp, Homo sapiens
tctatcatctttaatttctctgcttgacttgttcctgctttgttctctctggtccctctccggtcgctcctgccactcacgttgagtaccatccaccactagagggcggaatagaacaaacc

SEQ ID NO: 296946 - DNA, 122 bp, Homo sapiens
gaggtcagggaagctaaggtccgagcaggatcagcaggaatacccggcaggcggcggcggcggcggcagcagcattggtgctgcggtccgctgggaaacgcctcctccgagggcggggcccg

SEQ ID NO: 296947 - DNA, 122 bp, Homo sapiens
cgagagctccgggggatgcggcacctctaacctgcaccagcagggctccttctacaactacgggccgaaagccaggaccaaagcgtgtgtctcactagaaatgaaaagaaggtggaaggaga

SEQ ID NO: 296948 - DNA, 122 bp, Homo sapiens
aggtatattcatattcatagatatatatatataaatatatatattcatgtgtgctagtgccgcaggcacaggaaaaaatatgagggctttggacccaggccaacctggtatagaacttgatt

SEQ ID NO: 296949 - DNA, 122 bp, Homo sapiens
gacgcagcgtgaggccaaggcggcgtgagtctgcgcagtgtggggctgagggaggccggacggcgcgcgtgcgtgctggcgtgcgttcattttcagcctggtgtggggtgagtggtacccaa

SEQ ID NO: 296950 - DNA, 122 bp, Homo sapiens
tcgaatgatcaactaagcagtattggtaacacctgttagcccctcaggagccaaggaaaacgttcaaaatcatttgtcttgtttttaaactattgatgttgcttcctcaagcaactgttttc

SEQ ID NO: 296951 - DNA, 122 bp, Homo sapiens
aaagagtatctacttctccggattgttgggaggagggtcgaagcgtagactggccacgcccgggtcccgctctctcgttgcacaactgcaagctagatctgggcatcgaaggaggaacgctg

SEQ ID NO: 296952 - DNA, 122 bp, Homo sapiens
cccaggtcagggaaggctgaaaacatcttggagcagatgtgctcagtctcaggaggatggcggctggagcacttggtcactccacaaagcactggctgtgcaggagcctgtgcacttgacct

SEQ ID NO: 296953 - DNA, 122 bp, Homo sapiens
gaaggacccgggatccctcagcagctccggacctcatctgccccacttcggcatcccgcgcgggaatatgaccatgtaggagtaacccggggctctcaaggactctacggtttgtcacggtt

SEQ ID NO: 296954 - DNA, 122 bp, Homo sapiens
ccctccttcaggccaatctccttatcattgtccctgctgctgtcacctgctgctgcagaccgggggtcccgtccagtctcagcccgtcccgtcctccccccagcctattcccggtcccctca

SEQ ID NO: 296955 - DNA, 122 bp, Homo sapiens
tgttctttaccaacaacagcatccaaaaccaaaactaccttgataccggacagcttcatgcgcaccactttaaggcctgagatccatgagtagaagaaacaaggagcaaagcaaaaggtcac

SEQ ID NO: 296956 - DNA, 122 bp, Homo sapiens
cgggcctgctgagcacctgtcaggggcagctccggggtgcaggtgccaggcaggtggctccggccagcccagccccagcatgagctccttcgacctgccggcgccctccccacctcgctgca

SEQ ID NO: 296957 - DNA, 122 bp, Homo sapiens
ttcccttagagggcgcggctgtaaacgaaagtccgggcgagaggtggatgcaggccttgccgcccggaccctcaggtataattctggaaacttgcacggaagcctgggtcccgccatcttcc

SEQ ID NO: 296958 - DNA, 122 bp, Homo sapiens
tctctattatgtgtatgctcatagattgcagttgtcatggtgatgatatctagccatgctcgggggatggtggtgagaagccggcgcggaggtggaaaagacccccacgcaatccacagtac

SEQ ID NO: 296959 - DNA, 122 bp, Homo sapiens
aggagaatgcaccaagactttgaattgtatttacattcactgtcagtaaagacctggctacgctttgagaaatcaggatctcctaggtcattgcttcgcagctgtgattactgaaatcctcc

SEQ ID NO: 296960 - DNA, 122 bp, Homo sapiens
ggggaaggaatgtgaggctcaggagtggagtcttgctcagttagtctcaccccacctcggcgaagccctcctgtgctgccctgattcccttcacatcaaacatctgcaggggccacaatcaa

SEQ ID NO: 296961 - DNA, 122 bp, Homo sapiens
atacccaccgtataaattatcatcatctgcaaaaatccaaattgaatgaatgccctgccacgcaaagataatgattcctgtctgggcgcggtggctcacgcctgtaatcccagcactttggg

SEQ ID NO: 296962 - DNA, 122 bp, Homo sapiens
cagaaatgttaagtaatttgcctaaagtcacaggatttaacaattggtagagccgcaattcgaaaccatgttgcccttagacttcctctttaacaaatgtgcttaaaatctcttccacatta

SEQ ID NO: 296963 - DNA, 122 bp, Homo sapiens
cccccatcctgaggacaaggttttgggcccttttctgtttgcaggcaggaggctagagagcgctccaggccaggagcccaggaaaggctctcccttcccctccctcctcaccccccaccctg

SEQ ID NO: 296964 - DNA, 122 bp, Homo sapiens
acacttggggagccttgccaggggccagatcataaccctgaggtgacacagggtaggacgcgcaaaaccaccggcgccagggcgtttccgcagggtttcccaaaactcaaacgcagcggctc

SEQ ID NO: 296965 - DNA, 122 bp, Homo sapiens
tttaccctaaaaattccattccccctccaggtaccagaactggtttctttgtgggtcttacgaaggtctgggtctaggttccaagatacttcacttaagtcaaatcgaaagcaccagtggac

SEQ ID NO: 296966 - DNA, 122 bp, Homo sapiens
ggctcactcagtgtctggggctgggcctgagaatgagcctgcagccctgctctcccatctcgcagcccgtgcctctgccctgtctcatctcagtctggcatggacagctcagaaggcagtgg

SEQ ID NO: 296967 - DNA, 122 bp, Homo sapiens
ggaagctgggccggccagacagtagctctgctttccctcatgttttctctccacgtctcacggattccctagagtgtctgggcctcaggccaccgtcatcctagctcctgggccctggctct

SEQ ID NO: 296968 - DNA, 122 bp, Homo sapiens
cattctgctcctagatagggttaacctctgaagacctcagatttcgctgcttttccttgccgtggagagggaataaaacgggcatcgtggcctccgcgatgggcgctcgtgcctgggtcgaa

SEQ ID NO: 296969 - DNA, 122 bp, Homo sapiens
gccgcgggcggggaggggcgggcagcgggggcctctgccaggcgtccagactccccaaagcgcggagctgcgcgctggctcggccccggccccgccccggcgccaaaggaagaagacagaga

SEQ ID NO: 296970 - DNA, 122 bp, Homo sapiens
tttaaccgcgcctgcagtgcccagccgggatgagcacttggcccgaggctgctcaccaggcgcctcctctcccttcccggcgcctactctggcttggaagcgcgggccccaccgagccgcag

SEQ ID NO: 296971 - DNA, 122 bp, Homo sapiens
cgcagaccctaggttggacattaactccaggtgccccaagtcccagccaggagacccatccgggctgatggctggagcgcggagccccgcccaacaggtcaggggcaagagttcgcaatcct

SEQ ID NO: 296972 - DNA, 122 bp, Homo sapiens
gcttttattgttccctaaagactttggattactctgtatcacaaacactgaaatccaattcgtatttttttggcctttggggaagtggaaccatgggtgtgtttgtcatttttagcagtcat

SEQ ID NO: 296973 - DNA, 122 bp, Homo sapiens
tcagagacactgagaaggcgcggctctttccctcaaccccattcgccttcctttcggcggcgttgtcttgaaccaacctgaaaataataagtccttaagttacaagtcactaaagggaagtt

SEQ ID NO: 296974 - DNA, 122 bp, Homo sapiens
acttacacatgggcaaaagcttgcttggagaggccaatgtcccacatggcagagccaccacgtaaagctaaatctgtctgatttcaagccagctatgcttcccctgagactccaaactaagc

SEQ ID NO: 296975 - DNA, 122 bp, Homo sapiens
tttggcttacatattcctttaagaaagagtctttctccataacaaacaaatcatgatgaccgatttgactgcaagggaatgtattacttttgtttgtccaggacagtgaatcatggtgtttt

SEQ ID NO: 296976 - DNA, 122 bp, Homo sapiens
ggcctctgcatgtttaggggctggccctctaggcagcttacaggattcctgccaggtgtgcgtacacgtgggctcaggtctgtaggggctgggagtctgacttttgggtcggccacgtttgc

SEQ ID NO: 296977 - DNA, 122 bp, Homo sapiens
cgtgctccgtgtaggtaactgcatcgcggattacattctccaaaaacactttaagaactccgcgtgtctcctcgtatataaggcctgagatgcgcttaacgcctccacgccgtgccaggcgt

SEQ ID NO: 296978 - DNA, 122 bp, Homo sapiens
agccatacaccgcaggagatgtgtgaaggacgcgagatgctttcttgtggtgtattagaacgtgcttggaaacagttctgatcccagacacgcaagcgtgagcccctccctcctgccttcct

SEQ ID NO: 296979 - DNA, 122 bp, Homo sapiens
tctccttcctgtgtggccccccgcgaagcccttctcagcagccagctggggtatttagaacgttggtgctcccggtacagtggctttgtcagcgtcccctgcctccagtggcttccctgatc

SEQ ID NO: 296980 - DNA, 122 bp, Homo sapiens
aattggattgtaccctagaccctacaccctgaaacatttaggtacggaagatccagcaatcgattctcaaataagtgtcctcagttaacaattcctagctgtcatttgggccctttctgtgt

SEQ ID NO: 296981 - DNA, 122 bp, Homo sapiens
tactgactttttttgtttgcctccggtttgctcccggatgcctgaggtaggtgtcctccccgaagcacccctctcctcaaccgaggctgctgagcacctgctcccggatgcctgaggtaggc

SEQ ID NO: 296982 - DNA, 122 bp, Homo sapiens
atgccggggcaggtggcagtgcaccccgaggaagccttctggacggagtggtggggagggcgcgggcgcatgtctcaggccagtgcacttcacatctcatcccacacctgcgggtttgagct

SEQ ID NO: 296983 - DNA, 122 bp, Homo sapiens
ggcagcacgtgccctgcagaaggaggcgctccgcaggctggagttggagcacctggcgagcgtgcgtgcggcaggccaggagaagcggcggctgcaggtggggcaggcggcagggtgggtcc

SEQ ID NO: 296984 - DNA, 122 bp, Homo sapiens
ggtgctgtggatctctggtccgcacactcctgctcctgactcaccgccgttcgctctcgccgaggaacaagtcggtcaggaagccacgcagtaaccatggcttttaaggatactggaaaaac

SEQ ID NO: 296985 - DNA, 122 bp, Homo sapiens
gagggttaggggcatgcaggaaagggccggtgctcaagttggggaccgaagccaggcaggcgctgacaagtccaccaagcctagacgcgttcgacgcccattggactcgctgggtgtccgtc

SEQ ID NO: 296986 - DNA, 122 bp, Homo sapiens
acttttttcccaccgagaggggcggcaagatctactatgacggcatgggccaggacctggcggacatccggggtgagccgccgggatgctgggagggggcgtaggtccaggtttcatacagc

SEQ ID NO: 296987 - DNA, 122 bp, Homo sapiens
aaataaggcacccgaggctcagagaggtgaagtaattttccagacagcccagctcgtcagcggccagcatttgaagtcacactccagagcctgtttttatcataatagccgctgtgaccgca

SEQ ID NO: 296988 - DNA, 122 bp, Homo sapiens
tttcctgcgccgccccccaaagttggcagcccttgtgtttggccctgccccgaggttgtccgttgagattatgtaactgaacaatgggcctcgtctggaacttcatcttacaaaggggccga

SEQ ID NO: 296989 - DNA, 122 bp, Homo sapiens
gtgccaattacctgggtcacgtgacgcagccgcccacgggcgcgcgcccctgagactccgcgcgtcgtgacgtctccatggatgccccgccccgctcctggcgctgtccacggtgctggcgg

SEQ ID NO: 296990 - DNA, 122 bp, Homo sapiens
ccccttatgaacttcgaccgcccagcaaacagcggcaggtggtgcgcggacacgcgagcacgttagctgcctacctcaagcgacggcgtcttggagcctagagcctcccacctccctcccag

SEQ ID NO: 296991 - DNA, 122 bp, Homo sapiens
cccgccacctcctcacacgcgtcgtgctggatgagctcatgtctgaggctgtgggcggcacggggcagccgagccgggctgcagggaggcccgtcccagagaagcccgcgcgggctggggca

SEQ ID NO: 296992 - DNA, 122 bp, Homo sapiens
tcctcccacatctggccaaccaggccctccacactgcgtgctggcctccacctggagccacgggcccatcctgaggggacggaaatggtttcacctgaaggaggccagctttttaactggcc

SEQ ID NO: 296993 - DNA, 122 bp, Homo sapiens
gagcctagcgaaccagcagagcgaccccaagccgcaattcccccttccgtggatcgattacgaaggcttcctggcaggagctctccagggctgccgacgtgagccgaactgcacattgggaa

SEQ ID NO: 296994 - DNA, 122 bp, Homo sapiens
tccagtcattcctggtgttcaattccttcaggcttggggaggaaattccttcaacggcatcgcttctcggacatgcagtaagtcaaacggacatttggcttggcacacattgagcacttaat

SEQ ID NO: 296995 - DNA, 122 bp, Homo sapiens
cgcgggcccagtgctggccggcagagctcaatatggccagccagtgcccaggtgcatgcccgagggggcgcgtcacggcttcctgttgatccggatgcccgatgtcttgggaggcactgacc

SEQ ID NO: 296996 - DNA, 122 bp, Homo sapiens
cagcattttcttctaagtgtcccaactcttggttttccattacacagacagagtgcaagacgatgacttgcaaaatgtcgcagctggaacgcaacatagagaccatcatcaacaccttccac

SEQ ID NO: 296997 - DNA, 122 bp, Homo sapiens
gcctctgtaaaacctcagcaaaacagtacgtcacatgcctacctcataggatagataggacgcatcagcacagcacctggcacagggcaagtgctggggagagtcagctctggagaccacag

SEQ ID NO: 296998 - DNA, 122 bp, Homo sapiens
aggcggctggacggcccagctctccgcacccggaaggacctgttccacctctccggctcccgtacccctctatccgcatctgagtgaccagatcccactgcagtcaacagcccgcggggtag

SEQ ID NO: 296999 - DNA, 122 bp, Homo sapiens
acaaactacgtactgcttaattctgcatatagtcctgaatgaagatccttaattaatagccgcttgttaaatagaggagctcttaggttaagaacagaagtattgttcttatgcctccctgg

SEQ ID NO: 297000 - DNA, 122 bp, Homo sapiens
gcaggaagcaacggctgttaggtacacacatgatgagttaactggtccttgtttgccttgcgtagccaagtgtaaggtcagatgttagccgtaaatgaaaacacattttgcagcagaatttg

SEQ ID NO: 297001 - DNA, 122 bp, Homo sapiens
ggatgggggccggaaatctcctccccaatatccttcgatgctcctggccctccttgatgacgtaatcatcgcgaggcgaaagatctcgttttccctgacagctgacttcctctggcgcaatt

SEQ ID NO: 297002 - DNA, 122 bp, Homo sapiens
tgtttgagaaccaccgctctagggatcctctggctgacccgaatccccggtgtgtgtgcgcgcttcgtctgcaggtaggagttgtggtctggacagaagcaaagtaggccacactcgcctgc

SEQ ID NO: 297003 - DNA, 122 bp, Homo sapiens
gaatgttgagttcaatcaattcagaacgtcgagatggagcccaactcactccaggtatttcgctctcctccgctcctccgatcccggcaccccccggcaccccccaaccccccagctcaccc

SEQ ID NO: 297004 - DNA, 122 bp, Homo sapiens
tctgatcctgtttttcaccttgatcttcttggaacttttccctgagcccttttaaactcacggtatatcagcaaaattcccctaatcttcagtttcttctgtgatttccgccccccgcccca

SEQ ID NO: 297005 - DNA, 122 bp, Homo sapiens
aaggaaccagcaaagaggtcccctaggtttcatctgtatagattactggtaagtttattacgtctaagagctagttcctaaaaatagctctcatctgcatagtaatgggcctcctccatccc

SEQ ID NO: 297006 - DNA, 122 bp, Homo sapiens
agatgttcatgaaatgcagatttagctgtgttccttggcctcatctcccatgactgtcatcgagggtgcccagtggatcagtaggtcacaagtgaacaagtgtttactgttagctgtgggtg

SEQ ID NO: 297007 - DNA, 122 bp, Homo sapiens
ccgccccgccccactcgcccaccaggctccgcctgccaggccccgccccgcctgcagaggcgcctctgccagaaggcaaacccaataagggtatacagagcgtacagctagaggacaggtgc

SEQ ID NO: 297008 - DNA, 122 bp, Homo sapiens
tcttttcaactgctggttccaactgctcctctattacttttctgaataagtatgccaagccgaagtattggggttcaatgactttattctctgaagtaagcatattttcaatgttttctatt

SEQ ID NO: 297009 - DNA, 122 bp, Homo sapiens
caggatcagtgcagggggcctgcacaccactaggggcaacagtaccttggacaggctgttcgtctcacctggggttctagtttgttaacaagcaaaaggggctcactgcccaatgtgctaga

SEQ ID NO: 297010 - DNA, 122 bp, Homo sapiens
atctcccaactctgatgctccttcccttggtttctgggctcccttgaactcccctagctccgtgctcacggccatctcagggtctcccctgcttgcagctgcacttggtacagcctgtgcca

SEQ ID NO: 297011 - DNA, 122 bp, Homo sapiens
ccaatccttatcaaatgcctaattgcaaaaatttatgtttgagcaaaattccctcaatgccgtgcagcacattcccatttagataattaattttgccctcggatgaagccagaccattaaag

SEQ ID NO: 297012 - DNA, 122 bp, Homo sapiens
gtagtcccggaggtgctgcaaactggtggcaaccgtcttgcgatcctgctcccacttgcgcgaacagaagaccatctcggtgaagtaccacatccagccgataattgggacataggccagct

SEQ ID NO: 297013 - DNA, 122 bp, Homo sapiens
tgtggagcagaccctcgtccactccggaggccgagggtcctccgggcttccgaaggaagccgacctcaacgctggacgcttcttggagaatgattgcgttgagtggagatgtggtctgtcta

SEQ ID NO: 297014 - DNA, 122 bp, Homo sapiens
tggccaaagtggcttcttcttttgctgagacttgactcactcccggcagagggatgatagcggccttgccccgagcgtttatccggctgcaggcgtcattcttggtcgcctgtgtgtccaga

SEQ ID NO: 297015 - DNA, 122 bp, Homo sapiens
tctctctacatttccttacgtattttttgtctgcttttatcagaccctaaagcccctattcgtcctttaagatttaggtcagtggtcatcttctttggaaaggtttacctaactccccagaa

SEQ ID NO: 297016 - DNA, 122 bp, Homo sapiens
tcagttccccaacacaaccttctgtctcagaagggactccggaaatacgtaaaaacagagcgccgggtccacgccttccccaaggaatggggcgtgtctcggcacccctcggtgacgcctcc

SEQ ID NO: 297017 - DNA, 122 bp, Homo sapiens
gctgcacaaaggactgagcaggctgcaaggtcacagaggggagagccaagaagttgtccacgcatttacctcatcagctaacgagggcttgacatgcatttttactgtctttattcctgaca

SEQ ID NO: 297018 - DNA, 122 bp, Homo sapiens
taggctggaaaagagcagctttgctggaggaactaagcccacattcttcagcctgggattcgcagtgagaaacctctcctgcccccatggggcctccagcctccaacctggggtgaaaactc

SEQ ID NO: 297019 - DNA, 122 bp, Homo sapiens
ttcaaactgtcttttcaaaccattttcttaaatgtcttgacagactggtactagtgttaccgtagataaatgcctgctttataccaaagagatatcagaataatttctcttcaatttcctcc

SEQ ID NO: 297020 - DNA, 122 bp, Homo sapiens
aggctcgggccccacgggagcccactgcgtaggggctccggcatagagggctgcaggtcccgagcctgtcccgcggggaggcggctgaggcccagcgagaatttgagggcggcgcgggcgag

SEQ ID NO: 297021 - DNA, 122 bp, Homo sapiens
atggtggcacacacttgtagtctcagctatattacttgagaggctgaggtgagaggatcacgtaagcatgggaggcagaagttgcagtgagcctagaatgcgccactgcactccagcctggg

SEQ ID NO: 297022 - DNA, 122 bp, Homo sapiens
cagtgatgcctcaaaaagtgttaaaaattatgaccaatatattctagtggcaaatgcaggcgtgtatcaattgcattttgaaaagtactgttatgataagcacaatctgagagatatgctac

SEQ ID NO: 297023 - DNA, 122 bp, Homo sapiens
aatcccaattcttttgaatctgtgtaattagggtcattttgtgtagggctaagtgaagctcggctagtctatgtctctgctctggtccaagcaaatgcaaacaggcttaaatggcaaagggc

SEQ ID NO: 297024 - DNA, 122 bp, Homo sapiens
gcgctcccgggcactcttgccttctctgcttttaggcaaggcctggctgaccgactctggcgagtcgctgccctctcggagcgccgtagttctgagatgcagttcacaccgcggcccttctt

SEQ ID NO: 297025 - DNA, 122 bp, Homo sapiens
cagcccccactcctttggctaggcgagcgttggggtcttaaagggaccgcacagctcctccggtccctcctccccctctgcactggatgcacctaggagctccccaccactcgcgcacgccc

SEQ ID NO: 297026 - DNA, 122 bp, Homo sapiens
acctggcagccctccttctcccgggagcgtggcctggagccccccaactactgccgggggcgaggcccaagcggaggccgctcctaggccacaggcaccccgtgaccccgccccggttctcc

SEQ ID NO: 297027 - DNA, 122 bp, Homo sapiens
gccatgcccacagtgacgggtccgagctgttagctgccgtagccaccctgggtgcccgcgcgggattctccactgctctgcagactcaggaagcagagagtgagcctggtaccaccaccttg

SEQ ID NO: 297028 - DNA, 122 bp, Homo sapiens
aggttgagttgggagagctgagaggagttgggatggtttctcttaagctttcccagtccccggccccagacctaccgagccagaaattttggaggtggggcccagcgatctgtgcttttaca

SEQ ID NO: 297029 - DNA, 122 bp, Homo sapiens
ctgaggctcagagaggtgaggtaacttgttgataattacccaactagaaagtacagagcccgcctatgaacctaggcaatgtagttacagaacccacactcttctcttcctctcataatata

SEQ ID NO: 297030 - DNA, 122 bp, Homo sapiens
gagcgatctcaccccctccatccctcccggcaggtgggccgcggtcagatacgtttggcccgcaagtccttttcggacacgttggcatctgctcccaaagagcgccccagcaggacccggtc

SEQ ID NO: 297031 - DNA, 122 bp, Homo sapiens
cgaggaaatgcccaaaggtgggttctcaggcgtgggaagctcgacccttcccggggtcctcggcgaagtggccgaggccgcgccttacgcagggaactccgccgggccatctgggtggcccg

SEQ ID NO: 297032 - DNA, 122 bp, Homo sapiens
atgaatctcagcattctgtgcatgggaacattctcaattttgagtaatgcagtgccattccgagggtgatgcaggtgattcgagccttcctactacttggcccttgtccttgggttggtatt

SEQ ID NO: 297033 - DNA, 122 bp, Homo sapiens
cagtgctcgacatacagatgagaacactgaggcccgagggacagcctttgacctggtcaccgtgctcaggaggaggtggttacccgcgggcctgagggtgctgactttttagaatgggcgag

SEQ ID NO: 297034 - DNA, 122 bp, Homo sapiens
cataacgattggaaaacacacacgggcgcgcgcgcgcacacacacacacacacacacacccgctgttacggcccccactgcagaccccagatcccgccagtccccggactcctcccggcgcc

SEQ ID NO: 297035 - DNA, 122 bp, Homo sapiens
gaagagaagtggttattgagggaaacatggaaagatctagaaccagagagcccaagacagcggcatgaatgcaccactgttcaggaacagttgctcctgaaggagaagggtgctggactcta

SEQ ID NO: 297036 - DNA, 122 bp, Homo sapiens
gagtttgccggggccatgcccttcccggggccgggggtgaggcagctcggcttcccagcgcggcacagcaagccggcgcccttttattcccggcgctgcgaggcttccccaagtccacgcct

SEQ ID NO: 297037 - DNA, 122 bp, Homo sapiens
ctctctctcatcaagtcccttcaaataaaggtctctcttcatctcacctcctcatctaatcgagcagacattttaccctaccccagtcctattcgtgcagataccgataccaaccccatcca

SEQ ID NO: 297038 - DNA, 122 bp, Homo sapiens
tggcctcccagggttctaggagaccctgagttagccgggcgtgcgcgtgggtgtcgggggcgcgcaggtctccagccttgcagagacggaggaggctgccagctgtggggggcggcggtggg

SEQ ID NO: 297039 - DNA, 122 bp, Homo sapiens
gggggtagcaaaggagggagcttctaagaactgtcattgatcattcattcacccagtgcccggctcagcgaagagggcagcctctggtccccgcctgtgggaggtgccggtgctggattgtc

SEQ ID NO: 297040 - DNA, 122 bp, Homo sapiens
ttattgtagctagtaatatcctaacaataagatctcaaaactagaagttcagttaaataacgacttgttccatgcccaaatatttttaaatcaaaatagagtagccaaattattgctactta

SEQ ID NO: 297041 - DNA, 122 bp, Homo sapiens
ctcaagggatcctccccgttcagcctttcaaagtgctgggataataggcgtaagctaccacgcccagccacttctattattattattattattattatttttttttttttagacggagtctc

SEQ ID NO: 297042 - DNA, 122 bp, Homo sapiens
tgactgttatgcagcaggccggcaggtcaataaacttgcttgcctgactttgagtatactcgtcttttctcttggccaaccttacggtagctgtaccagtttgcatttccaccagcaatgaa

SEQ ID NO: 297043 - DNA, 122 bp, Homo sapiens
gtgttggtgcactggtgagtggccgggtcagtgggtgacgtgccccgccaagcttccagccggcccccgtcgccccttaccttccgaggccgtcgggaggacaagagcgcggtcatgccgcg

SEQ ID NO: 297044 - DNA, 122 bp, Homo sapiens
tgctccccctgcacaggcctcacagtgcgtctggccggcgctttatagctgcagcctgggcggctccgctagctgtttttcgtcttccctaggctatttctgccgggcgctccgcgaagatg

SEQ ID NO: 297045 - DNA, 122 bp, Homo sapiens
tccagctttggcgcaacacagagcaccgctttattagaaaaacgttcacagctgttttctcggtgctttttacctggtgtgcgaggggagacggccgcttgcccctcttctcatcgcggacg

SEQ ID NO: 297046 - DNA, 122 bp, Homo sapiens
cccatctccggagctggtctaatgtgtgtctgcccctcgcggagaggtgagcagcccgtgcgggcacgtggaacacagccagggcctgtgagctcccggggctgaggccggagcctggagag

SEQ ID NO: 297047 - DNA, 122 bp, Homo sapiens
aggctttggaaaaccagagagattagagcggtgagttgcgctggtcacattggatacctgcgcgttaggagattctggagccagacggagagccgaatggccttcgcccgccctgcccctct

SEQ ID NO: 297048 - DNA, 122 bp, Homo sapiens
ctttcttactatttttgccgctgccttataggatgatttgtacccaacacagtggatatccgagtatcttttatcagatttcaaatctccagtaaggaatgttgttggtgcagtttggatca

SEQ ID NO: 297049 - DNA, 122 bp, Homo sapiens
tgaaatcagctgactgggtctcgtgacagcctgggcggtggcgacgcaggcgtattagagcgcgctcgctcaaagcctgagcgaagatggcggcctccagagtgaaactctgagaggcagag

SEQ ID NO: 297050 - DNA, 122 bp, Homo sapiens
gcccggcgcgtgagaccctgggcggtgcaggggagcgttgacgacagacgtgggccgtgacgtcgccgcgccctgacgtccagccgactggcggcgcggtcgcccgggagaccgggaaagcc

SEQ ID NO: 297051 - DNA, 122 bp, Homo sapiens
tcaccatcttcttccgctcccccggcccgcagggcaggctgcacagagacgagggcacctcgtgggggtcgccagaccactgcagggcctccacctgggacgcacaaaacacaggctggggc

SEQ ID NO: 297052 - DNA, 122 bp, Homo sapiens
agcttcgagccctatccaatcaggccgctggactgagaactgcccaatcagggatgcagccggagaggagagggcggcatccgggatctggcgcggcttttgcctttcgctccagcctgagc

SEQ ID NO: 297053 - DNA, 122 bp, Homo sapiens
caaccagcctcctaacacgggcagtaacgccctggatagggcctccaacccaccccaccacgccacgccacaggcagtacggcctgggatggcgaacttttcccaccaccattttaccattc

SEQ ID NO: 297054 - DNA, 122 bp, Homo sapiens
ggccgcagctggtattgaaggaaatgacaaaagacaaggccccgggccggagcaggctcacgaggagaaggatggcaccagggtacaaacccagcttcccagccatctcttctgttactgaa

SEQ ID NO: 297055 - DNA, 122 bp, Homo sapiens
tcatcggggcgggcgggcgcgcgcgcgcgcgctcggggctgtggggcgtggcctagtgggcgtgtcgggtgtggcccccgccccctcatcgacctgggatttccttacttatttcgccgagg

SEQ ID NO: 297056 - DNA, 122 bp, Homo sapiens
agcccccgagaggtgctcagagcccacccactccaagccatgcacgtgcacctcgacaatcggagtcctcaaagccctgctttgtaagggctgttttttctgaaatgaaatctgatgaagaa

SEQ ID NO: 297057 - DNA, 122 bp, Homo sapiens
aatgcacctggcacctccacctgctaccctccatcagggctgtttctcaaattagacaggcggcttatcaagcagaagcttccagagagtgccttacccacttaatgccctcacatgggcat

SEQ ID NO: 297058 - DNA, 122 bp, Homo sapiens
ggcatctcgggggcggtggtcgccctcggtgtgcagtgttcaggtgcacaaagtaaagagcgccgttttagctgagaacgagaaccatagcaacgatattagcttacaagttgtccagtact

SEQ ID NO: 297059 - DNA, 122 bp, Homo sapiens
cagtcagcgagcaggacagaggagcccggaagaggcgccgtgcacttccgggtcgaagagcgcacggcggcggcagaggcggcggcggccgggcctaggagcgactctcggtcgtgcagcgg

SEQ ID NO: 297060 - DNA, 122 bp, Homo sapiens
tcctccccaccatccatactggatgttctccacctgactggagctgatttcctcttcctccgtggctttaactactgcccctcagggctgaatctggccccggcctccctctagttcagttc

SEQ ID NO: 297061 - DNA, 122 bp, Homo sapiens
agatttgggcaaagaattccaggcaaagatattccacatgctctaaggtgaaaatgcactcgtgacttcaagatacaggtaaagactaaatgcatgtgaaaaattgttcaatgttattcata

SEQ ID NO: 297062 - DNA, 122 bp, Homo sapiens
gtgctttttttattgactgcagacagatgatcagttcctatgtttatcgcattaggacaccgttcttagcatagtttcatactcatggcacagagccaaccagcacaatttctataacatat

SEQ ID NO: 297063 - DNA, 122 bp, Homo sapiens
ctccgccaccccggccgaattcttgcataaattatgccaggcgcgcctgacgtcaggtggcggcgcgcgggcgcgggcgcgggcgcggcgcggcccggagggagctggcggcgggcgcgcgc

SEQ ID NO: 297064 - DNA, 122 bp, Homo sapiens
atgtaaacatttgtatccctgtccatatatgctaccaatacttcccacttgctaattatacgcctactatatgccaagcactttaacattcagttaaatacttattgagcatctactatgta

SEQ ID NO: 297065 - DNA, 122 bp, Homo sapiens
ccatctccacggcagaggtgatcgtttccagcgcagcggtgcaaagccaaagggcacccacgagttcattacataattcctggtagcatgaggccaagtgtgtatgtgctctaggggaacag

SEQ ID NO: 297066 - DNA, 122 bp, Homo sapiens
caggtcctgagggatatagtgtcggcagaggtggtcgctggagaggcacctctaggcccccggaggccgtggccgctggtcacgaggaactgccgctgtgttttgctttgaagagccacttt

SEQ ID NO: 297067 - DNA, 122 bp, Homo sapiens
tgagaaaaacgtgatcactccccacagcactttaagatccttcaccacaaaaacaaggttcgaggtgcctgagctcagagctgaaggcactgcctgtagctcagactctgacaagagtgagg

SEQ ID NO: 297068 - DNA, 122 bp, Homo sapiens
tccttcattagtgctctaaatattttcaataatttttcacccctgctctaagacttgcctcggtctctccttcggcattatgctcctcaatcgaattctttccttctcctgaggaggcaaga

SEQ ID NO: 297069 - DNA, 122 bp, Homo sapiens
ctgagctcacagtgaagagggaaggaggggcggggtgggccggtggtggttgtttgtgaccgagactctgccccaggagggaagcggctttgaggaaaccgatgcttcctgcctggccctca

SEQ ID NO: 297070 - DNA, 122 bp, Homo sapiens
ggtgggtgcagggcacgtggtggcgaaggtgcgcgcagtggacgctgactcaggctacaacgcgtggctttcgtacgagcttcagctgggtactggcagcgctcgcatcccgttccgcgtgg

SEQ ID NO: 297071 - DNA, 122 bp, Homo sapiens
tacctgcaggcgtgtgaggaggcgcacgcgcagagaagcctgggagcgaacggagagcgacgtgggacaaacgtcatcaagggcgcttgtctgcgcagaagcaggagggtaaggaatggaat

SEQ ID NO: 297072 - DNA, 122 bp, Homo sapiens
cgctcccatttggcctcctgttcatatgaaggaaggcccaggaccatgagttctcagatccgcgggctctgagcaaaccgggtgcaccctgactcggcttcatcctctctaactccacggtg

SEQ ID NO: 297073 - DNA, 122 bp, Homo sapiens
tggctggctggcatgactacccacagggtatcgtgccttaatttaccaggtgacaggcaacgctgccctctcctggaaccatccagcagagccagggctgtacccccaaatcctgcaacaga

SEQ ID NO: 297074 - DNA, 122 bp, Homo sapiens
gtcttgtttccctggcaatctgctggacccctgctccactccgtccaccatccacgggggcgttccagcaaagccggccagccaggccccgctgcccttggtgcctacgccagcccctccac

SEQ ID NO: 297075 - DNA, 122 bp, Homo sapiens
ttgcttctacttcgctttctttcacggcttttgctctttttcctttctctgtctctacttcgcttccgttccttacttttgcttctctttcgttcatgactacgacttctgctcttgctttt

SEQ ID NO: 297076 - DNA, 122 bp, Homo sapiens
aggccccattttctctctttgctgatgattttcagacaggttggtttcacttatttatcacgaactgcagtgtggtatatctgtgggaaagtgtaccttgcagatgtgatagtagcaacatt

SEQ ID NO: 297077 - DNA, 122 bp, Homo sapiens
cccccttctcggactggatctctgttcttggtcgagcctggacccactcaggtagtcggacgccggccagggagtctccacctcctcaccagcggcagccattcggagcgctcgggcgcaga

SEQ ID NO: 297078 - DNA, 122 bp, Homo sapiens
gtctccaaaattggctttatgagttgtaactgcaggagtagacagtaaaggttttgcattcgctgcatcttggcaaagggattatacctcaagcagctttccctggagtccagtcaaataga

SEQ ID NO: 297079 - DNA, 122 bp, Homo sapiens
ctgccaacaaccgctgaaactaccagaggttaaagcaattaacatgagatgcaacctcaccgtggcgcagctccgcgcgcccccggctgctgcgacccgggaggggggagccccggagcggc

SEQ ID NO: 297080 - DNA, 122 bp, Homo sapiens
acacagcagctcttggcccaggtgctaagcccctcactgcctggggccggcggggcctgccggccgctcacagtgcagggcccgccaagcccacgcccacccggaacagccccggttcccgc

SEQ ID NO: 297081 - DNA, 122 bp, Homo sapiens
actgaacaacccgagccccacgtctctgattggctcaggcagaggaagggggcgggagatcggcaacgaagggcgtagccggcttccactcaaacttgaggtttccccccatcccctcacag

SEQ ID NO: 297082 - DNA, 122 bp, Homo sapiens
gttcttgctctgtgtgttgcagtgagagctgattggtaggaagagcctggcccctcccaccgcctctcccaccacgtgatctctgcacaggccgctcccctccccatcggccacgagtgaag

SEQ ID NO: 297083 - DNA, 122 bp, Homo sapiens
ggagaaagaggcaaggcaaggaagagcccacctagacttccgaggaccgcagagacggggcggcggcaggaacttgctcaccccgacctacattcagaatagtccaccttatattggggaac

SEQ ID NO: 297084 - DNA, 122 bp, Homo sapiens
ctctgcgggcaggcggagcagcagcacagccaagaagggcgacagacggctcaccggcaacgtggtggacacagaaccagaggctttatctgcactgttgttctccaagagttgctctgggg

SEQ ID NO: 297085 - DNA, 122 bp, Homo sapiens
ctttctggccccactaccctgcactgagctgtccctgggccagcacctgctgcgggccaccgctgatgaggacctgcggacagccatcctgctgctggcacatggctcccgtgaggaggtga

SEQ ID NO: 297086 - DNA, 122 bp, Homo sapiens
gttctataaacttccaaagcctgctcagttattcatctgctcacaccatcccatgcttagcgcttcttcctctatgttgaggctttcaggagggctactggggaaaaaaaacaaaacaaaac

SEQ ID NO: 297087 - DNA, 122 bp, Homo sapiens
cggcggtagcctgggaggcggggtacggctccgctggttggtggcgctctgcggtcatcgcgccccggcgatcgtagaaacccttttctgaggggcggcgcgcagaatgtggatggggtagc

SEQ ID NO: 297088 - DNA, 122 bp, Homo sapiens
ccgtagccagaatcattcattcagtagtgatccagcctttactaggtgccagcagcaccgcgtagtgttgaaagctatgggttgtgaagtcacgtggtttgggttcaaatcctggcgctggc

SEQ ID NO: 297089 - DNA, 122 bp, Homo sapiens
gccactgcgcccggcctcattttaggaatttcatatcaggctgcagaggaggaatagggccggtatctggggtgttgggtcagtagaagatacagcctcatgatccagagacctggacaggt

SEQ ID NO: 297090 - DNA, 122 bp, Homo sapiens
ccggcgttaaactcctcaatggcttccccaccgccgggacaacccctaaggcggtagccgcggggctctgtgcgtcctgcccttcgtctgcctctccggcttcgtcctctaccctccctctc

SEQ ID NO: 297091 - DNA, 122 bp, Homo sapiens
actggctcatggttggggcaggggaagagcaatccagggcacacaacatacaacatgtaacgtcactgtttattatgaaaataaacggtgatcatgagtggggcaaatacacagaacaactg

SEQ ID NO: 297092 - DNA, 122 bp, Homo sapiens
cttagtgcgcatgtgttgagcccactcacctcacgccggaggagatctatctgaaagctgcgggcttcaggtgtttctatctattgggagatgccgttccctggcgccggctgcaaacaatt

SEQ ID NO: 297093 - DNA, 122 bp, Homo sapiens
tcaagtcaggaactctggctcgttctactccactgtaagtcaaaccgatggtaaaaagcacgacacacacgtcccccaggactttcccaagatggtgctacaggaggccgctgctgggtgga

SEQ ID NO: 297094 - DNA, 122 bp, Homo sapiens
atccattctggggaccatgctggcctggtctagagatgtgggcaatgctgacatccagcacgcttgaggatgcaaggagcaccctacgagaatagagatgcaaaggcagaggaagagaaatg

SEQ ID NO: 297095 - DNA, 122 bp, Homo sapiens
cctgcctcggcttccctctcctggcatagggaccgtgaagccctgtgtgcatgcctggctcgcgcaccttgaccggcggatatttctccccatgcgcccccgacccgggtttcaggctctgt

SEQ ID NO: 297096 - DNA, 122 bp, Homo sapiens
gctcaccatatccagaagttctcatattcctcactttcctggcacaaggtctcacagtgtcgctactggggagcctcctgcagatctgacctcgaacgtggcccagactgcatccaaaggca

SEQ ID NO: 297097 - DNA, 122 bp, Homo sapiens
ccagagcaggaccgtcagtccctcgcctgggtcatggagatgcggtgtcctcagaggactcggcttctggcccgaggcctctcccggcagggtctgagaaacgaaagctgcctcaccatgaa

SEQ ID NO: 297098 - DNA, 122 bp, Homo sapiens
tgcaggcggtggcgctggtgctggcggccctggtcctcctgcccaacgtggggctttgggcgctgtaccgcgagcggcagcccgacggcacccctgggggatcgggggcggcggtggcgccg

SEQ ID NO: 297099 - DNA, 122 bp, Homo sapiens
ataactaagcagacaacatgcgcggtcctgtgcccatcatggctggtggaacgagcctgccgaatccacaacacgaatgcctgagtgtgtgcgcgagtgcaggtccggaggagcatttcaag

SEQ ID NO: 297100 - DNA, 122 bp, Homo sapiens
gtaacctggccgcgttacctccccaggtgagccggactcgcgggtgggttcggcagccggcgatgtggcaaaaaggcaacctcgccttatttctaggggcttggagatgaagagcggctgag

SEQ ID NO: 297101 - DNA, 122 bp, Homo sapiens
ggccgaggcaagagtccgagagggccgtgtttcgggaagctagacctttgcagggactgccgcgtccccgcccacagctccggttcagtctccccagcatggtgcgccttcctcctccggca

SEQ ID NO: 297102 - DNA, 122 bp, Homo sapiens
tgaagtcgtggttggttagaggaggaggcgctttgtcgggcgctcctcctctcggccccgcgaggccattaattcagaatgggcaagtggggcccctcaagcgatatttctttgtcaaaact

SEQ ID NO: 297103 - DNA, 122 bp, Homo sapiens
aatttttcaacctcccagaaacgacggcagggaagatgcctgaccctcaaaacaaaagcgcgcatcctaccggggcaatgggccccgtgggacgaggtgcagggccgctgtggggcgggcag

SEQ ID NO: 297104 - DNA, 122 bp, Homo sapiens
tcccaccctcccactacagctgtctcacagtttgggctctgagataagaggtgtttcatccgtcaaagaagaaaagtccatcaggaaaaaaaaaacccacaacaatcccataagtcatggag

SEQ ID NO: 297105 - DNA, 122 bp, Homo sapiens
ccttggaccgcaaatttgcatgggcccctttgccaaagccctgtgcccactgctggggaacgctggggactccgctcttgtggggcagtggggctgggtgggagcaaccccccatccgggtg

SEQ ID NO: 297106 - DNA, 122 bp, Homo sapiens
atcaggtaattaatggacgcccggatttcctccgccataacataaagagcgtgaagacggcgctttaattccagataattaaagagcgatcagttcgcgagtgctgctcggggagtgctggc

SEQ ID NO: 297107 - DNA, 122 bp, Homo sapiens
ttcccgcctaagagcagcggcagtggctcacctcgggagctacaggggcgctcctacagccgctccagcatcacagcccattccctcccttgcctagtcctgccaggcaaaccgtgaaaaca

SEQ ID NO: 297108 - DNA, 122 bp, Homo sapiens
gccgttgtaaagctttagcatcctgtgcgccttccgccgacgctccgtgagcctccacatcggggccttctggggagtccccaggtccacaccccaggctaggcccagtgacagctgctgcc

SEQ ID NO: 297109 - DNA, 122 bp, Homo sapiens
tcctgaaaacatggtttcctgggcctcgactctgagcaggcagcagatgtggcaaggtgacgacagtgaggcctaggcagggaagacagaattcaactctgtttattaatctgttggctcat

SEQ ID NO: 297110 - DNA, 122 bp, Homo sapiens
gggagccccgccggccgcgcctagtgcgggcccgccgagcccacgcccacccggagctggcgctggcctgcaagcacagtgcgcagccccggttgcctcccgcgcctctccctccacacctc

SEQ ID NO: 297111 - DNA, 122 bp, Homo sapiens
agtggcattaggtacgctcactgtacagccaatgcctccataggccactttttaaatacgcggggctaagggccaacgacaagattgtcatcgaggacaataagtcgatggcgctgcctggt

SEQ ID NO: 297112 - DNA, 122 bp, Homo sapiens
ccggggcccgggccggctcgcgcggggggtatgatgacccggctgcggggccccagatctcgtctcctccgccgcctcctcacggcagccccagctcgcggctgagaaccagacacaccggc

SEQ ID NO: 297113 - DNA, 122 bp, Homo sapiens
ggcgccgagaaggaggccccgcccgacaggcagctgcggagccatctgctgcgcgggcggcgccgctccagtgtttgtttacaacccggcccggcgagcgacaagagctcggctcctcttcc

SEQ ID NO: 297114 - DNA, 122 bp, Homo sapiens
tcatgcaggccgaacagagcaaccagggcgagcaaccagggccaccaaccggaaaccaagcgacatctcctctgatccccaccgtgcctgaaaggtggtggagtgggcagaatagtggcccc

SEQ ID NO: 297115 - DNA, 122 bp, Homo sapiens
agaaggcaacatccgggtgagggacaggcggagcgacttgcggtgcctgggattggatcacgggcttgccagttcacggtgggaacagccaatagaagagttaagaaagaaggtgggcgaga

SEQ ID NO: 297116 - DNA, 122 bp, Homo sapiens
gctccagatggcgccgggtcccaatcgtggctccacacagggttgtctgggaggacgggacggtgtctctggccagcactggcagcttccgggccttgtaccccactctgcctggcatgagc

SEQ ID NO: 297117 - DNA, 122 bp, Homo sapiens
tccctccttgtctccacccactcctccatgagaaccgagttgggaatttccacgggaagtcgggggtggcggggagagacagggtagaaataaagagcgcatccttgagagggggtaggttc

SEQ ID NO: 297118 - DNA, 122 bp, Homo sapiens
aaaaaaaaaaaaaaagccaggctcaactttaaggaaaaaataaaataaaacaccaagctccgctccactgtgcaggacaccatggcatgtgcttgtcatcagttcctccactcacctgggtc

SEQ ID NO: 297119 - DNA, 122 bp, Homo sapiens
atcagctctctccccactcctggaggcctcctagactgtcgcctaagactggaacactctcgcccatggcaaacgtctagttatcccctcccgcctcagtttaaagccattcccaccctccc

SEQ ID NO: 297120 - DNA, 122 bp, Homo sapiens
gctggctgccagcagcaggtagctgcaggtcaggatgggcctgcggccaaacctgtagctcgaaggagaggaggggccaggttagccacagtgtgcctgccaagaggagtgactctgcatgc

SEQ ID NO: 297121 - DNA, 122 bp, Homo sapiens
atgggctcgcagagcagaacaaagcagcagaactccaatgtccgctgctgctcagcaggacgacaactcacatcttcattaacagtgaggagccagcaccgaccaggaaatcgtctggttag

SEQ ID NO: 297122 - DNA, 122 bp, Homo sapiens
accctcctgcccgcctcttcccagaacccctggattacttttcgggcctgcaggtagtcccgaaggatcccagacctcagggtcctcacggagatcacacctgcaaaggccctggggccggg

SEQ ID NO: 297123 - DNA, 122 bp, Homo sapiens
gaggccgcgtctccttagtaatcgcgcgggcagggctcggcaaggggtcgctgcaagggtcgcgctcacccgccccgggtttgggcgctgggggtggggaagggagagaaggttcgaacagt

SEQ ID NO: 297124 - DNA, 122 bp, Homo sapiens
ccacaaatgtgaaatgcatgaccacatctgccttacatgtatgtcatttgtcagtaaacacgggctaaggaattccttgagccccatgaagagacaaaaaagtttgtcctcagagaatttac

SEQ ID NO: 297125 - DNA, 122 bp, Homo sapiens
ctgctgcctgagccttcctggagttacttaatccaccccagccccaggcactgaaccacgcgtgcagacccctcgtcctcagttctgcggagacagagtccccacagcatttctgctcctcc

SEQ ID NO: 297126 - DNA, 122 bp, Homo sapiens
atttggggagttagactggcatgagctaactaccagtttgtcccaggcattcaaaaaatacggcttcaaggaaagcaatggtcaaaaataaaggttgaaaataaaaacattgtctagctttg

SEQ ID NO: 297127 - DNA, 122 bp, Homo sapiens
gcgggtaggaagaggtgggagcagagttaggctgagtactgagcgaagccccttattttgcgtcccagctgcccttccagcccccagcgcccagcccccgccgcggctgggtgaagaggagg

SEQ ID NO: 297128 - DNA, 122 bp, Homo sapiens
gcggggtgaggtggtggcgactgagcctgagaagtcttcccctgcagggtggtccaggcccggcagcagaggcagcgctggattattgggggccctctgtctggggtgaggcccgcctcagt

SEQ ID NO: 297129 - DNA, 122 bp, Homo sapiens
ggggcgctggtccaccgactggcccggcagttccccagtagcaccgggggtttcctgccgcgcgcgtcacctggttcagtttagagcctccaaagctgcaaggcaaggcgaagatgggcagt

SEQ ID NO: 297130 - DNA, 122 bp, Homo sapiens
gagcaacgacctgccggtgctgtttgagctgggagagggctcctacttctccgaaggggacggcttcgccgaggaccccaccatctccctgctgacaggctcggagcctcccaaagccaagg

SEQ ID NO: 297131 - DNA, 122 bp, Homo sapiens
caacctgcgctacaaccacatgctgcggaagaagaagaacctgctgcttcagtacaacagcggggaggacctggccgtcaacatcatcttccccgagaagatcgacatgaccaccttcagca

SEQ ID NO: 297132 - DNA, 122 bp, Homo sapiens
gaatggcaggcagagaactgtcattcactatgacaaggtcactggttcttgagtaaccaccgaagggactgcagagctgagaaccagtgactggggcccaggaggtccctaggaagggcagg

SEQ ID NO: 297133 - DNA, 122 bp, Homo sapiens
gcctgtgcaaatgagaccgagtgtgactcgatccagcagaccaccaggagcctggacagacgctggaggaacatttgtgccatgtccatggagcggcgcatgaagtaagaactaagctcccc

SEQ ID NO: 297134 - DNA, 122 bp, Homo sapiens
tcttcggagccagtgggaatttagcaaatgactggatggggtctgggcaaccaggcatcacgaggcgccttctccttccactcggtggagcagggtctccagtgaatgcggcgtccacgcct

SEQ ID NO: 297135 - DNA, 122 bp, Homo sapiens
ccctgatttctaactccatggattagttttgcctctctttgaactttacataaacaaaaacgtagtgtatttcctgtgtctggcttcttgcactccaaaatatgtttttgagaattatttat

SEQ ID NO: 297136 - DNA, 122 bp, Homo sapiens
ttgactgtgagcttcgcggcgttcgcgcctcaccgcctcaccgagggtgggtctttcgcgcgcagaattgtgtaggattttccaaagggagtaaaagccgatcggggcctacttttaacatt

SEQ ID NO: 297137 - DNA, 122 bp, Homo sapiens
aggtcacacatcccgggtcctgagtctgaccatgagcccagatggggccacagtggcatccgcagcagcagatgagaccctgaggctatggcgctgttttgagttggaccctgcgcggcggc

SEQ ID NO: 297138 - DNA, 122 bp, Homo sapiens
gggtcacagtcctctgatcactaggttaacgtcactactggtcagccctgcctgaactcccgcagggaagggggagagcgaggcacgtctgccctcctgtcccatcatgactgggaactcag

SEQ ID NO: 297139 - DNA, 122 bp, Homo sapiens
ctgccgggccttggcgcgcactcaccggggtgggggcattcaccaccgacaggttgtagccgtagaggaaggaggagccgaaggcgcccgcgagggaggccacgaggagcgagcaggaccag

SEQ ID NO: 297140 - DNA, 122 bp, Homo sapiens
gtaggctcgaccaggaaggggacctggttcgtttcgcccaggctggcacggcttcaagagcgcctcacctctctttacgttgctggacagaccagttgagctctttgggtatgcacgtaatg

SEQ ID NO: 297141 - DNA, 122 bp, Homo sapiens
gcccagagcactgggcaatcgttacgacctgtaacttgagggccaccgaactgctactcccgttcgcctttggcgatcatcttttaaccctccggagcacgtcagcatccagccaccgcggc

SEQ ID NO: 297142 - DNA, 122 bp, Homo sapiens
atccacttatctgtccatccatgcatcttcccaatgttgagttccaggctctaagctgagcgctgggaaaacaaaaaagtattatacaagacccctgccttcagagagttcctgatcttttc

SEQ ID NO: 297143 - DNA, 122 bp, Homo sapiens
tgatattgtttttaatatccagggggcagaagatgatattactcccaatattgcagagggcgtacaaagccccgccccgtgatattcttcctaatatccaggaggggagaggatgaaattac

SEQ ID NO: 297144 - DNA, 122 bp, Homo sapiens
cctcgtacccgtccacacccaaggactgtgtttggagaggcagatgcattgagctctaagcgttcttgcatccttaactttgaaaccataaaagcatgttcttttctttgatctctgcatgt

SEQ ID NO: 297145 - DNA, 122 bp, Homo sapiens
tttttatctgatctcaaagcacttaataaataggaactcattaaaaacataccatcactgcgctgagcatggtggctcatgcctgtaatcccagcactttgggaggccaaggcaggcagatt

SEQ ID NO: 297146 - DNA, 122 bp, Homo sapiens
ctcctgccctccgatggcatctgcaggccccaaatggtctccggtcggtgggctcctccacgccaagcttgggcctcccggcgacctctgcagacccaagttgtcctgaagtcggcctctcc

SEQ ID NO: 297147 - DNA, 122 bp, Homo sapiens
gggagaccagggcttatttcttccctccgctatgactgtaaaagacagccatctccaaagcggccatttcacaggcctccccttagggatgcattctctttctcagggatgttccttgctga

SEQ ID NO: 297148 - DNA, 122 bp, Homo sapiens
ctccggcctcagcctccggggcctcagccggagccctgtctatgccgggccgcagcccagcgagaccctgttacactcactgcccccagacagcacccggtgggacacggccagctggggca

SEQ ID NO: 297149 - DNA, 122 bp, Homo sapiens
ggtgcctcgccgtcgaggaaggctccgccccgcctctaaaagcggctcccttcgcgcccacgcccctgggaggctcgccctgcccacccctcgcccccgcagaactccaccctcccccaccc

SEQ ID NO: 297150 - DNA, 122 bp, Homo sapiens
aggctttcgttgttcttcgcctcccactagggcgggttgagggtctggctccagtagccccgggtgcctctcactccttgggcgcaatgctactatcctggcagaaccctcgccgaaccctc

SEQ ID NO: 297151 - DNA, 122 bp, Homo sapiens
tgcgctgggggcgggtgagcgggcggcaggtttctcccagggaaaccgggtttctgggcgcgcggaggtgccctacctttctccccgggatcgggctccctctcccgcttcctcccctctgg

SEQ ID NO: 297152 - DNA, 122 bp, Homo sapiens
cgcttgcgcaatacgtggtaagaaaccagctgtgaggggctggcccaacgcagagcggcgcgaggtccgcttggcatctacaacaatcgaggggctagtccagaagttcaaggcggggttac

SEQ ID NO: 297153 - DNA, 122 bp, Homo sapiens
gggagctggcagtcacgtggcgagtgcggggagcaagtgggcggaggaggaagtgccacacgcctttaaacaaccagaactcgcgagaactcaccatcaccaggacggcaccaagcctcgcg

SEQ ID NO: 297154 - DNA, 122 bp, Homo sapiens
gcaataagattttcatgcaccataaactttcctgagtatctcaaccagttttgttgatgccggggtttgttcaaagctgcagattactgggcctcaccccagacctactctacttaaatata

SEQ ID NO: 297155 - DNA, 122 bp, Homo sapiens
cagaaagatgaagcttcctcaatactccaagataaactgtggcaccgagcccctggctggcgtgtttggacagtctcttgtccccacagcccctgaaacttcttgtcattcactcgtattcc

SEQ ID NO: 297156 - DNA, 122 bp, Homo sapiens
acagacttgggactagtctcaagcagcgaagagctgccggtgaggcagcaccagcggggacgcccggcggagccagagccccggggtcgcggcggctggggaggggaccgacagctcggtac

SEQ ID NO: 297157 - DNA, 122 bp, Homo sapiens
gcgaggctctgtcaaaaaacaaacaaacaaacaaaaaggtgtccgggaagtgaactgagtcgcaactgtggagaggagagatttcactgggcagctagtagtctctgaccccatcttttgat

SEQ ID NO: 297158 - DNA, 122 bp, Homo sapiens
tgttggcgcgaaggtgcgcgagtcagccctcgcgctgggggcgcaggaaacaatagaggccgcgcgcacagagcgagctcttgcagcctccccgcccctcccgcaacgctcgaccccaggat

SEQ ID NO: 297159 - DNA, 122 bp, Homo sapiens
acggaagagtggctggtccccagagccacttagaggttctgtcttctggctcctggcagacgtcactagattcagaacgaccagcccagccccaaagagcaaaggggacatgccgctttctg

SEQ ID NO: 297160 - DNA, 122 bp, Homo sapiens
cgaagcctgcggccccaccctacccgggctctctgcccctgcctgaagtctcagttgtggcgctgataacaacgctccctctgtgctaggcgccgggccaagcaccacgcaaacatgactca

SEQ ID NO: 297161 - DNA, 122 bp, Homo sapiens
gaggtctctggcctcggccagagcaataaggtggatcggtgcttcccacccttccagctccgccctcccgaccacattcctgagaagccctactcccgcgacgccgcgcccgggaggaggca

SEQ ID NO: 297162 - DNA, 122 bp, Homo sapiens
cacataacccaaacaggctggttatacttaacatgtcaggcaggagtcctcattgcaattcgggggctagtatctttggccctctcaggtggcagatcaagtgtaagagaatgagagcataa

SEQ ID NO: 297163 - DNA, 122 bp, Homo sapiens
taacttaaaccgtgcagaccagcccaagtctgggcacaaagccggctttatgtgaatatccgtgggacgatcaagaacaatctccacgtgggttacatccccacgcccccaccctttccact

SEQ ID NO: 297164 - DNA, 122 bp, Homo sapiens
tgttttaataacctatataatttgacaattttaatttagtctgtgagccattctgttgtgcgacttcttgggtagcttgtctggtggtatactaggaggtacattgcaacaaggtaatttcc

SEQ ID NO: 297165 - DNA, 122 bp, Homo sapiens
aggcggtgagtgactgtggggtgcatgtgcgtgcacttgtgtattcgtgggagggggttacgcgctgtctccttatcctgtgcacacttgcgcacactctgcacgagcacccgcccggccaa

SEQ ID NO: 297166 - DNA, 122 bp, Homo sapiens
ggtgggcggtgtttcgtcgcgacagactctaggaaatttcacgatagaactagctttaggcgcttgagccttgccgtctttttggggtgtggcctgtctccgtctgccaaaggctttgagct

SEQ ID NO: 297167 - DNA, 122 bp, Homo sapiens
agtgtagaatgaactaatacagcaggcaaaccagaacagagtcatttgtgctaggtgccacgtaatcagactgaacttcaaaattagccattttcaaccaccccccaaccccccccccccaa

SEQ ID NO: 297168 - DNA, 122 bp, Homo sapiens
tcctgctgagagccacaaaatagtaccttgagatctacagaagcaaaacaccttcctctccgtgaatagagagatctgcgaatcgctatatgttcataaagagatgtggcaaataaactaga

SEQ ID NO: 297169 - DNA, 122 bp, Homo sapiens
tccaagtctgcaagcttgcaaggtcgcgttcatgagaactttcatcctcctgggacccggcggcaggcacatgggcctggatagttactgagaaaattctttcagaagggctttcggggacg

SEQ ID NO: 297170 - DNA, 122 bp, Homo sapiens
tggctctagctgtcggtgaacacggaaagtggtgtttgcttaacgtggagccagactacccggaataggtgttttcataccggacggagatcagggtgttagtgagcagggtggtagagctt

SEQ ID NO: 297171 - DNA, 122 bp, Homo sapiens
gtcgcgcccccagcccgacccccggcgacactgccccggcgcgccccatccccgcagccccgcagaagagccagacctgcctttcagggcggagcccttttcatcacaccaggtcacccaag

SEQ ID NO: 297172 - DNA, 122 bp, Homo sapiens
agagtttgtctctgtactggctaccttggcaggcatgaggagcaaacaggctttattccacgtggctgcagagcaggccaggctggctgtacacctgcccttctatggtgcacagcctgaaa

SEQ ID NO: 297173 - DNA, 122 bp, Homo sapiens
gcggtgccgagatcgggggcgccgagcgcggcagcagagagcggtagcggcccgtcgtggcgcaccagaaccgaaaccagcggcagccgcacggccacttgagccgccccttcctgctggag

SEQ ID NO: 297174 - DNA, 122 bp, Homo sapiens
ctgtgtgattcttatgatgtctgaggctggagacaccaggccaacaaaggttcccgaagtcgagcaagaactggagtcccccgtgggcttgctagaactcacactgcagggcccatccaggg

SEQ ID NO: 297175 - DNA, 122 bp, Homo sapiens
tctgggggcagaggagcagggtcagaggcggggtcccatgtgcctcggcccacccgccggcgcccaccccccatactgactgatatggcagttgatgcccttccagcccgggatgcaatcac

SEQ ID NO: 297176 - DNA, 122 bp, Homo sapiens
agtatatcgggtgcatctgagaaagacattgtgcactctgccttggcatacacaatggagcgttctgccaggcaaattatgcacacagccatgaagtataacctgggattggacctgagaac

SEQ ID NO: 297177 - DNA, 122 bp, Homo sapiens
acccaaaatgctttaagaatcacaactctagcccttctaatcaaactgctttggccaagacgtccgttttgagttgcatttgaaccctagccctcggtgggaggcacactcacttccacgtt

SEQ ID NO: 297178 - DNA, 122 bp, Homo sapiens
cagagggccccgcctcccccacccgccacccccgcccactcgggcgcccgtgattggctccgcccgcccctggctgcgcgccgaagcccgcctccctcgcagctaaagcagacggtacccgg

SEQ ID NO: 297179 - DNA, 122 bp, Homo sapiens
atgcctgaacccctctccccctgtgggcttccacactgcccaaacctccccgacgggcaccgccccctgctccgccgtgccccgtcccatcaaccacccaagggctgaggagtgcaggcgcg

SEQ ID NO: 297180 - DNA, 122 bp, Homo sapiens
agaaaacagaatacctagttccattgattaggcaatggtaaaagctaagttttatactgccgttgttagttgtggagcagcagttatctacccatattctaaaaccatgttgcagagagaga

SEQ ID NO: 297181 - DNA, 122 bp, Homo sapiens
tgcagcctgcttcacttgtgcagcactgtgcggttgtctgtgctggctcatttatctcagcggcttcgtggtggtccctgcatggccctgtggcttactgttgcccttcgcctctggttggc

SEQ ID NO: 297182 - DNA, 122 bp, Homo sapiens
ctccttgtggccatagaaccagtgcgcagggggtgcaggaaacaggtgcatggctctgatcgtccatctcctcctctggtacaacctgattacctgaaacagcagcagagacatgcagagga

SEQ ID NO: 297183 - DNA, 122 bp, Homo sapiens
caccaaggaaaaaatgcagctggcaaataagcgcacgaaaagatgctcaacatcgtacgtcgttagggaattgcaggttaaaacaacagtgagacaccaccacatacctgtaagaatggcca

SEQ ID NO: 297184 - DNA, 122 bp, Homo sapiens
atgcctgagcctcccccacgccgtgggctcctgcactgccccagcctccccgacgagcgccgcgccctgctctacggcgcccagtcccatcgaccacccaagggctgacaagtgtgggcaca

SEQ ID NO: 297185 - DNA, 122 bp, Homo sapiens
caggggcgggccgccctgcgctatgccctctggctggacgcgtagggctccggctcactccgcccaagtcagcctcccgcatcccgcacgcccgcgctggggcccgcacctgctcagcaggc

SEQ ID NO: 297186 - DNA, 122 bp, Homo sapiens
gggtgataaagcaatgccccttgaaagcagaacgatccagctcaggacagcgggttggagcgccagcagggactttctggacatttgagtctgggtcactttgttgttcaggatggttcaaa

SEQ ID NO: 297187 - DNA, 122 bp, Homo sapiens
ggacttgctgtacaagggagtcgccgtcctctcttgtgttgaccgagattcctcagcaggcgggggcagagccggggaaaagcctggaatgggaaggggaggctcaggtgcacctgagggag

SEQ ID NO: 297188 - DNA, 122 bp, Homo sapiens
ggtcaaagctaggctctgcctgaggtccctggacccacctggtcaaagctgtagcatccccggcagcagcggcgggcatcagggctgcaccgcacctggcatgttgagaggcgccagccacg

SEQ ID NO: 297189 - DNA, 122 bp, Homo sapiens
agagctcacggagcttaaggaacctgcccagagccacacagccccagccacgggatcgagcgccaccctggccagcctgtctgggcaatccctcttggctggcatgcttattcatcttgtcc

SEQ ID NO: 297190 - DNA, 122 bp, Homo sapiens
cacctttcctgcccggggagcggcctctgccctaagcagagcaggtctgggtttgactgacggcccggcgcgtcttacaggccccagaagagcgtgtggcatggctcggaccccaacgggcg

SEQ ID NO: 297191 - DNA, 122 bp, Homo sapiens
tattttagttctatatctagctagtatacaaataatgtaacaccatctcattttgctttacgtttcttagaatactagctagtaaggtcttatttcatatcctttcttggaaaccacatgtg

SEQ ID NO: 297192 - DNA, 122 bp, Homo sapiens
ggccatacccattactggcaggggggctaaatcctgtcatagcaacctcaggtggtaggacggaggactcagatgagataataggtatgaaaatcttttgtaggctgggagcagtggctcac

SEQ ID NO: 297193 - DNA, 122 bp, Homo sapiens
ctataaatgttttgcatctaatgttatagttgtatgaactttctacaaattggccaaaaacgtaattaaccaacattaactttacactacttgttagctccgtctgtaacaaggaaaaatga

SEQ ID NO: 297194 - DNA, 122 bp, Homo sapiens
gaacttctgggctcaagggatcttcccacctcatagcctccagaggagctggggatacagcgcacacaaacatgcctggttaacctttataaaattttttttgtagagatagggtttcactg

SEQ ID NO: 297195 - DNA, 122 bp, Homo sapiens
atgctggcacactggcagggcatccaccggtggcacgaggtggagtttggtgggggcagtcggaagagagtcggaagagagccggatgcccccgagtggcccaactccaggggacaaccatc

SEQ ID NO: 297196 - DNA, 122 bp, Homo sapiens
ggctccggcagtagactccagggaagaagttacactgcctctgagctgccttctctacatcgcagtggggtcagcttctaccggggcggcgtcccggggtcttggaactgcatgcagactgc

SEQ ID NO: 297197 - DNA, 122 bp, Homo sapiens
agggacatctcggtaccctttctgcactccgtgggccctgggtgcgctgaggcctggaggcgtctacactggctccacatccacttcccccgcagctcgtgtgggcgctcgtccacaaacac

SEQ ID NO: 297198 - DNA, 122 bp, Homo sapiens
acgatggatgatggggcccggggttcactcccagaaaccatacccgggcgacttgaaatgcgaactccagaggtggcaccattataagttaggacgtttctcagggcttaaagtgaagggta

SEQ ID NO: 297199 - DNA, 122 bp, Homo sapiens
tgtggtctgtggcaacaggtgtcacttgaatgaatgtcccagaggaagctgggtgtctcccgccctggctcctttccttgacctccctgccccttcttggcccaggtgtcctggctcacagc

SEQ ID NO: 297200 - DNA, 122 bp, Homo sapiens
acataatggcatcaggtggttgtataatgtgtattctgcctggaacgtggtcactgacaacgtggtgactgacaggttatcgatggcaggaagctggggccactgtgcccatttcggggatt

SEQ ID NO: 297201 - DNA, 122 bp, Homo sapiens
cgtctcatgcgatcctgggagatggcagaagtcccgggacacatggagtgtgggctctttcggaggctgttggatccctcctgaatgtaagtgattccttcttaaagcatgctgattttcct

SEQ ID NO: 297202 - DNA, 122 bp, Homo sapiens
cactgtgaggcagcagggcccactggctgctctagcccacagtcaggccaggtccagcgtcgagctgctctcctgcagggcatggctggctggcagcacccaccgctttggccctgtgatgg

SEQ ID NO: 297203 - DNA, 122 bp, Homo sapiens
ggcccggccccgggggcgcggccgcccgggcctccgtgtgccccagggggctccgggccgcgagccgctgccgaatggcttttgacaaaaaaacccttgaccaccaaggccagcctcttcct

SEQ ID NO: 297204 - DNA, 122 bp, Homo sapiens
gcggccgcgacttccccgacgcggggcgctgagaagcagtgagtgcctgtgtgtacctgccggccgggaatataggacttgtcgcatctcagcccttccctcccggagcgggggcgagaggt

SEQ ID NO: 297205 - DNA, 122 bp, Homo sapiens
ggctcgcgggctccccggagagcggccagtcactgggtgaggctcacttttgggacagcccgtaagagcctcctacctttgtgctggccagagggtccttgttcacaaaggcctggacaaac

SEQ ID NO: 297206 - DNA, 122 bp, Homo sapiens
gggcgcggggtgggctgggggcgcggatcagtgggacggagttcggggttcggctccgagcgggcgggctggaagtgggggatccctcagccgcctccacgggccggccccgcgctcacgtc

SEQ ID NO: 297207 - DNA, 122 bp, Homo sapiens
ttgccccgcgaaggctaatccgccgctccgccaccggaagaacacgtcggcaggagcaggcgcctagcacaaccggaaaaggaagtgcctccggcgcaagtggcattgagggacttgtagtc

SEQ ID NO: 297208 - DNA, 122 bp, Homo sapiens
cggacgcttgctggaccgtctcctggatcatgaccgtgtggttggagctgggctcctcctcggtgacctgcgggaggagggcaagagaaaggtcacccagcgcctacttcccggtccagcgt

SEQ ID NO: 297209 - DNA, 122 bp, Homo sapiens
cctttctatggctggcaggacttgacctggaaaataaggaaatctgcgtttctccaggggcgtgagtctcaggcagtgtctgtgtgggcatcatcgactgctatgctccaaatgtcagctga

SEQ ID NO: 297210 - DNA, 122 bp, Homo sapiens
ctaccataatgatacatggggtatggtggagggggtgggaaaatcactattatatgcattcgagaataacaatggagcattacacttcaaaaccctggaggtgttttcacagaatgtgctta

SEQ ID NO: 297211 - DNA, 122 bp, Homo sapiens
tctaaagtatgcatttaaaagaaagggctgggtggagcacgtagggtatgtgtgtgtcgccgcagttcccttggtttcaagaggagggattttaggtaaagcaaagggaaagtgtgacggaa

SEQ ID NO: 297212 - DNA, 122 bp, Homo sapiens
acatcgagtgtttccgctgtgtggcctgcagccgccagctcatccctggggacgaatttgcgcttcgggaggacggtctcttctgccgagcagaccacgatgtggtggagagggccagtcta

SEQ ID NO: 297213 - DNA, 122 bp, Homo sapiens
cggcggcgcgtacgtacccagcaacacgcagagcacatcgagggccacgtacggcagccgcgtcttgtcaaacatggtctctgcccgggctgcccggcaagggcgatggactgagctgcggg

SEQ ID NO: 297214 - DNA, 122 bp, Homo sapiens
ataagacgctgcagcaaggaaggataccctcgagaagatggtgctgcacccacggggcctcgtgcctcagcagagctgtgtgtgggcaggtggtgtagaatgggactccagtgtagcacggc

SEQ ID NO: 297215 - DNA, 122 bp, Homo sapiens
aggtacattgagatcttcaagagtagccgagctgaagttcgaacccactatgatccccctcgaaagctcatggctatgcagcggccaggtccctatgataggccgggggctggcagagggta

SEQ ID NO: 297216 - DNA, 122 bp, Homo sapiens
ccttcccccgaaagcctcaaagttctgcaaactcacagccaagcaaaacgcagctgcagtcgagccagcctcgaaaggtcttacaactttctgcagtggccagcttgttctctgtttccatg

SEQ ID NO: 297217 - DNA, 122 bp, Homo sapiens
gactgcccttgaagccggccccgctcccgcattggggacagcacggggcggaggccgagccgggcccacctggagcgctctgggtctgtcctggggctgccagcctcctgcggggctgcctg

SEQ ID NO: 297218 - DNA, 122 bp, Homo sapiens
cacgttccgatacctgccatcttctcatggagcacattcacatgtcacaatcagtgtttccgcactctgggcttcttaaagggagccctcctagtgcctcccacaaagaccgctaacattaa

SEQ ID NO: 297219 - DNA, 122 bp, Homo sapiens
gggaaccattggcatactgagggtattcattacagtcttgtggctgaggtcaccacgcagcgaggagggaagggacaaggaagcagcagaggtgtgtgtgagaaggagctgaggaggggcag

SEQ ID NO: 297220 - DNA, 122 bp, Homo sapiens
taactactagctgagagcaactatttactaaacaactattcctatatgccacactggctacgcttttaaaacatattatttcacttaatcctcctaacaactttatgggatagatgttatca

SEQ ID NO: 297221 - DNA, 122 bp, Homo sapiens
atggggcttcagcggctcgcgacgcacattgatggagcgtatgtccaggcgccggtgcaccgcaaggagcaaaacagacacagttcttggtcctagggctcacgtcccggggcgaagaggat

SEQ ID NO: 297222 - DNA, 122 bp, Homo sapiens
aattcacaatatatacatctctgaggcacttgttgtttcaatagatggtttgttcctctccgtaattacaaagacaatgagccccaaataaaaagtatcctacatttttagtgactcaagat

SEQ ID NO: 297223 - DNA, 122 bp, Homo sapiens
tttccaggcagccgggacccttttgcaacttgcccccctactcgtgttctcagtaccggccgatggctccgtggaactattcgggatcccgggctgctcaaccctaatctgcagccccgcct

SEQ ID NO: 297224 - DNA, 122 bp, Homo sapiens
aggcggcctcctggcatggaaaacggtgaggaaagctgtctgagagcggcctctgcgcgccgggcaggaggcagtgctgacgtcacaggcagcctgtagccctgacatggggacaaatagct

SEQ ID NO: 297225 - DNA, 122 bp, Homo sapiens
ggaaggcttcagtctgtttacgtctccagtgaggtttcagttcacagtggatggagaaggcggaacataaactatgtcaggaggcagctttacgccaagcttaatttaacgatttccccctt

SEQ ID NO: 297226 - DNA, 122 bp, Homo sapiens
atggactttctcttgatgagtgcaaagacctaaggaaaagacctgtgatgaggacagggccgtgagctgaggcttattctttaataagagttatctttgtggcacttatcctttatctataa

SEQ ID NO: 297227 - DNA, 122 bp, Homo sapiens
cttaaatataatattttctccatgtagcctactttcactccatttcaccccagttgccatcgttcaggcagttgccatagttcaggtcacttctcacttaggtgattcattcggcagctctg

SEQ ID NO: 297228 - DNA, 122 bp, Homo sapiens
tggcttcagtctgcctgtagggtgctttatctgttgacatcaagaggagggcacgtgttccggctgctttgactttacgaggtgcattcccagcataggcatggctgtgctaagctgacgtg

SEQ ID NO: 297229 - DNA, 122 bp, Homo sapiens
cctatcaaagtgctgagtgcctggaccctctttccggaggaaacagtcccctctggacctcgttcggcctctctccatcagacaccccaaggttccatccgaagcaggcggagcaccgaacg

SEQ ID NO: 297230 - DNA, 122 bp, Homo sapiens
ggcggagcagagggaagtcagcagacgctcctgagtcccctccccaggctttctggggaccgggactctggggcagagctccgagccctgggccagccccgaaagcagatgcccctgcagcc

SEQ ID NO: 297231 - DNA, 122 bp, Homo sapiens
aatcatcacaaaggccagatctaatttaaatgagatgcctctaaaattctgccagcttgacgaacttcacttacaggagtttgctgacaaagaggtatttctctcctgccccagcagaacgc

SEQ ID NO: 297232 - DNA, 122 bp, Homo sapiens
gaagggtctagcccgagggaaatgctggaagatcccatcggccagtgaccagcaactttccggcgagattttgacgcggagaactgtgctctgcctcctcttattctcccaaagctcacgtt

SEQ ID NO: 297233 - DNA, 122 bp, Homo sapiens
gccgcaggaagatcagaccacagaagcggaagaggcggggcgtgcggacctgccaatcaccgcctcctacccggccccgcccctgagcacggcccctgctgccctgccgcggaagccccccg

SEQ ID NO: 297234 - DNA, 122 bp, Homo sapiens
cccgccccgagaaagcgggcaggggccagacagaaagacgggggagggaaaaaaccgctccggcgggggaacaaaatctgaagtgaccacactgcatgcattctaagtagacagaggggctt

SEQ ID NO: 297235 - DNA, 122 bp, Homo sapiens
gtcatagacacaactgaacttgattgagttcattggttaaccacattcttggaaggatgccgttgaatatcaaggaaagaatttgtcaacggtttaaatgtttactaatcacagatctctgg

SEQ ID NO: 297236 - DNA, 122 bp, Homo sapiens
gtcaccaccgctctcctggctccactgcctcctctcgctgccgccccagtccctgccgcccggcacagacaccgcacatggcatcatcatagagactccgtgcccagccccctgccccctcg

SEQ ID NO: 297237 - DNA, 122 bp, Homo sapiens
tgggaagtttgctgtgcttagtacagagagaatcccgttctgaacaaactgggaatcccacgtgtgtaaaaagcacaactgttgtggtggaagcaggaggttggggcgaggccaggagcggg

SEQ ID NO: 297238 - DNA, 122 bp, Homo sapiens
attttattataatgacctaagtctgtaatatatcctctgaaggcccaaatggttcctttgcgcaaattgtaaaaagttgcccacttctcaagatgcctggaaaactgccatactaaatatat

SEQ ID NO: 297239 - DNA, 122 bp, Homo sapiens
gctaagccaaatctaacagagaataatgatgcctaccaactgccagagttaaggggtacccgctagccaccccctcccccaacaaaatatgcataatcatgcaaaggctgcaggaggccagc

SEQ ID NO: 297240 - DNA, 122 bp, Homo sapiens
gtcggcggagacggccctgttattcctcttttgcagatggcagattaatccggcagcacccggcctcaaagggaccggctgctcggcaaagggttaacccgtcggccggtaatcgtggacac

SEQ ID NO: 297241 - DNA, 122 bp, Homo sapiens
actgcgggagggaggcagcaggcccagtgcttcagggcagctctccttgtggccgcctgacgccaggacggacttgggccaccagtgccagaggagagagaagcggcaccagagacaaggcg

SEQ ID NO: 297242 - DNA, 122 bp, Homo sapiens
tccaggggctctgggagttgctgccaggtgagtcgaacagtccgatttcccgtggggtcccgcacagatgggacatggcttaggaggaatcctgggctgcaggcattccttggcctggtggt

SEQ ID NO: 297243 - DNA, 122 bp, Homo sapiens
gctatctcttctcattcagaagctgttctatttccgccttaatgctctgctcgaaggagtcgttgctgctcgctctgaccgggaaggcagaaccctagtcctcactggatctcacctggctg

SEQ ID NO: 297244 - DNA, 122 bp, Homo sapiens
acgtcctgctgcaactccccgagcactgcctgtcttcccgctctccagccctcgaggctccggcataggcctgagaaagccgtgccggagctgcccctgtgcctgctactaaatgaattgcg

SEQ ID NO: 297245 - DNA, 122 bp, Homo sapiens
ccccgtgccccggtgctggccaggtgacgggtgcctgcttccgttggcactgaaagcaaacgcttgttgattcagaacctgcagccccgtgccccggcgctgaccaggtgatgggtgcctgc

SEQ ID NO: 297246 - DNA, 122 bp, Homo sapiens
atgcccttccatggatcgggtcgggcattcggtttacagttccttagtgacaccagagcccgctcctccggccccaaagggagataatgaggtacagagagcgagaaaaggcagagtgcgga

SEQ ID NO: 297247 - DNA, 122 bp, Homo sapiens
gggaacgcgcaagaagccggcatgctgggaagttactcatagctcctggggtcaccctcccgccccatgcccatccggatgagatgttttcgtgagttgcgtaactcacagccacccggtaa

SEQ ID NO: 297248 - DNA, 122 bp, Homo sapiens
cagcgaaagcaaccccgtcccagcaataaagcccagggcctgttggggaaggagaccctgcgggagaattggaggaagtgcggctctcaaggctcccaacctcagccttttagtcgtcccaa

SEQ ID NO: 297249 - DNA, 122 bp, Homo sapiens
cagcgccctacctgaacccgcaatctgggtcccgggcgtcgcggccgggcgcgcccagcccggtcctcttgctgaagagcttctggaacagcgtaggggccatgctagccacggccaggcag

SEQ ID NO: 297250 - DNA, 122 bp, Homo sapiens
gcccagcccctgaatgaagccaaggctccaagcacctgagtgaagaggctgtgatggaagcgaatcctccagccctggccatcaccccgtggagtagacaaactgctcagcccagcctctcc

SEQ ID NO: 297251 - DNA, 122 bp, Homo sapiens
cgcacccacacaaaatcccaggaggctcagtaccagctgtggtccgggccttgcccacctcggagaggccacgacccaaggcatccggtttcctctcgctccagtctaacttccgcgcatct

SEQ ID NO: 297252 - DNA, 122 bp, Homo sapiens
tggtattctccttcagaaatatccctctttcccatctccttattccgggtgcagaacgagcgaggaagcaaagcggaaaggtcaagagaacaaattctcgcagcagcagcttggggagcgcg

SEQ ID NO: 297253 - DNA, 122 bp, Homo sapiens
taagtcccagaaaccacaagcgttggctcatgcctgtgtggagtcacaggcaggtggccacggggaattagctgaagaccagcaggcaggaagcctcccacatgccacctaaggggcgctcc

SEQ ID NO: 297254 - DNA, 122 bp, Homo sapiens
tcagtattgtccaatcacggagggcagtttagagccggcccaatgagggcctccagggggcgggtcggactgccgcgggccggggagcgctctgggtggccagctgtgggcccgggccgtcg

SEQ ID NO: 297255 - DNA, 122 bp, Homo sapiens
gcgaaccacttggtttgccattttgtgttgtccgaactccgcttgctcaggtagcctttgcgcgtgccgtccttgcgcgccagcagtcccagggacgcgacgtggccatcattcagccggat

SEQ ID NO: 297256 - DNA, 122 bp, Homo sapiens
agcgcctgcgcaaggccaagaaggaggtaccgcccatggagaagccggaagtggtgaagacgcacctgtaggacatgatcatcttgcctgagatgatgggcagcatggtgggcgtctacaac

SEQ ID NO: 297257 - DNA, 122 bp, Homo sapiens
ggctgtggcgacctgggaagctgctctgcggagcctccggaggcgcagatttcagcacatcgagagcagatgagcggctagtcccaaaactgtccgcgcttcagacagatgactttcgcaga

SEQ ID NO: 297258 - DNA, 122 bp, Homo sapiens
ttgggacaccaattgtcttagactgactacattaggaagactatggactcttatgagctgcggcagagcgcgacccgttcccccagggccctccaagctcctcctgcccgggccggcaggtg

SEQ ID NO: 297259 - DNA, 122 bp, Homo sapiens
acctcgtgatccgcccgccttggcctcccaaagtgctgggattacaggcgtgagccaccgcgcccggccgtcatttggtatgtcttaatgtgcctcaggacctagcacagtccctggtaccc

SEQ ID NO: 297260 - DNA, 122 bp, Homo sapiens
cagcatcaacccatgttctcctaacttctttgcacctgggttgctgttctgagcttatgacggtgagattaggcagcatgagggtattacagagagataagtcaggatgcaaagatcctttt

SEQ ID NO: 297261 - DNA, 122 bp, Homo sapiens
ggatcccgaatccctgcttggctcggagctgccaggtctaagccgaccctcagagacgcacgcccctgacccactgggcagctgtggtgtctttgtatacaatgttcccttcctttctcctc

SEQ ID NO: 297262 - DNA, 122 bp, Homo sapiens
acagcaactgcatgtaatttaacattaaccctctactacagggttgctggaaaatatgctcgcatacctctacaaacagcatcaccgaatacttaatcttatcacacccttcacaaacagaa

SEQ ID NO: 297263 - DNA, 122 bp, Homo sapiens
aggtggcagcatatacaggtcttaccctgccagctccttgtgactgtcttgtctatagggcgggaaccagccatgaatcattcctccctgggagcccagcccctgttcaggccatgcagtga

SEQ ID NO: 297264 - DNA, 122 bp, Homo sapiens
tagtctatacaataagcacttctctgcaatgcactatcagcaaaaccatttcctgacatacgggaacccaggcttttcacagacatgtaaacctcatcatgtaaaggaacaaaatgagctga

SEQ ID NO: 297265 - DNA, 122 bp, Homo sapiens
agatgcctagaggtgaaaggacttggtcctatccagagtagggcctattcctgtgcttaccgttaatgggccccagtgagcttcagagaaggagatcacacattgaggaaaacaactaatta

SEQ ID NO: 297266 - DNA, 122 bp, Homo sapiens
ttaatatgacaccatcagcatggatagaaacctgaatttcatttccctcacagcgtcttccgtttccccaggaatcatgacgtttacaagctttgcctcccataatgactgcattccacaaa

SEQ ID NO: 297267 - DNA, 122 bp, Homo sapiens
aaactgaggcacaagtaagcaggagagccgtgattagaaacctaggtctaactcacagcccgtgagctttcctccaagccccgaggcttccccttaaaaaagccagcaaggggcgagactcg

SEQ ID NO: 297268 - DNA, 122 bp, Homo sapiens
agccccaccatttcctgtgacttcctggagcctggcccacagaggagggttcaggacggacgctttccttccccgccctagggaagagggagggacgcgggcgctggcgtggaggttggggg

SEQ ID NO: 297269 - DNA, 122 bp, Homo sapiens
ccgccccgggcccggccggtcctgaccccagagagcagctccagctcgcaggaagcccaacgggggtgtaggccttgtctccgcttaagatccaggaggagaccctgaaaagaaaataaacc

SEQ ID NO: 297270 - DNA, 122 bp, Homo sapiens
aggggatggtgaaggggagagcaagggccacagtctccctgttacactctctcctctgttcggtgggtcaaagctctcagcaggagactagaccaaaataatgtatggtctgcaggctaggc

SEQ ID NO: 297271 - DNA, 122 bp, Homo sapiens
agcggggaggccggcaccgggattcacagagcaatttgtaagggtaaatgaatgggctgacgatcttactttggcgtgtcaaggcaagccccagtctcaagctagaggtgagtgtttccctg

SEQ ID NO: 297272 - DNA, 122 bp, Homo sapiens
catccaaatcccccaatagaactagttgtcttgtccataaagtgagactaatattgtgggcgctacttatctacttagcaccttggactggtgaggactgtggtgcacaagctaccttacaa

SEQ ID NO: 297273 - DNA, 122 bp, Homo sapiens
ttctcgtcctagttcctcctccacagtctcttaactctaggagtatgatagggagcatcccgccggtgccagctgggaacggggagccggcgtgcccggggtatcccggggtacgtggtctg

SEQ ID NO: 297274 - DNA, 122 bp, Homo sapiens
ccgcaccccgcccggaattccccagtggaagcgaggcctgcggggcactgcgcccgcccgcggagttggaaaccccaagggacccgccctgcccgagcccgccggctcctactcaaccccta

SEQ ID NO: 297275 - DNA, 122 bp, Homo sapiens
aaaattggcaagtgaatgtatactttcatgttttaagttaaaaacatacatccatttcttcgtgattcctgttttaaccagttttctcaattaaccaagcaactgctgggcccaatcatgtc

SEQ ID NO: 297276 - DNA, 122 bp, Homo sapiens
actttagggaaacttcaactacgcggcgattgcgcccaggtgatccgctctataacctcccgcagaagagccagcctcctagctctcctgacgtttgttgtccagggtccttaagtccaacc

SEQ ID NO: 297277 - DNA, 122 bp, Homo sapiens
tcctcgaaccaccttatcgctttcaccccttaggtctcctgcagctgaaagccttgaagccgggagttattcaaatcttgggagtcaagacatccaggttcctgtgccagcggccagatggg

SEQ ID NO: 297278 - DNA, 122 bp, Homo sapiens
tgttagcctggcactcaagctcaccccagcttttcgacattatcctatcaaatgctgtaacgcccagaggcctgtccggcctctgagcctctaggcaggccatccctcctctggtaggaggc

SEQ ID NO: 297279 - DNA, 122 bp, Homo sapiens
tgcagcgtctctccaacagtggtctacactcgagacacttggcagcttttaaaaatagagcgtgtgtgagtgcagcgtctctcccacagtggtctacactcgagacactcggcagcttttaa

SEQ ID NO: 297280 - DNA, 122 bp, Homo sapiens
tcaaggagatgctgccatcactgggaggctcagaggacccttcctgcccaccttcggagacggcttctggaggaacggcttggccagaagacagggtgtgagtgagacagtggggcacaggt

SEQ ID NO: 297281 - DNA, 122 bp, Homo sapiens
aaacaccttctgaaaaagaaaggaagcccaaactcatagcacatggccagcccgtgtccccgaccacaggcagcctcgagcacatgctcaccacatggcttcgcctggttgggtggaatcaa

SEQ ID NO: 297282 - DNA, 122 bp, Homo sapiens
gctcattcttgcttcgggcgttcaccctctatagagctcagacgtaaagtgaacggggtccgtgcggggtccagtcagagtctcagctactgctcaggagcgctcgcctcctccacgaggct

SEQ ID NO: 297283 - DNA, 122 bp, Homo sapiens
gtatatttcagaaataaaaaaattaaacaggaacaatacaaatctaatccacttttatgccgctacatgaaatattatcttttaagattggtggaagaatagaatccatgttagctgtgccc

SEQ ID NO: 297284 - DNA, 122 bp, Homo sapiens
atatcacccccctctggatatgatgattcacgtcgcaggggggcgggcgcccctgcgatgcggggagtcatatcactccccctctcccaccctggatatgacgatccacggtggtcacacag

SEQ ID NO: 297285 - DNA, 122 bp, Homo sapiens
agagcggtcatttcacgatgataaggggtcagctttttgggaggacatagcggtcgtgaacgtgcgcccctaatatcagagctcacttagacgcgaaaccgacagggctgggtggagacggg

SEQ ID NO: 297286 - DNA, 122 bp, Homo sapiens
ccttcctctgtgtgtagggctggcttgatccatctccccacaactattctccttttaggtcgagcgccccgaggtcggggtcgcaagcataagacgaccccccttcctcctcctcgcctagc

SEQ ID NO: 297287 - DNA, 122 bp, Homo sapiens
ttcattggctcagcaggtacattgaggaactcctctgacatttctctatgtccctctagacgtctgagagatgaagaatgtgatagagagagctgccttctgacggaggggacattgatgtg

SEQ ID NO: 297288 - DNA, 122 bp, Homo sapiens
agaattacagagctccataataccattttaaacatcagactcaggaactcaatttatctgcgtttcagtttaggcctaggcctatgaataatatgaatttatgctcatattaaaatacgtga

SEQ ID NO: 297289 - DNA, 122 bp, Homo sapiens
cctctgtacttcaaacttaaccacagagaccgactcccaaaccagcaagtgcgtaagcgccgccgcgctcaccacccgccccgccccttccgcatgctaatgccttcttccggcagccttag

SEQ ID NO: 297290 - DNA, 122 bp, Homo sapiens
tgaagtctcagaaatgaggtctcaggaatgaagaacagccgtggctttgaaagcacagtgcggtgcgaggccgtccctgagcaggcactcctgtcccacccccgccccaggccctaggcgag

SEQ ID NO: 297291 - DNA, 122 bp, Homo sapiens
gggacatgcctgtgagcacgtccagcacagatatcttggttaaagtataaggacatagaacgtactatgtgcctgtgagcacgtctaacagttacatagaatagggcttgacaaagagttat

SEQ ID NO: 297292 - DNA, 122 bp, Homo sapiens
ctcccagctctgcaatggctcgtgctgccttacctagagtctccggccaggtcagcttgacgttcctttcccagttcaaacttactatttaggaaaagcgtttcttgggctttgctagcttg

SEQ ID NO: 297293 - DNA, 122 bp, Homo sapiens
tacctctgcctccctccgcttggcgtttgcgggaaccttggtaaaatcctccctgtttctcgcgcgcgcctctctctccagcttctttttcttggattctcgcctgtctcctcccacagagg

SEQ ID NO: 297294 - DNA, 122 bp, Homo sapiens
ctctggaaccccgcgccattagcgcctgcgccgtctctaggccccgccccctcacccctccggtcctggagctcccacagctaacatggcggcgccctgtgtgtcctacggcggagcagttt

SEQ ID NO: 297295 - DNA, 122 bp, Homo sapiens
ttgccaaccctcacccctcctagggttgcagcctgaggccagcctggacagtgactggcccggtggcctccacctgccaacctttcctgtccccagatggcagcccggtgaccaccaggggc

SEQ ID NO: 297296 - DNA, 122 bp, Homo sapiens
gtgtgggtggccgtgcccctctgcctggagccgcctcaaatcaactttattgacagtaggcggtgaccgacaggcggggtgcacgctgggcacacgtgcctggtcggtgttacttgaagcgt

SEQ ID NO: 297297 - DNA, 122 bp, Homo sapiens
ctcacctgcctggtcacctgaggacagtctctggaggccggtcagtggaggtggcctggccgccactcacctgggaaggcattgatgtcaatgacggcgtgctgccctgtctggttgttgat

SEQ ID NO: 297298 - DNA, 122 bp, Homo sapiens
gtccgcggggagcgccccggatcctcgcgaagaccctgcgggatttgagaaagggaggctcggggagagacggacccaactcctggtccggctgcacctactccatgttgcccacaacgcgc

SEQ ID NO: 297299 - DNA, 122 bp, Homo sapiens
ccccagaactcgctgtgttaagtagattctggttggatatagaaacacaggcaccccaggcggaatgcagatacgcctcaacatgtggattaagtaagagccaggaagcagagtaatgaagc

SEQ ID NO: 297300 - DNA, 122 bp, Homo sapiens
ggggcatcgggggaggcaggggccccgtggggcgcaggtgacatggagtgggtaggaggccgggggtgacactggcggggcctgcagccgagggtgtcgagactgccacgctgtcgccccca

SEQ ID NO: 297301 - DNA, 122 bp, Homo sapiens
aattacataactcctgggagagaccgtgcttttgcagattgcctaaatattttctttctccgtcggctccttgtaacctctgaggccaatagacaactttgtttcccagcccttctccctct

SEQ ID NO: 297302 - DNA, 122 bp, Homo sapiens
attctaagcaccatcagagcctcctaaatctgttcatgtcacactgtcaggtttgggctacgggaatgggagggcagtaagtacgcgggagagaaatgtcctcatctctccacaacacaaat

SEQ ID NO: 297303 - DNA, 122 bp, Homo sapiens
gaaaatgctggggcagaggactggggtgcgtgagggtggcgtagagcccaggggtgggttcgtgggaaggtgtgtccacttgtagatttggtggcattgccagatcacacgccccatgggca

SEQ ID NO: 297304 - DNA, 122 bp, Homo sapiens
agggtaacaactctatctctaagtgaacttaagacaaccagattccctagcagtggcaagcgagcggcgcgcctgcttttctccactccgaggcgggaaaagcagagctcccggagtcgcga

SEQ ID NO: 297305 - DNA, 122 bp, Homo sapiens
gagcggaaaggtagctggtaaacgcagtaggaatacaggcacaaagcgtggtgagagactcgcccagcgctttcctcggtttctcccagggcttccgcgtcaccagcttctgcctgctctcc

SEQ ID NO: 297306 - DNA, 122 bp, Homo sapiens
caagcagccatcatctggtctggaggctggggacagggctcatctcccagcagccatcagcgcccgcctgacaccaggcaggtaatgctatctcctgcgctgagagggccgatgaaccgtga

SEQ ID NO: 297307 - DNA, 122 bp, Homo sapiens
cctggcccagcccgactccctcctccttcccgaaccatccggctcgggctccttccctggcgatggctggccgctgagccatggctcagtacggccaccccagtccgctcggcatggctgcg

SEQ ID NO: 297308 - DNA, 122 bp, Homo sapiens
cagggaagagctgggaaatacgcaaagcgcctttttctccactttcggagatggtacgtgcgcgcttccacgcagtggcggctgctgcggcgagcacgtcccctgcgggacccacgcgggga

SEQ ID NO: 297309 - DNA, 122 bp, Homo sapiens
catccctgctggggcctcagggctcatgtctgggatttccccacctttgcggggcaggagcggctcctcttgggcggggaaggaggcagggccggctcgtctccccattcccctctcccgga

SEQ ID NO: 297310 - DNA, 122 bp, Homo sapiens
tttacagctgcctccgggacagcctagcagaaccctcctgggccagggctgggcagggcgcgagatccctctgccggcctccggggccctcagggacaccctagcaggtcctctctcccagg

SEQ ID NO: 297311 - DNA, 122 bp, Homo sapiens
ggcggggcggaaccggggaagggtgctcctggttctggcagttggggggaagggtggccacgatacctggggtcccccagccggggcagcaagcacacctccacagtagggcccccgatgta

SEQ ID NO: 297312 - DNA, 122 bp, Homo sapiens
cgtcctcttgttgagtctctttactgcaacgaggctgacggatggggtttttcaaaacgtcgctgcaaccagatgcaaggctgcagctttgcttaccgcagcgtgctgcagttgtgtttatt

SEQ ID NO: 297313 - DNA, 122 bp, Homo sapiens
gaaggagatggtttgcagggcaattaggaagtatgtgtagccatattgaagtaataatggcgggggaatgttctagaagacacaagaaatacatgagaaagtgttgagataggacacagcgc

SEQ ID NO: 297314 - DNA, 122 bp, Homo sapiens
ggtggatgccgtggtggtgccgggagcactaccagcctgtggggccgtgggcttgtgcttcgccggagtgggaagtggggacattaggaagcccgactgttgaatcgcctgggcgtcctaaa

SEQ ID NO: 297315 - DNA, 122 bp, Homo sapiens
acgcgcagcgccatgaccagcaagggtcccgaggaggagcacccatcggtgacgctcttccgccagtacctgcgtatccgcactgtccagcccaagcctgactatggtgagaagacggtggt

SEQ ID NO: 297316 - DNA, 122 bp, Homo sapiens
agcggcggatccggaccgaagggggcgccccgggtggcctccagcgcccggtacccgaaacgctttctggttccctctaggcgtgatagacagcgagcttgcagtccctgggggtgtgaagg

SEQ ID NO: 297317 - DNA, 122 bp, Homo sapiens
gtcacagcggaggccccacctcttgtgcccatacaaggagcggcgggccctagatggcatcgtggcgtcgcgacggcgtgtgcgtgtcgcgcttcctagtgccgtttatagggtcccggcac

SEQ ID NO: 297318 - DNA, 122 bp, Homo sapiens
aatccatgtcttcctatatctccaggtcttccagcatctccagggcttccagcatctgctcgtcttccaacatctccacgtcttccagcatctctgtgtcttccagcatcttcatgtcttcc

SEQ ID NO: 297319 - DNA, 122 bp, Homo sapiens
ggtagcaggagatgccgcggtagggggcggcggtgatgcagcagcggcttggccggggcccgcaggcagagacacagctgaagtttccagggcggaacccacagcctatggagttgaagcca

SEQ ID NO: 297320 - DNA, 122 bp, Homo sapiens
ctgagcccacccaggcccaatcgcctcatctctgacccagttttttcacagagtcaaccacgaccagaaatccgctcgcctcgctgggctcctcctccgctcaagaatctgcaggggttccc

SEQ ID NO: 297321 - DNA, 122 bp, Homo sapiens
actgaagcctgagtcaatctgaacagtagcacccaagagtcaccagggtcagagaggctgcgaagaggctcactgatcagaaaggccagctctgtcctcttcctgcccgaaagtggcccggg

SEQ ID NO: 297322 - DNA, 122 bp, Homo sapiens
agggactgactaataagtcctgttgattgatttcgaaatgtttaatttgggagatgtgggcggagggcatctacaaccatcaaaaagtgaaagtgctagttgagagttccatttctgacccg

SEQ ID NO: 297323 - DNA, 122 bp, Homo sapiens
agcttggaacagctaaagggaaaaacagtgcaagatgagaacaacaaaggtctacaaactcgtcatccacaagaagggctttgggggcagtggtcagtatcgattggtctttagaggttttg

SEQ ID NO: 297324 - DNA, 122 bp, Homo sapiens
gttttccaatctttctagttatgcagagctgtttcaaaattgcccacgtttccaagattgcgctcaatttccccgtttgggaatctccccctcatttcaccacccagccgatcattttaagt

SEQ ID NO: 297325 - DNA, 122 bp, Homo sapiens
ctctctctcccgtttcactcactgagagctccaggtagtgagcagttcagtcgatttcctcgttaccccgcccccctttctcttgcccccccacccctctcatctgcctggtggaggatgaa

SEQ ID NO: 297326 - DNA, 122 bp, Homo sapiens
cctaggaggacaactacagcggattctcgttattcaggtggtcagattctgtaaggtggccgcgaacactgagttagcgaatcctgaaccagtaccccgggggaacacagggttaggttcct

SEQ ID NO: 297327 - DNA, 122 bp, Homo sapiens
aaaaagtcacagctcaaaattgctctttgtaaaagtcacacacatttccaagtatcaagtcgcagtcctgcttgtttacttggattttcttcgcttggattgcaccgcactggttatgtctg

SEQ ID NO: 297328 - DNA, 122 bp, Homo sapiens
agctgggggtgctgtctgggctggccggggtacaggccggaggggtacagtgcacaaagccggggtgcagataacgtacacggcagccaggagcctccgatcagaggagggcccgctgacct

SEQ ID NO: 297329 - DNA, 122 bp, Homo sapiens
gcatctttgcaattatcaccttccctttatgctgaaatattctgtttacatcactgcatacgtgttcacatcacttcaaatgttgtcactgtatattactaggcatatggttataatcctat

SEQ ID NO: 297330 - DNA, 122 bp, Homo sapiens
caaaggcccacaggatttaagaagtgttagaaaaactgaatcatcagcagctggagagtgcgtggctatgagggatcacagggaggaagaaatgatacagttcaagttttcgtttgtttagt

SEQ ID NO: 297331 - DNA, 122 bp, Homo sapiens
ggggggcaggtgctccatctccaccctccagggagttctgtgccccttctcaggacttggcgctcactcttggatgacctaggatgcaccagcacgtttaaccccacccacaccagggactt

SEQ ID NO: 297332 - DNA, 122 bp, Homo sapiens
gggcgggctgaagaaggggaaggtgggaagagcccagccggggctacaaattgggtgaagcgctgaggttttagtacttccgtttgaggagataggcaaaggttatgcaggtttttaatggc

SEQ ID NO: 297333 - DNA, 122 bp, Homo sapiens
gcctttctccaccggaggaccagggaaccgcagtcttcatcacagaggtaccgtgctccgcgctccccgcctgacccggcccagcccgctgcggcggtgcctccttccttcctccttccctc

SEQ ID NO: 297334 - DNA, 122 bp, Homo sapiens
ctctttaaaataacagctccagcattttaatcgagatcaaaaaggacccagctgaccctgcgcgcagggggccttatacaaagtcggagaagtagctgggtcgctggccggccagggactca

SEQ ID NO: 297335 - DNA, 122 bp, Homo sapiens
ggaccccagagagccctgagcagccccaccgccgccgccggcctagttaccatcacaccccgggaggagccgcagctgccgcagccggccccagtcaccatcaccgcaaccatgagcagcga

SEQ ID NO: 297336 - DNA, 122 bp, Homo sapiens
ccttttgctggccgttttcctcccccaaccataccgccttttttgtgtgtggggggtagacggttgggtatttagccgcttcagaggccttgttcccataatttagagttccccttcggatt

SEQ ID NO: 297337 - DNA, 122 bp, Homo sapiens
caaaacaaagctggggccggggcgtcggagcctccgcgttgtagttgggagaggttcgaacggggccccagctggcgaaagggaaaacggacccggacccggacccgtggagcctgctcgaa

SEQ ID NO: 297338 - DNA, 122 bp, Homo sapiens
tctctttgggctgacaggctttgtcacccacacacatccagaggtgcccacgagtgtattcggggagaagcttcgagaacaagttgaagagcgactgtccttctatgagactggagagatac

SEQ ID NO: 297339 - DNA, 122 bp, Homo sapiens
tgaagcgggacgcagccaaagaacacgagatgccatttctcagcccaattggaaagaggccgggagcaccagttccctgaccccctcagccccaccgcctgccgccccctggtactgaccag

SEQ ID NO: 297340 - DNA, 122 bp, Homo sapiens
caaggcgagggctccgggagggggcctgtgtgggtctggggggctgagatgaggagggcacggcccacccagggcacctggccacatgtgacgcaggcttcgtcccaagaggaatgacgaaa

SEQ ID NO: 297341 - DNA, 122 bp, Homo sapiens
gtgccccggggcctgctccagcccccagccctgagctggaaactccgagctcctgggtcacgccttgaccactgcagttttggaggaaactttggccaggtcctgggctgaccgtccgtttg

SEQ ID NO: 297342 - DNA, 122 bp, Homo sapiens
ggcgccggcaacacagctctgccttccgcctcgcccgccgttccgcgtccttccgagctacgagaggaaggcacactgcagtccaggcatgtagacatcagcctgagagaaggctattccta

SEQ ID NO: 297343 - DNA, 122 bp, Homo sapiens
tctcctgactcagtcctctcccactgacaagacagaaagagagctgggttgaggtcggggcggattcagagcccaccgtgtcagcaaagacacataaggaactcgccctccggaaagacgcg

SEQ ID NO: 297344 - DNA, 122 bp, Homo sapiens
gcagctaagtacaacggcagcgtctgtccttaaacttgagtgcagagccagggtcaccgccgcccgctcgcagcagctgactggtgtgaactgatggggtggacataacctggcttctcagg

SEQ ID NO: 297345 - DNA, 122 bp, Homo sapiens
gatctttcacacgtggtgggcctggcagcccacatcagtggtttgaggctccaggactgacgtcccaatttaaaaccataacaaaataaaagaaaacactgttgccatccccaggaaaacaa

SEQ ID NO: 297346 - DNA, 122 bp, Homo sapiens
cttactgctttaaaacattatccaagaatttgcattgcaccttcacatcagtttgggctgcgaatcctggttcatggacattcactgtatccaatgagcagttttttgagctctgtgctagg

SEQ ID NO: 297347 - DNA, 122 bp, Homo sapiens
aggaagcccggggccgagcggggctctggtgctgggagaggctctccagccccgcggcggcggcgatgcctcctcggcgcccgtctcctgtctccgacagcatcacttgctaggacagcatc

SEQ ID NO: 297348 - DNA, 122 bp, Homo sapiens
ttgggcttaaatggaatagcagagacaacagtagctatggaagtgacataacctaaaacacgtggctctgacctgtgctgatggtgtgcagtcattcatattccagctgaatgcaaaaggca

SEQ ID NO: 297349 - DNA, 122 bp, Homo sapiens
cacccgaggctaggcggggagagggtgcagtttccggatcccgaaggcttcgagaagagccgacctgtctggaagggtctccaagaacagagaggactctgcaaccatcactcgggagccgc

SEQ ID NO: 297350 - DNA, 122 bp, Homo sapiens
gaggcatgttgacatcgtggcccctgagagcacgtgatgagaagagcgctccacctctgccgtgttcttacgcaaacgcacagttccagtgtaatcagagagaacatcacacacacaccaat

SEQ ID NO: 297351 - DNA, 122 bp, Homo sapiens
ctgtcctcggtcttcactgcccctggagtaacttgaatacattgcgaggcctacctgacacgccgaatcgcggttccgggaatttatctccgttgcaaccacacagcggccatttcccgact

SEQ ID NO: 297352 - DNA, 122 bp, Homo sapiens
gcacagagaggactttatcatagggcccacgatgagctcccggggtccgagcgagagacccgcagcaccacttggtgggggcagggccgtgtgtctgcatgtgcacctgttcatctgcccac

SEQ ID NO: 297353 - DNA, 122 bp, Homo sapiens
gaggctgagctctctcaacggaggaagcagcggcatgagggcctttgcagaaggagctgacggggcactggggtggcaagccccgtgggccaggaaagaaaccagctccaggtcaatttgct

SEQ ID NO: 297354 - DNA, 122 bp, Homo sapiens
agcagattggtactgcaggtgtgattgtgtgatttgggtgggtaggtgctcacgtgtgtccgtatgtgtgttgcgatggatacatggatgtctgtgcctgtagctgtgtgttcccaggcaag

SEQ ID NO: 297355 - DNA, 122 bp, Homo sapiens
gcgtgcatatcggcaacagctgcccgaggctgccgtgaccggcaggtcaggacccagatgcgtggcggaggcttccccaaggtcagagtcaggactctgctgccagggctcacggtgtggtt

SEQ ID NO: 297356 - DNA, 122 bp, Homo sapiens
gaaaagaaagtatgataaagcgtgtctgtaatacttttatttttactctggtggtagtggcgagctgagaagtttctacatacatggagtccagtaaacatctattgaacaaacaccatcaa

SEQ ID NO: 297357 - DNA, 122 bp, Homo sapiens
ttgttgccctccctctcttgtcatccgtcagaagcgcagagctttttcggaagctttgaccgtgaaggatcacaaatttgtttctcaaaggcccctccgctggctcctccggcctcacgagt

SEQ ID NO: 297358 - DNA, 122 bp, Homo sapiens
tcccctgctgctcaatgtggcgtaaatcttcccttccatagctgcgggaccacagctcaccgacctgggacaaacacccgagacgggccgaattccagctcgcaggtagtaattccgcccct

SEQ ID NO: 297359 - DNA, 122 bp, Homo sapiens
atgacttgggatttgatgggagctcagggagccaaggaaggcaaagagaagcaggagccccgccacacacattgcaagtggtggattgctggctgtggttttcctggaaggctcttaaatgg

SEQ ID NO: 297360 - DNA, 122 bp, Homo sapiens
gggtgcctcgcaaccctggagctgcatttaagtggactgtctcccagtgacagaggcgggcggctgcacttagctgtgccgtgggcttactcacagggggtggagacaagatgacatcacac

SEQ ID NO: 297361 - DNA, 122 bp, Homo sapiens
aaggacagaaccaggagttgctgctctgctcgccggaggcaaacgcacacctcactgcttcgcccaccctgtactgactgtgtcgaaggtaaatgtgcagagtcactaagcgtgagccgtga

SEQ ID NO: 297362 - DNA, 122 bp, Homo sapiens
ttagctttgtttagtgatatcaacacaggtggtaaaaccccaaggaaaatcctgaggaagcggtggtgggggacccctcacagccctactggctctgcacggtgtcccttggctcaggccag

SEQ ID NO: 297363 - DNA, 122 bp, Homo sapiens
aaatatttaataaacaatactaaagcaaaaagcttttggcatattgacgtatggtacagccgagtgtcacaaaaggtttatttacaccctactgatcgctttgtgattaaaacatatgggtg

SEQ ID NO: 297364 - DNA, 122 bp, Homo sapiens
gagcgtgtgcgtgacgtggtggcgcaggctggagttccacggggcccagggtccggctcccgtccttcgctcgctgcctcgtttgcttgttccagtacccacgcagctagccagtcacgtcg

SEQ ID NO: 297365 - DNA, 122 bp, Homo sapiens
tcatttttctctttctactcatcttttcaaacctaaacaatactttccaatggtttgctccgcttggcagttctgacccatatatccccaggcagactacagatggatttgtcttctacatg

SEQ ID NO: 297366 - DNA, 122 bp, Homo sapiens
tttttctctcaagtgtaggaaaacttccataccccattccccagttccctatcaaatggtcgtgtaaaagttattcctaaaagctacagtgagctttcttggtcctaatttatttgtcacta

SEQ ID NO: 297367 - DNA, 122 bp, Homo sapiens
tggagagcttgttaaaaggcaaattctctttgagcaggtggagggtggagcctgagattccgcatttcatacatgatcccagggggtggcactgttgccgccagactgtgcaacccactacc

SEQ ID NO: 297368 - DNA, 122 bp, Homo sapiens
gtgactagataagtagtctctgcaaccatatcatcctaaaatctcaagtggaggaaagcacgcattagggaaaaagcagcatgcttgtgtgaaactgtcagcacctcatgttgcaactgtaa

SEQ ID NO: 297369 - DNA, 122 bp, Homo sapiens
ggtgtactatttcggggaggtccacatgaagaagggcatctgccccatctgcttcaagaacgagatggacttctggaaggtggacctcaagttcctggacgactgttgcaagagccacctga

SEQ ID NO: 297370 - DNA, 122 bp, Homo sapiens
tcttaaagtttgtccctgttattcattttattattttagagatagggtcttgctgttgcccgggtgaagtatagtaggccaatcctagctcactgcagccttgaactcctggcctcaagtaa

SEQ ID NO: 297371 - DNA, 122 bp, Homo sapiens
gtcaggccaccgacgccttggtctacacagcgcagcctccagtgagcccgcggcatgccgcgcggcctccccacacacgatggcgatgtcgcaaccacagtagaaagagtggcgctctctac

SEQ ID NO: 297372 - DNA, 122 bp, Homo sapiens
gacctactgagcctttcaggttcacaatcaatcagatccctactggctcacctagtctcccgacgccttcgcttcagtttggaaacgtccagattacgcagccccagcgagtaggtgggggc

SEQ ID NO: 297373 - DNA, 122 bp, Homo sapiens
aataagaacaaatattaatttcgctcacaggtgtgcaactagggcaggggatgggagagtcggggtatttttgctccacaggatcatttggggttgcttaattggtatctggaaggcccagg

SEQ ID NO: 297374 - DNA, 122 bp, Homo sapiens
gggcctgggggagcgctgggcgggggcgggcggtgcgggcagggctatacccgagctgggcgggctccgggcgccgcgggccctgccctccccctccatccctccggactcgctcccccctc

SEQ ID NO: 297375 - DNA, 122 bp, Homo sapiens
tcaacaaatgttagtgtctcgtcttgtatgtggacaaagaataaagatttatttcctactcgaactattaggaatatgtccagtccgtagatgttgagttgaacgacttataacacaagtta

SEQ ID NO: 297376 - DNA, 122 bp, Homo sapiens
tgcaaaaactaggagctcgcattcatttcccaagtgtgacccttagatgcttagttgactcgctgcatatttgctcttgtcttcagaaaagaaaggaagaagtatcgttccaacgaaatgtt

SEQ ID NO: 297377 - DNA, 122 bp, Homo sapiens
agcggatgtcctctggctcactccatctccctgtgaccttgggtaaactatttagcctcacggggcctcagatgcccccctgtgaagtaggaaaggtgatagccctcacctcacagagtgtc

SEQ ID NO: 297378 - DNA, 122 bp, Homo sapiens
gcaaggtaaaagaagacagagaagggtctacagaagggaagaggagcccctttccacccacggttaagaaagagagggaagggctgggcaagtcacatctctagaggagacctgctgtagcc

SEQ ID NO: 297379 - DNA, 122 bp, Homo sapiens
ttcagaagacttcctcgagtctgtactgagccaccagccacccagtccaagcaggaagtacggccacagggagaatggtggcagcccagggcacatgaaggaaaagtcgggtacttaaagac

SEQ ID NO: 297380 - DNA, 122 bp, Homo sapiens
gcctcctcagcggcgtccccaggtcccgagaggggtccctacccaggctaagactcacgacgggctccaccctgcaggggctcaacttgcagaaaccctggggcctgccttccccaggggtc

SEQ ID NO: 297381 - DNA, 122 bp, Homo sapiens
tccgccacggaccgcccgggtccctcagagtctccggatccgaaatctaccccgaggcagcgggacccgcccagaccctccacccgggagagtcccaggcgcctttacccaggttcattttc

SEQ ID NO: 297382 - DNA, 122 bp, Homo sapiens
tccagagagccgctaccttcatctggacggcagcagatccgatgagcagcagggagtctccgtcccagacgtcaatctgcagggtctgcacggccaggtagcgggcaaagcagcgccgctca

SEQ ID NO: 297383 - DNA, 122 bp, Homo sapiens
aagagacgaaagacctgaaaacagatttctgtgttttactctccatgtggccatcatggacgaggacgaagagggacttgatttttcctttaacgagaagaatgtttaagctctgaattttt

SEQ ID NO: 297384 - DNA, 122 bp, Homo sapiens
cttgcgccgcttcgagatcagcctgggggtcgcgccctcctggtcttgtccacgaagcgccgttcttgggccgttaggagctgctgggaagggctctgataggcccactcctcttctccacc

SEQ ID NO: 297385 - DNA, 122 bp, Homo sapiens
agggcttactcacttcaggaatcacaactagcgtggatcccaggggcaaagcaccacatgcggttgtgctcacattcctgaatagctagacaaggcctgcaacaacatgctcctcctcaggg

SEQ ID NO: 297386 - DNA, 122 bp, Homo sapiens
ggtgccttctctggagctcctgcttcatttcctcttacccactatcaaatgaaggatttgcggtaaacttcatgattaggactaagaagaaaaacatttctaaaaatatctatttgagcagc

SEQ ID NO: 297387 - DNA, 122 bp, Homo sapiens
ctgaggcagaaatatcgattgaacccgggaggtggagtttgcagcgagctgagatcgcgccgttgcactccagccgcctgggcaacaagagcggaacaatgtctcaaaaaacaaacaaaaac

SEQ ID NO: 297388 - DNA, 122 bp, Homo sapiens
gagagagagagagatgacaaggagcacaagaagtggtccatctcccgaattcgctgttaccgcctgtctctttaagggcatgccttgtgctgttaatagatcttagggtgaaccacttcatt

SEQ ID NO: 297389 - DNA, 122 bp, Homo sapiens
cggagagtcccagctaagaggccaaatgagtaaaatgcaagacatgaagctgggaggggtcggaatgctgatctgacctcaggctgctggagagaagttaactagctttttaaaatttttat

SEQ ID NO: 297390 - DNA, 122 bp, Homo sapiens
catggcatgtgctttatctttcataaacaagcagctaaattctggaacagcaggaggattcgagcttaaggggtcagagatccactctgttaagctagacaaccgtggcctgctgttttact

SEQ ID NO: 297391 - DNA, 122 bp, Homo sapiens
attcaaggttgatttagctccattgacttctcccaagtgaacatgttttgctaggcccttcgtttttgggaaaaaatatttagttaggttcggatttgtataaatggctaattatgggtata

SEQ ID NO: 297392 - DNA, 122 bp, Homo sapiens
agacaaggaaagctaattgcctgagctgtctgtgaagccaggtgtcctgccttggagtcccgtgctgcatcatacgggtccatcgtgttggtcaagctgtagagcagtgtaaggagtcattt

SEQ ID NO: 297393 - DNA, 122 bp, Homo sapiens
cgggagagagcgcccctcccggggagcaggccagaggccccagcgggtccggggctcagtcggtccctggaacctggggtccctcgggaagaagaataaacaggaaacaaatcgaagaggct

SEQ ID NO: 297394 - DNA, 122 bp, Homo sapiens
agagacttagggagagtcaaggaccaccctctcttcctataacctcccaggtcctggcagcgtatggggatagcctgaacaagtttctctggctgtaaagaaataaattaattaaataaatt

SEQ ID NO: 297395 - DNA, 122 bp, Homo sapiens
ctacacagtaacctggaaattatcaccggcggagcaaagtcacagctcagggaggccctccgcgttgtctggcggaggaggggagtggcaggtgatcctcacaggtaagctcgccgggcatt

SEQ ID NO: 297396 - DNA, 122 bp, Homo sapiens
tcagataaccaagaagaagcactgagcccctggatgctggttgtgcatccctggagtaaacgcagataaccattccaccttgtgggcagcgcagtgcccagatccacgggtcccaccttacg

SEQ ID NO: 297397 - DNA, 122 bp, Homo sapiens
agaaggaacaggtgtgtagtgagtggggaactggatagggaaccagaatacttcggttgccgtctcagagctgctcttaactagctgtgagaccttaatcaacccacttaacctctctgggc

SEQ ID NO: 297398 - DNA, 122 bp, Homo sapiens
cgaggacccccaccagccagcgctcccgtgggtggaagtaagtgcggatgtggcctcctgcggggcgagggttacctgcagggcggaaactgtggggtccagagtgaggatggctggctttc

SEQ ID NO: 297399 - DNA, 122 bp, Homo sapiens
gtgaatcagagcatctgaccgccaggaaggccatgtggcttactgtggtcatcatgcacacgtcaccttggggttaagtggcattatttagtctattacttaaggggtttggtgtccgcatt

SEQ ID NO: 297400 - DNA, 122 bp, Homo sapiens
gacacattgtagatgttcaaaataagaattgtcagtctccctcacaaaatgccagcctctcgtactccagtttatgcctgaatgtgtaaatccacaagatcagtgcacgcggtggatttcta

SEQ ID NO: 297401 - DNA, 122 bp, Homo sapiens
gcagttcgagcggaagtttctcactgacaatttgccccaaatagatagatttgtcagaagcgaccttcgggaaggaagcaaaaagccaccggcccgaaggttgggcccaaaacagggactct

SEQ ID NO: 297402 - DNA, 122 bp, Homo sapiens
agtttttcaaatttgaagcagcaaatacctatctctctactatccaaattaagtgagtgacgcagctatatgcatctctcaaatatttgtaataaaagacgaaatttctaaactataattga

SEQ ID NO: 297403 - DNA, 122 bp, Homo sapiens
tcagcattgctgcccactgtgcccagctggggccagagaccagcctccctgctggagcctcgttgggctgtcctggagtagatgctttttctgatactccctgaacaacttgaacagcagca

SEQ ID NO: 297404 - DNA, 122 bp, Homo sapiens
caggctggagtgcagtggtgagatctcaactcacagcaacctccacctcccgggttcaatcgattctcctgcctcagcatcccaagtgggtgggattacaggcgcccaccaccacacccagt

SEQ ID NO: 297405 - DNA, 122 bp, Homo sapiens
gtgatacctaacttctttgaggaatgatcttagcttccaaacccagaatgtgacagaaagcgccacagcaagcaaggtcctactttatcccttctaaaaacaaagccactgaagtttggaag

SEQ ID NO: 297406 - DNA, 122 bp, Homo sapiens
agagacttgaaccttcctttcccgccccgccccgcgacgggctccattcctcagtcccgacgccgcaaggccggcctggacacttcagaacaaaggcctgcactcgagacccggcgcccagg

SEQ ID NO: 297407 - DNA, 122 bp, Homo sapiens
gggagggcgctacggaagaggcggtccgggagaggtacggggatctggtaccaggcacggcgctgagcaggaattatattgactctttttaagtacagtgacccactatacagatggggaaa

SEQ ID NO: 297408 - DNA, 122 bp, Homo sapiens
tagcagtcggagcccagcacccaacatagggcagagtggagtgtgggtggggctcaggggcgtgtgctgagcttacctgaagtcggcagggcaggaatgagctgtctgggctcctgacccca

SEQ ID NO: 297409 - DNA, 122 bp, Homo sapiens
atggagtccctccactcgctgacctcctcctgcacggcgcatagctcctgctgcaagaagcgccacatgttggccaggttgaagccattgacccagttgtggttgatggagatggtgtcatc

SEQ ID NO: 297410 - DNA, 122 bp, Homo sapiens
cctcacgctggccgaagtctacctcatgatgggcaagcccagcaagctgcagctggagtacgactggctggggcccggccgccaggacccccgccccggctccctacccaccgccctccaca

SEQ ID NO: 297411 - DNA, 122 bp, Homo sapiens
cgctccccacctccctacgaggcggggtctacatgcccctctcgctgcaacgcggccaaccgcaggcgggtgctgacgacacctccacccccggctcgtaagctaatttgcgtcacatatgg

SEQ ID NO: 297412 - DNA, 122 bp, Homo sapiens
ggccctcgggccttttcccggcgtccatttagtggcgggaaaagcgaccttttctgagcgcgtttgcctgttgagtggtagcctttcccctcaaccagcaatggaggagcagccccagatgc

SEQ ID NO: 297413 - DNA, 122 bp, Homo sapiens
taaggtccttaatcttcatcacatcagtattttcccttttgccatgtaatgcaacctactcgtgggtgcccaggattgagattggacgtctttgggaaccattactcggcccatcacatctg

SEQ ID NO: 297414 - DNA, 122 bp, Homo sapiens
agcctcagtttgctattcagtccctgcaactctggcctcgcgagtcagatttctgggggccgccgctagaggcgcctgagctcaaaacccggctcccctggcagggtttccgggggagcccg

SEQ ID NO: 297415 - DNA, 122 bp, Homo sapiens
atttagttaacactgaatttgcaaacacagaaaggaatagaaaacctgactccacttggacgcacaggcctttggggagttctgacaccagggccccatcggcagctccaccagagcatcct

SEQ ID NO: 297416 - DNA, 122 bp, Homo sapiens
tcaagacttagggcttacttagatgtctgcctactgaaaataatcacacatcttcatgtccgttgtaacagctggcctcccacactggcctttgcagccacgtccacatatgaggctcatta

SEQ ID NO: 297417 - DNA, 122 bp, Homo sapiens
tcccctggctgggagctggggcctcccctggctgagagttgcgccctgacacgcgctgcgcggctggtgactgagcctccaccacagacccagggcccagtcagactggggtaggggcgaca

SEQ ID NO: 297418 - DNA, 122 bp, Homo sapiens
tccccagcctcagatgttctcagtctggccagtgaaaacatctggaatcatgactccagccgcgctagccatctcactttttacaataaaaactgagcaagcaaggaacacctagtgacgac

SEQ ID NO: 297419 - DNA, 122 bp, Homo sapiens
ttctttaacagctaaagtagatataaatggctaaacacagatccccaatcccccaccaggcgggacacggccaattctataatgttgcagccagaaggctgtgggcttacaggcagccaagg

SEQ ID NO: 297420 - DNA, 122 bp, Homo sapiens
gaatgctttgtattaaggcttccctgagaaaacttattccaaaactttattggacacccacgctctgtctgcctcaaaatattatcagaatttatgatattattgttaaggccagtttggat

SEQ ID NO: 297421 - DNA, 122 bp, Homo sapiens
aaagaccccgtctcaccacggctccggccacggcgtggaccaggctttcgtaggacagcacggaagccattggtgcggctcctcgaagacccagccacacttttcccacagatgccgcagcc

SEQ ID NO: 297422 - DNA, 122 bp, Homo sapiens
tagcagaggcacccgagaggccagagagctggcgaaatggtctggggccacctctctcagcggcttgggcttgtgcagcaggatgtcctcgatgaagaaggatgtgggcctctgagaagacg

SEQ ID NO: 297423 - DNA, 122 bp, Homo sapiens
tcatacaacccagcaaaaaggaacagctggaagtctgcaataactgagcatagatttaaccgttgtccgttgaaaggagaatggagttttaagttcaagttcagctgagttaactatactat

SEQ ID NO: 297424 - DNA, 122 bp, Homo sapiens
tcacggtcccctggaaacaggagacagagttctcggggccacccgggaagcactaggctgcgtcagaaggcagcctctgtagatggggcgagggggaagagcatttcctggggtttcctcgg

SEQ ID NO: 297425 - DNA, 122 bp, Homo sapiens
agaccgcccgcggccaccccaaatacgcctgtccactgaagcctcactaaaaggaggaagcgctgatgtcagggttacttaaattcccaggctccggatccctagaagaggtatttcccttt

SEQ ID NO: 297426 - DNA, 122 bp, Homo sapiens
gggggttgggagtgtggctcaggcgaaagaggaattttagggattattgcagaaaaggggcggctccctggacttgtccctgaccccgaagggtttgagaggtaggagggttagcgatgctg

SEQ ID NO: 297427 - DNA, 122 bp, Homo sapiens
aaagacaaacatgccctgttagtgctcagtagtcattttaataaattttcacaatgggctcgacttagcataaactttattggtttgggttctcttggctattctggagtggggctgaggca

SEQ ID NO: 297428 - DNA, 122 bp, Homo sapiens
tgggcagccaccgccatgaatgagagctctctggctgtccccaggccagctatgctctgacggccaagcgtggtggtccttgcctgtgtccgagcgtggggttagttctggaacatttgatc

SEQ ID NO: 297429 - DNA, 122 bp, Homo sapiens
ggtctggcccggagcagggagtccttctgctccctggcacggctctgcgctgaacccacccggcctgcggagagcagacaagtgcctcttgggcccgcttctctaacaaatgtaaaaataat

SEQ ID NO: 297430 - DNA, 122 bp, Homo sapiens
tttttgagaagacaaagttaattcacctgaaacaactaattaagaaacaattaggctgggcgctgtggctcatgcctgtaatcccagcactttgggaggccaagatgggcagatcacgagat

SEQ ID NO: 297431 - DNA, 122 bp, Homo sapiens
actctttccacaggccctgtgtggtctgggctctaccgagaggtccccaaggagagctggcgtgtcagtcagccaagaagcaagcaggcaggcaatgccagcatgcaggtggcggggctggc

SEQ ID NO: 297432 - DNA, 122 bp, Homo sapiens
tgttttagaagcacatgatgccctagtgcagctgctatgtgcatttgccagacatttccacgccttagagttccccatagtttgaagtctgaatctgacccctgttctgcttctcaaggtaa

SEQ ID NO: 297433 - DNA, 122 bp, Homo sapiens
cgtgatctgccctcctcagcctcccaaagtgctgggattacaggtgtgagccaccatgcccggccgcattatgacttgttgtcttcctgggcatttaattcttttgacttgaagggtggcca

SEQ ID NO: 297434 - DNA, 122 bp, Homo sapiens
aagagagtatctatgccactggtagcccccaaataatatagctcagtgtctcaagatattcgccacttgctcatgctagaaacaagaggtctttacattttcacagttagagggattttttt

SEQ ID NO: 297435 - DNA, 122 bp, Homo sapiens
gagagggagagaagtaagaaaggctggaggtgggagcagaactcacagggaaggatctgacggcatcgcctcccatcagcaccttctgtcctggtcccaggcccagggctcctcagagcagg

SEQ ID NO: 297436 - DNA, 122 bp, Homo sapiens
tggctctgttacccaggaacggtgatgccccctttttatcccttccagaactgggctgggcgagagagctgtcgagctgtgaatgattaagtgggctgggcatgcctggggggcagctgtga

SEQ ID NO: 297437 - DNA, 122 bp, Homo sapiens
aggatgtgttccctttgcagaatcagaccccctcctgggactgtggggaccctctgtcgccggcctccattggaggatgcgttgtccctggagctgggtgcgctgttgcgtgacctggggcc

SEQ ID NO: 297438 - DNA, 122 bp, Homo sapiens
tcctaaatatagagtttgatacaagccatacgctggctgcctccgaaaggcttgaccgtgcggaaagcaggctcaaatgtcagccgggaggtggctatggtatcttacttgccctcctaatc

SEQ ID NO: 297439 - DNA, 122 bp, Homo sapiens
agtcctttgctgtgggaatgttcaaaggccagctcaccacagatcaggtgttcccatacccgtccggtaagggaagggataatcagagctgggtggggccagggtggtttcccctgccagcc

SEQ ID NO: 297440 - DNA, 122 bp, Homo sapiens
cctcagccaggaggaggcccaggccgtggaccaggagctatttaacgaataccagttcagcgtggaccaacttatggaactggccgggctgagctgtgctacagccatcgccaaggtcagtg

SEQ ID NO: 297441 - DNA, 122 bp, Homo sapiens
catgacctccagatgtgctgggaagtggccagctcctcctcctggggcagccaggccttccggatctgtgggggcggggccggccctttccccccacccctagtgacacaggcccggaggaa

SEQ ID NO: 297442 - DNA, 122 bp, Homo sapiens
acttcctcccctctgaggtccataaaagccccaggatcagccccagagcagagcagaggacgaagatatgactgaacaatctgcctgcagaaagaagccacccattctagggcctcctcttt

SEQ ID NO: 297443 - DNA, 122 bp, Homo sapiens
gctgcccagtcagccagagcctccagaggatctcaagctccttctgccttgtggaggagccggggggggggtgtgctttgtagctaattcctcccacatttgaattcctcaccgcctgccca

SEQ ID NO: 297444 - DNA, 122 bp, Homo sapiens
caggatggtcttgaagtctgagggcagtgccgggttggctgcggcctccagggcagtcagcgtcgtccccgggagcttccgactcagctgcgtctgggctgcggggccaaaatcagactccg

SEQ ID NO: 297445 - DNA, 122 bp, Homo sapiens
ctcacccctttttccccagttcctatgcagtttatcagcctctatacatttagatggcaacgaaaatcatgcttttaagaagcttctaacaatcagcatatgacttcagtcgctctaaagct

SEQ ID NO: 297446 - DNA, 122 bp, Homo sapiens
ctcggcctaccaccaagtactaggattagaggcgtgacccatggcactggaccccagacccgctatcctggatattttcatcagtgagctagaagtagaggatgttgcctcagctcactctg

SEQ ID NO: 297447 - DNA, 122 bp, Homo sapiens
ggagcatgcgcggagggagggctgcgggggcggcggtgcgggctcttggggacctgaggacgctgtgagagcgctggcggcgactgctctacgcggtggcggaactctgggggcgaacgcta

SEQ ID NO: 297448 - DNA, 122 bp, Homo sapiens
agcccatcttttgcaatgccatacttgtttcctttttgaaatgaattgaggtaaaataaccgtttcaggtccatcccttacatggcaaagtaaaaagctggagtcagtacacagtgttgggg

SEQ ID NO: 297449 - DNA, 122 bp, Homo sapiens
gctttagcaggggtgcgcctgagtgtatgcagagggcgggtcctggcaggacgaattcaccgccactgccagaacgaactattcagattcacgtggagcaaggggctcatgcagaagcagtt

SEQ ID NO: 297450 - DNA, 122 bp, Homo sapiens
gtcgtgcgtaatgacgtcagcgccggcggagaatttcaaattcgaacggctttggcgggccgaggaaggacctggtgttttgatgaccgctgtcctgtctagcagatacttgcacggtttac

SEQ ID NO: 297451 - DNA, 122 bp, Homo sapiens
cttggagcaaactctcaagagctgctctcttcaacgggattttcaggccagaaagacctgcgtggagcaaggacaagagacctccgagacctttccctatgctctcacaatccgccatctta

SEQ ID NO: 297452 - DNA, 122 bp, Homo sapiens
gattctttgttgtggagggctgtcttgtacattgtaacagcatcattagcatcgcagcatcgttagcaaaatccctggcctctaccagatgcctgtagcacttcatccctagttgtggtgac

SEQ ID NO: 297453 - DNA, 122 bp, Homo sapiens
gtactgtgctaggcaccagcagtataaagtaagggctctgccttcaggttgctgaccatccggtaggggtgttagatcatgaaaactaacaccccaacccttctgatgaatgtataaaaaaa

SEQ ID NO: 297454 - DNA, 122 bp, Homo sapiens
tggagagtcgctaggattgtgcgggtccctccgacctctgcagatatttcctgatacctccgggtttggggactaccgcgagaagggcaacgcatttaaactctcaggagcagagttttcca

SEQ ID NO: 297455 - DNA, 122 bp, Homo sapiens
acattatgtgcattcaaaacagtaacattaactgtggactctggaaataagaaaaggaatcgtgttggagagtgagactgagccagttgggaatagacaaaattacattctcaagggagaat

SEQ ID NO: 297456 - DNA, 122 bp, Homo sapiens
cgcgcctggctctttgttggcccccagtctctaaggatttctttttcttgttctctaatgcgtcggatccgccggcttcccttactcatcctttacctgctcccctgccgctcgccttgcat

SEQ ID NO: 297457 - DNA, 122 bp, Homo sapiens
gaaccgagagcagcgggcagctatgcggcctccaggacagcagggggcgatgtcttgccgcgcggccgcctgcagtgggggcggggccgtacccggcggttggcgaagggcgagcggagggc

SEQ ID NO: 297458 - DNA, 122 bp, Homo sapiens
agagcccggctgctgagtccacacctgtggaatggggacgacgaactgggaggatccagccgggaccctttcgggaacacacccttcctggacttgacgttcggatgcctaacacgcacctt

SEQ ID NO: 297459 - DNA, 122 bp, Homo sapiens
ccattagtttatgtgggatcccagcccccatagactctcaaccctctaccttagcttacccgaggtgagcattcttccaataaacacccgtttgagtgtctttaatgatttattgtggtggc

SEQ ID NO: 297460 - DNA, 122 bp, Homo sapiens
attagtattttactctagtggtgtaattgtaatgtagaacagttgtgtggtagtgtgaaccgtatgaacctaagtagtttggaagaaaaagtagggtttttgtatactagcttttgtatttg

SEQ ID NO: 297461 - DNA, 122 bp, Homo sapiens
ctgggctgcggtggacgtggtctcgggctgtgacgagcatggtccctgggcagcagtggacgtggtctcacacccagagtctgaaatttctgcctcttcctggccctaaaaatatcctgcct

SEQ ID NO: 297462 - DNA, 122 bp, Homo sapiens
ggcctgattccacggaaacggctttggcaccaccggaagtcagccaacaacagcgaattgcgtgcgcgtccccgagcctcggagcgccgcgccgcagtgcatcaaggagcatgcgcctaaca

SEQ ID NO: 297463 - DNA, 122 bp, Homo sapiens
agtgccagcacggggaaggtgcccaggctttgaatggaactgaatgcagaattccgggggcgccaggcaagccagatggccttgtgggcagtcacttcccgtggtcgggtggggcggggaag

SEQ ID NO: 297464 - DNA, 122 bp, Homo sapiens
gcgcgggcgggagccgaggctgcgccggtggcgctcccgccggcgcgggttcctggtgggcgcaggctcagcgggccccctactctgcgcggccagccagcgcctgctcaggggaggagctc

SEQ ID NO: 297465 - DNA, 122 bp, Homo sapiens
cattctcttcaatattgttggctgtttcaggttaactaccaaaatcatttgcctgagaagcgagatttaattgtcttacaactacctctgtgaggtacaatagggattacaagtacccattg

SEQ ID NO: 297466 - DNA, 122 bp, Homo sapiens
cactaatgctctgacggggcggggctcactaatgctctgacggggcggggctcacactaacgctctgacggggcggggctcacagtaatcctctgacggggcggagctcacactaatgctct

SEQ ID NO: 297467 - DNA, 122 bp, Homo sapiens
ccccacgcctgcccggtatacagcaaagtccaaacagtttcttccaaacctcgcatcctccgtagttttgcaacagccggacacctagcccgcatcctaatgcggatatttcagagtattac

SEQ ID NO: 297468 - DNA, 122 bp, Homo sapiens
aggggaggggacaggaaggggaagaggaggagggctgggcacctggccctgggtgctcggcgttgcccttgagtgccctcctgtgatctttctgccgttccttggatctggtctcctgatgg

SEQ ID NO: 297469 - DNA, 122 bp, Homo sapiens
ccccggagaaaaagttgaagcgttatgtaagtagagctgcgggcaccactccgcgggcctcggcgtccacacccctccccagtcggctcgccggcggctgcagctggccgcgcgcggggctg

SEQ ID NO: 297470 - DNA, 122 bp, Homo sapiens
acctaataatctttaaccaggtattttttatatctagtctgatgatgattgtctaaccatcggtttttccttcaaaatagttcttctatgaggggaggtcttcaaatttacatttttaaaag

SEQ ID NO: 297471 - DNA, 122 bp, Homo sapiens
caggtcgctgtgttttcacaagctgaacacacccatgtaaccagtacacagatcaattatcggcccccaggagtcccctcatgttcctatctggttactatgtactcaagagtaaccactgt

SEQ ID NO: 297472 - DNA, 122 bp, Homo sapiens
gaaattctgctttagctgccgggaatccccaggggtatctctagaaacgcgggatatccccgctgctctcttggcggccagttcagaaaccgctcagaactcagtccagggcaggtactgga

SEQ ID NO: 297473 - DNA, 122 bp, Homo sapiens
atggaagctcacccatataataatcaagattagttgaacccaacactgacccctctaacccgcacccctaccaaagggcaagtagggaaacagaccaacagagatgttaccttctgaataat

SEQ ID NO: 297474 - DNA, 122 bp, Homo sapiens
tgagttttcctgggataggtcccccatcacaacctactccctggggctcccagggggattcgtggagaggcggcgcccaggggggccttcgtggaggaggtgccctgggtccgcctgcccac

SEQ ID NO: 297475 - DNA, 122 bp, Homo sapiens
acaagaaatgcagttcagggatgtcatagaagccaaggaggacaaattcagtaatagtttcgtttcctgtggagacaatttccatgtcgatcgtccaagtttctgcttggcaataattgggg

SEQ ID NO: 297476 - DNA, 122 bp, Homo sapiens
gcatgccctcccctttttatacgaatgttttctaccagtgtgcttgggtttgccatgatgcgaggctgagttgctgtagcgtcttgattctctccctgggtctgcgttccctcccctgggcc

SEQ ID NO: 297477 - DNA, 122 bp, Homo sapiens
agctgggtcggctctcccttccgcccgccgctccctcccctccgccagctctcctcctcccgggcgcctgcggctgccctgccaaaacttctgcagttcccatgcccttcgcggcgactcca

SEQ ID NO: 297478 - DNA, 122 bp, Homo sapiens
aatccgtaagggcgtcgaaatctaggaatcagatctcgaagaagcacagaggttacttcacgagctttctcagttcgttctggataggcctccacccacccagagtaggtacgcccaagaac

SEQ ID NO: 297479 - DNA, 122 bp, Homo sapiens
ccagcccgtgcaacggaagccaggccaactgccccgcgtcttcagctgtttcgcatccaccgccaccccactgagagctgctcctttgggggaatgtttggcaacctttgtgttacagatta

SEQ ID NO: 297480 - DNA, 122 bp, Homo sapiens
taaatcttccaatgctttctcccttgaggcaaaagcacaggtgagatgtaagcagctccacgggcatgttcctctcacagtgccacagttccctctgccactctgtgagacacgggtcccaa

SEQ ID NO: 297481 - DNA, 122 bp, Homo sapiens
agccaggggagtcagaagctacccgtcccctccactggccaaaaacccaacagctcttggcgcatcgatcctaagcgacaaggcagcaaaagtgactgtgttcaggtccaggcccgcccctc

SEQ ID NO: 297482 - DNA, 122 bp, Homo sapiens
aaatcagactgcacaactatgagtatgaaaatgccagtttaggccaggcaaagtggcccccgcttggaatcccagcactttggaaggccaagggaggaggatcacttgagcccaggagttca

SEQ ID NO: 297483 - DNA, 122 bp, Homo sapiens
ggcgattaggagtccagatgtcttgggtatagccgtcgccccgggaaagtgggctctagacgcaggagttggcaagccctctctgggggcacgcgtggctggggcagaggtgcagtgggcct

SEQ ID NO: 297484 - DNA, 122 bp, Homo sapiens
gggcggggatggatctgagcggtcactgagaatttctcaatggggctcttggattaatgccgcaggctctccaggggcaagtgggcctcacagatgcccaggtcctgccctaaggtgccagc

SEQ ID NO: 297485 - DNA, 122 bp, Homo sapiens
taagtgagtataaaagtgtcttgactgagtcctcaaactgaccatcgggctgtctgataccgttgtagacctgattgaaaattcttgatctggccacataccctgtttacattgatgcagat

SEQ ID NO: 297486 - DNA, 122 bp, Homo sapiens
gcatttcggtcacagcccgcttcgaggtgcagcgcacccgaaagtcttctcggggagtggcggagaccaaggcctggctctctgtgccagccgcgagctccttgtcccatggagggtcaagg

SEQ ID NO: 297487 - DNA, 122 bp, Homo sapiens
ctccctccttccagagggctcccccgcagagccctctgctgagacccacagggaggacggcgttagggatctcatagaaactggacattctctttccacccatgttggtgcctttttgctac

SEQ ID NO: 297488 - DNA, 122 bp, Homo sapiens
cctcggcttcttctgggagaaaattcccacggctacctagtgagcctgcaaactggtaggcgccggcgtaggcgcgcgggcggggccgggggcggggcctgcggggcgtggcggggcgggca

SEQ ID NO: 297489 - DNA, 122 bp, Homo sapiens
aagtgactagtccaagcattgcagctaggattcaaacccagtccacctggctccacagtccgtcttcttagcttccatgttttgctgtctgttcacttaataaacagtggttgaattggatt

SEQ ID NO: 297490 - DNA, 122 bp, Homo sapiens
gcagaaatgccttcctaattctctttggcactagccaaaactaaagtgaatgtgcttgaacgtgctcttcaaaacgaaaggcagaaggggtcaagccatccgggattcagagctaggtaatc

SEQ ID NO: 297491 - DNA, 122 bp, Homo sapiens
agtagttaaattgatcagcaggtatcagagccgttgtcttcaagctgcccattatgcaaacgtacaggaaacagttttgacctcctgaggctttgtttctgtttggatttgtgaatagaatt

SEQ ID NO: 297492 - DNA, 122 bp, Homo sapiens
ctgactggtttttgtatttttggaggagacagggtttcccctgttgaccgggctggtctccggctcctgacctcaagtagtctgcctgcctcggcctcccagggtgctgggattgcagacgg

SEQ ID NO: 297493 - DNA, 122 bp, Homo sapiens
aaagacagtttaaaaagttgtttagtttcctaggacattctcgctgcgactgttgaaagtcggacagcacccgccttgtgctcaccccgccgggatacacggggacggttcctttccaagga

SEQ ID NO: 297494 - DNA, 122 bp, Homo sapiens
tgcgtgtctcccgaggcgccctgtgatcggggccttcacttgctgtgaaggtgggcctctcgccctttcccacccctgctgcacaccttgctgctgagtgaacgcgtcctcatgcgctggag

SEQ ID NO: 297495 - DNA, 122 bp, Homo sapiens
atgctggcgtttccccgagggaatcctggcatgtgccttgggaaaggtccccatcatgagcgagcatggggcctgccttcccaccatcccaccgccccagggtccttccggagggagcctgg

SEQ ID NO: 297496 - DNA, 122 bp, Homo sapiens
tgtctcatccagagagagacagagtctgccttgaatcagaggtcatgtggccgtccccgccgggccgaacaggttgcaggagcccttggctttccttcacagagagggcagacaggaatctg

SEQ ID NO: 297497 - DNA, 122 bp, Homo sapiens
acacagccacattttgttcttcctagaaggttttggtgaaagaaaggtggcctttacttacgtgtaaatttctagatgtagtaactgaggaattacgaagaacctggcttctgtgtggaatg

SEQ ID NO: 297498 - DNA, 122 bp, Homo sapiens
gtggggggcggggggagtcttaaacttaggcccgcccagccacaggcgctcaggcccagccggccttccctatacaactttcctcatagcatgcgcgggcggctgattcagtcccggggcgc

SEQ ID NO: 297499 - DNA, 122 bp, Homo sapiens
actgctccaaacccgttcggccctgtgcagaagtctgaagaacagaggtgccctctgacgcggccccaggcaaggactcactagagcccggccaagactggattaggggtcatctgacacct

SEQ ID NO: 297500 - DNA, 122 bp, Homo sapiens
ctcactaagtgtattccttgttttagaattcagtgaatgaaagagagtttctttccttggcgtgctggcttcaacaatgtttgtcctgtccttactgcacagtcaatctacatgaaagaaag

SEQ ID NO: 297501 - DNA, 122 bp, Homo sapiens
catggctgtggagctcccgctgcttcgctgcgaaggacaggttgatgagggtccaggcgacgatcccggggcgcccattgaagaacagcttgaagtcaaaccacttcccgatccgagggtta

SEQ ID NO: 297502 - DNA, 122 bp, Homo sapiens
tcattattgttattgtgttagaaacaacaggagggagggagaggaaacccagagttgactcgaattattattgggaaataatgggaacatcttcaaagaaaagtaaaaggaaaagaaaataa

SEQ ID NO: 297503 - DNA, 122 bp, Homo sapiens
ccgacgacagctcccgcggggctcggccacctgcccgacggcagcgcaacccccaggagacgttctccgacggcttcccggcgcacccgggtaccatctagtggcagcagaagcaggaggca

SEQ ID NO: 297504 - DNA, 122 bp, Homo sapiens
cctctgaaactccctcccagccaggcttttctgaccctgggcctttgtacatgtggttcccgcttactggaaagctcttatccttttctccacatctgccctaattagtcctttaaggcccc

SEQ ID NO: 297505 - DNA, 122 bp, Homo sapiens
gaaggatgaggagacaggtatgctaaggggtggggaaagagagatctaggtcaagggaaccgcataacggaaggccctgaagtgagaaaatgagcagtgggtcccaggacctaaaatgtggc

SEQ ID NO: 297506 - DNA, 122 bp, Homo sapiens
tggcgagcagtgggcctgtgacaccttccaaccctgtcctcaccaactgcactgtctgctcggggatcacacgtcttgatggcgggacatacattgtccctgcccacagggtcagaactgag

SEQ ID NO: 297507 - DNA, 122 bp, Homo sapiens
tttcccaggcggaccccttgaggcacagcaggtcagcggggcagcctgccgggggtccagcgccctcagccgcggcgggctcctttccccgccaccagtgctggcctcgcgacacgggacaa

SEQ ID NO: 297508 - DNA, 122 bp, Homo sapiens
acagggagccaagaaaatccagcagggcggtggcagaggagggagcagaaggtgggagcacgggaagtggaacgagcacagggctgtgggcccctggccctcatctgtcaaatgggaaagca

SEQ ID NO: 297509 - DNA, 122 bp, Homo sapiens
cgtcgtttcgatatcacaccctctgtgtgccgccttacttcctgcttcgagaatgtataacgtggaaatccacgggaccaaatttctgcagaggccttgccggatggttccataactgtaga

SEQ ID NO: 297510 - DNA, 122 bp, Homo sapiens
caataacttaagcatacccttagaatgaccttgtatggcagatgcacctgcatgtgtgttcgagctaaggaatctgggcaaggccaacccgaagactggttccttgtctatgaggaacacct

SEQ ID NO: 297511 - DNA, 122 bp, Homo sapiens
ttcctgccatcattgatggccagggctgattattcctggtccctcctcccccatcctctacgctttaggagccaactctgcacagtgtgaccagggctcccttggcctctggtttctactga

SEQ ID NO: 297512 - DNA, 122 bp, Homo sapiens
aacgaggctgagtgggtgcttcaaggattcaggaggaaacacaacgagaccacacatttccggatttggcagggaaagaagaggatggttgctgggagggggcagccaggacatggggagac

SEQ ID NO: 297513 - DNA, 122 bp, Homo sapiens
ccctcggcagttccagagaccggctcctcacggagggtggcggtagagactgttaagccccgcgggcgccggggcaggccggactgtgccattcgtggggggtaccatgtgggaccgagccg

SEQ ID NO: 297514 - DNA, 122 bp, Homo sapiens
gagacctctccctgaatgggaaggagctgggaaggcagagctgacacaaaagaagccactcgaacttcatggatgggcactttgagcaatgcaggttgcaaagttgtgggaatctgggtaga

SEQ ID NO: 297515 - DNA, 122 bp, Homo sapiens
ctccgcagcggagatgaaaatgaggagcgcgctcctgagggcaaaacccagagcagacaccgcagccaccgcggatgcaaagtgagtaagactcgcccttcacagccacatggtgcctgctg

SEQ ID NO: 297516 - DNA, 122 bp, Homo sapiens
ccgcagccacgcgtctacccagattgtgcgggggccacgggagggtcatgtgggtgatcccgactcgggtgtggggttcgtgcttgggaggagcagcggtctgtggggcccccagtgtccac

SEQ ID NO: 297517 - DNA, 122 bp, Homo sapiens
atagttggctgccaagttacaacctattttgtcaaactcttatgagacatgctcatgattcgtcttccttgtctacttgctcactgacagggcactgctgcggcagcagatgaaggtctttg

SEQ ID NO: 297518 - DNA, 122 bp, Homo sapiens
agcggcagctgtcacctcctggcctcgccccacagcacacctgagcctcctgggcagccccgagcccacagctcccagcagaggcgctaactgccctcctcaagcacaggtcgccgcgtccc

SEQ ID NO: 297519 - DNA, 122 bp, Homo sapiens
gggatgtaaggcactcacattccttctgtagcatctaacaagaactccatccctggcccccggggagggccactgtgccccttttagaaaggtggcatcctgccctccactcattcagtcag

SEQ ID NO: 297520 - DNA, 122 bp, Homo sapiens
gtcacagaatgtcattttcgctattttctgttagtcaaagcagcgttagatgtcagcccacgttgaaggagaagggcatagataccagcagtcattcagtggaggagtgtagggtcacatta

SEQ ID NO: 297521 - DNA, 122 bp, Homo sapiens
tgcggcgcgggaagcaacccagagccctcctcccgcctgctctgtgtaggagacagcctgcggagcccactgccggcgcgcagagagcccagcagctcttgagtccaggaagcaagggtggg

SEQ ID NO: 297522 - DNA, 122 bp, Homo sapiens
ttcttcctttttcttcaatcacagcctgacttcacccagtccaatccacagtgcaaagagcgagtccattataacccagtcagaagagaaggcagattttgtgattattcccgctgaaggaa

SEQ ID NO: 297523 - DNA, 122 bp, Homo sapiens
agccctcgcagctccgggccctcccctggccacggaaggcgcggggcagtctgaagtcctcgggctggagaaacccaccgcgagcacccgctcctctgcgcaggaccctggactagccgggt

SEQ ID NO: 297524 - DNA, 122 bp, Homo sapiens
aagaggccatgctggccactcctcctcaggggatctggaaacccagaggcagcagtgaggcgtggccccaaatctgggctcttcttcttacaaacgtggggctttgggcaaacgccttcatc

SEQ ID NO: 297525 - DNA, 122 bp, Homo sapiens
atgtcgacggagaaagggtttttaagggcacacgagggaatgagccacccaggggactgccgacgtctgaaagccatgagggtagcccgtactgggtgccgacgctggcagcggagagacag

SEQ ID NO: 297526 - DNA, 122 bp, Homo sapiens
cacttctggagtgggcacactttgtcccagctccgtcttcctggagcacccaggagagcccgctgcaagaagaagccccacggcaggccacgtggaggcgaattcacctcctacccagacag

SEQ ID NO: 297527 - DNA, 122 bp, Homo sapiens
cagggtgagagcaggtctcactcatcccaatcccagccaggattgggtcagggcccccagcgcttacctgcaggcaaggtgctgctccacgaccttctccagctgctgccgctgctgaatct

SEQ ID NO: 297528 - DNA, 122 bp, Homo sapiens
acacatctgagggcctggggcgagggggtgctgccgcagtggcaccgttcccctcagactcgctcatcaggacttcagcactgcccgtccatggggacgtctgcactcacagtgtcctcggc

SEQ ID NO: 297529 - DNA, 122 bp, Homo sapiens
cacagaagtctcgctgcaagtgcaggctctggtcacacggccatttgccagctgtgtcctcggcaaggccctcccgctcgctgagcctcaatttcttcgtctctgctaagttaacatgtcct

SEQ ID NO: 297530 - DNA, 122 bp, Homo sapiens
gggctttgtttgctcttgtttcttcatcaccgagaaatacagaaatatgaaagcgcctcacggtgcccagagtgacaaaaggacacccacacaagtttaccaggactcctaaaagtccttgc

SEQ ID NO: 297531 - DNA, 122 bp, Homo sapiens
ctaaggcacagttcttaaatgggaacatgtaatccaaatggctactttatagttgcacagcggtctttaacactatcctgagacaacttttcctaggtatcgttctttcattctgtctttta

SEQ ID NO: 297532 - DNA, 122 bp, Homo sapiens
tcgaatatcaatatttccgaccatcaacataaaaggaggcttgacacagctctgaatgggcgccattcggttggaagaaaactgatacacaaattgaagtctctcaccttttccctcaaggt

SEQ ID NO: 297533 - DNA, 122 bp, Homo sapiens
ccagcctcccggtggacaccagccctgcgtggacgtggcctgtgcttcgcccgcactgcgcgcatccccaacctctgtccgcatgcctggggccttcgcccccacgtgctcgacaggggaac

SEQ ID NO: 297534 - DNA, 122 bp, Homo sapiens
caccgcgcggcagggcccccggcgtgacgtcatttccgcgtcgtccggtttggccttcagcgcccaatcccaaaacgcgaagcgtagtcccaccctcgactgagtagcctcgcgctaacttg

SEQ ID NO: 297535 - DNA, 122 bp, Homo sapiens
ggtccgggagcctgcggcatggaggtgcacgggagactctgcactctgacactctgaccccgcgctgtccccacgagcaagcgcggcagataaaggccagcaaggccggccggggctctggg

SEQ ID NO: 297536 - DNA, 122 bp, Homo sapiens
ccagcacctggcacggcacctgctcacgctgggcactgcagacacgtcgtgggaattgcccgtacactcttctgagagcacctcgcgggcagggcttgtgctgttcatccctgtgttcctcg

SEQ ID NO: 297537 - DNA, 122 bp, Homo sapiens
acaagcttgctggttcaaggttgtgcagaggctggcgcatgggatttggaggagggtgtgcgctgatcagcagcattgagggccaggtgagagcagagaccacggatttgcagtgctgttgt

SEQ ID NO: 297538 - DNA, 122 bp, Homo sapiens
gctgcagccaagatggtaaaatagagccaacacatcactcactgtaccagaagccgttgtcgcatcctaatgccaattgtgctgcaatgcatattgcttaggccatcactaggcctgggtgc

SEQ ID NO: 297539 - DNA, 122 bp, Homo sapiens
cttccctttttcactggttatttccaagcctccaggctcccaccgaagggcggctttcctcggtcaaaaccttgcctaagaaagcatcactacgtggtgttttctattccttatttcaaatg

SEQ ID NO: 297540 - DNA, 122 bp, Homo sapiens
gaggactcaaatattaaggagatgtctcccagaaaactagaccacaaagagcctgactgccgaacagtcaggacacaagagttgggcctctcagaggaccacatcatctgggatggtacctt

SEQ ID NO: 297541 - DNA, 122 bp, Homo sapiens
tatcgtctgtttctcagtgatgatcttagtggcttcctgtctactgtttgtcacatttctcgccttcgggtcttcattgtggtcctggtggccatgtaccacctggcgccctgcagggctgc

SEQ ID NO: 297542 - DNA, 122 bp, Homo sapiens
ctttctagagcgtgagcggtgggggagcaggcgcagggtggcacgagcggaggcggggcccgggcgtggggcacggctggggaagctgccgcctccggccctgcccggctgcctccgccgcg

SEQ ID NO: 297543 - DNA, 122 bp, Homo sapiens
ctcgatctcctgacctcatgatccacctgccttggcctcccaaagtgctgggattacaggcgtgagccaccgcacctggcccagaatatttatttagagagtgatgtcaggcctaagtgttg

SEQ ID NO: 297544 - DNA, 122 bp, Homo sapiens
aggttcagctgtttatttgaaacgtaaacagagtccttgggaaatgttgctggtatctgccgtgttccccacgcgggaagccagagagcgtggcaagtgtctgtcccatcctggggcctcgg

SEQ ID NO: 297545 - DNA, 122 bp, Homo sapiens
agccaaagccacaaactagtacatgtcagggccgggttttggactcctcttttggatcaacgcctgtgctttatctactgtttactttgccccctccttggaagtaggttagatggatgaac

SEQ ID NO: 297546 - DNA, 122 bp, Homo sapiens
tgggaacatgttacttctggatggtaggctgaaaactagtcagtgacattagcatccagtcgcaaaccctgcccaatttccaaataggcagctgattacacaagagaagctacaaagccaca

SEQ ID NO: 297547 - DNA, 122 bp, Homo sapiens
gttccactgctcctgcaggagctcctggatcttcttcacatactgcccaatagtggcatccgttggcgagcttggtggccttcccgggtgctccttccctgggagattggaactggtctcct

SEQ ID NO: 297548 - DNA, 122 bp, Homo sapiens
gcaattttgtttctctttcaaaacaatggctcgaaaatttccaaggaaatagcaagagggcgattcccttcttgaagtatttgagggagcagaagcttactgaagttcatgccttgggtcac

SEQ ID NO: 297549 - DNA, 122 bp, Homo sapiens
cagggctcagtgcccaggctccacgacgtgggcaggttcaacggcagcctcaggacagagcgcctgaagatccgctggcacacgtctgacaaccaggtgaggtgagggtgggtgtgccaggc

SEQ ID NO: 297550 - DNA, 122 bp, Homo sapiens
aagctacggtgcggatccagctggggtatcaggggctaggcacgtgatgaaaatgaaggacgcggacaccaggacaggaatctcctggttcttagagaatttatttcgccacaaataattgg

SEQ ID NO: 297551 - DNA, 122 bp, Homo sapiens
cggcccagggctgggggcccaggctgcccctgctgagaagccaggtgcgcgttcagcccccgggagtctctccgaggctctgtgcgcctcattcctccacggcgtcactttttaaaaagata

SEQ ID NO: 297552 - DNA, 122 bp, Homo sapiens
tcctggacactaggggtggcgggtggctttaggcgtctctagtcttcgagcgtttgaatacgttttagcccacaataatggggtaaaccttgaaggccaacaattctgatggcatattcagg

SEQ ID NO: 297553 - DNA, 122 bp, Homo sapiens
cctgtttccgttcttttcacactgtctgtgggtgctgtgccctgttggaactctctttaacgtcttacgttggagccgctaaccttccccaggtgtttgtcttcattgctttcacagggaaa

SEQ ID NO: 297554 - DNA, 122 bp, Homo sapiens
cacctggggcttgctggcggagtgccatcctcatccatatacatgtccccaattaaaagacgtcccgctgccgggaaagcggctgcaccttggagcgaaactgaaagaagagaccccggggt

SEQ ID NO: 297555 - DNA, 122 bp, Homo sapiens
ccctaccagccagcacctccttcaggttacttcatggcagctattccacagactcagaaccgtgctgcaagaccgggcgcggtggctcacgcctgtaatcccagcactttgggaggccaaga

SEQ ID NO: 297556 - DNA, 122 bp, Homo sapiens
gaccttgcaatatgacttggggtaaggtgggccctgccctccgagggcattgactgagcccgctccagcaggattggtgaagaggatgtctagactggagagggctgctgtctgtctcctgg

SEQ ID NO: 297557 - DNA, 122 bp, Homo sapiens
cgataccttcaccaccaattctcgttttccacaaatccctattaaaagacagcacggtaccgttcccagaaatcaaggctcacaccacgtggagctgactggatgctcacggggacattcga

SEQ ID NO: 297558 - DNA, 122 bp, Homo sapiens
tgcgcagcagcaggcggatcttctcgtcgtccgagtcggggtccagcggcttgttgtactcgtcgtcctcgttctccgagggtgcgcggtccccgcctgcgcctgcacccgcgccgcccggg

SEQ ID NO: 297559 - DNA, 122 bp, Homo sapiens
tcctttttaaatctccatattttttcccacgtactatctttgctttctgttttcttagttcgaacttgttccaagagtgattatgctcactcatttcctcaattcccacttagttttcaaag

SEQ ID NO: 297560 - DNA, 122 bp, Homo sapiens
agttgcaaaattatctctcactgctgtcgcaaaatgacatattcatatgtgcataaaaggcgttcggttctaatatgaacaacaaatgctatcaaaataagtttatttttcagggagacctt

SEQ ID NO: 297561 - DNA, 122 bp, Homo sapiens
agagggtgagaggcagagctggcctagaaccgggtctgctgacttcgagtccagggtaatcgcggatcggaaagaaggaatggggacccttcttccaccgccatgaaaaacagaaaactgag

SEQ ID NO: 297562 - DNA, 122 bp, Homo sapiens
tccagaggcgagggtatcccagaagtgtgagtgtcccgggggtgtgggtgtcccgggggtcgtgggtgtcccgggagtgtgggtgttccagaggcgagggtgtcccgggagtgtgggtgtcc

SEQ ID NO: 297563 - DNA, 122 bp, Homo sapiens
actttgcttttctcattgaattactctgtaatcccaccactttgggaggccgaggtgagtcgatcacctgaggtcaggagttcaagatcagcctggccaacgtggtgaaaccccatctctac

SEQ ID NO: 297564 - DNA, 122 bp, Homo sapiens
cccgtgttctctgcagggcacttagaggactcctgtgctgacctctcaggcagccttctacgaagggacgcggagaataacaggaaggatttccatttcctttttctaggaaaaaaacaaaa

SEQ ID NO: 297565 - DNA, 122 bp, Homo sapiens
gtgacagtttaatgctactaccaattctctttgataacttgagtgttttaaaggaatggccgaacaactaaccttaaaatattcaggttctatcttatataaatacagattgttttaaaaga

SEQ ID NO: 297566 - DNA, 122 bp, Homo sapiens
tcactatccctttcaagatgtgtttaacactttgaggacacctgtattcctgccactgagcgctactgctttgctaatttgaactgattccagctcacgctgatcccagctccctagatctg

SEQ ID NO: 297567 - DNA, 122 bp, Homo sapiens
tccagagctaggagggagttacggggcgaggcccagggcttttcagggccgggggtcgtgcggccaggcgcgggtggactaggccagcggccactgaggggcagagaggtctggggttctaa

SEQ ID NO: 297568 - DNA, 122 bp, Homo sapiens
gtctgggggcgagtattgccagtggatcccctcctctagccaatcaaggggactggtgaccgaggggtctgaggagtcgagctgcagcgaactcaaagatttctgcgctgtgggggcggctg

SEQ ID NO: 297569 - DNA, 122 bp, Homo sapiens
gggaggccatgccccttttctgagtgcttggaagtgactgctgcaagtgacaagtgaccacgccttttcccccgcgggtataaattcagaggcgctgcgctccgattctggcagtgcagctg

SEQ ID NO: 297570 - DNA, 122 bp, Homo sapiens
ttttctgggaactgtagttgaagagattcaggttatagcataagaagagcactgtttcatcgtcttcttgctgttaggaggtctatgaagcagagaagaactttcctttggaaaacaactaa

SEQ ID NO: 297571 - DNA, 122 bp, Homo sapiens
catctccaaaccaagccgggagacgcggagtcagcgaggtagctccacaccatagcggtgcgggtctggaagagccttgtgacttggagcagacacacacagcgtcacgcggctgccccggc

SEQ ID NO: 297572 - DNA, 122 bp, Homo sapiens
caccccttggcactgacatccctatgcccccctctctcccactctcgcctcccggggcctcgccactctacgccctgcagcgcccactgccaggagggggcggagcctcagcccctctcgca

SEQ ID NO: 297573 - DNA, 122 bp, Homo sapiens
gcccaacgtggccctcgcaccgccggcccagcagaaggttgtgagcagccctccgtgtgccgccgccgtctcccgggcccccgagcctctcgccacttgcacccagcctcggaagcggaagc

SEQ ID NO: 297574 - DNA, 122 bp, Homo sapiens
acaggtgcaggggtagtagccaggctattccaggcagacctcaggcagacagcctaggcacgagaggaccctagatcttgggggcccccagagggaggcagggagggcatttgtggctgggt

SEQ ID NO: 297575 - DNA, 122 bp, Homo sapiens
atataagaaggtttaaattccatggggataaatgctaaaatagagatatagaccaaattccgtgaaaaaacagaagctatagtaaataattaccatgataaagacagagaaagttgcaaatg

SEQ ID NO: 297576 - DNA, 122 bp, Homo sapiens
ttagatgtacgacatcaaatcacaggtaaacacacagatacacacaatcagacagatgtacgacatcaaatcacagggaaacacacagatacacacaattagatgtatgacatcaaatcaca

SEQ ID NO: 297577 - DNA, 122 bp, Homo sapiens
gcagaaggaattcaaaggagccttctcaggtacaggtgtgtgcattccaggcctgccagccgcctcccccgccgccttcccgggccgtttgtccgaaggcattatgcaaaataaagccgcct

SEQ ID NO: 297578 - DNA, 122 bp, Homo sapiens
ccgaagaatctttttcttaccttgagcactgagggatgagcagcaacttgcccctcccgacgttcccgggggttgccaggcggcagcgtaactttccacgaaaaggcggctctcggatcgct

SEQ ID NO: 297579 - DNA, 122 bp, Homo sapiens
tcagaacctagaagcttggacgaggggtccccagagctgggacccagactcccgtggaggcggggctggccggctggtgcggagactttgagagctcagaggagagtccctgaggagttggg

SEQ ID NO: 297580 - DNA, 122 bp, Homo sapiens
cgaagctttccctttatgttcctgctttccctgacagcccctcctctgaactctggcagccggtattgttggtaaccaggatactctgtcttggcttggagagagccctgaatgcaaatgat

SEQ ID NO: 297581 - DNA, 122 bp, Homo sapiens
attagaggtgagtcactaggttttgttgacactcaaaaggaagtgattacacaagggaatcgttgcaagatcattgcaggttatcttagaaatctgactaccatatgtctatcgatgaggaa

SEQ ID NO: 297582 - DNA, 122 bp, Homo sapiens
ggagctggctgagctgcccaatgggctgggggagactcggggctccgaggacgagacggacgacgatggggaagacttcacgccacccatcctcaaagagctggagaacctcagccctgagg

SEQ ID NO: 297583 - DNA, 122 bp, Homo sapiens
caggcccttgaaaagaaggtaatgtggagtgggtagcctccgtattgattaagaaggggacggacttaccctccactgtgagagttacctaaggctcggcgtccgtgatggtctacggggct

SEQ ID NO: 297584 - DNA, 122 bp, Homo sapiens
cctaatgtccaggggtagagaaaatgacatgactcacaataaggcagggggtgaacaccccgtccatgatattgttcctaatattcaggggggaagagtatgatgttactcccaatatcaca

SEQ ID NO: 297585 - DNA, 122 bp, Homo sapiens
ctgctccccagcatcttctgtttcctggtgagtgattcctgctactttggatggccatgacgggctggagctgccttgtgacaggagcaggagggtttctgggacagaggatcatccgcctc

SEQ ID NO: 297586 - DNA, 122 bp, Homo sapiens
tcctccctccaccatcctggggtcccgggcaggctccgtggactggcggagggggcccagcgcggggcctggtcctcagcgggcgccccgatgaacgaggccgggctggggttcggggaagg

SEQ ID NO: 297587 - DNA, 122 bp, Homo sapiens
aggtcccggctcaggctctcggggctcgtcaggggccgagctccggctgccttagctgcccggctcacagcctctgagagaagcagctgggggccctcaccctgcatcgtctgggggacagg

SEQ ID NO: 297588 - DNA, 122 bp, Homo sapiens
caaggccaaaaggaaactgctccagcgaagaggggacggtgagctcctcccgcaggacaacgccacactttggctcaccacatcgcttgagtttcatgtccaaggccacggacttttatcga

SEQ ID NO: 297589 - DNA, 122 bp, Homo sapiens
tggtgaggacacagtaagcacctgttctgctgagtttctccaaaagtaacaaaaatgtcacgcacaggttggcaaaaacagcacccaggccaaatcctgccagctgcctgtttctgcaaaca

SEQ ID NO: 297590 - DNA, 122 bp, Homo sapiens
tggtcacctcctggcggtaaaagccactgcgggcgggcggcggagagctcatggcaggcccgggagctgcccaccccgcagagcctgcgggcggtgcccccacgaccggggacggggctccc

SEQ ID NO: 297591 - DNA, 122 bp, Homo sapiens
ggtgccgtggcaatgggtggcacctgcctgtggccccttctcagaaggacgttttaaacgcgtgaggtctgatgcacagccacagggagacacagacgagcagatgtgggcatccgagtatt

SEQ ID NO: 297592 - DNA, 122 bp, Homo sapiens
ggggagccggcttctgcatgcgagctccacgggacagtctcagtccccctgctgcagtgccggcgggaaacggcaacaatgccagagcattcacacccagagtctccttagagcccctagat

SEQ ID NO: 297593 - DNA, 122 bp, Homo sapiens
tgacctgaccttcgagggtcacctcctgaattcaatcgctgtgacctgtgctgcggaccccgtcaggaagctcctggtctcctccagtccctcccccgcctcattcgcacaaaaggcctcat

SEQ ID NO: 297594 - DNA, 122 bp, Homo sapiens
gccgggtggatttggctgctcgtgcaggagctctgaaggggtccgctggcgggggaccctcggacttacccgagctggcactgcggacccctgcgaggttcatagaagcacggaagggggcc

SEQ ID NO: 297595 - DNA, 122 bp, Homo sapiens
cggtcgcacagacgcggaacagggcaccaggcacgccgccaggggcgggacggccacgcccggccacgccacgccccggaagtgacgtacatctctgcacgttctcttccggccggagtcag

SEQ ID NO: 297596 - DNA, 122 bp, Homo sapiens
accttcccttagcggaagctggaaaggatcagaacaatgaatggaaaagtcctttcaaaacgctttacatttgacagattcttgttgggtagctgtagaataacggtagtgttcagccctgg

SEQ ID NO: 297597 - DNA, 122 bp, Homo sapiens
tttactaagaatccatatgccacagaagttggcaatatttatatccttttcttctgccttcgacctactgtggtctcgatttggttggtttggatggcaatcatgcacatacaagggtctgg

SEQ ID NO: 297598 - DNA, 122 bp, Homo sapiens
ctccccagcgtcgccctaggctgggactctagtaggtcttcggctcagttttggctgcagcgcccgcgtagatcgcttcggccgggttctacgcccggctcaactatgagccggtgcgccca

SEQ ID NO: 297599 - DNA, 122 bp, Homo sapiens
tttaaaatgggccgggcagcagaaagacgagtgagtgacagcagacaggccaatcagaagcggccccgtctcgggcccaccccgaggcctggcccaaccgcgtcccggtagctcccggaata

SEQ ID NO: 297600 - DNA, 122 bp, Homo sapiens
atgcaggcagaaccacctctcacggttgttccttttgaaacaaacaaaagcagaaacagtcgcactttttgatgttactcagaataatgaaaaaaataggagatggttcagaaagtggatta

SEQ ID NO: 297601 - DNA, 122 bp, Homo sapiens
tctagtttgtctgtcgcgccacgcagtcaactggagtgtcactgtgggttctatttacaccgttatgagaaaaacctgtggcggagtaaaactcggtaactccgctcgcagaccgcccatct

SEQ ID NO: 297602 - DNA, 122 bp, Homo sapiens
aagaggggaaaggcatttgtagggtgttaactggtggactcgggaccagagagacagctgcggattcccctcggggtgatgctccgtgcaggagcggtcacggcgtccagaggaacccgcgg

SEQ ID NO: 297603 - DNA, 122 bp, Homo sapiens
cagtgtcattgctagtctcatccccgctttacagaccaggaaaccaaaggtcagagagatcgagtaactggtgcaagtccacacagctcatcagcatctgaggccggattcaaatggactcc

SEQ ID NO: 297604 - DNA, 122 bp, Homo sapiens
tcaccaggcaactttgaagtcagcaccaactcaccatacttcggagagtatgcaaagtcccgtttcagatcagtccagcagctgggttgcagcaagtcctacctggagagacttaccggctt

SEQ ID NO: 297605 - DNA, 122 bp, Homo sapiens
ggcaacaatgagccgggcggccgctgggccccttccccgcagcggcccccgcctccgcggcgccccccgcacggccccgccgcgtgcccgccctgagccccggcacctcccgggcgccgcgc

SEQ ID NO: 297606 - DNA, 122 bp, Homo sapiens
catggtgaaatcacccagagagaccacaaatgggatcatgtctcaaaggctgtgggacagcgagcctgttgcaggtggcttgaactcaatgtccctccaggtcttgaacctgctgcccctcc

SEQ ID NO: 297607 - DNA, 122 bp, Homo sapiens
gacgtagctcacatatcatatgatccctccccttccagtggacacgtccatggctttcagcgtgtttatagatgggcaacatccccacgggcccttttagaacattcgcttcacctcagaaa

SEQ ID NO: 297608 - DNA, 122 bp, Homo sapiens
ggtatttggagatgataaacagcaaaacagggtctgtgtgtgtgccattgattcaaagggcgtgcgatgtgcctctgttgaccctattcatcttcacccttgtgtccctcctcccttgttag

SEQ ID NO: 297609 - DNA, 122 bp, Homo sapiens
ctcgaacaggcgggagccctggaggcttggccagctctctgctgtcgccttgtggggcatcggagcagctgaagggcctgagtccttgctttacagaccagacacgggcagggagcgccgcg

SEQ ID NO: 297610 - DNA, 122 bp, Homo sapiens
ccagaccaaaatgtcagtagtgccaaggctgagaagccctagtagagactgcaaatgaaacgcgagcttttaggaacttcacctgaagtcttcctccctcctccttccctggctactctgac

SEQ ID NO: 297611 - DNA, 122 bp, Homo sapiens
cccatcgtgaacaagacggagatcgagaacgttcgcaatggcacgcaagtgcgctactaccgggaggccgagacggaggccttccttacctacatcgagggcgtctgtgtggtctggttcac

SEQ ID NO: 297612 - DNA, 122 bp, Homo sapiens
gcgggtgaatgacgtaagtggcaagcgcgctggccaaccaaatagccagttggggaggggcgggcctgagtggaagaagacgggccaaaggggagaagagaagggcagggcttcacggaatc

SEQ ID NO: 297613 - DNA, 122 bp, Homo sapiens
ggggaccaggtgggggcgcacgcaggagcggtgcgtttcaggctgcaggtgccgtctgcccgtctcacttccggcctctccactgtgctggacaccctctctgagcagctttgctggaaaga

SEQ ID NO: 297614 - DNA, 122 bp, Homo sapiens
aaaggctaggggtacaataagatgattcttaaggcccctatcagctctaacattttttgacgtctaagcacttcatcctacttcaaactcctgaaatcccaaattcatcctgaagcctttcc

SEQ ID NO: 297615 - DNA, 122 bp, Homo sapiens
gtgctttaccctaaacgccggacatctagaggcagcttcctgcgagcagggctgctgtggcgtctttctcagcataaatgtcagtacctttgacttttgaaaggacagggtaagagagagaa

SEQ ID NO: 297616 - DNA, 122 bp, Homo sapiens
tcaatgagggactgtgttgctaagagcgttgggggcaaagccaggctggttccttggcctcggggtttcctgggtcggggacacggtgaagaggctccagcgggacctgcccatcagtcctg

SEQ ID NO: 297617 - DNA, 122 bp, Homo sapiens
taatggatggagggagtggagatgcagacttgggagagacggaagaatgaatgacacagacggggtaatctgagcagcaagaaaagaatccagagtgcctcttaaggccctgccaattcatg

SEQ ID NO: 297618 - DNA, 122 bp, Homo sapiens
gcgttcttggcgtcgggaccctacctgacccatcagcaaaaggtgttgcggctttataagcgggcgctacgccacctcgagtcgtggtgcgtccagaggtaagggatggggacccaggactc

SEQ ID NO: 297619 - DNA, 122 bp, Homo sapiens
ggcaacgtcagggtcagccgggagctgcctggccacactggtgaggggcctggcccagttcgggccctttttggggttggggggtgcactgccctccgtgtggagacctggctgaccagctc

SEQ ID NO: 297620 - DNA, 122 bp, Homo sapiens
gacagagaaaatcattcctcttttgcagatgacaaacataaaggcccaaagtggcagaaacgcctgccatggagttacatggctggtccaaggtaaatgggggtgggaattgggggtacttg

SEQ ID NO: 297621 - DNA, 122 bp, Homo sapiens
aagtgtgttgctggaatgtgtgtgtgcaggaatgctatgtgaaaaggccagaccccaaaccgttccacaggctgattgcaacaaagaaaaacctcagggctggagacatagatgaggattgg

SEQ ID NO: 297622 - DNA, 122 bp, Homo sapiens
cattcataacccagtgatgtgtgatgtcacttgtcccacagaggataatgaacaacttcccgggaaatatttccatatgactaacaatttaatgtcttagacagaaactgaatcttgcctac

SEQ ID NO: 297623 - DNA, 122 bp, Homo sapiens
tgcagaaggcaggctgggccacgccctcaccaagggtccttggagctgggcagatggtgccggggtagctgctatctcagaggctgcttgagctcgaacaggcctgtcccgcccctgacgac

SEQ ID NO: 297624 - DNA, 122 bp, Homo sapiens
gagaagctgcagcttcctgcatgacagctggtgtccacgaagcacaagcctgaggagtgacgggatgggggagggaggtgggccaccatgtttggacccggggggctgctcttccctccccc

SEQ ID NO: 297625 - DNA, 122 bp, Homo sapiens
gagaggttgctgtttaaaccttcaagtccaagttctcttcgtgggctaggcccattaagccgccacctcctccaggctgccagttacctggagagagccacaaggaaaggagctggcgtctg

SEQ ID NO: 297626 - DNA, 122 bp, Homo sapiens
gggggagggggcattgggaaccccacgtggcactgatatcacctcagtcaatgaagtggccggtgcagggcacagggccacctgccgctcactcagctgccccttatcagatgactcaagtg

SEQ ID NO: 297627 - DNA, 122 bp, Homo sapiens
acagacagagatacacaggcagggaagaaagccaggtgaagatggaggtagagactgcagcgatgcagctacaagccaagaaacaccaataggaactgcagccgccagaaactaggaagagg

SEQ ID NO: 297628 - DNA, 122 bp, Homo sapiens
ccatttctcaagcatgcatttggtttctttacacttctcaggggcagttgccatgggaggcgcaggcctgctggaaggaagatggtcgattctcccaagcaacaaaggccacgtagagtcct

SEQ ID NO: 297629 - DNA, 122 bp, Homo sapiens
tctgtcccagccctgagctcagtgaaagattgcagagtcctgggcccacgagggggtctccgctgtgtccagacgcccttcagagcaaaggagccacaggcgggcgctctcccagtgtctct

SEQ ID NO: 297630 - DNA, 122 bp, Homo sapiens
ggagcagcaccagcggaagccacatcacgccggcgtcgggtcgggtaaatgggacagctccgactgcgctcagcctctaggactgtggctccgcccgggctagttcgctctccagtcaggag

SEQ ID NO: 297631 - DNA, 122 bp, Homo sapiens
acatcagcagaagggcaaagagtacggctcccacagcactaatggacagtaggcctcccacggctgaaaatgcaaaaagcagtgtgacccccacatagctccggggagtacatgcctttagt

SEQ ID NO: 297632 - DNA, 122 bp, Homo sapiens
agcgccacccaggggttgccgtggcaccagtgggcgtctgtggctttccgatggtccctacgtagggaccaggcacaacagctctcagatgcaccacgaggcctgatgggatttgcacaggt

SEQ ID NO: 297633 - DNA, 122 bp, Homo sapiens
taggaaaaaaaaaatctttggaatagccaattaagttgaataaaaaaatccacacgaatgcggtttggttggggcaggaatccactcctatgttcctggtaatctgatcccgctccatgaat

SEQ ID NO: 297634 - DNA, 122 bp, Homo sapiens
catccaagactcaaacttagaaacttgaattagatgtggtattcaaatccttagctgccgcgaagacacagacagcccccgtaagaacccacgaagcaggcgaagttcattgttctcaacat

SEQ ID NO: 297635 - DNA, 122 bp, Homo sapiens
taatgctaatacacaataagcatccacaggctgagcgaatgaccttgaggaactgtttggcgtcagctacggcactacaaacatgaccaaagccgcacggggcccaggatgcccggggctac

SEQ ID NO: 297636 - DNA, 122 bp, Homo sapiens
acactcaagcacacggcatcacaagacctgaatgcctctgaaagtatgtgataacagcaacgaagttgagatcctggaataaccaaacctgacattaatctgaacccatttttcttttcctc

SEQ ID NO: 297637 - DNA, 122 bp, Homo sapiens
aaaaaaaaacaactaaaacatgctccaattgaatgctgcagtctatcagtaattatcacccgcccagcactaatccctcttagctgcctcacctcaacccctcccatcacacatattcattc

SEQ ID NO: 297638 - DNA, 122 bp, Homo sapiens
agtccttggcgagctcccagtggggctttgcagctgctttgactatgagggccaggaccccggtccctggactgcctcataacttgggtcgtgaggactgaaacagaatccatcacttaagc

SEQ ID NO: 297639 - DNA, 122 bp, Homo sapiens
tgctgaccaagagggagaactggagccttctcctgtcccctctgctccacctcctgctggcgaacctgaggccaggtcctgtgagagctactgcctggatgggcaccgagcagggggcccgg

SEQ ID NO: 297640 - DNA, 122 bp, Homo sapiens
tcccctcggaggagcggggcggggctgggcactgctgaccaatcggagggtggggctgggcgctgagaaggcggaggcggggcccgcagccagactgggccgggtgcaactttcgcggcagc

SEQ ID NO: 297641 - DNA, 122 bp, Homo sapiens
cacagggcaggagggaacgtgcccagactcggagcagcgggaccagcctctgaaggagcccgacaccggcgtggtgtactagtaggtgacgcagaggcctccacatcaggccgaggtctgac

SEQ ID NO: 297642 - DNA, 122 bp, Homo sapiens
aacttgtaaatagtagaagcaaatgtgtaaattttaacgtaagcctctagaacttgagatcgtaatcacctgcagggtgtgtgtgtgtgtgtgtgtgtgtgtgtgtgtgtgtgtgtgtgtgt

SEQ ID NO: 297643 - DNA, 122 bp, Homo sapiens
atggtcattctgatctcaaaccaaatggagaaactacggattttttttccttattacggtcggatgggatgaagaccttcctgcctgctaagagctggggatctatctatagagatacatag

SEQ ID NO: 297644 - DNA, 122 bp, Homo sapiens
aattgccttggaattctgacattccatgaatctatgagccattcagttgtattacagcatcgtaatcctggtttacaacttgtcaattaggcagtttgcctacatattttcctgccttcgga

SEQ ID NO: 297645 - DNA, 122 bp, Homo sapiens
cttcaggtttgggcaccttccaagtggcctgtgaacccctaaagggcaagagctggggtacgatgtccctttgccccagtgacccagaagcaggttcaatctgtgcctcacagcaccaccgt

SEQ ID NO: 297646 - DNA, 122 bp, Homo sapiens
gacacctgagcagatgagaactggagcctccagctgcttccagcgaatctacacagggagcgctctgggcaggttttgttcaagtggtacccgaggggacgcaccatttaaataagcaggcg

SEQ ID NO: 297647 - DNA, 122 bp, Homo sapiens
tccccgaactcgctcgtctcctctgcgctctcctggccgcctcctctccccgagcctccgcgtcttgctctggtctgggaaaaagcgcttgtgaaagtatttgctggaggctggaagaggat

SEQ ID NO: 297648 - DNA, 122 bp, Homo sapiens
cgagccgggggtggcgggcggggacgtctgctcgtcagagtcattcaatgaagatatagccgtgttcgccaaacaggtcagcaaaatagatgttaaaaagtaaaagaaacaaaaagagagcc

SEQ ID NO: 297649 - DNA, 122 bp, Homo sapiens
atgtgaaacagataaaactcactccccaaatcccaattttaaaaggcattgagggcggggcgtggtggctcacgcctgtaatcccagcactttgggaggccgaggcaggtggatcatgaggt

SEQ ID NO: 297650 - DNA, 122 bp, Homo sapiens
cacagccgcggctgcggtgccgcgggtccccttgcagccgcccgggagcgaccggccctgcgcaccccagccctgccccgcgcccgcccgcctgcctgcctgccttaccatggctgcagccc

SEQ ID NO: 297651 - DNA, 122 bp, Homo sapiens
gcctgggcacacttattctagtaaagagagtgtgatgacagaacaccttagacttcaacacgcatctgtgcttaaagaggataaaaaacaaagaacaaaatcaaacaagacaatgtatgagt

SEQ ID NO: 297652 - DNA, 122 bp, Homo sapiens
aataggcctgagagccacaaagccggtaagtgaggctgccatgactgtgacctggtatcccggtgccacagccacactgctcttttcttcttcttcttcagagcatgctagagtcaagggga

SEQ ID NO: 297653 - DNA, 122 bp, Homo sapiens
tgccaccgaatccttaaggcagtgcaaggccccagtggcggccagaggcggatgaaaccacgggaaaggactcggggctgaaatcaacacacttgactgggtttggggagctaagtcaatca

SEQ ID NO: 297654 - DNA, 122 bp, Homo sapiens
caaactcgttaaaactagccatgtcaggaaaggcaaaataggcttggggtctgttagggtcgaagaattaaagagatgttactacacagaactgggatttcaccctgctggccagggaagac

SEQ ID NO: 297655 - DNA, 122 bp, Homo sapiens
gtcttggctgatgatgaccaaccaagcctagactccctggggcgtcgcagtagcctttctcgtttggagccttcagacctctcggaagactctgactatgacagtatatggacagcccatag

SEQ ID NO: 297656 - DNA, 122 bp, Homo sapiens
gagttagaaagggaggtgagcgaactacgcagacgcaaagagcccgcagcgcgcaaggcacgcagggtccaggccgcactaatcactttgccacgcccctcgtccgccaccttttctcttgg

SEQ ID NO: 297657 - DNA, 122 bp, Homo sapiens
tgtgtgtgtgtgtgtgcgcgcgcgcgcgcgcgtcaggggccaatgctggaaaggaaacagcggactcgctgaggagaagaaaggagccgcccccttcgtcgccagccccctccccacttccc

SEQ ID NO: 297658 - DNA, 122 bp, Homo sapiens
gtgggccgggggcggtcggcctgggcttcccccggagcgcccgggagagccagattccaccgaggaacgcggcatccccgggatcctcccgaactgggctggcctctccctggggagccccg

SEQ ID NO: 297659 - DNA, 122 bp, Homo sapiens
ctcagctttatgtgaatcgtgaaaaatgtgaggatgacataaatacctgaaagtcattttcgcttagtgtaaatctgaaagggaagtcagggcactataatgaaatatgctttttttttttc

SEQ ID NO: 297660 - DNA, 122 bp, Homo sapiens
cccgtccccccgcagaggccggtagcaggtctgtccccggcggaagtagaggccgccctgcgccgcgcccgccagcagcacgagcagcagaagcggccgccaccctggcccgcgcctcgcca

SEQ ID NO: 297661 - DNA, 122 bp, Homo sapiens
tgacagagggagattctgtttctaaaaaaattaaaaagagtaacaggaagtttcactgggcgggggttggaatgtttatctagtttagcagcgaagttctaagataaggtctgaaatacaat

SEQ ID NO: 297662 - DNA, 122 bp, Homo sapiens
gaggtgtcccgggagtctatggcagaatttccccctcatcctgcgctgggagaggggtctcgccccggatggaactccgcgttcccacctccaggttctcccctgacctccacttctgtacc

SEQ ID NO: 297663 - DNA, 122 bp, Homo sapiens
aggtagaggacaagggaacggcagaagacgcagcgaagggtggccacggcagcagcacggcgcagggcgcagctgaatcgccgctctgttcccggcgcgcactgaggggctttcttcgcggc

SEQ ID NO: 297664 - DNA, 122 bp, Homo sapiens
gtccacacgctgctgaatggagcggctagagccgggtgcctcgctgggagccggtgaggacggtgtgcaggctggaaatgtcccagctgctgaatcatggctcagcagtttgtctcctagtt

SEQ ID NO: 297665 - DNA, 122 bp, Homo sapiens
gataatgaagtgttcagagtaaatgtccctgaagaacaatctcttcgtctgtctctcactcgctatcaggatagaagcatcaagtgtaatgaagatcagtttctgtgttaagctgggaaaac

SEQ ID NO: 297666 - DNA, 122 bp, Homo sapiens
tttctatcatgctttgtgtgtactattcatatgacactcatcacatgctaacttacttcacggttactgccatttgtcttacattctctacttaaatgaaggtaggaaacctgccttaatca

SEQ ID NO: 297667 - DNA, 122 bp, Homo sapiens
taatttaaattacatactcgttatgtggcaatttgttgacttaacagaaagcaaagattccgggtaggttgtttctgaggggacattaccaaaaaccagtacgatctacttaaaagagaaga

SEQ ID NO: 297668 - DNA, 122 bp, Homo sapiens
ggtgcccacgcagctgcctggacaagtcagtgcactcccctttccttcctgcctgggggacgcatgccgggcgtgatgccacagatctgggattgcgtgcgtgtgtgtttgcaagaatacgt

SEQ ID NO: 297669 - DNA, 122 bp, Homo sapiens
caagtcagcctgccctgatcatgttactctcattggttctttctgcccttttgtttgcatcgttcctctagaccatcacatcctttcttacgctgttacatgcttctttctttctttctcaa

SEQ ID NO: 297670 - DNA, 122 bp, Homo sapiens
cgcgcctctctgcgcctgcgccggcgcggcgcgcctctctgcgcctgcgccggcgcggcgcgcctttgcgacggcggagttccgttctcctcagcacagacccggagagcaccgcgagggcg

SEQ ID NO: 297671 - DNA, 122 bp, Homo sapiens
ggaacagccccgagctgggtgttggctgagtgtgaattccagcagccaggctcacagacccgtgtcacctctgacgtcaagtggcagggacacgctaaaagcctttgagtctattgattgag

SEQ ID NO: 297672 - DNA, 122 bp, Homo sapiens
acgctgcgacaggaagaggcaataggaacatgcccccgtaggccgtgggtggcatcacgacggccttttttgtttcctgtattgctttagtgtaaaggaaaatgacaactctaaagaaggag

SEQ ID NO: 297673 - DNA, 122 bp, Homo sapiens
tgctttccagaatttgggatttgagattggcccggcattgcttcccaggagcggctctttcgggcccaggcggtggctcggaccggagcgtcccccctgcagccttcgggcgcccaggccag

SEQ ID NO: 297674 - DNA, 122 bp, Homo sapiens
ggggaggtcgcccaccccctcggaggaaagagtgggtttcagtttgtcctgcactttccacgcaggttgacgggagcctcacacaggcctggcacactctgaggccacaggaaaacgtgttt

SEQ ID NO: 297675 - DNA, 122 bp, Homo sapiens
agcgagcaacaggcggcgcaggagctggagccggagaacctagtgtgcttagcggtcgcccgctgggttcctcgcgcgcctggccgcccctcccctagcaacggcccggccccgccccgccg

SEQ ID NO: 297676 - DNA, 122 bp, Homo sapiens
ggacactgttacagaaccagaaagaaacccaagacagtcccttccttgaggaacaatcaccgtccaaagccaggttagtttcctttggaagtagaaagaaaactccctcgagtcagttgtca

SEQ ID NO: 297677 - DNA, 122 bp, Homo sapiens
cggctccggctagctggcaggcaggcccgcagccagctccctcgcgctccctctcgcgcgcgccggccacgccccctaggcaccgcggccaatcctcggccagctctggtccgtctccttcc

SEQ ID NO: 297678 - DNA, 122 bp, Homo sapiens
tgtatcctaagggtaataagcttatgcattcaaggatttgcctaaaagaatgttcactgccgggccttttataagagtgggtacttggagggaactcaaatgtttaatcatgagagattcac

SEQ ID NO: 297679 - DNA, 122 bp, Homo sapiens
gcacggagacagttcattactttagaagtggcaactgtttgcagccaggcggtgacctagcggctgctcttacataaaatgggtacatttccccccactttagtggatttgccttccactct

SEQ ID NO: 297680 - DNA, 122 bp, Homo sapiens
gccccgcctccacccatccattggctagatccgccgcccgtcagacgagcccccggggcccgcccccagccctgagctgcgcctcttagctctggggccacagcgccagcgccactctgcca

SEQ ID NO: 297681 - DNA, 122 bp, Homo sapiens
agaagacggggttatggaaaaggcaacgggctggagattccccggattcccaggctagggcgccggtctcactgtgcgcgcaggtggggcgcgtgccagaacagggcctgggggtcaggccg

SEQ ID NO: 297682 - DNA, 122 bp, Homo sapiens
actgcacatcagctccaggctgcaggagccaccacctggccatactggcttcctccctgacgcagcacagctgtgcctgggacacagagtcgctctcaagtactggagcagctagcaagctc

SEQ ID NO: 297683 - DNA, 122 bp, Homo sapiens
gcgctgcgcatgaccagccgggcccgccgcggccctagagtcccccaagggctgtggcaccgtcctgctctctggtcctctcaaaggccgagaggtgtaccggcatttccgcaaggccccgg

SEQ ID NO: 297684 - DNA, 122 bp, Homo sapiens
cgagccgccgagacgcagtgtctccgggtggcggcgggagaggcgggccgggaagcatggcggccgccccaacaccgcgcggcggagaccgttagggtgtgcagggcccgggaaggcggtct

SEQ ID NO: 297685 - DNA, 122 bp, Homo sapiens
ctctgtgtctggtgagggccgcttcggggttgcagacagttctctccctgtatctccccacgctaggggctggggagagctctccggggtctgttttatgagggcactggtcccattcctca

SEQ ID NO: 297686 - DNA, 122 bp, Homo sapiens
ctcactgtctatcagctgggccagagggcactctctaggcagcttgtctaggtaaagttccgggtcgaagtgcgccccgttcagatcagtggagtccagggggtcgggccccgcggggagtc

SEQ ID NO: 297687 - DNA, 122 bp, Homo sapiens
gtggaaggcaaaggggaagcaggcacctccttcacaaggcaacaagcaagagtacatgcacgcaggagaaactgccatttttaaaaccatcagatctcgtgagaactccctcactatcacga

SEQ ID NO: 297688 - DNA, 122 bp, Homo sapiens
ggtgtgagaccctggccccgcccccgcggtcagcccagtcccccgagccccgccccgccccgaccaacccgcggggattttggcctaaaccgaaaatgaaaccgggtaaaggcgactggggc

SEQ ID NO: 297689 - DNA, 122 bp, Homo sapiens
aagcttagtgattatactatgcagaaatgaccccgagaattattccaatttttggacactcggtgtgtgccccacagaccagctgcatgagcatcgcctgggagcttattggaaatacaggt

SEQ ID NO: 297690 - DNA, 122 bp, Homo sapiens
ccgacaaagattctctaggccaccggtctcctcgctgttgcagaataaacgctgaggacccgctgcgtcagcgagctgctcagcagagaaaggcgagaccaccagggctttaggcctagaga

SEQ ID NO: 297691 - DNA, 122 bp, Homo sapiens
gaggggcggaaggagctgggttgagtgcacgatgctgagattgacccttttttaggtccccggtgttctgtgactgaaaatccggtcagctggaggctacggacctccttgctgaggctagt

SEQ ID NO: 297692 - DNA, 122 bp, Homo sapiens
ctccaagcaagattttgaagagcgcacagtgtctggataataggtgagcccctggggctccgagaaggacagttcccagctctgtgcaaggaacatgctgtctgaagggactcacccagcac

SEQ ID NO: 297693 - DNA, 122 bp, Homo sapiens
gaatgaaaggggcccaagtagggaacaggagtgaggagagacagggttagcgggggcagtcgaaggagacaacggaaaggcagaaaacagaaaaataacgcaagagagagaaaaagtaaagg

SEQ ID NO: 297694 - DNA, 122 bp, Homo sapiens
ccgaatcaccgacctctctccccagctgtatttccaaaatgtcgctttctaacaagctgacgctggacaagctggacgttaaagggaagcgggtcgttatgaggtaattctgcacgtttgcc

SEQ ID NO: 297695 - DNA, 122 bp, Homo sapiens
ttcttccaattgcctgaattcagaacaacacctggctcctgatgttctaggggcagggagcgggaaaaaggatggggcttcactgttcattttgcagactttgacgttatccccattttacg

SEQ ID NO: 297696 - DNA, 122 bp, Homo sapiens
aacaacaactcctcctgctgcacatgaccagggtggtttgggtttagttggtaactcgcccgtcaccatctctgcctccataatgagcacccctgggctgggcagaaaaggcctgggctgtt

SEQ ID NO: 297697 - DNA, 122 bp, Homo sapiens
ggagcgtgagtagttgccgcaataggcgcaagagcaggcagaagcgaaagtgatggtccacggcgcagtcagccgctcttgagaatgcgaccacaactgggagcggcagggctggtttcggg

SEQ ID NO: 297698 - DNA, 122 bp, Homo sapiens
ccatgatgtaggagcagaagaactgatgcaatatttcaaaactgaggctgggcgtattcccgcagtgttccaggctgaggctgggcgtgttcccgcggtgtcccgggctgaggccgggcgtg

SEQ ID NO: 297699 - DNA, 122 bp, Homo sapiens
cgccctctgcagcgcacctcttcgcaaacccttgagggcgcagggcctcgctctcctccccgctactcctacagccctgttctgggcactgagcccccaccccgacccccttacattcagcc

SEQ ID NO: 297700 - DNA, 122 bp, Homo sapiens
ggctccttatgatgggcgctacctgatcacggccaccctcacccccgagagagacgcctacgtggaagcagtgctgtcggtctccaacgccagcgtggcccagctgcataccgctgggtaca

SEQ ID NO: 297701 - DNA, 122 bp, Homo sapiens
atgtgtgggtttaaaggcatcccacaccctggcaagaccaccgaggggccccgggccacacggctaggctactgggaaactgccccattaactacccagaggaccccacaaacagggagatg

SEQ ID NO: 297702 - DNA, 122 bp, Homo sapiens
agcaggcccaaacgcacgacgcagctgctgtgcctgggtctgagctgcacccacaggtgacgtgaggggcgcctaggaggcgggggaggcacggggccgggaaggctcgggggtcccagagc

SEQ ID NO: 297703 - DNA, 122 bp, Homo sapiens
ggcaaacacaaaaactcccataaacttatgttatttctatttttctttctagtttgccaccgtttacaaggccagagataagaacaccaaccaaattgtcgccattaagaaagtgagttacc

SEQ ID NO: 297704 - DNA, 122 bp, Homo sapiens
cctctctgtctgtgaccgcaacaaactttgtgaaacttgaaccgctgggtgcaaagttcacgcccttttctcctttcctctcttgcctgggccggctcctcctggagcagggagggaagaag

SEQ ID NO: 297705 - DNA, 122 bp, Homo sapiens
tggaaggcggcaggcggaagggagggggccggtgcgagtgaggagaagctgggcgtccgccgcgacttctcattggctctctgccccgcagcctacaatgagcccgccgattggctgcagct

SEQ ID NO: 297706 - DNA, 122 bp, Homo sapiens
taggattctattttggccactgcgaggttaacaggctccaatattaagcaactccagtatcggttactgcaacaccagagcagatcggaaataaatgtgcccccaaacgcacgccagcagcc

SEQ ID NO: 297707 - DNA, 122 bp, Homo sapiens
agtttgagtttggcgctcggcttctgcggaggaggcggggagggagaaacgaggggaaggcgtaagagacttggccctcgccagccaccatcggattcttccggttctgcggaggataaagg

SEQ ID NO: 297708 - DNA, 122 bp, Homo sapiens
ccccgtagtggacgtagcccccgatgtaggcggcgtaggtgctaatggccaattggagtgcggcccccagcgcgaaccagcgccgcttcacgccaaaggacatgaaactagcgcacagcacg

SEQ ID NO: 297709 - DNA, 122 bp, Homo sapiens
gaacagagccgtctttctctctgcgttgtgccgaggccccgcagcgccgcccgagtgtcacggaaagtgcctctggtgaggagctgccgtgcgcactctgggacaagtcaggtcctgcgtgc

SEQ ID NO: 297710 - DNA, 122 bp, Homo sapiens
aacaagggacctccagtcttgtttggcccacattttccctcatccgcccctcggaagggccggacgcagccatttcaaatattaatacatttagggagaaaagtgcaatggtagactcggga

SEQ ID NO: 297711 - DNA, 122 bp, Homo sapiens
aatgtactttgtggaaaagaaaaaaatagggttagaaagaggaatgttaaatcctaattccgccacagatttggagtaattttgcttgtttgtttgggttgttttttgagacagagcctcac

SEQ ID NO: 297712 - DNA, 122 bp, Homo sapiens
ccggtccctgatggaggtaagtcagggagcccgggcagctcttgccgcttggacagctgccgtgtcctggcccccctcctggggaagcccagcccggtttccactgcctgttcccacatggt

SEQ ID NO: 297713 - DNA, 122 bp, Homo sapiens
agactgagttccataaggcagtgctcaaagcctgtgtggtgaccatgacgacacaggggacgagggagaggggacgtggctgattctgcaggcagacattcggggaggaggaggcggcattg

SEQ ID NO: 297714 - DNA, 122 bp, Homo sapiens
ggtccactgcctggggatggctgtcccctgagctgctgctctgtccccaccacggaggctcgtccagctgcccgggcatgagtcatgggccagccctgggcgctgctgcggattcagaagct

SEQ ID NO: 297715 - DNA, 122 bp, Homo sapiens
gcaggtcaagccaggtgagctggaactcagcctggggctgggaggccgtctgaaaggcctcgatgctgttgcagctcaggtctagcacccgcagctgctggaggctgaagtcggagatgcag

SEQ ID NO: 297716 - DNA, 122 bp, Homo sapiens
ccatttctgcctcctctgaagtgggaccagcaaaggtaggcggccccagaggcggggctgcgtggctcagtgtctgtgactctcaattccctcccctgccccgtgggacccctcagctggcg

SEQ ID NO: 297717 - DNA, 122 bp, Homo sapiens
aaaattaaaaatcaaattctcgcagctttttaaaagaaaggagcgtttccgaggtgtggacggtggctcctgcaaaggaatctgcacaagctcctgcacctggccaacctgcaggctcgttc

SEQ ID NO: 297718 - DNA, 122 bp, Homo sapiens
gtcccataaggaggcaactcagtctctgctagctcacaagcgtggtctcagtgacctactcgaaagctattctgcttgtatcatcagttcagcctcaccttggaaaactcaagcccagtttt

SEQ ID NO: 297719 - DNA, 122 bp, Homo sapiens
tttaaacgctgtcttggtgtttagcaaagtctaagcatcgctgctcatccccagccccaccgccccggccctcccgccccggagtctggaaaccaggacagggtgacagccgggacgctcgc

SEQ ID NO: 297720 - DNA, 122 bp, Homo sapiens
tgttccctcagcaagaggcttcttacctgatcccccacagcctctcctacagctcagcaacggtttatggaatgaaaggcctctcttgaagctttgcaggcacctgcctgcctgaggtgtta

SEQ ID NO: 297721 - DNA, 122 bp, Homo sapiens
agaggttccgcccttcagtaaactgccctgatgcagcttccccctctgccacagatggatcgactttgtgactgcaggggagtcactggccctctctgggtctccttttttctcagttgcaa

SEQ ID NO: 297722 - DNA, 122 bp, Homo sapiens
ctgcaaggagaactgacaggatttgctgaaagattgaatatggggtgagataaagagaggcgctaaggccgattccaagattttggcttaagtaattggaaggttggaagtgctagcacata

SEQ ID NO: 297723 - DNA, 122 bp, Homo sapiens
tggggttgggtagcagagattcaaggatcctgctctacccatggccctgaatgtgaccatcgctgttgagcaatgggccatcccagtgggtctcctggggcctggttggggggcggagttgt

SEQ ID NO: 297724 - DNA, 122 bp, Homo sapiens
cagactggctgcactcagaggccaggatatgggcataggggagattcccttcagagaacacgaggcagaaaagttgcctggttgggtgaaggagggggaggaagagcttgcagagaggtgca

SEQ ID NO: 297725 - DNA, 122 bp, Homo sapiens
ctcccaagctgttctgtccaggatacagcctgcagccaggatcgtccctctcagagtcctcgggccaaagttccagagacccttctcccggctccttgactgcggtcgccaaacccctgggc

SEQ ID NO: 297726 - DNA, 122 bp, Homo sapiens
gagcgggaaagggcgcgggacccgggactgtaaccgccacttccaggccctcgctccccgcgcttggagccctcaagggcactctcagggatcctcgagagccttaaaacagaagtctctgg

SEQ ID NO: 297727 - DNA, 122 bp, Homo sapiens
cctattttcattttggaaaatatttatgaataaatagttttatatgacggctggcagcagcggcctctcctgtaccccctcaggagtcagtgagtaaggtgagggtcctgctggcgggggcg

SEQ ID NO: 297728 - DNA, 122 bp, Homo sapiens
ccaccccgctgctgcccgcttctgcccagccacctgctgctgcctctcccagtgcggcttcgccacccctggccacagctgctgcccacactgccatcgcctccgcctccaccacagcccct

SEQ ID NO: 297729 - DNA, 122 bp, Homo sapiens
cctaggcggaaaagggccccctccctattcactcagcatccacctcgcgcgggcaatacacggcccacaattcccaaacactggtccctgggccgcccagaatcaccagccaaatccgaaat

SEQ ID NO: 297730 - DNA, 122 bp, Homo sapiens
caatggcagcgggagctttgtggctgctgggccgcaccgcacgggagtcaaacctgcggccgcaacgccgccagcagccggaacctgcggcgcgcagcctcagtccgcgcccgcgcgagggg

SEQ ID NO: 297731 - DNA, 122 bp, Homo sapiens
aggggccgcaggctgggcactgccccggggaagggctgctccagccagtccaggtaggtgcggtagcggaagaacgggcctgtggggcggggagggagggccgcggtcagacaggcaggtgg

SEQ ID NO: 297732 - DNA, 122 bp, Homo sapiens
agaaccgtggttagccgtgtgacctcgctgttgtagactgtccttgtcgtctgttggagtcggaggttcttgtactggttcgtgtgagtgagtgagtgagcctctgctaagtggccggttga

SEQ ID NO: 297733 - DNA, 122 bp, Homo sapiens
agaggcgctctggagaggaacgcacaaaagtgtcccgcaagtcgaaatgcgagtcctctccgggggctgggatcgagggctggtttgggggtgggggtggggcggggagggtcggctgttgt

SEQ ID NO: 297734 - DNA, 122 bp, Homo sapiens
ggcatggtgactcacctgtagtccagctactggggggctgaattccttgaacctgggaggcggaggttgcagtgagccaagattatgccactgcactccagcctgggcaacagagtgagact

SEQ ID NO: 297735 - DNA, 122 bp, Homo sapiens
catacactgagtacaggaggaagcagctgatgaggatggtgatgaaagacaggaagaggacgattttaaaactccagcagatgatgaagttatttatgatgttacttgcacccctgtacttt

SEQ ID NO: 297736 - DNA, 122 bp, Homo sapiens
tgccctcggcggcagacccagggccattgccactttttcaaatcgcacgtagaggatgtccgagggcttaagaaatagatttttctctgactgctaccagagacagttggaaatacaagaca

SEQ ID NO: 297737 - DNA, 122 bp, Homo sapiens
tgatcctgtgtcagagttctgtgtgcatgtggggacccgcaatagaagggtaggggtgttcgccaggataaccagctttaggttctcaagcattaagggtaatactggaaaggggtttgggg

SEQ ID NO: 297738 - DNA, 122 bp, Homo sapiens
cagctccaagagctagcaaactcaaatgcagaagcatcctcatggctctgaaacgttctgcgtttgcctttggcaaagaaagtgcatagtacaagactgcgtccccagtcaatttattgtct

SEQ ID NO: 297739 - DNA, 122 bp, Homo sapiens
gcgggtcctgccgcggttcgccccgggccccgggcttgaaagcccttggctacctcgtcgcgggagctgagctactcttacaggttgttttacccagtgcttgcagctttaagttgcgattt

SEQ ID NO: 297740 - DNA, 122 bp, Homo sapiens
tgtctcctggccaggcctggtggctgacacctataatcccagaactttgggaggctgaggcgggcaggttgcaaggtcaggagttcaagacctgcctagccaacatggtgaaaccccatctc

SEQ ID NO: 297741 - DNA, 122 bp, Homo sapiens
gaaaggggggaaataaatgggcggggcctagcaggtcctgtgcggggcttagggccggggcggggcccaggaagactcagcagcgggtgggtgagggtctaaaggcggcaattccgggccgg

SEQ ID NO: 297742 - DNA, 122 bp, Homo sapiens
gagatgttaatattcccactggtgaaaagcagagaccaagactagacaggctcatgaagccgcccggagcctcccggccagtcaccacgcaacaaagaccggggccctggctgccgcaccac

SEQ ID NO: 297743 - DNA, 122 bp, Homo sapiens
cgagggctggaactcagacccagaggggcggtccctgttgcaagtcatctcccgaaagggcggggccggggctcatcccggaaggaccggtgtctaggtcaccctggagcgctcaccccacc

SEQ ID NO: 297744 - DNA, 122 bp, Homo sapiens
ccagccacgcgccacggtagcccacaggttggtggcacagagcggcgtgtgggtccgtggcgcagggtagcggggtgggcagctgctcccaggcgtgtgcatgtagagcagccgcctgtgtg

SEQ ID NO: 297745 - DNA, 122 bp, Homo sapiens
gaggaggattcctgaccaaacttaaccattgatttttacagggaacctgattaggatagccgggagcttgggtaacaacccgccacacggcttgaacaattgtaggattcaatgacccttca

SEQ ID NO: 297746 - DNA, 122 bp, Homo sapiens
acccctttctctccttccctctcaagttacaaccccttttcagagtcactctaatgcctacgtggttcaagtttcagctttcaactatagtcttggaatgaggaaggcttgcctccatctgt

SEQ ID NO: 297747 - DNA, 122 bp, Homo sapiens
tagcggttcctctggaaagtggcctccagctcctggagctgctggctggtaaagtgagtccgctgccgcctttgccgcttcttcttagacgggtcctcggcgcccacgtcctcattcttccc

SEQ ID NO: 297748 - DNA, 122 bp, Homo sapiens
atgggagaaatatcgctgaattctttttctcagcatggaacgtccctgagaaagagaatgcgtacctaggggtaggtctctgaactggcaccccccggggcgtacctgtctcttatggtcga

SEQ ID NO: 297749 - DNA, 122 bp, Homo sapiens
ttgttgattcaccacttccatttatttgctcttccactaccagagtcccttgaatctgaacgactaagcctgattttctttgggggaaaatttgtctaggttttacttcccccctttaagac

SEQ ID NO: 297750 - DNA, 122 bp, Homo sapiens
ctcccggagccgcccggcgccgccgcccccgccgccatttcctcgcgctcgccgtcgcctcgtccccgctgtcaggttactccattcacctgggcctgcagcagcctgcgccgcgcctccgc

SEQ ID NO: 297751 - DNA, 122 bp, Homo sapiens
gaaggaggagggcagcagcaatacccctgaggccttgaaaggatcttgggttccggatcacggttccaggcagtcagggttccagagctgagggggtatccaagcagtcagggttccagagc

SEQ ID NO: 297752 - DNA, 122 bp, Homo sapiens
ttttgcttgtttgttttgttttgttgaaaatagtagggcacagaatggggagaggagagacgggaagcgcgctcctaaatagaaatgctgttctcaatcagcaccgggtccaggtagtagta

SEQ ID NO: 297753 - DNA, 122 bp, Homo sapiens
cgcgttattcacctagtggaggcggcctgatttactggcgacttcacaaacccaactccacgctggagcatttgcatggctctgttctcgcctcgaggagcagccactagcgaacccggtgg

SEQ ID NO: 297754 - DNA, 122 bp, Homo sapiens
tgcccctttgagaatctaatgccgctgctgatctgacaggaggtggagctcaggtggtcacggcagcgatgaagagcggatatgaatacagacgaagcttcactcctctgcccgctgctcac

SEQ ID NO: 297755 - DNA, 122 bp, Homo sapiens
ctcggtaagctgggggcggaggccatgcagctgaccaggtcgctggctgggcctctgaagcggcgcgccactcttactttccgccctgggccgccaaagcaccgcaccagctccttactccg

SEQ ID NO: 297756 - DNA, 122 bp, Homo sapiens
cgagggtcgcccctggctggtttcacgccttcccggggagggccagcccggctgcctggacgagcaccaattctcagcaaatttgtgaggcaaacaaaataatgtgacaatttcgtatcttt

SEQ ID NO: 297757 - DNA, 122 bp, Homo sapiens
gggcggcgtctttgtccattttcaaggcaaacgtcccgccagcaaataaatgcaggttttcgtcggaggagcctggctgctccgcggcatgaacaccgcggctgcggctcccggggcagcga

SEQ ID NO: 297758 - DNA, 122 bp, Homo sapiens
cacacctttctctcccgccctgaccgaccgcggggcctccccgcccagcccctggccgtgcgagtcccttactatgtggggatgagaaggcatttgagaagagtcaccccgagcgccaaagc

SEQ ID NO: 297759 - DNA, 122 bp, Homo sapiens
tgcaagtggaccttatagatctagtccaatcacctgatcttgctttgaggaaagaggcagcgaggtgatgtgcttggccagtcacacctgaatcagaatggaggggtaacccttgaccttct

SEQ ID NO: 297760 - DNA, 122 bp, Homo sapiens
gaagacagatgggcacggggagccccaagaaagctctgcccagaaactccagtgggtacacgggccctgtctgctgcagccccctccctcccacccgctgccccgtccctctccctgcctgc

SEQ ID NO: 297761 - DNA, 122 bp, Homo sapiens
gagactgggatagtaagcctgtctaagaggtgactcctagtggggttgaaagataggtcacgagaactgccttcaaataattgaagggctgtgatattacagataaattaaacttgtcccat

SEQ ID NO: 297762 - DNA, 122 bp, Homo sapiens
accactgtctgcgcccccgcacgcacgcacccacgtactcgcgcacgcgcgcgccggccccgcccaccgccccgctgtggcccctttggaccgcacgagccaccgtccgcacagccccgccc

SEQ ID NO: 297763 - DNA, 122 bp, Homo sapiens
gtttagccctaactttgcactaaagtaaccttggctgtgtaatttagccatctaagaaaacgaggggatagacaccccatatgttctctgagctcccttgaagatgtctgtatgaaagattc

SEQ ID NO: 297764 - DNA, 122 bp, Homo sapiens
aggacaataatgatgagctagccacttttttagaggtggaaaaaaactagttagaatccacgctctctggagacagagttctgcagtaagtggaaccttctgacgatggagcctggagccag

SEQ ID NO: 297765 - DNA, 122 bp, Homo sapiens
ccggctccgccggcctggcgctgcccggcggcccggcctccatggctgcgggcggaacggcgagccccgctagcctcgggccgatgcgaccccgcgctgctcccaccctcggccggggtcgc

SEQ ID NO: 297766 - DNA, 122 bp, Homo sapiens
ctctctggatcccgtttgcggagggcccagcttagaggaagctttataggattgggctgccggtcgggcgcgggaggcctgaagggctccaatcagctgggcgcgggcgcgtcgccgttccg

SEQ ID NO: 297767 - DNA, 122 bp, Homo sapiens
ccatgcccaatgatgaaatctcgaccttgcgtctaaaaaacttagcgcctgttctgcctacgcagaaagacagtagccgatatccattaagttcttcttgcaggccaggcacagtggctcat

SEQ ID NO: 297768 - DNA, 122 bp, Homo sapiens
tgtacatgctgttttgcatcttgctttatacgttggggagtgccagatgtcaccatctttcgttcttcctctggggctggtcaaatccccctgagaaaactcctctggcctcctggcggggg

SEQ ID NO: 297769 - DNA, 122 bp, Homo sapiens
ttccccacatccctgagaacttggactccgattgcatctcttccctgctcagagccctgccgcggcttcccatcagtcgctcactccaccccttcccgggggcccagcctgcctcctggtcc

SEQ ID NO: 297770 - DNA, 122 bp, Homo sapiens
tgggagctgggcccagcccctgcaaggtggggaatcgggccagccgccccgtttccatctcggggccccactcctggaagggaaaataaatcactgtccccttggggggagggagggagccg

SEQ ID NO: 297771 - DNA, 122 bp, Homo sapiens
gtacattgactgcatccaacatcggaagaactgaataggaggttttcttttacctacatccgttgatcaaggtctaaaaacaacttgttgggccgaatttaagcagtcctgacatagaaaat

SEQ ID NO: 297772 - DNA, 122 bp, Homo sapiens
gtgatgggctcgctccattgtgctcgtatttgcatggatgtgatcgcggccttgattggccggcgctgagaccgccccgccccctgcctcgtgccccccgccttggagacgccgctgcgctc

SEQ ID NO: 297773 - DNA, 122 bp, Homo sapiens
ttcctttcctcagctctttcccccgttattaagccatgagagaggcctcagcctaccagacgcccacggagcacatattttaatgcgccttcacagtcttccagaaaaacagatgcaacatc

SEQ ID NO: 297774 - DNA, 122 bp, Homo sapiens
taattattagaaaatgcattttatattatcaacaagatatgctacagaactccatttcaacgaaataaacagattctgatttcatacatgaacgcttcggaaaaatcagccaatcacaaatc

SEQ ID NO: 297775 - DNA, 122 bp, Homo sapiens
ggaacttgaaggcgagcgtggtggtgccatgggccatctcaatctgaacgttcctttctccgtccccacccagggactggaagaattctgtgggctgataagagaaaagaggttgagaaagg

SEQ ID NO: 297776 - DNA, 122 bp, Homo sapiens
ggcggggacccctctgtgggccacgcctgctcatcacgggacccaggcttctgttacgagcgagcagaaccctgtgggcctggcccaggtctcacaacgacccagggaagcaccccctcaac

SEQ ID NO: 297777 - DNA, 122 bp, Homo sapiens
tgagctgctgcccaccgcaggccgggggtgggaacccctggagcccggccgcgcagtagccgcgatcctgccaccagggggcagcaagtggaagggaccctagagccctcacctgggagcgg

SEQ ID NO: 297778 - DNA, 122 bp, Homo sapiens
agagttccacagtgtgagtagtgctggagtagatgctgctggtctgtgttttcctgtcaccgtgataaaccatcgctggcactcagacccgtggtgctcaccgcagcgacctgaaacaaaat

SEQ ID NO: 297779 - DNA, 122 bp, Homo sapiens
ctcacccccggggacgccgagcccagccctgagcttgggttcactagggcaccgggcgagcgggttcacctgggcactggacgagcaggttcaccagtgctctgggcaagtgggttcacccg

SEQ ID NO: 297780 - DNA, 122 bp, Homo sapiens
cgtctctattccaacttcagagttctgccgtccagccctgcgacaatcttccggtgccaacgcggcaggtcagtatgtatcccccacgatgccccccgggccacgggcccctagttaacagg

SEQ ID NO: 297781 - DNA, 122 bp, Homo sapiens
cgccgggaaggcacccgagatgacagcgccgagccccataggcgctagtcccgccctggacgccgaccgccgcctccacagtctcggcttcggttgctggatgagaaccagcgtggcccgtt

SEQ ID NO: 297782 - DNA, 122 bp, Homo sapiens
gcaagaaggggggaatctggagcagaggaggcgctctaggggctctagggggcaacggggcgtctgtaagaccgatatgagaagggcccttagagggatgtccaggaataatggtgaggtgg

SEQ ID NO: 297783 - DNA, 122 bp, Homo sapiens
gcgctccacgtcctgggctggccgacctgctgagggtatctctgagagcaggagccaggccgtcccgggctctcctgcgacagtgcggtgggagagccttagcgggagccaggctgcgccat

SEQ ID NO: 297784 - DNA, 122 bp, Homo sapiens
gggggctgcagtgagagccacaaggctggcacccaaacatgcctgcctgagtcacacctgcgctgagcttaggggacccacagagccagggctggggagaaatatatctccacaagcagagg

SEQ ID NO: 297785 - DNA, 122 bp, Homo sapiens
accagcagtagtatttctaagcccaggcctgcatccagccaatatgtctaattatagcctcggaggagcagggatagacaccactgagaattatccataaagtgccagctcagcttgttaac

SEQ ID NO: 297786 - DNA, 122 bp, Homo sapiens
gaggaaactgttgagaaaacggaactactggggaaagggagggctcactgagaaccatcccggtaacccgatcaccgctggtcaccatgaaccacattgtgcaaaccttctctcctgtcaac

SEQ ID NO: 297787 - DNA, 122 bp, Homo sapiens
tggctgtgggtgactttccgatatttactagcttaggatattaagcaagtgctttaatcacgccaagactcagttttcccatctgtgaactggaggtcataatagtacttgccttgttggat

SEQ ID NO: 297788 - DNA, 122 bp, Homo sapiens
atctacacccgggtggaggggcgccctggagctcggagatccgaccctgcgggagccgcgcgcagcctcgcttgcccttaaatctggccaaagcaaacgccatcgcctctcgcttcttcttc

SEQ ID NO: 297789 - DNA, 122 bp, Homo sapiens
aaaataaaatagaagccagttcacggcacgcctgctccggaaagctgttattccttctctcgcacgcctcttcccctgtctctgcctctctcgctcattcccttggacttgactctctgctt

SEQ ID NO: 297790 - DNA, 122 bp, Homo sapiens
accagcctggccaacatggttgaaatcccttctctaataaaaattcaaaaattagccagacgtggtggtggatgcctgtaataccagctacttgggaggctgaggcaggagaattgcttgaa

SEQ ID NO: 297791 - DNA, 122 bp, Homo sapiens
atagtgggcccgctgcatgtccgcgtcgcggaacgccacccggcaagttatgcaggtgtacgtcgccattgccaggcgagaaataagaaccgaccaagccaaacacctggtgatcagcgccg

SEQ ID NO: 297792 - DNA, 122 bp, Homo sapiens
ttacaagtgtgagccattgcgcccggctggtatcaatatttctaaacaaataaacaagcccggttggtttaggatttttatgatcaagttatctcaaaacatagattcagtggctcccaacc

SEQ ID NO: 297793 - DNA, 122 bp, Homo sapiens
gatctgggtttaaatccagcctggtgttctccagctattcgcacaactgctcctgaagctcggaaaagagggtggtagagccaccttgctggaaggttttaagaataggaataaagaaatgc

SEQ ID NO: 297794 - DNA, 122 bp, Homo sapiens
ttcatttattcacccacccatctactcacccacaaatgcattctttcatgcagtgtgagacgtttgtgagtatagagccatttgtagacagcaggtgcctaatattcattcaatatttattg

SEQ ID NO: 297795 - DNA, 122 bp, Homo sapiens
gctctccggaggcttgccctgacttggggtggggagtgtgacgtagagacactgcgaagccggagcgatcaggttaggtgaggccatgcttaagttggattcgttgaaaatatgattcaatt

SEQ ID NO: 297796 - DNA, 122 bp, Homo sapiens
ccgacccacgcaccctgtgcccccaggtgccagctcttgcattacaggagcccacatgaccgggtctgaaaagaacctaaaagtcactgtctcacagagtatttgataatttttagcatttc

SEQ ID NO: 297797 - DNA, 122 bp, Homo sapiens
gctgggttcctccctccctgtgcggctcgcctcagcaggcacacatttagaaatcattcacgagcccctcaaagtcgcacaaaagaactgcatgggaaagtaggaagagctgtctgcaccaa

SEQ ID NO: 297798 - DNA, 122 bp, Homo sapiens
acctgctgtctaccatggacagcccggcctccacctgaccgtggcccgcccagccactcccgggaccacggcaaaaggaaccacccagacccaccacccgtacaccctcagcagaccctgaa

SEQ ID NO: 297799 - DNA, 122 bp, Homo sapiens
ttgatgagcgcatgatgcatggtgtagtgccgatggaagtggggtcagaaggcctcctgccgctgcggcagaattcccgtgtggccttctcccaccagggcctcagtttcccctcgcagttc

SEQ ID NO: 297800 - DNA, 122 bp, Homo sapiens
ccgtggaatcgggttggatgcgcatgtgcgtgtctctttttccgggggaggctccgcccacggccccgccccgctcccaagtgcgcgcggacccctagctccctctgagttgcgctgggctt

SEQ ID NO: 297801 - DNA, 122 bp, Homo sapiens
tagatgctcttgtttccacaagcactcataaacagagccacaatattttcagaaagaatacgctttgcatggagtgcaaaagtctaaatctaactagtttatacactattaactaaattaca

SEQ ID NO: 297802 - DNA, 122 bp, Homo sapiens
atacacttccctcagggacctctctgctgccaagccacaaggccatgtcaggacaggaggcgtactgggctctctcagcctcccttcagcaaggcttatggctatcatgtctaaccctgcat

SEQ ID NO: 297803 - DNA, 122 bp, Homo sapiens
cagccgccgcgtcccctttaaatgcccgggagccggagccggagccggagccgcggccggcgctgcggctgctgcagcagcggagcccaccgcagtccccaacgtcacaagcgactgtccaa

SEQ ID NO: 297804 - DNA, 122 bp, Homo sapiens
atggaaagtagggaggaaatgagagggggtgcggggtagcggtcagagaagaggaggctacgcacagcacggaaagggaaggcagcagccacatggacctgggcccacggctgggccctgaa

SEQ ID NO: 297805 - DNA, 122 bp, Homo sapiens
gcggggcgagggcggagggcggagggcgcattgcctcatcctgtacattttactggaaatcggacgcatccggaggaggggctgggaggcggcccgggcaccgccaatggccgggccgggcg

SEQ ID NO: 297806 - DNA, 122 bp, Homo sapiens
tcggcgggcttctaagttcaggctctcagagtctccaccaaatggctggaaacgaacaaacgcaaagatctcgaaagtgttccaaaaagaggcaggtcctgcccgagatgccagtggcgtga

SEQ ID NO: 297807 - DNA, 122 bp, Homo sapiens
taattaacgataagtctccacgatgtcctcctctcagtaagtttgacacacagacctcagcgaagctgtatgtactgcctaaaagtaggaaagatctccacgttgatttctgaattgtaaaa

SEQ ID NO: 297808 - DNA, 122 bp, Homo sapiens
cccctggaggcccccttcctgccttggccagaggggcggggcgtaggctgggggcggggccggagagtgggcggggcctggcgcgtgggcggggctccgggcgggccggccgccgagggtgg

SEQ ID NO: 297809 - DNA, 122 bp, Homo sapiens
tatcttctgtgtccgtgattctaattacatttcagggggttgtgatctctcccagaatcccgttcatgcattgtgtttaggatgaaatgcttgagggggtttggggctgtacactcatgggc

SEQ ID NO: 297810 - DNA, 122 bp, Homo sapiens
tcccgggctgttcatctccgtccctgcccgggaagggcagggggcagggctggaggggcccggctacagaactacttcccctggaattccccacccggtggattagacacccgtgggtccgg

SEQ ID NO: 297811 - DNA, 122 bp, Homo sapiens
aatggcaaaatgggaattacactaattacatacaagaacatgctttaaaatcatctttcccgatctctgcctccctccctccctgcatttttcatgctacactatatgacagatgctcccaa

SEQ ID NO: 297812 - DNA, 122 bp, Homo sapiens
cgggacccccgctccgcagctggggaccctgtgaagttggccctgggaggtgagtgcgatcgggggcgccgcacaggtgctgggattccccaggtcgcccatttcccctatggccaaactga

SEQ ID NO: 297813 - DNA, 122 bp, Homo sapiens
ggggaggacgcccgaatctgtcagcaaagcatccctacctgcaggaggcctggagctcagcgcagccccccacgcctgcccgggtccccgaaacgcggctgctccagcgccgggggcgcaca

SEQ ID NO: 297814 - DNA, 122 bp, Homo sapiens
cacctcgcctgtccacggagcagcagggggtttgactgtgcttttccctcttgcttccctcgctctttctgcagctgccacgaaaacccggaacggcggagcggcgccgcccctcgcggcac

SEQ ID NO: 297815 - DNA, 122 bp, Homo sapiens
gcatatgtatacgcaggcacacgcaccgtctacacttccacggaacagactaattaacagcggctctggcagatgtgtcagagatgagcagagacaggagctgggcttatgagttatgactc

SEQ ID NO: 297816 - DNA, 122 bp, Homo sapiens
gcgcctctctgtgcctgcgaagagggttccggtggtgccctggcggccatcgctggaggccgcggttgctatgggagacctggcgcccggcctgggagcgacaggaaggcgagctgtggccg

SEQ ID NO: 297817 - DNA, 122 bp, Homo sapiens
acctcccattctcagggttccatcccaaccgctccaacatcatgtcgcaaaacatcatgtcgtcacatctgggctcagcctataccttactggatggtcctactagcatttcctacagtggg

SEQ ID NO: 297818 - DNA, 122 bp, Homo sapiens
gggtaaataccagtcttttttagacccttatttctgaaaatgtaccacaggtatgatgcccgttaattcagaaggtagctgtggcacatgcagaagatgtttctgaaataagatcaaatgtg

SEQ ID NO: 297819 - DNA, 122 bp, Homo sapiens
caaaaccatcgcttggaggtgtcggggatcgaacccgaggcctcatacatgcaaagcatgcgctctaccactgagctacaccccctcactataaggtctctttgtaataattttcaggaggt

SEQ ID NO: 297820 - DNA, 122 bp, Homo sapiens
gcgagtcgcccagccgcctgttgtgcctttgcctgaggtcggtgcagtctgcgccctccccgcggcttcctgtctgtgccaagctccccgctgcgcctccgcgggtctctctgcgggtcagt

SEQ ID NO: 297821 - DNA, 122 bp, Homo sapiens
tggaactgcggcggcccatggggccccgggcgggaggacaggttcttctgcccacagtgccgagcgctgcaggcacctgaccccactcgagactacttcagccttatggactggtacgagcg

SEQ ID NO: 297822 - DNA, 122 bp, Homo sapiens
cttaacaatgtaaacactgaatattggtttatccaccccaaatacattataactatattgcggggagtttcctgggggacagcgagagggtggaggctgtaaacagtctaaatcttcaactt

SEQ ID NO: 297823 - DNA, 122 bp, Homo sapiens
cctacaattgaagacaccatgccgcttgctaatttacattgcaaatgtaggcctggcagccggaaccagccacgtgaatggcttgagcactttgcaactcctggagaagcccgatctctttt

SEQ ID NO: 297824 - DNA, 122 bp, Homo sapiens
gcccctggatcccgagcggcgcctgccgcgtgtagccttctgaagtccggtggatcgaggcgaggaacggtgaacgtcctctcgtttcagctggcttttcccgagctggccccctggggagt

SEQ ID NO: 297825 - DNA, 122 bp, Homo sapiens
agcggtctctctccgcctgcacgagcgatgggccctgagccactgcggtgcgcccaccctcgacaagttgagggctaggaagccaggaaagtgtctttttgcatcttggccacggtgggggt

SEQ ID NO: 297826 - DNA, 122 bp, Homo sapiens
gctaagatcaagtagcaaagggctggttccctctggaggcttcaggagaaaatccatttccgtgtctttcccagcttcccggccgaccccgatccggggctgtggccccttctcatccttcg

SEQ ID NO: 297827 - DNA, 122 bp, Homo sapiens
atagtttcctcatttccaagctggtgttagtacctgccttggtgcaaccccagaattggtcgcaattaatatgacggtgagacgtgctctgtagaacattaaatacatgcataatactaccc

SEQ ID NO: 297828 - DNA, 122 bp, Homo sapiens
ggaccccgaagcggttgaggggatccaggcctcacaacgtcttgagagtggccccagcgtcgttcctagtctcttcggcagaccccagcgtcgtccttcttttcctgagaatatcctgacac

SEQ ID NO: 297829 - DNA, 122 bp, Homo sapiens
ccggaaactggccacaggggcatgcagtttgcagagaatccagctgaaggcagctccctccgccagctccctcggaaggaacgtgctgccgacccctgctggtgaaccgggctccaccgaga

SEQ ID NO: 297830 - DNA, 122 bp, Homo sapiens
agaggaaatgttaatgcccgaatgtcaccagctcatcgccgacaaaggcctgaacacaaacgtctccaggcaacagccccgaggtgaggtcagctctgtccatgtcccccccgcacggcttc

SEQ ID NO: 297831 - DNA, 122 bp, Homo sapiens
aggagccgacctaaaagtaacaatagataaggtttcctgctccagtgtatctcaaaagaccgggcgccaggggcgggggacctagggcgacgtcttcagagtccgccagtgttggcggtgtc

SEQ ID NO: 297832 - DNA, 122 bp, Homo sapiens
gcaggcggctggtggtggtgctgtgctgccgcgaggctgttggatggggactgatacctccgggaccccgcactcctccctggcctggtgtgcagcggtcggtagcagggcccagccagtgg

SEQ ID NO: 297833 - DNA, 122 bp, Homo sapiens
agggtcacagcgaatgcgcacctcgctcctccttacgctctagccctccccgtcgcgtggcgtctcagggccacctctgccctggctctccctggcaccagggaatcggggtgtgtcagggc

SEQ ID NO: 297834 - DNA, 122 bp, Homo sapiens
catatgccagaagcaatctcgcacttacagaatcgatcagcgtgtaggggctctccacgtcgctatcagaggaggtgtactgaggcagctccaacctcaccgtgtagtttgttcccttctca

SEQ ID NO: 297835 - DNA, 122 bp, Homo sapiens
cgtggatatgcagctgaagaaggaaaagaaatgtgtgaaactcataggagttcccgctgacgctgaggccttaagtgaaagaagtggaaacacccctaactctcccaggtcagtgtcctctt

SEQ ID NO: 297836 - DNA, 122 bp, Homo sapiens
gcctggatcatcacaggggggtcccacaccggcgtcatgaagcaggtaggcgaggcggtgcgggacttcagcctgagcagcagctacaaggaaggcgagctcatcaccatcggagtcgccac

SEQ ID NO: 297837 - DNA, 122 bp, Homo sapiens
aaaactttctagaaggacaagctctcaacagaggctgcacaggattgccacagataaaaccgtgatgaaaatagacttatatgacaattatacaaaatgcatgaggaaacaatctaccgtga

SEQ ID NO: 297838 - DNA, 122 bp, Homo sapiens
agaagcgatctgagtggctggcgcccactggggctaaaggttaaaggctgccctgcgctacggggcgggatcagcggggccaacaggctgacgggcttccccgctgtccaatcagaatgcgc

SEQ ID NO: 297839 - DNA, 122 bp, Homo sapiens
ctcacctcccagggcttccccaccccgtccgcgtcatcctcaatacaaggtctcgtcctgcgctggggctgcaggctccagacaggcctgcaggtgcctgtggaaagcccccgcggccgggg

SEQ ID NO: 297840 - DNA, 122 bp, Homo sapiens
ttctgctctattttaagtttctgctaacttgtccccgaccccacaactgctcacgaccttcgtgaaggtcaacctttcctaccgcgtggagtgagttgggatgcatactggggagttgtata

SEQ ID NO: 297841 - DNA, 122 bp, Homo sapiens
gagcagcacgggacattccagaccctctcaccaccccacccccgccccttgctcctgtcacgaggcccaatcccccagagccctttcatgtgatgctcagctgagacccctctgcctatctc

SEQ ID NO: 297842 - DNA, 122 bp, Homo sapiens
tagagggtaggtacgggtctccagatatactgcctaccacgctttgctcacccctccaaccggcctcggtgttccaggagccagcacagcaggtggtccagcctttcctggacctcctcgtc

SEQ ID NO: 297843 - DNA, 122 bp, Homo sapiens
gggaccgatcgcgccgggggccgaagaggaacgccgccccgcgccctctcgctccccgcacgctccggctgccggccccacgctgctcgcccacagatcgcactgggttccgcttggagcgg

SEQ ID NO: 297844 - DNA, 122 bp, Homo sapiens
ttcgccaggcagcagcagcctctcctgcgagttttaggcatgtatgcagctcagtttgatcgagcgttccttttctgccttttcactcttacaaaagattaaaaggtggcgtcacattgctc

SEQ ID NO: 297845 - DNA, 122 bp, Homo sapiens
aatgagcactgtattagtgcttgatattcaagattaatgaatgagccctgtccctgccctcgaggaacagggacaaacaggaagctcccaaacactgcctggtgtgaaaggctctgtgatgg

SEQ ID NO: 297846 - DNA, 122 bp, Homo sapiens
ccaaatgtttcagcatcatggacaactctagggggcttgggtttccaccccagagacttgcgcagggcagactctaccaaggtgtgggttggagttgggagtcggggtgaggttccccgctg

SEQ ID NO: 297847 - DNA, 122 bp, Homo sapiens
aggccccgccccaggttcccggccgtttggctagtttgtttgtcttaattttaatttctccgaggccagccagagcaggtttgttggcagcagtacccctccagcagtcacgcgaccagcca

SEQ ID NO: 297848 - DNA, 122 bp, Homo sapiens
cctgaccactcccaccaccatgaaggtagaaggaattccggcctggatccaccacagccacgtgaaacccacagcacctgagacctgggaggtgagaccaagcccggacaatccctacaaag

SEQ ID NO: 297849 - DNA, 122 bp, Homo sapiens
caagcctgcccagagtgggcaccccggactgggccttctcgtgggactggcatttccaaccgggagcgcggtgctggggccgggatacccggggtggccgcaccgtcctgctggctccttgg

SEQ ID NO: 297850 - DNA, 122 bp, Homo sapiens
cctccaccttgcattcgccactgacgcaaatgtccaccgtgtctggacggcagggtgtcccgtccaccacggctgccgccctctccgtgtagaagttgaagccttccgctaggcacgtgagc

SEQ ID NO: 297851 - DNA, 122 bp, Homo sapiens
gtggccggtgggggcggggcgggagcgcggtcacccgcacgtctcccagggcgcgggccccggaggactctggcgttccgttgcaggcccttacacatctgcaccccactgcgccccgctgg

SEQ ID NO: 297852 - DNA, 122 bp, Homo sapiens
gaggaagggcggaaggcgctgaggtgtagctggcagtggcctgtccatcgtggtaggcaccggggcagcagcgcagcgggagatggcggcaggcttcagagcccaccacctgggctggatgc

SEQ ID NO: 297853 - DNA, 122 bp, Homo sapiens
gttgtggcacccacaggaggctgcaaaataaacactcttctgtgtttaggggtcactgatcgctatcctgctaaggatttgtaagttgaactttctttaaccttgaaatccatggaacaaat

SEQ ID NO: 297854 - DNA, 122 bp, Homo sapiens
tctcagggcacctgccacttccccaaggggccacctccatggctgcagccgcgtcacctccgtcccatcatctcgctggttaaacgtggaaaaacggggtcttgagctctccacggtctccc

SEQ ID NO: 297855 - DNA, 122 bp, Homo sapiens
aatggtcacaaaatcagcagggtcggcctgaggaacctggctccatccctggggtctgcacgctaagaaggctctcccggatgtctgcgctgggtcccgcggcagcatgtctatgtctctgg

SEQ ID NO: 297856 - DNA, 122 bp, Homo sapiens
cacaggagtggggacgggcgcgagacttgggctcctcctggccccaggtgtccctgcccccgattgttccctgtgccctgtaccgcggggcccaccacaatgacgtcgctccagctgacgac

SEQ ID NO: 297857 - DNA, 122 bp, Homo sapiens
taataggaagactgcaggtgtggccgtcaggcccaagtcctaggtgagaatgcaggtctgcgagcccctaggaccggaccataacgaccttaacagccataacggccgtaactgccataacg

SEQ ID NO: 297858 - DNA, 122 bp, Homo sapiens
gagctcacccccaggaactacacttgctggggccttcgtgtcacaatgacgtgagcactgcgtgttgattacccactttttttttttttttgaggtggagtctcgctctcttgcccagtctg

SEQ ID NO: 297859 - DNA, 122 bp, Homo sapiens
atctagacttaccacactagtggcggtaccttcccctaacatctcggttgatgagaatgacgatggagagtgtgtgaggaggagggacatggttcctctctcttctccatcctgtccctgag

SEQ ID NO: 297860 - DNA, 122 bp, Homo sapiens
acctcaagctgaatataagtagccgcagacaccgtttgcatgacccaggaaccacaaacacggagcgaaggcctgccgggaccacgctgagcttcactactggcagccaactcacttccggg

SEQ ID NO: 297861 - DNA, 122 bp, Homo sapiens
tgttgcaggcacacacctgcagccataactgtgcaaacacaggccaggcgcggtagctcacgtccagtaatcccagcactttgggaggctgaggggggcggatcacctgaggtcaggagttc

SEQ ID NO: 297862 - DNA, 122 bp, Homo sapiens
aagtgttagttaaagcagcagcctagattcagaattaagaaaacatgatttttatttttccgtttcatggaagcagcagctgtctactgatagttcctgccgccggccaccaggtggcagaa

SEQ ID NO: 297863 - DNA, 122 bp, Homo sapiens
gcaagatccgccggctgtcggcctgcaagcagcagtgaggctggccgcctgcaggtggggcgcggcggggcccgggtggggcatgtggggacaacgcctggatgccacagccagccgtgagc

SEQ ID NO: 297864 - DNA, 122 bp, Homo sapiens
gggagagacagaacctgcctctaccggtcttccaaggcactgagagcccatcgccgcggacgccgctgtaaattccctgcgggccctgtgcaccaccctgtgcgggtccccctctcccaggc

SEQ ID NO: 297865 - DNA, 122 bp, Homo sapiens
gccccatcctgcgccccagatgcgcgccccgcttggaccagtccgagcagaggggggttccgaaatctgctcggacgcagcatcgctggccgcctgccccgctagttccccgagtgcgatta

SEQ ID NO: 297866 - DNA, 122 bp, Homo sapiens
gagaaggagcgatggggtggacgtccttcaaggccggggaacacgcggggctttccaggccgcgggggacggtggcgggtgtcggggcgcggtggcaacgctggagttcccgggtccaccgg

SEQ ID NO: 297867 - DNA, 122 bp, Homo sapiens
ctcttatgcttcataatgagcccgatggagtagcagacatctctgtgcttctcatcggagcgcagcttcacctctacgcccacctcctcctttttgcgctcaatgtgctctagagtgtgctg

SEQ ID NO: 297868 - DNA, 122 bp, Homo sapiens
aaaagaagacaaaacattgtaaatttcataaacctcagagtggctttttatgctttatgtcgatttttagaatttcctagtccagtctttcatgaatcgaagaatatttcaggaatcataat

SEQ ID NO: 297869 - DNA, 122 bp, Homo sapiens
tctggtgctgcggccagtgcgggtcataaaccctgagcccctgcttaatccgccagctcccgagtcagcgccagccagacacgtgacactgcagccccacagacctgtttggcaggagcagc

SEQ ID NO: 297870 - DNA, 122 bp, Homo sapiens
acggcccggcccaggttgcatttgatctgggccagctgcaagtcggactcggcgtctagccgctccgcgtagggcagcagcttgttgtagacgatctccttctgcgggacgaagccccgcgg

SEQ ID NO: 297871 - DNA, 122 bp, Homo sapiens
ccaagggttagaatttcaacgtaggaattttgagaggacacaaacacccaggctatgacacggtctttagaaaatcccagaatgagttgtcaggttcttgggagatctgtaactgtgggaaa

SEQ ID NO: 297872 - DNA, 122 bp, Homo sapiens
ccactcaggcactgccgcggacagcctgggggtggggcttgaggcgcgcggggcgggactcgccactccagcctgcagcgtcaggttttgtctctgggaacatcagactttttacctaaaat

SEQ ID NO: 297873 - DNA, 122 bp, Homo sapiens
gtggccagctccacccagaaattccaggacctgggcgtgaagaactcagaaccctcggcccgccatgtggactccctaagccaacgctcccccaaggcgtccctgcggagggtggagctctc

SEQ ID NO: 297874 - DNA, 122 bp, Homo sapiens
agtcttgctctgctattgttaggaagaagcaagtgtattaggggtaaagctgactgagcccgcccagcatgcatctgtggagctctggaagaagctgtagcacaaagcccctctgttagagc

SEQ ID NO: 297875 - DNA, 122 bp, Homo sapiens
ttgcctggtatgttccatctcactctcagcctgtaaacccaaacccactcaatgcttttccgaacaccgattgtctcttttgtggtacctgggccctgcctagtgactgctgtttccttctc

SEQ ID NO: 297876 - DNA, 122 bp, Homo sapiens
ttcaacctgttccttacaagactacattgagcgtgctggtgttaaatgcgtgcaggcttccgtgcaggagccctctgcacatggcagagagaatgtggcccgtgctgcactctgacgcgcag

SEQ ID NO: 297877 - DNA, 122 bp, Homo sapiens
cagtagaagcatcccttgcaggggctgttgggttgcatcctaagctgtgctggagcttcccgatgtactctgtagatgtctttgcaccttctgtcctcattgccatccccaatcagtccctg

SEQ ID NO: 297878 - DNA, 122 bp, Homo sapiens
caggcagagccaagcaaatggaagccagtccacttagaggggccttgatgactgtcaggccgtgatgggttcataaggatgtggccagccaagccatatggttcacagagcaggacactctc

SEQ ID NO: 297879 - DNA, 122 bp, Homo sapiens
ccaggcgtgagccacggcacccggccgagagcattttttaaaagggtgaagtgccacagccggcagttctcatcagccagagcgcagaatgagagtactgaacatggggaaggggcttggtg

SEQ ID NO: 297880 - DNA, 122 bp, Homo sapiens
tattctccatcagctctcttttaactgccacttttacttggtctctttttttctcaactccggttatctgctgcttattccccccaactattcttaaggaccccttttcccgtacccattca

SEQ ID NO: 297881 - DNA, 122 bp, Homo sapiens
gggggtcccgtcatcccccagtcactgcaatccctgccctgtccctcgtgcgcacagacgcgccctcacacacctccagggaggccaggcagtgccaggattcttagaatccacgccagcag

SEQ ID NO: 297882 - DNA, 122 bp, Homo sapiens
tgtgttgtggctgctcagagtaattacttctctgagaatttattctgtggtgtcacaaagcggtgtggaaaagtttgttaatacttaccacggttcaatcactggaactggttccagtgcgc

SEQ ID NO: 297883 - DNA, 122 bp, Homo sapiens
agagctgggacggaggcgccgacggcttctcggagggaacagggacatttgtcggggtcccgggatatttttaacctgagtatggcccaacctaaaggctggagttggtgcagtcggggagg

SEQ ID NO: 297884 - DNA, 122 bp, Homo sapiens
aattcctggcatgtggggagcgcttggtaaacacttgtaaaatgaatgaatggatggaatcgggtataagagaaacaaccagaaagctgtagcgggggctttagctcactgcatccccattc

SEQ ID NO: 297885 - DNA, 122 bp, Homo sapiens
tgctgctgcgggcagcgtccagggtgtcgtagaaggcccgcaccacctcctggaactccccggtgttctctgccagacgctccaggttgttccagggccccttcagcgtctgccccgccact

SEQ ID NO: 297886 - DNA, 122 bp, Homo sapiens
gtggtgtcttcttttaaagacgtctcacttcgcaattggaatcgaagcgtgggccggtgtcgggtcttcctggtgttacaggcaggaggagggaaaactgagtccttcctgggatggggcag

SEQ ID NO: 297887 - DNA, 122 bp, Homo sapiens
acagcatattctcgaacgtactggtctggatagttgaaatccagaagctctagggcctcccgggggggcagtttaggccaaatctgaagcagcgcctgaagctgtttaaaaaatgaaactgg

SEQ ID NO: 297888 - DNA, 122 bp, Homo sapiens
gtgctgaggtagaggggcagagtcccaggccaaagttagaacctgcggatgggggcggagcgatctgggtgacacacccaccccgcccggctggggcggcgcggaactatgacgtagtagct

SEQ ID NO: 297889 - DNA, 122 bp, Homo sapiens
acaatttttgagatcttgttgtctatgtcattccctgtgaattttgtttgttatgacagccgtattgaaatccatcttcagggccaggcgcggtagctcacgcctgttatcccagcaccttg

SEQ ID NO: 297890 - DNA, 122 bp, Homo sapiens
gtggctgaacgagggcgctgaggaggtgtaagccctggtggcactgggtagagagggcctcgctctgggggtcccgcgccggggcgcatgagccctggcacggggccctctgctcatcgccc

SEQ ID NO: 297891 - DNA, 122 bp, Homo sapiens
gtgtgtctctagaagagaaaagcatctatctggagatataaatgtgtatgtaaatataaacgtttgtggcaagaggacagttctgtgacatctgttgaacatatgtggttgtatatattgga

SEQ ID NO: 297892 - DNA, 122 bp, Homo sapiens
gctcagagtgtcccatagacactgattttggccacggagatgctctctgtgtagtggttccggcctttctcatacaggacgtagagctggggggcctgctcctctccatccatgctgccctc

SEQ ID NO: 297893 - DNA, 122 bp, Homo sapiens
gtcggctcagccgggcagtttgaggagctgctgcgcctcaaagccaagtaagcggggcggcgagcggtaggagtgaggagccggagcgggagcggccgcgagaccgggccggtgtggggcgg

SEQ ID NO: 297894 - DNA, 122 bp, Homo sapiens
gcctctctctctgagtggctgccacctgatgggctcccaaggaatcaggaggagccccagcgaggcccagctagagccacaggccgcagaggctcaggaacttccccgttcccactggaatt

SEQ ID NO: 297895 - DNA, 122 bp, Homo sapiens
cagacagcagactcaagaaggaagaggctttttattcggccgggagcgtcggcagattctcgtcttaagagcccagctcccctaaggaagacagaattcctggcccgtttaagggcttacaa

SEQ ID NO: 297896 - DNA, 122 bp, Homo sapiens
acggggcggtcccccgctcccccaagacctcggcagggtctcccgccagggtctccccggcgccccggccctcggggtcccagccgctcagcaggaagctgcctgacgctgaggactgggct

SEQ ID NO: 297897 - DNA, 122 bp, Homo sapiens
cacctgtaatcccagtactttgggtggccgagctgggtggatcacctgaggtcagaagttcgagaccagcctggccaacatggtgaaacccccatgtctgttaaaaaaaaaatacatatata

SEQ ID NO: 297898 - DNA, 122 bp, Homo sapiens
cagcccttcacggcaaagtgggcggcgagtagctctccaggggtggcatagggaccaacccgcccgttcttctgggagcagctgggaccaattcaagttgcgaagtgtgttgactttctcct

SEQ ID NO: 297899 - DNA, 122 bp, Homo sapiens
tgctcctgatctgaatgcttttcttgggctaagtgatttgttctgtgacgttctgggctacgtcgtgtaataagtattgccagatggcaatcacaagcatcatttccatttcatatttgtgt

SEQ ID NO: 297900 - DNA, 122 bp, Homo sapiens
cctgctgccatcatgtcttggtttgttgatcttgctggaaaggcagaagatcttttaaaccgagttgatcaaggggctgcaacagctctcagtaggaaagacaatgccagcaacatatatag

SEQ ID NO: 297901 - DNA, 122 bp, Homo sapiens
ccagggggcccgcgaggccagtgcgcgggcaggagcggggacgtgctcagaagagccgggcgccgccgcgcccgcccgccccccgtcccccggctcccggctccgcgcgccccccgccgccc

SEQ ID NO: 297902 - DNA, 122 bp, Homo sapiens
ttcctgctgttcccaccacctgatgccctatagctcgaaaaaccactgaagtctagtgtgcgactttgaaagattgtaatatatgctctggaaaacattcagcagtacgaaagccctccctg

SEQ ID NO: 297903 - DNA, 122 bp, Homo sapiens
aaaagaggtgccaagatccaaaggagaaacacaagggggctgcagaggtaaacctggggacgagggcctgtccccccactcacccgtgatgcccacggtggacactgggcccacgcgctgcc

SEQ ID NO: 297904 - DNA, 122 bp, Homo sapiens
ggggttcaggcccgcacctggcacacagtgggtgcttcagaacaggtgaccctttccttccgtttgtgcttacacattgacataaatagtttaatactggacacacaggattctagacactc

SEQ ID NO: 297905 - DNA, 122 bp, Homo sapiens
ccgctcaggggagggaacacgaaaggaaactctccaggaagccagcgcgctcgacctgagcgcaggccccgcggctgcgggctaagtgcaagggtcctcagcctgcgcgcgcacctgtcctg

SEQ ID NO: 297906 - DNA, 122 bp, Homo sapiens
cagggtgggtatggagcactggagtcttctgtataactacagttctggctctggattttccgagatcgcgactgtggccgaggcaggggcaccagcaaccagtggcgctcagtgaagggcag

SEQ ID NO: 297907 - DNA, 122 bp, Homo sapiens
acccaacaacccactcaggcacttccggtaagaaatctagtgcccttggctcggaacctgcgtcgtagtgcgcaagcgccccgggcctggagacggccgcggatgccgagggagggggcgtg

SEQ ID NO: 297908 - DNA, 122 bp, Homo sapiens
ttgtgatcactgggacatcaggatgaaggggtcactccaatcccttggagatcagattctcggggactccatggccagacccgaacggcgcccttcacatggtgggtggagagggtactcct

SEQ ID NO: 297909 - DNA, 122 bp, Homo sapiens
agatatgacgcttttggtgtccctaccccctagcaaaaaaagggagctggggaaaaggaacgattgatggttatgaaacatgaaagttaactgggcgctccgccttgacgggaggcttgggg

SEQ ID NO: 297910 - DNA, 122 bp, Homo sapiens
actgcaccccaccacatcccattgtatttcatttgttttacatgctgatctccactctcccgactgattcatatgcatgaaggggccactagtgatttgacccattagggataccagctctc

SEQ ID NO: 297911 - DNA, 122 bp, Homo sapiens
agttatatgatacactgtttaaattccaaaaaggtgcttgcaccatctgtaaaactgcatcgatgtgggttgaaatgaaaaaaaaaaaaaaaaaaaaaaaccatggaaaaccaacagttcac

SEQ ID NO: 297912 - DNA, 122 bp, Homo sapiens
gcccggccgtaccaagtcccagtcgcaggggccgggggcgcaggaggagccgggccgaagcgcacgcgcagtgggcgcgccttgcgctctgcagctcccgccgccggaagttgccgagaccc

SEQ ID NO: 297913 - DNA, 122 bp, Homo sapiens
taactcctccttcgtcccttcccaatacaaagacacacaaactgggggggacacggaggtcggtgccctcgaggcttaagtcgccatttgctgacctcaacggctggcccggcatgcggccc

SEQ ID NO: 297914 - DNA, 122 bp, Homo sapiens
tcccgactcacgctttcccagggctcttcaatcccggccagccggcagggcctgggagcgcggtccagcgcccagcccagattcgcccagttgggcaaggctggccaccccgcagcccgagt

SEQ ID NO: 297915 - DNA, 122 bp, Homo sapiens
gtcgggggcagagtgctggagagctgggcagagaggaacaaaatgtctgacagcaggagccggagcccagggaggaaaccagatggaaagggctctgctcagactgactcaatgtgggcaca

SEQ ID NO: 297916 - DNA, 122 bp, Homo sapiens
atactttcacggagaaggggcgaggatgcgggtgagatgaataacaaaagcacagatttgcggtcggccggttagctcagttggttagagcgtgctgctactaatgccagggtcgaggtttc

SEQ ID NO: 297917 - DNA, 122 bp, Homo sapiens
gcactcctgactcctcccagacccagctggaaaggaaggaccctaagacctcagtcccaccgagagactttaatccattcctgggatgtgggagagggaccacccgccccccgtcctctcgg

SEQ ID NO: 297918 - DNA, 122 bp, Homo sapiens
gttgtcatccgcggcgcggcggcggctctggggtttcagcgagagtcttctaatccgaggcgctgcgggacgggtgagcttccctccaggccggtcctgtcctcgagatctcgccagacccg

SEQ ID NO: 297919 - DNA, 122 bp, Homo sapiens
agttaagaaagggactcaggcactctgacagctctgggatcacctgcgagagcaggcagacgaccccgctggcctactgttgagcagctttgagtaggagctagcagctcacaggggcagtg

SEQ ID NO: 297920 - DNA, 122 bp, Homo sapiens
cagcgcatctggaattgttggttcctcctatccagacttgttcatccctcccggtgggttcgtggtttcgctggcttcaggaatgaagctgcagaccgtcgcggtaagtgttacagctcata

SEQ ID NO: 297921 - DNA, 122 bp, Homo sapiens
ctgctctcccggcttggatcccctttcagcccattcatccgggcctgggccgggggtgggcgggcagacaatcagacactgttttatcccaggcatcggctccagcctcccgcttggcgccc

SEQ ID NO: 297922 - DNA, 122 bp, Homo sapiens
acagaagccgggcccacccgccccagcgcggccacgtgcccgccgggccctctagggacgcgccccgccgccccgcatcgccacagtcacctccggctcgggctcaggctccagttcgggct

SEQ ID NO: 297923 - DNA, 122 bp, Homo sapiens
ggagctgggtcagcttggagatgtctcttatgctccttatgcctccgctttcccaactctcggtagaggacctagtgggctcgtgggatgcggcgctggaagagactttggggagtgggtcc

SEQ ID NO: 297924 - DNA, 122 bp, Homo sapiens
actaagctttaagaagtactcttagctgggcatgtgtgcatgtagtcccagctaacagggcggctgaggcaggaggattgtgtgagaccagtttaaggctgcagtaagttatgatcacacca

SEQ ID NO: 297925 - DNA, 122 bp, Homo sapiens
cgcaaaccgggaacagcggctgagcctgcgcttcggaagcatggatgtgcgcctgcgctgcgctagggcgcggcgggcggtttgaattttgcttacagagtcccgtctcaccatcctgggct

SEQ ID NO: 297926 - DNA, 122 bp, Homo sapiens
tctttttttttttctggagatagggtctcactctgtcatccaggctggattgtggcaatgcgatcaagctcactgcagtctcaacctcccaggctcatgcgattctcctacatcggtctccc

SEQ ID NO: 297927 - DNA, 122 bp, Homo sapiens
aatttctgctggccctcggtagtcctctgcccacgtcggtgatccggtctcgcttctccgcgggagctgaacggatccaaatgtttcccagtgggctagcagcttcttagagggactgggag

SEQ ID NO: 297928 - DNA, 122 bp, Homo sapiens
gcgccccgatcgcgcccaacccccggcggggggctcccactcacttgtctttctcggtgccgaagatggaggccagatactccgccatttcccacccgccgccgccgctgccgtcgacactg

SEQ ID NO: 297929 - DNA, 122 bp, Homo sapiens
tccagacgccccgcgtacttcccctacttcttcttcttgagatagccccgcccatctacccgaagccggagccaattggctccctctggaaaaatctgtgggcagggtaaaggtgagcgggc

SEQ ID NO: 297930 - DNA, 122 bp, Homo sapiens
tttttgtcctataaagagacacatggttaatatttttggctttgtgagttgtatagttttcgttgtagctgttcagctctgctacatgaaagcaaccatagaccataccttaacaagtggtc

SEQ ID NO: 297931 - DNA, 122 bp, Homo sapiens
acgctgcgtctgcacccaggagacgcccctcccgcccctctccccgacggccgcttcccccggtacaagcccagcaaactccctgcagatggcaggctgccagctcaggacattccagaaag

SEQ ID NO: 297932 - DNA, 122 bp, Homo sapiens
ccgtcccaagctacagtgtttaaaagctgcagttaaaaacactgagcaaggcagcgggcacgtgattcaagaacatgctgtttctaaccaaacaacaagcctcattttttaataccttcagt

SEQ ID NO: 297933 - DNA, 122 bp, Homo sapiens
cagctccacgtcctggcgcttctgggagccgccccagcgggagccagggagaaaatgaatcgccttgagtgacacaggacatggcagattggatgtttaatttgggtatctctttagaacgc

SEQ ID NO: 297934 - DNA, 122 bp, Homo sapiens
gaggtggctgttgggggtgccagggattccaggggcagaacgggcatccctggctccctccgctccatttaaccctcctcactgcaggtgctgcgagagatgtgcaagcagggataccggga

SEQ ID NO: 297935 - DNA, 122 bp, Homo sapiens
tgtgggctatggagcttcagaccatctggattcaatgccagttctactgcttagttactgcgtacttttaggcaagttacttacttccaggtccatgcctcagttttcccatctttaaagta

SEQ ID NO: 297936 - DNA, 122 bp, Homo sapiens
tcttttgagaaatacaggcagaagccatgtagcatttgttgacaacactgatgggggattcgtgcaccaggcccaatggtgaactctagaatctctaggtctctagggttccttctaattca

SEQ ID NO: 297937 - DNA, 122 bp, Homo sapiens
atgtgcagtccagaccgcctctgggatccccaaggttcagttccccccagccctgtagatcgctgtccgcttgccaagtttatcacacaccctgcgtgcacctgcagagtaaccaggcagca

SEQ ID NO: 297938 - DNA, 122 bp, Homo sapiens
cgcctgcgcgccgcgtccgctgtccgcgcctgcgcgcctctctccccgcccaacccacgacgcgggcgctcctcactctcgcaacggtcacgcagaccccgcctctgcgaacccggccaagt

SEQ ID NO: 297939 - DNA, 122 bp, Homo sapiens
gagtgggccacaacgctagcagtagaggtcatgaggagttgtcagattctggatatattacgttttgcagtggtgtgaacaagaatcttggactagaggttgcagagagataagtcaaggat

SEQ ID NO: 297940 - DNA, 122 bp, Homo sapiens
cacataggttgtgttctgagtctcaggttcacatgttaatcctaaagtcttagttctccacgaggtcagatgttgcttgtgatgaagggtgtggttaagtctgcagtgcagatggtagaggg

SEQ ID NO: 297941 - DNA, 122 bp, Homo sapiens
actattattattattttgacacagtgtctcactctgtcagccagtggcaggatcatagctcgctacagcctggaactcctgggcttaagcgatcttcccacctgggccttccaaagtgctgg

SEQ ID NO: 297942 - DNA, 122 bp, Homo sapiens
cacgtcgtctgtttgtcactgctttttctgaaagaagtaaaccttagtctgagtaaggtgcgtgaaatcggctgagcaaagtctgaccagcaggttcctcctgaaactatttataaccagat

SEQ ID NO: 297943 - DNA, 122 bp, Homo sapiens
ctccacgtgaccggcagcctgtgctgcgtttcctctgagttttgcatgttgaggttggaacgagctgcagcagctacagggctgagcccttgagtttgggcgtctccgggggtgaggttcct

SEQ ID NO: 297944 - DNA, 122 bp, Homo sapiens
acggcgtcaggaggaggcttcgggtgacgagacagcgggcaacggctctggtccagagcgcgcgtgtccgccgttggaagcggtcacggcggaaccctcaaatcgccccctttcctagagac

SEQ ID NO: 297945 - DNA, 122 bp, Homo sapiens
tctgctgcccaggttggagtgcagtgccatgatcctggctcactgcaacttccaccttagcgattctcctgcctcagcctcccaagtagccgggattacaggcacatgccaccatgtcccgg

SEQ ID NO: 297946 - DNA, 122 bp, Homo sapiens
cttctccctcttgggagctttcttgggcttggtggccctcttgggcggcctgggctcctgcgggcgccgctcccactcctccccgggccccgcaggcagcggcggagagaaggtctcgagct

SEQ ID NO: 297947 - DNA, 122 bp, Homo sapiens
tcacccgccagcccgggaaggcaagccccagtcaggcggaaggtagctggctgcggggcgcggcgactggcgggcggcgggcggcgggaggcgccaaccgccacagacgactcccagctggc

SEQ ID NO: 297948 - DNA, 122 bp, Homo sapiens
aggtcttgttggggcttaggggccctccatcccctatctgtccgattgtgggcggcctgccggtgctctaaaggctcagtctgtctgtctgattctgggcggcctgccggcgctctaaaggc

SEQ ID NO: 297949 - DNA, 122 bp, Homo sapiens
aaaccttagagttttggtcgacttcatccccagcagagagagtatcagaaaacgacagagcggtaaagaattttgaaaatctgtgaaaggcaattgtgaaatgctagagctgctataggccc

SEQ ID NO: 297950 - DNA, 122 bp, Homo sapiens
cactcctgccttggggctcgtgtcgtaggccacaggcacgaaggggatcatgcaggggatcgacgagttgagatgcagagagtgcttgggttcccccttgggtaaggctccctgcaggaagt

SEQ ID NO: 297951 - DNA, 122 bp, Homo sapiens
tggtatatacattggaagtatttttctgctatttggttttctttcattttgttcttaggacgttttgttactcaggaacaaatccagttttgatgtgtgaaggtgtgtgtttccatacacat

SEQ ID NO: 297952 - DNA, 122 bp, Homo sapiens
gattcgattgggagggaccgctcactcgggggaaatggattctttaccacggctgaccagcgttttgactttgctgttctctggcttgtggcatttaggattaacagcgacaaactgtgagt

SEQ ID NO: 297953 - DNA, 122 bp, Homo sapiens
ctgcttgggaggacacctggaatgccgaaggcaggactacacaccgggcgaatccaccagcgccaccaagcccttgaaaacccgaggccgccgcgcgactccatttcccagcgccccgcgcg

SEQ ID NO: 297954 - DNA, 122 bp, Homo sapiens
ccaaagctggtagaccaaggaagccttttttcacaggttatctttcaaaacacactggaacgtatagctgtagagctgtgggtacatgcaaggatggagggagggcagacagtgagctactg

SEQ ID NO: 297955 - DNA, 122 bp, Homo sapiens
gggggcggctggccgggcggaggagctcctcacatctcagacggggcggccagtcagagacgctcctcacctcccagatggcgtggcggcggggcagagacactcctcagttcccagacggg

SEQ ID NO: 297956 - DNA, 122 bp, Homo sapiens
aattttccacatgggtggcatgaaacacaggagaagaaggtaatttgccagtgttataagcgtaagcccatgtgtgaaaaaaatgaataaaacagaagaacaagggagaataacaaagctag

SEQ ID NO: 297957 - DNA, 122 bp, Homo sapiens
tgcgggagcacacactaactccgctccttctctcaatcttcaaacttatttggagggtaccgaagtttctgcgcaaattttgcgcgcagttcccacgtgcccgcttcaggtcttcaactttc

SEQ ID NO: 297958 - DNA, 122 bp, Homo sapiens
ttagtatgaatagcaaaacccatatagaaatgactgacaatcactgcattctggcatcaacggcaatatggtagagataactgtcaacaaatagagtactaataataatcactgtaatacct

SEQ ID NO: 297959 - DNA, 122 bp, Homo sapiens
gcaacattgagcattgagtgagtgagactccgtctgcaatcccagcaccccgggaggccacgacgggcagaccacttgaggtcaggagccggagaccagccaggtcaacagggcaaaacccc

SEQ ID NO: 297960 - DNA, 122 bp, Homo sapiens
cagctaaactcattgtttcctttcatcatggccctttccatcttcgtcacactgttccctcgtcctagaatatcgtctccctttgttctcagcctcctccaaccttcctgcttctctacaca

SEQ ID NO: 297961 - DNA, 122 bp, Homo sapiens
aattacactacttttattggttctatgaggacaagcacttggagtaccaattatattctgcgtggcatactttgggtgctgagtaaatattagtaacttattgaatagcacataacatctca

SEQ ID NO: 297962 - DNA, 122 bp, Homo sapiens
cgtgagatttaaagacacctcgcgagacctcacctaaatcagtcacggggtctgccttggcgttgtggttccgtcttctccatccgttggagacaccggaaacgcgctgaggacctgagcaa

SEQ ID NO: 297963 - DNA, 122 bp, Homo sapiens
gaggagcctgcgaaaattgaggatggattccactcctaggccagagagtgcctgttttgtcgattgaaactatccacgatatgccccaggctaggtgaaaataagtccaagactttatatat

SEQ ID NO: 297964 - DNA, 122 bp, Homo sapiens
gtgtctgtgtgtgccagtcccttgtgctgacacaggacgtcccttaaagtccagtcctggcgatttctgaatctcactctttccctctttaaagttccaggatccttcttatctccctttcc

SEQ ID NO: 297965 - DNA, 122 bp, Homo sapiens
ttttctttctctatactttgcgtctgtgtctttcttttccaagtctctcgttccacctaacgagaaaaacccacaggtgtggaggggcaacccaccccttcagcgcagtgaacccgtcctcg

SEQ ID NO: 297966 - DNA, 122 bp, Homo sapiens
cctgccccgccccgccccgcccgggcccggagtgaggacgcggtcggaggcccagcagcgcgggtcccggcaaggggctttctcaactacacaaaagacagtctaaaaaattaagtctccat

SEQ ID NO: 297967 - DNA, 122 bp, Homo sapiens
tcctcctgccgattagggggcgacaggggggcggtgggggggggggcagttttcaggagccgaatgagctgagccagtgttgagcattattccaggaattttaaacactcgttaaaggcttt

SEQ ID NO: 297968 - DNA, 122 bp, Homo sapiens
tgttccctttcatgtaaatagggatcacgatgtgtgagtagctgacgcttctcttccatgcggttcagggcattttcactcaagttttgaagaagcttcaccaatccctcatactcgtgaac

SEQ ID NO: 297969 - DNA, 122 bp, Homo sapiens
acgaaaaggggctttcttccgttgaatgagcgtttggtggggagcccgggaggtcagtggcgggaccgttattggcatttatttctctccgtgtactgagtttttcttcagaagaacattct

SEQ ID NO: 297970 - DNA, 122 bp, Homo sapiens
ggtggctgaaccccagcaaacagaggaagaggactgccccctcccgcggaggcccactcacgctgggcactagtgacaaggggacatcagcctttgttctcctggggcttggcgaggctgcg

SEQ ID NO: 297971 - DNA, 122 bp, Homo sapiens
tgaggggcgtctgggattttccgccaatgggaatggcgggctgaggcacagttgaaggggcggggcctcagctacggaccggaagcaatgggcaggccgtcggggaacggattggaagaggc

SEQ ID NO: 297972 - DNA, 122 bp, Homo sapiens
gggttcccggagcttctggactgtgtgtatgcggcggtgccgggagcgtggtgcgcccagcgagggcacgggagcgctgtgccccacatgctttgcccggcgcacctcttccctcactgctt

SEQ ID NO: 297973 - DNA, 122 bp, Homo sapiens
gatcgtctttagtctcgctgtacgtaactgtcaatctcgctggtgtataatttatactcccgggggccttgtaaatccgaaaagccatgtcgctctcctacaagtccctctctcccacttaa

SEQ ID NO: 297974 - DNA, 122 bp, Homo sapiens
atcagcacttctccccataattttcttaggaatgaggaacacacaaactgaggtgatcaccgtggcttcccagactttggaatgggaactatgaagttaatctgcatcctatttgagccatt

SEQ ID NO: 297975 - DNA, 122 bp, Homo sapiens
gcttcaaagacccattattaaaatcagccgacaatttagatggctaaagcaccctgtaaacgagcgttttaattgaggcaccacgctgggaagtggtggattttgttgtccacaccacacgt

SEQ ID NO: 297976 - DNA, 122 bp, Homo sapiens
aaagaaggcctggtgaaccccatgggtagacccttggtctctaaggatgcttcagaatttcgtccgtaaaaccacggagcagggaagcacacctgtgtctgtgctgccgcctcttagggacc

SEQ ID NO: 297977 - DNA, 122 bp, Homo sapiens
ccattacaattccctttaagtgcattttgcaagtaaaaccaaaactttagtccaaatgcccgttgtgctgtcactctaagtttttatcctataattgataaacctgtctaacaagtctattc

SEQ ID NO: 297978 - DNA, 122 bp, Homo sapiens
actggctcgcctgcccttctgctggggcactcaccccgcccgctgtcgcccatcccgtcccgtccagcctcccctggctccggctccggggtttgttgttctccgcctgccaccgccgccgc

SEQ ID NO: 297979 - DNA, 122 bp, Homo sapiens
ctatcaaaggcgttttttgcctttacagatggtcaacatttgttaaagaagtcaggaaaacgcagacatgcagggattaggacatccttgcgtcatgggtctctcagccttttccttaacca

SEQ ID NO: 297980 - DNA, 122 bp, Homo sapiens
gccgggcctccgcggccgccgccgccgccggcgctcactcgatccgcacttgcaggcggacgttgagcatcaccgaggccacgatgtagaagtaggggaagttcatgcgcagccgccaggcc

SEQ ID NO: 297981 - DNA, 122 bp, Homo sapiens
acgtgacgactggccccgcctcttcctctcggtcccatattgaactcgagttggaagaggcgagtccggtctcaaaatggaggtaaaaccgccgcccagtcgcccccagcccgactccggcc

SEQ ID NO: 297982 - DNA, 122 bp, Homo sapiens
ttcaaccagcgcccttgcaaataacagctcttattatttcctccctgggcgatgcgaatccgaggatcggggtctgactcccagagaggcccagaaagcttctgttgaattgccctcgtcgc

SEQ ID NO: 297983 - DNA, 122 bp, Homo sapiens
ttcgtcactgcggtcgctcctgggacttgctggtgttgggtcagggcggtgtgagtgttccgtgctgaggagcggcttcccatggccaccctggagtgcccctgtgtgtccccccatccaga

SEQ ID NO: 297984 - DNA, 122 bp, Homo sapiens
ggcagaggccgtcagagaggggctccgtgtgcatccgttatggaagcggctgaggcctcgcggtgatggcagaacgatgtgtgggatgagtttcaaaggacctcagttgtggctcctggcgg

SEQ ID NO: 297985 - DNA, 122 bp, Homo sapiens
gggatgtgaggagaccctctccctggctgcccagtctggaaagtgaggagcgtctctgcccggccaccatcccatctaggaaatgaggagcgtctctgcccggccgcccatcgtctgagatg

SEQ ID NO: 297986 - DNA, 122 bp, Homo sapiens
tcatcacagaaagctacagtcacaagtcaaattaactactgtatcacaattatcatattacgctacatacaccttactgactcagaatgtaacgtttcagaagaaaaacaagactggttgtt

SEQ ID NO: 297987 - DNA, 122 bp, Homo sapiens
tcctcaggccctgacagctgcatggtgtgttggtatttctgcctcctgaagccacgtccacgtcggctcctgtgcagtagagaccggagtctccatcaggctccctctgggggcgggtggtc

SEQ ID NO: 297988 - DNA, 122 bp, Homo sapiens
gccgagccaggacccaccagctgcttcaggtcctcctccgagagctccgcgtaacggtaccgctgctgctcgaactcgtaccgggtggttttggccaccaccaccacccgggaggggcggaa

SEQ ID NO: 297989 - DNA, 122 bp, Homo sapiens
cggggttgacagagtggcaagagggtggtcccgagggcgcagaggggacactgggtcccgcgacgcttcctggggagggcgcagcggttcccgagggtggcagtggccggcgtgcgtggcgg

SEQ ID NO: 297990 - DNA, 122 bp, Homo sapiens
ccggctccttcccctcagcacttggccggagcccgcgcggttcctctcctcagcgcgcgtcgtcccctcagggctcccggttctcgcagttgatcaagtgaggcagaacgggtagtgcctgg

SEQ ID NO: 297991 - DNA, 122 bp, Homo sapiens
aacagcttcatcagataatctcctgacacttcgaagggggagtcctccccacaggaaacgcgaaagcacaagataagtgatcttatccttttccacttaggcttcttcagaagagacacagc

SEQ ID NO: 297992 - DNA, 122 bp, Homo sapiens
ccggaaagggactgaggctgggtgagttgcgccgttttcctaacagttttcccatcctgtcgcagacaaagaaaagaaggaacaatggtcgtgccaaaaagggccgcggccacgtgcagcct

SEQ ID NO: 297993 - DNA, 122 bp, Homo sapiens
tcgccactggctctctctgcggcaggtttccctccggttaccgtgaccaaaggggaaagacgcctgcctccctgcaggccccaagatgtgccccaggggatgcgctgactgcagcctccgct

SEQ ID NO: 297994 - DNA, 122 bp, Homo sapiens
agcacagtttgtggcttcataaatgagctctctttcctgtcctctttcctctccatattccggagaggatctaagcctcagggaaaatcctggtgaccttaagcttctgacggggccatggg

SEQ ID NO: 297995 - DNA, 122 bp, Homo sapiens
aactcgtacgttttttctaaaataatttcttgagcattgtggtggccttatgtactaacccgaagctgaacttcctgggaagctgatccaatggagcacttggaattcaggggtggagtctt

SEQ ID NO: 297996 - DNA, 122 bp, Homo sapiens
tgaggcttgcgttttgaaagcagtcccttcccaatatagagtgccacaaataatctcaaacgtacactgatttcatttgcaggtccacttttttgttttgttttgttttgagacactgtctc

SEQ ID NO: 297997 - DNA, 122 bp, Homo sapiens
ggggtgggctgtctggacgttcggagggatcagtgtctggcacaggcttccggaggccttcgcctcgcgggctccaagttgtgaaagggctgggccacgacgggcgtgggtaccgtccggcc

SEQ ID NO: 297998 - DNA, 122 bp, Homo sapiens
cggcccgcgggaagggggcgtcacctgggcccggagcggagggcgccacccacacattctcgccattctccttatcggcttccacgtagcctggaacagagagggcggcctggaggaagcgc

SEQ ID NO: 297999 - DNA, 122 bp, Homo sapiens
ggtgattacagccaaccttgggcccctccctgaggggtttggattcagcaggtccgaggccgggcctgagaagccactttgctcacaagctcctgggcgctgctgctgccccggggaaccca

SEQ ID NO: 298000 - DNA, 122 bp, Homo sapiens
ggctggcggatcactcgcagttaggagctggagaccagtccggccaacacagcgaaaccccgtctccaccaaaaaaatacgaaaaccagtcaggcatggcgccgcgcgcctgcaatcgcagg

SEQ ID NO: 298001 - DNA, 122 bp, Homo sapiens
ctaatacaagcctttgacagcgctgccagattcgggaatgaggatcactgcggcgaggcccggcgggctgggcagcctgactcggcggctttgagcgctctcagaacccgcgggcgctcgcg

SEQ ID NO: 298002 - DNA, 122 bp, Homo sapiens
cctgtgagtgagcacaccctccttgatgggccgctccaggctcgcccttcccgcattgtccgctgtgccgcgcagagtcagtaatggaagaccaagttagagacagctctgtctacttctgc

SEQ ID NO: 298003 - DNA, 122 bp, Homo sapiens
cgtcaccattttgttcatcttgtgagtcaacggtgctcgactgtggtgtctccgtctccgcggaggtgcttttctttgcatctccgatgggttcattgtagaacttcaaatgtctagtgcgt

SEQ ID NO: 298004 - DNA, 122 bp, Homo sapiens
agcttgatggagataacacaactagagaattctccccacacactccagcacggatgaactcgtatttttacaccctccttagtatctgcagccaaagcaaagggaaaaccactcaggcattg

SEQ ID NO: 298005 - DNA, 122 bp, Homo sapiens
accccagccccgacgcctactgcaacctggtcatcctggctgtagccaacagggtgagcccgagggcagcctgctcccaaagcccggcttcgggaacgctgcttccccgcccccaccttgcc

SEQ ID NO: 298006 - DNA, 122 bp, Homo sapiens
tgttttataggggaggtaattgagcagaacttaggacagttacatgctttgcttcagttgcggggctgggatttggacctggctcctggcctgacacaggtcctcagcttccaccagccttg

SEQ ID NO: 298007 - DNA, 122 bp, Homo sapiens
aatctctaaatcgattgagatgcttcagtaactttttgttttatagaacctctgggtatacgtgttatttaccagctctatcttttaaactggacaaaagttttcacgcttattaaatctat

SEQ ID NO: 298008 - DNA, 122 bp, Homo sapiens
ggggcgcaggacccggggagccgcgccgggaggagggtcgggcgggtctcagcccctcctcgcccccaggctcccactccatgaggtatttcagcaccgccgtttcctggccgggccgcggg

SEQ ID NO: 298009 - DNA, 122 bp, Homo sapiens
ccaaatacatacaaaaatacacatataaatacatacacataggccaggtgtggtggctcacgcctgtaatcccagcactttgggaggccaaggtgggcggatcacgaggtcaggaattggag

SEQ ID NO: 298010 - DNA, 122 bp, Homo sapiens
atttttcaagagggttttgatagagtaacagatcattaagttgttggtattccagaggtccgatttctatgtttatgttggaatgtgctctatgaatatagccttttagagatcacaggtaa

SEQ ID NO: 298011 - DNA, 122 bp, Homo sapiens
ctctgggacactctaacttctcggcggtgccccctccccgcggcggcagtttgccctttacgttctttgggtccttcgtctgcagtggcgtttgctggtgagctccccgcaggtagcggcgg

SEQ ID NO: 298012 - DNA, 122 bp, Homo sapiens
atgacaacttttattgccctcaagagaaactccagtccacctgctccacccaccctcctgcgggaccaaagaaaacacccagagggcaaaacaaaaaggggctcaaaccaacaggaagtcag

SEQ ID NO: 298013 - DNA, 122 bp, Homo sapiens
cttgaagggcccagcagccaggacagggcagcgccggccatgtcatgagcagcccaaagccgcactcgggtcaggaggctgatgctctcgggacttgagcctccgcacagcccaggtctggc

SEQ ID NO: 298014 - DNA, 122 bp, Homo sapiens
ttgcccacctaggacctccttaatctagtactagagccagctgagtctgcacttttctcacgctccccaggatctggggactctaacacatgatctggtaagactgtccctcttcataggtg

SEQ ID NO: 298015 - DNA, 122 bp, Homo sapiens
ttctcccatccttgcccagttacctgagagaaaaaaaatatggcgctagagtggatactgcgatttcaggaccgaaaccaattccaccaatggctgtggtgttagtggctgtattagtccat

SEQ ID NO: 298016 - DNA, 122 bp, Homo sapiens
ctaatatgatcaacctgagaaatagtgcagctagccatcaagaagtaaatggaggccgggcgcggtggctcatgcctgtaatcccagcaatttgggaggccgagctgggtggatcacttgag

SEQ ID NO: 298017 - DNA, 122 bp, Homo sapiens
aggcaccgaggaccagctgtcctgcttcgccacagccgtttccccggccgagctgtggaccgtgcacctggccatccacccgcaggcccacctgctgagcgtgagccggcggcgctacgtgc

SEQ ID NO: 298018 - DNA, 122 bp, Homo sapiens
ttcagggatcagcatgttaaattagacccaggtgcttctgatgcaggtgagctcaagagccgtatccgaccttaggttaataccatatcaagttctcaaagccagaaaatggtagccacagg

SEQ ID NO: 298019 - DNA, 122 bp, Homo sapiens
ggccggagcgcagcagccgggacgcacccggagccctgcccgccagctggtaactgggcccggctgtgcatctgtgatgcccaatttggaggctggaaatctgttttgtttgtttttctaat

SEQ ID NO: 298020 - DNA, 122 bp, Homo sapiens
ctttgtctatcggatgcatactgtgcaccttgtcattgttgggaggacaaaaacaactggcgtttctcacaagctgtctgaaagagctgctgcagacgacccatgtgtgcacagactccgca

SEQ ID NO: 298021 - DNA, 122 bp, Homo sapiens
ggtctccgaatgctgcttctgctgtgctcaccaagggagcgcgtgtgcggcgtgtgtctgcgaagcgggcaggttgtgtttagttgtgctgtgccttggaacagtccgtgtgaacagaggag

SEQ ID NO: 298022 - DNA, 122 bp, Homo sapiens
ctttcttgtgagacaaaggagacagtacctggcaattgtgaagcagccctgccctgtggccggagcctggattggcccctctcgaacccagacaccccactagtctgctagttttgctagag

SEQ ID NO: 298023 - DNA, 122 bp, Homo sapiens
ctgtgcggctgcagtgtctgtccacagagctccagagctgggggcaggttcagcggcatccgtgcccgcttaccttggacacggcggccagcctctgctccacacgggcgcccaggctggtg

SEQ ID NO: 298024 - DNA, 122 bp, Homo sapiens
tagtgggtaggggcggtgggtgggacctgatctgtcggacagtaggggcggggcttttcgcgatgccccgcccctaggagcgctggcgtcacgcccccgtccccgcctctccggaacccgga

SEQ ID NO: 298025 - DNA, 122 bp, Homo sapiens
gtgtggtctgattgcagagtgacggggcatatgattagggcattgtcgcacgccgtgtgccgggctgagggctgatgagcacaccatcgcgttggagcacagccagaccgcgcacgtgacca

SEQ ID NO: 298026 - DNA, 122 bp, Homo sapiens
tggggaaaccaacgcacgtgtggcccgcgctgagtagtttggagccagacagactaggttcgaaccccagctccaccggaaatagccgcggccagggtagtgttgatccccaaagtggggta

SEQ ID NO: 298027 - DNA, 122 bp, Homo sapiens
gagaagaaaaagcctcttgctctgtgcaaatggttttttttaatcactgtatccctcccacggttcagaccggctagacttccatgaaggagaacagaaccaacattccttttacccaaaag

SEQ ID NO: 298028 - DNA, 122 bp, Homo sapiens
cttggctaggggcttccttccacttctgggcctccgaatctccccatttttgtttctgtccgtctagcccattctttgccccccttttgtttccgcattccctctctgaacagggtgtgcac

SEQ ID NO: 298029 - DNA, 122 bp, Homo sapiens
gaggaactgccctgtcctatccccagtcacacctgtcaaataacttatcagggtggtttgcgtgttttacctacataaagcttaggttgattttgagagataggactagctggatttcctag

SEQ ID NO: 298030 - DNA, 122 bp, Homo sapiens
gccattcgccgagcgctcaaaggggctgtcactcccagaataaatcgccgccgcgcccgccggctcctctggccatttccatacagctccggcccgcgccgcggacccgccggcctcggcct

SEQ ID NO: 298031 - DNA, 122 bp, Homo sapiens
gattctcacaaggaagcaggtgatagacggtgcatcccaaccaatcaccagccagcggagcgcaataagaaggcagttaaccaatcggagaagagatgggtggctcgaaggatggcctgctt

SEQ ID NO: 298032 - DNA, 122 bp, Homo sapiens
gagcgggtatgcagggtgattcctattccacggacagccgatggctcccccttccctcttcggaacctggtattttcatgcccgtgtcatctggattttgttcttgggtctctatggcagct

SEQ ID NO: 298033 - DNA, 122 bp, Homo sapiens
aactctcctacaaagaagggccaaaccggccgcagccatgttttcgcataactggcaaaacgcgtttccgccaacgatagcgtcacttccggcgtctcaagccggcggtgaggagaatagaa

SEQ ID NO: 298034 - DNA, 122 bp, Homo sapiens
gcaaatactttcattaagtaagaacttaacagtggcagctggtaaaacaaaagcagcattcgtgatgttgctaattcagttcttccccaagaggcccaagctcctgctaagcacagtctccc

SEQ ID NO: 298035 - DNA, 122 bp, Homo sapiens
gcacagcctgggcctgttgcgtcctcccagcctcttccctccccggcagtgggggcgccgcgcccagcctttgctcgatgagggctgcaggatccggctgagaccaacccgcggcgcaggtg

SEQ ID NO: 298036 - DNA, 122 bp, Homo sapiens
accctgtaagtagccgcgcaagtcccggccgagttgctgtccgcacacgtgctgggggtccgctctgagaggctcggggtatctgcattgtggaagaaacgtctggtcactgaactttcccc

SEQ ID NO: 298037 - DNA, 122 bp, Homo sapiens
ggccgcggggcagtcgaggagcgcccatatacgaccctcggagcccgaggtccccccgtgcgtccgaccacagatcagaggagtcccagaagagggcgagatcaaagcgctcgcttggatgc

SEQ ID NO: 298038 - DNA, 122 bp, Homo sapiens
gaaaaggggaggtaagcggggtagaagtacctctatgggccgggtcagactcggtgtttgcggattaccttaatagggcaagccccccactccttaacgcaaacagcttctgccctctgtcc

SEQ ID NO: 298039 - DNA, 122 bp, Homo sapiens
tacccttgagacctctgggctccagtatccaggctcagccataccaatccatccctccgccgtgctccccagtgccacctgctgcaccgtgaataaacccccacagctgcaccctatcagtt

SEQ ID NO: 298040 - DNA, 122 bp, Homo sapiens
ccgagggctggcagggctgggaggcctttgggaagctcagaggagccgcggggagccgggcgtacgagagcaggccaggactccgctgggcgaggccgagcagggacaccagctcctcaccc

SEQ ID NO: 298041 - DNA, 122 bp, Homo sapiens
agcaacagcaacagcagcagcaacagcagcaacagcagcagcagcagcagcaacagcggccgccgcatctggtgcaccacgccgctaaccaccacccgggacccggggcatggcggagcgcg

SEQ ID NO: 298042 - DNA, 122 bp, Homo sapiens
ctctattatgccggccagcggagtccaattggtctgacttcactgtccggagaatcctctcgctcccaaacctccctgagagacgacctttaaccgtgccagccggacctgcctacaaagac

SEQ ID NO: 298043 - DNA, 122 bp, Homo sapiens
cctgactggttcccgggcgcaggctgcaggaacctgcatgaggactttgcctggggcgaacgaaggcagagctgggctggaaaacctggcagggcagagtctcagccagcgcggtgctttgg

SEQ ID NO: 298044 - DNA, 122 bp, Homo sapiens
tttatcattccaaatcactggcgaggaggtcctgctctcgatctgatctccctgctcgcgcgaagaggtgaccgacacacttactgaggatctctgttagtttctcacgtctcagttgttat

SEQ ID NO: 298045 - DNA, 122 bp, Homo sapiens
ctcttacctgtagcacagagggccaaaaaggtctgggcatgctttttgaccaaggcctgtcggtcacggggcagagagagccggtgcagaatgaaggccaggaaatcatgtgcaatcacagc

SEQ ID NO: 298046 - DNA, 122 bp, Homo sapiens
tccccttttgtaaaatggaagaaaaggattaaagttacttcttgctccaataaatcagtccgactgacaaactgcctctgtaggagtgtcttaaagtgcagaaaagtggaaacagattctag

SEQ ID NO: 298047 - DNA, 122 bp, Homo sapiens
ggccgtcttgagggtgtctgtgaacggttggacactgtggctgggggactgcagggcctgcgcgagggcctttccagacacgtggctgggctctgggctgggctccgggaaaccaacaccac

SEQ ID NO: 298048 - DNA, 122 bp, Homo sapiens
cgtgcacaggcactcacgcgccgcggggcccctcgggcggctccagcacgccggcccgcgcggggaccctggcgcaccagacccccgcgcagcccgcgcctgtcctcctctcgctccgccgt

SEQ ID NO: 298049 - DNA, 122 bp, Homo sapiens
ccctgggagatgagggggtccccatgtgcttttccagttcttctggaattgggggacccccgccaaagactgagccccctgtctcctccatcatttggtttcctcttggctttggggatact

SEQ ID NO: 298050 - DNA, 122 bp, Homo sapiens
cgacacagcgcgcagaccccaggacccgaaggctaagctcacatggctggtaagaaatggcgacacagcgcgcagaccccaggacccgaaggctttatctaaaacactcagtgcaaaatgga

SEQ ID NO: 298051 - DNA, 122 bp, Homo sapiens
cctgcgctctaattaccagcataattagaataagaacatgttgctcactccagaggggcccgccccgcgcctctgctgctctgggagaaagcgtgtttaagaattcccatggagttgcatgg

SEQ ID NO: 298052 - DNA, 122 bp, Homo sapiens
ggcggacgctgccttcctggggtgacggagcagcaggaagcgttttcggatcctggaatacgtgggcggcccgtgggaggggctgaggcgcagtttcctactcacccggatccgaatcctcc

SEQ ID NO: 298053 - DNA, 122 bp, Homo sapiens
gggggaaggaggggggcaggggccagggcaggtgtccgcgcccaggtagcaggcagggcgcgggtgaacgtctgcagtgaggactcctagccccgaggttccagggccaaggcgagaacaca

SEQ ID NO: 298054 - DNA, 122 bp, Homo sapiens
ttctccccagggtttccaaacttctttccagataagggccctgccctacttcctccaaatcgaggtgcaccaaacctggaatgaaaaaaaacgttattcacattttcaaatggctataccca

SEQ ID NO: 298055 - DNA, 122 bp, Homo sapiens
cggcggcgctagccaatcagaggcctgatcggggtcgtgatcggcggactaaagggcgggcggagaaggaagcggcatgaagaaggcgaaaacggcggcctgacttcctgtgactgacggca

SEQ ID NO: 298056 - DNA, 122 bp, Homo sapiens
cgggaagacagagccggacgtgacgccaccgtggaaggaagggaggggcggagcgtggctcggtgacgtcctcccaagatggcggagacagagtgaagaaactgtgttccccccttgggttg

SEQ ID NO: 298057 - DNA, 122 bp, Homo sapiens
gactttgtcttattatcctggcacacacgcctggtgatccctggcttagctggcaaattgcgagggcctcgataggagattcaaaactcaacaagtggctgtcactatggaaacggctccaa

SEQ ID NO: 298058 - DNA, 122 bp, Homo sapiens
gctggctactccctctttctcaaagtgtgtgtccttttgcttcagtggcccaggcccctgcggtgctgctcccagccctccgacccctcctcctgtctcctttgctaacgttaggctcaacg

SEQ ID NO: 298059 - DNA, 122 bp, Homo sapiens
gaggtgtgtgcatgtgtgtgtgcgcgcgtgtgtgcatgtgtgcatgtgtgtgtgtgcgcgcggtgttagcccagttgcaggcgcttttcactatgaacataaaggtagaaaaagagatcagt

SEQ ID NO: 298060 - DNA, 122 bp, Homo sapiens
gccccgcctcggccgcacagcgctcgccgctacccacccggacccccagaaacgccccgccgctgccgctccgccgaggaccgccaggaaccccacttaccagcagcagctccctggggtgc

SEQ ID NO: 298061 - DNA, 122 bp, Homo sapiens
tattgagagctccaattccacctctgctcttccagtctaaagatttctttcttctggcagcgtgggctttggagtaagatagacctgtatgtgaatcttggcctcaccacttactagcttta

SEQ ID NO: 298062 - DNA, 122 bp, Homo sapiens
aaattcgaatttaactgggtgtccagtatttttatttgctaacgctggcaacccttctgacggccagagaagagaggaagcggccggcagggtctggatcccaactcggcgctcccctccaa

SEQ ID NO: 298063 - DNA, 122 bp, Homo sapiens
catcaagttcagtcaggagcttacccaatccagggaagcgtgtcaccgtcgtggaaagcacgctcccagcccgaacgcaaagtgtccccggagcccagcagctacctgctccctggacggtg

SEQ ID NO: 298064 - DNA, 122 bp, Homo sapiens
gagaggcgcgcgtttactgcgctcaggagctcggtgcagcctcttctggagagttgggggcggtttccagggtccggagtgtcccctgaccccgggaaagctgggtaagtatgcggtgcggg

SEQ ID NO: 298065 - DNA, 122 bp, Homo sapiens
agtcctggcctgccctccacgaagccccgcccctacgcgccggcccctcccacctcacctcggccacgcccccttcgcaggtggtcagcctggcgcacaatctcatctacttcggcttctac

SEQ ID NO: 298066 - DNA, 122 bp, Homo sapiens
ccgccgccagagctttcccgcgcggtcggatagttacactactgtccgggacttcctagccgtgccgcggaccatctcaagtgcttccgccacactcatcatggcggtggcagtaagtcact

SEQ ID NO: 298067 - DNA, 122 bp, Homo sapiens
ctcctgggttcaagtgattctcctgcctcagcctcctgagtagttaggattacagacatgcgccacctcacccggctcagtttttgtatttggtggagatggggtttcaccatgttagtcag

SEQ ID NO: 298068 - DNA, 122 bp, Homo sapiens
aaacagtcctaccccggtgtcttgtgtatcccaggtctgtgcttctcgtgggagcctcgacgctacctttaggacagcaagtcagtcctaggggccaggattccttaggataaaatgggaca

SEQ ID NO: 298069 - DNA, 122 bp, Homo sapiens
cgtccgcgaattggtggacgcggccgccactctgggtcgaccctgttattcattgggcaacgcgtcttttgaaaccgaactgaagggggaaggggcgagagggaagaggaggggcagaagga

SEQ ID NO: 298070 - DNA, 122 bp, Homo sapiens
tgcagtgcgtttccaggagctaaaccaaggccagggtcagggagcccagctttgtggcagcggatgatacattcctctgaaatacaccaactccttgagagcttccttcaattatactgccc

SEQ ID NO: 298071 - DNA, 122 bp, Homo sapiens
tcttggcgctggaagagttaaaccgacgccagctttagctccttggcttcgtggctacggcgttcttagcctcccctgctcgggctcttcccgtcgttttgggttgagagaccacgaggttg

SEQ ID NO: 298072 - DNA, 122 bp, Homo sapiens
cctcttacaaaataaaatcaggtctccatagcatgggctgcaacgtccttcagggtcagccgctacatatctctcccaaccattcagtaccaacccatcttctgcttcagccatgtcaacct

SEQ ID NO: 298073 - DNA, 122 bp, Homo sapiens
gtgttactatattaaagcgcttcaagttttcatagcgctcgtcaaacagagacctcggaacgctctgcagacattaattaatgttcgctccggccctggaagccatttcaccaatggaaatt

SEQ ID NO: 298074 - DNA, 122 bp, Homo sapiens
cgctcgcgcggcctctcgggtagagtagtccggttccccatctgggagcgcgatggggcgcgcaccgcgaactacccgtcccatggcgcaccgcgcgcagagcgtcctccaccgccctcctc

SEQ ID NO: 298075 - DNA, 122 bp, Homo sapiens
acatcaggggtgtgacagtgagtgctggctgctgtagtaattgaatgcttagctacgtgccgggccctttgccagctacagctcatgtgagacctcatgttcagtcttggcagtaacccagc

SEQ ID NO: 298076 - DNA, 122 bp, Homo sapiens
agtagttaacaagtttggttaaaatagcgcttctcaagctatacacatcacctggggtgacgccttagcttctgcattacaaactcccaggtgatttcagtgctgctggtcctaggaccaca

SEQ ID NO: 298077 - DNA, 122 bp, Homo sapiens
cttcctggagcctgtgggccctgaccctggtgccaagagcgcacccagtcccagggaccgcgcctctccgctgcctggactttccgccaattccagccaaggtccaggtgctttctaactgt

SEQ ID NO: 298078 - DNA, 122 bp, Homo sapiens
aacagaaaggtgacttagttccaaaggcaaatttgtttccatgacatttttctcttcccacgtgaccatgcctgccgggtttaggattcacagaattctgcgaaaatacagtcatgcatcac

SEQ ID NO: 298079 - DNA, 122 bp, Homo sapiens
tatctacgactgctacacctcagccaggggctgcactgccaccctgggcaacttcgccaacgccaccttggatgctgtctctaacatctacagctacctgatcccctgaaggacttctggaa

SEQ ID NO: 298080 - DNA, 122 bp, Homo sapiens
agcacaagcatgcatgatcttgaaggtccttgttatctctaaaaagatgtatgactcattcgtttggaatggggggtagtaaaaatctaaatcagtgaaccaactgaatcatataatattta

SEQ ID NO: 298081 - DNA, 122 bp, Homo sapiens
actgcactcacagcctgaaggacagagtgagactctgtttgaggaagagaaaaaaaaaagcgtttctgatgtgatagagataataaaacctgagtaacatgatagagattgatgggcagagg

SEQ ID NO: 298082 - DNA, 122 bp, Homo sapiens
agagcttcgtcctggcacctgattggctctctttccagctccgcctccatctcctcccgccgcccgccccttggcgatcccacagcggcaggcagagcaaaatacgcaggcgcaggcgcttc

SEQ ID NO: 298083 - DNA, 122 bp, Homo sapiens
tcccaggttgcctttcgcgccccgagggctgctgggactctcggactcccgggccgagaccgagggaaagaatccgctttgcatgtcgggagtagtagtttgtgtaatatcgcgatccttct

SEQ ID NO: 298084 - DNA, 122 bp, Homo sapiens
tatgtgatgtcatgcagatagtgacagaaaattagatatgtaatcagtatgtctcttccccgagctgcttgtctaatgtaagccttgaagttctgtcacccgggggcaattgggggtcatgt

SEQ ID NO: 298085 - DNA, 122 bp, Homo sapiens
ttcgccaactccgctgcctttgccgccaccatgcccaaaacggtgagtgccggaggtgggcgctgtcgaccccaatggctctggctgagcctcatagccctttgctgatggctgagggcttg

SEQ ID NO: 298086 - DNA, 122 bp, Homo sapiens
aggaggagggagactgctcacatggcccacttcgcggcctgagatggagtgcgcgcagggcgtcagggcagagggaggcggggattcaggataaagagcggcctgatgcccagagccgggtg

SEQ ID NO: 298087 - DNA, 122 bp, Homo sapiens
ctccgtagagggtgggagtttagacatctggctccaagttgtaaacctacctacttgtcacggaaatatgagaagttttaattttcctttggataaaggcaatcagctcccacagatggcca

SEQ ID NO: 298088 - DNA, 122 bp, Homo sapiens
tagggtttagtcaccccttttctccgtttagccttcaggctgttttatttttctcctgcccgtagttttctgtggggcttccccagtcttgccagttgtatttcctaaatgtctgttccttc

SEQ ID NO: 298089 - DNA, 122 bp, Homo sapiens
gggaggctgaggcagagaattgcttgaacccgggaggtggaggttgcagtgagccgagatcgcgccactgcactccaacctgagcgacagagctagtctccgtctcaaacaaaacaaaacaa

SEQ ID NO: 298090 - DNA, 122 bp, Homo sapiens
ggcactctccaaggggagagaaactcctaggccagcgactcaccctgctcgcagccaggacgtgaagcccctaagctgcccgtttgattttctcagggacaatgtggagtggtcggaagagc

SEQ ID NO: 298091 - DNA, 122 bp, Homo sapiens
aaccaagacagaatacaaaaggcccacttagcccagcccgtggcatggggcagaccctcccgagtgggatccagagctgggtccagccaccctcagccccctatgatgtacccacctcattg

SEQ ID NO: 298092 - DNA, 122 bp, Homo sapiens
aggggcaatgagggggtatggcctttgaagcctactctgaacacatagcacactctagctcgggggactgcagaatccgaggccacttctgacacaacctgaaccactctatctccaagcac

SEQ ID NO: 298093 - DNA, 122 bp, Homo sapiens
gctcctggccgcgcgccacccctcagtgccctatccgcaccaccatcacagtgacgttgtcggccgagccccgctgcaccgccttgttggccagcctgttgcaggctgcttcgtagcgggcg

SEQ ID NO: 298094 - DNA, 122 bp, Homo sapiens
agcacactacagtggccctgagagggcagctgtgaactcaactcaagaaaaactccttcacgtttctctgaggctgatggcgtaagagagggatttgtttattagggtttgagatgggcagg

SEQ ID NO: 298095 - DNA, 122 bp, Homo sapiens
ttgttttgtttttcgttttgagttttgctgtagccaggctggagagcagtggcacgatctcggctcactgcaacctccacctcccaggttcaagcgattttcctgcctcagcctcccgagta

SEQ ID NO: 298096 - DNA, 122 bp, Homo sapiens
ttgctgaggtgaaaggccatacacgtgtgagcatttcatctctgggttctcagcatctaacgcagtattttattttattatttttattttatatatatatatatttgaaatggagtctcact

SEQ ID NO: 298097 - DNA, 122 bp, Homo sapiens
acgtgggcttattgcatctaccccacggatggtttatctttttctttccatcagacttgccgcaaggttatgtggctgttattttgttaatttccaaggctcttacattcactgatccttct

SEQ ID NO: 298098 - DNA, 122 bp, Homo sapiens
ggtcctctggcccccgtggcgtgggggtggcactgactgacaggccacctgttcgcctgccgtggccctgggagccacgtggcctcacagcccgctcctcagggttcctcaaggacaggcgc

SEQ ID NO: 298099 - DNA, 122 bp, Homo sapiens
ctcacactcaccatagaaggataaaaggataaaacttgtcattttttaatataaagcatccggcaacatgtaacattgtcttttaagatgttgtaaggaaataccatattgcataaatgaag

SEQ ID NO: 298100 - DNA, 122 bp, Homo sapiens
tgctttgcatcactgggaagcaggcagtgtcttgggtgggggcttggtcagtatcctctccgtctgggtgcccagctcccacgcacacctgagctttcggcatgctcccacctcgttaaagg

SEQ ID NO: 298101 - DNA, 122 bp, Homo sapiens
caccccttgagcacagccttttctcatctgttcttgctcttggatggggggctgctactccggagcggcgaactggcgggcgggggtgcgcctgtgagtgtgagcgcgcgtgtgcgtgtgtg

SEQ ID NO: 298102 - DNA, 122 bp, Homo sapiens
acaaatgcactaggctctgattgcaagaagtgctgctgagtgtgtacaagaagggaggaccgggattggactgaactgcagaacaaaggaaaccatgtggactggcacactggactgagcaa

SEQ ID NO: 298103 - DNA, 122 bp, Homo sapiens
acgggccccttcttcccagcaccaccacaaggaggctgttacgggaggctggggtcaccccggctaggaactgggtatcaggagaggaggcagaacagtggagaagaccctgaggaagacta

SEQ ID NO: 298104 - DNA, 122 bp, Homo sapiens
cttttttctttactaatcatagttattaaagcactcacttcatttttattgtgttttaaacgggcagagaaaatctgagtctgataatgacctttgtacatcatgctgcaaattgattttga

SEQ ID NO: 298105 - DNA, 122 bp, Homo sapiens
aggaactaaggatttttgtgccacctaagaaataaaacgttagcattttttctaacaacacgtcctaaggctggaccctgcctatgggatatcaggtcagaatattcaggggagtatcctca

SEQ ID NO: 298106 - DNA, 122 bp, Homo sapiens
tgacctcgtgatccgcccgcctcggcctcccgaagtgctgggattacaggcgtgagccaccgtgcctggcctgacactgttgaccaactgaatcagagcctggaatccattcttcctctgga

SEQ ID NO: 298107 - DNA, 122 bp, Homo sapiens
tgttcctgtcgcctcatcagtgatgtcatggaaagacatcagacatgctgttattattgccgagcgagagtctgcaaaggaaattatgctgctgcctctaggttttaattttccatgaaaaa

SEQ ID NO: 298108 - DNA, 122 bp, Homo sapiens
gaagaccgtgtggctggaagatcggccttgctggtttgttgaacctgtttcttgagtccccgccccgcgatgtcccacccttggtggggagaaggggacagaaaaccgcgatgggatgggcg

SEQ ID NO: 298109 - DNA, 122 bp, Homo sapiens
cgggagcagggagcgccgcgggtcctttctggcgtctgcagagcgggcaggtgctggggacgcagacgccggagccagggagcgggcggttggagtcttaagtccaaccggttccccgcata

SEQ ID NO: 298110 - DNA, 122 bp, Homo sapiens
attgcctcctcctccatcattcccctccaagggctatctttgcactccctgggggaggcacggtgcagtccagcatgaattctgcaacacagagcaatgtaaggaaccaagtcatggcccag

SEQ ID NO: 298111 - DNA, 122 bp, Homo sapiens
acgcagatgaagacggagagcgcgtcggggcccactcaccactccatcagcctccatgctcggccctaaggacgccacggcacacactcagtatctgaacacttgaacggctgagcagatgt

SEQ ID NO: 298112 - DNA, 122 bp, Homo sapiens
gcttcgggtagtcaagttacaagaaggcttcagcgggtgcatgtcagctatgcggttgggcgggttggccccactctaattagcctggcttcccacgttgacatttcaggtacgggttcact

SEQ ID NO: 298113 - DNA, 122 bp, Homo sapiens
cccaggctggaagtagtacctgtccaagaacctccagccactccagtggattaaagaattcgactctgggatgtggtgaatctcaagttctgttaacactcaaaaactttttagaccttcca

SEQ ID NO: 298114 - DNA, 122 bp, Homo sapiens
accagaattccaggacttagccctggtgcaatgtctcacgcctgtaatgccagcaggttgcgaggccaaggcaggcggatcacgtgaggtcaagagttcaagaccagcctggccaacatggt

SEQ ID NO: 298115 - DNA, 122 bp, Homo sapiens
tggcgagcgacgccgacaactttgcgatggagtttgtgcgggcgctgtggctgggcctggcgctggcgctggggccggggtccgcggggggccaccctcagccgtgcggcgtcctggcgcgc

SEQ ID NO: 298116 - DNA, 122 bp, Homo sapiens
tggccacgccgaagccccgggagttgtggccgagcgtgtgggcgcccacccagtgccagccgcgtccctcgtacacgtagccgtccgagcccaccacgaaactgcagaggggagggagaagc

SEQ ID NO: 298117 - DNA, 122 bp, Homo sapiens
tcttttccatgaaaaatctctccttcggagaagagcttctccctgactggttgtcaaatacgcttttgattttctcacacaccgacttaaaaggcaggcggttcagggcaaagccggcaccc

SEQ ID NO: 298118 - DNA, 122 bp, Homo sapiens
ggtcagcctgctgcactgaaggcagtaagtgcacccagcagcctgggacaatgatgttggcgctgctggagacagggacaggtgcggacctggagaggagagtgttgtggtgtgaggctaag

SEQ ID NO: 298119 - DNA, 122 bp, Homo sapiens
tcaccctgtgaggtatgaagtgttgtcctctgcattcgacagatgaggaggttacagctgcgagactgtaggcggttgcccgggcgctcttccaagtaggtagcagggccgagtgaatgagc

SEQ ID NO: 298120 - DNA, 122 bp, Homo sapiens
ccaaggagtactcgggggctctgttcaggcacttgttaatgaaaacgaagcgaatcttgacgccttaaaccctgtctagcctacttgattccgggggtggggctgtgggaatcgctgcccac

SEQ ID NO: 298121 - DNA, 122 bp, Homo sapiens
cctccatagtgaaacaaagagtcctcttcgtggaaaagaaaaaaatacgctccctttaaacggtggattgaaaatgactttgatttataaagagaagactgagggcggggatactgattcag

SEQ ID NO: 298122 - DNA, 122 bp, Homo sapiens
ggtggctcaggaaaactataactaatatgtaggaaggaccagaatagaaaataagagatacggtgtccaggtattgacagtatctcaggtaccaagtgacaaggacccagacagtagttctg

SEQ ID NO: 298123 - DNA, 122 bp, Homo sapiens
acaagctaatgtgcgcggcatgcaaagtcgagccttctgcacctgccagtctctcctccccgctgctgccgggaactccccgcgatcccagatcggcctgcgctgccttcctccttccctat

SEQ ID NO: 298124 - DNA, 122 bp, Homo sapiens
cacgtgtgtctcccccctgtgatgccagtgtgggccagaacacaggtggcccggtcaaaacgttgggggttgtctggtgagttctgccatttgtaggagaactgagctcgctggtggtcctc

SEQ ID NO: 298125 - DNA, 122 bp, Homo sapiens
gcgggtcgcctcgccgctaggccccaagacggcgccgcctgctcggcagcaaagcccacccgccccgtcggcggctcagtgctgcacccccaccaacagccagttccggcggccgcacttcc

SEQ ID NO: 298126 - DNA, 122 bp, Homo sapiens
actccttggcacaactgacctctccactcttcgacaaactggcaagcgcttgccgccgttcgccaaaccttggtacgacagtcaatccagaaatgagcttctggaacaaatcctaaatcctt

SEQ ID NO: 298127 - DNA, 122 bp, Homo sapiens
tggcagcgcggtttctctctgccatagtctcggctgtgtcatggctgcatcccacgtgggcgacacacagtgccccagcgccaggcagcggggacaatggtccccagctcagggggttcctt

SEQ ID NO: 298128 - DNA, 122 bp, Homo sapiens
agtgagaggggaaatgttctaggcagaaagaacatttgtcccagatctggagctgggaagcggcagagttggggtgaggtgagcacagaagaaaacaggtcagctacatactgaatttggct

SEQ ID NO: 298129 - DNA, 122 bp, Homo sapiens
tgggagagagccagaggttcctcttcacaaaccgtattgggaggtcctggatacgggcatcggttccttggcaaagcttggaagccacccattaatcttgtactccctctgctggctttgct

SEQ ID NO: 298130 - DNA, 122 bp, Homo sapiens
ttcagatcaacaagtaactgtctgtgtggtatccgtcgacccagccctgtggcgtccagccgcgtacttttgccttctctggtatgaagagcagggatccctgtgctctgcaaccatccggc

SEQ ID NO: 298131 - DNA, 122 bp, Homo sapiens
gcacctgctggggacccaccgtgaggccccgggagtcggtgtgctggtgctggataccagcgctccttgagagtgccctgggcacagggaccccatgctcccatgagcaggggtgctcctgg

SEQ ID NO: 298132 - DNA, 122 bp, Homo sapiens
acctcgtgatccgcccgcctcagcctcccaaagtgctgggattataggcgtgagccaccgcgcctgggcagtatcgtgtttttattttcagcttctatttgttcattgctgacatacaggaa

SEQ ID NO: 298133 - DNA, 122 bp, Homo sapiens
gaggttttcatatactcgcgaactcgaacaggacagggcacacagatagaaggtagacagcgagcaattttcccctcttccttcttgactcagctcataggcagggctttggcttgataagc

SEQ ID NO: 298134 - DNA, 122 bp, Homo sapiens
acaggaacaccagagtcttttaaagactttcttctatttctctagcaatcaggaagtgctcgttttccaagaggaaaccaaagtttgactccaaaggggctgctgcatttagttccaaactc

SEQ ID NO: 298135 - DNA, 122 bp, Homo sapiens
gcgcgccaactgggctacaaggccaagcaaggttacgttatacataggatttgtgttagccgtggtggccgaaaacgcccagttcctaagggtgcaacttacggcaagcctgtccatcatgg

SEQ ID NO: 298136 - DNA, 122 bp, Homo sapiens
cgctgccataaccgcctccactcctgcctcgtgccccgcctccgcggtagcttcttccgccgccatagcccccaccgctgccgccgccgtagcctcctgagccgtagctgccgccgcctccc

SEQ ID NO: 298137 - DNA, 122 bp, Homo sapiens
agtgggactgagtcctcaacctatggcatctgacactacccaagtagatagtatgagaatcggattgaattagaggacctgccccccccaccccctgctgccaccaccaccacccagctagt

SEQ ID NO: 298138 - DNA, 122 bp, Homo sapiens
ggcgctgtgggccaggcccctcctctggctcctgcaccaccgcctcttttcgggctccgccggctcccgccgtccctgcaatgccgctctgtgcccgccgtcctgagagcccgcgcggcact

SEQ ID NO: 298139 - DNA, 122 bp, Homo sapiens
ccctgtggcatttcagggcgcccagccaatagcaatcagcagtgctgactgtaactgcaacgtgatagaaatagatgatacccttgatgactctgatgaggatgtgatcctggtggtgtctc

SEQ ID NO: 298140 - DNA, 122 bp, Homo sapiens
atttagcagtcactcaattaaaacaagcaaatgaattaattctgaggcaattgtgttgaacgtgactggagacagttcacaatgtctggtctgcctttaatagacgcagttgacatgagctc

SEQ ID NO: 298141 - DNA, 122 bp, Homo sapiens
ttaatgtactggtttgcagaagaggaaatctgattttcagtgtgataacatattctttgacgttaaccagtacagttggatttttaatgacactttaatcttcaaaggtttaccaacacgga

SEQ ID NO: 298142 - DNA, 122 bp, Homo sapiens
ttgactgggattgcagctggacgtatttaggttcaaaacatcctcctcctggctttcttccgctccactctttggtcaggaagactggggcggggtaccccccaacccatgccctcaaattg

SEQ ID NO: 298143 - DNA, 122 bp, Homo sapiens
gcctcaagtaatccgcttgccttggcctcccaaagtgctgggattacacgcatgagccaccgtgcccagttagattctgcatttctaacaagctttcaactgatgctggtgctgctggtctg

SEQ ID NO: 298144 - DNA, 122 bp, Homo sapiens
aggagaggacgagcaaggacgggacggaaaagcacgtctggctgcgagggcacacagggccggggaggaggattaggctggactgatcgcgggtcgcaggtgaccccgggaccagatgtccc

SEQ ID NO: 298145 - DNA, 122 bp, Homo sapiens
cattagcagcctggtctgtactgcagtcaggggagctgtcctcccttggtggtgctgaagcgagacagagaagtgactgtaagttggacagtggagggatgggtactctttccctcctgtga

SEQ ID NO: 298146 - DNA, 122 bp, Homo sapiens
ggagatgtgaggtaattctccggcaggcctgcgtggcactagtgcgcatgcgtaaaggcgcgagggctacaaacgcggcgggaagcccgccagggccacgtgcggccgtccaggcttgcgat

SEQ ID NO: 298147 - DNA, 122 bp, Homo sapiens
aggagagcagctgcgggcgcgccagggcgctgacagtctggctcttggaggtaagatgggcgtggctgatcccgaactccgcctgcgtttgcagaagcgaagggaaccgagcgagcggagct

SEQ ID NO: 298148 - DNA, 122 bp, Homo sapiens
gctgggctggctttagtaggagagcgaggccgcggcgtggaacctgaagctagaactgagcgaaccggcggaccgagcgggaaggaggagagccgcgtaggaggaggggttcgggggcggag

SEQ ID NO: 298149 - DNA, 122 bp, Homo sapiens
gcatcattaagggctgccctctctgaccactcgatctgtagagggaggtgacccttctaccgaattgaactaaggaacctgctgatgagaagcgacatcctttgcacttgaagctctgaccc

SEQ ID NO: 298150 - DNA, 122 bp, Homo sapiens
gtaagtcccccatttcaaatggggcagaaggcagaggagcagaggagccactgtgcctttcgctgtcctggagccagttggccttctggttttggtgaaccctgcttttataagaggactcc

SEQ ID NO: 298151 - DNA, 122 bp, Homo sapiens
ttaaggtcgatttacatgacctccggctacaactaagacagccgaggagggcactccagtcgtcagtcggccaaacccacaattaaaacagccctccccctagtctcggtgtgactagggct

SEQ ID NO: 298152 - DNA, 122 bp, Homo sapiens
gaaaacccctgcagagacagctcagatccagagctcctcacagagactgcctcgtaaaggcgtcatggcccaactcccccggccccatcctgcctgcctccacgcggatctccctcacagtc

SEQ ID NO: 298153 - DNA, 122 bp, Homo sapiens
ggctagcctggtagagcctttttatttaaaagctttccatcggccaggcgcggtgtctcacgcctgtaatcccagcactttgggaggccgaggtgggcggatcatgaggtcaggagatcgag

SEQ ID NO: 298154 - DNA, 122 bp, Homo sapiens
cgagggcccgccatgagacgctcggggaaccagactgccgagcccccctctctgggccgacgccagcccggctgtggactggagaaaaccgcaaggccacctgcagaaagaaaagaaggcca

SEQ ID NO: 298155 - DNA, 122 bp, Homo sapiens
aaggggacgcggctgggcggggcggtgactaaggtgaggggctgctcgcgggatccgcaccgcgggagcagctcggaggggcggccctggggggcaagggcgggccgcggggcggcgacggg

SEQ ID NO: 298156 - DNA, 122 bp, Homo sapiens
ccgaggcccgcgcctcccgcccgccaggcccacttccggccgcctgcggccgcggcccgccggggaacggcctagagattcgaaacctttcaggccgaccccagctcgcccgcctccctccg

SEQ ID NO: 298157 - DNA, 122 bp, Homo sapiens
ttttttatttactccagagcatcagctatctattgcaacattaatgctgcataaccactacgccaaagtccagtgtcttttaaaagactatttttttctcatacatctgcaggtcagctaga

SEQ ID NO: 298158 - DNA, 122 bp, Homo sapiens
acgtggagcggagggaagtgacagtacagttagcgatggccgggctgttctgtcccaatacgcctcctggacaagccgccccgccgggtcgccagccctggagctcggcccccggccccaga

SEQ ID NO: 298159 - DNA, 122 bp, Homo sapiens
gggagcagccagagtaagtagtctctgtgagtgggccagaagctggagcccggggactgccgagtgggagctgcacggggtggcgggaaagttcgggcctaacggcgagagtcaaactttgc

SEQ ID NO: 298160 - DNA, 122 bp, Homo sapiens
gaccaacccgccctgacgcctgtaagaaaacgactctcacttttcattggctgaccctcccggagttgagaccttgcttcattttccttggttgttgctgctgtcacgtcttcccgccacgc

SEQ ID NO: 298161 - DNA, 122 bp, Homo sapiens
ctcacgtgtggcagccttcttctcagcacactgctctggcttggcagcagggttaacttgcggacaaggagcgtggtgtcagcacgtgcctggatacatgagatggttgaccagagagcaca

SEQ ID NO: 298162 - DNA, 122 bp, Homo sapiens
gcccggcgggcccaggagggcccggtggcggcgccggcgtacgaagctacccggtgatcccggtgcccagcaaaggctttgggctcctgcaaaagctgcccccaccacttttcccccatcct

SEQ ID NO: 298163 - DNA, 122 bp, Homo sapiens
ctcggggacgccgtgaggaaagcccagcgacgccgggccagggccagggccatggtccgccgcgggccgccgaataaccgctaccactaccgccgccgccgcctacatcccgtaaactttcc

SEQ ID NO: 298164 - DNA, 122 bp, Homo sapiens
gggaactctgagcccccacagggtccggagggctcgactccagccaccgcatgggggtcccggccacacgactcctggagagccctggtcccagagctggcactgtcgtctggcctcccgaa

SEQ ID NO: 298165 - DNA, 122 bp, Homo sapiens
gctgaccctatttctataggtacctccctcatttttgtaggatggctccaagtcagccaccgagactgccccctctgcactaaccattagccagcactaccaggattggccagcttgctctg

SEQ ID NO: 298166 - DNA, 122 bp, Homo sapiens
cgcggcgcatgcgtggcccggggtctcggggcgttgctgggaaacatctgccgttggttgcggcgggcaccggccgacatggcggcagcggtggcggctgcgctggcgcggcttttggcggc

SEQ ID NO: 298167 - DNA, 122 bp, Homo sapiens
cctccctgatgtccctgccatgtgtcccacacaggctgtggcatgggagacaaaaggccacgctgaagtccacagggctctaaggcagcccctgcctcctccgcctgtgatttgctagtgac

SEQ ID NO: 298168 - DNA, 122 bp, Homo sapiens
ggacagaaattgtacatggcccacaaagccccacttaaaaggaaacatttgctggccgggcgtggtggctcatgcctgtaatcccaacactttgggagccctaggcaggcggatcacgaggt

SEQ ID NO: 298169 - DNA, 122 bp, Homo sapiens
agactggacaacatagtgaaacaccatctccacaaaattttttaaaaagccagatgtggccggccatggtggctcatgcctgtaatcccagcactttgcgaggccgaggcagatggatcacc

SEQ ID NO: 298170 - DNA, 122 bp, Homo sapiens
agcttcagcggagacgggcttgtgtgacaggagcgccaggtcagagcacagcgccagcctcgcaggcactgcctttgggacagtctcagccagcatggctgcctgagcggggaggaggagat

SEQ ID NO: 298171 - DNA, 122 bp, Homo sapiens
gtgctgagaatcatgccttgaaatctagcagctctgttaaaaactgagcaaggtgtacttcggggttgtgttgagaaggttggtgttcagctaaatcaggagggaaggccaaggaaaatcag

SEQ ID NO: 298172 - DNA, 122 bp, Homo sapiens
tacagctatcccacacttctggcaacaggttctaaaagtggatgattgcggccagtggcccgtgatcccagcacattaggaggccaaggcgggcggatcatctgaggtaaagagttctgaga

SEQ ID NO: 298173 - DNA, 122 bp, Homo sapiens
gggcctgatttgcaggaggtgcccagtgaagaaagccttgctcagggtctctcggagctgcggacagggtcatcatgggggcagccctctcctctggggtctcccagtccctccctgcccaa

SEQ ID NO: 298174 - DNA, 122 bp, Homo sapiens
ctttgttgtaggctaggctggcagctccagaaggctgagaacagcccacacacacagttacggagtgagtaggcttttccagcagagccacattctttaagacaaagacccgccagaaaagc

SEQ ID NO: 298175 - DNA, 122 bp, Homo sapiens
ccatgcgtccggtagcagcgcagcgagcagtagggcgcattacagcgagggcaggtgtaacgcgctggctggacctcccccgccgggcagaagccacagggcccggccggctccatggcaac

SEQ ID NO: 298176 - DNA, 122 bp, Homo sapiens
gctgagaaccctcagccgagcacagggctgcttctgcaggcaaaacaaagcttctcccttcgttcctcggaagcttccttcccgggaaggaaggacaagccaaggaacagagcttctcttag

SEQ ID NO: 298177 - DNA, 122 bp, Homo sapiens
gtcggccgccgcactggctctttatgtccgtaaaaacgcgactttattcctgcaggtccacgaatcctcctcgcagggctcgcagccttcgccggccgccagctctggctacgaatcctcca

SEQ ID NO: 298178 - DNA, 122 bp, Homo sapiens
gagtctgggtaggggcgcggggcgggggcagctgtttccagctgcggtgagagcaactcccggccagcagcactgcaaagagagcgggaggcgagggaggggggagggcgcgagggagggag

SEQ ID NO: 298179 - DNA, 122 bp, Homo sapiens
agcgcccgggccgccaggaagatgctgagtaccaggctttccgggaggccatcactgaggcggtggaggcaccagcagcggcccgtgggtccggatcagagaccgttcctaaagcagaggcg

SEQ ID NO: 298180 - DNA, 122 bp, Homo sapiens
tctgttgcttcccagccccaacttcaactctccagctggtgttcagcatcaagttcagaacgtaagcaccctgcaccccaaaaacccagcaagttttcccttgccacaccaagctcccagat

SEQ ID NO: 298181 - DNA, 122 bp, Homo sapiens
cttcacacaaacaaacttgctcccctctgagacataagctctgctctgggctctggcacccggtgggagaggcctcttaaggaaatcagaagaaaagcctcagctcctcagtggctgagctg

SEQ ID NO: 298182 - DNA, 122 bp, Homo sapiens
aaacacacacatatctgtgatgctatggtcaaaagaatttccattctacctcaacatcaacgtgtaatatagtttaaagcaaaaagaacagttaaaagcgggagagggagcagaagtcctgg

SEQ ID NO: 298183 - DNA, 122 bp, Homo sapiens
cgcgccagcaaaaccacgcaggcgtcttgtcgcttccgcctcgagcgtgtggcgggattgcggaagccctccacagttcataaccgttggctggttatgaaccgttcataacgggcgttaat

SEQ ID NO: 298184 - DNA, 122 bp, Homo sapiens
agacgggcccctcctccgcagctccagcaccctagggcctgaggaggcgggagactcgcccggcccgcctgggggcctccgcgctctgagcgcctcctgcagccccactctcaccgccacgc

SEQ ID NO: 298185 - DNA, 122 bp, Homo sapiens
cttggtctcgcctctttggcggaagaaagcagcacccacacagtgtgtaacatctgatcccggtccagctcccgcgggctgggctctgcccgttgtgagtggccgacagctccgccagcgcc

SEQ ID NO: 298186 - DNA, 122 bp, Homo sapiens
gtgcaatcacccaaagctctgtttacaacccgaaggcagctccgtctgtaattatctgggcgccattaactgcgtgggagcagctctcaacgggtacaagagagataccaccagaagtgaaa

SEQ ID NO: 298187 - DNA, 122 bp, Homo sapiens
acccactgagaaatcggctcattattgactcagagggatgaacgccagatcctgactcaccggtaaccacttcctgcagaaatcctccagccctgttagaaatgcctcagccagggggactc

SEQ ID NO: 298188 - DNA, 122 bp, Homo sapiens
tgtttgtgtgggcttaagtgtgtgcctgtgtgtgcttgagtgcatgtgtatgcacttgtgcgtggcacatgtgtgcatacatgcttgtgtgtgtttgtgtgcacatgtatgcatatttgtgt

SEQ ID NO: 298189 - DNA, 122 bp, Homo sapiens
ttcagcatgttgaagcatgctgtttggctgttttagaagaatgtttttcttagatgccatcggtttaccacaccacccttgactgggaaatggggctaagattttaataaattagccaacca

SEQ ID NO: 298190 - DNA, 122 bp, Homo sapiens
cttctcccccatgccttccctttcacgcttccgtcctgacgcaaacgtggggccgccttccgcactgcgggcttgtccttggccctgccctactcagtttcctgaagcatgcgcagttgcct

SEQ ID NO: 298191 - DNA, 122 bp, Homo sapiens
tgaccgctatcagaaatttggcctagtggcctctcatcagggaaatgagcttggtctgttcggttggagttgttccacagagttcaaaggacaagaatgctgtgtgttcatacactgagctc

SEQ ID NO: 298192 - DNA, 122 bp, Homo sapiens
caaaatgatgtgactctcctgtcactctctatccacaggtaggattgtgaagtatatcttcgttcaactcatcagtgagatagtaactttcatacctcaaaccaaccaataggagagacact

SEQ ID NO: 298193 - DNA, 122 bp, Homo sapiens
gcgcgctctctcactgatgcactcctttgctcccaccccttccacctcctcctgctgctccgaggtctgcctcaactgatgcgccagagaggactaacatgggtaaaaaacactctgtggac

SEQ ID NO: 298194 - DNA, 122 bp, Homo sapiens
gcaggtgcagggccctcccggccaggcccaggagccgggcgcggatctccacacagcccacgctcagcggctgcaggctccccagctgtgccagtgccccgtgtgctagagtccgcttcagc

SEQ ID NO: 298195 - DNA, 122 bp, Homo sapiens
tcaacaccaccctgccctgtggtgggtgggtgcaggtggtcgtgggtggctgtgatgctccggctcccacccacaggcaccatgactcctgtgaggatgcagcactccctggcaggtcagac

SEQ ID NO: 298196 - DNA, 122 bp, Homo sapiens
cgcgtccgcgcggcctctgggctatttctggccaggccgcagcactgtggtcggtgcgggcgtggcaggggcggggcggccttatcgctcggctctcccgcctacgcctcccgctgcagagt

SEQ ID NO: 298197 - DNA, 122 bp, Homo sapiens
cggacaaaggagctatttgatcagggggtatggtgtgtgattgtaagaaattcagctagtcggtggcaaccattgttccccaagcggctccctgaccccattctgttcctggaaaaactccc

SEQ ID NO: 298198 - DNA, 122 bp, Homo sapiens
tgaagggctgcccagcgcccactgtacaaggcacacggctgactaggacgcaggggccagcgactgggccccacgcagccccccaaaacagacttccattcacaccgacttccatccacacc

SEQ ID NO: 298199 - DNA, 122 bp, Homo sapiens
gtctccctgactttgactttgccccacctaaggatatatgtagctgagtgtcaaagctaacgttacgtggagcaaaggaggattcttctgcatagctcaaaagccacacttcctgtttcaga

SEQ ID NO: 298200 - DNA, 122 bp, Homo sapiens
aggtggactcttattcttctcttgaatctgggctggcttagtggcttttttgacctaacacgacgtgatggaagtcactcctgggactgcagaggctacattatatgaagttttgtagcttc

SEQ ID NO: 298201 - DNA, 122 bp, Homo sapiens
ggaggaagttgtagttactttttatgacctagtttccagacttgcacaccacctctttcacgttattctgttcattagaatgagtcacttagtccagtttatattcagggagaagggaatta

SEQ ID NO: 298202 - DNA, 122 bp, Homo sapiens
ccgtgaagtagtcgaggcagatggcgcaggtggcctcctcctggaggttggtggacaggtcgggggcggccatggcgcggacagaggggaggaaggcggtactgtccgcggggcggcggcgg

SEQ ID NO: 298203 - DNA, 122 bp, Homo sapiens
tgaagccctcgggatctgtgaacctgctctcgcccttgctgctgtgtggtgcccccagatcgaggcctcggctgtggccctgtggggctccggggctgactgtgcaggtgccagcctgctcg

SEQ ID NO: 298204 - DNA, 122 bp, Homo sapiens
cggttcctctgggtgcttccgcctccccttctcctgcttctccagcctcttcggcctcctcgcccgccgcgggaacccgagaccccagtgtatgccccacccctgaccccgctcgcgacatg

SEQ ID NO: 298205 - DNA, 122 bp, Homo sapiens
tccgcagcgggagcctctctgcaccaggattctctgacctggtcactgcctggccctgtgcgcgggtgggcgcgagcttcacgcgcactcacagccagcccggcactccagggcccccataa

SEQ ID NO: 298206 - DNA, 122 bp, Homo sapiens
gcagccaggatcagatctggccagatggccccacggcagagatggggaaaatgtcaccttcgaatcctaagaagctaggctcctgtgctttgccaaaggcctcgtgggcagcagtctgtagc

SEQ ID NO: 298207 - DNA, 122 bp, Homo sapiens
ctgctgcgccctccctcggcccgccgctcggagacgccccgccccgccccaccccgcccccgcgcccacgtgactagcataggcccgcccccgctccgccccccgccacagactccgcctcc

SEQ ID NO: 298208 - DNA, 122 bp, Homo sapiens
gctgaatggagctggtcgctggttgctacgagcaggtcctctttgggttcgctgtacacccggagcccgaggcttgcggcgaccacgaggtgagataccgcgtagttagagacagtcggagg

SEQ ID NO: 298209 - DNA, 122 bp, Homo sapiens
taattgtgtcagagtgtccatggccacaataggatatttcagggcaatgtataccaccatcgtggagtatttaggcaaaggtatagttctgatggttaaagtgaggcatacctatttgttgt

SEQ ID NO: 298210 - DNA, 122 bp, Homo sapiens
ctcagactggatggacttggatcaggaaggagcatcctaacaaaccgttaggaacagccccgtggatactgaagttttttttatggtagttacaggaaacttctgatactctttttattatt

SEQ ID NO: 298211 - DNA, 122 bp, Homo sapiens
ggcagccggatcaaagccggggccgcggcgctggagggagtggggttggggagcaggctgcgctcccccggggtcggggcacccaccagggttcccgctcaagcatctagggtcagactggg

SEQ ID NO: 298212 - DNA, 122 bp, Homo sapiens
ctctgcttgggtgagtggccgctgggccgcgctggccgcgtggatggcgagggagatgggcgctggcgtcacccaggtggccagagggacatggtcctggaccacttccagagtgggactcg

SEQ ID NO: 298213 - DNA, 122 bp, Homo sapiens
ccctgctgaagcatgtgtaccttttccctgtgatatacaaaccctgggtctgggagttgacggtgtggggatgcaccgcctcaaggccatccgagacatagcttctgttttcaagtccccat

SEQ ID NO: 298214 - DNA, 122 bp, Homo sapiens
ccaacgattggatggcgaggataaaaccgtcgtccaatgatcctgcagtcaccaagttgtcgttagcaggggttcacggcagtcgttttcttccgtttgcttgtgtctttggaataaaacgt

SEQ ID NO: 298215 - DNA, 122 bp, Homo sapiens
cggggtatgggctcgatggcttatgggaaggatgtaaccaacattttcggggtatgggctcgatggcttatgggaaggatgtaaccagcattttcggggtatggactcgatggcttatggga

SEQ ID NO: 298216 - DNA, 122 bp, Homo sapiens
gggggactggccagacattacacagaatgaatttttgatttttctttagttgtgatgttacgtaaatatttcaatggggggtctcatcagaatataaatggtatacttaactgagagtaaca

SEQ ID NO: 298217 - DNA, 122 bp, Homo sapiens
cagccctcatctgtagctcccttgtttgttctgaagataatatattgattgtgtctctttcgatggcattccttccatgcttctcacatgaggaagagttactgctgttttccccaggagac

SEQ ID NO: 298218 - DNA, 122 bp, Homo sapiens
cgtgaggcctctgggggagatgtcagtggggccagctggtgactggcatatgctgaatgtcgatgcgtcttcctcctttcaggatgtcagcttgcactgctcagaatcaggagttacagagg

SEQ ID NO: 298219 - DNA, 122 bp, Homo sapiens
cttggagacggcgggtgccctggccccgccccgctcggactgacagcggcggccgcatcgcgcctgcgcagtgccctcgtcccccgcagtctctgtgcgttgaagccggagaccgcggcggc

SEQ ID NO: 298220 - DNA, 122 bp, Homo sapiens
tgtggtatcagccagtagaggtactggagcaccagaaacctgagttcccagtgatagaaccgccaatgcctcatggccatgctgctaaatccatcaggatagtttctttagcaggtatgtgt

SEQ ID NO: 298221 - DNA, 122 bp, Homo sapiens
gagctcttccttggtgtgcattcaggcaccaaaaagaagcattgaagaaataaaaggcaacggcactttgcttctcagtgactagacttgggagaggaaagaatttctgctgaaaaggatca

SEQ ID NO: 298222 - DNA, 122 bp, Homo sapiens
tgtggtcctcaggaaggccatgcagggcgcccacccggagctccccggggatggcctctgcgtgcggcctcatgaccttgtgacctgggtctggctctcaggagcaccaggcaggcagggag

SEQ ID NO: 298223 - DNA, 122 bp, Homo sapiens
tggcctggttgctgcaggagcaggccacggggcaggaggtggccggcggggagccccctccggcggcagacgtcacggccactccacctccaccggcccccaggggtggggagaagagccag

SEQ ID NO: 298224 - DNA, 122 bp, Homo sapiens
aagcagggctgggccggagggtgtgggtccatattaaagaagcaagggtcttcccatacccgggggacccctgacaaacctaccaggcctgaccaagtcattcattcaaccagcgtaggtcc

SEQ ID NO: 298225 - DNA, 122 bp, Homo sapiens
tctcaaacacacacaaaagaagagactagtgtaataactccccatgtatttcttcatgagcgtttcaatagttaacaaactgagcccagccagagtggcgtttttacagtatccatctgatg

SEQ ID NO: 298226 - DNA, 122 bp, Homo sapiens
ccctcccctgatgggatgggatggcctcactccaggaggagttgcgggggcagccacctccgttctcaggcgctcatcacaccctgaacgcggcgtgagcccctagctattgggcaccaagg

SEQ ID NO: 298227 - DNA, 122 bp, Homo sapiens
gcttactccttggcttaaagccactttaatctaggacgttgcggaagccagagtgtatgtcgattccattaaggaaagaagagaaatgcttatggaaacagtaccacctccatatccattgg

SEQ ID NO: 298228 - DNA, 122 bp, Homo sapiens
ccaaggtatcagtgtctcgtaggcgctgcacgaactcctcggcagaggtgcagcgctgtgcggtaccgatcagaaactgggcgacgtgccgctcgctcagccccaacaccgagtgcagctcg

SEQ ID NO: 298229 - DNA, 122 bp, Homo sapiens
gttaaaagatggctactgtgaggctaccacttcaatgtctgtcttctgtggctttcctctcgaggctgtggtgggagtttgttttgtattgctctccaatcacaatggagataatttgcacc

SEQ ID NO: 298230 - DNA, 122 bp, Homo sapiens
gaacggcgcccgccccgcggattgcccagcggatggcccggagacctcgccccgcccggccgcccctccgccagtccacaccgccaccccggccccgccgcgcgggcccctcgtacctggcc

SEQ ID NO: 298231 - DNA, 122 bp, Homo sapiens
aagagtagaagctagagcctcggcaatccatttccacattgaagagggcctgcagattgccggagagattaagaatcactgtgttgtttgaattagtcatagttcttatattccaggcttgt

SEQ ID NO: 298232 - DNA, 122 bp, Homo sapiens
ggaagggtgggcggggccggggttgaggtttttccgtgcacgaggctgcccgggcggtcgcggacatcatctttaggctgtggatgccttggccggggtctccagacgctgaccctccaggg

SEQ ID NO: 298233 - DNA, 122 bp, Homo sapiens
gtacctgcctcgcactctgtgcagctggtgtcctggctcctggagtggcggtggcatcctcgtggggatgggggtggctggcgagtggccgtcggatgcacccctgcctcacacagccacag

SEQ ID NO: 298234 - DNA, 122 bp, Homo sapiens
atgtgttacgtcacacggaagctccatgaagaagtgaacacctgaaggcaccacagaacccgagtgtttcttacggcaggcagctcgatggggaaacgtgattgggtgagtgtttcttacgg

SEQ ID NO: 298235 - DNA, 122 bp, Homo sapiens
ggaaagggaaacaacatccttcggtacacttcttgctttctgggccctcagagaagggatcggtctgggagaaagggattgtgtatccaaactggacacctccagccagccagaaaagagga

SEQ ID NO: 298236 - DNA, 122 bp, Homo sapiens
cgctcagccctgcagtgcggaggtggcaacaggttcccatttgtcctgttgctggcgctgcgggcgctgtgggccccgagcactgagctctgactttggaaattgagcccctcatggcctcc

SEQ ID NO: 298237 - DNA, 122 bp, Homo sapiens
ttggggacaggggaccaagctggaggaagagttcagggaaccactgtccattcatggttacgactaagagcacggctgctggagtcaaacttgacttgaatcctagcttggccgcacatatt

SEQ ID NO: 298238 - DNA, 122 bp, Homo sapiens
acaaatttgaattaaaagggaagcacaatcagagaattactgaagaggaatatgtaacaacgtgggaattcagcttgcctgctgctagtaatcagactgacatccataacaatcattcagag

SEQ ID NO: 298239 - DNA, 122 bp, Homo sapiens
gacgttttctcaactgcaaaacaggagtaactggagcaacctttcgtggagggtgccaggcgctggagcgtggctaaggcagggaccacgtcccagccgccctttcccgccctgcggcgcag

SEQ ID NO: 298240 - DNA, 122 bp, Homo sapiens
tcggctcggctctggccaaggagcagctctgggaagcaacgggaggtgaggcagcttgttcgaagcctgctggtcaggatggagtcggatctgaactgtggccgtctgacccccaagcaggc

SEQ ID NO: 298241 - DNA, 122 bp, Homo sapiens
gcagagagcagcaaagcgcgcacgcagcctccgcctcatactccgcagtggcagagctggcgcacagaacacccgccagccggccgtgcgcaggcgcactccgccaagtcccgacgggagct

SEQ ID NO: 298242 - DNA, 122 bp, Homo sapiens
gacttggggacagctgtggggacacggcccagatgttctggtcccagcagaagtgactggcggggaccaggtgaggtgatgaggtctggtagtggggctgagggaaggggtcttccccagac

SEQ ID NO: 298243 - DNA, 122 bp, Homo sapiens
ttcttcaaaatgaataacaagaacattcagcccccttcattctgccctttcaaggtctaacgtacttgaaggggcaatacttgtagcatttgccacataaatgccaggtagtgtctttccac

SEQ ID NO: 298244 - DNA, 122 bp, Homo sapiens
tgggcgagttctctctggagtaggtgaccttctttctgtgtcatcttcgtattcctcagccggttgtggacgtgaccggatcagctcagacactggcctcattaactcaatataagttggag

SEQ ID NO: 298245 - DNA, 122 bp, Homo sapiens
ttctcacagggaacaaacgaaccgtcaattaccgaggaaaggtttgctgcgtgggtaactcgcctctgtgcaggaagaacccagaagccctgctcctgctgaggttgtaactggacctgtag

SEQ ID NO: 298246 - DNA, 122 bp, Homo sapiens
tgctccggtgcccacctgcgccatgggggggctggcccagggcccagagcgtggcgacaacgctgggcgtggtcctgccgtgcaggccccggggctctctctccctgacctcgccttgtgtg

SEQ ID NO: 298247 - DNA, 122 bp, Homo sapiens
gtgtgtgtgagtatgtgacggagtatgggagagagagacacgcacccaacctgaagtcggcgtgtgagccttgggtgtggtgtctgatacccacagatgtttttcggcagctttcaaagtgt

SEQ ID NO: 298248 - DNA, 122 bp, Homo sapiens
cggggggtgggattgaatgaaaagtgcaaaacacaggctcgcagcgctggagcccggggccgcggagccgggccggggcagcgccgtctccgcctcggggccgccgggggcgccctgctgag

SEQ ID NO: 298249 - DNA, 122 bp, Homo sapiens
gcgggccccacgctgggcctggaggttggctggtggccctcccagctgcggaggtggggtcgcccttttcctcagtctgtctgtaggtttccacgtgcccctgatcttcgtgttggccgcgc

SEQ ID NO: 298250 - DNA, 122 bp, Homo sapiens
gtgcctctatgacaaatagcctgagcagctgcacctcgccgaggtgccaaacggatgaaacggggtcactttgagaaactgcacacgatgtgcctgatgcacggtaggtgctcagtacgtgg

SEQ ID NO: 298251 - DNA, 122 bp, Homo sapiens
tgttctctgggacttccttgtgtgttagagactcgagcaagaccctttcttgtctatccccggacggacccgcctttcccgcatctctgggggtgaggtcggctctcgttcaggcctgcagg

SEQ ID NO: 298252 - DNA, 122 bp, Homo sapiens
gcagtgacgtcagtgtgcagggggatggagcaaagccagtcaccaccttggagctttttgcgaaaccatcggtgccagtgaagtgatgtcggcaatttctgccagtcagtctgaggggcggg

SEQ ID NO: 298253 - DNA, 122 bp, Homo sapiens
gtgccacagtggataacatgctaccttagtggcctggaagaaggcttctctgtcaggaaacgatctagagtagatcagagccctggtgtagatgtgcacacgtgtgaatatgtgagagagtg

SEQ ID NO: 298254 - DNA, 122 bp, Homo sapiens
ctttttttagggaggaggatgtcattagttgcaacgcctgacctcatccagtacatagtccggaaaatgcaggttgcatacttgtaaaccatccagcttgcagggcatccgagggtactcat

SEQ ID NO: 298255 - DNA, 122 bp, Homo sapiens
actccgtgggacttggagccatggcgggcccactgcaccgctctctgaaagctgggagggcggaaatcacaacacggtgttggaaccccacacgattcctcctggactaaggctttcttggc

SEQ ID NO: 298256 - DNA, 122 bp, Homo sapiens
gcttggctctgtgccccgtgtttctgagcctgctctatttacctcttgcattgtggctctcgctctgtctccgcctgcctcgtatcctctgcctgcctttgtatctctgccccgggctcctc

SEQ ID NO: 298257 - DNA, 122 bp, Homo sapiens
atgatctccccagccccgagccccggggctggctagggccgggcgccgggttacctccttcggcccggcgggccccacctgagcttttctcacccgctcaaagccgctaccaccccgcgccc

SEQ ID NO: 298258 - DNA, 122 bp, Homo sapiens
gttctggaccttcgccctcggaacacagtgctgttggccgggactccttcccgaggtggacggctccctgttcttattcctggctctgccagaactgtaggaagtgctcagtacactttagg

SEQ ID NO: 298259 - DNA, 122 bp, Homo sapiens
ccctgctaactggctgcttgttttccggtgcaggtgcttgaggaatccaaagccctcgtgcgctgcaacatgaagatggagctggagcaggccaacgagagggagtgtgaggtgctgaagaa

SEQ ID NO: 298260 - DNA, 122 bp, Homo sapiens
agcttatgaaagggagaagagtgaaactgggatcttccgcacatcagcgtttggggatggcgccaagggccgttcagctcaatatgcctgaggttcatacttggtttctgctgcacaaggag

SEQ ID NO: 298261 - DNA, 122 bp, Homo sapiens
cctgggctacagagcgagagtccatctcaaaaaaaaaaaagaatagggcttggtgccgggcgcggtggcttacggcttacggctgtgatcccagctctttgagaagccaaggtgggtggatc

SEQ ID NO: 298262 - DNA, 122 bp, Homo sapiens
ttttgcaccttttcttctcttgagttccacatcagcaattccccagtgctgctcccagctcgagaaatatccatcccagagacctccttggacgctgctgttaggctcaatttttcgcggct

SEQ ID NO: 298263 - DNA, 122 bp, Homo sapiens
gctccgcccccgcgcgccccggccccgcccccgcgcgctctcttgcttttctcaggtcctcggctccgccccgctctagaccccgccccacgccgccatccccgtgcccctcggccccgccc

SEQ ID NO: 298264 - DNA, 122 bp, Homo sapiens
tcgggtcccccgactcttagtacatgggcaactgcgggtgattgaacacacttttctggacgatagaggccaaagtcccccttggaaaatcaaacctttccataatcttgataactctccag

SEQ ID NO: 298265 - DNA, 122 bp, Homo sapiens
cttaagggatgaacacctaaatgatagatgaatgagagataaggagaacaatggccaatgcggttgcaatactgtgcaaaatggcagagtctgcacagaagagaactcatatttttacttgc

SEQ ID NO: 298266 - DNA, 122 bp, Homo sapiens
aggggcgggagagcggccatgaagcgaagccgcaaacgcttgtcagctgcctcccggcgccgcccgcgctgctcccattgtcaccgcctcatacgccggaagtggaactgcgcgcgccaggg

SEQ ID NO: 298267 - DNA, 122 bp, Homo sapiens
tgggaaccctgcggggtgaccacagcacgtgacgggctctgcagagctctgggaaccctgcggggtgaccacagcatgtgaagcgcactgcagagctctccaaacccgtcagggtgacaaaa

SEQ ID NO: 298268 - DNA, 122 bp, Homo sapiens
tgctcactgcagtgccagacagacaataaacaattacatgcagtggattaagtgtcaaaacggaggtagtacaggatactgtgtgcttagagaggaggaaatgactcattccagtatttaag

SEQ ID NO: 298269 - DNA, 122 bp, Homo sapiens
cctttttatctgtactaagtttcaggagcagaatcttcgttaaactgagcagagcaagagcgcgctgcccacagggctggggcgggcgcacgggcccttatgtaaggccgggccttcccggg

SEQ ID NO: 298270 - DNA, 122 bp, Homo sapiens
agacacagagagaatcttcttgggagtaaaagcgaaaataacaacaccgcaagacagaatcgtaggaagaagaaccaacagaggatgacaactctttacctgggattgacgttgtgtgaggg

SEQ ID NO: 298271 - DNA, 122 bp, Homo sapiens
gtcgggctcatgattccccggccccgcattcaccctcacccggtaaccccgggcgtgccccgcacacagttcacccccaccgagcgcctcccccgggacgcccaccacccagcgcggccgca

SEQ ID NO: 298272 - DNA, 122 bp, Homo sapiens
agccttccagaagcacggtcgctccaccaccacctccgacatgatcgccgaggtgggggccgccttcagcaagctctttgaaacctgagcccgcgcagaccagaagtaaacaggcaccttgg

SEQ ID NO: 298273 - DNA, 122 bp, Homo sapiens
ccctcaggagtgtcctttttgtctcactagtccactgggcacatagtactggttttatgacggagtgtttgccttcacttccctacctgcacagggttcagtcactactgtcttttgtcagg

SEQ ID NO: 298274 - DNA, 122 bp, Homo sapiens
gtttgaccatctatgaggtttttagaaacagccgttgctacttttgggagatctggctagcggtaaatgaataacatggtatcgagaacctaccacaagtcctgcatatttttatcttgcgc

SEQ ID NO: 298275 - DNA, 122 bp, Homo sapiens
taggtcactcttactcaccagaaagtcagcccctgagccgaagcagctgagtcctagatacgttttcccacagcaaaaatactaaatagaaactgtttgttcctggaccaagaaggaaagct

SEQ ID NO: 298276 - DNA, 122 bp, Homo sapiens
agggcaatttgcaaaggcccgcctagaccggctttccattggtggaagcgggaacacctccgctctccataggctcacggctgcgcccatcgcggctgctgctagagctccggtcacccact

SEQ ID NO: 298277 - DNA, 122 bp, Homo sapiens
ggtggctggcctggtgggggcgggggctgcttcttaaaggagccgtcagagggtccccagcggccccagggtgggaaggggccagagtggagagatgctgctgcggaagtcctcggtggagt

SEQ ID NO: 298278 - DNA, 122 bp, Homo sapiens
aacccggggaggtctggcctgcttttcctccctgaactggcccaatgactggctccctcacgctgaccactcctctgggctggcctcctgcactcgcgctaacagcccaggctccagggaca

SEQ ID NO: 298279 - DNA, 122 bp, Homo sapiens
acactgacctcagtcgtgcccgagggctgcatgttccgggtgtgtgcgtctcctttcctccgcacgttcattcgaatgtgcagagccacatcagccctcctccagcattcgctcacagggcc

SEQ ID NO: 298280 - DNA, 122 bp, Homo sapiens
tgtgcctccgtctcctcgccctatgagtcggccatcggagaggaatatgaggaggccccgcggccccagccccctgcctgcctctccgaggactccacgcctgatgaacccgacgtccattt

SEQ ID NO: 298281 - DNA, 122 bp, Homo sapiens
ccggaaaggggcggggcaaacgggggtctgtacaggtgtgtcctaggctcgaaaccccggcgacgaaagtccatagttagcggctttcttcctagcagaggctgatatagtggagctggggc

SEQ ID NO: 298282 - DNA, 122 bp, Homo sapiens
tacctctgacatagcggtggggggtggggatcgacacctcaagcattctaaagactggagcgctgggtctgaaattcaaaagtgccgcctccagagaagagtagaaaggagttggagtgtac

SEQ ID NO: 298283 - DNA, 122 bp, Homo sapiens
acttgcacacagacgcctcaagtcgtcctctttagagtcgtcacttagacctgcaaggggcgggggaccagtggaaacccaaacagaaactttcaccattacaaaggcgagtccccattgat

SEQ ID NO: 298284 - DNA, 122 bp, Homo sapiens
tgcgggtggatggttcggacaagtctcgaactcgccagctctgaccgcacacactgcatccgtgccagggaaagaaaagcctgggaaaggccagggtatggctgtaacactccaaggccttc

SEQ ID NO: 298285 - DNA, 122 bp, Homo sapiens
ctccaaccttattgaatctctccccttctttttgttatctggtcatttgatctataatttcgattccttttcctgaaattccctcctttttccttttcccctaaaccatcattctagtcctc

SEQ ID NO: 298286 - DNA, 122 bp, Homo sapiens
agagaatcgaacgcttgccgactgccgccgcgaccctggcccggaatctccttgcctgcccgctctccttagccgccgggatggctttgcggcgccaaccaatcgcctacaaagatcatttc

SEQ ID NO: 298287 - DNA, 122 bp, Homo sapiens
gttgtagccattcccagtctcaattttttggaaaactcttctttgcagatcagacaacagcgctatttctccaaaatgaattctaggtattactgccctgtcaccctttccattgctctaat

SEQ ID NO: 298288 - DNA, 122 bp, Homo sapiens
agagcaaagttggaagccagcctggggggtcagacagaccaccccatgccctgtgtccaccgcagtgggctgggtgagcactggctctccctctggccttggtcttctcctgtgcaaagcag

SEQ ID NO: 298289 - DNA, 122 bp, Homo sapiens
ggcgatctttaaacagcactggtctgctctggagctgcccgttctggggccctcgctgtccgcgggctgactgcgtgttgtcggggacacttgtggacactgtttctaggctgttctcacac

SEQ ID NO: 298290 - DNA, 122 bp, Homo sapiens
gttataccagaagcaaggcttactcacttttgcacagtttccagttctacacctccttctcgttcctcagtgtgattggtccagatagctgccttatccaactgcctcctttggaccacttc

SEQ ID NO: 298291 - DNA, 122 bp, Homo sapiens
caaactttctagcggcttcggcccgagggtggtgacgcccggggctggtcgcggcggctgcggcagcgggctccatcccctggcaaatccccttcccgggagcaagtgccttcagctgggag

SEQ ID NO: 298292 - DNA, 122 bp, Homo sapiens
gacagaaggcataacacaagattagaataactgcccaaagttggaaaatggaatattaaacgacccgtactgcatctatgttccttatactgtgctgggaccacaaaagaagactaagtcaa

SEQ ID NO: 298293 - DNA, 122 bp, Homo sapiens
gaactgccacacaccctccttcctcccacagtggttctgtgtttccagcctgtcacaagccgactcacacaaagctgtgctctaacctgctgggggtgcggtgccacttgccaagccctggg

SEQ ID NO: 298294 - DNA, 122 bp, Homo sapiens
gtgggggtggagaaaggggaagtggtccagaaacaaaaagccccattgggcatgataagccgaggaggcattcttctaaagcagacttttgtgtaaaaagcaaaggttacatgtgagtatta

SEQ ID NO: 298295 - DNA, 122 bp, Homo sapiens
gagctgaggacaggtcagtgagggcactaggctacaggaagaggcatttcctatagatgacggctgtaaaattttaagctgagttcctccaggaagtcatagagtaattagtggtttttttc

SEQ ID NO: 298296 - DNA, 122 bp, Homo sapiens
accccagaattgactggggaatgcctgtgagcgatgatgacctcacagggaacagctgaccgcagggctgggagaacagctgtgccccttcgaggctggattttagtggagggacacacgcc

SEQ ID NO: 298297 - DNA, 122 bp, Homo sapiens
agggggcggctgttgagggcggcggagtagggggcgagcgaaggcggtggcagagaggagcggaggcttcccatggggaacacgctgacctgttgcgtgtcccccaatgccagccccaagct

SEQ ID NO: 298298 - DNA, 122 bp, Homo sapiens
cgactccggccaacagccagtcccggtggacaccagcttcttaggggtcagcctccaggacgtctgcacaccctcccgccccaacggacctgttcacttcgaggcagctctgtgccacccgc

SEQ ID NO: 298299 - DNA, 122 bp, Homo sapiens
ggatcaaacacaacactaattcagcaagctattattgagcacttgccctaagctcagcaacgtactaatgggggagactacaataaagagccgaaaagtctatgaaactgtgtcttcagctc

SEQ ID NO: 298300 - DNA, 122 bp, Homo sapiens
ggtgagtgttacagttcttaaggcggcgcgtctggagttgttcattcctccccgtgggctcgtggtctctctggcttcaggagtgaagctgcagaccttcgcggtgagtgttacagctcata

SEQ ID NO: 298301 - DNA, 122 bp, Homo sapiens
cccgccagccccgggcagtacagggcttatcaccagggctagcagctgcggagggtgcgccgggtcccccagcagtgccggcccaccaacactgcactcgatttctccccgagccttagctg

SEQ ID NO: 298302 - DNA, 122 bp, Homo sapiens
atggtatgtacactccttgggcaatgcctcctaacggcttaggaccattccctgtcctcccggggcgtttagaataaaacccacactcagaccctgcctcacaagacccgacatgatttggg

SEQ ID NO: 298303 - DNA, 122 bp, Homo sapiens
cccggctctcgcctcactaggagcggctctcggtgcagcgggacagggcgaagcggcctgcgcccacggagcgcgcgacactgcccggaagggaccaccacccttgccccctcagctgccca

SEQ ID NO: 298304 - DNA, 122 bp, Homo sapiens
gggggagggaaacggagcagtgacaggtatcccagagggtgctgctgaggcgacgatggccgaggggcccgaggaagcccgaggccaccctcccgggcaggacgatggcggaggggaccacg

SEQ ID NO: 298305 - DNA, 122 bp, Homo sapiens
aatactttttttcttttttaattttagaaatttacagacacttgcaagcaccccaaaagccgcacttcctccaaatatctctggactcccactgcttgacttagttttggggtcacctcatc

SEQ ID NO: 298306 - DNA, 122 bp, Homo sapiens
ggaagccaccgctaactagcagtcggaggcggcgttgtttctaagacaggcaggcagctccggcaggagcagccgctaagcacaaggacggccaaccacacaaagcctgcttctcaaccact

SEQ ID NO: 298307 - DNA, 122 bp, Homo sapiens
tacttttcagtgataattaacccttgctgacactgagggggctcagctttgtcctccacccggttgaagagcacggacacccagaacaggactgtgaccttttgtagatttctctgattctc

SEQ ID NO: 298308 - DNA, 122 bp, Homo sapiens
ccaggaactacctataaaagcggccatgttttacatatttcttgattttgtttgttttctcgtgagcttaggccgctggttttggtgatttttgtctgattgcaatgtctggacgtggtaag

SEQ ID NO: 298309 - DNA, 122 bp, Homo sapiens
taaaagggtgcctttaatacaatatttaggtaggttgacctgactgcctaatttatatgacgaaatattaaagccctgggtactgtgaggatttcctagtactaaagtttgtccttatgttt

SEQ ID NO: 298310 - DNA, 122 bp, Homo sapiens
aacacggtttcccagagcttgacccttccaacagctactcccacaaacagggccaattagcgagtcctgctgatgaaggaacactctcagcagctccccttcccagctggttagcagccact

SEQ ID NO: 298311 - DNA, 122 bp, Homo sapiens
tggccgggcgctgacctgcctgtcctgtctgttttgtctcgcagtgaaccccaactacaccggtggggaacccaagcggtcccgaacggcctacacccggcagcaagtcctagaactggaaa

SEQ ID NO: 298312 - DNA, 122 bp, Homo sapiens
agaaaatggaggcacacagaattcaactgatttgcttaagctcttatagagtaggggtgccgagggactttgtggggttttagttctccttcatctccatctgcctcctcaagccacctcaa

SEQ ID NO: 298313 - DNA, 122 bp, Homo sapiens
tgcgaaggcgggccccgccctctgactgcggactacgcggcggcgcctgtgccgcagtagcgctggaccttggcctctggcggtctctggcgccccctcccgttcgcatcgtgaagctgggc

SEQ ID NO: 298314 - DNA, 122 bp, Homo sapiens
gaattaagtgaattagtacatgtaaagcactccaagaatgcctggcacaaatagagtaagcgcaatataagtgtttgccgtgatcattcgtggcaactttgtattattatcagctgagatct

SEQ ID NO: 298315 - DNA, 122 bp, Homo sapiens
gaagttctctgcggtctgttttggggactggcagattttacaacaggacagttcatacaacggagcctgagagaagattgtggccaaaccagggaaagacgtgaaataaagacagcagttcc

SEQ ID NO: 298316 - DNA, 122 bp, Homo sapiens
gcttcccgccagtcccctccagctcgggggtgggcaaagcgcccggagcccctacctaatcgtgcaaccatggaaaccagcccgccggctgccacagggctgccgactcaccagcctcgcgc

SEQ ID NO: 298317 - DNA, 122 bp, Homo sapiens
ttttaggaaaaaagaacaaacaccaaaccacaaaaactttcctgctgccaacagctaaagcgatagaggcgcagcaaagctccaaatgtgggcaagatgggagcaagatgagacgcggggct

SEQ ID NO: 298318 - DNA, 122 bp, Homo sapiens
ttgaagttcgagtggtcttttgcgtcttttgaatgacgtattttcctcactagctcctcccgtctccctgctcgtccgttctctctcccacgctgggcgcggttccatgcgcaccctcccag

SEQ ID NO: 298319 - DNA, 122 bp, Homo sapiens
gccaaattgaactgtagtgtctgagtgtacacatttgtgtaataaaactatacggaaaatcgtataggttattaccataaatgtcacaatagcagttacattgagaggtggaggaagtcatt

SEQ ID NO: 298320 - DNA, 122 bp, Homo sapiens
tattaatcagcagtaacagttgcaacaaaagctggttacaaacaatccatggaaataggacgtgaagatagacaactggttagacgagaaattctcagaaaggagtatgccttaaccctaaa

SEQ ID NO: 298321 - DNA, 122 bp, Homo sapiens
tacagcagaacccagggccctctgcgcactgacacggagcaatcccaggatgcactgacacggagcaatcccaggatgtggccactacacttggaagggcgagtcacctgcagccacctggg

SEQ ID NO: 298322 - DNA, 122 bp, Homo sapiens
tatagtaattagagttataccaacagagctgctcttatgtatactttgatttccctgagtcgtgtatataaatgacattggaaactctcggtgttatgaaccagcagattttacatatcaga

SEQ ID NO: 298323 - DNA, 122 bp, Homo sapiens
gacgcaaggcctgaaggcggggtcaagggtacaaccctggcgggggtggtgcccgtggggcggggcaagaaaaggggaagagcccaacggtattaacccctcggcagccgcggcgctgctat

SEQ ID NO: 298324 - DNA, 122 bp, Homo sapiens
aattgtggaaaggttgtgaagaagaaagggtgctagggattatataagggagggcctggccggatatgggccacagtggaagaattcctgcagaacgggcttttgagctgggctttgaaggg

SEQ ID NO: 298325 - DNA, 122 bp, Homo sapiens
gcttctggcgcgaatggagaaccaagagtttctaagttcatctgcgccgtccgaggtgaccgatgggcaggtctcaacagaaatatccacttgctccgaagtcttccagaagcccattgtgc

SEQ ID NO: 298326 - DNA, 122 bp, Homo sapiens
agaagccggatttcagcagagtgggtgcaggatctgctttaattctgctcatcttattctcggggaccacaccctgcgcgccgggaggaagggctccaaaaccacagggcggaggcttccgc

SEQ ID NO: 298327 - DNA, 122 bp, Homo sapiens
acccccgcataaaacgggcacaggtcctcgaagcatccccatccccgcccgcctgccatgcgagctgcaaggtctgtggctcccaccctcagacagtgcatccccaggcccgcgtgcggccg

SEQ ID NO: 298328 - DNA, 122 bp, Homo sapiens
accttgcgatccgcccccctcagcctcccaaagtgctgggattacaggcgtgagccaccacgcccggccaggattattattttaatgtaaagaagtagcaaatgtgttaagtttaccaagat

SEQ ID NO: 298329 - DNA, 122 bp, Homo sapiens
agcagtatcttctaagccctgggggcttccccgggccccagccccgacctagaacccgcccgctgcctgccacgctgccactgccgcttcctctataaagggacctgagcgtccgggcccag

SEQ ID NO: 298330 - DNA, 122 bp, Homo sapiens
ctgatctgtgaccctctgaccgccgcaccccggttagggcgcgagcaccgagaagaagaacggggttcggccccacgcgtgcagtcatgttcctattaataaacccggtgaacgcactggag

SEQ ID NO: 298331 - DNA, 122 bp, Homo sapiens
ctgtgtgtggccctggctccagcagccgcccccgtctgttctgggtggattttccccacccgaggtcactggtgcacctgggacccccctgccaacatgcccagcaccaccgtggcgcacct

SEQ ID NO: 298332 - DNA, 122 bp, Homo sapiens
agcgagaaaacccccgcccctggcgcgcacgctgggccggctcaggtgaagcggggcctgcgcccccgcgcactccccacgccgggagccgaggaaaccaaaaagaaagacgcggcctttcg

SEQ ID NO: 298333 - DNA, 122 bp, Homo sapiens
taactgctggtgttttcaaccctttcccctctgtgccatgtttctagcttttatttaaaacgtactttggttttccttggcaaaattgtgtctagctactaggatgacgtgtcttaattttt

SEQ ID NO: 298334 - DNA, 122 bp, Homo sapiens
tgccctcaaaattttctaatctgtgggaaacaggattatctccaagacttcaacatacaacgtttgtgcaccaacaacatatgtacagctaaggaaaatattctgtattaaatcatgggtgt

SEQ ID NO: 298335 - DNA, 122 bp, Homo sapiens
agtcttctcatatgtgaatggttggtaataatagggtttataatgccttttaccaattgtcgtggtgataattaattgaaaaatcatgtacaaataactccaaagagctggcatttaaggtg

SEQ ID NO: 298336 - DNA, 122 bp, Homo sapiens
aaaaggtcccagaggtttccaggccctctgcgccctctgcaaagggctgatttctacagtcgctaggacctgcagcggcgctgctcccgcggggctccggccgcgctgcatgtcccattata

SEQ ID NO: 298337 - DNA, 122 bp, Homo sapiens
aaagttgattgcctcaggaagctgcagagtcaacaatttcatttatcccttttcaatgttcgctgagttttgatgtgaacctttactaatccataaagaatgggaagtctacacgtttctgg

SEQ ID NO: 298338 - DNA, 122 bp, Homo sapiens
gctcatcaacctgctcagcatcttcccgcccgcccgcccgggagcgacgcggcggcgctgcggaccctggaccaggcgtccctcagcccggcagctccgcaccgaccccaggcacctgcacc

SEQ ID NO: 298339 - DNA, 122 bp, Homo sapiens
gaataactgcaaaatgaaattcacacacctggcacaatgagactacattgagtaatgcatcgtgactctagatttggaattagaccaacagggtatggatgatgagctgctaacatgtgatg

SEQ ID NO: 298340 - DNA, 122 bp, Homo sapiens
aggctgaggaccgggatgacatgctggggggatcagagcgatccgggagaacagcagggccgagggcgaggtgagggcccggccagcccggcggccacagagggcgggcggggtggcctctc

SEQ ID NO: 298341 - DNA, 122 bp, Homo sapiens
tgtccttgcccagcatccccggcctgcatctcaccaggcaccgccggccgcgccagggcccgagagggcagggtcaggcaccctggcactcagcccaggactgaagatgccagagggagcgg

SEQ ID NO: 298342 - DNA, 122 bp, Homo sapiens
cttgggcggggccaggctcagcccgccccggacccctaaaccccgccctcccggtgggtgcgacctctgacctaggctccctcatttagggctctggcaaccgtatggaattaaccctgcct

SEQ ID NO: 298343 - DNA, 122 bp, Homo sapiens
gcagcgttgccggctccccagagccaggtccaggcagaggtcgcgcccagcactgaccgtcggtcccaatccgcagactcccgagggcgatccaaaccgcctaagcatcccaagcgtccagc

SEQ ID NO: 298344 - DNA, 122 bp, Homo sapiens
tcctcgtccccgggctgcactggacacctggctcttttttactcagctccagaagcaccgcgggggcttgagccagttcccaaagaaaaaggaacggcccacctgacatccccagaaggaga

SEQ ID NO: 298345 - DNA, 122 bp, Homo sapiens
gcaaacttcacatgggtaggaatcaagtctgatttttttcaacagtgtatgcctagacagcgggcacagggcttgctggacacagaaggcaaggactcagagaatatccaccagatgaaaga

SEQ ID NO: 298346 - DNA, 122 bp, Homo sapiens
cccaagggtggagccctcatgacctaatcgtctcctgcaggtgccactttctaatactgtcgccttggtgattacgttttaatgtggattttggaagggacacaaacattcaaatcataatt

SEQ ID NO: 298347 - DNA, 122 bp, Homo sapiens
gccttcccaggtgggggaaggtggaacactgtccatcccctggacaaaaacgctgcgcctcggggccttgaacccggttttgtttgaaaggaagcaagagaaaataagtgtttttccattta

SEQ ID NO: 298348 - DNA, 122 bp, Homo sapiens
cttagtacagttgggaaccatacacttctggcatgtttggaaatcaaaatgtcacattctcgggggaggaagcccagaaaattgggtatgttctagagatttaccaccattgcttattgctt

SEQ ID NO: 298349 - DNA, 122 bp, Homo sapiens
tcagcgagctgagccgcatccctgccactcagctcacagacccccacccaggcagccccacggcccaggagatagctcacagctgccccctggcccgctcgagcagcacacatcagtggggt

SEQ ID NO: 298350 - DNA, 122 bp, Homo sapiens
gcaaaccagcgggttagtattgacaactggtgccggagggacaaaaagcaatgcaagagtcgctttgttacacctttcaagtgtctcggtgagtgttcttggttacttttcaggaagtgcca

SEQ ID NO: 298351 - DNA, 122 bp, Homo sapiens
ggagtaaaggagagttgctgtgcatattagctggcttttctaagtctcacaatccagtctcgttctagttcagtcttgcagctctggcaaacacagcactcaaatgacttcagagggacccc

SEQ ID NO: 298352 - DNA, 122 bp, Homo sapiens
gtcttgcgcctgcgccttgtgtcacgggccgaaggaagtcagctgtggggtagatttgtacgagatcgctggaccctaaggaacccagaaaatgcaagcaaggttatgtgttacaagacatt

SEQ ID NO: 298353 - DNA, 122 bp, Homo sapiens
accttggttcccatctcactcatatactgccgccgtacatgtcaatcagatgaacctgtgcgtatctcttaatgacaattgacccacatttttgactgaagtgaaagggggttctgctccgc

SEQ ID NO: 298354 - DNA, 122 bp, Homo sapiens
caccacccgagccaatggcggcggccgaggggcggagggggctggcaggaggggagggagcgctggctttagagccacagctgcaaagattccgaggtgcagaagttgtctgagtgcgttgg

SEQ ID NO: 298355 - DNA, 122 bp, Homo sapiens
tcccctgctcaaaactctctagtgattttccatctatttcagagtaaaagccacagtccgcgccgtggcctacaagtctctacatgaagtttctccctgttactcctatgatctcatgccct

SEQ ID NO: 298356 - DNA, 122 bp, Homo sapiens
tgtcatagagtcctaggaggtactacttgccccccacagtgacgctgactgcttagtggtcgaagacggtgggcacgtactcctccgggaaggcttcgttggcatagctcatgagtgggcac

SEQ ID NO: 298357 - DNA, 122 bp, Homo sapiens
atcaagcaggtacaattttccagatgagtagtgtgctacagagggcctcactgtatgttccgggaacattcctagaatatgcaggtgaagaaggatgaaacccctttcttgggaatcttgag

SEQ ID NO: 298358 - DNA, 122 bp, Homo sapiens
ccagatcacggagcaggaagcagagctctggggagcggcgtggggtcggcaccctgccagcggcgtgggctcaccatccggcgtgggctgtggctcagggacatcgccgggcggcttcatgg

SEQ ID NO: 298359 - DNA, 122 bp, Homo sapiens
tgagagattgtagtggatctgaagattccctgtcgcctggtgctgtggtggccatcgtcacgtcaccgtgcagtacgttactcgtgtgtgtatgtgtgtgtacgcacccgtgatgctggggt

SEQ ID NO: 298360 - DNA, 122 bp, Homo sapiens
gagctgctaggttttaagcgcgcccggaaacacgcctcgccaccacccagccaccaccaacggaaaatctgtcagtgcatgtagcccttcctgccacggagaaggtggccaaggtctagagg

SEQ ID NO: 298361 - DNA, 122 bp, Homo sapiens
cttgactgacacgtgattaacatgattgaaacgtgaccaatacgtttgacacgtgactgacgcgatttacgtaactggcatgtgtccaacacgtgactcacacgtgatcagcacatgtccaa

SEQ ID NO: 298362 - DNA, 122 bp, Homo sapiens
aattttctcttctattcataaagacatcttagaagtattgtcaagtgtcttagaggaacccgccttctccctcagctctgctggtggtcagcaatggatgcaataaagtggaatatgtggtg

SEQ ID NO: 298363 - DNA, 122 bp, Homo sapiens
cctggccgggctcctgtctgtcggtacgcctggccggtacctgagagggcgcggaagaggcgcgtggccggcagcagcaggtaacacaagcacgacgcgatcatggccggccgcccgcgccc

SEQ ID NO: 298364 - DNA, 122 bp, Homo sapiens
agccggtgtacgaaggtcgtgtgcctgccgaagagtgggtcccacacgcacagcgcgcgccgtaccaaccaagcaaggctcacagagagcatttagtcgtccagagcaaaggatgctgggca

SEQ ID NO: 298365 - DNA, 122 bp, Homo sapiens
gcagcatcctcaacccaaacttactctgacccacaccctgaaagtggctcagctccgcgacggccacggactcagagttcaggaggaacttgttacactgcccggaaggatgaaaaccgagc

SEQ ID NO: 298366 - DNA, 122 bp, Homo sapiens
caaggcttggcggccccgtggttgggcgtcccggcagccgcttgagggatggggcggggtcggccgggacctcctccttcattccctcggcgggccgagcctcccctctctcccgcccctcc

SEQ ID NO: 298367 - DNA, 122 bp, Homo sapiens
taaaatatgtaataaagaaaatggattattagtataagttagaatggataatatatggatcgagtttattatgtcttggattaaagatgagtcaactgtgatggataatagttattactctc

SEQ ID NO: 298368 - DNA, 122 bp, Homo sapiens
tggccgcactcaccgccttcctggtggacgggctcctggtggctgtgctgctgctgtgagcgggcccctgctcctccatgcccccagctctccggctgggtgggcttggccatggtcagcgt

SEQ ID NO: 298369 - DNA, 122 bp, Homo sapiens
ccctgcctgacactacattccatgtctccttgtccccagctgggtgaagcacaggcccaacgtccagcagggccagggcccggccgagctcccctcccactccctgcagtcttccttctctc

SEQ ID NO: 298370 - DNA, 122 bp, Homo sapiens
cccgccagcgtcctcggctccaccttcacacacatcaggatctacccacctgcaaccgcccgcgctgctgcccagttcggaggctcacctgcacccttgggccgcctccagatgcttgtagc

SEQ ID NO: 298371 - DNA, 122 bp, Homo sapiens
tggggcaggtttctgatgaacagcttcatcatccggacaagcacctctgggtggcagcggcggaggtagctcctgcgtcagagagaaccctacaaaatcgtttgtcttgataaaagaaaaac

SEQ ID NO: 298372 - DNA, 122 bp, Homo sapiens
tgcctgcgtcagacacctgtgatgtttgaaagaaccagtttatcaaagtgcttagcctgacgcctgacacgctgtgcacccaagataaatgtttgttgtgtcattcgatctgtcgaggaagg

SEQ ID NO: 298373 - DNA, 122 bp, Homo sapiens
tacacacatttccagaacgacacacaggaaactcatcaggcattgcctagaaagacgaaccggggccaagcacagcacgccctgctgcccacctccggggcaatcagttctattctggaaca

SEQ ID NO: 298374 - DNA, 122 bp, Homo sapiens
tcaccccaccagacagtgaaccacgaccagcagaggtgcttgcagagggcaaagggaccacgcaggagtgacggaagagcgtggccataaagactgtaccagccacgacctggtgaccgtag

SEQ ID NO: 298375 - DNA, 122 bp, Homo sapiens
ggcatcctgttattcatcagcttagttagcatctgtcttcccccgaagtggtaccaaagccggtcccttggcgacgggtcttgcatgtgacactcttgccctctagtgcctcaccagcttgg

SEQ ID NO: 298376 - DNA, 122 bp, Homo sapiens
acccacccgaccaggccccctgtgccctacagctgagagaggacccagcagaagggagggcggctcactagcacacccctgcatggactgggtgccctgttctccatgtgaggcctaatggg

SEQ ID NO: 298377 - DNA, 122 bp, Homo sapiens
tctgcgtttgggggtcttgtgtgctgtggggtgaactctgctgcagaggcagttcccacccggtctcagtgagccaggccccctggctgaccctggcgcgagcacacggcaggctgagcagg

SEQ ID NO: 298378 - DNA, 122 bp, Homo sapiens
ggaggcagtggcttttgaaagcctggtgggttggcagtgcttctgcacacgaagagaaggcgactcttgttccagggaggcacagctggagccgtggcacctggtacacttgggcagcacag

SEQ ID NO: 298379 - DNA, 122 bp, Homo sapiens
ggccggccacgggcggtgcagggcaagtccggaggcaggagtcctgcgggtgttgggcgccgtgctgcgctgtagggcttctttccacaagggaggagtcctccgtgtggcttcttctcctc

SEQ ID NO: 298380 - DNA, 122 bp, Homo sapiens
cactcgccctcgcacagtgatttgccacctcggttcctgttttggctcttctgagaagctcgtctccgagactccagacgtggctggaacccgaattgacgcaatcctgacgctacagggct

SEQ ID NO: 298381 - DNA, 122 bp, Homo sapiens
ccatctgctccccgaccccagagaggcccacccagatggagggagcgggtgcccaggtctcgtggggcggagggtctggccacggctccacgcccctgacgtggaggctgtgaacaggaggc

SEQ ID NO: 298382 - DNA, 122 bp, Homo sapiens
tcctgatgttccctggagaaatctcacctcctcacccaccaggccattggcccagcctgccggaagctgcatgccagcggagcccagccctgctgcccactaccaccagctccatgtgcacc

SEQ ID NO: 298383 - DNA, 122 bp, Homo sapiens
gtaacatgttcagcttatgcccaagttcacacagctgagaagacacagaacaagaccctgcgccttcatccctggaccctatctctgcagtgccagaggggctccgaagcccgggtctccac

SEQ ID NO: 298384 - DNA, 122 bp, Homo sapiens
acgtgggaaggctttttttcctgttccttctttccctttttaaacgcccacccacttttgcgcgggctcggccgcggaatttttctcgcgagaggcgcgctgccctctcgcgagagagagtg

SEQ ID NO: 298385 - DNA, 122 bp, Homo sapiens
tgtctttagtcagttttgatttacatacagttggtcctctatatccacaggttccacattcgtggatttgaccaaccatggatcaaaaatactcaggaaaaaaataaacaacagcataataa

SEQ ID NO: 298386 - DNA, 122 bp, Homo sapiens
aacgtggggggcctgacgggacaggcccttctcatgcagcccaggggccccgagtctgtgcgtgatggtgtggctcggatctgcgtccctcctctcacccctgcagcgggggctgggatgaa

SEQ ID NO: 298387 - DNA, 122 bp, Homo sapiens
gctttgctttgagggcacttagaaagcccagcccagcccttgctcctgccctgcacacagcggagcgacttttctaggtatgctcttgatttctgcagaagcagcaggtggcatggagccaa

SEQ ID NO: 298388 - DNA, 122 bp, Homo sapiens
agtccgagagaggagccgcgggcgccgtggatggagcgggaggggccagagtattgggaccggaacacacagatctgcaaggcccaggcacagactgaacgagagaacctgcggatcgcgct

SEQ ID NO: 298389 - DNA, 122 bp, Homo sapiens
gctgtagaagccatctcccggggcttagcactccacctctaaactgaatctattctgtgacgctgggaaattctgacttaatcattccgcaccttgcttccttgattactccacagtatctt

SEQ ID NO: 298390 - DNA, 122 bp, Homo sapiens
actttgaaaaggagagggagaagcaggaaagttggagttgggggatgcaggtaacagaggcgtctgaagaactgaatgtgcttaaagctcctttcttggacgggcctggtggctcacatcta

SEQ ID NO: 298391 - DNA, 122 bp, Homo sapiens
agacctactcaacgcactttgctgcgggtcacagttattttctcaaaaccccacaggccacgaagaaaggtggcagtcccagccaatgagaggcggacacaagttgcacctccagcggccgt

SEQ ID NO: 298392 - DNA, 122 bp, Homo sapiens
agaatgagtaacttgcccaatgtctgccagcaaggaggtggcagagctgggattcttgatcgcaaacaccgcccttgactgtctctgcctgtggctagtgatgcaattgtcccacgtgtcta

SEQ ID NO: 298393 - DNA, 122 bp, Homo sapiens
gcagcggcacagaagacggcggaaggcgctgcgaaagtccgggctgcggcagtagatgagcgggttgaaggcagaattggcataacctagccagttcagggcaaggaaagccgggcccggga

SEQ ID NO: 298394 - DNA, 122 bp, Homo sapiens
ggctcaacccctcctcggccgggctggaccccgggaccccaggccccgaaggagagggctcggagcagacgctgtccggggctgcattggcaacaagcccaccgccaccaggttctgctgtg

SEQ ID NO: 298395 - DNA, 122 bp, Homo sapiens
aagtctgacaataaccttcctgccctggccttgtcttctaggggacatgggaaatatagacgtatatatatattttggtttctgtggatttttgttggaagtacagcaggaaaattttcttt

SEQ ID NO: 298396 - DNA, 122 bp, Homo sapiens
ccatgctgaagagtgcttctttgagcgggtcacctcgggcaccaagatgggcctcatcttcgaggtggcggagggcggcttcctggacatcgacgtggaggtgcgggctagctgcccgcagc

SEQ ID NO: 298397 - DNA, 122 bp, Homo sapiens
gctaaagagatggaggtggagagtactggattttcccacctgcctgggagggtactgggacgaggggatccagatgagagggatggcctgtggtgacaggaatagagtggcagacgacctca

SEQ ID NO: 298398 - DNA, 122 bp, Homo sapiens
ttcctggccatggctgctgcgcgtcataatcccctaacacagttaagtggtggttctcatcgtcgttcacccttacagatgtcagaggggaaagaaaaatccaactcaaaacttccaatgac

SEQ ID NO: 298399 - DNA, 122 bp, Homo sapiens
ccctcatttcaaagatgctgtctcttctataataccagccacactgggagccgagaatcccgaaaaaaatattaaactccctactgggaagccagcagagtaaaggatggtgaaaagctgga

SEQ ID NO: 298400 - DNA, 122 bp, Homo sapiens
cgctggagggccagaggcacccctgctccgggccagtggcggaaggggcaggagtgtcaacgccctggctgctgccatcagtggggacactccgatgtccaacttgcactgccccagagttc

SEQ ID NO: 298401 - DNA, 122 bp, Homo sapiens
tatcatgctgaaatatgtcggtgagaccggctgccatctctaggtcagcggcgacggggtcgacggacgctcgcaccagtaagctcttctctatctccagccgcttgctgcgaggaagaaac

SEQ ID NO: 298402 - DNA, 122 bp, Homo sapiens
aagcccccaaagggaggagagttgctggcctgacatcagctgctcttaaataaggatccccgccccctcctgtgttccccggtggagctagttgaagaggagtcctcctgttcgtgctaatt

SEQ ID NO: 298403 - DNA, 122 bp, Homo sapiens
agcctccgagacccaaacgatgtctgtgcaggctgtgcctgcagagatgcggcccctgcccgggcctgggctggaggccgaggggtccatgggagagcacaggctgaaagagggttctagaa

SEQ ID NO: 298404 - DNA, 122 bp, Homo sapiens
gtggtttagggagttagattaccaaaaccctgcttcctgaggatacttagtgctttcggccgtgacccatgggtcaattaacttttaattcctcccaccggcacaaactctgcctcgcaact

SEQ ID NO: 298405 - DNA, 122 bp, Homo sapiens
cccatgttcgtccatcacccctcccccctttcccaaggacaatctgcaagaaagcagcggcggaggagagctaagactaaaaggcaagaggggccattgagtgaagagcaagggggagagct

SEQ ID NO: 298406 - DNA, 122 bp, Homo sapiens
cataaaaccaaagcaaaataagccctgaaacctgggcccaccggaccacagtcttttcaacgtcccttcctggtgtctggcccccagccctggtgggggttcccctgagataagggctgttc

SEQ ID NO: 298407 - DNA, 122 bp, Homo sapiens
gcccacctttcggaagtgcctgagggctgcagggcttcgttcgcagagctccgtgatcagcgtgatggtgcccagcaggatgcctggggtcagcgtcggggaagtgaatggtgggggccagg

SEQ ID NO: 298408 - DNA, 122 bp, Homo sapiens
cccactgatgctgcagcaggttccgcaggtcttacccttcagtgtcagcaagagcagggtcggggacatcaggggccggcatgggacagggccgggcctcccagcacctggtaaccctctca

SEQ ID NO: 298409 - DNA, 122 bp, Homo sapiens
tgatgaccatcaacatgaaatatcagtactgcacaatgcacatcaacagaaataagtcaacgacatcgagaagaattaagtgactatgaagaacgaactgaagaactcaaaaatctgttaca

SEQ ID NO: 298410 - DNA, 122 bp, Homo sapiens
taatgttagtaatgtacgaaataataaaataattaccagtatttgagatctcgacttcatcgcggggccatgaactttctaatcagtttggaaatatttaccgaggaagcagcttcctcgga

SEQ ID NO: 298411 - DNA, 122 bp, Homo sapiens
agcactatatactaatggttctctgcgaagcactcactatttcactattgcaagtagaaacgtatcacatttttatcttccaaccacaccgaggctccaaagtccaaatcaccgctgactaa

SEQ ID NO: 298412 - DNA, 122 bp, Homo sapiens
tgggggagggggcggggaggccatcagtccgtctgaggactcccaggagccgggggacagcgccggcttcgggtgggcttctccccaggcgttggcctgggacaccgccccctgccccctgt

SEQ ID NO: 298413 - DNA, 122 bp, Homo sapiens
gggccacaggccccgagctttggacccgctggcgcccatgtcagggccgccggcgcatggcgggccccgtggccgctctgctcacaccgcagtccgcactaccataacctgccccagccgct

SEQ ID NO: 298414 - DNA, 122 bp, Homo sapiens
gctctgtcttcagcgacttcccggtagccgccggaaaacttccgccgagaccggacgtgacgctacgacggcagcaggagctcctggtccacaggctcacaggcccggcagcggcccccaga

SEQ ID NO: 298415 - DNA, 122 bp, Homo sapiens
caaaccttcctcctgcacccaaggcagatatcacgaattattcccacctgtactcctccccgaggctgccatcccactgaatcagagttggcaagccatctggaaccttgtgaccatcccga

SEQ ID NO: 298416 - DNA, 122 bp, Homo sapiens
acacgctctgcatgcaaaatacaggaagggaatgtgcactacacacattgttattaatgccggcagctgggggagaaagtaggactatgagattcttgttttctgtttttcaagctttccac

SEQ ID NO: 298417 - DNA, 122 bp, Homo sapiens
agggctcccctgaggcgggactgaggtgagcaggggtctgatggtgcgccctgcggtccccgcaggtggcaagcacagtgaacgacatcctgcccttgctgctccattgcgacacgctgagc

SEQ ID NO: 298418 - DNA, 122 bp, Homo sapiens
cacaatttccgagtttcaaagatactttcaaactgaaaggaactgttcgccagctgctcgcgaagtggcccatgtgacccctagtgaacggtctaaacttccgctagatgctttgggaattc

SEQ ID NO: 298419 - DNA, 122 bp, Homo sapiens
tgtgggaaagggtgaagtgcagggtggtaagagatggagcagggacagacgtcagcaacacgccaaaggcatttcctgagcagagggtgcacagtgaggtgcaggaagagaggtgatcaaca

SEQ ID NO: 298420 - DNA, 122 bp, Homo sapiens
ttagccccttctggttgctgagctcactttcagtcatgtgacctcctctgctcctttgtccggcacccattaccatggggaacagcgtcaggcttcggtgaactgtcttctagcagggaggc

SEQ ID NO: 298421 - DNA, 122 bp, Homo sapiens
aaggaggaatcccggtgctcttctccaccagccttccctttggtcgccccctggcgtccgcgtcattgtgggaacactcgggcgggatgtattttaaaggagtgcctgatgcgtgtgggtgt

SEQ ID NO: 298422 - DNA, 122 bp, Homo sapiens
gactcttcgggatgctgtctggagtcaaggtcttgagagtgctgattatcaaaaggtggccgagatgggtagggctgtttgtcatcataatatgaccactgttcttcatacatggggacgcg

SEQ ID NO: 298423 - DNA, 122 bp, Homo sapiens
cgcagagataagggagaggcccccttcccacacgctgaaggatatcgaggcccgataagccgagaacaggagcaagaacgaggaagaagaaaccctaggcagacaccaggccaggcttgaga

SEQ ID NO: 298424 - DNA, 122 bp, Homo sapiens
aaagagatgccagcaatcacagatccctaaggggtgttacagctatagctcggggagtcccggggtctcggcccccagaagttttgctgctctttctcccatagtccactgcttgggagcat

SEQ ID NO: 298425 - DNA, 122 bp, Homo sapiens
ggcgctgggcaggtgacggtggctgctgacccccggtgcccatgtaagctgctggctctgcgcagctgccgcttcaggtgggccgcactgcgcggcggttcagggtggtgacgctgcgaggc

SEQ ID NO: 298426 - DNA, 122 bp, Homo sapiens
cgggatgactgacaccgataccccgagtggctccgggcagcagcgctggcagacaaggcccgccttcctgctgtgctgtgctgatcattccacgacaagcccggtttctgcacttcggtgtg

SEQ ID NO: 298427 - DNA, 122 bp, Homo sapiens
gattttaactgatggttctgatgtgtcgcgtttaagcattgctgctggaggtgtaatggacgttaatactgctttacaagaggttctgaagactgccctcatccacgatggcctagcacgtg

SEQ ID NO: 298428 - DNA, 122 bp, Homo sapiens
ggccaggtcagagcctgcatggggctgcctgccccggcctctccctgggacaagaggggccgaccaccccagacccgatactaccacccggaaagacggctggaggcgaggatgaggcccct

SEQ ID NO: 298429 - DNA, 122 bp, Homo sapiens
tgcggttgggggcggtggtgggtcagcctgagccccaaacagtgccgtgaaattctccatcgtaccctccgccccggcgctgtctccgtgtctgccgttggtaattttcattggacaatgct

SEQ ID NO: 298430 - DNA, 122 bp, Homo sapiens
ctgttttttttctctctacagcgtcggaataaagttgttgggaatccctgccccatctgtcgagatcacaagttgcatgttgactttagggtaaggagagtcttttctttttagggtaagaa

SEQ ID NO: 298431 - DNA, 122 bp, Homo sapiens
gttttgttttcagaatccgggctggcatggggaagcccacacgccccaggacatcctagacgctgagctcctgcagcggctcacggggagcacagcgaagagctgcaacaaaacacaattcg

SEQ ID NO: 298432 - DNA, 122 bp, Homo sapiens
tctcatccagaagctggatttaagggctataaatatctccttaagtcctcactaggcacccgcaggtgctttactcccaaggaaatgtatataacccttgaggtgcttaagggttctattca

SEQ ID NO: 298433 - DNA, 122 bp, Homo sapiens
tcagagatgaccactagaatatataaagaatccagtaactcaatcttctaaggccaaagacgtgattgaagggagacataaatgtcagaatagaccaagactcatggaaaagaacagctgtt

SEQ ID NO: 298434 - DNA, 122 bp, Homo sapiens
aaggtggccagccgggcaccccttctcccattagaggatgtctttgtgggggtaagtgcccgacgaggaggcctcgccccaacacagtgtgtcaagctggctggtgccacccactacccgct

SEQ ID NO: 298435 - DNA, 122 bp, Homo sapiens
agtttcccgaggagggcatctttgtccctcgcgatatgcactgcctgtgtcaggctgatgcgctcccgggtgcagtacttgggaaggcgggcatttggcagccttgtgtgtgtgtctgtgca

SEQ ID NO: 298436 - DNA, 122 bp, Homo sapiens
acagctttccctccggggagcctgtgagccccgccccggccaggagaccccggtgctggccgggttggcattagaccgcactgcctcctgtccagggcgctgcctcctcctccacttgacaa

SEQ ID NO: 298437 - DNA, 122 bp, Homo sapiens
gggccgggaagaaagcgggttaggatctgatcccgctgagtagaggacccaggagcctcccgccccgcgtgctctgtagcgcgggggcgcgctgcgcgctgcgcctgggcggctggcggggg

SEQ ID NO: 298438 - DNA, 122 bp, Homo sapiens
aaacatgtcatgtgagtgaacctgtgaggcggggagaacaataaaatggcaaaatgcacccggactaggtggggcttatagtgctagatattttaggctcaattttattgttcatggcactg

SEQ ID NO: 298439 - DNA, 122 bp, Homo sapiens
ggaccaaacaaaaaagaatgtatttctgaacctgtttatgtgaagagatattgtgagctgcgtatttaagacaacacccttgctattgggcaagaaatctatttggcaagctcaaataggaa

SEQ ID NO: 298440 - DNA, 122 bp, Homo sapiens
tctacgccgcgaacttgcttctagagcgcactccagcctgcgaactgataaaaccttcctcgagctccgccgcgaggccctgccccaacaccccctctcttaccccaattccgccacattcc

SEQ ID NO: 298441 - DNA, 122 bp, Homo sapiens
aacatacaggacagtccagctggatgtgataaagattttatcacctcatatggaaaacaccggctgcactggattcatcagtgttaacttcctttgaggaagctgccttatagttttcatca

SEQ ID NO: 298442 - DNA, 122 bp, Homo sapiens
aacccaacccgtcggggccgccgctccggacccgcagccgccgccgccgcctcctccccccggatcgggtgtactgtcccaacccgaaagtccagttctgcggcccggcagcggcgagcggg

SEQ ID NO: 298443 - DNA, 122 bp, Homo sapiens
gaagctgtatttgacagaataatcataacaacattatgatgataatatcagtctgaatcacggacaatatatagaccaaatactgagttttgctactatttgaacctccttttctatgttta

SEQ ID NO: 298444 - DNA, 122 bp, Homo sapiens
aatgcgtagatgtgtggaaggagagctccccactcagggcacccagccgcctctcccacccggagactttttctgtgacttggccgccgaccctggcgcatggacaaccccagagcaatagg

SEQ ID NO: 298445 - DNA, 122 bp, Homo sapiens
ggcaggagcatggggtgcttggttgtttccttcctaataaaataaacgcgggtcgccatgcgttgggcctcttgtcgctcatttctgcgctgggctttaggcgcgtgctcgccggagggatg

SEQ ID NO: 298446 - DNA, 122 bp, Homo sapiens
ccaggtgcccacgcgggccaagcgcgaaggcgagatctgggtagcgtggacaggcgctagcgaataagaactggctcttatagagtcacgagactatatctgggaaactacacttcccagaa

SEQ ID NO: 298447 - DNA, 122 bp, Homo sapiens
ctcaggaggaaagctgcacacgtggccagggcccattccactggggaagtcagcgcctcacgctgcctggcctggtcacctcagtccaccctcgctctcccatgtggagtgtttttccctta

SEQ ID NO: 298448 - DNA, 122 bp, Homo sapiens
ttcttgttttcccagggccccagaccggaaatggattctgtttgaagattcggatgcattcgcacagcctcttttatttgtttttccttagggccgagctttgattgttttccttacacaac

SEQ ID NO: 298449 - DNA, 122 bp, Homo sapiens
ggctgttatacttggccacatattcacattgcttgaagggggcagtcttgtcctccagaacgtgtctgatacagaaggcgtagccgttgagtcgcctctgcttgcacagtttggggctatat

SEQ ID NO: 298450 - DNA, 122 bp, Homo sapiens
agacttacttagtgggaatcatgatgctggtagtgggcatgggtgtctaagcctcacacccgggtctgggcagtgctcagcgtgagctgcgcagccgagtcatttacgggtggggctgagcc

SEQ ID NO: 298451 - DNA, 122 bp, Homo sapiens
cctgtacgttgtgccgcctcccgcttccctaacacttctccgcctgcacctcggcccctccggccacccggctcgggttgcttgtccgtcgctctcttggcgtcctcttccgccccgccctg

SEQ ID NO: 298452 - DNA, 122 bp, Homo sapiens
cgcccgcagactctttcccgcctccgccggcatttccgtgtccggccgatgtcatgcggtcggttgagcctcagggctagcagcttctactgatgcaaaaacataggaagtgtctctttgct

SEQ ID NO: 298453 - DNA, 122 bp, Homo sapiens
gaggcagggtcttgtaactcctggcccctactggctgcatgaagttgcaggcttcagccccgaggctcagagcatcttcttcaggaccagattctgcacccccggcccgaggcttttcatcc

SEQ ID NO: 298454 - DNA, 122 bp, Homo sapiens
aatcttcactaaccaacaaggagggctgcgggggctttggagggcctcttttctcgcaaccgtggcccctccgcccctcacctgccccttgagtgtctgtgcaggggtctcacacgcgagct

SEQ ID NO: 298455 - DNA, 122 bp, Homo sapiens
ttcctgcgacactccccccttccacccatcagagctcaggacactcatctgttaatgagacgggcagctggttccccacacccatcctcggatggagctggcaggcacggactcctcagggg

SEQ ID NO: 298456 - DNA, 122 bp, Homo sapiens
ggaacctagaaatggggcttgagagagctcacgctgcagcttccggctcagcgagggcagcgagagggcctgtgatctgtccctttccttgtatggtgaaaacaaagtccgggtgcaaagtc

SEQ ID NO: 298457 - DNA, 122 bp, Homo sapiens
ggcttggcacaggctagcgggaagcctcaggtcaccctgacacctgttgccatggcccggcggcggtttcctgacttgtcaggacgtgtgcacagagagaacaatgggtttgccttgacagg

SEQ ID NO: 298458 - DNA, 122 bp, Homo sapiens
cttgaaatggataattctcggtaccagcccttcgcccttcagcatgcactgatggggccacgctcctgtctgggttctgaggattgccagggaaacaggaggtgctataagagatgacaaca

SEQ ID NO: 298459 - DNA, 122 bp, Homo sapiens
tgggtccgggggtctcagggtcaggttctcaaactccctgtctgatagaggtcctggcctcgggtcccggagagggtggggtccctgggtcggttccgcggggctgtgaaggggtcctgccc

SEQ ID NO: 298460 - DNA, 122 bp, Homo sapiens
ctcaccactactccccatttggcctaggcccttccgcatgccccacccagaccgtggtcccgtgagtccgtccagacctgtaaaagtggaccgcgggcccgcctctgctctggactcccttt

SEQ ID NO: 298461 - DNA, 122 bp, Homo sapiens
ggcggcgagaggaagcccgctacgagtgccctagctccccgccgctctcgatgaaccggacggaataagccgcgcctccagcaggggctgcgcctccatgaatccctagttgtttttttttt

SEQ ID NO: 298462 - DNA, 122 bp, Homo sapiens
cattcagtgggtggttgggggacaagagcgtgagctagcctgcaatgcgtaggacattctcgcactgtcccaaatcccacacaactcaattcatgaaggtgtttatgatcatgcaaacctag

SEQ ID NO: 298463 - DNA, 122 bp, Homo sapiens
acgagtcttaagtagtattctcaggttgtctggcctgcggccgcgctgctgtcaaccagccggataactgcgctgcctcccgacgcgccgccagccaggccacggcctcctagacacaagcg

SEQ ID NO: 298464 - DNA, 122 bp, Homo sapiens
atggcgctggccgccggcatctctccgcgcctgcagccgctgggtccccgcgctgctgggcgacagggtcgctcgcgcggcttctcttcaagctgcgcccaccccgaccacaccaaggaagc

SEQ ID NO: 298465 - DNA, 122 bp, Homo sapiens
ctgagccggcggctctcgcaggagccggcggagatgggcgcgtccccagctccgactcatcgggccaacctccaatcagacccagggaaaccgaaagcccctgtctggcctcttctcatctc

SEQ ID NO: 298466 - DNA, 122 bp, Homo sapiens
gcccccgccgcttacccagcagctgcccacctcctccttttcctggtaggcagggcagagcgcgtgcggcgggtctccgggcagcggtactgccgccccctggcggccgtacaggcagtggc

SEQ ID NO: 298467 - DNA, 122 bp, Homo sapiens
ttaaacaactttatgctgccttacacctgtatttaagaactcaaaggtacttcaaaatgacgacactatatctaacaccattactggtaccatctacagtgtcatgaatctctatcatgctt

SEQ ID NO: 298468 - DNA, 122 bp, Homo sapiens
cggcggagactcgggcgggcctgcgcacgccccgccccgcgcccgtccgtctgccaggcgcggcctaccattggctgcgcgccatcgggccccgccccaccccggttggctgagcggcccgt

SEQ ID NO: 298469 - DNA, 122 bp, Homo sapiens
ggacctggaggacaactatgaacaagacagacaagggcctgcccatgtggggcttactgtcgaagagggagacggccatgcatactaacaagctacccttgccaactgaggtcagtactgtt

SEQ ID NO: 298470 - DNA, 122 bp, Homo sapiens
tttttgaggggtctagggagtagtgataggtcctaggaacaagctctacacgcgagcctgcgtggtgctccagagcatgctcatttgctaggtttttgcacaggagctgtgcaatagcccac

SEQ ID NO: 298471 - DNA, 122 bp, Homo sapiens
aaaaaaaaaaaaaacctgagttttaacttggtgactgttgactccctcctgacagcgaggcggtggtgaaccgagtgtttgacaagctgtccccgctgcacgagcgcatctactgtgcactc

SEQ ID NO: 298472 - DNA, 122 bp, Homo sapiens
gacaaggttacgctaggtacaccagtgtgctgtttccagaagggctgcttttcctgtctacggctctcacattttctctgttctgaactcgtgtccttggtctgttctctctgtcctctcat

SEQ ID NO: 298473 - DNA, 122 bp, Homo sapiens
tcctcagacactagtgctatgctacccacacatctgtaagatgaaaaaggtttctgcgcacgtgtctgcctcacgtggggctgttgatctgctcagtgtgactcctcctggccaatgagaaa

SEQ ID NO: 298474 - DNA, 122 bp, Homo sapiens
gctccctggcggagctctggacgccccacctactcccagcgttcagtgcggtgccctggccgccattgtttgaatttgaaaacggtaacatcgcagtgctgctcgcgggtctggctagtcag

SEQ ID NO: 298475 - DNA, 122 bp, Homo sapiens
ggcggccacccccgcccgagccgcggcgcccccagggaggaaacaaaagtgtctccgcggcgcccggagtcccccggagcaggacgcctcctcccggccccagtcccggccccctcccctgc

SEQ ID NO: 298476 - DNA, 122 bp, Homo sapiens
cagttatacttaagtatttcagacaagagtaagcaaatatcacgcctggggttcttctttcgagggtattttggctggactgtcacccacgtttggaatggaaagtgcagcacgagccgtac

SEQ ID NO: 298477 - DNA, 122 bp, Homo sapiens
aacaaggacaattttctatcaacctcacggcccatcccctaagcattaaaaacaccaaatcgctcaatacagatggcaaggccccttgtgctatttctctggcctatttttcttgctctccc

SEQ ID NO: 298478 - DNA, 122 bp, Homo sapiens
aggagctcagaaccaaggtaagccgaaaagcatacctgttggtttcttagacgtctacaccggcccatagcctttgtctccgccaccatggcctgaggtggcagctgccctttcatgacttc

SEQ ID NO: 298479 - DNA, 122 bp, Homo sapiens
catgtctcacctccagccataaggcggctttctcctatctcagtaaatagaatgtatgatcgggttttacaccgagacattccattcccagggatgagcaggagacagatgccttcctctta

SEQ ID NO: 298480 - DNA, 122 bp, Homo sapiens
aacacatcaatcaaaactggaccagccaggagaaacagctataagagccggatggtgaggcggagcaagaaatccaagaagaaagaaagtctcgaaaggttagtaaaatcagtattcttttt

SEQ ID NO: 298481 - DNA, 122 bp, Homo sapiens
cggaccccggcagcccgccccgcctagtgctgggaccgctgtccggcccggccccgcccccgcaggccccgcccctgttcacaggccacgcccccagctgccccctgtccccgccccgccgc

SEQ ID NO: 298482 - DNA, 122 bp, Homo sapiens
ccgttacaaggatgaagaaacggaggcttaggaaagcaaagggcacactaaggtcaaagacgtgctattcaagcccatttgctaacgtgcagccgtttcctggcttttcagcaaggagatgt

SEQ ID NO: 298483 - DNA, 122 bp, Homo sapiens
gggcgaggggcagagtgaccaagcgcccgtgtcccgctccggcaggtcatgtacgcggaacgctggggcctggagccctgcaccctcccagtgatcgtgaacatcgcggccgcaccctgcga

SEQ ID NO: 298484 - DNA, 122 bp, Homo sapiens
gggtcccctggagaaactccaaccagcctgccaatgcggtggagcctccagaagtcgtaccgtttgcagcggggaggagcttggccctgcctcttcctgtggaacctgggattcaaagggtg

SEQ ID NO: 298485 - DNA, 122 bp, Homo sapiens
tgaacctggcgggagataccagtgcctagtattcagcaccgaggtctggacagcgacacacgcaggactgccgcaggagctgctctctcttctgagcaccaaagacctccacccttctgcag

SEQ ID NO: 298486 - DNA, 122 bp, Homo sapiens
ataaatgtttagggtaaaacagctttcttaaactgcaggctcctcctgtgcataaagatacgtggttactttgacaaatagcttatatcaaaaatgtaaataagtgaatagttttattttta

SEQ ID NO: 298487 - DNA, 122 bp, Homo sapiens
tctagtaaaaaagatgcggcaagatcaacaaggcatatagcttgcgcccgccagaagttccgcggcctccacacccatcccggcatactttgcgccgtgcacaggcaagccctggtgcgcat

SEQ ID NO: 298488 - DNA, 122 bp, Homo sapiens
attatgtaaataaacacaaaattgcaactgtaacaaatgcgatgaagcagacgtaggaaacgccaacaaacctgaatctgacctagttaagaggtgaaggacttcttccagaatctctgaaa

SEQ ID NO: 298489 - DNA, 122 bp, Homo sapiens
atgaactagggaattgttctatatcaagattttcagtgaccagccagatgcagtggctcacgcttgtaatcccagcactttgggaggctgaggcgggcggatcacctgagtttgggagttcg

SEQ ID NO: 298490 - DNA, 122 bp, Homo sapiens
acatccagcaaaggcagcatcttcggggccagggagctggcagcagggactgcagaggggcgaggtgtcctctgggggtggtcggatggcagtgatggctgcacagttcctaaatgctctga

SEQ ID NO: 298491 - DNA, 122 bp, Homo sapiens
tttaaagaacagagatccctgaatagcaccgggggccgttacagcccatgaggacatctccgagtccttctatatgacactagggacccccgtgccatatacagacactgttctcagagatt

SEQ ID NO: 298492 - DNA, 122 bp, Homo sapiens
aaaaaaccctaccaccacatatgaacataaaaaagaagagaaccccaaccaattgcaccacgaccggatggaagagcccagctgacacaaccaagacgagtctcagtgtctagggaagcttg

SEQ ID NO: 298493 - DNA, 122 bp, Homo sapiens
tacatgaaggagtgttaacctgaggtagggaaagaggagatcttaaagtattaaagcatccgtaatgtgaggattggaggagcttagaaccaattctgaatactcttcagagacaacctagg

SEQ ID NO: 298494 - DNA, 122 bp, Homo sapiens
cgccgcgcgggggaaccgtgccctctcgcatccgaaacaccctcccatccgagctgttctcggcctctctggttcaaactgacgaagactgtttctctaataggttcagtctgtgagcgctc

SEQ ID NO: 298495 - DNA, 122 bp, Homo sapiens
tcgcacaaccactctccagcctggcagggcggtctccggcctcgcacgccggacccgcggcgagcagagctgcctcttaaaggaaaccgcacagtgtccccacgggtgctagccacctgttt

SEQ ID NO: 298496 - DNA, 122 bp, Homo sapiens
cagggcctggggtggcagtgcgccgtgccagacccggcagggcctggacctagtggggtccgggaagggctgagcgtgaaccattcccgcttctgcgctcgggcgcccagcacaccaacccg

SEQ ID NO: 298497 - DNA, 122 bp, Homo sapiens
ggtggggctgtatttccccctcaatctgtgggttccatgacagcaggacaatatccaccccgcccttcaccatgatcttcaactttcatgatgtcttcttcctctcctcttgccagacctta

SEQ ID NO: 298498 - DNA, 122 bp, Homo sapiens
agctgacttacggatcgggttggtcccgcccccggcgcggccgttttgaaaatcctggtccgcccttggcgattttggtggaagcctgtccctcagaacggtctcagtatagtgttttgtgc

SEQ ID NO: 298499 - DNA, 122 bp, Homo sapiens
ctgtaactggagatgagagttcaggccaaacactggtttaaaaatctgtatatgaaatagcgataccctggaatctaggactgagatcctgtgcctcacacccacccacgcggccaagtgcc

SEQ ID NO: 298500 - DNA, 122 bp, Homo sapiens
acaggccagctgcccctcagagtgaggcagcgccgtgattctgagggtgatgctggcgttcgcccctcaaccctgtcccccacaaggagattacggacaaggcagcatttctaataagcagc

SEQ ID NO: 298501 - DNA, 122 bp, Homo sapiens
ttaccataaactgaatagctaaaattagcattaggcttctttaagtcatgttgacacagtcgaaaaactgataagacaaataagactaactctaccctgccttccacagtggactcatgctt

SEQ ID NO: 298502 - DNA, 122 bp, Homo sapiens
ttgtggctagcacacggagacacgcagattcagtgaagctggctgagtaacagagacaagcgtgccagatacagggaggggcaatgtaactgcgacaggattcaagaatatggccaacatca

SEQ ID NO: 298503 - DNA, 122 bp, Homo sapiens
gcccttataaaggggacttttcccaatactcgatcgattcccacctcgccctgcgccgcgcgccctccgccggcgccaacacctgtcaactctgcgcgctcccaggttcttggagacgccga

SEQ ID NO: 298504 - DNA, 122 bp, Homo sapiens
cggggggcgaccgcgagccctctgaggcccctcaagggacagggcatgggtgtgaggggtcgcgtgcgccccctggcgccgggtccgctgggcggggtggtgggcggggacggtgggcggag

SEQ ID NO: 298505 - DNA, 122 bp, Homo sapiens
aggtttaagctaatttctaccttgacatttccaatgagagaaacacattaatgagttaaacggaaggatgattttccccttggcctctttaccatatcttttgcctcctgctgactaataat

SEQ ID NO: 298506 - DNA, 122 bp, Homo sapiens
gtttccttggctttgaagcgcctctggtccgtgcagccaccagcagtacaaaaataattgcgagtcctgatcgcactttggagcctaatgacagcccacttaaaaccagatctccaaaccca

SEQ ID NO: 298507 - DNA, 122 bp, Homo sapiens
aattaaatgatctttgcgtttgggcaaggtctggtgccccaaagctgccgacttgatctgcggttggggcgagcggcaggtagggggcccggagttaggagggggtgtgggagcccgtggag

SEQ ID NO: 298508 - DNA, 122 bp, Homo sapiens
cctcccctcaaggcaggaactcccaggatctctatgcacagattccgggtcctccagagtcggtccctggcaggaaatgtcaatagagtccagcccattaaccacagacaagcaatttaacg

SEQ ID NO: 298509 - DNA, 122 bp, Homo sapiens
cgcgtcgcctcggggcctcaaaccgcagccgctccctcctccgcactttgaccttccgttcggcggggctgtggcttagtggagtctgcaaagttgtgatttgttttccctttctgcttctc

SEQ ID NO: 298510 - DNA, 122 bp, Homo sapiens
ctgggccagggctttgggacgggacgcgagctgaccacctgttccttctttccgcagggtcgcggagcctcgccggccgccatgtggagctgcagctggttcaacggcacagggctggtgga

SEQ ID NO: 298511 - DNA, 122 bp, Homo sapiens
tggagcgtgggaaggagccgaggtggtggagcagcgtggggaggtgctgaggtggtggagcgtgggatagagcatggaggctgctgccaccagctgctcggaaggcatccttccaagttaag

SEQ ID NO: 298512 - DNA, 122 bp, Homo sapiens
ccggcactgcttcctctttctgcttctctgtttcctgatgacatcaacataaataggaaacgtgggaggctcactctgcctagaggctccagaagaagactggtctctcccaccacacagag

SEQ ID NO: 298513 - DNA, 122 bp, Homo sapiens
atgagattgggtttgaaatttatcccggggctgagtaggacaggaaaagtggtgaggggtcgaagagcagccttagccagcccatatctgggacaggtctggagtagaggaactgcacattt

SEQ ID NO: 298514 - DNA, 122 bp, Homo sapiens
aggtgagaccgcgtcgggcgggcggctggaccgagggaggccaggctgggtgcaggtgggcggcgcagcgctgcggggccgggatgcggggcgggggaacctcggctcccgggaagccccga

SEQ ID NO: 298515 - DNA, 122 bp, Homo sapiens
tcaaaaacaaacaaaaaaacaaaaaagaaattgagaaagaacagggaacgctctggagggcgcagccataagctcagccctgcagagggattaggcttggatgtaagtgaggactcatgaga

SEQ ID NO: 298516 - DNA, 122 bp, Homo sapiens
aggaaggaatctttgtcaagggatttcttaacctttgctgttttccaagatcaaagggttcgggtggaatgcgacaatgtcggtggtatttcaacttagcaacctctttttttgttttgtca

SEQ ID NO: 298517 - DNA, 122 bp, Homo sapiens
ggctcatctttgtacgcccagctcccggcaggacgtggcacgaagcagtgccagtgtgaacggatgaatggatcaaagccgggagcagggctgcccccctgcagctctgccctacctctccc

SEQ ID NO: 298518 - DNA, 122 bp, Homo sapiens
ccggcttcccgcgctgcccgcccgcgcgcagtcctcgggccgcctttttacgccctcggacgccgatcgccgacccacatccctgcgcccgcagccaggaccccctacttcctccgccgtcc

SEQ ID NO: 298519 - DNA, 122 bp, Homo sapiens
acacactggttagaccaacattacagattagagaaagatgaatgtctggatcaaaggggtcgagtcaacccttataaaacaagtgtagacaaatcttgaagtctgcacttgtattcccacgt

SEQ ID NO: 298520 - DNA, 122 bp, Homo sapiens
caaggatcacggcttaatcttttcttaaatgcattcagtcacccaaatagaaacctgttccgaaacttgccatgcatggatgtcaaaatattctcttcagaatttactatttacacctttgg

SEQ ID NO: 298521 - DNA, 122 bp, Homo sapiens
gacttggccccagcgttttgggtgctccggggatgacaccagtaagggttcagcagtgcccggccagtacaggttggtcctgccgctggggaaggggatcccgttgtcggacgtgaagatca

SEQ ID NO: 298522 - DNA, 122 bp, Homo sapiens
gtttagggagccatcagttcaatcagtagtagtatttatttgagtgtagctgtaaagatgcggcaagagaagaagcagggagatgtctaattcctctgtttgactttcccactaaaatctaa

SEQ ID NO: 298523 - DNA, 122 bp, Homo sapiens
aaagcctggacacacaaagtgagggctcacatttccgtctccacttgggccctgctggtgcgggctgtgtctgggtgtctcctcccctcctgcctcctttcctacaagtggggagtcgagta

SEQ ID NO: 298524 - DNA, 122 bp, Homo sapiens
aaaatcataagttcaaatcttaggtcaagtcgcatgttggccacaagctaaagtgaactacgaaacagatctggggaggtgactattcctgagctaagtcaagagtgaagacaggtacactc

SEQ ID NO: 298525 - DNA, 122 bp, Homo sapiens
ggagacctgttcacctgccgtgtctgccagaaggccttcacctaccagcgcatgctgaaccgccacatgaagtgtcacaacgacgtcaagaggcacctctgcacgtactgcgggaagggctt

SEQ ID NO: 298526 - DNA, 122 bp, Homo sapiens
gggaaaggatgttatagaaactccagatactacttctcccctccagtggtctgagttgcgcggcgctttcccgcctgtccggtagggcggtgccgcgcagaaagccgcggtccctctgcgga

SEQ ID NO: 298527 - DNA, 122 bp, Homo sapiens
ggtgtcatttctcggtcttcaaaaatgacggacactgctggtcgctgtggcttcctcctacgcgttcggtcactcctgcacatgtccgcagtagtggtgctctcggggaccccctcgccacc

SEQ ID NO: 298528 - DNA, 122 bp, Homo sapiens
acagagcaagactctgtctcaaaaaaaaaaaaaaaaaaaaaaagaattacaatgcttctacggagaaatcaataattcatttatagtggagagttcctgatatttaaatttttttattactt

SEQ ID NO: 298529 - DNA, 122 bp, Homo sapiens
gcaggatagcccactctctcccactctggtcctttgaccagagactaatgttgctgaggtcgatagggaagtaatggaattttgcatctgcaaatgtgatcagcctctgcaagcctggcttc

SEQ ID NO: 298530 - DNA, 122 bp, Homo sapiens
tcttttttttttaactggcagaagagctttttcatgttcttgggactgtaaaccaagcatcgaattttccgcaactttttctagtaagtgtgccttgtgggaaagttaaaaacaagtccatt

SEQ ID NO: 298531 - DNA, 122 bp, Homo sapiens
cacttgagtgcacagggctggtaacagagggaggctccatatcagacaggcataaatgaacgaatggcaaccacccacacccatcccagaactgtggtctggagagccttgaaaaaaggggt

SEQ ID NO: 298532 - DNA, 122 bp, Homo sapiens
cccggcactgcctggctgcgagcacatgatggcgatacgggagctcaaagtgtgccttctcggggtgagtcctggccgccacccgccggcggaccccggcccgcgctctcgcgccccttcgc

SEQ ID NO: 298533 - DNA, 122 bp, Homo sapiens
tgagtctatagaaatgctgatgccacttttctgggacaatcagctcttcacagaaatgcacgtcttcccatctcatcccccttatgatgcccagcatgtggtgggcctaaaattgctgtcct

SEQ ID NO: 298534 - DNA, 122 bp, Homo sapiens
cttcggctgaggggaaccgtgggcgggttctgagcaggagtggccgtgagggggacggaccgtagggggcgggaagactgcaggcaagagctggtaattttaagatgcaaataacatttttc

SEQ ID NO: 298535 - DNA, 122 bp, Homo sapiens
ggctacctgggcgtgcatgagccacagcttgcgcaggctggtgagaccctggaaggagcccgggcggatcaggtccagccggttgcccgacagctccagctcctccaggcgcaccagggccg

SEQ ID NO: 298536 - DNA, 122 bp, Homo sapiens
atccagatagtgcagtttttgttgtgcttgtgctgatcaactttatggtgtgattaaatacgattttttttattacgctcttgaaattgtactcttgaggttgcagaatggcaattagatgg

SEQ ID NO: 298537 - DNA, 122 bp, Homo sapiens
cgggggctcgccttcgctgtgggccacggccagtgtttctgtggaggtggctgatgtgaacgacaacgctccggcgttcgcgcagcccgagtacacagtgttcgtgaaggagaacaacccgc

SEQ ID NO: 298538 - DNA, 122 bp, Homo sapiens
aaataatgtatgttcccaaaatagcagtctgtgatcccacagtaatctctgtcttatcaccgaggctggcataactttttagcagctggcctggctgtctttctgttcagttccatcttctc

SEQ ID NO: 298539 - DNA, 122 bp, Homo sapiens
cttttttccccccacctccctaaactaaatcacttgcgcggttcttgccttttaacggagcgataacgtgaggacatctgaaattccgactttattttcctccagcacacctggcccctgcc

SEQ ID NO: 298540 - DNA, 122 bp, Homo sapiens
gtttttaagactagcaaaagcccagcctggcattatctagcattgaggtacagcgtctcacggaaagttcttttttattccccaggctgtccccttctcctccattcccggataagccttca

SEQ ID NO: 298541 - DNA, 122 bp, Homo sapiens
acaaatgtgagggcaatttttttaaaaactattttatttttaagtagatttgcagagatgcgtaaagtcttaattgcatcattaataagtgacagcattgccatggtgattacttattttca

SEQ ID NO: 298542 - DNA, 122 bp, Homo sapiens
cctccacgcttccagaggagacgatttggaactgacccgggagggccaagaaacaccttccgagtaccaggctaaaccccgccagggagagagaccgggacgaaggtcccaggctagtgcga

SEQ ID NO: 298543 - DNA, 122 bp, Homo sapiens
cccgacaagtttggcgtgaaggcccccccgggttgcaccccctgcccggagagccccagccgccaccaccaccacctgctgcaccagctggtcctcaacgagactcagttttccgcctttcg

SEQ ID NO: 298544 - DNA, 122 bp, Homo sapiens
ctcagtccccccaaccccgtcctgcaggaacaagtgtggtagaggctcggggtcggagggcgggcggccgtcccgcgggctggacggagtttctgggctgcggagaggccgttggacccacg

SEQ ID NO: 298545 - DNA, 122 bp, Homo sapiens
tcactgatgtcatatcatttattatcctcacagcagctggcattcattccctgaaatcgtcgtctcctgataaacaataatttagagatatgttcacttgtaaataaaaaggttagaatcta

SEQ ID NO: 298546 - DNA, 122 bp, Homo sapiens
ccaggatcactccgggaccaccacgccaacggctcaccaaggcgcgcaaacctccgcgcccggaagtttagtgtgtagctgctccttcgctgtcgctcatgcccatcacctccagctgacca

SEQ ID NO: 298547 - DNA, 122 bp, Homo sapiens
gaggcgtgagaagggggtcgttttgggaactcttctgggttccagttctggcccaaccaccgctggtccgggtgaccttggggagtccctttcctctcccagcctcagtctcccccctgggt

SEQ ID NO: 298548 - DNA, 122 bp, Homo sapiens
atgccgatttcggctgggggcggggaggcccctgattggggcgcgggaggcgtgatgtcacgtccggcgggggaagccctgcctcgcgcaccctccgcccccgtccccgcccccacaggtgg

SEQ ID NO: 298549 - DNA, 122 bp, Homo sapiens
ccctccagatcgcctgaggtccagccactaaagggttaagtggcaggacttggtggctcacgcctgtaatcccagcactttgggagacggaggtgggaagatctcttgagcccagaagtttg

SEQ ID NO: 298550 - DNA, 122 bp, Homo sapiens
agcgccgtacccacctccctcgctatcaaacaaaagctccaggcattggaaacgtttccccgccgggagcgccagggtccggccgcgctgcggggtcggtctgcgcgcgcggcggggtggtg

SEQ ID NO: 298551 - DNA, 122 bp, Homo sapiens
agaagctttagctgccaaagattgggaaagggaaaggacaaaaaagacccctgggctacacggcgtaggtgcagggtttcctactgctgttcttttatgctgggagctgtggctgtaaccaa

SEQ ID NO: 298552 - DNA, 122 bp, Homo sapiens
catcgtgaggcccaagagtgcggagccccccaggtccccgctgctcaagcgcgtgcagtccgaggagaagctgtcgccctcttacggcagtgacaagaagcacctgtgctcccgcaagcaca

SEQ ID NO: 298553 - DNA, 122 bp, Homo sapiens
acaaaccctcaaaagtaggaagagagagggacttaccgttcgccgcgacccccaggctggcggagccacttttaactaagaatgaattagggacaaactcttcctcagagtctgagtccggg

SEQ ID NO: 298554 - DNA, 122 bp, Homo sapiens
ttgcacccagcagaggccggcctgggcggtgggctcaggggcctgggtgcccgaccaggtcggctcggctcagctcagctcggcggccgcaccgcctcccggcacaggtgtggacgggggtg

SEQ ID NO: 298555 - DNA, 122 bp, Homo sapiens
tctctcctgcgtggggaccagcgctgagccatacaggctccctcagggtggggtctcttgcgcgcccctcgccttcccacggcgggcatctggccctggctgcctcctgcgtgcccctcgcc

SEQ ID NO: 298556 - DNA, 122 bp, Homo sapiens
aacagccacatgcagtttaatttccttaaaagcttagccggaaaaggtttctgtggcttgcgaccccagctgggcttgagagaaggctctgcacactggggcgggggcgggcacaaggtgat

SEQ ID NO: 298557 - DNA, 122 bp, Homo sapiens
gtgaggcccgggggcgcggaggggcggtggttcctggtgcatccggggagtgccggcccgcggcctctccgtggagattcctccaagcaggcccccaggccgccgcggactcctcagactca

SEQ ID NO: 298558 - DNA, 122 bp, Homo sapiens
atgcgcgtcgaggagaaaggcttctccccattccaaagagaaaatctcttagaggaagcacgcgcgacatctcctgtgtgttccgaagcgctctcgctctctctcagctgctctaccctctc

SEQ ID NO: 298559 - DNA, 122 bp, Homo sapiens
tttgcagtgggacctggctcacttttgtagatcccttcaaagctggagattggtgccttccgggattctgccattgaaggaaggaaaaaggtagcagacagcctttcccttctcttctcctt

SEQ ID NO: 298560 - DNA, 122 bp, Homo sapiens
ttttttttgagacccagtctcactgtgtcacccaggctggatatcagccatgcagtggcacgatatcagcttactgcaacctccacctcccaggttcaagcgattctcctgcctcagtctcc

SEQ ID NO: 298561 - DNA, 122 bp, Homo sapiens
taacagtcggcagcgaaagcgcgcactcgagcgccaatgagagcggaaggaggggcaccgcgcctgaggaacactccgtatgtcgaacaatgattggctggagcccacctttcttctttttt

SEQ ID NO: 298562 - DNA, 122 bp, Homo sapiens
agctgtgggcaccacagcccgaccagggaggcagcgggtctccccaggttaagaggccagcggaggacgcgcgcggtctccttgggggagggtgcgggtgggccgggcgcgcatgcgcatgg

SEQ ID NO: 298563 - DNA, 122 bp, Homo sapiens
gatgccacctacgcgcttccttgcgcatctccctgaccaggcgtacgtgtgcttctgctgcgtggagggcaaggagcgaaacctcagccgcagcaaacacacctctccacattccagcacac

SEQ ID NO: 298564 - DNA, 122 bp, Homo sapiens
caaaaaaacagaaaagacccagtggaaaaaaaaaaaaaagtgatgagttgtgaggcaggtcgcggccctactgcctcaggagacgatgcgcagctcatttgcttaaatttgcagctgacggc

SEQ ID NO: 298565 - DNA, 122 bp, Homo sapiens
tcctctctagatgaagcaagaacaagtctgtcttcccatctagggcagggttgctctgtgcgaggctgatggtgcacgctgctgggatattggcacttctcaggcattttattagctcctgt

SEQ ID NO: 298566 - DNA, 122 bp, Homo sapiens
gccgcggtggcttcagcccagacctgggcagccagcggagaaagagttaactggcaggggcgaggaggagcccagggaggaaggaaggatattgccgtaattctgaaagtttttttccttcc

SEQ ID NO: 298567 - DNA, 122 bp, Homo sapiens
gagctgacctgcgggcaaactctgcctcagcagccccccaactacgtggcaccatggccccgactgtacacaaaagagccatccttgccctaaatgtctgtgtgatgagctgtaagacccta

SEQ ID NO: 298568 - DNA, 122 bp, Homo sapiens
cacagtctcttctttttctctgtccattcacttccattcatgcactgcaagagggctctccgccctcccattgtagacccatggttcttcattccccacacttcacagtcacactgcttccc

SEQ ID NO: 298569 - DNA, 122 bp, Homo sapiens
atagtgcaccataaaaattcaagtggcaggccgctttcgggaaaggacatacagcaacaccgttctcacaaacaaacagaagtttcatgttgaacactgcaaatgttcaaggatgcttattt

SEQ ID NO: 298570 - DNA, 122 bp, Homo sapiens
accccttgggctgtgctgtgctgtgctgtgattcagagtcctaaagctttaggaatttagcgagagcagttccttgcttctagtgagggagagaaggtggtaaattctaggccagcccccac

SEQ ID NO: 298571 - DNA, 122 bp, Homo sapiens
ccaggctgagccccagcagcagcggcaggaatgtgatcatgctctgctctgtaaagatgccgggagttcagtcccctggaccagctcttccagggtccgtgggtcctcgcctgtcccagaag

SEQ ID NO: 298572 - DNA, 122 bp, Homo sapiens
agagcttcgcgtagcgcctggcattctcacaaattgagtccaccaactcggggtcatcctcggctacgtcgtccaggtccacatacagagccacctgttcccgatgagccagccgaacctca

SEQ ID NO: 298573 - DNA, 122 bp, Homo sapiens
gcaacctgggcacaggtggcttgagacaacctagccattcgggcctgctgccagagtgaacgccacagggaggcctgccgggtctggggagcatgagctggtcaggcccccagtagacccct

SEQ ID NO: 298574 - DNA, 122 bp, Homo sapiens
tgggagaggattacattttctccctgctccacttgactttcttccggaaggagcaggtctcgcaggatcggggccaagactggaagagttcaggtttgggagtcgtgtgtataacagccccg

SEQ ID NO: 298575 - DNA, 122 bp, Homo sapiens
agtgaattcttcccccagagtcctacagagaggaacccaggccagctgactccttcatttcgaccttatgagactcttggcagagaacccagttgagcctacctggactctgacctataaaa

SEQ ID NO: 298576 - DNA, 122 bp, Homo sapiens
agagaagggcgaagacccgcccctgcaggtgattgacgggcactctcctccaatggtcaacgcgctcggccccggcgggctgggcaagggccgcggctcgcggaggaatctctcttgccctt

SEQ ID NO: 298577 - DNA, 122 bp, Homo sapiens
ccccgccccgcctgcagaggcgcctctgccagaaggcaaacccaataagggtatacagagcgtacagctagaggacaggtgcgttgtcccttttagagctcaacagtgcattgaaatgcaga

SEQ ID NO: 298578 - DNA, 122 bp, Homo sapiens
tttgagggactgggaggactgtcccggctaaagctggcgcgggaaactggggctgcgcggcgggagggccctgctgctggggaaggaatctaatatatccgttcccctgaggaagggtgcca

SEQ ID NO: 298579 - DNA, 122 bp, Homo sapiens
gatcctggttggagagcgcctcagcgggatcctagatacagagcggctcagcgggattctcgatacagagcccctcagcgaatcccagatacacagcgcctgagtggtattctagatataga

SEQ ID NO: 298580 - DNA, 122 bp, Homo sapiens
gcaaggaaagcaggcataggacaccgtcgaaccaccactcccacgaggctctgcgcaggccgctcgcgttggctcagttaccatagcaacggcagaggtccctcgctcttgccgtcatcaag

SEQ ID NO: 298581 - DNA, 122 bp, Homo sapiens
tggccaattgcaaggggtttcacagggcgctgaactcgcgggagcgtcaccgtcctgcgacgcttcagaggatccttaggcctcagtggtctttgacccccggccccaggacctgaccccaa

SEQ ID NO: 298582 - DNA, 122 bp, Homo sapiens
caaacaaaaagtccgcgcggtcctaggtgaatctggccgaggcttctgcgtcaaggacggcgcgggtcagctgaggccaagaccgcaggcactgccctaccgctctccagatcacagctccg

SEQ ID NO: 298583 - DNA, 122 bp, Homo sapiens
gacctgaacttgcggaaccccggctggcagccagcatgtccccgcaccttttcatctgtccgctgacgctgccctggcagcttcagagttagtgctagagcacagtgctgccgccgcagccc

SEQ ID NO: 298584 - DNA, 122 bp, Homo sapiens
cttgaacatatcggagaaattaacttcccgaagcttgcttttaaaaaagcacaaacttgccgccctagaaagcatgactaaactaagcatccaatcttaaagcacaattagccagcaattcc

SEQ ID NO: 298585 - DNA, 122 bp, Homo sapiens
ccttcatccttctccagaagagaagaggaaacagaagaagaaacgcctggtgcagagtcccgattcctacttcatggatatgacatgcccaggatgctataaaatcaccatggtctgtagcc

SEQ ID NO: 298586 - DNA, 122 bp, Homo sapiens
agggctttagtaatccgctcaaatccccaggccaaacagtggcaccaaacagatctcctccgaaatcactttgaacttcagtcccaggaggcattttggcttatgcaggatggtctttgaag

SEQ ID NO: 298587 - DNA, 122 bp, Homo sapiens
cccgcgtcatgcacagcagggaggggagggttttctgtggagtggaggggggaccattcccggaggaatgttggagggaatgaactatttgcataaacaaaagatctgagtttccactttaa

SEQ ID NO: 298588 - DNA, 122 bp, Homo sapiens
agtgagaccagcagactctcacactcaacctacaccatgaatttgtgtctatcttctacgcgttaagagccaaggacaggtgaagttgccagagagcaatggctctcttcactccgtggaag

SEQ ID NO: 298589 - DNA, 122 bp, Homo sapiens
ggcctggcactaagttgctatatgagaactgaatcatagattctagaacagtgcctggcacgtagtagtgcttaaccaatatgtttggaatgaatcattgtcttgtgctgactttagtgctc

SEQ ID NO: 298590 - DNA, 122 bp, Homo sapiens
tctcgtggagcttgcctgctcagacacaagcctcttagaactgatggtcatcctcttggccgttgtgactctcatggttactctggtgctggtgacactttcttacacatacattatcagga

SEQ ID NO: 298591 - DNA, 122 bp, Homo sapiens
tagttcaaacggctgtagatctcaattcattctaaagtctactaactggttatgttttctcgaaccacatgcttaaaccaacttcttccacataagcagcttttacccatataatatcacta

SEQ ID NO: 298592 - DNA, 122 bp, Homo sapiens
cctcatgccagaaagctgcctcctcatcctggtgggggcgctggtgggcggcatcatcttcggcaccgaccacaaatcgcctccggtcatggactccagcatctacttcctgtatctcctgc

SEQ ID NO: 298593 - DNA, 122 bp, Homo sapiens
ctttgtaaactgtaaatgctatggacaagtcagggatagctaccgtcattaggattcttacgactgttacttccagaacacccactgtaattgtatggtcaagatttggacagcatttcatg

SEQ ID NO: 298594 - DNA, 122 bp, Homo sapiens
cgtccctggtcggagacaccgagggtgtgaccgtgtccctggcagtgctgcaggacgaggcgggtaaagtccggccctcttttggggagggtgggggttggactggatccagacctcccaag

SEQ ID NO: 298595 - DNA, 122 bp, Homo sapiens
acgccttcaacatgaagagcgccgtggaggatgaggggctcaagggcaagatcagcgaggcggacaagaagaaggttctggacaagtgtcaagaggtcatctcgtggctggacgccaacacc

SEQ ID NO: 298596 - DNA, 122 bp, Homo sapiens
tgcgtgtgggacgatttctcgggctgttctcgtcagaggtacctggccgcatgcgtgggacgatttctcaggttgttctcattggaaggtacctggccacgtgtgtgggacgatttattggg

SEQ ID NO: 298597 - DNA, 122 bp, Homo sapiens
tccaccgcttgtttacccagcactcacgaagatgcccggaacttagcatccttagatgaacgtacgtgcctggcaaacaacaaacatttcttaggcaactgaaaggctgatgggattccaca

SEQ ID NO: 298598 - DNA, 122 bp, Homo sapiens
tgagttcccagagcattccgggaaaacagcacagcacagagacaggcttgcgaactggcccggtccagtatttaatttggccagggcaggagactttcaaagtttaatttaagaggcaaggt

SEQ ID NO: 298599 - DNA, 122 bp, Homo sapiens
gggaaggaggggaaagaagactcctaccactcgtcgccgcctcagacggatcctttgccccgcccaccgctgctacgcaacccggcggaagctcgtcaccaaaccccgcctctttgtttaac

SEQ ID NO: 298600 - DNA, 122 bp, Homo sapiens
tttatagacagtaccaaaaaacccaggtgaaagtaatctatggcattagcaattaagatacgggttggccttgaggagagtgagtagactgtgcgtggagagagcagaggggcttctgggat

SEQ ID NO: 298601 - DNA, 122 bp, Homo sapiens
cacctgcaactggtcactggctttgtggtagtatgttgcgtgcatgcccgcctggctcaacgttaccgttgccaaccagttgttcaatgtgtatttcccagctagagacgtgacagtgccct

SEQ ID NO: 298602 - DNA, 122 bp, Homo sapiens
tgtgagtgtgagtgtgagtgggtgtgggtgcgagccgggccgccgacgatgccgcggggccgccccccgaagcccagggagagcaaggcgcgcggcgactccggtaaggcccgcggccgcgc

SEQ ID NO: 298603 - DNA, 122 bp, Homo sapiens
ctcgcgagatgtgggcagggcctcccgttaggggcggggttaacaggctgagctgcggcccggcatgggtgggttacgggttttctccgcgaaagctccgggaaaagtgacctgaaatcggg

SEQ ID NO: 298604 - DNA, 122 bp, Homo sapiens
atgagaattattctcaacctgtattaggattgggagggagggagggaggcgaaagcaaagcgggcatgaaagggagaaaaacgtgaaccccctgtggctgtctgggaacaaagccgcctaat

SEQ ID NO: 298605 - DNA, 122 bp, Homo sapiens
caagggtcctactttggctgccagccagcgacgacttcaagggtaagatcctatgcgggccgtaaggactcttcccctccccctctcccacttcttctatcccaaagtcgctcttcccaatt

SEQ ID NO: 298606 - DNA, 122 bp, Homo sapiens
cacagtatttgccctaccacagagggtcaacctggattatcccgagttcttccaactctgcgcttcctcccaggttggtgtttcatgagtaagtctgagatcaagctggcttttgagcttct

SEQ ID NO: 298607 - DNA, 122 bp, Homo sapiens
gtcacgagctcaaacccacacccagtggggaaatctgcgccaacagctgagttgcccaaccgagggatttcaagctttccaagaactgacgtggtttctggaaggaaacagaggccacatga

SEQ ID NO: 298608 - DNA, 122 bp, Homo sapiens
ccggcctcatttttcttttgatgtatctcagaactgttacacagggttggggttggagaccgattatcccggtgcccttttcacagtgctcctgatttcatattccaaagcaagcctgagct

SEQ ID NO: 298609 - DNA, 122 bp, Homo sapiens
caggaactggaatggctcatttcacttagcctgctgcttgtcactcctcacaagagggagcgtgcaagtgagtgcaggacccagagcgaaaatacgaatgctggaactcaccggtcactcct

SEQ ID NO: 298610 - DNA, 122 bp, Homo sapiens
aacacattttattacacaagcaccaaaaaaaaaaaaaacacaaaaaaccacaaaaggagacggtaatagcctggtctccgtgagacatacagataataaagaatttgcttctcagcagggta

SEQ ID NO: 298611 - DNA, 122 bp, Homo sapiens
actccatctcacgtctcaaaaaaaaaaaaagaaaggaaaagaaaaaagaaatagggccagcggaggtggaacaatgccttaaagtgctctccgcccgacagaaagaattcaggctccaacct

SEQ ID NO: 298612 - DNA, 122 bp, Homo sapiens
ttcagaccaaaaaaactgatgcaactatgtttgagacctgaaaattactgagcatggattcggatgttaaatcccagctgtttatgtacaaagtagctgaggctcatagcatacagcaaagg

SEQ ID NO: 298613 - DNA, 122 bp, Homo sapiens
catccagaaaccttggggcctttggggtccgaggacaccctaatggggttccccacagggcggccactggtgcagagatggctccaggccggcgggataggctgccgccggcgtgcacctcc

SEQ ID NO: 298614 - DNA, 122 bp, Homo sapiens
aaacaagggagattttctatgagtcaccgggattttgccctccatgcgcaatcccaagggcggagaggaatttcagcagctacgagcaacagaaaggaaacgagagagtagccagactctcc

SEQ ID NO: 298615 - DNA, 122 bp, Homo sapiens
cgggggcgctgggacaactgcagatgttggaggggagttcgaatcccaggcttcccggcccgcagactgccccggctggccccaggacctgtttgttctcctgcaaaatagggttaataatc

SEQ ID NO: 298616 - DNA, 122 bp, Homo sapiens
tgcggcggctgcagcggatgatggtggcggccggcccgctgggctgtgcctgtgtgtcgccgcggaaatcagcgccctgcgccgcgcgctgagcccctgcaggtccgccgcagccccagcct

SEQ ID NO: 298617 - DNA, 122 bp, Homo sapiens
ggagggctcctcggctgcgcccagacggcgtaaatacaaacctcctattttattcctaggcgtcaaatgctccggggtttaaaaccgtgaagccttgccacaaacggtccgaagtgtctccc

SEQ ID NO: 298618 - DNA, 122 bp, Homo sapiens
tgatgtggggttttcgataagtgcctcatcagtatcctcatcatgctcgtgttgctccgccgcggcgtgtgccctgacttgattgtaattgcccgaatctgctcccgctgctcaggcgcgca

SEQ ID NO: 298619 - DNA, 122 bp, Homo sapiens
cgcagctgctcctgctcagccgggacagctccctttaggacggcgacgtgtgtgtgtgcgcgtgtgtgtgcgtgtttgtatgtgtatgcgtgtgtgtgtgtgtgtgtgtgtgcgcgcgcgcg

SEQ ID NO: 298620 - DNA, 122 bp, Homo sapiens
gcctgagtgcttcggacccgccctgcggggtgagggtggctcagggctgctggctgccatcgaagaggccatccgcatctccgaggaccctgcgagggatggcccaggcatccgcagggacc

SEQ ID NO: 298621 - DNA, 122 bp, Homo sapiens
gacgtgaaccacacagtccaggagctggtggaaggaggccaccccagttcagatgaggtgcgttcctgccaggaccacctcaacagcaggtaggagggcctggggctgggagtccctcccat

SEQ ID NO: 298622 - DNA, 122 bp, Homo sapiens
aaccacccccgcaaagggcagaagcgccagatcctaccagccaattacccagacgcgcatcgcgacccgcaagttcgggcacgctccgcccgggcgcaggcagcgggaggggccgggcacgc

SEQ ID NO: 298623 - DNA, 122 bp, Homo sapiens
gcaacccgggagggaggggattggccagcggctggtccaggtgtcatgtgacaccgcggacgagccggggcggggatccggcagctaggccggggggtggggggggcggtgcggaactagag

SEQ ID NO: 298624 - DNA, 122 bp, Homo sapiens
ctggatcaccttgatgagcggagagacctgcaccggtggcaccatcttgtccctgacctccgcaccggaagcacaacctgcagacggagcaggatgccgcacaagccagcaaagccttggag

SEQ ID NO: 298625 - DNA, 122 bp, Homo sapiens
ccggggctgactttcaggaaatgatgccggccccgtaagtcagggcaattaccggcagtgcgaggagaattactgtacggggcggatctcccacaggcgctgtcaacacgcaaccccacccg

SEQ ID NO: 298626 - DNA, 122 bp, Homo sapiens
tctgcactggccgagaggagcctgaagtcctgctccctccctcgcagtctgaaactggggcgttggggaaaactgcgagaaggtttaaaacccagctgttggtgagagcatttggctaagaa

SEQ ID NO: 298627 - DNA, 122 bp, Homo sapiens
aaaggagccaaagatccctgacagtagataatctaccctctcatctcccagaggccacaacgagctcctgtatcagaaggcaggcatttcaacagcatgggctggaattaaaaggaccaatt

SEQ ID NO: 298628 - DNA, 122 bp, Homo sapiens
agcaaacacggcctgaaagccgtgacaacgggctgccgtgctgggctttgtctgagctgacgctcggggacttagggaggctctcgagttcagagccagggcccctcctggcacagctcaaa

SEQ ID NO: 298629 - DNA, 122 bp, Homo sapiens
tttaatccaagacatagtctcccttttctaatgggcaatcttcgtttttcaagttgttctcgatctcccatgtaaagtaaatgagctctagctctctccagctccaggaagtcttagacttt

SEQ ID NO: 298630 - DNA, 122 bp, Homo sapiens
gccaaggtgccctctccagccgcactgctcctgcgcaggttgggtgaacgctcggcccagcgtcgaggtgccagcctggagttctgggggtcaaattcctcatcgggaatgacctcctcgca

SEQ ID NO: 298631 - DNA, 122 bp, Homo sapiens
ggagaaggtgaggactcagtttgcgggggcacactaagtgtgcctcactggagccctcagcgcccctttagaatttgaggtgggcttgccagagttttgggaagatggcagcagcagcaggg

SEQ ID NO: 298632 - DNA, 122 bp, Homo sapiens
cttcctttttctcccttcagtgaggcaggccctgagttaagtcagctgtcaaaagcagaacgtagaaaacccaagaaatagtccttgaccaggcacgtatagttggaaacacctgttctttg

SEQ ID NO: 298633 - DNA, 122 bp, Homo sapiens
tccacaatgatctgaattatatctctaaggcaactttgctctttgatgccggctttcaatcgcatttccttggcttcctacatcagtagtttttaagaactcacattttcccacaagattta

SEQ ID NO: 298634 - DNA, 122 bp, Homo sapiens
ggcagccgcaggccggggcgctcccccgggatgcccagagcacgcgggggcggggttcggcgcctctggctgccagacgtccccaatatggtctgaggcgcttccaagccacctccctggct

SEQ ID NO: 298635 - DNA, 122 bp, Homo sapiens
tttattaccctagtctgcctgcgtgtacagaatgaagggtgcactgttttatatagagttcggcgctttgaactatcatttgcctagctctcccagcttccgcgcgggccacggctccgggc

SEQ ID NO: 298636 - DNA, 122 bp, Homo sapiens
cgaactcctggcctcaagcaagtctcccactgtggcctcccgaggcgctgggatgacaggcgtcagccccgcctccctgaggtttctgtctgagtcctgcaccccgggctgaggcctctctc

SEQ ID NO: 298637 - DNA, 122 bp, Homo sapiens
gttcccgtgcttacatcaaatggtaacgaggggtacagcctattgtctgagtctacttatcgcccttagacaaatgccagaatcataatcagagtgagaaattacgcctgagcacagggggc

SEQ ID NO: 298638 - DNA, 122 bp, Homo sapiens
ataagacagagacaggaaagtcaaagtgaggagacaattaggtgaccatgaagcagagaccgatgtgatgtagacacgagctaaggaatgtgggcaacctctggaaactggaagaggcaaga

SEQ ID NO: 298639 - DNA, 122 bp, Homo sapiens
tgtccccgctcactaacctaaccgtggttcggatttctggcctaaacccaggcatttgagcgcctcatagctcgtggggaacctgacaggcaattgtattatgaaagctgacatgctgaatg

SEQ ID NO: 298640 - DNA, 122 bp, Homo sapiens
tttttgttttcttttcaactgaaatgttcctcctagtagccactgaaggcaaaaattatccgggtgaagttatgccacttagaaacctaaacactagaattgtgattgtaatcagagtacat

SEQ ID NO: 298641 - DNA, 122 bp, Homo sapiens
gccttcccagacctcagcacccccgggatatgtgtaatagaagggtaaatacacgccaggcgcggtggctcacgcctgtaatcccagcgccttgggaggccgaggtgggcggatcacctgag

SEQ ID NO: 298642 - DNA, 122 bp, Homo sapiens
atgtgataagaagatgtacctcagattctgaaagacctgtccttggcccttggctggtcgcggggggcccagccggcgggacagaaaaagagcggagggatcctcagcccgcgcgcagagcc

SEQ ID NO: 298643 - DNA, 122 bp, Homo sapiens
atagcggccgagaaacaatggttatctgctccactgacgccaggatgtcttctccgtgcccgatcccggagtacaaacagtgaaatgagaagccggtgagaaacgcgctggttaaaaacatc

SEQ ID NO: 298644 - DNA, 122 bp, Homo sapiens
cggccagtccctgcagggcccggcttcccggcgcggtcctttccaggggctccccgtccacgatccacaaacctgccaggattagagggctgggagaaagagctcctttggcactgatttct

SEQ ID NO: 298645 - DNA, 122 bp, Homo sapiens
tgccctctgcaccttagtggtggggttggtgtttcactatgggaaggagttgtttgttgccgactgcccgcgctgggtcaggcagcctctgggccctattgtattaggtgtaggcaggaatt

SEQ ID NO: 298646 - DNA, 122 bp, Homo sapiens
ttatttttccatcttcaatctatgtttttggtggtattctaacacatgtatatgtattgtcgggggaaggttagacaaatgtcataaattgaacatctgaaaatcaaaccaatagagctttt

SEQ ID NO: 298647 - DNA, 122 bp, Homo sapiens
gctaaagcatccaggcaggactccgccaggtgggcaggcagaggcctgtgcacaggcagacggtgtgcccgtgagcaggacatgcttgtagggtcacaggtcacccacccgcaggacacgca

SEQ ID NO: 298648 - DNA, 122 bp, Homo sapiens
caaaatatacatcaaatcagatcatgtcactctcctgccaaaagccctccaaagtccttacgttgatctagctgcctcttcaaactcatcacacatctgatcttagatgtattatgcttcaa

SEQ ID NO: 298649 - DNA, 122 bp, Homo sapiens
ctgcacaactggaggagggcaggacgaggctggcctcgcaggtcgggctacgttcttctacggtctgaggcgttgtctagaaactcaaaatctctggaatcccatccaggactcctccatca

SEQ ID NO: 298650 - DNA, 122 bp, Homo sapiens
gtgaccgccactacggggtcggagcggggcggagctcagctcacagattctttgccagtgcggaggctgcgggcgcccgctcaggagtgcagattttagagaatgcaagtcagcgtttcaag

SEQ ID NO: 298651 - DNA, 122 bp, Homo sapiens
agcaatgcttgaggttgggctgctaacaagctcactcaactagtgtttcctgacggccaacgtcagaataattccatctccatgagaagtacagaaagaaccacaaaccaaacctccaaatt

SEQ ID NO: 298652 - DNA, 122 bp, Homo sapiens
catctcagacgatgggtggccgggcagagaggctccgcacttcctagatgggatggcggccgggaagaggcgctgctcacttcctagatgggatggcggctgggcagagacgctcctcactt

SEQ ID NO: 298653 - DNA, 122 bp, Homo sapiens
tcggggtggggaccaagcagaacaagagaatcaaaagtcagccttcttttggtctctgctcgtgcacaactggtttggttctgagcaggctgatgtttgagaggaaaagccaggactgcttg

SEQ ID NO: 298654 - DNA, 122 bp, Homo sapiens
cacccggccaccgcggcagacgcttgctcctgccacgccccccccccctcccccgcatcacgtgtctgcactcgctttcctcggattcccggatgtgggtgagttcatttgctcgcgtgcag

SEQ ID NO: 298655 - DNA, 122 bp, Homo sapiens
tagctgtgaggaactgtgggtgactttatcctcacatcgtgtttcttccagaaattcagacgcaacagaggttaggccagtttggtgggttccagtgagcggtgtgttgagcctagtagagc

SEQ ID NO: 298656 - DNA, 122 bp, Homo sapiens
gaaaggccacaatggaggaactgagtgcacctctgcgcttcagcgccgcgctctgcagggcgtggccacctggtcctggtccacgtgcctcagcacagaggccgcagacaaatgccactgct

SEQ ID NO: 298657 - DNA, 122 bp, Homo sapiens
ttcgtgccctccttctcctcctgctcgcgccagcgggttcctgatggtagggtgggttcgcgccctcctcctcgcgtgagcgggttcctgattgaagggtgggttcgcgccttcctcttcct

SEQ ID NO: 298658 - DNA, 122 bp, Homo sapiens
tgtccgtaaggctacccactgagacctgggcaggggctccggcccaaagccctcagaaaacgaactcatccgttctttctagtcatttgctgagcacctaccaggagccataaatggccgtg

SEQ ID NO: 298659 - DNA, 122 bp, Homo sapiens
gggggataaagggcagcccctgggagaaggccgaggcttttccattgtaaccagccactccgggaatctgcagctctcatctggggcctggtctgagaacccaggttttcaggagtctgatc

SEQ ID NO: 298660 - DNA, 122 bp, Homo sapiens
atacagaacatttgatgtggttaaggtcccacagtggctttctttctgatggatttgagacgcagcgggccatggtggttgagaacaatgggctcttgtgccactctgcctagtttcagtcc

SEQ ID NO: 298661 - DNA, 122 bp, Homo sapiens
ggggagctagcactctgccccccacccctcactccagcgccgctgcttccgccgccgtaacgagcctcccgtctattggctggcgcaggccccgccccctgccgagtcagccagtcgccggt

SEQ ID NO: 298662 - DNA, 122 bp, Homo sapiens
aagcagcatctctagctttcttccatctgtccctctgcacagctggctcagcgagactgccgtgtcccgcttgtgggcaagtgacgcgtctggggagagtgatccagaaatgtcaactttgc

SEQ ID NO: 298663 - DNA, 122 bp, Homo sapiens
ggcttcttcctctattttccctaaaatagattgtttatacattatcctaagccatgtttacgccagggattttcatgtatgccaaataacatttataagaaaatttaagttcagttgagaac

SEQ ID NO: 298664 - DNA, 122 bp, Homo sapiens
ggtagcgtggtggggagagaggagttagggaaaaacaaacacccccaaaaaactatggctcgcagtatccaaatgatgaagaacagcaagttttctgtgctcaacttccattttggttctaa

SEQ ID NO: 298665 - DNA, 122 bp, Homo sapiens
cagcgactcgcaggggctggtggggctggggtccagctgccgtgctcccctgccctgcgccgcgccgcgcgtcttggtaggcgctgcgctgccggggccgggtcctgggccagtgcaactcc

SEQ ID NO: 298666 - DNA, 122 bp, Homo sapiens
cgtggtggaaggagaccctgaatcagggacttttaactatatggcgaatctcgatggcagcgaagtgtttgataaaggctcttgggagggaatggagatgtgatgacagtgatggggatgat

SEQ ID NO: 298667 - DNA, 122 bp, Homo sapiens
ggggtgtagtcttgggtggggttgctgattgcacctcatagtcatcttccctgaaatgcacgttgctgccagaactcttgatgggctccaattcatcagagtgtcatcaaaacacaaattct

SEQ ID NO: 298668 - DNA, 122 bp, Homo sapiens
gaaaatcggggcactgaggcatgcagttaataactgccgagtgccttgcaattccgggtccgcactcgagttggggctacagtttggtggccaactgagacgggcagggctgcgagctgtgc

SEQ ID NO: 298669 - DNA, 122 bp, Homo sapiens
acgcagtattgttacagacttggtcagtcaaatggaccctcatggaaggagaaccatattcgttttgaccaaagtagacctggcagagaaaaatgtagccagtccaagcagggtgaggtcaa

SEQ ID NO: 298670 - DNA, 122 bp, Homo sapiens
atactgctctgccacaaactagaagacccctacaaccctggatccacagctgtttgcagccgatcctcatgcaaattgccaacagatacaggtgggaggtgaaccagggacatctggacaag

SEQ ID NO: 298671 - DNA, 122 bp, Homo sapiens
gcttcaggggctttccacagagggagcacggcgggggcggaggctccctgcagggagcagcgctgaggtagactggctctgaccttggctctctgaagggagaaaaacttaatcgttcttca

SEQ ID NO: 298672 - DNA, 122 bp, Homo sapiens
ggggctgtgctgggatgtccccgccgggtgtgggcgctccttggggaacctggttacccccgaccccagccccagtgagaccccaatgccggctcctgccagccctggacggccattggtac

SEQ ID NO: 298673 - DNA, 122 bp, Homo sapiens
aggatgcgtggtttagatagaatgcgaggtttagataggatgcgaggtttagacaggatgcgtcgtttagacagaatgcgaggtttagatagaatgcgaggtttaggtaggatgcgaggttt

SEQ ID NO: 298674 - DNA, 122 bp, Homo sapiens
ggcacagctccagggtgggcacggcggccatggagtcgatgtaggcgctgaagtcgatggcgctctcgtcgtcgtacatggcgggggcggcggcgcctggctcgcctagggcccctggctcg

SEQ ID NO: 298675 - DNA, 122 bp, Homo sapiens
ggggaccttttgtttgtttgttattatttgtagagatggtgggggtctcactacgtttcccgggctggtctcgaactcttcagctcagaagaacctcccgcctcggcctcccaaagcgcggg

SEQ ID NO: 298676 - DNA, 122 bp, Homo sapiens
ggagaggagaccgtcaggccccgtccggcccgaccccctctccccctccccgctgcgatgcgcccgggcctcgcgccagcccagtgactcaggctggatcccgcacagccttcccggcacat

SEQ ID NO: 298677 - DNA, 122 bp, Homo sapiens
actatttctgactctgtctttgaaaatagaggagagaagttgtttagagagtataggcaccggcagctgggcccttgcagccgattgggctcaaattctcatactgctatttgcatggctgt

SEQ ID NO: 298678 - DNA, 122 bp, Homo sapiens
tcagagcaccatgctcaactctccggggacacggagaccagtgaaagaagcgcaaaagtacggtgaggactctcagaaatcgcattcccccgggacacccggcccacgctcgtcggtcacta

SEQ ID NO: 298679 - DNA, 122 bp, Homo sapiens
gttttagaaaggaaattagagagagaaagtaacacgttggcccattgtgtgtctgagcggcgctctgcctgcagctatctccgtgtcaatggcatcctttgatagtcgcagtggaccgggtc

SEQ ID NO: 298680 - DNA, 122 bp, Homo sapiens
atggaacatttagaaacaaaactgacttcaggcatcatattattttaaatgttactattacgtcttcttctgcctatacttaaaaataacttgataaatgacttggactgatgttactctgg

SEQ ID NO: 298681 - DNA, 122 bp, Homo sapiens
gctgtgttctggaaaggagcatagtaccgtcgttgcggcaggtggtgttgagtgtgtattcgtgtggcccctcccttgtgtgtaagcctcgaaaatggataggtgaaaggagatacgcgcca

SEQ ID NO: 298682 - DNA, 122 bp, Homo sapiens
tcaggcttcagccagagccctgcgtgcctcccaagcagaggggctgggtttccgacctggcgtggccatgcacaggcatgcgtgtggctccgctgcaccgcccgtgtttatcttctggacac

SEQ ID NO: 298683 - DNA, 122 bp, Homo sapiens
gcctcgaagcggtgacaaagaagtgctggcagagggaactgccgccagctgcaggcacctcgcccaacacctccacctcgagcacacccaagtccacagcggtcccgggatctgtcacccag

SEQ ID NO: 298684 - DNA, 122 bp, Homo sapiens
atttctacgtgccgggagcgttcccatattatgatcctcataaccaaaaccacgctccagcgcaagccaggcctaaccgcaccagctgagcctcagtgctggtaaagcctcgcacctggcgg

SEQ ID NO: 298685 - DNA, 122 bp, Homo sapiens
agtctaaactaatcctttggattataaatgaactccaatccatgtttcaccatatactctcgcccactacagagcagaatcagctgtctgtcaggatccagtgccagccacattggaatccc

SEQ ID NO: 298686 - DNA, 122 bp, Homo sapiens
acggtacacgcctccggaggtggcggtttcgttcccctcctccaggaagccccggccccacgccagccaggtccccacccctgccggccagggtcccctgggctcggcccacacccacccgg

SEQ ID NO: 298687 - DNA, 122 bp, Homo sapiens
gcacacccgcaggcgggaccccggggtgcccttgccctcctctcctgggcagccgcacgccgggatccccactccacctgcgcgcgaactttcgccatctgggactcaagcgcccgcggctt

SEQ ID NO: 298688 - DNA, 122 bp, Homo sapiens
aaagtgaaatccaaaaagggagcttttctcccagaagctcagtttctcaagccacaggaccgttccggggctgagtatgaagaacaagggcttctctgggctaccccaggtcaaggggcatt

SEQ ID NO: 298689 - DNA, 122 bp, Homo sapiens
tccggcagatcccgtctgcacccccgggttcctactctgagcgcctccccctaggccacccgcactgtcgggtcagtcaggctggagccccaatccgcagagatctcccgcagccacagatc

SEQ ID NO: 298690 - DNA, 122 bp, Homo sapiens
aatcccatgatgggattataattacgatttatagcagcagacgtctactgggtgcctccacgtgttcagcagttcacatgcgttatctcacttcatccctaggaggttcccagcagatcatt

SEQ ID NO: 298691 - DNA, 122 bp, Homo sapiens
gcagccacccccgcagcctccgcagcctccacagcctccgcagccagatccacagcaagacgatccgcagcagctgcccccgcagccagagcccccgcagccagagcccccacagccacagc

SEQ ID NO: 298692 - DNA, 122 bp, Homo sapiens
tttcctcctattgttgtgaaccgttatttttgtgtagtgcgtacaaaccgtttgcacactcgtgaacgcatgaaacacttatcaggcacccactgtgttcccggccctgtgctgggtgctgc

SEQ ID NO: 298693 - DNA, 122 bp, Homo sapiens
cggagtgaggggaccggagttgaaggggcggaggggaagtgggatgcggaaaaatgagttcggattaaggagactaataccctactggaagacaggcatagtagacatctatcgggctggac

SEQ ID NO: 298694 - DNA, 122 bp, Homo sapiens
aagcgggctgtttgtctgagggcctctggcgctcccttggcccagacgctgcacattgttcgggccagggactgggtcaaggagattacgcagacgctgggagcacacgggcagagtggacc

SEQ ID NO: 298695 - DNA, 122 bp, Homo sapiens
agatgcaaatcaagagccaaccatgcaagcagtcccttctaaggccagcagtctcaggcccgctgtgtcaactcttttctatacgtgcacatacacacagtgacacttccatgagcacaagg

SEQ ID NO: 298696 - DNA, 122 bp, Homo sapiens
tcgttggatcctgtggaataactacgttcccagcgtcccgtgatattctgcaggtctccccggctgagaggcagatgttgaggccatttgtgtatgaacaagaaaaggacagactcaaccgg

SEQ ID NO: 298697 - DNA, 122 bp, Homo sapiens
gaccccaagtgattcgcccacctcggcctcccaaagtgctgggattacagtcaccacgcccggccagtttatttctttcaagagacactggcgttcagactatctgaatcaatccggtaact

SEQ ID NO: 298698 - DNA, 122 bp, Homo sapiens
agccaggactccaagccaccctcccaggtgggcaaccccccatatcccctgtcctcccagcgtggtggggaagcttgaaggcatctgagcgctgctggaggctcccccacatgctcccagca

SEQ ID NO: 298699 - DNA, 122 bp, Homo sapiens
tgagagcctcaaaaggggcctcatgaagcccagatcttccctggtcaagctgatggcattcgtataactgaaagttggggaagaccaccaggtcagtggagtggagaggttttgtatatggt

SEQ ID NO: 298700 - DNA, 122 bp, Homo sapiens
ctcgtggcttccgcttttacaccctcctccgagagccggctcccatgcccttcccagctgcgctgccctcggcaccaccgggtgcgtccccccgcaaagctggacgcccttgtgtcctcccg

SEQ ID NO: 298701 - DNA, 122 bp, Homo sapiens
atagaaaggaattcctaaggcaagccaagtagttatcagaatctccacccctaccagagtcggaagctctgtacttgcctcctggtaactgcttagtgagaattatttagccagcttggatt

SEQ ID NO: 298702 - DNA, 122 bp, Homo sapiens
cagaggcgttttcatctcaacatgagagtacataatagaaatgctactgcatttacatttcggtggccacaccccaggtgtctttgcaacaacttcagaacctcagctatcaataaacaaca

SEQ ID NO: 298703 - DNA, 122 bp, Homo sapiens
gagcgggagtatttcccaaagcagttctctcacgggaccgtgtcgccgtgcaggacgacacggccctctcttggggttggttaagagctgtggctgccctttcgcttcaaggaaggctacaa

SEQ ID NO: 298704 - DNA, 122 bp, Homo sapiens
accctggaagtgggcatgcagccgatgggcaaacagggtccccacatttgctggtgctggcggcttgaccctagggacaggtgtttttgtgcatttcactcttgggaggaattgtgctacct

SEQ ID NO: 298705 - DNA, 122 bp, Homo sapiens
ctgggggtctcaggagttcaaggttggattcttctgcgaatgaagaaagtcccttttcttcgctgagcctgtattagagagaagaggctagactagctggtcatgtcccaaagcaaattcaa

SEQ ID NO: 298706 - DNA, 122 bp, Homo sapiens
ggtcagttttcttcgggcaacaattttctaaattggctggggtctggcggtgttggcccccgcgcgcagaccttgccccgaagggggccctgcctgcctggcatgggcggaggggggaaggg

SEQ ID NO: 298707 - DNA, 122 bp, Homo sapiens
cttttcctccttgcgtcctctcccggtcctccagatctgctgtggccgcggttgggggagcgggatctggaagatgccaacccatgccttggcggtgcctgactctaatcaggacgagctaa

SEQ ID NO: 298708 - DNA, 122 bp, Homo sapiens
ggaagagcaaccacacccccaggcgagcatctgacagcctggaacagcaccctgcacccccgggtgaggatcagacagcctggagcagcacccacactccaggtgagcatctgacagcctga

SEQ ID NO: 298709 - DNA, 122 bp, Homo sapiens
agattcaggcggagcgccgggctgcagtgcgcggaggcccgctcccgggactcattgatgcgcatgcgcagggcttcagcctgcacgtactcggattgtgcagcgactccccgtggcggttg

SEQ ID NO: 298710 - DNA, 122 bp, Homo sapiens
tcagtagcaggatggcctcagattgaggtcccagggccaaaggaccactcctctcctcagcgctggtccgggaaaggcaagctccgggcgggagcgcacgccgcgcccccgaagcctggctc

SEQ ID NO: 298711 - DNA, 122 bp, Homo sapiens
aaggattgtagaccacagcaaggcttcctcaggcttgcataccagggtatgcagtgtctacggccactatttcaaagattagagttgacgcagcaaggtggtaaggtcagaaataatttagt

SEQ ID NO: 298712 - DNA, 122 bp, Homo sapiens
accacagggctgagcaagaaaatcagatgcagagcgtggggcgaggctcccctcacaggacgcccagagaaaagatcagcgaccctggctcggatgcagagcacacagcggggagatgcagt

SEQ ID NO: 298713 - DNA, 122 bp, Homo sapiens
taagactggactggaggacactccagacagaatgactactcgtgggtagattgaagctagcgctcagattggagcccatttgccatctcaagcctcccgcatttccagacacgccatttgca

SEQ ID NO: 298714 - DNA, 122 bp, Homo sapiens
acacacagcgacgctcttggagagcacatacatacatgtggacaggcacacgcacagcgacgctcttgcacacgcacacacacgtggacaggcacatgtttgcagcacggctcactctcaag

SEQ ID NO: 298715 - DNA, 122 bp, Homo sapiens
ctccctaggacgaggcagccgagggaggagagcggccaggactgcgctgtggctggacggcggatgaggcttctttcaacaaggcgagtttcagtgagaaatgcgtgatgcttttgatgttt

SEQ ID NO: 298716 - DNA, 122 bp, Homo sapiens
gaggacgcccagagaccgcgggcgctgagcgcgttgggcagactggttgcctctgggcatcgcaaactgcccccgggcgcatctggcttatctggagacctgggagcttgaggctcattgga

SEQ ID NO: 298717 - DNA, 122 bp, Homo sapiens
caataaatgagttagcttcttccacgttggaggcccagagctgtgagccccaaacacacccggataagacgctggacctgccaggtgcggcagagccgaggacgggagagccttccttcccc

SEQ ID NO: 298718 - DNA, 122 bp, Homo sapiens
gtaatttggagtctggaaggttgcacccccgccagtcttcatgaggattcacaatgctgacgttcgtcagaaggatttggagagatagacccaatttggttttctcaagtagggtctgatca

SEQ ID NO: 298719 - DNA, 122 bp, Homo sapiens
tggattattccatgttcacaaattgtaaggatttggtctatagatggattcagtgcaatacgatggaaatccagattgctattttataagttgacgagcaggttctaaaatttatatggaaa

SEQ ID NO: 298720 - DNA, 122 bp, Homo sapiens
ttcccgtgccgctgtgcgtccctgtgacgtgcgttcccgtgctgctgtgcgtccctgtgacgtgcattccctagtaatgtatatgtgctcatgacgtgcctgtgttaggccattcttgcatt

SEQ ID NO: 298721 - DNA, 122 bp, Homo sapiens
tcctggattaggtatttgtttctgtttcttgtacgcaactcttcatagctgcctttgtcccgaataaatactttgaaacttgaaaggatttgagttcagaatggaggttaatatcctattga

SEQ ID NO: 298722 - DNA, 122 bp, Homo sapiens
ggtaagggtcaagggagctcggattggtgactgaggagcccaaggaaagccggcagaagccgagtcctctagagctgggcttttggctctgaatcgtgcaggcttcccactttacacagacc

SEQ ID NO: 298723 - DNA, 122 bp, Homo sapiens
atttgggggcctctactgctctctctgaccccttgtctgggtcttggggctgaatcccatcggcctggcaactcattgccccatcacccatggagaaaactggagagcctagaagctgaggg

SEQ ID NO: 298724 - DNA, 122 bp, Homo sapiens
ctaccacctgcgatgccttggaaatgcagccggcggggcccacctgtggagcctgcagaccggaatctctggtctgtgtcctaaccagccctgcaggtgatcccccgcaggtgaaggctgag

SEQ ID NO: 298725 - DNA, 122 bp, Homo sapiens
ttaagcaaaagctattaagaagcctatctgaaaagcttgggcattaacattgcaaatatgcgtgtgagtgtaccggggagagtggaaaacaatttactgaagaaatggtcccaacacagggc

SEQ ID NO: 298726 - DNA, 122 bp, Homo sapiens
ccaaagcaaacaacatcctcagaatacagtttcttcaaagccaacttgcttctctgttgtcgtaataatgttgtacgcctctgttcttttcaaaagcattccttaagacatctggctggtca

SEQ ID NO: 298727 - DNA, 122 bp, Homo sapiens
taccctgactaatccagactttacttgcaaaatccgttaaagcattaagagttctcccttcgccaggtgcggtggctcatgcctgtaatcccagcaatttgggaggccgagacgggctgatc

SEQ ID NO: 298728 - DNA, 122 bp, Homo sapiens
ccggagcgttctgggaaaggcctgggtgtcctgggttctgaagaccccagggacgcaccccgctgcggtctccttccctgcccggatggactggacgggggctctgccccacccacccatcc

SEQ ID NO: 298729 - DNA, 122 bp, Homo sapiens
ggccctgaaaacatcctctctgccctcaacctcttctcagcaactgctttgtgtgtgcagcgcctttcaggcccccagccccagcctggtgggccccctgtgctggaggcatccagcaggga

SEQ ID NO: 298730 - DNA, 122 bp, Homo sapiens
ccttcattcgaccgactgttgtccagggcaagttctttcacatcagagggcgccctgttccgcagctctgaatgaatccgtctgcccatctccatctctcgcgctctctgtctgcagaggct

SEQ ID NO: 298731 - DNA, 122 bp, Homo sapiens
gaccgagcgaggggaacgtctgtgcctgtgaatttgccagcgccgtgactgctttctcctcgcagtgactcagttacagacgaccctcgcctccgtccaggagctgctgattcagcagcagc

SEQ ID NO: 298732 - DNA, 122 bp, Homo sapiens
ctttctatgacgtcccgcgtcccggcttctgattgcccgcctgagacgtcaatcgcagggcgtgtgtcttgctgggacacagtggaggtctaacctttggtttgcggagcggtcgggtgtat

SEQ ID NO: 298733 - DNA, 122 bp, Homo sapiens
cagaacagcccggtcacggagcagccctggagatgcaggcccaaccccaccccctatgtccgcacaccctccctgcagcatgagtccagggacacccgcgactccgagtcctcaaccacccc

SEQ ID NO: 298734 - DNA, 122 bp, Homo sapiens
cggcgcgaggcaggcgtccaactccaccccgccgcctcccacaccttggcgccggtgcttcgttcccggagtcggcgggttccactccccggaccccgcaatcccgtaaccccgcaaccctg

SEQ ID NO: 298735 - DNA, 122 bp, Homo sapiens
ggcaaatggaaaatgctggcatctgagcggggtggtcagaacgcaccccacagccagaggcgccttcccggtaacacagcacgccttcctgttagtgtgtcgccaggaccaggctctacccg

SEQ ID NO: 298736 - DNA, 122 bp, Homo sapiens
taatctcacaaattggagtattgctagcagcaggtgtccatggctttaggaacccgtgtacgcaccaggcattggcctttcagagtgcctacaccactgccagcagggccatcttctctgtg

SEQ ID NO: 298737 - DNA, 122 bp, Homo sapiens
gttttcctaatagtcatctccagggtttagcctcaggcttcgtttcctgcttctttatttcgtcctcttgggtagcattatctggtttcttttctctagttttctgccctctctttctttgg

SEQ ID NO: 298738 - DNA, 122 bp, Homo sapiens
cctgcttgcatcaaacctgcacacatcacgaacaggcgccctccatcacacccaattacgcgtgacctcaacagctctcacatcccgcagaaccgggtttcagttccactgtgcctgagcgt

SEQ ID NO: 298739 - DNA, 122 bp, Homo sapiens
actatacctccctccctaccagatgccatcccccttcacttggtcttctgatcaagtttgcgctgtaccagctggctcaggaggaatgcagtgaggatgctgctgcccaccgtgagcaggaa

SEQ ID NO: 298740 - DNA, 122 bp, Homo sapiens
cccggacccttctttattggcctcaaaacgggtcattttgggaagcggcgcggggctggccgcgcttccctgggccccggccctccccatggtgtttacggggaggcgaacggggagcccag

SEQ ID NO: 298741 - DNA, 122 bp, Homo sapiens
gtggattacaggttaaagaagcacttggcatgcaatgaggatgcttattttatagtattgcgaaggattcggagattgtactggtttctacaagcagttttctctggtaacccaaattgcat

SEQ ID NO: 298742 - DNA, 122 bp, Homo sapiens
gttgtctccttgggattacattcaggccatgcagttgggcaagagaaccagaggtgataccgtgccctcagggacgcccccaggtcggtgcggcctgtgcggctcgctcccggcggtggctg

SEQ ID NO: 298743 - DNA, 122 bp, Homo sapiens
aaaagaagaaaaatgtgggaggaatcactctacctgattttaatttttactccatcattacggtaatcaagactatagagaaacagagagaaaagagaacagaataaagaacctagaaacag

SEQ ID NO: 298744 - DNA, 122 bp, Homo sapiens
gcgtgggccaggacagcgggaggtaagtcgccaagaaaagggttgggaagagctcagaatcggacggctaggaagaaatgaccaaaaggagcctgatagccccctattctgcacgctgttcc

SEQ ID NO: 298745 - DNA, 122 bp, Homo sapiens
tcccaaggagacgggccattggtgagcagacctttaatgtaatgtctgtacatctggcaccgttcatcactgcatacatttctatgtgttttgcttctccatcacatttcaggctggattgg

SEQ ID NO: 298746 - DNA, 122 bp, Homo sapiens
ggaaggcggatatcagctctggttgctcggttagtttgccctatttgagctgacgactttcgttaatgaatttcacctctagtgctcagtggtttatctgaaagaaaaggctggactagaga

SEQ ID NO: 298747 - DNA, 122 bp, Homo sapiens
tgcctcttgtaaccatttagcttgcttggaaattctttctgtgcaagtctctacttcacccgaggtgtcgatgtaagtgcaacaggcactgtgagctactgcacagactccttgtcccagct

SEQ ID NO: 298748 - DNA, 122 bp, Homo sapiens
atcaaggaatatgagtgcctgcagacaagcctcgcttcttttcttccccttcagggctagcgtttggggaaggcaaggctgcggctactcttggagcttcagtgtcccgggaggaagaaagg

SEQ ID NO: 298749 - DNA, 122 bp, Homo sapiens
gcttggggtcggggggaggtgagagctgaggggcgaatgtccctggcgcgggcgggagagcgcgctctcggcccggcccgcaacttgattcctaactctgacctgccgcccggcgcgccttg

SEQ ID NO: 298750 - DNA, 122 bp, Homo sapiens
acaagtaacgccactgtattgtgaagattcccaaattctcgtgcttgtgctgaactccatcgacgtatctgtcatcagggaagataaagtggctgttagtgttgtcgtcagaaataatatga

SEQ ID NO: 298751 - DNA, 122 bp, Homo sapiens
gtctcccagtcccttgctggcccaatctcggttcctgactttccacccccgaaccctccccgctctccagggaaccacgatccagccctccagagaggttctcctgggctcgccgtttcgcc

SEQ ID NO: 298752 - DNA, 122 bp, Homo sapiens
ctttacgtggaaaaactgtgtacgtctcaaattaaaagcagctcttgccccgcttagagccggtgaaagctgcttcgaaggcgtttgtagagtagggattggaaatgttcaatgcaaaagtt

SEQ ID NO: 298753 - DNA, 122 bp, Homo sapiens
ggcggtgcatgtgtgcggggtcgtggcagacgcgtggctgggtcacacttctgctgtcaccgggccgtttccaactcccccagtcacctgccacagcttccctggcaccgcgtgcatacagc

SEQ ID NO: 298754 - DNA, 122 bp, Homo sapiens
ttcattaaacttagaaaacataacgatgtaaccaccacagggtcacacccgagatccctgcgtctgactgtgcagggctgtgcgccagcggcctcacgacaaagccctgcgtgtggggccag

SEQ ID NO: 298755 - DNA, 122 bp, Homo sapiens
attacagctgtgacttgtgatatgtactgaacagcctgtaaatctcacctcacgtcactccggaattctctcaccacacatttactgagctgcagatggtcttcttgctttcccgatggcag

SEQ ID NO: 298756 - DNA, 122 bp, Homo sapiens
ggtccccgtagccgtcctgacgggcctcggcctcatccacggtgaagtagggccgcttggcgtcctcgtcatatttggggtgggggccgcccaccttgcgctcgccccctccaccgccctcc

SEQ ID NO: 298757 - DNA, 122 bp, Homo sapiens
gctggaacgcgaggcggtcccggagcctcttccgttcgctgcacagcctcgccctgcgcccgccaccgccctgcggatcggtcctctcgcccgccacctccagttgacccggatctgtccag

SEQ ID NO: 298758 - DNA, 122 bp, Homo sapiens
taggcggacgcgggagagaaaaccaaagaggctccctccttccccttagcatctctctcccgccgtgttcaggaagtggatggctgccccagctcttgtccgcactggtacacctgcgtgca

SEQ ID NO: 298759 - DNA, 122 bp, Homo sapiens
ctacgaactacaactcccggcaagcatcggaaggccgcgtcgtaattgcgggcaaccaatcgtaccagagcagggcaagcccccgccctctggctcggtggaaggcctccgccaatggcaga

SEQ ID NO: 298760 - DNA, 122 bp, Homo sapiens
cctaaagtctccgcgcgtcagcgcgcgtcagcggcccgccgcccaatcgccgcgctgccgcgctccctggactcctggcccgcgctcgctttggtatatttccgacctgacgtcacgagcag

SEQ ID NO: 298761 - DNA, 122 bp, Homo sapiens
cagagcgaaggatattctttcccttcatcgccttggtgtctttctctgggggaaaaaaatcgcctttaaccaagggagccaagatctcaccagtgcaggaggctctcaaaatggagcgccgg

SEQ ID NO: 298762 - DNA, 122 bp, Homo sapiens
gacaggccgaaagaggaggagccgccacaaagcccgccacgtcttcctaaattggtttaccgcctgaaggcattggtgccccatcccgggtacttaaatgggggcctgccctctactcccct

SEQ ID NO: 298763 - DNA, 122 bp, Homo sapiens
gcccgcttgctcgaaaaatgtagctggtgtctttttgaaccctcctacgagctgggcacccgggtcacccctcgaggaagaacgcagccctgccccccggagcgcacgcgcagcctggctct

SEQ ID NO: 298764 - DNA, 122 bp, Homo sapiens
cctccgaggaccccttagaccgcagaggctgctgttgttgctttagttgtgccacaaccacgtggtcctggaaactgcctcgctcactttgtctgcctttgtatctgctggcgtggatcttg

SEQ ID NO: 298765 - DNA, 122 bp, Homo sapiens
tggtgattgtgtcccctagggtccatgggtcctacgagcacctgtgggccgggcaggtggcggatgccctggtggacctgaccggcggcctggcagaaagatggaacctgaagggcgtagca

SEQ ID NO: 298766 - DNA, 122 bp, Homo sapiens
cgggcctcgcgcctcaccgcacagcctgcggcctacctgcgtccgccgcgccctcggagccgctgctgctgacccccgctgacctccgctgaccccgcgctaaccccgcgcggcgcctgacg

SEQ ID NO: 298767 - DNA, 122 bp, Homo sapiens
caatggcatttatctggtccaaggtcattcaacaagaacaggttgaaatcaccctcagaccgaagagccggccgtctgtgcattttgcttttcccgcagttcagccgggactctgcttcacg

SEQ ID NO: 298768 - DNA, 122 bp, Homo sapiens
cctcgccatccgcgcctgggtccgcgcgccgccgcccgccgctcctcagagacatggagccgttggctaccacctctgcttcaggggagaaatttggcgcgctcccacccagactcgcgaga

SEQ ID NO: 298769 - DNA, 122 bp, Homo sapiens
tggaatacgcgtttcttccactctgttctccaggattttcattccttggccagttgcttccgggaatttattcccttgtctggaaataccatctctctgttgttccttgaaaacaaagaaca

SEQ ID NO: 298770 - DNA, 122 bp, Homo sapiens
gtgcccgtggaggattaattggttagccatgcccacttagccctcgtttaatttattttgcggaaatgagagggaaggagatggcttgagtgaacgtcaggctgtccttggagaatctgggg

SEQ ID NO: 298771 - DNA, 122 bp, Homo sapiens
cccatgtgcagggttcagcacttacctgggagtggtagtggttaggcttttgagcttgaacgcccgcgtgtgaacagatgaaaaatccttcagtacccaaatcccagtcttccctttgggga

SEQ ID NO: 298772 - DNA, 122 bp, Homo sapiens
tctctacccttccgggaggaaaggggaaggcacgaatgacccacgtgttcagaccccgagcgcgcccttcaccttggcccagggagaagggcgcttcccccataccgtgctgcagcgttgcg

SEQ ID NO: 298773 - DNA, 122 bp, Homo sapiens
cgaccgcgcgtgcgcttacggaaacaccacctttcggaggcctcattggctgaaggtcgccgtcgcccaacgcaggccattctgggtaatgttcccacaggcgcacggcgggagagtgaggg

SEQ ID NO: 298774 - DNA, 122 bp, Homo sapiens
aatgaactgaagagttctggagattggttgcacaatgtggatgtgcttaacactacttaacggcacacttaaaaatggttaagatggcagatttaatgttacatgtattttacataattttt

SEQ ID NO: 298775 - DNA, 122 bp, Homo sapiens
ggaggtgtgatttgtccaacgctcgcagccatttgagccaccccacacggaggcgagcctcgctagcgcctcggttacagcctttcccgcaaggcttcattcagtcgcgccggctccgggga

SEQ ID NO: 298776 - DNA, 122 bp, Homo sapiens
tctcagggcttggttttccttggcagatggatggtctaaactcagagaagcccacatcttcgttgacccccattaagatctcagaagcagtgatgagagccctcagtgcaggctgtagggca

SEQ ID NO: 298777 - DNA, 122 bp, Homo sapiens
ctacctttcaaaactgttctccctacaaacgttattgaaatgatagcccagaatgaagggcggccaaggcctctgtttgcaagatgggaataaacacgggagactcatgaagaattgtctcc

SEQ ID NO: 298778 - DNA, 122 bp, Homo sapiens
acagagtgggcgaggggttgatgctagaaggggaggtcagatcagtgggcagaggcaggacgctgaggtggcaggcacttgccctggagcccctggaaggtagaaacaggactgagataaga

SEQ ID NO: 298779 - DNA, 122 bp, Homo sapiens
gggcgatggatccgtttacggaggtgagtgagtttgcgggtgcagccagccatgacccaccgctctaggcccccacccaccttcctctgtcaacctctgggcgaacccccaccgggcggagg

SEQ ID NO: 298780 - DNA, 122 bp, Homo sapiens
tactgcacctctgacggacaggagggcaaccaactgccttaaacaacgggaaggaagaggcggtctaaattcgtccacttcccgggagaggtgagaatgtaaacacgcgcgttctccaatca

SEQ ID NO: 298781 - DNA, 122 bp, Homo sapiens
cattagtctggttagacgctctctttgcttttccccacgagtgaccacggctagataggccgccggccagatgtggcgggggagagccggggctttgctccgggtgtgggggttttggccga

SEQ ID NO: 298782 - DNA, 122 bp, Homo sapiens
tctcgaactcctgacctcgtgatccgcccgccttggcttcccaaagtgctggaatacaggcgtgagccaccgcgccccgccgctatttttaatttaagacatttatacataatatttatgct

SEQ ID NO: 298783 - DNA, 122 bp, Homo sapiens
gacagacataaccctgggattcagggaaggcgcgagcaccgcccaggacctggtagggtgcgagccgcgagcagtccgggagggagcgcgcctagggcggagcgtaggctgtggggggaggg

SEQ ID NO: 298784 - DNA, 122 bp, Homo sapiens
aaacaccattcccagtttctttgcttttgacagctgagtctttcttaaatatacccaaatcggaactctttacactaaatagtaaacccgagataggagcaagtgccttccggggtggtgta

SEQ ID NO: 298785 - DNA, 122 bp, Homo sapiens
gcctgaggaaagtcttaggtggtagagtttaaacggtgtgagtctcacagatgggttccacgagctggacaatcattagttcttttgtagggggatattggagagacgacataggtcgggat

SEQ ID NO: 298786 - DNA, 122 bp, Homo sapiens
taagcagcctttcctccgcttccatgtaaatactgtgcaaatccccgcctttgacacaggcgaccttcgctcggctcgctctccctgctggcctgggaacttagcgatttggaacccactac

SEQ ID NO: 298787 - DNA, 122 bp, Homo sapiens
gcatggtaggcaatggggtccctgtttggggacaggcagcacccgactgatggtccccaccgggaagtgatgagagatgtgaactcaggtacctgcccggccctgcagccccaagcccagcg

SEQ ID NO: 298788 - DNA, 122 bp, Homo sapiens
gagtagttgcctttgcggagcaggcggtgcactcggcccacaggaaactgcaaacctgcacgagaagaccgagtcttagccttggcgcgagctttaccgccttgtttgccgcgaccagacat

SEQ ID NO: 298789 - DNA, 122 bp, Homo sapiens
tgaggagactgggctagaatatggggaaaatgaggcagctgtagttttcagggcagagtacggcagatgagagaactagacaggatgacaacactggagatttgcagagagcctgatcaagt

SEQ ID NO: 298790 - DNA, 122 bp, Homo sapiens
aagaacgcattttccttactgtcacgtttatgccccgagtggtaatttcgcttcccggcacgcgaaaaatgaatgggcgccatcttgcgcgtggcatcttgggaaatgtagtttacaggctc

SEQ ID NO: 298791 - DNA, 122 bp, Homo sapiens
acgtgtctgtcagttacctggtgaatattgaatgttgtgatgacccggtcaccgtcatcacgtgtgtccgtcagttacctggtgaatattgaatgttgtgaggacccagtcaccgtcatcac

SEQ ID NO: 298792 - DNA, 122 bp, Homo sapiens
ggggagcgcggagctgcatttgtctgctccaggtgctagccaggcaggcgcagccgtggccggctagggctggaagtgtcagcggcggccgcgggcccggcagaaggccgagtaggagggac

SEQ ID NO: 298793 - DNA, 122 bp, Homo sapiens
gcataaacttctaccctgtccaatcataagcctcacgtgacctgccgcgtagggagggcacgaacagaaaggtgctgcgcatgcgtattgaaaaacctcacctactctcgcgggtcctcagc

SEQ ID NO: 298794 - DNA, 122 bp, Homo sapiens
cccgcagcccccggctgggaactggggcctggatgcagcccggggcgggggcggggcggccggggaggggcggccgacgggttcgggattgagggtctgggctaggggaggggtctggggac

SEQ ID NO: 298795 - DNA, 122 bp, Homo sapiens
attgtgttgttatctgcacagtgtgtagtaggagttgtttgtaggcatttcctagcctctcggagtattctttgttgtggaaatgcattgtttgtctttgggctaggtgaagaggccccctc

SEQ ID NO: 298796 - DNA, 122 bp, Homo sapiens
tgtgactgccgtgtgtgcttagacccgtagtttcctcagtggatagcactcaatttattccgtagtgatattgtaacaatactgccattcccttctactgcactgcccaaggtgtgtgtagc

SEQ ID NO: 298797 - DNA, 122 bp, Homo sapiens
tccgggaagtcgcgcgctcatccgttttcggcagcgccggagcccgagccggggaccgggcggacacccacagagtccgcaccgcagcgcgctgcacgctctcgcccccgcccgccggcccg

SEQ ID NO: 298798 - DNA, 122 bp, Homo sapiens
agcaggaggccctgccagaggaaggcctgtctaaatccacataccagtgcaagctgtcttcggctgtcctacgtactaagggacatagctcagcacagccagtccctgtgatgcatcagcca

SEQ ID NO: 298799 - DNA, 122 bp, Homo sapiens
tctaatggaaaaagtggacaacatgagattacagactgataatgggaacagagaggtagacgttctaagaaataatctaaagaaaatgtgaaggccaggcagggtggctcatgtctgtaatc

SEQ ID NO: 298800 - DNA, 122 bp, Homo sapiens
agttttactttgtatattaactagaattgtggttttattttggagaaactattttgtgttcggaataactaaatacattttagaggtcgctcactctttggaattctgacttacatttgtgc

SEQ ID NO: 298801 - DNA, 122 bp, Homo sapiens
cccatctcctttttctatttacggtaattactagagagcattttattttggcctctggggcgtgtctgctgtgtttctttgtgtgggcatgtatgttaaaattggaaagtgttttctttgag

SEQ ID NO: 298802 - DNA, 122 bp, Homo sapiens
ttcaagtagcagcacagatttccttactttcaactgtcatgagctgaactcatttttcaacgaagcctaacatctgtgcttccttccatccagcaggaaaactttatttccccagaacttat

SEQ ID NO: 298803 - DNA, 122 bp, Homo sapiens
ggctgttactggggaaagaaagttgtcttaaaggaccctggagtgtgagggatggaaaagcgaaaggtttgtctctgcaaacaggtagtgctgagtggtcgccagcttagagcccgtcgtcc

SEQ ID NO: 298804 - DNA, 122 bp, Homo sapiens
gggaccagggcaggtcttgggaggcttcccaactaactgcttatggttctgaaataaagacgccttttgcgggttgctggtaagaggacccgggatatgagtttttcctccttgcaaaaacc

SEQ ID NO: 298805 - DNA, 122 bp, Homo sapiens
cgcacggcagcgggtgtgcctgagtgcgcgtcgcctcccaaccagagaggacgtggcatacggcgccaccggaagttccggcaagtgggccctgaggctggccccagcttccgggttggtcg

SEQ ID NO: 298806 - DNA, 122 bp, Homo sapiens
taggtgcttccacagccacccaccacaagtcctgtgtcactgtggctaacaatctggtcacgtgctcttgttcagttgagctgtaaattcctgtgtgtcatctattgtcatggtgtttgaaa

SEQ ID NO: 298807 - DNA, 122 bp, Homo sapiens
aactttatcgggttgaagtttctgctgtcgcctcccctttgcgtgcggagctgggctttgcgtgcgccgcttctggaaagtcggctccagtcatatccctgggcgctgcctgcggccgctcc

SEQ ID NO: 298808 - DNA, 122 bp, Homo sapiens
cgcggaagcgagggtgtcgctcgcccccgggcccgggtccgccccgctccgaggcctgctcggaagaaagacctcggtgcgcagttctcgtcgcgctcccacacctggtccgcccagtcgga

SEQ ID NO: 298809 - DNA, 122 bp, Homo sapiens
ccgccccaacgcctcccccacccgcgccgggccccggcaaggggcaccggggccgctccccgcgccccaaactccccggggctcccgactaggcccggctccgctccgcctcctcggctctc

SEQ ID NO: 298810 - DNA, 122 bp, Homo sapiens
gaagccagccgcagtccaggaaggtcccaaaaggagtttatggcccactgccaaatggcacggtgggacttatactgggaaggtccaacttaaagggaattcaagtacatacaggagtagtg

SEQ ID NO: 298811 - DNA, 122 bp, Homo sapiens
gaggagcactgtcctcgtgacacccgtgacaaggaggcggccagggctccgggaagtcgccggacaactcagcacagacgcccggagcagcagatgctccctacaggagcaggcagaggtgc

SEQ ID NO: 298812 - DNA, 122 bp, Homo sapiens
taaacaaaatgttttaaatttagagatctgtctctgtaaaagctaatgaaaatgcttacccgtggagggtgggtggggtgaagtggaaaagacaaggacaagagcaaaattcttctgagtat

SEQ ID NO: 298813 - DNA, 122 bp, Homo sapiens
cagccttggaggctccacgggatccaccccctcctcctccatcagcagcaagagcaacagcgaagacccattcccacagcccgagaggcagaagcagcagcagccgctggccctaacccagc

SEQ ID NO: 298814 - DNA, 122 bp, Homo sapiens
tcaatgggactgggctcatcggggaggctttgggtgcacaggagcccacaggtaggggggcggctcaggcatggcgggctgccggtcctgagctctgcccgcagggaggcagctaaggcccg

SEQ ID NO: 298815 - DNA, 122 bp, Homo sapiens
tactgagaccggatcttgtctgggtctcggagcccaggacaaggaaaggggtcagcctcccggctaagctgcctctgcaccaggctgcccctgcccacaaggcaaccctcaagaagcagctc

SEQ ID NO: 298816 - DNA, 122 bp, Homo sapiens
ggagactccctttctggttctactaagtagcgggtgttttttcttgacgctcttcgctaccgctagaccacggtccggctggcaacgggcgtcttcctagatgctggcgttaccgctagacc

SEQ ID NO: 298817 - DNA, 122 bp, Homo sapiens
tacctcgttcggtgaagccggtgcattcaccacatcctctgctgctcctagcagggaagccggcggtgaggcgggggagcaggcatggtggctccggggtttatgcggggtttactgcttac

SEQ ID NO: 298818 - DNA, 122 bp, Homo sapiens
gccctggagagtagggtcggtcccaccataataacagagactgtaaggagaagagaggatcgtttctcaagggaaaatcaggatgctgttaccaaacaaaggagagaaaagagtctgtttct

SEQ ID NO: 298819 - DNA, 122 bp, Homo sapiens
gatcacagggtcggtggcagaatcagggccaggaccttaagtggagatgggcctggggaccggggacgccgaaagaggagggactcggggaagagaccgcgaggatggagtggggaagggcg

SEQ ID NO: 298820 - DNA, 122 bp, Homo sapiens
gtccaggcagcctgggccataagggcgtcctcccagtgggaagggcctgacgtatctgcccggtgactgacctcagaagtcactccattaccagccatgtggcgcactgtcttccaatatca

SEQ ID NO: 298821 - DNA, 122 bp, Homo sapiens
gcggccacccggtggaaggtggcgccacgccagggccaggcggaggcggggagccaagcccgcagccacgccctgcccagggcgcaggtgggctcggctggaggaggtgctgggggtgggtg

SEQ ID NO: 298822 - DNA, 122 bp, Homo sapiens
tgaaagcacggttgtgaagatacccaggaccagcaatttcctttctgtgtgggacccacccgctgcgatagaattgagtgcagaagactgagcttcgtgtaaacacaaggtcaccagggatc

SEQ ID NO: 298823 - DNA, 122 bp, Homo sapiens
cggaaggaaggcgatggccccgcctctggggtggaggggggtcggggcactcacgagtgacgtccgggtctgactgtcttgcgtaactcccgccaactgtgggatgttctctttctgccccg

SEQ ID NO: 298824 - DNA, 122 bp, Homo sapiens
gcagtcaccccactctgcccgcagctgggaagggcctgggcctgcagatttgatttccttcgatactcgcaatgtggtctttgctcccaggagagaaattctcggtgcaagtgcatggaaag

SEQ ID NO: 298825 - DNA, 122 bp, Homo sapiens
tgcagcctccaattggcgagcggggcaccgaggggaaggcgcccaggaggtgggttcatccgcgtggggaagcgcccggggtggccacgcggggcccggagggtgtcgccctcgcggcaccg

SEQ ID NO: 298826 - DNA, 122 bp, Homo sapiens
ctcacccagtcttccactctccaaggtcttatttcacttcctggtacacactggccagtacggctgtccccgtaatgggagggttgtactgtttgattttaaataacagtttgctgttagtc

SEQ ID NO: 298827 - DNA, 122 bp, Homo sapiens
ccgcccccgcgcggaggactgtgggagcggcttccttggattccgcgcttggcaacggctcggcgtcgcgctttggccaaccgctgcgtcgtccctgggcccgaataactgtcgcccgcttc

SEQ ID NO: 298828 - DNA, 122 bp, Homo sapiens
ccccatccctgtgacctgaagaggcatgtgccgtcttctggttatccacgaagaggcacacgcgccgtcttctggttatccacgaagaggcacacgcgccgtcttctggttatccacgaaga

SEQ ID NO: 298829 - DNA, 122 bp, Homo sapiens
tgcggcatatggctcagaagagaaaggagtgggtaggcagggagctcccaaccttagggacgtctttgactgggagggcgttgtgaaaggaaaggagaatctcaaggctttcctgtgacaaa

SEQ ID NO: 298830 - DNA, 122 bp, Homo sapiens
cccactgcgcatgccccagagcggcgacgaatgggagcccggagcgcaggggcggaggcgcgcccgggcagctaccgagaagcgccaatcaaccatcgaccaatcagatcatcaccgtcaat

SEQ ID NO: 298831 - DNA, 122 bp, Homo sapiens
ggagtgctttattaaaaatctcacctcacactctagaccatctgaatgagaatctctgtgcgtagaaataagtgattttaatacactcctaggtggattcttcactaagcttcactaaagtt

SEQ ID NO: 298832 - DNA, 122 bp, Homo sapiens
tccccgggcgcggttctggtgggcatgtcttccaagagcgatgcgagtgtcagtggttcccgaatcactttggaaattggcctttcactcgctgacttcttggaagctacgacaaagcacag

SEQ ID NO: 298833 - DNA, 122 bp, Homo sapiens
cctgtgctgagcgcggaaactgcccggtccgcgcccgctgctagctcctggaggttgatccgacggcgaacccggctctgaaattaagagcaaacttccttcgagaggcgagagacaggagg

SEQ ID NO: 298834 - DNA, 122 bp, Homo sapiens
cgctaccgacgtcgaatcattatgcggtcaacaaccgcaggtgggttatgtgtcatagcccgcctccgctggagggaaaaggcctggtgcgagaaatgcccaagggaaagcctgtctagggt

SEQ ID NO: 298835 - DNA, 122 bp, Homo sapiens
tgcgtggacctccctaaacacactgcgcatgctccattccaaacggtatggcgagcactgcgcatgcgggaaacccaccctgtaagggaagaatcctgggaaagaggcaagcctatgaagtc

SEQ ID NO: 298836 - DNA, 122 bp, Homo sapiens
tttagagaagccaatcagcttcgccgcgatcccggcactacgatcccggcactacagtcccggcgcaaccacccgcactcagattctccccaaacgccaaggatgggggtcatggctccccg

SEQ ID NO: 298837 - DNA, 122 bp, Homo sapiens
cagaggctgcgaagctgcagttacgtgggatggacaagtccacacatccggcgtacagcacgaggaatctagttagtgatgaaatgacaatggatggcataccacacatccagcacatagca

SEQ ID NO: 298838 - DNA, 122 bp, Homo sapiens
tcttgctatctcctataccaataaatacgaagggctgtggaagatcagagcccttgttcacgagaagcaagaagccccctgaccccttgttccaaatatactcttttgtctttctctttatt

SEQ ID NO: 298839 - DNA, 122 bp, Homo sapiens
aaagagaaagaaaaaagttgcttgaaatccttcaacatgatcctgattctatcttagacacgttaacttctcggaggctgatttctgaggaagagtatgagactctggagaatgttacagat

SEQ ID NO: 298840 - DNA, 122 bp, Homo sapiens
aatcccactccatgtgtcctaatattcagcacagaagaatggtctacatttgtggaccagcggtgaagggagagatgagccagggcagtgggctcagcagcaagaggaggcgcagcacacgg

SEQ ID NO: 298841 - DNA, 122 bp, Homo sapiens
tcagatcagctggcagcagggaaaagcaatcatcttcagatattattttggtcaactcctcgttttcaaaaatccccttttggtaatgcagttgtgatggtgaactagccagatgaaatggt

SEQ ID NO: 298842 - DNA, 122 bp, Homo sapiens
agctaagcggctcggattatcctgggcagaccagagacttgaccagctaaacacttccgtcggtccggggcgtggacggggccagatcagcctcctgctctcccgagtcagggccacggaaa

SEQ ID NO: 298843 - DNA, 122 bp, Homo sapiens
aggtcgtctattatttgttcttacagcacatcctgtaacttttttttgccatagttaccacgattacagttaaaacagttcattgcataactagttccttgaggtttgtttctcctattggg

SEQ ID NO: 298844 - DNA, 122 bp, Homo sapiens
cctctctggtattcttcctggtaatgcaaacacctcagtttattcaagacaaaccaaactcgaagacagtctacaaaataactgaccagcactcttcaaaagtgtcaaggtcctgaaagacc

SEQ ID NO: 298845 - DNA, 122 bp, Homo sapiens
catgctggaaaaaaaaaaagacgtacttggaacaaaaaacttgcatcggaccaagtgtaacgctatcctccagatttctctcaacagggccgccttaagtccatgagtagaagggcgctgcg

SEQ ID NO: 298846 - DNA, 122 bp, Homo sapiens
ggttgcagtgagccgagactgtgccattgcactcaagcctgggcatcaagagcgaatcttcgtctcaataaaacgaaacaaaacaaaacaaaattaaacaaaacaaccttactggccgggca

SEQ ID NO: 298847 - DNA, 122 bp, Homo sapiens
cagtttctcaatcacactaagccaaatttccagggtacggcagcccccaggggccggtgacgacagcatggagcaaggcagatggagaacgcgctccccacggcaggaagctctgctggacg

SEQ ID NO: 298848 - DNA, 122 bp, Homo sapiens
taaggattgaggttaattatactgataaggcaacattattgactcattacatcaatctaccgccaaataagtttctacttataacttgcatggcatgaaagagccaaatcttcatattacac

SEQ ID NO: 298849 - DNA, 122 bp, Homo sapiens
tgtgccttcagcctccactctccttggccttaataggcttctctcatttcctttgctgcacggctgcctgcctgtcccaatttcaacagtctaggaggcagaaggtgaaattaattcctggt

SEQ ID NO: 298850 - DNA, 122 bp, Homo sapiens
atgtggtacagggttgggcctggagacccggatgccggcgaggtcctggctgggagaggccgccgctgccttcaggtttccgaggtgggtagagaggttcccgctgctttgaggtcaaggct

SEQ ID NO: 298851 - DNA, 122 bp, Homo sapiens
ttggctgagccttgacgttgtcccagtcccggtgatcggaagttctccgtgggcactgggcggctgaaggctccggaactgcgcctgcgcttttcggtgagtcatgcttcaggtttgccagg

SEQ ID NO: 298852 - DNA, 122 bp, Homo sapiens
cagctgctggcctgggtgctaagcccctcactgcctaggacctgccagccgctctgagtgcggggcccgccaagcccgtgcccacccagaacaagcactggcccgcgagttcctctccctcc

SEQ ID NO: 298853 - DNA, 122 bp, Homo sapiens
tctggaggcctaataaaatccacttgctttggagttagaaattatttcgggcctggagcccgcgtagacgcgaccctgtgatcccatttcgtagcttgctgagagattcgctgcgggagttt

SEQ ID NO: 298854 - DNA, 122 bp, Homo sapiens
ttccgcagagggactgcggcttcctgcgcagcgccccctaccggacaggcggcgggaaaacgccgcgcaactcagaccactggagcggagtagtatctggagtttctgtaacatcctttccc

SEQ ID NO: 298855 - DNA, 122 bp, Homo sapiens
cagcaggtggagaggccagagatgggccaggatcagcaaggcggggctttgatcgggacccggcccaggtgagggctctggctgaagtcttccttctcaaacctggaggatccgccaccctc

SEQ ID NO: 298856 - DNA, 122 bp, Homo sapiens
aggctagggaggagctggagtcagagggccagaacaggcgtgcaccaggagcgggggcggcgtcgcgtaaggggacagtggtgcagaccacctctttcccggccgctgacgcccgcaagcag

SEQ ID NO: 298857 - DNA, 122 bp, Homo sapiens
gtggcgggggcgaccggtggcgggatgggctgtggcgcggccgaggcggcttcgtgaagccgaagacctgcgggtgtagaccagaagccccaacaagccccatccctcgggcccggagcagc

SEQ ID NO: 298858 - DNA, 122 bp, Homo sapiens
cgtgatccgcccgcctcggcctcccaaagtgttgggattacaggcgtgagccagcgtgcccggccggcattccacttttacacagtgacaaagctctgggatgcagccagagttaaaggaat

SEQ ID NO: 298859 - DNA, 122 bp, Homo sapiens
gttggatcagaccacaccctcaaggagattgcagattccttggtgagtctgcccctgccccgcctctgggctggtgcacggatctgcagggacagcttcccgtgcttacagcacaaagtatg

SEQ ID NO: 298860 - DNA, 122 bp, Homo sapiens
gggcctccccagctcccagcagacctcaatgtacccaccgggatccagggagcatcagtacgagccaggcgcctgccatggccctcctagctggggcctcccagcctcccagccacagccct

SEQ ID NO: 298861 - DNA, 122 bp, Homo sapiens
cctctggggaatcaactgattgctcatttcatttaatgagccccgtagactaacctgattcgggacaaaaaagtgatttcttcttccgctgtgaagacttttctctcaactttacacaatat

SEQ ID NO: 298862 - DNA, 122 bp, Homo sapiens
tgatgattctaaaaaccacttttaggttcttcaggtgcactgtatgcaccctgtacattgcggagccatttgtatctttggccacaagtccttctcgtggtgtaagagatcttggtgttgcc

SEQ ID NO: 298863 - DNA, 122 bp, Homo sapiens
ccaaagttctgctaacacgaatgaagtctcgttggtgtgacatcaaacagctacgaaggccgtttctgtgacccggaggccacacgccgagtctccgggacgaagcctcgcttggcagagcc

SEQ ID NO: 298864 - DNA, 122 bp, Homo sapiens
tgttagaagcaacttgggagttctccatgtgctttgccgttgcgcgctcagaccaactgccgatggacaggagagtttggtatcaccatcttctccaccgttcacgccatccaagaacagca

SEQ ID NO: 298865 - DNA, 122 bp, Homo sapiens
cccaggcactgcttcctgggcagcactgccaaggcgttctgtggcggctgcatctgtcatcggggaacacaaaacacacagggaagtcacccccacgcacggcccacacgtgtttgcaaaca

SEQ ID NO: 298866 - DNA, 122 bp, Homo sapiens
tacaagactaataaatagaagatgcagtttgaggtggaaggtgagggatattttaagtttcggactgtaggaaatcagtcagggtggtaggagaagctataaggaaagacgcaaaccttctt

SEQ ID NO: 298867 - DNA, 122 bp, Homo sapiens
caagcttgtttgctgtctgggagatcaaagctaagaggccctttctgcaaaccttgcaaacgtgagggcttcacgtgattgcaggactgacctcgtcctgaggttactggtgaccgggagag

SEQ ID NO: 298868 - DNA, 122 bp, Homo sapiens
tgcctcttcacccattgtatctgtctcgttctgaaacttatcatgaagtccttgtgtgcacgttctaatatgtaggtcatctgtgggtctatttgtatggactgatttttctcttaactatg

SEQ ID NO: 298869 - DNA, 122 bp, Homo sapiens
acgtggcagagtggatcgctgcggagtggcaccccggggcacccacgtggcagagaggatcgctgcggagtggcaccccggggcacccacgtggcagagtggatcacgcagagtggcacccc

SEQ ID NO: 298870 - DNA, 122 bp, Homo sapiens
gtccgcgcccggcgctctgagagggtggccgtggttaattcccggtagtgaccgccatagcgccacgtggccactgcttgacaaaggaaacttttttcaacctccagtgagcctaagaaagc

SEQ ID NO: 298871 - DNA, 122 bp, Homo sapiens
gcttcgggcggctttcttcccgagggcggcacgagggctgggcggtggggtgcgggtgcccgggtgaggggcggagctgggggcatggcgtccggagcggctcgctggctagtattggcacc

SEQ ID NO: 298872 - DNA, 122 bp, Homo sapiens
aggaagatggtcaggaacagaacttcaaatgtaccagttttggccaggtgcggtggctcacgcctgtaatcccagcactttgggaggcccaggcaggcaatcatgtgaggtcaggagttaga

SEQ ID NO: 298873 - DNA, 122 bp, Homo sapiens
caggaatctgcaggtctcagggagccgcagaacctgaaacccaaaaataccaggcttgatcgcctgctcttcggtagtgtcgccatccacccgcatgggggcagcagcgctccaccaaaaag

SEQ ID NO: 298874 - DNA, 122 bp, Homo sapiens
atgggagtggccgtgatagggcacagaactacaactctcagcagacattgcggccgcagacgcgctttcgtacaacacccagagcgccccagttaggtaagaaagcgcgcgaggaccggact

SEQ ID NO: 298875 - DNA, 122 bp, Homo sapiens
gcgggacccccttttggggcggaggccgcaggcagtggctaccctggccccctagacctgcgcaggccgatgcggaccgtgcccggcccactgttcaccgactttggtaagtcgtggccttg

SEQ ID NO: 298876 - DNA, 122 bp, Homo sapiens
ccaggcctttccgtggggtcccgatattttcctttctgcttctacccactgaagctggttcgtcgccagggtcggccacgtgcccgccttgggtgctcccacagcccgggaggtgcagctgc

SEQ ID NO: 298877 - DNA, 122 bp, Homo sapiens
tctgccactcccgtccccaccatggcagccgcctccccatgcccgtggttctgccactcccgtccccaccgtctgcactccagacatcttcttgaattaggaggactccaagccagaagctc

SEQ ID NO: 298878 - DNA, 122 bp, Homo sapiens
gtgggtgaatcagtgttagctcacagtgcagcacgctctaaatcaaggtatgcatgtgttcgccactcagggaaggatgagaaagcttccctgcaaaaatgacttttgagcttccaataaac

SEQ ID NO: 298879 - DNA, 122 bp, Homo sapiens
accccaacccaggtgggcagaggaggaaagttctggcattttgtggaaggttccacccagcgttcacaagggtttcccactgacagtgagaaaaagcttacatttgcaattggttccttgga

SEQ ID NO: 298880 - DNA, 122 bp, Homo sapiens
aagtagggccaattacagacagagatgactgccaaatccaaggctcctcccaccctttcccggcaaggtgcattccccaagacagagaaatcttaaaggaaattaaaaacaacaaaacaaaa

SEQ ID NO: 298881 - DNA, 122 bp, Homo sapiens
gcactaaatgtgatttaatcttttaataaaagggtccttttgtacccacttaggcttcttcgtaattaccagaaaggtgataagcctgcatgtgtctggacaccaaagattgagaagctgcc

SEQ ID NO: 298882 - DNA, 122 bp, Homo sapiens
ggggtgggccggggggaagcatggggatgaggctgggtggcaggatcctgtcctctctgccgcctcattctggggtgtggctccagccttccctggcccccgccggaggccgggagggagca

SEQ ID NO: 298883 - DNA, 122 bp, Homo sapiens
ccccatcagtgtgtgtgtgtgtgtgtgtgtgtgtgtacacatctccacacccatacagcccgtcctgtatcccccatcggtgtgtttgtgtgtgtgtgtgagtgtacacctctccacaccca

SEQ ID NO: 298884 - DNA, 122 bp, Homo sapiens
ttcccagggaggcagaggaacccagagcaggctgctgtccctccagcgtggctcacgcaccgcccccaggcagcgctgccccatatagcaacatcactgcctcactcaagatgctcacctca

SEQ ID NO: 298885 - DNA, 122 bp, Homo sapiens
cctccgcaggccggggactgggggccaggggcgtccacccctccaggtcggggagagccacggggagattcctggactgcggaggagccgggcgagcggggggagcacgacccgggtggact

SEQ ID NO: 298886 - DNA, 122 bp, Homo sapiens
agcgtgcgcggcggtgggcaggggcgcttctcgctgggtgggctgcggctggggcccgggcgctacataaggggtcccggggcctctggctcccccaggcagcgccccacgcgcaactgcac

SEQ ID NO: 298887 - DNA, 122 bp, Homo sapiens
aacatgaaatgaaaggtgcatcagcttgggggctgggaaacctgcagtatgggtttactccgtccctatcactggtgtggctgtgggcaaaccacttattgcctgacctacctcacagggat

SEQ ID NO: 298888 - DNA, 122 bp, Homo sapiens
gaagccattctttcaggagatatgctcagcatttgccacgggccagctgctgttccaggtcgtgggttagggcccggcaccaggaagggcgcccctcccacagggccgacatcctaaccggc

SEQ ID NO: 298889 - DNA, 122 bp, Homo sapiens
ggggaggaaaccgtcccgtcacatgcgcttcactgtctcacccgctctcagcttttcgttcgtgtagacttgggactgaacggttcccaccaaacccaccacagtgtgtggccacgaggggt

SEQ ID NO: 298890 - DNA, 122 bp, Homo sapiens
ctagatggcgctgttactccactctgcgcgctccgcctgccgacaacttgaccccgctgacgtcacggccgtctgaatcatcaaggccattttcaaatcccattggtctagccgtcacatgg

SEQ ID NO: 298891 - DNA, 122 bp, Homo sapiens
tgccagccacgtggccctgctgcccctcgctgggtgccagccctaagctccagtgggaggcgacctcacccaccgtcccaccgagggccccctcacaggtcaagtgtgctgcctgtgaaccg

SEQ ID NO: 298892 - DNA, 122 bp, Homo sapiens
ccgggctcggcttcgccccggccgccggggcctctcccctctgccctttctctcccttctcgcagccctgggaccacgtcctagccccgcagtcccctgggatgagaccctcgtctcgccgg

SEQ ID NO: 298893 - DNA, 122 bp, Homo sapiens
atccactgtgagacaaacccccgccatatctccagcacgcaagaactggaacgcctgaaccgcagctgccagggtttcctccaggcccgtttacccgagaagcttgctacaagtgccagaaa

SEQ ID NO: 298894 - DNA, 122 bp, Homo sapiens
cattggctggaggggggccgcatcacgtggcggcgcgcggagcaaggggcaaggtgggggcgtggggcggagctgcctcccataggctcactggcgggtcccgtcacgtggcaggggcgggg

SEQ ID NO: 298895 - DNA, 122 bp, Homo sapiens
actgcgtgtgccgaaaaagagcttatttgctgattggcttctgccgctgtctttcacaaccgcagccagtcgagcggaggcacacccaaagccccgcccccttagagttcaaataggtggtg

SEQ ID NO: 298896 - DNA, 122 bp, Homo sapiens
tatgcgggcagccatgtttctgatattccttgtggcctatattctgacagtggctgaaaacgtgatcatcatcctattggtgctgcaaaatcggccactgcacaagcctatgtacttcttcc

SEQ ID NO: 298897 - DNA, 122 bp, Homo sapiens
tttctaaacattaagctccaatgacacaatgcaatattagcatcctaatattctttctctcgatgtagaccttggaaagagaaattgcactgttaataggagtattttttgttgtttttgtg

SEQ ID NO: 298898 - DNA, 122 bp, Homo sapiens
cttccagaggccctgctaaggataaccaaaaaagggcatggagcaggctggttttggcagcgtgcacgcagtttcagagctttttaggtcttgggttttctgatgagtgatttcctgagcat

SEQ ID NO: 298899 - DNA, 122 bp, Homo sapiens
ctcactcgccaccactgaaaactaacttgagaagccccaggtctgtgggcaccgacaccccgttaattcatccagcttgtcctgctccgagcgccaggcaggacttgggggcttcggtgtca

SEQ ID NO: 298900 - DNA, 122 bp, Homo sapiens
catgtcttctattcctagcacgatatcctttatcagctctttataactgacgccaagctccgagatcagtgtctggagcttccagttttccagggtgacttgctccatcgtgtctttggatt

SEQ ID NO: 298901 - DNA, 122 bp, Homo sapiens
atcaggcatttccatatccttttctggagacttcatatggaccaggtctgttctcagcaacgcagggaggtcaggcttgagctctgccttcaaggggcttccagcctggggacagagccagc

SEQ ID NO: 298902 - DNA, 122 bp, Homo sapiens
ggcccgcgccgagcacctggtgtgaaccaggccctgggccgagcgtggcacagacctggccgcgctcacgccccactcgcgggatcggctgcctgccttgtacggaggaagcggggcgtcca

SEQ ID NO: 298903 - DNA, 122 bp, Homo sapiens
ttgatcaatccatctttggaagaaaacccacatagttttttcaggagctgaaaattgagtcgttatagaaatattaggacatattttcaatcatttcggtgcccgaagggaggcaagagctc

SEQ ID NO: 298904 - DNA, 122 bp, Homo sapiens
tgtgcagtttctttggggaatggcctttttcttttacaattctcacctgctttctgcaagcgtctcactcttctagtcctgccccttcaaagctacccctcccccaaggctgcctgagccat

SEQ ID NO: 298905 - DNA, 122 bp, Homo sapiens
cccatcgtcacccaggtcctaaaccagcgagggagcggctcctgctcgtgggtctgtagccggtacccggcgtaggaacactgaggcgctcacaggaggcctctccttgtaaccgtccagtg

SEQ ID NO: 298906 - DNA, 122 bp, Homo sapiens
gttattcattcatctaatgttacaatagtagcaacacaaagatttaatttaataacctaacggatcatctttcttaagttattaaaataccatataaggatggtttaaactgtctatgaggc

SEQ ID NO: 298907 - DNA, 122 bp, Homo sapiens
agaattacaaaagaaaaacttaaagattcatatgaaaggagtgtttcattgttatcctcccgtttggaaagtaaaggagctttaagtatctattacatgcatggtttattgaaggaacaggg

SEQ ID NO: 298908 - DNA, 122 bp, Homo sapiens
taggaggatactgaagatctgtgggggacaaaggtggggttctagggggcttgggctctccgggggggtctggtcatgactacctgctgttgaatggacaccttgccagcttcagcgatctt

SEQ ID NO: 298909 - DNA, 122 bp, Homo sapiens
ttccccgcccctaaatttccagttccgattggtctgtttcatgggaccgcccctctggcccgaccaatgtggaagcctcctcgggtgctccgccctccccgcaggcggcgtgcggctgcata

SEQ ID NO: 298910 - DNA, 122 bp, Homo sapiens
ctggccgacctctgcatacttttctcttgttactaagtaacttgccacccctaaaatcaccgttttgccccccggcctttgttcccactgctcccctgcatagaatgcagttttccatcttc

SEQ ID NO: 298911 - DNA, 122 bp, Homo sapiens
tgaccccatcctcgctttgatgcccgggacctgctacccaggtacgtgggtcttctctgccggatgtggacatcttggcctctcgccttggtgcctactcttgggaagcgggtccagacatc

SEQ ID NO: 298912 - DNA, 122 bp, Homo sapiens
ccatcccaggagcccatggaggccttcaggacagggctgtgcgagaggaggtcgtgcccacgagttcctgcccggtgggaatgagcagggggcgggcggggggtctcagggcgagatctccg

SEQ ID NO: 298913 - DNA, 122 bp, Homo sapiens
ctggagcagtttcagtgcggcattgatgtttggcaccagggtatcaactccgaagtgcatcgcagtgctggcaccctgatgtgtttgtgtctccgctgtcacacacttgcagccactgcagt

SEQ ID NO: 298914 - DNA, 122 bp, Homo sapiens
gtgctctgagccccccggggtgcagggagcaggcaggacacagggtgcctggctgattcccggggaggctgtgggccctcaggcagccactgttctgtgtcagtgctaggcttggcctggga

SEQ ID NO: 298915 - DNA, 122 bp, Homo sapiens
tctggccccgatgaggagacgccctggtctggccatttttcccctagggctcgttccctgcgaggtaccggtggcgcggtgacccggaggacggggtccagtttcccctggactacaactac

SEQ ID NO: 298916 - DNA, 122 bp, Homo sapiens
aaatggctttgctctctgggcctcagtggcttcagttgtaaaatgggattaagtttttcgcgtcttattggatgctagggacggaatgaaatgaagtgccctggagaagccaactggaggtg

SEQ ID NO: 298917 - DNA, 122 bp, Homo sapiens
cgcaggaggtccaaacctcagccgctagcggccccgagaacctgagcccctcagcgaccgcgtagccgccagcaccgtagccgccatcttgagtctccgcccattgcttctgtccgagacct

SEQ ID NO: 298918 - DNA, 122 bp, Homo sapiens
aagactaagtccagtctctccagcccagcagttggagtgtgcccatcaattcattcaattcggagctgctgcctttttttttttttttttttttttttcaggatttaagatgttaaaaaaaa

SEQ ID NO: 298919 - DNA, 122 bp, Homo sapiens
gagcttagcacctgggccagcagctgcgctggacttctcgtcgggccttagctgcctccccgccaggcagggctcgggacctgcagcaccccatgcctgagcctccgccctcaccctgcggc

SEQ ID NO: 298920 - DNA, 122 bp, Homo sapiens
gcgatctcctgctcctgcactgccacctgctgggcccgctccaccacctgcacctgcacccgctgctcctcaatctgctgcttagtcttggccacctgggtaggagggtgaagtcaggttca

SEQ ID NO: 298921 - DNA, 122 bp, Homo sapiens
gctcagcatttcccttcctgtcctggttggacactcgaattcccccaccctctctatgcccgaaagctggctggccccagcccaggccacccccaaccgctaccccatacagtaagcctggg

SEQ ID NO: 298922 - DNA, 122 bp, Homo sapiens
gtcgcttgggcctggctcagcttaccccggcggtgagggtgcgggtcggggacggagacgcgtgcaccctgaagacagtaactaggcctgctctacagagggaaacgcaggctctgagagcc

SEQ ID NO: 298923 - DNA, 122 bp, Homo sapiens
cccagctcccagctccacaggtaggtggggcccaagggcaagcaccttgccccaggaggacggagtttatgctgctgattgccaatgtgtcctgcctccttcctggcccctacaatgtcacc

SEQ ID NO: 298924 - DNA, 122 bp, Homo sapiens
gtagatagaggtggtggtccccgtgtttgaccgcagagagctgacagttgggacagcgatcgtgctgtctcaattacagaggatggcaaccatgcagaggagtcaaaccagcccctcctgcg

SEQ ID NO: 298925 - DNA, 122 bp, Homo sapiens
gctctctcctcaccggccgctgcgggcttcccggattccttttctccctggcacccaagccgtcctgggtattcccaagacaccccgcccttgaagcaggtcgttacaggtcaccccctctc

SEQ ID NO: 298926 - DNA, 122 bp, Homo sapiens
cagggcacctgcgaggtgattgcggctcaccgctgctgcaaccggaaccgcatcgaggagcgctcccagacggtgaaatgctcctgtttttctggccaggtggccggcaccacgcgggcaaa

SEQ ID NO: 298927 - DNA, 122 bp, Homo sapiens
ctccaaggacgtggtctccaagctgcggatcatggagcgcctcaggggcggcccgcagagcgagcactaccgcagcctgcaggccatggtggcccacgagctgagcaaccggctggtggacc

SEQ ID NO: 298928 - DNA, 122 bp, Homo sapiens
ggaagcaacgtctatttttagatcagatcctgtccctatccctctccgggcccagcgtgccgcaggtaatgagagcaacgccattccttcggccaaggagaccacagaacctcaccctcctc

SEQ ID NO: 298929 - DNA, 122 bp, Homo sapiens
gcaacactaactcaggcttctagtggtctgatgagcttaaaaatcaattaataagccgggcgcggtggctcaaacctgtaatcccagcactttgggaggccgaggcgggcggatcacgaggt

SEQ ID NO: 298930 - DNA, 122 bp, Homo sapiens
tgacctcatcttctgcctgcctcggcctcccaaagtgctgggattacaggcatgagccaccgtgcccggccacaacattcttaatgtaagggtttgaagcctctctcaatccttgaccaact

SEQ ID NO: 298931 - DNA, 122 bp, Homo sapiens
cgaactcctgacctcaggtgatccgccctccttggcatcccaaagtgctgggattacaggcgtgagccaccgcacccggcctgaacgaagagatttctataacctcctttatttgaccactt

SEQ ID NO: 298932 - DNA, 122 bp, Homo sapiens
agtgttgcccatgatgtgttttggaagcaggtgggatcatgaccgcagtgctcagcccagcggttctatcggacccttccctgaatgcttctctcctgcccagaaggtagcaaaagtcacgt

SEQ ID NO: 298933 - DNA, 122 bp, Homo sapiens
catcaaatcagaaacctcagaggccattggcaaggttttagccagctgaagtggagcctgcgaagtggtcgcaacagcacgatcaactgaagtcgggattgccagtaattgccaattccacc

SEQ ID NO: 298934 - DNA, 122 bp, Homo sapiens
ctgatcctgcaaattctgtctgcgttggattttgacccatacagagtcctaggggtcagccgaacagccagtcaggctgatattaaaaaggcttataagaagctcgcccgggaatggtaggt

SEQ ID NO: 298935 - DNA, 122 bp, Homo sapiens
tcccagccctcccggggctccctggcacccgcaggcagagcccagcccctcggctggcatcggctccggtcagctggctgattgatcaccaggtccggccccggtctctctaaacctctccc

SEQ ID NO: 298936 - DNA, 122 bp, Homo sapiens
cgagttcctgagacttcggggctactgatggcagggagaggctggccgagggcagggccacgcggtccccttctgctgatgtccgtgaggactgggcacagctgccagagtcaagggcacgg

SEQ ID NO: 298937 - DNA, 122 bp, Homo sapiens
ctctagaaaaagtacactcattttcccctaagtacttctagaagtcaccagtggttctctcgtgtgatcatgagcaaatcaattttcatcatgcactgctgcaattattctgggctttcatg

SEQ ID NO: 298938 - DNA, 122 bp, Homo sapiens
tgtgcgtttgctgggagatgcctgactgtgtgttcgtcgagggctgcctgactgtgtgttcgtcgggggctgcctgactgcgtttgctgggagatgcctgactgtgtgttcgtcgagggctg

SEQ ID NO: 298939 - DNA, 122 bp, Homo sapiens
aggacatttacaaacacaaattactctctacctatcacatattcattcatgaagggaaggcgagaaatgccaactgtgtgacactgagctaggtactgaaataaacagacccaagaatgtgg

SEQ ID NO: 298940 - DNA, 122 bp, Homo sapiens
ggctcatcaccccctacccaggaggcagtgcaatggagtctcctgggtcatacaaacagacgcagccactcaccctgcacctgttgcgtgtgcagaggacaggaggaagacttcaccagatt

SEQ ID NO: 298941 - DNA, 122 bp, Homo sapiens
acctctccatccgcttccgggtctgcgggcaatccctctcatggcagggcggggtcgcagcgtcctggaccagcgcctagaccctggctggtctcgcaatggagagggctggatccgaggtg

SEQ ID NO: 298942 - DNA, 122 bp, Homo sapiens
ccctttcaggccctacatcattcgaggaatggcgcccccgacgacgccctgcagcaccgacgtgtgtgacagcgactacagcgccagccgctggaaggccagcaagtactacctggatttga

SEQ ID NO: 298943 - DNA, 122 bp, Homo sapiens
ctccgctccagcatccctggggccgctacgcccctcgcacgcccggccgagccctttccccggcccggtcacccagatgggtccccaaacctaccagctcctcagattctctccctccctcg

SEQ ID NO: 298944 - DNA, 122 bp, Homo sapiens
ggggcacaccttagctcagaacctgtttttacccagtaccctagggctttggttctttgtcgccgtccccgttggagttttttctttgcctttcagaagcccgtgcactctctttagagtgc

SEQ ID NO: 298945 - DNA, 122 bp, Homo sapiens
aaaaaggttttcagcagataaacagccgggacctcgggggattgtgcctcagcctaggcccggtagtcgaagacatatggacaggaaatgggcaagacacgggcctttcagagaagagagac

SEQ ID NO: 298946 - DNA, 122 bp, Homo sapiens
gagctgcctctttggaagtgcagatttattcctgtaataatcctgcctgcttttacctctcgtccactgaccagcaagtgtgagtcccggtgtcagtcggcacagtccagtgtccatctgca

SEQ ID NO: 298947 - DNA, 122 bp, Homo sapiens
accgacgggggcgggggggaaaggagccgggaaaaaagactccagggctgcagagtgctccgaggaagcctgcattccaccaccttcaggagccggtcccgaggcggctccgattcactgca

SEQ ID NO: 298948 - DNA, 122 bp, Homo sapiens
cgtggatccgtccggctgagggtgcgtggatcagactgggctgagcaggcaagtcatcgtcgggtcacagcgaggcgacccaggagcgaacttccagggcagcctcccttttgttggcgctg

SEQ ID NO: 298949 - DNA, 122 bp, Homo sapiens
ggagaagggggcggggtggcctgattggctcgcctgcccctgggggcagtagaggggccccgcccagctaggggagccgctccgttccactcccctccctagccctccctccccacggccct

SEQ ID NO: 298950 - DNA, 122 bp, Homo sapiens
gccccaaactccctcattcctgggaagttttctctctttacagtcaacaaacctgtcaaacgtctcccttccagcccgtcccccattcctcagctcctctttctcccccctcacccctctct

SEQ ID NO: 298951 - DNA, 122 bp, Homo sapiens
ctgacctcaagtgatccacccgcctcggcctcccagagtgctgagattacaggcgtgagccgccgcacccggccgcaatctgtcttaacaaacactctaggggattctgatgctcaccaaag

SEQ ID NO: 298952 - DNA, 122 bp, Homo sapiens
cgcgctggagcgggtcgccgcggttccagcgcgccgggccaccagcaccggcctacagggcggagttcgcaactcacttgaaagttgcacggaaccgagtgctgcccaaccccagggctccg

SEQ ID NO: 298953 - DNA, 122 bp, Homo sapiens
caggggccggacgcttatggacgatgcatatgtggggccggatagaattgtggcaggcggcgctggggctgatgcgcctcacccagattatcctctgtaatcctcacagccctgtgaagtgg

SEQ ID NO: 298954 - DNA, 122 bp, Homo sapiens
tgagcctggaaatccatctgggcggggcagaaggggacggtgtgggactgaggcctccctcgaccctatctggggctcttctggtagcccgaggctaaagcacatattaaaattatttttca

SEQ ID NO: 298955 - DNA, 122 bp, Homo sapiens
gccatgaatccgaaactgttggccccgcggtgtcctctgcccagacctcagcggattgctcgcttttatagagcttgccgcgttcccattggctggcctcaggtggcgtgatggcccactgc

SEQ ID NO: 298956 - DNA, 122 bp, Homo sapiens
tgctccgctgaaactgtacttggctgaaactgtacttggcaatatcacctctgacctccacgttgctgaaccccatgaacacttttaatcttaggcctcttggcagcctccgatacagctga

SEQ ID NO: 298957 - DNA, 122 bp, Homo sapiens
gcttctccagtcgcccccttacgcctcccccttgagcctcccgccccgccagccctcggacgcatgggcccctgggagttgtagtgtaacctgcagtgcactgaggcgctgaggagaccaag

SEQ ID NO: 298958 - DNA, 122 bp, Homo sapiens
tgtgcaaagcacaagacacacgagcagtcatgggggtcctgacagagtcaagagaccgcccgttttttttttttggtttttttttttttgagatggagtcttactctgtcgcccaggctgga

SEQ ID NO: 298959 - DNA, 122 bp, Homo sapiens
cacatgcggcggcacggtccagcttttcaggctgaagctggaaacgatgactctgctactcgctccccggctctctgggaaccctcggagtgcgggtcaggtctccaccgcggcccacagcc

SEQ ID NO: 298960 - DNA, 122 bp, Homo sapiens
ccacttggggcttggggcttctgacccgggagtcgggtgctgggttgagtgcgaggccgacgcctctgccgggtggggaacccgcccgccggcgaggagcggtcgcggccaggggcttccgc

SEQ ID NO: 298961 - DNA, 122 bp, Homo sapiens
ctcctaccctcacccctatccgcgccccccggactggcaggcctctggaagcccaggccgcggcgcctaccgcaaaaccttctcccgccgcagtcccgtgaccttgacgccacgggcaatcc

SEQ ID NO: 298962 - DNA, 122 bp, Homo sapiens
ccgcggcccgccgattggccccagccgccctggtgactcgacgcacttccgccccgggcgcggctcgggccacgcccacctgtcctgcagcactggatgctttgtgagttggggattgttgc

SEQ ID NO: 298963 - DNA, 122 bp, Homo sapiens
aaaaccttcgccttgtcaggctagggcgggaagaccgctggggaacttgttgcttatcagcgccggcagactaccgctttaataataataccagaaaagcgcagcagggagggggtgggggg

SEQ ID NO: 298964 - DNA, 122 bp, Homo sapiens
ggcaggcaggaccactgggcccacgcgtgcctctggacgggcctcccagccagcatgtgccgtgttgtgttcgcagaaagaagagcagagcctcaaaaggctgaggagcagggcacgcaggt

SEQ ID NO: 298965 - DNA, 122 bp, Homo sapiens
caataaagctgatatgagatatacttcacatatcatgcagttcacccattcaactcgtttcgagtggacagttgagtggtttttaggacattcacagataggagctgaggtcaatattacag

SEQ ID NO: 298966 - DNA, 122 bp, Homo sapiens
gaggatgaggaggccaagggcgtgcagcagtatgtgcctgaggagtgggcggagtacccccggcccattcaccctgctggcctgcagccaaccaagcccttggtggccaccagccctaaccc

SEQ ID NO: 298967 - DNA, 122 bp, Homo sapiens
gccccgcggactgactgcgtctgtgctgagtctgtgtgacacctgactgcgagtccccctcgctttgagtctctgtgtgggtgatgtctgttcacgtgtggctcaccttggcttccagtggg

SEQ ID NO: 298968 - DNA, 122 bp, Homo sapiens
cgcggggccggaggacccttctctttcggtgaccctggccgacatctaccgggagctctacgccttcttcggtgacagcttggccacacgctttggcaccggccagcctgcacccacggctc

SEQ ID NO: 298969 - DNA, 122 bp, Homo sapiens
aagtgaaggggcgggcctggagggacgtgagtgcgcaggcgcgcggccagaggggcggagcgtaggaaagggcgcccgccctgtcctcgcttatttgcataaccaagactgcggaaggcgca

SEQ ID NO: 298970 - DNA, 122 bp, Homo sapiens
acctcggcgggcgggactgggcggggcggggcatcagaactcaggtgttttttatttacgcgtcagggcttttcttgtttaataaagttatgatagctagcagtgcggtcccgggcgcctcc

SEQ ID NO: 298971 - DNA, 122 bp, Homo sapiens
cctgcagaaaaaagagccagtgggagatgatgagtctgtcccagagaatgtgctgagtttcgatgaccttactgcagacgctttagctgtaagttatagttcttttctaagttaggatctct

SEQ ID NO: 298972 - DNA, 122 bp, Homo sapiens
tggccctttaagaggctccgcccggcaagtccgccactcgctcccgattggtcccgagcgcggccgagcgcagccgaacttgacgcaccgcccgcagccttccttaccaacctcccacgcga

SEQ ID NO: 298973 - DNA, 122 bp, Homo sapiens
ccctggcctgggccggtgtcaggagaatccacttggggagccgtgtgaatcaaactgcttcgttttgtctgagcccggcggtgccttccctctgtgggaacacatggcaagcacgaaccatc

SEQ ID NO: 298974 - DNA, 122 bp, Homo sapiens
ctgttctcccgctgatattcataggaatgccgatagtctgtgtcatagtaggcatctccccgatcccggctataatcgttgcgtctgtagctgccacagtatcgccggtcatacaccctccg

SEQ ID NO: 298975 - DNA, 122 bp, Homo sapiens
ttaagcgggccggcgggtgacatcacctcatttacataggagcgcccataaagctgcgcccgccgcaccccgcccgacaactcggtggtggccactgcgcagaccagacttcgctcgtactc

SEQ ID NO: 298976 - DNA, 122 bp, Homo sapiens
gacggtggccgatagtggtcctactgtcgtgggactgctctgcgcgctcccggtggggcgcgcctgcgcattatgctggtctccatggcggggcctcggagccaagacgaggttgagtagac

SEQ ID NO: 298977 - DNA, 122 bp, Homo sapiens
tggttttccagaacatgattcattttacccgtgtttcctcatttctgtttaaaaatccagcgcaatattatggatttattgtcacactgacaaggatgtgtgtgtatgttaagattcaaaga

SEQ ID NO: 298978 - DNA, 122 bp, Homo sapiens
ctgactggaagcaggggctgtttttcaactcctggactaaagcccagaagcaggtgagggcgggggaggtggaatgggtctttggggctgagagcaggctggcctgggagtggaggagccca

SEQ ID NO: 298979 - DNA, 122 bp, Homo sapiens
attccatgaagctttttgatgtttaggtagtcctggtaatgcaggactacacgtgtagtccgagctatgcaggaggatctcttgaggccaggaatcacccatgattgccccattgtactcca

SEQ ID NO: 298980 - DNA, 122 bp, Homo sapiens
ttgggcagagctgggtgaagagggacaccttctgccaggtgggctgtggggaccgctgtccgtcctgtgccaaggtggaaggtttctccaaagtgcagcagctgtgcagcctgatccccaac

SEQ ID NO: 298981 - DNA, 122 bp, Homo sapiens
gggcctcagggctcaggaggccgtgatgaagccagcaggtgaactgcaccctggagcctccgacggggcggccacgggcagcgaagaacccggaaaaacaggttcgaggcagacacaagatc

SEQ ID NO: 298982 - DNA, 122 bp, Homo sapiens
gtccgccccccaccccgctagagtctggcggggaacggagagctcgcaggtgaggggccccgggttccccgccacccttggagcacctcagcgttcttaggggaagccagagccggggagga

SEQ ID NO: 298983 - DNA, 122 bp, Homo sapiens
ttccagggattctgggatttaatttcttgagggcccctcttgttcggctttacgcgggtccgcccctttcagaaagggccatctcgctgccacctggctcctgaagattctcccaccactcc

SEQ ID NO: 298984 - DNA, 122 bp, Homo sapiens
ggggttgggtgctggttttacatggtgttcccacagctgggaggacacccacatggtcggcgtgcaggatatttcgctggaccctagaaaagccaccacgacctgtgggccatgatgctacc

SEQ ID NO: 298985 - DNA, 122 bp, Homo sapiens
gaccgtatcctgcaagagtcggattttgaaaagattaattgctcttccggagattagccccgtcaaggctggctttaaatgctcctactatagattcccatagtactacgcaagcccaatat

SEQ ID NO: 298986 - DNA, 122 bp, Homo sapiens
gggcaggaggccggctctcgaggtcctcacctgaagtgagcatgccagccactgcaggaacgccccgggacaggaatgcccatttgtgcaacgaaccctgactccttcctcaccctgacttc

SEQ ID NO: 298987 - DNA, 122 bp, Homo sapiens
ggcctccccgaaacacaaattggaatggcgttggctcccgggcacactagggggcgccagcgggcttgttttccaggatggccctaaaattctctccagcgaggagaggaccatgacggcca

SEQ ID NO: 298988 - DNA, 122 bp, Homo sapiens
acatcgcacctgtccacgacgcaggatcccaaattacccactgcctttaatgacaaatgccgtcatgattcggttgtcgtctgagggtgggggtgggataaactcccttcaaagggggacct

SEQ ID NO: 298989 - DNA, 122 bp, Homo sapiens
gcgtgagccaccgcgcccggccaaaagttcctctcttaagcaagctgggcacgaagtagccggcaaccaaaagcagctaagggctacaactttaaaaaatggtttatttttttctttaacaa

SEQ ID NO: 298990 - DNA, 122 bp, Homo sapiens
atatacacaaatcaataaatgcgatacattgcattaaaagaaccaacaacaaaaactgcacgatcatttcaatagatgccgaaaatgtattcagtaaaatcctacatctctttatgataaaa

SEQ ID NO: 298991 - DNA, 122 bp, Homo sapiens
tttagccccctacgtctaccccctcccattgactgctttatgtgtaaaatggcttgttggcgggtccagccctagagctgctaagctgagaagtttctaatcttgtctctggaatcttcctt

SEQ ID NO: 298992 - DNA, 122 bp, Homo sapiens
agctctgtcgtctgcggagggcttaagtgttaacagcttagtggaccctctgtctttacacgtgaggcggctgccctctaccagcgagggcgaagggtcggtgtgacagcattttgtatcca

SEQ ID NO: 298993 - DNA, 122 bp, Homo sapiens
tcagagccggtgaaaggccggaagggctcccggaataataatgagtgcaaccccatgcatcgatgaagatgcaggagaccgcagccacgctccaaagacaaagcaaaacagccggacaccta

SEQ ID NO: 298994 - DNA, 122 bp, Homo sapiens
ccctcctccccacccactgacctggggcgacgaggggatccccaaagccctgagtgaagacgtgatctcttgcaccccggttattccagtgcagactattttaatgaacccttggcaaaacc

SEQ ID NO: 298995 - DNA, 122 bp, Homo sapiens
gccagccggccctcaaatcctccgacgaagcggcagccgccacgaccacggccagagcagcgctcggaggcgagtttgtcaacaatcgcctcgcctttggcggcctgacccgtaggcgccgc

SEQ ID NO: 298996 - DNA, 122 bp, Homo sapiens
tgtagcgtccgggccccagaccaagcgcgtgcttggagctctccggtacagtgaggcgcgcgcttgcctggctagggtccctgtgaaggaatgggatcccgaggtgcttgccaggaccgtag

SEQ ID NO: 298997 - DNA, 122 bp, Homo sapiens
gctcggcgggtgcgggaaaaagggtgaaagagaaacttggcgacctcccggaggagttcgcgaagcgaccaggagcgtgttgccatcgtcctcacccggcacccaattccaccacagagtcg

SEQ ID NO: 298998 - DNA, 122 bp, Homo sapiens
ggacccggggcctccccgcagacctcatcttcctttggtccccactggatgacaggctcccggtgcccagtgggccacagggagttgcccacatgcctcctgctcctgatttcactccaatt

SEQ ID NO: 298999 - DNA, 122 bp, Homo sapiens
ctgggagagtaagtataggaaagggtggaaatgacacagagataaaaacaactttattctcgtaccgaagaaaaggaagagcaaaataatgtaaaacaatttacaatgaaaatgggtaaaaa

SEQ ID NO: 299000 - DNA, 122 bp, Homo sapiens
catttagtgagagcagaaacattttaacaaagtctggaaaaggaatttagtaatcagaaacgaaaacagtgtggttaggtgaaaggactctgagtgtgctagtagagtaatagttgtgggag

SEQ ID NO: 299001 - DNA, 122 bp, Homo sapiens
aggaagcttcctgtggctgtgccagagcagcaaggacctgtgcagcgtcagcgcccagagcgcacagtcgcggccctccacggtgcagctgcctcccgaagccgagatgcgcgcctatgccg

SEQ ID NO: 299002 - DNA, 122 bp, Homo sapiens
ggcagcggcttctgcgcatgctcggaagagcgggcagggttcccactccgggagcggagacggagaacaggttatgtgggagccggcgggggcatttgccggcgacacccgagcgggggccg

SEQ ID NO: 299003 - DNA, 122 bp, Homo sapiens
attttcaccccacccccgcctctgatccccgggggcgagattggcgcgggagtgtggccgcgccccatcagatgttcgcccttcaccagcgggagcttgatatcccttgtctgtaacataga

SEQ ID NO: 299004 - DNA, 122 bp, Homo sapiens
aacaaaatcaaatgtgtgtacttcctgtgccatcttaatcagagatgcttcccagcagtacgtattaatacatatcacagtgcaaatggaatgaagcaatctgaatgttaggtgatgctatt

SEQ ID NO: 299005 - DNA, 122 bp, Homo sapiens
atgaggtggacctcaagtccggctacatgagcgacagtgacctcatgggcaagaccatgacggaggatgatgacatcactaccgggtaagcgcaggggcttcttggatggcgggggaggatg

SEQ ID NO: 299006 - DNA, 122 bp, Homo sapiens
agtctgtcagcaggagactcggcctggcttacgctccacttggacttctgctcgggctcccgggaagccatctggggcagcctggcgtccatctgcccttctgaagtaggtcgcagaccctg

SEQ ID NO: 299007 - DNA, 122 bp, Homo sapiens
tcctgctcatctctaaatgtgttcaggaactcagtcgaccctcagccgtgcatggggtcccggctggcttggtatgtgcacctgccgagtctgtgctgccagttatccccacggcctctccg

SEQ ID NO: 299008 - DNA, 122 bp, Homo sapiens
catgctaagctccaaagtgagcaacagacaccctcgtcccaggtcccatgctggcagaagcggacccgggccgagggatcagccctcccacttccagcggaggagcccttcgcaaccctagc

SEQ ID NO: 299009 - DNA, 122 bp, Homo sapiens
agttcactcgaagtaatgaggagtgtgggctttgcagaacagagacaaggcaggcaggcccgcgaggaagttgttgtggtcttgctgaaagatgaatccagagctgggccctgattatgagg

SEQ ID NO: 299010 - DNA, 122 bp, Homo sapiens
tcccagtgctggtgtcttaggaaagctgacaggcagctttgtgcaagccgaggtattggccgccataacgcacactgacttttgtaccgcctttgctgtcttacgcattttgtcggaataaa

SEQ ID NO: 299011 - DNA, 122 bp, Homo sapiens
cgagtcactgacaaggcggcggtatccagcagagggcgcgccaggcgccagcaccaggcccgaggacgcctggctcatccccaggccggcttccgagagccccgctaagtgcaggcggatac

SEQ ID NO: 299012 - DNA, 122 bp, Homo sapiens
gctgtggtcaaagacaggcctgggaactggggtcctgagcaccctagcccagcccagtcccgccccgcggaggggcccgactgagctgggccgcgcgccccagcagccccagcagccgccgc

SEQ ID NO: 299013 - DNA, 122 bp, Homo sapiens
tcctcggggcgtgcgctcctgtgcgccaaatgattggtggcaggaaagtagcaggtaaaccggctcccgccgcctcgccattggtcagcggcctctctagccgccacacaactggccagcgg

SEQ ID NO: 299014 - DNA, 122 bp, Homo sapiens
ttcctcatattccgtgatgactgttttgagtcctaaacaaacatttcctatcaattttagcggggagtagggccagggcaatctcgacactaagggacggggacacagacaagtctcttcca

SEQ ID NO: 299015 - DNA, 122 bp, Homo sapiens
ggagaacatggccctggagaaccatgggtttgcccggcgcatttatgaggactctgatgccgatttgcagttgcaggtatgccttgtcttgcacacttccgggcataaggagctcactactt

SEQ ID NO: 299016 - DNA, 122 bp, Homo sapiens
caacacatacaagtaccgggacggtgagggctgggtcacagacgttcaagcgccgagcctcgccggcaaggtctcatgagccaggtaacccacaagttgaacagaggcgtccgctggcttct

SEQ ID NO: 299017 - DNA, 122 bp, Homo sapiens
gatctcatgatcctcagcctcccaaagtgctgggattacaggcaggagccaccgcccggccgggatgcatttctttgtattaaaatgacctgcttctggccgggcatggtggctcacgcttg

SEQ ID NO: 299018 - DNA, 122 bp, Homo sapiens
cctcagggtcctcaagggtccaggcagccccggggggccaggagcctggggccctgtgggcgcctcactatctccatcccctatgggctctccggtctccctccccctcccgaccctccttc

SEQ ID NO: 299019 - DNA, 122 bp, Homo sapiens
tgtctgcgctccttaggcagtccctcttgcctcctgtcctgtctcactctcctgcacacacgcacccagtgagtactcaaggctagtggcttctattcatacttccgagacatgtcttgttg

SEQ ID NO: 299020 - DNA, 122 bp, Homo sapiens
ttatctatgattaaaattagaaacacatccttgggcctttctttgcatgccatttttccacggtttcaaaaagataagcttcgcctataaaaggagtttttgttgctatctggttgcgtgtg

SEQ ID NO: 299021 - DNA, 122 bp, Homo sapiens
ccccatgggcatgtgggcgagggtccgggccggctctgaatgaacgtctcagcttctctccgcattgctctttcctcagccccggccatggccccgcagaacgtgcaggtgaccccactcac

SEQ ID NO: 299022 - DNA, 122 bp, Homo sapiens
gtcctctgcctctttctggtctggcaggtccggcactgttggcaccaggtcaccaggacccgcttcagcacaaggaatgtcatcaaggtgagtgggccccatacaccttcacccttcttccc

SEQ ID NO: 299023 - DNA, 122 bp, Homo sapiens
gaagctgctggttggtgcctgaaatctgtgcgttgcccctttaattgtgtccccagccctcgggcgtttctgtccaacgcccacgtcagcaaataccttttgtttctctcacgttggggcta

SEQ ID NO: 299024 - DNA, 122 bp, Homo sapiens
caccccagctgcagaccaagtgaccagcccagttagaaggggctcggccggatcaaacctcggtgctgcctcaaagcatctgctgaagctcttcctcgaccaactgaacttcctcactgagt

SEQ ID NO: 299025 - DNA, 122 bp, Homo sapiens
gaaaaagcccgcgggcttccatggaatgcaggctgcctggggttgaaccctgctgggtcccggtgtcgcctctaccccccaattaactgcgcccctggaacagttccctaactgatctgcgc

SEQ ID NO: 299026 - DNA, 122 bp, Homo sapiens
cactgaagagcacctaaagggttcagcctggcccagaatatatctttattatgctttcatcgttttaaaaaaagcctatacagctcaaataaataaataaatccataaatcaagttcacttg

SEQ ID NO: 299027 - DNA, 122 bp, Homo sapiens
gtggctgggttgctgtggttgaaggcacctgccttaaggggccaggtcggcgcagggcagcgtctctctggggtgaggagtttatctgagtgccttagagaaggccctttggagaatggctg

SEQ ID NO: 299028 - DNA, 122 bp, Homo sapiens
ccaggccatcagtcccttcgcccatggccaatcagggctcgggagatgaccgccaacccccgcccccccaagacacgcccccgcgtcccaacgcagccagtcagagcgcgggacacaactac

SEQ ID NO: 299029 - DNA, 122 bp, Homo sapiens
acgcagcctcgttcttgagcagtatttcccagttcccttttcagatggtaattgataacccggcccctcttgtctgttcattctgagtggagctgacaagccctccccttctttggttccct

SEQ ID NO: 299030 - DNA, 122 bp, Homo sapiens
gcccgccccgtgttgggaaaactgcttgggccagcagtccatggccctaggagagagaatcggctggccgctgctggagccgcagagcagctgccaaactgcagtccttcgagtccctgcga

SEQ ID NO: 299031 - DNA, 122 bp, Homo sapiens
ggggacctgcacggaggagcgctctaggggaggctgctgcctcgggagctagggcgcgcccggaccacaccgcacggcgcagaagcccagcgcgcacgcgcgccgcctgccgccccgcgcgt

SEQ ID NO: 299032 - DNA, 122 bp, Homo sapiens
cagttcggggtccctgcgtcctgtctcctcagctgggcttcgaggatgtgatcgcagagccggtgactacgcactcctttgacaaagtgtggatctgcagccatgccctctttgaaatcagc

SEQ ID NO: 299033 - DNA, 122 bp, Homo sapiens
ggttttctactttagggaaagagccacagcttgagtggggtggttttggtgtcacatacgcgattaataacacccaccgctgcagaggaatcaccgtggactactcctcctttcatcccatg

SEQ ID NO: 299034 - DNA, 122 bp, Homo sapiens
cgctgctcagaaacgggcccaaaaaccaccgtccgctgtgagtacttccggggcaaaaggcggagccaggcagaagaagtcccacggcgaagcgctcgccctctagcctgaggcggaagaca

SEQ ID NO: 299035 - DNA, 122 bp, Homo sapiens
ggtttcacagaggattgtgggattacaggcaagacctgctgagggcttgcactgagccaccgagaggagcagaaagagatacgagggcttcaggtgccagtatggttctcactgttgtgaga

SEQ ID NO: 299036 - DNA, 122 bp, Homo sapiens
gcggcctgcgagtccgtcgcgtgctgagggagacgcaggaggtggagccggccgggtgctcgagggaaggagactggaagctggttccggcgtgaggaggtggaggggccgccgcgggctcc

SEQ ID NO: 299037 - DNA, 122 bp, Homo sapiens
ccgccattcagaggggtgcacgccacccttgacccctgaccctgaagtcataacccaccgcgcaaatatacaggaccgcctcctcaggagtaggaccatgcccgagtcccctgttgcctgag

SEQ ID NO: 299038 - DNA, 122 bp, Homo sapiens
aattcaaaataactcgtgtttaatcaccagtgcagatggtgtcagtaaacctgcctggggcgctgcttcccaacccccgccagggcctgcgccctgcagcccaccggaggcgtggccggagg

SEQ ID NO: 299039 - DNA, 122 bp, Homo sapiens
gggactcgaatctcgcgtagtcttgatcataccacagctggtagaagtaggtcttcccgtcgtccccctccagcagggactcgggatccatgcctcccttgggagataagaatgcgtgtcag

SEQ ID NO: 299040 - DNA, 122 bp, Homo sapiens
gcgttcgaaatggcgcgcagcacagttccgcccccgcgcgtggaatgccgctccagtggacgcccaggatggctttcttaaggaagtttatgagaagccatggaaagagcagcctgggatca

SEQ ID NO: 299041 - DNA, 122 bp, Homo sapiens
acgtgaggagcgggcggcgcgctgggttgctttctcgggggtcgggtgagggccaggcggcggtccctacccggatccgccttcctcaaggcgggtctgcccttcggggagggcgtgtcggt

SEQ ID NO: 299042 - DNA, 122 bp, Homo sapiens
ctctgtgcccagcactgcactaggtgccatgagaatacaagagtagtataagatgttatccgccctccaggagcttacaaaactagaggcagaaataagatgtacatgtgactcaggcagca

SEQ ID NO: 299043 - DNA, 122 bp, Homo sapiens
cagagcgagactctgtctcaaaagaaacaaacaaaagaactggaggtggcccggcccctgcgtctaacagtcctgggccctccacaccagcacaggaactcaagcctgcagtcactggggcc

SEQ ID NO: 299044 - DNA, 122 bp, Homo sapiens
cagcagacgcacctcgaaaggtgccagttggctaaatacttcatgcatattacccagggccggaggcaggaggcttccctcagccatgacagccactaaggtgcaggatgcctccaggtgcc

SEQ ID NO: 299045 - DNA, 122 bp, Homo sapiens
ctgcagcccgccatgcctgagccttcccccgctccgtaggctcctgtgcgacctgagacccgagactctccgacgagcgccgccccctgctccaccacgcccagtcccatcgaccacccaag

SEQ ID NO: 299046 - DNA, 122 bp, Homo sapiens
gagcagaaacctgaataagtcacgccgctatggggcggggctggtccctggcagaggaagcgcggtgcaaaggtcctgagacgagcacgctgcctgccgtgtgacacagtagctgggaggtc

SEQ ID NO: 299047 - DNA, 122 bp, Homo sapiens
tcccggcgcccgctcctctatccgcgcagagccctggcccattgagcatgcgcggcctcgcgaggcctgctgggaaatgtagttctcccacccagcctcgccacgcgggggcgctgggacaa

SEQ ID NO: 299048 - DNA, 122 bp, Homo sapiens
atcgtcaatagaggggaattgggcactccccaaaagagcaaaatattaatatcaagcaagcgagaagctgtattctgcacgttagaggctccttcactaatacctgcaaaccaatgatcacc

SEQ ID NO: 299049 - DNA, 122 bp, Homo sapiens
ctcctcaagtgccgttaaagtgggagcccaggcagaggagccgagagtgagtgacggctgcgaggcctaccagcatgttgtcacctctcagtgggggcttggcttcctctgcacagttaaag

SEQ ID NO: 299050 - DNA, 122 bp, Homo sapiens
agcgggaaagcagaggagctgggaagctttaaagctgagccctctctcacgcagcagaggcgcagctaattccgaatcttccaccagctgggagtaagcgccaatctaacttctgtacaagc

SEQ ID NO: 299051 - DNA, 122 bp, Homo sapiens
gagctctgctgcctggtgggaccggacgtggcagccggcgggctggaggctcccaggtcccggcctcgccctggcctcgcctcgccccctagagtctccccgagcgctcgtagcggcggggc

SEQ ID NO: 299052 - DNA, 122 bp, Homo sapiens
gccagctcctacagcacctatgggatgggtgcaccaccagtgatagggatctcagtagggcgccagctgaggagggaggaagataataggatagatgatgaaaatgaaagggcagactagcc

SEQ ID NO: 299053 - DNA, 122 bp, Homo sapiens
gagatactgggtgaggcgtaggagctactgtgcacccggcgtgagtcacccgcacacccccgccccgtacaggcgtgtctctctgtgacccgagtttggccaacaggcattttcagttccac

SEQ ID NO: 299054 - DNA, 122 bp, Homo sapiens
cgccggggtggtagactaggggtcagcctgtgtctccacatagctggtggggcctacacgcgccaactgtgctgtgcagcccccgggccttcaggacaacacagccacgcagggcatcctca

SEQ ID NO: 299055 - DNA, 122 bp, Homo sapiens
agggctgcagagtaagaggatgtggaagggcaggaaccgggggcagggtgccactttaaacgatgtggtcaagcacggcctcacggaggtgacatttcagggatgacctagcaagttgggaa

SEQ ID NO: 299056 - DNA, 122 bp, Homo sapiens
tccgccaccatcacgtgggctcctcctctgtgacgtcggcgccttcgctgtagcaaagctcggcctctggaattctgagaactaatttgctattcggtgacataagagggggagtgcgcttt

SEQ ID NO: 299057 - DNA, 122 bp, Homo sapiens
gccactaaaagccactagttttttcatgggaaagatgcttctctttagtcatacatttaccgtatggtgccagatttcactaagttggtggcgtattgatttgcaaagttccttaagaagac

SEQ ID NO: 299058 - DNA, 122 bp, Homo sapiens
aaaccaggcccacctgccgggcaggtggaggcgagcaaccacctaagctctctgggacagcgggagagggggcaggggagtcgccgcaccattcttcctgtggccgctagggggtccccgct

SEQ ID NO: 299059 - DNA, 122 bp, Homo sapiens
gttcggacttcttcccttctcagcgctgtgcctgtctggctctgagaaagggccagcgggcgaacggggagcaaaggggaacagagacctttaatgagcttctactaagtaccgggagttcc

SEQ ID NO: 299060 - DNA, 122 bp, Homo sapiens
gggcagccacagttttcatgatcacatcatacaggactgagaagcagataacaagagtgacgctcacaggggtaggcatagacacactggggccgaaggggagaggaactctccctagacac

SEQ ID NO: 299061 - DNA, 122 bp, Homo sapiens
gtaccgaggggcctcccaggacatgaaactgttttaaaaccattcctgggcaagctgggacgaattggccaccctacctatgtagctacaatgtgctgtctaggcatgcaggagacagcaat

SEQ ID NO: 299062 - DNA, 122 bp, Homo sapiens
gtgcccggtttcgccagaggttggtccttcttcctccctttcttcttcccttcctttgggcgccggcggcgagagcagggattgtcagcaactcgggctgcagaagcagcagcaacggcggc

SEQ ID NO: 299063 - DNA, 122 bp, Homo sapiens
cccgactcaacgtttaattttggatgaaccgccagactgttttccacagcagctgcttgacgctagccagtctaatgggtgtgaggtgggatctcattgtggttttgatttccatgtcccta

SEQ ID NO: 299064 - DNA, 122 bp, Homo sapiens
cccacccccaccccagctctgcgtccttcaaatgcgggggcaggcgtgaagctggcccgacgcaccctctctgagctctcgggtgggaagaatcccaccgccccacgccaagcagtgccggg

SEQ ID NO: 299065 - DNA, 122 bp, Homo sapiens
cacgctgctgaccgtgaccagcggcaacgtgtggatgcactttcctgctttctcagggtgcgcgcgggcacggagcgtcactcggtgcgtgcagacatggagcgccactgcacgtaagatta

SEQ ID NO: 299066 - DNA, 122 bp, Homo sapiens
acagaccccgagtgtgactgagtccactgtgtgcaggaacacagcagaacagaccttgagcgtcatggaatgcacacagtgatcctggagggtggggtgcatgtgtggcaatgggaggcctg

SEQ ID NO: 299067 - DNA, 122 bp, Homo sapiens
cctgagtctgaattatagaatactaaagggcattagaactgtcatatcagaggccaggcacggtggctcatgcctgtaatcccagcactttgggaggctgaggctggcagatcacctgaggt

SEQ ID NO: 299068 - DNA, 122 bp, Homo sapiens
gctgggacccgtgagagcagctaaacgccagaggtcagacctcgctttttttggctaaaacgcttaatcaaacacacctaatacttctgccggggtgcggggaggttgagagcgcggcggcc

SEQ ID NO: 299069 - DNA, 122 bp, Homo sapiens
aattgcctttctcttcggccagtgttagcctctgagcaggggaccctggacccttctgtgcgccaaaggctgaggtgactgacgaggagatctccccacagctaggtgtagtgagccagacg

SEQ ID NO: 299070 - DNA, 122 bp, Homo sapiens
tcaagacgtcctccttttactgtttgtaaaaactgctcctgaaaactatgatcgacgttccggaattagaaggacgtggggcaatgaaaattatgttcggtctcagctgaatgccaacatca

SEQ ID NO: 299071 - DNA, 122 bp, Homo sapiens
ctccgggtgggcggggcatcggcctaaggccaagggcggagccaatgagaagcagcgccgcgttcccgctgccccccgcccccgtggggcgcgcgccggagccacgggcagccgttaggggc

SEQ ID NO: 299072 - DNA, 122 bp, Homo sapiens
gagaccatttggcgccagtcccctaggagatgggaggagggagataggtatgagggtaggcgctaagaagagtaggaggggtccactccaagtggcagggtgctgaaatgggctaggaccaa

SEQ ID NO: 299073 - DNA, 122 bp, Homo sapiens
agcggtctcccatcctttaagccacccaggacaggctgtcagatgcagacccaggaaagacggtttagtcttccgggcacccatttcctcagccctgtcggttcccttcggtggcgcagggc

SEQ ID NO: 299074 - DNA, 122 bp, Homo sapiens
ccctcgcgtctgcgatgggagctcgataaggtcaccgtcaacagcatccacacggcgccacgccagccgccagcccccaaaagcaccagggaaaagagccccggagaagcacctcccgtggg

SEQ ID NO: 299075 - DNA, 122 bp, Homo sapiens
cttgaaaaactttctaaacaagccataactcatgtgtggcttacaatcatagagagggcgcgctgcaaatgaaaattaccagcgcccgctctcgccgcaatccttcctcggtgcagtccaac

SEQ ID NO: 299076 - DNA, 122 bp, Homo sapiens
gaccagctctgcagccctggagtcaggagcagagccccccggctcccagcccgccgtagccgctcctggcaccgagcgagccgcgatgacaatggctgcattgtgcttcatgtcccttccca

SEQ ID NO: 299077 - DNA, 122 bp, Homo sapiens
ctgctgctgctgtggcggcggcggcggcggcggcggctgtggctgctgcctgctgctcctcgcggcgaaaagcacaaagcacagcgccctccgcctgcaggcagcccgcccgccgccggccc

SEQ ID NO: 299078 - DNA, 122 bp, Homo sapiens
gtctaaaagactttctgggcctcaggttcaaaagagccccactcagtctcctttcaaagtcggctcaggtaggtaggttctctctcccgtctcctggaagtcaatgaatggaactgtcggag

SEQ ID NO: 299079 - DNA, 122 bp, Homo sapiens
gcggtgtcgtccaggactcaggagtggcacctcccactagctctgcgcggtccagttagacgcgctggcagtgggccaccctgcgccggccccctttcttccagatggctcacaggcttcca

SEQ ID NO: 299080 - DNA, 122 bp, Homo sapiens
atcgacagtattgatcagacgctccccggctaacaggcaccaatgagtctgtgccgcccacggtgatgttctggcggctcgtggggaccccacccaccgtcagcctagcttatggtccccgt

SEQ ID NO: 299081 - DNA, 122 bp, Homo sapiens
ttcattgccagaagttttttataagctgaggaattaccttgagaggattgaatttccaagcgcaagtcagcagctgctggggaggctggggccccctcaatcatcctgtacccacgagtctc

SEQ ID NO: 299082 - DNA, 122 bp, Homo sapiens
aaaatctcttaaagcaaatcactttgctgtcctcatatttctagattgaactgacatctacggctcaccactctgaatatacatttgtggaattcagggagaggcattttgtcatatcagtg

SEQ ID NO: 299083 - DNA, 122 bp, Homo sapiens
gcacaaccctgctctccctgggaaaaaccctcagtccttcctgccttgagccagaggccacgggctccatctgctgagagcttgtagagacacacatcaaacaagtcccaaactgctgacct

SEQ ID NO: 299084 - DNA, 122 bp, Homo sapiens
cgtctccagaggtaggatgccgcttttcgctctgaatcctagaagtggcagcttgatcaccgcgcgcaggatagaccgggaggagctctgcgctcagagcatgccgtgtctcgtgagtttta

SEQ ID NO: 299085 - DNA, 122 bp, Homo sapiens
ggccgggagcgatctgggtcgaggggcgagatggcgccttcctctcagggcagaggatcacgcgggttgcgggaggtgtagcgcaggcggcggctgcgggcctgggccgcactgaccctctt

SEQ ID NO: 299086 - DNA, 122 bp, Homo sapiens
gctgaagaaccgagccgcgcgggcctggctccggggctgagttccctagcgggcgccgagcggagcctgccattagaccccattttgccagtcaggccattttaactgaaattttgcattta

SEQ ID NO: 299087 - DNA, 122 bp, Homo sapiens
gtctcaccttcaccacccgaaaacaggtgctaggagagaagctgagaggagcaccggtcacgccccggccccgccctctgccggctctaaagcgcaaggtctctccgcctcgcgccccgccc

SEQ ID NO: 299088 - DNA, 122 bp, Homo sapiens
ctgaatagcagaggcaacctctagaagcaacaggccaaggtgcgtgagtctgctggctggcggtagtgcttcagtgggggccagggaccctgccttcagccacacgctatcagctatgatgg

SEQ ID NO: 299089 - DNA, 122 bp, Homo sapiens
cctttgtgaagggaaactcgctctgggtcactctggtggtggcggggctggtacgtgacgcggccaccccacgggcgtgatgagacacgcgaggctggcgtccgggcatgcgcgggccgcgc

SEQ ID NO: 299090 - DNA, 122 bp, Homo sapiens
atgaggtgggaacattcattagacaggtagaaaggaggccaagcaactactggcagaattcggaaaagggtagagctgtttgaaatccacctgtctaagtgaaaaagttcagaggagcagga

SEQ ID NO: 299091 - DNA, 122 bp, Homo sapiens
gaatatttcctgttacagatgtcaactgaagtcatttaaaaattttctcccaaagttcatcgcgggatcattgctcttattcatattaggtagcataggcaaagctgctagaacaaaagact

SEQ ID NO: 299092 - DNA, 122 bp, Homo sapiens
ctcaccagcgccggggctgtgcatccaggggccggggccctcagagcggggggctcatggcggggcggggggctggggcgccggcctcacatccccccagtcgccggaggctgcagagcgac

SEQ ID NO: 299093 - DNA, 122 bp, Homo sapiens
tgcagtgaaaatggcccagacctcatctcttcatctgccagtgctcattctaagaatcaacgtgaggaaacagctctacagataaggaatgatgtggacggtgcagggaacaatgacaagca

SEQ ID NO: 299094 - DNA, 122 bp, Homo sapiens
ttttgcaaggcatctgcagaagtagccttgggcgagaatagcgaagtctcgaaaagtggccggtttgtcactgtgcagaccatttctggaactagtgccttaaggatcagagctagttttct

SEQ ID NO: 299095 - DNA, 122 bp, Homo sapiens
accttccttgcccaggaggtccaggaggcccaggacacacagagagaggaggccttgccccggcccacacagcatcagcagcagagctattcccgtggcgctcccacatcagcaagcggggg

SEQ ID NO: 299096 - DNA, 122 bp, Homo sapiens
tgaggatgacgagcggcggcctggggccaattgccgagagggctgcggggtgaggggcagcggcggtggccagtgagaggcaggtgtctggagcgcgctgggcctgtggagccgggatgccc

SEQ ID NO: 299097 - DNA, 122 bp, Homo sapiens
tcagagctcattgtcgggaagagaaagccgggctcctggctggaccagtgtcctcatccacgtgacgttcctggagctggacagatcccggctgaaatctggagagggatttgataaatgct

SEQ ID NO: 299098 - DNA, 122 bp, Homo sapiens
tgattcggctgatctggctggctaggcaggtgtgcccttcctccctcaccgctccatgtgcgtccctcccgaagctgcgcgctcggtcgaagaggacgaccatccccgatagaggaggaccg

SEQ ID NO: 299099 - DNA, 122 bp, Homo sapiens
aaaatccagtctcggggacacgagagagacccaggtcttgagccctgtaagcacgctcggcgttatggctccggtcagatggacaggcgcactctacaaatctcggagcctactgcatcaag

SEQ ID NO: 299100 - DNA, 122 bp, Homo sapiens
cccggagtccccaggctgcggtgcgccaggccagacctgaccgagggcggaagacccgagcggcagggaggcagaaagaaaagaggtagcaagccccagacaagggatccttaattacagat

SEQ ID NO: 299101 - DNA, 122 bp, Homo sapiens
aattctgtctgtggcccccacagctgtgaaatggagtcgctgactcgccatgctcgtgcacgtgcttagtgcccactgcagaaggctgctttgaatgaaagctagtgtttattcgtgtactc

SEQ ID NO: 299102 - DNA, 122 bp, Homo sapiens
tccctcggcctagcagacctcttagaatgtttgttttccttctgagaaagagcggagggacgtggccaagaccaacatgaactgcaaacacgggacatcctctgtgtggggggacatttttc

SEQ ID NO: 299103 - DNA, 122 bp, Homo sapiens
gcccccacccagcgccccctccggccccgggctcggaccggagcccagaaaacaaagcggcgagagaacagagcagccatttcagtttggacaattcacattttgcaaaaatgcaacccctt

SEQ ID NO: 299104 - DNA, 122 bp, Homo sapiens
ttcccctcttcatttctagaccggccttattgtcgcctgctaccacggctttgtggataccgtggtggccttagcagagtgcccccacgttgacgtcaactggcaggacagcgaggggaaca

SEQ ID NO: 299105 - DNA, 122 bp, Homo sapiens
tgctgcctggggaggggacagctggtggtgcagctggcggcacggccttccctctgtggacggtaatgggtttctttgacttccagactcccagacacggccgtgaattgaaaagtgctccc

SEQ ID NO: 299106 - DNA, 122 bp, Homo sapiens
agagttcgcaggtccccagctttgcccagatgctgaaaaagaacctgccagttcaaccagcgacaaagacgataactacacccacaggatggtcctcagaaagttacggcctgtccaagatg

SEQ ID NO: 299107 - DNA, 122 bp, Homo sapiens
cctcgcgacgcgctctcgggcatcggtttctcccagcaaagcttggagggtttagctgcgcggagagctcagcgagctcttctgtgtctgtttggggcgtgtgggctccgggagcgtgagga

SEQ ID NO: 299108 - DNA, 122 bp, Homo sapiens
cgctctgggacacctgagctcaggacggtgaaggcggagtgagctggacgcggggcggcgcggaggaaactgcacctgtcgccggcatttgttccgtgggagaacgcaggatccctcccagc

SEQ ID NO: 299109 - DNA, 122 bp, Homo sapiens
taaggaccctccctttgcacgcagtgggcgcgaatctctgcacccctctgtggcagggagcggtgctgcccatcagtctggaagacacattctcagcacgtcacgctgcggccccacggagg

SEQ ID NO: 299110 - DNA, 122 bp, Homo sapiens
gggtgagaccttgttatggaagagaacagcggccagttcagggagtgtggtcttccacttcgatcgtgatgtgtttctgtgtcgcttgaagtctagcttgcctttcctaacgctctcggccc

SEQ ID NO: 299111 - DNA, 122 bp, Homo sapiens
agcgattctcctgcctcagcctcccgagtagctgggactacaggcgcctgccaccatgcccgggtaatttttgtatatttagtacagaaggggtttcactgtgttggccaggctggtctcga

SEQ ID NO: 299112 - DNA, 122 bp, Homo sapiens
actgacacccaccgcactgacacccaccacactgacacccaccacactgacacccaccgtcgttcaaggcactgcacctgcggtactttgtcatggcggccctggcagattacgtggttcct

SEQ ID NO: 299113 - DNA, 122 bp, Homo sapiens
ctgtgcactcctagcggcaggctggcgccaaaggccccaggcagtgaggggtttagcacccgggccagcagctgtggagggcacaccgggtcccccagcagtgccaggcgctgtcactgcac

SEQ ID NO: 299114 - DNA, 122 bp, Homo sapiens
accaagcaagtgaactgtcttggaagtggatcctccagcccctgctacatggagcaaaaacgagctgtcccagacaggctctgcccaaactgcagactgataagcagagtaaatgagtgttg

SEQ ID NO: 299115 - DNA, 122 bp, Homo sapiens
gctatggtcgagtcacgccactttcatctgggtgactttaaagttcccctttaacaggaccgtagacggcagggattccaccgtgcgtagtgtggatgcgccaaaatcgggatgccgctggc

SEQ ID NO: 299116 - DNA, 122 bp, Homo sapiens
agcaccagatcctgtgctgcagacccccacactcagagctcagggtcttgctgggacaatcggacaagcaatggcagtctaatccagtgggatgagggagtaagaggccacggaggaggagc

SEQ ID NO: 299117 - DNA, 122 bp, Homo sapiens
taaaggaaagcgacaatctccttggtttcacaggggatttcacggcagcagggatcccgccggtgagcctcactgcccgctgctgccgcctccgcagagtgggcaggcagggtgcgcaggca

SEQ ID NO: 299118 - DNA, 122 bp, Homo sapiens
agagaagagaggagagaagagagtgatataggtgttagagattgagacaccacattactccggaaaagaagtcactgacaaactgtagggaagatactgacttgttccaggaaagccctggc

SEQ ID NO: 299119 - DNA, 122 bp, Homo sapiens
agcccacggagcaatttcccgggaccccgagcgacgccattacaggaatgtaattttgcccggatgaggccccgagtttaattatcctcgcggaggaatttcaatgcggccaatccatcttg

SEQ ID NO: 299120 - DNA, 122 bp, Homo sapiens
cccttcccccacccctgttgtcctctcccatctcctcatcctcttcctgaagagtgggggcgactcagcaggatccagacatagtgagacaaatgctacccaggctggtaaccaaggaagtg

SEQ ID NO: 299121 - DNA, 122 bp, Homo sapiens
caggggctttctttctccagtgaaatgtttgtgatgtatctagaaggagtggagaaccatcggtgtttttaaaatagggaattaacacattttgaatctggaatttaaggaaaggaaaattg

SEQ ID NO: 299122 - DNA, 122 bp, Homo sapiens
cgctgttgaagcagggccacgcatttgattgacagttcgtttgttggaggggcgtggtcacgctcggaaactccgccgtgacgttgcaaaagctggaatctccgcgagaagtcctgtcttac

SEQ ID NO: 299123 - DNA, 122 bp, Homo sapiens
gctgtcctgaggaaaaggagccaggtatggcagctggtttcagagagaagggaaatcaggcgcctacaagccactgaagcttcaatctggtgggtgaaggagacaaagaggagtgggtgggg

SEQ ID NO: 299124 - DNA, 122 bp, Homo sapiens
ggtggcggcggggggcgggccgcggggtgcgactcaaagccccggtctcagcggccgccgcgcgccaccgccaccgacgccgcgagcttcctccaggtacccgcccacctctcctcatgtca

SEQ ID NO: 299125 - DNA, 122 bp, Homo sapiens
ccacggggcagggctcgggacctgcagcccgccatgcctgagcaccgcccctcccccatccgcccccgtgggcttctgtgcggccccagcctccccgacgagcaccgccccctgctccacgg

SEQ ID NO: 299126 - DNA, 122 bp, Homo sapiens
atatcctaaaacttagcaagcctgaggatttgcaaatggttgccttcttacataccctcgcgaacgctccccacgaaggcttgcgggtggttaggccgccatgtcttctgtctcacattctt

SEQ ID NO: 299127 - DNA, 122 bp, Homo sapiens
cgggagagcagagcccacaacagcactcttgttttgtcttcacaccacgtccctaagctccgggaaatccaggaggaggcctctttagtcttgaggaagtagggagtcttttacccagagta

SEQ ID NO: 299128 - DNA, 122 bp, Homo sapiens
catcgatcagtacgactccctctactccaagcgcttcgccgtcttcctgtccgaggtcagcgaaagccgtctaaagcagctcaatctcaaccacgagtggacgcccgagaagcttcgacaga

SEQ ID NO: 299129 - DNA, 122 bp, Homo sapiens
tagtcaacagaataaatatccgacaagaatttacgaagcgtctagagtataattcggtagcgctttgaaatccaccctgggattcggaaaccgggtagaaaactacctggttcagcaaacga

SEQ ID NO: 299130 - DNA, 122 bp, Homo sapiens
cccgctggaccaggcagggcttcttgccagcaccagctccacaattaaatgtcccctgcccgcccggcgcggagaggccggtcagcagagagggctccagccccagcaggcccggccgcggg

SEQ ID NO: 299131 - DNA, 122 bp, Homo sapiens
acgtgttcgctgtgctagccccgtgcgagctgagctgccgttagagtcggtagattacagcgaagctgcagtcagcagctcgtctgcctggccctgcacaccgtgagactcgaggcagtgcc

SEQ ID NO: 299132 - DNA, 122 bp, Homo sapiens
cttgatctctcgacctcgtgatccacccgcctcggcctcccaaagtgctgggactacaggcgtgagccaccacaccaggcctactgtttcgattttaagaatgaagaaatttagtctcagag

SEQ ID NO: 299133 - DNA, 122 bp, Homo sapiens
aaaggcactgtcatcaaataacagtttaataggtgagataggatatgtatcttggtcacacgacccaaagcaatagtaaaggctgtgacatgtatctataaaggtcagaggatgaaggactc

SEQ ID NO: 299134 - DNA, 122 bp, Homo sapiens
gctgcagttgcacctccggccagagggcaggtaacttcccttccaaggtcattctcctggcggggtggtgcgcgaggcccgcccacgtcctccggattggcgggggcgggagaggcgcaccc

SEQ ID NO: 299135 - DNA, 122 bp, Homo sapiens
aaaataaatcctgctgcctgttttgtcatcatcttcgacaattagctgtacttgggacaacgtgactcgagccaattggtgaaggcgattagggcatccacttaaaaacgctcttcacaact

SEQ ID NO: 299136 - DNA, 122 bp, Homo sapiens
gctggccttcctcaccagctccggggcgggatcgcagccagaggcgcagcgtgagctcgacgtggttctcagaaccgtcatcccgaaaactagcccacattgcccccttacaactcccagga

SEQ ID NO: 299137 - DNA, 122 bp, Homo sapiens
gtgagagggatggggctggcgggaaaggcaattccagggccacttccccttttcctgcgccggccagcccgcagtcaatgccctttgcctgcacgaaaacaggctagacacagagtcgcctt

SEQ ID NO: 299138 - DNA, 122 bp, Homo sapiens
aggacctgtggccacagtgccccctggtggctagagcttcgcacggtagccttgctatggcgcgagaagtgatactgcgataggaactgagggtgggtaaaggtcaacgaatgaccgaccgt

SEQ ID NO: 299139 - DNA, 122 bp, Homo sapiens
ttgttccaattattgttctgcttttatgttcagaaatgcacatcatacaaatgagggaaccggaagaggcagagaaacatacccttctagctttccctggacccacgttctctgagctgctt

SEQ ID NO: 299140 - DNA, 122 bp, Homo sapiens
gagtatgtactgtgaagggttagtgtacttcatactttctttttgattagaagaaaatgtcgggttgttttagcagacagagaatgttacagtagcttttgttgctacttctaatgttttat

SEQ ID NO: 299141 - DNA, 122 bp, Homo sapiens
aatgtgtgttaagtcacttgtttatttctcaagatgtgcacactcaagtatgaagctggccgggacaactcatggctcctaggtatgtacaggccctttgatggcttgggttacagacaacc

SEQ ID NO: 299142 - DNA, 122 bp, Homo sapiens
cagcaagagacccacccccaggcccctggcagcgcagtggatccgggatcgctggagacgcggtgcacacacaaatcaggttcagatctgtggggttcatcctcccgggccccttttaagcg

SEQ ID NO: 299143 - DNA, 122 bp, Homo sapiens
tcattttgggatacctgtgtgagccgggggttccattttcctggtgacccttctcaactccgttcccagtggttctttctcaaaattacagattgtgaagaatttttttttttcctcctagt

SEQ ID NO: 299144 - DNA, 122 bp, Homo sapiens
ggcggactgaggcgtggtccgcggggctcagggaggtggctcctgcgccgggtatcggggcgcgtggtatcggcctcagccaatgggtggcagcgccccgccccctgcgtgggggggctgcg

SEQ ID NO: 299145 - DNA, 122 bp, Homo sapiens
aatgccaagctaggagaattttcccaaagctgtatttgtatagcaagaatactatttttacgtacattttatggattttgggagggaaaaggtgacgaaaattctgcatggaggcttaaaat

SEQ ID NO: 299146 - DNA, 122 bp, Homo sapiens
gtaggctggaggtgtttccttcctcctcctgcccatccccccgtctcccgcctctgtaaccgtcacaggaaatggcctcaccaagcccttgaacgacagcgcatggtgaggcgacagctggg

SEQ ID NO: 299147 - DNA, 122 bp, Homo sapiens
tctacaggcatgcaccaccacacctggctaacttctgtaatttttgtacacatggggtctcgccatgttgccggggctggtctcgagctcctgaggcaggtgatcctcctgcctgggcctcc

SEQ ID NO: 299148 - DNA, 122 bp, Homo sapiens
taaagggcccacaccccgtcccacccccaacgttggccggagaaggtggagtccagccagcgcgataggtgagagcaagggacgaaaggttttctgtttaaattgccaccatcaccagctcg

SEQ ID NO: 299149 - DNA, 122 bp, Homo sapiens
gacagtgccactgggcctttatctgccatataaggactgatcaacgctctaagacaagtccggaagcggtgtcgaaacttcataacccagaagacactgcagctctcggcggcacgacttac

SEQ ID NO: 299150 - DNA, 122 bp, Homo sapiens
gcgtgtctgacggatgacgactccacaaggcgctgtggccctggcagcctcatgaggttgcggctctgcgggaccacaccgccgcgggagtgcacgggccccagcgagtgaaatctgcggca

SEQ ID NO: 299151 - DNA, 122 bp, Homo sapiens
cagaggcaactgagtgtgagccagtccagggtcagatcctgggctgatgccacctgagggcggggtgggggcgtggcctccgtgcacatgggagactccaggtgcaggagagggggaggtgg

SEQ ID NO: 299152 - DNA, 122 bp, Homo sapiens
aacgcacaccccagtgccctttctcgccacaggtgtgaaactacatctcccgacaggcggcgttgtccccttccttccttccttcctctcccaggcccgagccatggcaacagcgtgacgtg

SEQ ID NO: 299153 - DNA, 122 bp, Homo sapiens
ggatacctggaaaggggaggtaaggcagctcaaaggacactgttgttcaacggagggaagcggattcaacaattatacaattcgctgagtcggggctttcactgcgaaagaacttggcttcg

SEQ ID NO: 299154 - DNA, 122 bp, Homo sapiens
ctcaatgtccaggttcgttgatctgtccatggagcgcaactaaacgaagtggagaggaaccgggcgagtggcacccaaaaacaatctagtcttttagtttccagcttaaactcagctttatc

SEQ ID NO: 299155 - DNA, 122 bp, Homo sapiens
aggagagagagacccaggggagaaaaccagctgcagaggcaggaggggtccagggcagcccgaggccagagatgggcgtcttccttacagccacctgtggtcccggcaccttgggctgttgt

SEQ ID NO: 299156 - DNA, 122 bp, Homo sapiens
aaaccagatgcctgtactagtttttagaccccaagtcaacctttctgagccacagcttcccgctgggaataatgatgcctgccctatctacctcacagacttgttatgaggataaagtgaga

SEQ ID NO: 299157 - DNA, 122 bp, Homo sapiens
ctccgtccctcccctctggctggcaggtgtgacaatgcacacataggccatgaaactcgccgaggaaagacaagcatgtgcactgtggtcttctagttctttcctttgcctttagaacctta

SEQ ID NO: 299158 - DNA, 122 bp, Homo sapiens
gctctctaaccagaagccaggggacaaaggagcttgtcgctatggtccgtaaatgcctatcggcacagcagggtggacagaggatctggaaaggtaaatgaaaatcattcatcacagctcac

SEQ ID NO: 299159 - DNA, 122 bp, Homo sapiens
atgatgcgagcgtgcctgtcgtacgcagcaccgggttccaaatctctctggaaagttgcacgtgcatggaaatacagaaagtgttgtacgtccatccgggacctggctgaaatttccgtgaa

SEQ ID NO: 299160 - DNA, 122 bp, Homo sapiens
aaaaaaatcacatctacttaaggtttaatgactaaagccaactttctaacatatctgtaccgttctctgaacatactgttttcacacttaactacgatgttgtcacttgtttctgtctgatt

SEQ ID NO: 299161 - DNA, 122 bp, Homo sapiens
ctgttgatttaatctcctaaactttgttcatttctgtctactttcctcataatgtggaggcgaccttacttgttttagtggaatgggaagggcacaggtcagatagacgtgggttaatgagt

SEQ ID NO: 299162 - DNA, 122 bp, Homo sapiens
agtctgggcatctgggaatcggagagtatagcctgtgagccgctttcccctccttactgtcggttgcatcccttcgacactcccgaggccgtcgcgggccactggccctctgcagccatgaa

SEQ ID NO: 299163 - DNA, 122 bp, Homo sapiens
ccgggctctccgtggtgggcagtccgcagcctgtcctccagggttcagcacgtgcattggcggagccggctccccggtggctcggagagcaggacggcccttgtgttccctggaaatcccct

SEQ ID NO: 299164 - DNA, 122 bp, Homo sapiens
cctgcatccctcctgccctgcctgccaagactgatgtgcagcttttctaccatcacataccggtataatgtgtgcaaggtggggggtgtctccaggttttgagggatctgcaagcgttctct

SEQ ID NO: 299165 - DNA, 122 bp, Homo sapiens
catacagtaggtaacacccacccccaggcaggccctgaagttgccgggttctgctctccgcgactacgagccaccggtgagagagcagcccacgggcacacaggcagacctgtccttgacat

SEQ ID NO: 299166 - DNA, 122 bp, Homo sapiens
cttcctttgggctttgctgttaggactctgcggtgaggaaggttcgaatgaaagattttacgtgttagcttggtttgaagccaagaacggtatagtgaataagaaactcaggcgacagtgag

SEQ ID NO: 299167 - DNA, 122 bp, Homo sapiens
ttaaaggtgacacgtacttagtttggtccttccggtgtgccatagttcttaaaagtagcacgtccggacttcgttccttgcggcggattcctggtccagaaaaaaagacacaaactctcgcg

SEQ ID NO: 299168 - DNA, 122 bp, Homo sapiens
gctgacatccagtagtgctcttccagggctcgggcgctgtgggtctccgtaggtctcccgcgtggtgcggcggtgcctcgcttattttccctcctctccgtgtgcagtatcccgaggtggct

SEQ ID NO: 299169 - DNA, 122 bp, Homo sapiens
tacatagtttaacctgcctcaagttcaaggatgtttgggggcggccctgtttgcactcaccgagataggccagcaggggaaggagaattgtttcaagagctcataggagactctttgcggat

SEQ ID NO: 299170 - DNA, 122 bp, Homo sapiens
taggagactcatcgactagagggggacatggtggccccaggctgtaagaacaggccacaccgtccactgggccgcttgctttgtgctaagatgacactttgttctgagcctcacagtgtctt

SEQ ID NO: 299171 - DNA, 122 bp, Homo sapiens
aatagtgctgttttgcaaattttggggactctgcacactgtctgacacaaactagctcaacgcaatctctattttaacttgattattctcagttaaaataatcaaaaagtaggtctcaactt

SEQ ID NO: 299172 - DNA, 122 bp, Homo sapiens
ccagaatgattgctgctactcaccatggctgggccatgcagggtcttcactgtcatgttgcgctggtggcttactttgtgcaggaagctctttctgtgaatgtatcttcctgtgtatgcctg

SEQ ID NO: 299173 - DNA, 122 bp, Homo sapiens
atgggaatcatgaactccttcgtcaacgacatcttcgaacgcatcgcaggtgaggcttcccgcctgccgcattacaacaagcgctcgaccatcacctccagggagatccagacggccgtgcg

SEQ ID NO: 299174 - DNA, 122 bp, Homo sapiens
tctggaagagagtgacagacaaggttggaattgctggccatagccaagttttggaaggaacgaataagatttctgcaagttctgtttgtcattatctagtgctgcaagttgagaattaataa

SEQ ID NO: 299175 - DNA, 122 bp, Homo sapiens
gatctttgagcactcaggttggaggggagcgtgtgtcgtacccgggggacctaccgggaacgttttgggaaagacagtccctttatttaggtacctggtttagcaaacaaagccccgaggac

SEQ ID NO: 299176 - DNA, 122 bp, Homo sapiens
cagaacaggctcagaacacactcagaacatgcttggaacatgctcagaacacactcaacacgctcagaacaggctcggaacacattcagaacacattcagaacacgctcagaacatgctcag

SEQ ID NO: 299177 - DNA, 122 bp, Homo sapiens
aggacgtggctctttattcgtgagttttccatttacctccgctgaacctagagcttcagacgccctatggcgtccgcctcgacccaaccggcggccttgagcgctgagcaagcaaagggtga

SEQ ID NO: 299178 - DNA, 122 bp, Homo sapiens
ctctgtgtaacgggtttttctctcgccggcaaaaacccgcggagtcatcgagcgtctctgcgaagtttaccatttcgaattccgctgaagctcaagcaagcaaggcagagaaaaggctaatc

SEQ ID NO: 299179 - DNA, 122 bp, Homo sapiens
ttttattcatgtaaaactacaaatataaactccctcttgaggtcgggggggtcagccccccgcccggccagccgccccgtccgggagggaggtggggggggtcagccccccgcccggccagc

SEQ ID NO: 299180 - DNA, 122 bp, Homo sapiens
agtccccttccgcatgcccaagggcagcctcaggaagcgagcccaccaccgtcggcccagcgcctgttgatcggccaggccttctgggccggtcatactgggcccttcctaacctgaggaga

SEQ ID NO: 299181 - DNA, 122 bp, Homo sapiens
gatgaacgaagtaaataaatatgtagctctgcacttgtggagcagcggtaggcagacctgcgagacgactctggcccaaagcttaaggctgcatcatccgtcaggtgtggatgagatccatc

SEQ ID NO: 299182 - DNA, 122 bp, Homo sapiens
ttttctttgtctagatggattccactaatttcaaaatcaaacataaacagttcagccactcgcctataaatgaaatgagccccaggttataacaggtaataaaaattgctaacaaaaaaatt

SEQ ID NO: 299183 - DNA, 122 bp, Homo sapiens
gggctgtggtgcccaaccggtgctaaactcaagcttgggaggtcgcccacgagaaacagtcgcccttccccacccgcctgctcggcttggcggggagcgggatgtcgctgggggcgatgcca

SEQ ID NO: 299184 - DNA, 122 bp, Homo sapiens
gacggggcgaggacacagacacacacaaagggaagacggggcgaggacacagggagagggcggccgtccacaagccaaggagaggggctttggaaggaagtaacccagctgacaccttgatc

SEQ ID NO: 299185 - DNA, 122 bp, Homo sapiens
gagagatgggtgaaggattctgtccccagcctgacccccaggtgtgccaggcaggtactccggggaccgccaggatgagagagtgggcctgagcccgggcttttgctgaaaaggaggccgat

SEQ ID NO: 299186 - DNA, 122 bp, Homo sapiens
tctgcgggatcgtggggggcccgggagcacgggttgtgggggagtgcccggctcgcgctgcgtcctccgggcgggcgcgggtccgcgttctgtgggggagccggggcgggggtcgcggccgg

SEQ ID NO: 299187 - DNA, 122 bp, Homo sapiens
ttttcccacattgatgataatatgcgtgggactgtgtgaaaacaccagaagtgctatactcgttcagcacagtgacaccctccctccagctccaggtgttttttttggcggtcctagatgtt

SEQ ID NO: 299188 - DNA, 122 bp, Homo sapiens
agtgactgtagaggtaagggtgggagggtggagggaggcggattaatcccttaattacgccgtgatcggcgtggcacctgctttccgcctgcccagctcccaggggactccggcactagggg

SEQ ID NO: 299189 - DNA, 122 bp, Homo sapiens
gggctggcctctgggactgatgggagagccgggcttggcgttgtgcacacgcatgtggtccggctggctgaccccgccctccctccagggcctcccttctatggggacgcctcctgggaaca

SEQ ID NO: 299190 - DNA, 122 bp, Homo sapiens
cctattggctgagtcctctgagggtgacgtcatcgggacgtactaagactagggttgggccgagagtcggagccattactgcaggaaaaggtcccggagagctgagcagtcaagatggtggg

SEQ ID NO: 299191 - DNA, 122 bp, Homo sapiens
gtgaggactgaggtgacaatcccaagctccagggttgtgcctggaatttaaggactgaggcggcaagttggctgcgtaggagacgggctgggctgcggggcccaggggctccttgggcaaag

SEQ ID NO: 299192 - DNA, 122 bp, Homo sapiens
aaacctagttttgccagttacactcaccaggcctatgagattagatagaaaagcaaaactcgatgcattaatttactgagaggcacgttccatatttgctttcatcaatgctttcagactac

SEQ ID NO: 299193 - DNA, 122 bp, Homo sapiens
agaagggactttcctggcagcccggcgacgaggagcgcggacagtgagtttgctctgccccggttcatggttcctgcaagccctctaggaggccgaaagctgcagcccctccccttgccccg

SEQ ID NO: 299194 - DNA, 122 bp, Homo sapiens
cgaaggcggggaaagcgtggcgattgggaaacgggagaccccacgcgggagaaaggtgggcggggaagaaatggaggccccagctagtgggttttgtttgtttgtttattcgtttcactcac

SEQ ID NO: 299195 - DNA, 122 bp, Homo sapiens
cagcctcagccgagcgcctggaataggttaagatcccccacgaagtacagaccagcattccgagcctgcagagtcaaccaaaatacagttactgaacactattggaaataactttatttcaa

SEQ ID NO: 299196 - DNA, 122 bp, Homo sapiens
gggagcctccacgggtgtctgtggtcttgactgtgctcttcagatctgcaaagaaaagctcgatgtctcacagctctgtcccctcctcttccttccccttccttgtggccctcgaagctcct

SEQ ID NO: 299197 - DNA, 122 bp, Homo sapiens
ttgcactttacaatgtccccagcccctctgcagcccgtggctggcagggcgttcgatgtgcggttggcccccagcgcgccctccagagctgcggtgtctccctgcctcattccccacatccc

SEQ ID NO: 299198 - DNA, 122 bp, Homo sapiens
caccacaaatgttaatcatactccacatagatgttatactttacacagactgtggcattccgcccacaagctctatgtggccttcaaaactcccagactctcctacatatcatcacaaagtt

SEQ ID NO: 299199 - DNA, 122 bp, Homo sapiens
agtggagaaacctggcggacaccacgctgaccgagagatgaaggttaatatcactagcaccgaagggataccacacacctcctgatggggttcccgctgccgtgcacggcctgaatttaatc

SEQ ID NO: 299200 - DNA, 122 bp, Homo sapiens
ctactcggggggattgcttgggcccatgaggttgaggctgtagtaatagcaagccatgttcgcaccactgcactccagccccaccccccaaaaaaaacccaaaacagagaactaaggaactt

SEQ ID NO: 299201 - DNA, 122 bp, Homo sapiens
cctcccgtgggggaggaggagcccaaaagccctggtacgctggcgccggggtttggggatcgggcttccaggctgcgtcttcccgggttcccactagctactcactgctccaaggttatggc

SEQ ID NO: 299202 - DNA, 122 bp, Homo sapiens
gagggctgcgggagcaagtacggagccgggggtgtgggggacgattgccgctgcagccgccgccccactcacctccggtgtgtctgcagcccggacactaagggagatggatgaatgggtgg

SEQ ID NO: 299203 - DNA, 122 bp, Homo sapiens
tgtgcagcgtccaaccaatcctggtttgtgctgggccctggactggaacccagcccttcccgacgggaacgcaaagcggccacgagggggcagcgcacggcagggaatcttcgccgccgacc

SEQ ID NO: 299204 - DNA, 122 bp, Homo sapiens
cgctgggcgggtctttccagatgatgaggagcggaaaggaaggagtgcgcgatgcgcaggcgctctggccgaaaaggccttctgggatttgtagttctttgaacaggagtaccgtttgtatt

SEQ ID NO: 299205 - DNA, 122 bp, Homo sapiens
acgccagtggtggctgtttattgagcacttactatgtgtaggccctgtgttgaggggccccggacaagcttcctcccggtcatcctcagggcagctgtagcatgactgtcacctcatcagcg

SEQ ID NO: 299206 - DNA, 122 bp, Homo sapiens
aaaaaggaacaacagtcactgccttagacagatcaagacaagatctctatacattcatatcgtatgaatgtatagagactagaggtcattctgcagaatgctgtgatcgcatgagtcagaca

SEQ ID NO: 299207 - DNA, 122 bp, Homo sapiens
tcggcgtcagcatcgtcgggcccggccgggctcacagcgcgggggtccgggggcccggggcgccccgccgcccgcgccccccacccccgctgcaggcgccctccccgccgccgtcccccgct

SEQ ID NO: 299208 - DNA, 122 bp, Homo sapiens
ggcgcggggggttgagtggggcgcgccggctgcagctgccgaggcggggctggttggggtcgtcgcctccgcgcctagccgcgaccaagccgcgaaaggggctggagacaaaaggtccacgg

SEQ ID NO: 299209 - DNA, 122 bp, Homo sapiens
ggggtctgcgagctgcttctgtccagggccaggtagttgaagcctggggttctgagcaggcgtgggcagcacccaaggaggtgcatggccgtgtcctagtgaaactttatgcacgctgaaat

SEQ ID NO: 299210 - DNA, 122 bp, Homo sapiens
ccctgttctcctggggccaagacccgggtctgtctgaccctggggttgctgagcagaaaccgcctggagctacccctaccaccggacaatcttcccaggaggaggaacaggtgcagcctggg

SEQ ID NO: 299211 - DNA, 122 bp, Homo sapiens
ctagtgcaaggatcagatagcacctgcttggaagttcactgattaatgatttaacaagggcggtcacatgggacaactgctgcttttctctgccctcatttttcttactaacaggtctgaaa

SEQ ID NO: 299212 - DNA, 122 bp, Homo sapiens
cttccccagccaaaacgagggtccagtggccgccgccctgttcgcccagcaccggcgtcacgtgaagtctgaagtcactcttatccagttacatttgacagatgagaaaattaaagctcaga

SEQ ID NO: 299213 - DNA, 122 bp, Homo sapiens
ctggcccccaccccgctcgcacgcctgcgccctggctggtcgcgcgggccaatggcagcgcgcccctattacataagcgcgagggggcgggccctggctgacacaaacttcaggggacgtcg

SEQ ID NO: 299214 - DNA, 122 bp, Homo sapiens
gggctgagtccactcatggggccgagacgggctgcaggcgctgggaggtcttccaggcaccgggccttacccacgagaagtcgaggcgtgttccagggcgcagttccaggaggctgggcagg

SEQ ID NO: 299215 - DNA, 122 bp, Homo sapiens
cgtcagccgagctcggcggtggcgcgggcggctgggacgcagctgcccccgctcggcgcccgctgcacccttagcagccactgccacctgggcccggagcctccacgatctcgcccggcgat

SEQ ID NO: 299216 - DNA, 122 bp, Homo sapiens
gggaatcagggcaaacgccactgaatttgaaactggcgggtcccctcagtgaaaggctgccggaacaacccccgccgctgcgcatgcgcactccgggacgcgcgcgaacacgcagcagccag

SEQ ID NO: 299217 - DNA, 122 bp, Homo sapiens
aatttctaactatcaataccaagttttagctcacagcgtatatacatacttccataataccgcttatatgtcaaattatctacatttaactcatgagaaaatcaagtgcatggaacaaagac

SEQ ID NO: 299218 - DNA, 122 bp, Homo sapiens
tttgcaaaacaccagcccccggtgaacaagtcgacctgctgtgcagcccacctctgactccgtttcccccagcgtacccagccacattgggaggctccacctcggtctaacgctccggcatt

SEQ ID NO: 299219 - DNA, 122 bp, Homo sapiens
gtttctgatggctgccaccaaagaactgtacaaatataggatttaaatgcaatatctcaacgctccaattgccctccaaaagcaacaggtgttattatcccttccatttctcagaagaggaa

SEQ ID NO: 299220 - DNA, 122 bp, Homo sapiens
tgtttgaatctaagggacaaatacaaagagagcacaggatggggcgcagggagatagggacgggtattgttcttacttgaatgagaggaaatgggctagagctgctgcctaagagatgaaga

SEQ ID NO: 299221 - DNA, 122 bp, Homo sapiens
cctgtcccggggccgggaggcagaggtgctggtggcgcggggagtgcgcgtcaaggtgaacgaggcctaccggttccgcgtggcactgcctgcgtacccagcgtcgctcaccgacgtctccc

SEQ ID NO: 299222 - DNA, 122 bp, Homo sapiens
tgactttgtcctagtctttccctcccctaggctgcttttcctttcttctgttttttaaggcgccttctgctgctgcagcccaccctctctcccctgctgcagtccctcccccttcatacgcc

SEQ ID NO: 299223 - DNA, 122 bp, Homo sapiens
atctcaccttccttgtttacaaacaagggctggggacacactgagttcccatagcacacacgtccccaatcccagaaactttactcttctgaccaaaaatcagaactcaaaatctgaaatct

SEQ ID NO: 299224 - DNA, 122 bp, Homo sapiens
tggcatgtagtttagcaataaattataattattaccatttgtattgatcagatactttaccgtggtatgagggcagacacattatattgtcctattaacagcattattccttcaatacaatc

SEQ ID NO: 299225 - DNA, 122 bp, Homo sapiens
tctttcagctcactttgtcagcagacttcccactaggtagtgcatataccccaaattattcgtttggtagagcttttctttaccattctcagtatcacatggaagaaagtcaaccattgtac

SEQ ID NO: 299226 - DNA, 122 bp, Homo sapiens
tatagttccagttctgacctggaactattcctaatcttctccatacctcagttttctaatcgacaaatacatattataatactacttaagctttttatagagttggaaagactattgagaga

SEQ ID NO: 299227 - DNA, 122 bp, Homo sapiens
tggtgaagactctaagacttcaggccatgatatccacaaggctatgttcatgcactacttcggtataatctcaaaataattgccagctccccagtggaacgcctgccttggtccatgtggaa

SEQ ID NO: 299228 - DNA, 122 bp, Homo sapiens
ccgggaccacgcgacgcctccgtccaagcccctggctgggctgcagcattctcgagaccacggtcacccggattcttggcgtctgtaccacgtccagattctggccacggacgcatatctca

SEQ ID NO: 299229 - DNA, 122 bp, Homo sapiens
cctggccaggctcggcctctcgcttaaggtggaccccacaaacttctgtcctgggcctggcgtccccagccgtgccctgcctgggaagcctctaggttgctcacctcctggaggagtcagca

SEQ ID NO: 299230 - DNA, 122 bp, Homo sapiens
agggataatggaaaggaagacaaacacttggaatggggtggttgattccagaaaacagaacgtgtcaggaggtcctaagataaaggagaaccttggaaaacctttgccccatcctaacggta

SEQ ID NO: 299231 - DNA, 122 bp, Homo sapiens
ccaccagttccgacgccctggggtgggcccggaggaccgagtggctggggcggcacggggcggggggctgggcgggaggagcgggggtccaggaggtgacccaggagggggtaggatcgggc

SEQ ID NO: 299232 - DNA, 122 bp, Homo sapiens
gggtgtgcggcaaagggaggcaagcacgcatggagcacctctatggctccaggccctctgcgcagcccccgtatgcactcgctggctctggcaaggtggggacaaagctgcctcccttccca

SEQ ID NO: 299233 - DNA, 122 bp, Homo sapiens
ctgggtaattattaaacattagaagtatagaacaaacaggccagccaggcccggcgaggccgcggcgggtccggcgccccggacctccggacccggaggtccggcgccctggttggcgccct

SEQ ID NO: 299234 - DNA, 122 bp, Homo sapiens
tgttttgctttgtattctattcccacctcaaaggcaggattaaagtagcactgcttgtcacgtctcattatggaaatcggtgtggccctcacaggggcgcagtcagttcgggactaggagct

SEQ ID NO: 299235 - DNA, 122 bp, Homo sapiens
gtcccacccttgggaggcgggcgcgctgttaccattttacggatgagaaggaggcggctccggaaaggcgagggatcggctccaggcctcacccccggtaaataccacttgaacgccagtgg

SEQ ID NO: 299236 - DNA, 122 bp, Homo sapiens
cctctgacgccaaggagccagccagaaaccagcggtggtgagcacgggctcccccgggagcggtttcctttgtgagcaaggccaggatgggccgcccaggctagctgctcccagagccacaa

SEQ ID NO: 299237 - DNA, 122 bp, Homo sapiens
ccggcacctcgggaggcccaggcgggcagatcactcacgttcaggagctggagaccagcccggccaacacgtcgaaaccccgtctccaccaaaaaatacaaaaaccagtcaggcgtggcggc

SEQ ID NO: 299238 - DNA, 122 bp, Homo sapiens
gtcccttgacctcagttcacaggcctccccagtctccccagatccagggcctccattctgcgaaggccaccctgtccctagcaggaagaccacagggttgggcaggaaggtgtgtgcgtgtg

SEQ ID NO: 299239 - DNA, 122 bp, Homo sapiens
caactggtagagatgacgggcctcagtccccgtgtgatccgggtctggtttcaaaacaagcggtgcaaggacaagaagcgaagcatcatgatgaagcaactccagcagcagcagcccaatga

SEQ ID NO: 299240 - DNA, 122 bp, Homo sapiens
gcgagcggtgacctggggacgcacaggaagcgagggcactgcggccgcggcgcgcatgcgcgaacacgcacacagagaggggtgcacatgcgcaggaatgcaccggaagtccgcctcccggg

SEQ ID NO: 299241 - DNA, 122 bp, Homo sapiens
aaatgacaggaaaatggggatgagggacagatgacatatgagaggaagcagggactcaatcggagtttggtattcaccttgaaggcaaatgggagctgctggaaggattctgtgtttttttt

SEQ ID NO: 299242 - DNA, 122 bp, Homo sapiens
gggcccagcattccgtcttgagcttatgacactcatatttagaatacttgaaatattgtccggtgaacagactgtaaacaggagagcagagggaaggaggggaagggaggggggaatgggac

SEQ ID NO: 299243 - DNA, 122 bp, Homo sapiens
cagctgtttggtagctcctcccctcctccttttccgggtagtaacagggcggccaatgagcgctgaggagcggtgcctgcggccttttgcctgcatacgcttttccaaaacaagcagctcta

SEQ ID NO: 299244 - DNA, 122 bp, Homo sapiens
tcacccagtcagtatttattaggcgcctactgcggacggttggtcttcacgcagatcaggcgagaagggatagtgatgcgcgggccgctgcggagacccggagcccgccgcggatcacggga

SEQ ID NO: 299245 - DNA, 122 bp, Homo sapiens
ttctgccttcctggggtcttctggttaaaaagaccattggttccattcattggctgtaaccgcgggtctttaaaaaactttgtgacttccttgaatagaaagaatgtcttactctggatttc

SEQ ID NO: 299246 - DNA, 122 bp, Homo sapiens
gcttcccttgaactgggcggcaccaaatacgggggctggggcctcccttagaatggggtacgcacgccctgccgatgcacacagtcccgctggaactctctgcctggacccttatgaatgtc

SEQ ID NO: 299247 - DNA, 122 bp, Homo sapiens
caccaggacccctcacttgtccttgtgagtttctgacatggtcctcctctgtctcttcctcgccagcttggctgccacccctcgggctggggtcactggggcatggcccaccagcggcctct

SEQ ID NO: 299248 - DNA, 122 bp, Homo sapiens
agtccgggcgatcacgtgggctccagccggcccaggtggggctgtgacctgtgacgcaggcggcgccgccacaggtgcccgggacgcgccccgccccctccccggccctccccgcccgggcc

SEQ ID NO: 299249 - DNA, 122 bp, Homo sapiens
gagtcccggggctggagtgaggtacctgagccgggcgcgcagcagaaagcccacgttggccgctgcggggagcgcggcgtggagaggcgggagaccgaattccggcgccgccgccgcggccg

SEQ ID NO: 299250 - DNA, 122 bp, Homo sapiens
gggtcacggaagagaaccatggaacccagtgactagtgttcagctcgattaggacgaacccggacacttagctgtgcaggaacaatgacaagcctttagcccgatcaggagcagcagtgggc

SEQ ID NO: 299251 - DNA, 122 bp, Homo sapiens
tcaaggagtgagagcagagcgaagtcttggagacgctgaacttgctgttgcactggaaaacgagatgtgcggggtaaggggcagggacgagggggaaaaggaccactcggatcgtccttaag

SEQ ID NO: 299252 - DNA, 122 bp, Homo sapiens
tctgccagacttaaaaaaaccatcttgtgtctttggaggtgctgcttaataccaaacatgcggtgccatgaagggaccctttgggggttgaataggagttaacccctgcgctctctttgcaa

SEQ ID NO: 299253 - DNA, 122 bp, Homo sapiens
catggaaagcaagccacttcctgccgtgttaaaggagactgcgctgaccttcaaatccagcgagtggtgacacgggtctgtcagctagtgttagggattgtgtagttattttttatgaagga

SEQ ID NO: 299254 - DNA, 122 bp, Homo sapiens
aaataaaaagtgagtaaaaaagaccttacagtttatctatttccttgtgctagaaagatacggtatagtccaaaaatgcagtgactgggtatgtcttatttaactgtttttcttcttccatc

SEQ ID NO: 299255 - DNA, 122 bp, Homo sapiens
gattccggtgcagggcggctggagtcgcacaggtagcctcgggcggatttcggcgtgtctcgcgctccgcaggctgggacctgggctccgccccgaggcggggacagagggtcgcgccaccc

SEQ ID NO: 299256 - DNA, 122 bp, Homo sapiens
tcactcaccgaagtagtcctccctggcctctggctcccgcatccgggcccgggcggcctccggaacgaaaggacctggtggctcctccagacccgacggctcaatccccgagggttctccgc

SEQ ID NO: 299257 - DNA, 122 bp, Homo sapiens
agacaggctacccccactgggcagtaaaacacacgttggaggaaaatctttgtttacccccgaaggtacagtatgaacctttggcctttagtgaacttcatagcctaatctatgctgaacac

SEQ ID NO: 299258 - DNA, 122 bp, Homo sapiens
aacccaccagaaggaataaactccagacacatctgaatatccgaagggccaaactctggacgcgccatctttcagcactgtaacactcaccgtgagggtccgcagcttcgttcctgaaaaca

SEQ ID NO: 299259 - DNA, 122 bp, Homo sapiens
ctcaccccagcccgtgtccacttcaaggtgaatgaccagggaagtcacgtgtcccaatcccgcagttccaaagcccttggggaccctactgtcagggtcgtgcacgaggaggtgaaggtcag

SEQ ID NO: 299260 - DNA, 122 bp, Homo sapiens
acacacacgcctgttggagcatcctgaggcccgcctctgtggcttctgttgtgacgcaagcgttccctccgcgagtagggtctgtggccggggctgtgtctgcgggactgggaagctctccc

SEQ ID NO: 299261 - DNA, 122 bp, Homo sapiens
gtaccctttcccaccccagcgtctctgaattgggatgcatctgacagcaagtgtggcatccgggctgcagttgccgttgtctgctcacatgtgaattaaaaaaacaatctcagcatatgaaa

SEQ ID NO: 299262 - DNA, 122 bp, Homo sapiens
gacgacaaacctcgggtatttccccagactaagaacgcctgcagtatgagatgctcaattcgtagtagaaaaagaaagggtcctgataggatgaagccaccattccagtacgaactggtgca

SEQ ID NO: 299263 - DNA, 122 bp, Homo sapiens
tttccgtcgcaaagttggagggtgggcataactcgggtcggtacttcgggtcaggcagtgcgctggatgcctaagtcacacactccttcggtggtccccgcccttcgcttgcgccgaccagt

SEQ ID NO: 299264 - DNA, 122 bp, Homo sapiens
tgcaggcattttggctgcagcagctaccgccctgacctgtctcttgccaggactgtggagcggatagggggagtaggagtagagaagggaacaagggagcaagggaacaagggacatctgaa

SEQ ID NO: 299265 - DNA, 122 bp, Homo sapiens
ttggaagctgggaggtcactcggtggtcaaggggtagatgatcttagttttacagtgctgcgctgtctcccaggctgaatgacgctgaagccaagcaaattcgggcagtctctggacctttc

SEQ ID NO: 299266 - DNA, 122 bp, Homo sapiens
actcaacataaagttatactcatggctaaaatttattacactacaggaacagcaggaaaacgatgggtgtaggtgaaggctagagaagccaaatacaggttttcttatcttccttttgtggg

SEQ ID NO: 299267 - DNA, 122 bp, Homo sapiens
ttcatcaaggccccctttgtcctctgaggtcccctggctcaggtccaccctgcagccacgcgcaggacccctgtctactgcagagcctctgggcagcctgccggcagccagtcaccatgatg

SEQ ID NO: 299268 - DNA, 122 bp, Homo sapiens
acttggagaaaacaattgtgccactcagagagtgttgactctcaggcagacacagggcaacgtgccggacacagagtatctcccgtaaccctcctacttggccaccttcttcctgcaaagac

SEQ ID NO: 299269 - DNA, 122 bp, Homo sapiens
gagactaaatcttggcgttcagactcccgtagaggtcatctgtgtccaggcccacccgggcgccggctcagcggtagtgccgaaggtagatgagcttctggggagggaacttctcccggcag

SEQ ID NO: 299270 - DNA, 122 bp, Homo sapiens
gcggcccccggctggaacgcgcgccgtgccgcgtcgctgagcccgccggccccggccctgcgcccacccgtctaccctgaccctcactcacgacgcgctccttggtgtgctcgggttcggtg

SEQ ID NO: 299271 - DNA, 122 bp, Homo sapiens
ttgtgcaagacataatgactagacacagttcccgcccttggaatgtgtcgttcagtgtcacgggaagagtactggccctggagtcatccaagttgggcttaagtcctggttttgccacttag

SEQ ID NO: 299272 - DNA, 122 bp, Homo sapiens
gctggctgcctttcttgtgccagaagcagagctgcagaggagacaccaccaaggttgtcccggccagagcagcagtgagactgtgtcggggctgcaggggctgtgcagattgctcaccccca

SEQ ID NO: 299273 - DNA, 122 bp, Homo sapiens
cacagcggggtggaggcaatgccggaatctactaggacagccccctggctgggtccctcccgcgccgggggttagaccgctgctgtctcagggaggaggtgctcagctcagcccagggaacg

SEQ ID NO: 299274 - DNA, 122 bp, Homo sapiens
aggggcggggaagaacgagtgagacatgggcggggcagtcgcctcatgacgtcagtctcgcgcgcgggcggaggtgggccggtgcggcgctgtcacgtaggttcagtgggcggaagaggtgg

SEQ ID NO: 299275 - DNA, 122 bp, Homo sapiens
ccgcgcggtggctcccggcagccgagcccagctgcccgctcgcagccgctctacacagggcgctctggcataactactgcagaggggctgcaggctcgagcgcgctgattggcttcccagca

SEQ ID NO: 299276 - DNA, 122 bp, Homo sapiens
agcacaagcctggcatatgacaacataaataaatgagtgaatgtatacatgaataaagagcgtgtacggagaaagttgccgcattatttagcgcaaattaaggcagacatcagcctgcccag

SEQ ID NO: 299277 - DNA, 122 bp, Homo sapiens
cactgaaacacaatcagggctacgtgcattacctgtggccactttccgttggactgcgcccgtctcttgatttcttctactgttttcctgcgagaatcctggtctgaccgggacacgaacac

SEQ ID NO: 299278 - DNA, 122 bp, Homo sapiens
aagaggaggctgggaagcagtatttaagctgtgtttacagtaagcactgtgagaaataaccggctaagcgcgtttgttattgttcagtcttttgatgtgcttttaaaaagtcgcatctccat

SEQ ID NO: 299279 - DNA, 122 bp, Homo sapiens
ctctgaactatcggcggggccccttagatgcctgtccttgccctaggatgcccttccctacgtcctcctggcaaatcttggagatctgacttgcagtggtcttcaccctgcatgcagaatcg

SEQ ID NO: 299280 - DNA, 122 bp, Homo sapiens
ttaaaaatgtgctggacataaaggagattactactgttggggtggtgacacatgcaggagcgactgttggggtgctgagcttccctgagctctgagagaggcagagaccctgcttgggaggt

SEQ ID NO: 299281 - DNA, 122 bp, Homo sapiens
gccggcaggcttagagtcaggcatctgctgcttcggtgggggcccaacgcgcatgctgggcgcccgggtgattgagatccaaagagaagggcactgtaagacaggccagatgaactggctcc

SEQ ID NO: 299282 - DNA, 122 bp, Homo sapiens
ggccaggtgagcgtttggtggagctgaaagctcgacgcctcagtccaggtggctttaaaacgggtgcgtttggaggtgcccaaacctaacctgggcttccttccaatcggagcaatttcaaa

SEQ ID NO: 299283 - DNA, 122 bp, Homo sapiens
ctggaggacggcgccagctcctgacctagtgtgaggtgcccggacggtttccctaagaagcgcgtatttaagatgagatctgaagttgagcgtgaactcaaggtggggtagggggtgggcag

SEQ ID NO: 299284 - DNA, 122 bp, Homo sapiens
atcatatttcagcatagcattcgctgtgcattcagctgtcctaacgcgtggccatgtctgcgggctacaagagcagagaaaaaggcacgtcacttttgggcctggagcaatcagcataattt

SEQ ID NO: 299285 - DNA, 122 bp, Homo sapiens
acccacaagtgagcgaacacacatctctgagcagatctgcgggggcagaggagcgcgcttcgctctttcctgcacccccagcctcctcgcctccccaccccgcccctcctccacctccccag

SEQ ID NO: 299286 - DNA, 122 bp, Homo sapiens
cacatgcgcaataatggacatgcccagcaacggacatgcatagggatgcagcttgtgttacgtaggctgaggttttcttgcctctgttgactaggagccacaaggtttcttgagtattgaaa

SEQ ID NO: 299287 - DNA, 122 bp, Homo sapiens
gaggtcatacattgagttgtacccccatggccgtagtagatacttaaaggcagaataaagcgtacactcctccctccacacttgtcctctctttatcatcttagccctgtagtttgcaatgc

SEQ ID NO: 299288 - DNA, 122 bp, Homo sapiens
tatttctatgaggtcagcgtttttagatttcacacgtgagatcatactgtatttctcttacgtttctggcttatttcacttagcacagtgttcctcagttccatccatgttgtcactaatga

SEQ ID NO: 299289 - DNA, 122 bp, Homo sapiens
gtggcctgccttgggttcatatttctggactccagcccccaccctgtacagatgtatgttcgttccactctctgaacagcgaatatgcccatggggtgtggctcatgcctcaccccctccct

SEQ ID NO: 299290 - DNA, 122 bp, Homo sapiens
cccgcacctctcgcattacgaacggctccaggccgcgacccgcagtgcagaagaatcgggcgccagcctcaggcccggaccctggctctccacgcgcctccgacatggcggctcaggcgcgc

SEQ ID NO: 299291 - DNA, 122 bp, Homo sapiens
gattttatctatagctcaatccaatatttaatgacaacttcagaatatgatatgtattcccgacacacttgctgacatgttttggatcactaagataatgaatcatttatattttgcgaatt

SEQ ID NO: 299292 - DNA, 122 bp, Homo sapiens
tcccggggaaggcagggagccaagtactacagacttgtatgtttccatggaaatctaacgcgcctttgattatcacagattctggagaagagtgaggacttgggttcaccagtgcgttccca

SEQ ID NO: 299293 - DNA, 122 bp, Homo sapiens
cagagtgagagatatgccaagtgggaactggagatacgaatttgaatcccagctctaccacgatgctgagtcagtcattcaacctctctaatgcctcagccatgagacagagaagattcttt

SEQ ID NO: 299294 - DNA, 122 bp, Homo sapiens
accatcatgagcctccttaacaagtccaagagtgagatgaccccagaggagctgcagaagcgagaggaggaggaatttaacacgggtccactttctgtgctcacacagtcagtcaagaacaa

SEQ ID NO: 299295 - DNA, 122 bp, Homo sapiens
acctcaggtgatccgcccaccttggcctcccaaagtgctgggattacaggcgtgagccaccgtgcccagccaagctggcttgtttttagtggaaagtgccgtgagtgtgttagggaacaggc

SEQ ID NO: 299296 - DNA, 122 bp, Homo sapiens
cctccacccccacccatcccggacctggtttacggctccaggctcaggctccactgcgggcgctgattggttgttgaaggcttggtcccatcccagtgaccccaaagtgctgaagggagggg

SEQ ID NO: 299297 - DNA, 122 bp, Homo sapiens
atgtgtccagtatgggatcagaaaacagagaggacttaaaagtgatattttaatattactcgttctactgccttattggtaattttcaaaaataagctcttaagctgggcacggtggtttgc

SEQ ID NO: 299298 - DNA, 122 bp, Homo sapiens
tggagctccgccaagcagtgttccctccgagaggctgttcagttctgctgaggatctccacggagaccatcgctgcagacttctccccgagaatgcagagaggctgttgttttattttattt

SEQ ID NO: 299299 - DNA, 122 bp, Homo sapiens
tattctttcaacaaatatttattgaatgaatgcctagtttgttacaggtaccgcgcttctcgcttcagatacaaagatgaataagatagtacctgcactgaaagaacttagtatagtgccgg

SEQ ID NO: 299300 - DNA, 122 bp, Homo sapiens
gctgcactgggactgagaataggcaagcctgccgcagcctggctgcaaattgctccttcacgagcctggctgggaggaaaactatttacacatgggtggtgaagaaaacagaaaatctcaga

SEQ ID NO: 299301 - DNA, 122 bp, Homo sapiens
ggtcccagctgtgaaccgaggcccagctggccggacgcaggcgccttccaaaggcagaagcgcatgcacgccatggttgttagctctgccccagccccgggagagagaatgaataaatagca

SEQ ID NO: 299302 - DNA, 122 bp, Homo sapiens
tatgcccctcctccaagtctgtccctcagcgtccccgtccgcgtctctactgtctgtccccgaatgtgttcctctgttcctggagtctggccctcggtccagccaggcccctgctcaccatc

SEQ ID NO: 299303 - DNA, 122 bp, Homo sapiens
ggaggggaggggagggagaaagaaagaacccgcagagtgggaggagcagcagtggaggagcgggagcccagccagccagagaaaaggggaacaaattaggaccaactgggaaacgcgaggaa

SEQ ID NO: 299304 - DNA, 122 bp, Homo sapiens
agcacagcagctgctggcccaggtgctaagcccctcactgccagggccggtggggctggccggccgctttgagtgcggggtccaccgagcctacgcccacccggaactcgcgctggcccgca

SEQ ID NO: 299305 - DNA, 122 bp, Homo sapiens
gccggcttaacgcagccgcacggggtcgctgtaggccgaggccccgactcctccaagccgcgcatggctactggttgctgaggtgcccacccgacgcattcaaccttccgcttccgctctcc

SEQ ID NO: 299306 - DNA, 122 bp, Homo sapiens
acacaagccgttctggcccggccgcccctcagctatttgttcacgtaatgcgattggaaacgtgcaaggcggacagctcctcgcctctgcccctccctctctcccgtccctgccctcctccc

SEQ ID NO: 299307 - DNA, 122 bp, Homo sapiens
ctctgttagtgacagaatttaaaatatttgttatttttttttgcctgggtaatgaagtaccgtgacccagatatgtactgtggctccttgtttattttctgacagagatggggtttgaggtg

SEQ ID NO: 299308 - DNA, 122 bp, Homo sapiens
tttctctgctctctgctcagtcacatttctccagaagcagagagcccagaatagtccagccgtttgggaagtactagtaacctaagatactaggcctgtaaaattactgataattaaaaagg

SEQ ID NO: 299309 - DNA, 122 bp, Homo sapiens
gtatgaatatataatgaattgagactatctagtccaaacactcctggcactaacagaccccgtgaccaccaacacgttaccctcaatgctgtcattggtgagaggggcttttatagctcctc

SEQ ID NO: 299310 - DNA, 122 bp, Homo sapiens
cgtatctgttgttctctaaatattaattgaagatttactgaggatttgtaaggtccttctcgctgttatgtgaaaagtcaaactgtagttaatgtaaattatagccttttaggtgcttgggg

SEQ ID NO: 299311 - DNA, 122 bp, Homo sapiens
tcgggtgggttttaccttcttcagggtccattcctcgcctcgccccccgttcccaaccctcgggacactggagacttgcatttcacaaacgggtttgctccaggccgcactccatccccgag

SEQ ID NO: 299312 - DNA, 122 bp, Homo sapiens
ccccaggatcctaccttccagtcacggttttggggctgcaggggacacagtggccgctcccggctccctggcaggatgtactcgggtggtgtgcagtcgatggggtccatctccaagccctt

SEQ ID NO: 299313 - DNA, 122 bp, Homo sapiens
ttccgaaagtgcctgcctcgacaagcaagccaccggcccgcgcagtccggggctacagagcgctcaagacctttccctcgggtgctgagggaaggatcccctatcagagatctccaaggaag

SEQ ID NO: 299314 - DNA, 122 bp, Homo sapiens
agattctgtgtcatgctcctttcctccaacttggataccacataataaatttattcttgccgggcatggtggctcatgcctgtaatcccagcattttgggactaataaaaggaggccaaggt

SEQ ID NO: 299315 - DNA, 122 bp, Homo sapiens
cagttagcattggtccatgcctatcaacggaaaattgtgcagtctctgggataaacagctcgactttgtcaagggaaccgtgtatttttactagaagtcagattcacgtccggcctccaggc

SEQ ID NO: 299316 - DNA, 122 bp, Homo sapiens
tgtgtacccaggcagcccattgagtaacttctttgacgtaattaaacaacttttttcagacgagaagaacgggcaggcggcccaggcccccagcacgcccgccaagcggagtgcccacggcc

SEQ ID NO: 299317 - DNA, 122 bp, Homo sapiens
tctccatgtgcaaggcacagccacttggctcctttcagtcctgagggcccatgagagcagcgtgggtaagagcataggctctgggttcacagcccagccctgccccttccttcctgtcctct

SEQ ID NO: 299318 - DNA, 122 bp, Homo sapiens
gtgggtggagctgtcctaggaaagcccagaagggtggcaggaggattctggtggaggcttcgagatggctcggaagactttgaataagggttcgccagggaccagaatttaaagtaacagag

SEQ ID NO: 299319 - DNA, 122 bp, Homo sapiens
ccctgagcacagtcaggttgaggccaggggtggaggcaggggcaggtgggtggtgaatggcgatgactgaggaatctttgagctgcctctgaaaggtctcagcagtgcgtcctgtctgtgcc

SEQ ID NO: 299320 - DNA, 122 bp, Homo sapiens
cggcacaggcggagccagggctgctgggctgggaggccgagtcaccctcactgagtgatccgcagcgggcccgcgccgccctgtccccgtcactgtccctctcgcggcgcgcgcggcgatgc

SEQ ID NO: 299321 - DNA, 122 bp, Homo sapiens
cagggcggtcgagtgagggagctgctggcgggtgggtctggcaactctttgggaggccgacgcgggcggaccggcgggtgctgggaaccgagcctcggcttgcggccggcagtttccgtggg

SEQ ID NO: 299322 - DNA, 122 bp, Homo sapiens
agtggttgcaatgcaggtgttgtgtggactacacactacactttgagaaccaccgtctcgcgagagtgagccagggtgtttaccaggcagtagagaccatatggctgctcttcttctgggtg

SEQ ID NO: 299323 - DNA, 122 bp, Homo sapiens
ggggacagaaggagaccgagaaaggagaagcgtctccagggagtcctcccctcacgagggcgccagcagccccgagacgccccacggcccggcctggctgcctcactccagctgtgcgggtc

SEQ ID NO: 299324 - DNA, 122 bp, Homo sapiens
gcctcatccttaaactggaaaggtttaaggttgcaaaagagatgcagaagcaagaggaggcggagggcagaaaatgaccgtcgctgtcccagcaatggaggtccaagaggagaaaggctggt

SEQ ID NO: 299325 - DNA, 122 bp, Homo sapiens
ctgacctcaagtgatctgcccaccttggcctcccaaagtgctgggattacaggtgtgagccgctatgccctgctaatttttgtattgttttaagtagagatgggggtttcacaatgttggtc

SEQ ID NO: 299326 - DNA, 122 bp, Homo sapiens
agatggatcatggccgtgactgcatgtcaaggagagtctccttgatgacattgaggcctacgtcgagagagacaaaatgtggtccaattaaaaggtgtctattttaccacattttttaaaac

SEQ ID NO: 299327 - DNA, 122 bp, Homo sapiens
agaggcgaccccaaactcagtagttgccgcccagctcggggacttgatgccggcgtcaagcggggcagcggaacgcaccagcggcccggccagcccagcgagatccgagcgggcggccccgc

SEQ ID NO: 299328 - DNA, 122 bp, Homo sapiens
gcgaccgcgagccctctgaggcccctcaagggacagggcatgggtgtgaggggtcgcgtgcgccccctggcgccgggtccgctgggcggggtggtgggcggggacggtgggcggaggcggag

SEQ ID NO: 299329 - DNA, 122 bp, Homo sapiens
gtgcatgtcatttcctcaaccattataaccaatatttgctgagtacttcactccgtgccacgtttttgctaagcattttatattcattattctggttaatcatcagatcaaccttaggaggt

SEQ ID NO: 299330 - DNA, 122 bp, Homo sapiens
gcgtgtaggcagggcagtttgggtccccgcctttgtggaactggtgttctgtgcagaaggcgggcgggcagttgtcccctggaaaacaggaaaggagaggatagtgtttgggcctcggcgcc

SEQ ID NO: 299331 - DNA, 122 bp, Homo sapiens
gggcgccgcgaggggaggggggcgaggggacggggcggggggtgtggggaccccgggtggcggcggcaaccgcccaccgccgcgctctctcacaacccagcccagcccggcgcgtctgcaga

SEQ ID NO: 299332 - DNA, 122 bp, Homo sapiens
agaccctgcgggagattgtgattggcgtcctgcaccaattgaaaaaccagctttactgaccggttcttggaaacctggagaacagccaacaagaggcccttgaatctctacgtggccactga

SEQ ID NO: 299333 - DNA, 122 bp, Homo sapiens
tcggccctactttcagcagaaatacctcctgcagttttcaacagccccagctctcctgggcgttgattttcctagttgcttcctttaatgcagacatttgagtttgcagccctagattgaca

SEQ ID NO: 299334 - DNA, 122 bp, Homo sapiens
attcctcccatcgctccattttgtctccctgcccgcgcactgtcgcctcatggaaggccgcgttcacggccctttgtatcccgcgcgcccagtccccggggctctccttctcgggtttgcga

SEQ ID NO: 299335 - DNA, 122 bp, Homo sapiens
tgtgcggcttccggggcgtcgcggcccaggtgctgcggcctggggctggagtccgattgccgattcagcccagcaggtgagatcgagggcagctctcgacacactttctccaaggctagggt

SEQ ID NO: 299336 - DNA, 122 bp, Homo sapiens
aagaattaagagctctagaggcgcctcttccactcactagggcaccatgtcaaagggactcgtcatggcgatttacaaatatcacgatcgtggacagcgctattggaatgtaacttgggctt

SEQ ID NO: 299337 - DNA, 122 bp, Homo sapiens
agcaaaatgttggaggcgacgccagaaagagagtatatgcctgctattcggaagtgatgtcgaacgtgcaatagcagagtcctggagatttccaccccgttccgcacccagggatcccagcc

SEQ ID NO: 299338 - DNA, 122 bp, Homo sapiens
gacccccttctaggcctctaagaagcaacggcagggactgcactgaggacgaccctgaaacgccgtccttccgctcgtcgggcccgggacactgaggccgggtggccgcggggagccgagcc

SEQ ID NO: 299339 - DNA, 122 bp, Homo sapiens
aaagtgaagacaaaaaagaaaactgcatcactggcatgtgcccttgtcagtcagcacttccggggctgtgtgtggccttcaggaatttcagttttcatgcatgaccctgagaagactcagcc

SEQ ID NO: 299340 - DNA, 122 bp, Homo sapiens
ccccttccgatgggtctgctggctcaggtgcgggcgatggccggggagccgcgccccgcacgtgactcagcactttccccagagcccggactgcggagaacaatatcctcctccctaacaga

SEQ ID NO: 299341 - DNA, 122 bp, Homo sapiens
gcagccacctgcacccatgtaaaattggattattgctgactcctacaaggcccactttaacgcttctttcaaccagaatccctgcagaactaattttgtagaaccgccggggataaagacct

SEQ ID NO: 299342 - DNA, 122 bp, Homo sapiens
ggggctgtggggcggtgagaccgtggggccgtgagaccgtggggctgtgagccgtggggccgggagaccgtggggccgtgagccgtggggctgtggggccgtgagccgtggggccgtgggga

SEQ ID NO: 299343 - DNA, 122 bp, Homo sapiens
ctgggcctcactggaacacaggcaccctgagcagcctgagaatttggaaccccttcaagtcgatactctgtattttttaatttttaaaaataatttaatagagatggggtttcaccatgttg

SEQ ID NO: 299344 - DNA, 122 bp, Homo sapiens
agacgtgagacactggcctggcctgtgtaattgtccataatctagaccaactctacctgtcgtattttatttccctatatagttcctgagctttgttttgttttgttttgttttttaactct

SEQ ID NO: 299345 - DNA, 122 bp, Homo sapiens
gaggcgctggctaggggctggagtggggggctggttttctctccagcaatcgagggaggccgccggagagagaggagggaggagaggaggtgggagcggcgggagggcagccggagagcggc

SEQ ID NO: 299346 - DNA, 122 bp, Homo sapiens
gctctctaagttaaggtcacggtgtagaggagaggacttgaaaacttcctgcagcagcttcgtggcccggtgaaatgttctcagcagcaagcatgaagctctgatttgtaaaaaaatcaata

SEQ ID NO: 299347 - DNA, 122 bp, Homo sapiens
gcgcggcggccgctcccgagcgcagccctgcccggcccgccagccgcgcgtcccggcgcccgcgccccacggccacagccttgcctctatctagctcacggagcatgtgcagacccgcaggc

SEQ ID NO: 299348 - DNA, 122 bp, Homo sapiens
ctgctccacgcggccctcgtaagccgggctcacatgaagcccgtatttggagtgcagtagcgctagttcctgggcgccttcgcccgcgtccacccgagcccatgccacttgccccacttgct

SEQ ID NO: 299349 - DNA, 122 bp, Homo sapiens
acgctgcccgcccctgtccccggaccctttcggtacccggggcaacggggaacccgggagcgctcgctacctggacagggtgcaccatgcccgatccagcgcagggcagcaggcctgcagcc

SEQ ID NO: 299350 - DNA, 122 bp, Homo sapiens
tctcctctcccccagctgctctgctcggatggcgccgccggctgagtgacgggggcggcgcgcaggacttcccagctcggacctcttgccttcgaggggaaagatgtacgagagtgtagaag

SEQ ID NO: 299351 - DNA, 122 bp, Homo sapiens
cacagcccttccctgtccccgagaaggcggcttgccagcgctgcaggacagccggacagccgggtgccccttgcttgcctcattagatacatacaaatggaagcacatttagagtccctaaa

SEQ ID NO: 299352 - DNA, 122 bp, Homo sapiens
taactgcagaagatcatcaagtgcagggagctgtggaactcccgggcgcccagccctcggcgcccctgcaccctcagccgtagagctggggtgttccggcccggagggataggggtttgcag

SEQ ID NO: 299353 - DNA, 122 bp, Homo sapiens
atgttactcccaatatcgcagggagtgtacacttcttctgtgatattgttcctagtatcccgatggggagaggatgataataattccagcatcgcaggctgtgttcacccaccctgtgatat

SEQ ID NO: 299354 - DNA, 122 bp, Homo sapiens
ctcttcctctttgttaattgaaaaaggctctttgtctgtcttcagctgtcagctcacatgcggcctccccaggcaagcctttcccagctcctcagaccaggcaggtcgcccctgcggtctcc

SEQ ID NO: 299355 - DNA, 122 bp, Homo sapiens
aggtccgaccagcggtcctggactccctcccacagcacgggaactccttcgtggcgaagccgccggtgacgaagcagcagcccctgcgctgcctcatctacatagaagtcgccctatccctg

SEQ ID NO: 299356 - DNA, 122 bp, Homo sapiens
cagaaggagcctcggccgagcgtgcaacccggagccgccttgggccctccctgcgacagccggacccgcctccgcatcgggttgcgatgccctctgcatagtttctttctcttccttcatag

SEQ ID NO: 299357 - DNA, 122 bp, Homo sapiens
aatgctgagaaaaaaactcacacccctgagacatccgggtgtgaataaatgcggcagagtcgcccgagatcgggagaccaggcgtgggggagaggtccgggaggcctggaccagagtcctaa

SEQ ID NO: 299358 - DNA, 122 bp, Homo sapiens
agcggccgccatgctggagaaggcgccccccatggcaaactggctggggtgcaggaagagcgggtgcccgttgaagaactgttggcccgccaggcccggggcgaagccgaggccaggcaggg

SEQ ID NO: 299359 - DNA, 122 bp, Homo sapiens
gatgagtgtctgggcttggattgtgaccaactcagcacaagggcctcctaccagggcagacgttgcctggccgattctcttgttccccactcttttcttttctcccctcccgtttttttctt

SEQ ID NO: 299360 - DNA, 122 bp, Homo sapiens
ttgccagcagctgccttctgtggctggttatcttgtgctggctgttgctatgccaaatatcgttaccggaggccttatccagtcatgaggaagatctgtcaagtggtgccagcaggtctggc

SEQ ID NO: 299361 - DNA, 122 bp, Homo sapiens
gcccggagaggcgtccgcagggggcacggctgctcgggcggggccgctccctctgctccccgcgcccccgccgccgggtcccgagcccaggcctctcggccccacctccctcccgcacctga

SEQ ID NO: 299362 - DNA, 122 bp, Homo sapiens
gttctttagatcaatgcggcacatgtctcaaaagtcttcaaagtgtgcataccttttaatcgagtacttcttattctaggaatctattctagtaaaataatcaggaatgtacataaagatta

SEQ ID NO: 299363 - DNA, 122 bp, Homo sapiens
cggcccccgcagctgcggccctgtaactttaaacctggcctgagatcatcgttttggcgccggccaaacagagcccgagggcgggcctagcgcgcccggacggagaccaccttgcggccgac

SEQ ID NO: 299364 - DNA, 122 bp, Homo sapiens
tttacctacctacagttcaagcagttactgggatgtcctgactaatcgaagatgctgccgcgcgcgtgggtcgctctgcgcaagggcctcttcgaaaacccgactaggcgcaactcagcgtt

SEQ ID NO: 299365 - DNA, 122 bp, Homo sapiens
ggatttggaccagttaccttggcagggtcagaactgcagcaggttaatcaggtgagtcgtcggggattttaaagaagccgaagccggtttctttggctatgaaagtctacaaaacccccatg

SEQ ID NO: 299366 - DNA, 122 bp, Homo sapiens
ttgctgccgccagggcctgggagattgttccgctttctgcagtctgagcgtcggccgcttcggccccgggcggccggccctgcgggaggggagtgcggcttcctggctcctgaacccctcgc

SEQ ID NO: 299367 - DNA, 122 bp, Homo sapiens
ggcaggagactcaggattggctgccattcctccaagccccctccttctccaccttccaggcgggttccagaaagcttaccgcaccgttctccaggaaggtatctcttgggagagaagacacc

SEQ ID NO: 299368 - DNA, 122 bp, Homo sapiens
gcaaggctgtgctaggtggcccggagcaggactggaggctggtctgatggagatgcctctcggctgggacagcccagggagaggaaatggaccgcgttctttggaagaacagatgctcttgg

SEQ ID NO: 299369 - DNA, 122 bp, Homo sapiens
catggcaaaactcaaagcaccgacacaggaggctccggtatctgtgctcctggtgcatggcggggatgagacagcctcggcggcgctggtggagctcctgggagcctcgctccagcgaggac

SEQ ID NO: 299370 - DNA, 122 bp, Homo sapiens
gaccggaggaggccagccgggccgcgtggcccagcacctcctggctgcccatagcctccgcgccaggctcagacaccaggaaatgccgccgccactccgtttagtcgcgataagatggcgtc

SEQ ID NO: 299371 - DNA, 122 bp, Homo sapiens
cggagaagtgaggactcacaggagagaggtctttagaagacagagctgagcagagagaatcgcagagatctgaagcatcggggcattcctgtgcggaaaccacaccctgcgggagagggtgc

SEQ ID NO: 299372 - DNA, 122 bp, Homo sapiens
cgacttgcagacgatgctgcgagacctgcagctgcagatcctgcggaacgtcacccaccacgtttccgtgaccaagcagctcccaacctcagaagccgtggtgtctgctgtgagcgaggcgg

SEQ ID NO: 299373 - DNA, 122 bp, Homo sapiens
cagtgtaacaaaaatgagtacactgcaaagagagccctgttataaactgtaaattctgaacgctaattaagcatgctagtcctctccaaataatcaaatcctaacatgtccatgataattaa

SEQ ID NO: 299374 - DNA, 122 bp, Homo sapiens
gttggggaatatggaggaatccataaccagctcgtggttcagggatgtgggtgatgctgtcgcagcccaggaccctggacagagctgatccatgcacactgacagatttggcgtgggcaatg

SEQ ID NO: 299375 - DNA, 122 bp, Homo sapiens
ccagctacttaagaggctgagatgggaggattgcttgagcctgggaggtcaagggtgcagcgcgcagtgattggaccactgcctccagtctgggtgacagagggagacactgcctaaaaaaa

SEQ ID NO: 299376 - DNA, 122 bp, Homo sapiens
cctccatggagtgcttcacgaaggacttggtataaaagaaccgctggaacaacacctgcccggtagccatggccacctagagtagaagaaagtttccgtattttcaaacgcaccattcaaag

SEQ ID NO: 299377 - DNA, 122 bp, Homo sapiens
acccctgggacatcacctcctcccctcccacaccctcttttaggtggaagatcgcgcaggcgcagtacgcaccgccctggaagcggcctggagtctccgcaacctgacccagtcggagctga

SEQ ID NO: 299378 - DNA, 122 bp, Homo sapiens
ggacatggagacccaggatcacagtttgtgcttttcaggtttgctgtgtgtgtgtgtacacgggtgtgtgttgttttctctgtacatgtcactgcatgcagcattaataacaggatgttctg

SEQ ID NO: 299379 - DNA, 122 bp, Homo sapiens
ccgcctcgccctgtgcaagctcggtgcagtgcagcccctccggctctcgccccacaatgccgtgcgcaggctggcagcagttcagctgaggactaaacgcttggctcaagttcaacacggct

SEQ ID NO: 299380 - DNA, 122 bp, Homo sapiens
gggaagctccgcgtcctcgttctggggtgcacccagtcctttcgtgggatagagccttcgcgtaatccgtctgcgactcctcccttcccattttggctgctggctgacctgaaagccacgcc

SEQ ID NO: 299381 - DNA, 122 bp, Homo sapiens
gtgcattttattggcttcatgaaatgcatgccttcggccccacagcagaaggccaggaaacgcagatctgacccagggataatgccagttttctgttcttatatcctttcagcacagagctc

SEQ ID NO: 299382 - DNA, 122 bp, Homo sapiens
ggattgatctcacctctccctcattccccaaccaatatagcttcttgggcatatgacctacgcagtctcattgggccccacactgagaagaacaacacagtgtttgctttaatgctctgctg

SEQ ID NO: 299383 - DNA, 122 bp, Homo sapiens
ggcactgctgacagtggctggtcctctccccaggactttgcccccagcccttctcctctacgtttgtttgctctgcctggtcttgtgtgtgggtccagcccctctctgcctggcgctaaccc

SEQ ID NO: 299384 - DNA, 122 bp, Homo sapiens
tgtgtgggaggactggtggctgtctttgcaggcaggcatttgcttagagcaggctgtgtgcgagcccagcgtcaagtgattccggcctcctcgagtcagcggtggtgggatgaggctctgcc

SEQ ID NO: 299385 - DNA, 122 bp, Homo sapiens
cagtgccgtgtgcagcacctccactttccctcggtcgtggacatgctccaccacttccagcgctcgcccatcccactcgagtgcggcgccgcctgtgatgtccggctctccagctacgtggt

SEQ ID NO: 299386 - DNA, 122 bp, Homo sapiens
tccaggatgccagacatccctctccacgaggcctctccttcccaggccattcctgtatcacgagactgggagctgcttcccagtgctgctgcctctgctgagccacaatccaagaacctgga

SEQ ID NO: 299387 - DNA, 122 bp, Homo sapiens
tcatacagcctcaggaccagcgagcggcgctgggggctgctctccgcctgcagaggaacacgtctggtgggaggggccgagggcaggcccagttcggaaccccgtccccagcacgtcccacc

SEQ ID NO: 299388 - DNA, 122 bp, Homo sapiens
tcgtaagcctccttgagtgtgtacacgggccggggtcttggccgcgcgtccagcagcagccgctgcagctcacccagcacctgcagccagcgttcccgctccccctcgctctctgccagcag

SEQ ID NO: 299389 - DNA, 122 bp, Homo sapiens
ctttgaatactctgtgtgtgtgtgtgtgtgtgtgtgtgtgtgtgtgtgtgtgtgtgcgcgcgcgcatgtttagttgctgttgaaaatatttgaccactatgaggaactggtaaatttgcctg

SEQ ID NO: 299390 - DNA, 122 bp, Homo sapiens
ctggattagttatctatggctgcagaataaataatcctcaaatttagtggcttaaaataacgtttattatcacacattttctgtgggtcaggaatctggcacaacttcactggatcctctgc

SEQ ID NO: 299391 - DNA, 122 bp, Homo sapiens
tcacagcagagttgcgtaaagcagggtccgcctccattgaattggctcgattacccgcaacgcacaaataccggggtcgggagacctggattcgagttctttctctgccctcaccagctacg

SEQ ID NO: 299392 - DNA, 122 bp, Homo sapiens
gcggtggctgcgggagtcttgggagggggcggcgcaagggggcgtctgacccgggcccggcggccgtggccgctgcttggctgtgggagccttttgtctccgcgtgtgagaaaatggggcga

SEQ ID NO: 299393 - DNA, 122 bp, Homo sapiens
gctgtgtcggaagcagatatgtgctgctgcctctctgtctggccttttattctttactgccgaagttctggccccctgttctccatggtacttaaaagtcattggtcaaggctgacctgtgt

SEQ ID NO: 299394 - DNA, 122 bp, Homo sapiens
ggcggctccctgtggggaacacgggtgcaggcgcagtgtcagggcacgacggggtggccccgccccactccccagcctgccctctgacctgggcagggcacagtcacatcctggctgggatt

SEQ ID NO: 299395 - DNA, 122 bp, Homo sapiens
tgcacgtgcagggttctcattaattcttagcttgtctccagccatggcttattcaaaccccgatcttatttcctcctttgactagaaagctctctggtggtaccccctctatcgtctctcat

SEQ ID NO: 299396 - DNA, 122 bp, Homo sapiens
cctcggtgccggctggaggggctgggcacctctggggcggggttctgctccacctgccctcggcgcggactgtgccctcggcgggcacgcggaccggcggggtagggctagggcccggcttc

SEQ ID NO: 299397 - DNA, 122 bp, Homo sapiens
ctcgaaggcataaaaacagaagcttcagatgctctcaaggtgaaagttggcctcagccttcggcttaccccttgggattcctgccttcacttagtttctgatccaagagtattccttactaa

SEQ ID NO: 299398 - DNA, 122 bp, Homo sapiens
agcagcactttttctgacgtgtttgaacatccttaactgctgttttttttctctctacagcgtcggaataaagttgttgggaatccctgccccatctgtcgagatcacaagttgcatgttga

SEQ ID NO: 299399 - DNA, 122 bp, Homo sapiens
aaatacggtgccctgaggcgggacatggggaatttctcctggggttcagagtgttgtactcgcaaaacaaggatcactgatgttgtctacgatgcgcccaatagcaagctggtccgtaccaa

SEQ ID NO: 299400 - DNA, 122 bp, Homo sapiens
tcctggttccctgatcctcagtgaccttgtccttcaagactgaactccagagtccccacccgaggacccgcagtgcccggccgccgcgagctcgcggggtgtatgcccgccccgaggctcca

SEQ ID NO: 299401 - DNA, 122 bp, Homo sapiens
tccccaacaggctccccgccgggggcagtgcagccccggttagggcccccaaaccacccccgggtgcaggcagcacagccccagatagcacacctaaccagccacccaaggtgggcagtgac

SEQ ID NO: 299402 - DNA, 122 bp, Homo sapiens
aaccccaggctaggcctttggggaaacgggaccctcaccctcagccccagccgataagggcgaggtctgctccccaccccgacccaggctggacgatccagggccgcaggccagaacagaac

SEQ ID NO: 299403 - DNA, 122 bp, Homo sapiens
agctcatctcgctctcgcagcaggcgttccacttggggaagcgcgtccattggccctcggcgcccggaaactccagcccgctgcccagctccgcccagcagcccaggagcagcagcgagagg

SEQ ID NO: 299404 - DNA, 122 bp, Homo sapiens
cccatcaaacttcgtagaagccttccccagaggagtaaactcagtgcgcgatcttaagcgcgcatctgtggaaacaattaagtgagtaaacattcgcattttgcaaaatcttttaccatcct

SEQ ID NO: 299405 - DNA, 122 bp, Homo sapiens
aaccctcaaggttctggggagctaatcacagggtatggcagagtcctcagttcaggctgacgagtggccatgccttttaagtgaagtctacagagcacacagtgagagggaattgggaaata

SEQ ID NO: 299406 - DNA, 122 bp, Homo sapiens
aggaaacgatggccgacgctgtcgattctccagccaatcctggcactccttaactcatcccgctctcttattggataaaagggagctcagtagggcggatgttgtcctccctgcgaggatca

SEQ ID NO: 299407 - DNA, 122 bp, Homo sapiens
ccaccctcgtctgagaggccgcgaggtttcggcctgagatcccgtgaaggcgagaaatctcgcgatttctcgggagaggaatcggttaggagaagggggattcctcactcagctgtgcgctc

SEQ ID NO: 299408 - DNA, 122 bp, Homo sapiens
tcccacataccataccctacaagacacaaggtgcgcagacgagccttggctatgtaccggcgctgcaggaagaggctgtccgccgggcctgggctgctccagctacgcggggaggcggcccc

SEQ ID NO: 299409 - DNA, 122 bp, Homo sapiens
cggcctggagtctgaggaactggagcctgaggagctgctgctggagcccgagccggagcccgagcccgaagaggagccgccccggccccgcgcccccccgggagctccgggccctgggcctg

SEQ ID NO: 299410 - DNA, 122 bp, Homo sapiens
cgatctctctctcgggggtcggggggtgctctctcccagggcgggaggtctgtcttccgccgcgtgccccgccccgctcactgtctctctctctctctctctttctctgcaggttctcccca

SEQ ID NO: 299411 - DNA, 122 bp, Homo sapiens
tcggcgaagggtatctccgaggagcagctttcaggcgctccctgggctctcgcagtccagcgcgttcagaagctccagctgggaaactggagttggcctgaaagcagctccaggatctcccg

SEQ ID NO: 299412 - DNA, 122 bp, Homo sapiens
gggccagaaggctgaggacttgaagaaccggtgaaccacccttcaccccatctcttgaaccgcttcccactcgggtagcccttagcaactgagggcccaaacccggccccctactccctcaa

SEQ ID NO: 299413 - DNA, 122 bp, Homo sapiens
aaggtccctgtcttgcagctggatagcggcaactacctcttctccactagtgcaatctgccggtcagtattggtccttggtgtagggaggtggctgaatcaaatcaggcctcactgtcattt

SEQ ID NO: 299414 - DNA, 122 bp, Homo sapiens
tagccctactgttttgctcaccccacactaggttttagggaaagagatataaggatacctcgtcctctgtgaggtgactcaacagtcacagacccaaactgaatgatggagcagaataaaat

SEQ ID NO: 299415 - DNA, 122 bp, Homo sapiens
cgtccaggtgaaggtgacacctgaggcatctctcaggccggtcagtgtgcacgtgaggttcgcttctgaacctaagagcaggtcctcgagggccggtcggtgcagtgacagtcgggggtggc

SEQ ID NO: 299416 - DNA, 122 bp, Homo sapiens
aggggcagtgcgcatgaccagggctcccagacttcaggcaaggatgatggcggagagacacggcttagaagtcatcccaccatatggacggggaaactgaggcccagagacatgcagagact

SEQ ID NO: 299417 - DNA, 122 bp, Homo sapiens
tgcgcagctcatttgcttaaatttgcagctgacggctgccacctctctagaggcacctggcggggagcctctcaacataagacagtgaccagtctggtgactcacagccggcacagccatga

SEQ ID NO: 299418 - DNA, 122 bp, Homo sapiens
gtttggagctgcgacgccaaacatggcgtgttcctagaagccgctttcggcatcagtaggcggcggcgtggggtctggcagcgtggggagagggaccaaccgacgccacttcgtgttgggaa

SEQ ID NO: 299419 - DNA, 122 bp, Homo sapiens
ccggagtgctgggattacaggcgtgagtcaccactgcctgtcccccaacttggttttgcccgctgtagaaagtgcctgaggtcaaggctgggggcaaggggtggaggaaaggactggggagg

SEQ ID NO: 299420 - DNA, 122 bp, Homo sapiens
aggcaaattgggaactgggacgagggaacgttgttaggggcaccacctgctggggtccggcgcctccgcgctcgggctcggaattttggcagcctccgccccctggagacttgggaggagcg

SEQ ID NO: 299421 - DNA, 122 bp, Homo sapiens
acgtgaatgcccacagggctggatccaaggagtggggaagcaagtggggagggcgggatgcgtgcaacagacaaaagatgaagaaccagtgaccaaatcctgttagtagaaaacagaaagcc

SEQ ID NO: 299422 - DNA, 122 bp, Homo sapiens
aaggcacgctaacgcggacactgtacacgacatcgctaatgaggacaccgtataagacatcgctagtaactatcgcaagaacaaaaaaccaaacactgcatattctcactcataggtgggaa

SEQ ID NO: 299423 - DNA, 122 bp, Homo sapiens
cctgaggttgcacttgcttcatgtgcagttcacagtcaatgtcacatctactgtgtcttccgcttgcagctcagatgcagtcctgaaatgcattagatggcatgtgatggctttttctgggt

SEQ ID NO: 299424 - DNA, 122 bp, Homo sapiens
ggcaggggtaggggagggtctattcggcagggggtggcctagctgtccgtactccccaaacgcaaccttccagtcccaaacccaggcgttctaagcgctcaggacgacgatttgcgctcacg

SEQ ID NO: 299425 - DNA, 122 bp, Homo sapiens
ctaccctgggcctggtccggggcgggtgtttgcggggtggggccgaagcaggggcgtcgccgagttgaagacgtgtactccgagcgctcctgcgttcattcattcgctgggtggagagagga

SEQ ID NO: 299426 - DNA, 122 bp, Homo sapiens
cacctggctgtctccagggagaaagaggctgcggggctgagatggtgggactggggagggcgggagcctcccccgcaggttcgcctggccagattgccctcccaccatcccccaccccctct

SEQ ID NO: 299427 - DNA, 122 bp, Homo sapiens
tatgatgattgtggttgctcttactgaggactataaatgtggatttggttgatactttcacgtttctccttggacattgcagatggaagtcataaccccaaatgtcttacttatctgcaatt

SEQ ID NO: 299428 - DNA, 122 bp, Homo sapiens
tagttgcaccagtccactgtcctcctccctgttctttggcaatcactaatttgttctccacggctatacttacgtcctttcaagaatattataaaagtggaatcatatagtatgcaactttg

SEQ ID NO: 299429 - DNA, 122 bp, Homo sapiens
gcaaaatgactcatgtaattgctctgtgtaagtatccttagtctttattgtacacccacacgattctgatgctatagactcctgtggaatgcagggaaagagagaagggggcccattttaaa

SEQ ID NO: 299430 - DNA, 122 bp, Homo sapiens
gccatgcagcgaacctaaaaagagccttgtttgtagaggaaatttgtatgagaatgtctacgtgcaagaatgtttgctgctttaatgcagtggatttcagctaggggagatattgccactcc

SEQ ID NO: 299431 - DNA, 122 bp, Homo sapiens
cgggaggcgaggtgagtctttgatcgtaaccaggagcccggagctgaggcagttcctgcacgtgtcgcggggccggagaagctagggccaggtattccagggatgcaagaatcctgcaaatc

SEQ ID NO: 299432 - DNA, 122 bp, Homo sapiens
aaagaccagtgaggccccccaagctccctcccagcctgtcagcctttccttcttggctctcgccatgacctgatggccgcattctggattacatgcttgatccctgtcctcctccactagac

SEQ ID NO: 299433 - DNA, 122 bp, Homo sapiens
atggggaaactgggggaccggcacgggttccaggcgagtggacggtgggatggaatccgacgtgcacacccatgtctcaggctttgtttgatggaggctactgtttccacctcatgtcgccg

SEQ ID NO: 299434 - DNA, 122 bp, Homo sapiens
gagcgtgaggtcacagacacgctaacattaacaccatgtgtcctttattaactacaacggcgcttttacaaattatttctcagccagatcatgggcagcagcaaaatgctgtgcattccctg

SEQ ID NO: 299435 - DNA, 122 bp, Homo sapiens
tctttggaaatgtcctttgagctcctagaggctccattctgctcgatctctctgagctttcgatgatactgctctaacttcttctgcagctgggcgatggagtgagctgatttctgattctt

SEQ ID NO: 299436 - DNA, 122 bp, Homo sapiens
tttgagcccaggtgaatcttctgtgtagaatcgccacatccgccatgtgcctgccgaggtcgtgcggcctgcgctccttgtcccacagctggcatttttcctctgccggacagtggatcttg

SEQ ID NO: 299437 - DNA, 122 bp, Homo sapiens
atattttgcctggaatgtgagtaaaggggcacgtccctgactcctgaaccggagtggtctcgcgatgtcacatggctgtggcacacacgcggttctatttatttcttctccatcatgggtag

SEQ ID NO: 299438 - DNA, 122 bp, Homo sapiens
ttccgccggcctcggcctcccaaagtgctgggattacaggcgtgagccaccgtgcccggccggcgatttccactttctagcaacagttggcgtagaaaccctggcccagccagcgacagtta

SEQ ID NO: 299439 - DNA, 122 bp, Homo sapiens
ccggcgcttaggcccgacccagcagggacgatagcacggtctgaagcccctctaccgccccggggtccattttgcagacggggaactgaggccccttgaggcaggacacatccagggtgacg

SEQ ID NO: 299440 - DNA, 122 bp, Homo sapiens
ttgccccagtgttctcatattagaggtccctcctttctggtaagctggtaagtgattggacggtatagtgttaatgactgaagaacatttctatttaatttagctaagttcaacaaattact

SEQ ID NO: 299441 - DNA, 122 bp, Homo sapiens
aatgtcgactcataggcgatacgattcagagtcagcggtcggcaggaaagttctggcactcgccctgcagtgcacggaaatcatgaggactcacgtgatgccagagaaaggaagagcctgtt

SEQ ID NO: 299442 - DNA, 122 bp, Homo sapiens
acctcatcctctggcatggacgcagtcagggagtctgctccaagcagacactggtggtcccgctccactacaacgagtcctacagccaaccagtgtacaagccctacctgaccttgtgcgct

SEQ ID NO: 299443 - DNA, 122 bp, Homo sapiens
tggcggtgccgactgctcctgctagtggggaaggaagctcctcccggcaccaggaccgagcgcctccaccaggcctgctagaggatcacacctccatctcaccatagagccccccacagccg

SEQ ID NO: 299444 - DNA, 122 bp, Homo sapiens
ggggtgtgatggtagctaggccagcggtggtggtggggctgctcagggctctctggggtccgctctccgctcccgctaccgatcgaactcttggctcttaaaaagttagtgtggccgggcgt

SEQ ID NO: 299445 - DNA, 122 bp, Homo sapiens
ggtgacgtcatcccagtctgatctgtgaagggtagggccagcaggcagcaccaaagttcccgtatgcgcgttttcagtcttcatttaggtccgaattcccggcatataagaatactaccgtc

SEQ ID NO: 299446 - DNA, 122 bp, Homo sapiens
agtgatccgcccgcctcggccgcccaaagcactgggataacaggcgtaagccaactggcccggcccagaagaagtttttaggatatatggaggaaaacacaacacaacacagctacaactcc

SEQ ID NO: 299447 - DNA, 122 bp, Homo sapiens
cgctcctctcggtgatcacccgccagcccactgtcatctcccacctggtccctgccaccccgggaatcgcccaggcactgtcctgccaccaggtcaccgaggcggtctctgctgaggcccca

SEQ ID NO: 299448 - DNA, 122 bp, Homo sapiens
ctctgagaacgcaaggggtgtgaacggtttgccccaagtccttcagtgggttggtgggggcgtatctccacctctattccaacagaaccactgccccagacatgagaagttctggggaacag

SEQ ID NO: 299449 - DNA, 122 bp, Homo sapiens
tctcttgagtgccacttgggccgcggggggctccggcttcgcatccctgagcgctgccaccgctcttcctctgaatctgacctgcggagaggaccatggatgcctgctcagtgcctgcagct

SEQ ID NO: 299450 - DNA, 122 bp, Homo sapiens
agtgcttttctctgttgccacattttcctcaggttactcaggaaaatgctccagcatgtgcgagcacatgacctgaggttgcatcatagcaccaaaggaatcctcctgtcccctctgggaac

SEQ ID NO: 299451 - DNA, 122 bp, Homo sapiens
cggggtccgcaaaggctggcatcccaccaccaacgcgcgtgactagggtcttctgttttgcgcgtcttccagttccactgagggccgagactttgtctttgcggccccagtacttgcttagt

SEQ ID NO: 299452 - DNA, 122 bp, Homo sapiens
attacagaaagataggacaagtagttcagggtaaaaggtaaattccttccttttagcaaacgctgaattacgaaaagacacaaattaagcagatgggatagggttaaaagaaaaaaaaaggg

SEQ ID NO: 299453 - DNA, 122 bp, Homo sapiens
attgatcattaaatttattagcgagataaattccgcggcgactgagcggcctgctggaggcgcaggggccggcgcaggtccggggcctggctctgctggaggacgggggaggggcggcccta

SEQ ID NO: 299454 - DNA, 122 bp, Homo sapiens
tcccttttgaaataattgaaagtgttttaagcatttttaacctgattctaatctcaggtacgcagtaagaagctataactctgttagaacctcgaagagtagatgtagaatgaaaactccag

SEQ ID NO: 299455 - DNA, 122 bp, Homo sapiens
tatgagaaactaatgcggctgctgatctgacaggaggtggagctcaggtggtaatgcaagcgatgggagagtggctgtaaatacagaggaagctttgcttgctcactcgccactcacctcct

SEQ ID NO: 299456 - DNA, 122 bp, Homo sapiens
aagtgaggtagaaacaacatcactcaggcggccgtggccgtgaagcaaccgcacagctcccgtcaccacagttctttccacagcacgtgccacgcgggaacgccatccagcgtccatccctc

SEQ ID NO: 299457 - DNA, 122 bp, Homo sapiens
tcctctcccatcagtcaccaagacctgtggattctctcttctaaatagctctcagagggccgggggcagtggctcatacctgtaagcccagaactttgggaaaccaaggtgggagtactgct

SEQ ID NO: 299458 - DNA, 122 bp, Homo sapiens
aaagaagcacatgggcccggattccagccgcttcacagctcgggattcctccgcccagggcgggagccagtccagccattggccatcacacccagagacaccgcgatcccagcccactgccg

SEQ ID NO: 299459 - DNA, 122 bp, Homo sapiens
agattctgattagtctcctaattattatgtttatagttagcttttcattttaatgggcttcgtttttaaaatttggcttaagaattagttttatgaaatgaacaaaagagccaaagattatg

SEQ ID NO: 299460 - DNA, 122 bp, Homo sapiens
tatcaccccaaaaagaaactcataccctttatagcagtcgccctgagaggtgacagcgtgcgccctcgctcgctctcggcgcctcctcggtcttggcggccactctggccgcgcttgaggag

SEQ ID NO: 299461 - DNA, 122 bp, Homo sapiens
agatgggacttattctcaaaaggttcttgtctccacacgttaaaggaacagcagagcacacgtgcacttgcagacatacagctctcagagtccctagcacagagctttccaatagtggaagc

SEQ ID NO: 299462 - DNA, 122 bp, Homo sapiens
cacacgtataccagctgcaaatctccattcacactgcagatatagatattttcccaatatcgtattaagtaaatcctttgatacccttggcaaaattttatggtaattttcaaacaaaatag

SEQ ID NO: 299463 - DNA, 122 bp, Homo sapiens
atccgcaggcaggctgtggaaaattgtgaaaaacacacatctcagaacaatctcagccaacggaggagcaaaggtatttatacactctcaccaagtagcaattgtgaagagctgcccagtgg

SEQ ID NO: 299464 - DNA, 122 bp, Homo sapiens
atcccctgttgctgtctctgtcacctgttgtaacctgccctttttgtctttcagctaggtcgctgtcaacctgatatttctctccactttgtctttgtcggggtatctggatcctgttttat

SEQ ID NO: 299465 - DNA, 122 bp, Homo sapiens
atgctcacttgttgagcacccactctgtgtcaggcactcttctaagcactgaggatacaacgatgattccaacagacaaaaatccttgccctcatggagcttacacaggattgcataccagt

SEQ ID NO: 299466 - DNA, 122 bp, Homo sapiens
taaatctggaatgtctccgcgctgcgtaaagatgagaaatccgcgtggtggggaccacaccggccacagcgcggccccctgtcaggtgttgatgtgagtttgaaaggttacagattagttta

SEQ ID NO: 299467 - DNA, 122 bp, Homo sapiens
ttatttacatgcgtgttgcagtttttgataatgcgattgctgctgctaatgtgactaacgcgatgccgatgaacatctcggcgttttttggtgcaggataagcgggtgtagactctgtctgt

SEQ ID NO: 299468 - DNA, 122 bp, Homo sapiens
ggatgatggcaactatttgctttctaaatatgcgcagggtctaaatttgactctccataacgtcatagctttaagctatttaagttatgtgttactcactgatctttggggtgaatggtgtt

SEQ ID NO: 299469 - DNA, 122 bp, Homo sapiens
ctccaggcggcgctcccagcctcgggtccgggcagctgagtgcaaggccgccccttggggcgcttcctacccctggctgagtcgccagtgttgcctggagctgcccaggcctgcgcaaagga

SEQ ID NO: 299470 - DNA, 122 bp, Homo sapiens
cagggtgcccgcgtttgcctgccaggtggccggctgctgccaggtgttcgatgccctggacgactacgagcaccactaccacacgctgcacggaaatgtttgctccttttgcaagcgggcct

SEQ ID NO: 299471 - DNA, 122 bp, Homo sapiens
caactcaaaaagtccagggtgacgccgcgcccaccaaagtcgtgtgtgcctgaggctctgcggaattgagactgggctgaaccacagaacaagagctccagcagctctcgggaaaccagcgt

SEQ ID NO: 299472 - DNA, 122 bp, Homo sapiens
aagaagaaagcctgggctgtggcgttctggggaagtgaatagtacggccgccgggcgcgtcgccccaggaaccagaaggctttttgccgctattagtgcagaatgacttccggcaagtccca

SEQ ID NO: 299473 - DNA, 122 bp, Homo sapiens
ttctagggatacagcacctgagtcccagagggcctggcttggagacaccctcagtgactccgggcagggtcacaacccctctgagcttgcctctggtgcctccacattcccccagaaaatat

SEQ ID NO: 299474 - DNA, 122 bp, Homo sapiens
gctcctcactgacaccccaggacagcctgggggtctcagctccagcccctttgactgaggcggcagcctcaggcttgggcagccgcctcctggggaccagggcctccttcggctctgctatg

SEQ ID NO: 299475 - DNA, 122 bp, Homo sapiens
aggggacgagcgggtggcggggagatggcagcttctcacagagagatttccaccttctgacgaatcccatgcacccagcaacccggcaagagactggttccgaaacctccgcgcgagcgccc

SEQ ID NO: 299476 - DNA, 122 bp, Homo sapiens
tcaagttgacacataaatttaaccatcacaatagtctttgtttcaaatgcatgctcattccgacttccattagaggttacataattagtttatagcagaaggcatgattggctaaccttaaa

SEQ ID NO: 299477 - DNA, 122 bp, Homo sapiens
ttcctcctcatggctttgccctgacgtaattcaaacatggcaacagttcgacttcaaaggcgaacccacagacctcccagacacaggctcccgggccacgagaaaccggccgagcagtccgg

SEQ ID NO: 299478 - DNA, 122 bp, Homo sapiens
aagaaagagcagacctgaacttgactcctcctacgccctgtgaaggctgcaaggtggttccgtccgaggcgcggactccgcccccacgagcgccgccattttgtttggctgaggggagcgag

SEQ ID NO: 299479 - DNA, 122 bp, Homo sapiens
ggcgaacgctgccctcgctggccactctcaccacccgcgcgaatccgcgaggcagccgctcgccccgccccccaacaccgccccgcgcatgcgaaattgggtcccccgcccgcccgcagcct

SEQ ID NO: 299480 - DNA, 122 bp, Homo sapiens
atgaagccgtttttggcatttcccgccacagggaaacatacagataacttctttcttaggcgtagaagacattctaaagaacatctatgactagggattacaatgaatcttaactcctagtt

SEQ ID NO: 299481 - DNA, 122 bp, Homo sapiens
ctcagcagggttctgaactggaactcgggatctggccctgcaatgccaacatttattgggcgcctccttggggcctgacgttgtactaacttgtagggactctcacgtgaatcagatatatt

SEQ ID NO: 299482 - DNA, 122 bp, Homo sapiens
gctcagcgacttccatgctgtgactactcttttcatgaacgaagatgtgataaatcgtgacgactgaaagttgtagagatttgttgggataaatgggagaatctccagcaactctcagcgga

SEQ ID NO: 299483 - DNA, 122 bp, Homo sapiens
cctgacgggacactgaggcacagggttgaggaggactcccctggcagcccctccagcaagcgtggggcaggttcccgctccaagcctgagtcagatgcccatgtcagggcacggcccacact

SEQ ID NO: 299484 - DNA, 122 bp, Homo sapiens
cccggcggggcggggccaggtgcgccaggcttggggcggggcacctctggctgggcggggcggccgggccccggcgctctccagaccccggcgggtagctggcgctttgggaacctcagttg

SEQ ID NO: 299485 - DNA, 122 bp, Homo sapiens
gcctcttcaatccatcttaccacacaatatttcatgattcaaattcttcaaagtcttatacgcaggaatgtttattctgctgtatttctgtgaaattaaaaacttggaagaagcttcaaagc

SEQ ID NO: 299486 - DNA, 122 bp, Homo sapiens
acagtgagaggcagttcctataagcactactcattactacaagatttttaaatggccatgcgagatggtctctgagatcaaggaaaccagttcagccagcttcctgagcaaatggtaaatgg

SEQ ID NO: 299487 - DNA, 122 bp, Homo sapiens
gcgcggcccagttcccttttccggtcggcgtggtcttgcgagtggagtgtccgctgtgcccgggcctgcaccatgagcgtcccggccttcatcgacatcagtgaagaagatcaggtgtgctt

SEQ ID NO: 299488 - DNA, 122 bp, Homo sapiens
gttctcccgcagcctgagtgccaccaatgtaaaaggacagctgtgtgggccgcatgtgcccggaatgaggccccctgctccctcagccgcgttctcatgggtgaacaaagaccgtgatggaa

SEQ ID NO: 299489 - DNA, 122 bp, Homo sapiens
atgggactgtcgtcatcatgatctcgtccccaggctgccccggcggaactgtccggtcagcgtgactgtttggctttctgcagccatcagcaccgcacgggctcaccagcactttgctcctg

SEQ ID NO: 299490 - DNA, 122 bp, Homo sapiens
ctgagacaggtactccagtactgaaccagcagtgaaatgcaagaaagaaaacaggaacaccggtacagcactcttccaggagagaaaagagctaaaaaagtgggtggtgaaaatcacacttc

SEQ ID NO: 299491 - DNA, 122 bp, Homo sapiens
ggtagagcggaggactgtaggggtttgaatgtggtcatccttaggtcgctggttcgaatccggctcggaggagttccatttttaaaagtgtctcttctgggcctgaaataaggaaacttgga

SEQ ID NO: 299492 - DNA, 122 bp, Homo sapiens
aaatgtctaagctggaaggcaccttagagtttaattcctgtttctcttgtattaccatcacgagtaaggaaagttcagcccacagagagtcaggctgtggctgagttcctgctgccacccac

SEQ ID NO: 299493 - DNA, 122 bp, Homo sapiens
atcctttcatgtgaaatccttagagctgtgagcccttaaaagggacaggaattgctcactcggagagctcggattttaaggcagtaacttgctgatgctcccagctgaataaagcccttcct

SEQ ID NO: 299494 - DNA, 122 bp, Homo sapiens
gccagccgctcctgcaggatctgggctccctcctggaccttgcgcagctgctggctgtagcgctggactttctgctcgatgtcggtcagcgtgcgggccgtgtccgcctccagctcctctag

SEQ ID NO: 299495 - DNA, 122 bp, Homo sapiens
gcgcgcatgctcgcggctcggcgctgaaattcaaatttgaacggctgcagaggccgagtccgtcactggaagccgagaggagaggacagctggttgtgggagagttcccccgcctcagactc

SEQ ID NO: 299496 - DNA, 122 bp, Homo sapiens
aagacaaataattctgctaacccactcagaggaatgagtcaaaactccaggtgtaccaggcgagtgaatgtaaacctttcgcagcaccatcccgggctacatgcaagtttagggctggaagg

SEQ ID NO: 299497 - DNA, 122 bp, Homo sapiens
gggcaccaaaacccaccttgaaccatggtgcggtaccttctcccacacaatgctgaggggcgctctgactccaagccagaccaaggggcctccactacaggccatgggagcagctgtgccct

SEQ ID NO: 299498 - DNA, 122 bp, Homo sapiens
cagaggcaagagtgggggacttgggcggaaaggagggggcggggcgggattggcgagcagcgtggtgttggtgggggggcagtcccgcctccagccccagttagatgccaacccgcccgcag

SEQ ID NO: 299499 - DNA, 122 bp, Homo sapiens
cgggggcacccccagtcctcctccatggcctgatggttcctggtctggtgtgaggcactgcggcaggatcccagccagagcatgtttcttttggctgctgccccactaaagccacaaaacaa

SEQ ID NO: 299500 - DNA, 122 bp, Homo sapiens
cgcaccagctatggaggggatgcagacacgtgtgtacggcctagctcctcccgcagcctccgacagcttgcggggtgagcacggttaacaaaccctacagctggcggatctgtgcagacata

SEQ ID NO: 299501 - DNA, 122 bp, Homo sapiens
gaggccggcgtgtctggaatgagaacgagccgcgcacgcagtttgagggttccggggagccgcgtcctcccctttccaggcgacagccctaactacaggaattggccaaaattcagcatttc

SEQ ID NO: 299502 - DNA, 122 bp, Homo sapiens
tccgccatgccgatcctcctgttccctgcaaacccaaatcagccttcagggcttcagcagcgttgagtcacgaagcatccctcagcaacctcccgctgagcacccacaggattggtggcact

SEQ ID NO: 299503 - DNA, 122 bp, Homo sapiens
tacttaaacatttatgtcctcagtttcagtaaccacattttaagccctcatcagcctccacgtggcctgtggctacatattgcatacatcagagataacatttccctaatcacagaatagtt

SEQ ID NO: 299504 - DNA, 122 bp, Homo sapiens
cggaaagaaaggaagagcaatgtggtgcagcggcacaccggtcaggggagccctcaccaccgaccccccgcccctccccgcgccccacccccggcccccgcttccccgcccccacccaaacc

SEQ ID NO: 299505 - DNA, 122 bp, Homo sapiens
gtaggagggagcatcccacacctgagagctggacagggctggcagaatgaaggaggcagccggaaggcaaaaccaccagggacaagggactcagcctcttggggatcactcccaggggagct

SEQ ID NO: 299506 - DNA, 122 bp, Homo sapiens
cagcgaggccgccggtcttcagcctcggggggcctttagcagaggcgaaggctctgggcacgaccctggtttaagatccggctctgggcacgaccctggtttaagatccctgcctcgtcgaa

SEQ ID NO: 299507 - DNA, 122 bp, Homo sapiens
aaaaggagggcataagttaagatagggttgagaaacagctccagggtgtttttattttctcggcccaccaagttgtatttttctgggagcatgagatgcatttgcatcaacagaaattcaat

SEQ ID NO: 299508 - DNA, 122 bp, Homo sapiens
ttcttaacatctgcccgaaagttgttagcaaccctggtgttgccactgggattgtacctccgtttgtgcataggtcttgagggaagctggaggaacagaaaccagaacatggggagtggaca

SEQ ID NO: 299509 - DNA, 122 bp, Homo sapiens
acgctctccaacatctctctgcgctccaccgcaggctctgggcaagggtagacagtggctcgaaacctgtgtttaatatattccaaaggaaacaggtgagttcttgctgcaaagcattctgc

SEQ ID NO: 299510 - DNA, 122 bp, Homo sapiens
cctggggacctgtttttcctgtttcccgcagagttccctgcagcccggtccaggtccaggcgtgtgcattcatgagtgaggaacccgtgcaggcgctgagcatcctgacctggagagcaggg

SEQ ID NO: 299511 - DNA, 122 bp, Homo sapiens
ttatccctaagtaaatattttgtttcacagaaagcttgtccttttgtttttctgtgtacacgtgcgcactggcgcttgtgcgtgtatgtgtgtgtgcgtgcatgtgtcatttgctaccaggt

SEQ ID NO: 299512 - DNA, 122 bp, Homo sapiens
gacgctgggaacccgcgggagtggtgctcgctgcttggccgccaggtggggaactacaagcggaccgtgaagcgcatcgatgacggccaccgtctatgcaacgacctgatgaactgcgtgca

SEQ ID NO: 299513 - DNA, 122 bp, Homo sapiens
gtgtctgcgcgcgggggagcgcgagcgcgtttcctcccgccggcgccgagcacgagttgccggctccattcgagagaaaaaggaaggaggaaaagttgggctccaactcaagtgcgagcggg

SEQ ID NO: 299514 - DNA, 122 bp, Homo sapiens
ggaggctcaaggaggctgggataaataccgcaaggcactgagcaggcgaaagagcgcgctcggacctccttcccggcggcagctaccgagagtgcggagcgaccagcgtgcgctcggaggaa

SEQ ID NO: 299515 - DNA, 122 bp, Homo sapiens
ggagaaaaccttaaagagccttaagattgctaactagaaattcaagagaggcttcacatacgtttttacgttgctgctcacttttcagggggaaggtttgttggtctgatagctcaaatctg

SEQ ID NO: 299516 - DNA, 122 bp, Homo sapiens
aacttcagtgttcctggaactaggggattttttggttcttgttccctattttaattagaccgatgcctacagttattctcattttttttagcagatccaaacgacataaggtagtttaaaat

SEQ ID NO: 299517 - DNA, 122 bp, Homo sapiens
ttcaagccattctcctgccttagcctcctcagtaggtgggattacaggctcccgccacaacgcctggctaatttttgtatttttagtagagatggggtttcaccgtgttggccaggctggtc

SEQ ID NO: 299518 - DNA, 122 bp, Homo sapiens
ttgggaactgtcccatagtagctcccagctttgcgtgcccctacctcgcgctccttggaacggccaccaagacgtgaaattttggaagaagatactccgactttagtggaaagacctaaagg

SEQ ID NO: 299519 - DNA, 122 bp, Homo sapiens
gcgcaagaaggaaatgtaaatgtagctgagtgggacgcgtgtgatttcagacccaattaccggcagactgcaaaggagacagatgcagatggctccagatgcggggaagtgcgctccggtcg

SEQ ID NO: 299520 - DNA, 122 bp, Homo sapiens
gaagaacaggctgggactgccggcgtctgaagccctctcctcccctgtgagcttgggcaacgcggcggcatgcggctgcagccactgggaacgagcctggctttggggacttgacttggccg

SEQ ID NO: 299521 - DNA, 122 bp, Homo sapiens
ccaagacgggtggatcacctgaggtcaggagttcgagaccagcttgaccaacatggtggccgtgtctattaaaaatgcaaaaattaggccggcatggtggtgggtgcccgtaatcccagcta

SEQ ID NO: 299522 - DNA, 122 bp, Homo sapiens
cgatcctgccctggcagcatccatcaccatgtgttcattcaacaaatatctcttgaatgccgggagtgcctggcaatggggacgcagcagtgaataaatcagataaatatccctgctctcgt

SEQ ID NO: 299523 - DNA, 122 bp, Homo sapiens
acaggcctgtctttttcccttctggagtgtgatgctgtcccgatttcatgcacagctgtccggccgcggagagaaacgcagggtgcacggctttcctgtgcccactctggaaagcttctcat

SEQ ID NO: 299524 - DNA, 122 bp, Homo sapiens
agaagaaacccaaagtgcttttccactaagaccagtcagggtgttgctggcggccagccacgtcatccaggatacgtgctgcatccgtgtctccccctgtgggcaactggatgtggcgctca

SEQ ID NO: 299525 - DNA, 122 bp, Homo sapiens
tactggacgctgacggccaccgggggcgtgcagtccaccgcctccagcaagtgagtgcctcgctcccacctgtcaccgcccccaccaccttgcctgggctaccccgcctgaccctgtcccgc

SEQ ID NO: 299526 - DNA, 122 bp, Homo sapiens
tttaagaaatttctcacctcatactttgtatgttaattttatccatcccactagattgcacgcctgttgaggagagtgagacaggcattcatttttgtgcacacatgtgtgtgctttcctct

SEQ ID NO: 299527 - DNA, 122 bp, Homo sapiens
cctattcaactattttgtatatattctattttgataaagataaaacattatttaaataagcgaatgacagggtatatagagcttacaaatggttcctctgaggagcttaaatatcctagggg

SEQ ID NO: 299528 - DNA, 122 bp, Homo sapiens
ttcccatttcaatcccagacacagagagcttgaatgcttgagatgaaaacacacacactacgttggagacacacacacacaaacacatatgcacacacacaaacatacgcgcacacacacgt

SEQ ID NO: 299529 - DNA, 122 bp, Homo sapiens
ctacttaggagttgagctgaatttgaattttgttgttgtggttaccttcagtgcactgcacgcttcacattctgtaaggttgctgttgttgccttgtgcttagggtgggagctctgtactgc

SEQ ID NO: 299530 - DNA, 122 bp, Homo sapiens
catccccgtacttctctgatgattatctttttctttcaggtttctctccatcccatttcccgctaagtatttcctaaggcctgattcttggtctctgagtcaatcattcgataaactcttta

SEQ ID NO: 299531 - DNA, 122 bp, Homo sapiens
agagcctcccccttcccacgtacgtaggggaaggataatctacttccttttgaacagcttcggtccccactatgacagtcgcataaacttcagcgaagagtgcgctggtaaagtggcatgga

SEQ ID NO: 299532 - DNA, 122 bp, Homo sapiens
gagggagggcgcgagcggcccggccgggaggtgcggaagttcgccgcagcagctcattggcgggcagcgccgctttcatcatttctcggaaaagtcaatttcattttcgcttccccaggtcg

SEQ ID NO: 299533 - DNA, 122 bp, Homo sapiens
agattaatataaacagtatatttaagggcatggaatgggaaatggtgtctacaataaagacgtgaattttaaaaactaatgttttgaaaggagtcattgtttgcactattgatcatagaaat

SEQ ID NO: 299534 - DNA, 122 bp, Homo sapiens
ctgcagcccctggccaagtccaagggcgggcccgggggggtggtgacacagctcccagcgcggcccccacctgccctgtacacctgcagtcagtgcagtggcacagggcccagctcacagcc

SEQ ID NO: 299535 - DNA, 122 bp, Homo sapiens
tcctggatgtgctggagagtgtgaacctgctcatgtccccacaaggtgaggtccctctcacgacaaagttggagggggcccagggcaggatcctgggcctgcctgcctgactccgctgctcc

SEQ ID NO: 299536 - DNA, 122 bp, Homo sapiens
aggaacccggatcctggtttttttcagctctgctgcaggggcggagttcacgctcaaccacgcaaatccttcggtccgcctgacgctataaaaaccaccttttttccactcacttatcttcc

SEQ ID NO: 299537 - DNA, 122 bp, Homo sapiens
gtgctgtctgcaagaaatgctgagcgtcggggggtcgttcggtggccccagcctacagatcgcacacaagcccccgccccatccctcattggctccgctcggccagacccaccgcccgccca

SEQ ID NO: 299538 - DNA, 122 bp, Homo sapiens
ggaggccgggccgtgcgcggaggagtggccgctgggttggaaacccggcccggcagggagcggggaaggcgcgctttcccggaggtcggcgcggggccggggccggggccggggcccggagc

SEQ ID NO: 299539 - DNA, 122 bp, Homo sapiens
gggaggcacctgcgggtctggcgcggcagccgctgcggtttgcagctggcgcgcagccctcgctgggaacttggagctctcaaactcctcggatcaagcgttagccccgaggctgtcagttg

SEQ ID NO: 299540 - DNA, 122 bp, Homo sapiens
ttctaacctctccagagactaggaatttaggattaaggccagaatcaaagcccactccctcggtagtactcttaaggtttttgttattacttttttttttctttttgaggcagaggtagtgt

SEQ ID NO: 299541 - DNA, 122 bp, Homo sapiens
cagtgtgcttcctgcacccagcgccagcccgccctggggaggggctgaacccgccctgctcgtgataaggcacaagcaagggctgccctgaaggaagctccaaagagaaaggagggcaggaa

SEQ ID NO: 299542 - DNA, 122 bp, Homo sapiens
agggagaagcacaggcaggagccggggctgcccgcagcactagtggcctggtgtgggatccgggtgggagtgggtttcgcgtgggcgagggctcagtggcctgcactcagcgctgccgactg

SEQ ID NO: 299543 - DNA, 122 bp, Homo sapiens
gagccccgcacttttctccccgcggagctgcgctgagtctgaaataggtgtacgcgtcagcggggcaggaaacggaaagacagtgcagtaattggtggaaagctggaagtgggcacctcgag

SEQ ID NO: 299544 - DNA, 122 bp, Homo sapiens
gagcgccgcgcccaaggcacctggcacaggccctgtgacccgtatgtccaccaaaggctccgcttccttcttgtccctcttccggggagcttccaggtctttctgctgcttcttccctttcc

SEQ ID NO: 299545 - DNA, 122 bp, Homo sapiens
gtgcttgttctgctttacaggaaagttgactcatactggtgtccagtgaagaaacccaggcgcataagagggacagttggatctcaggtttgtgcttgatctggaaaaggaagagcagagac

SEQ ID NO: 299546 - DNA, 122 bp, Homo sapiens
tcaatatatacaggtttggagttcagtatgtcttctagaactactggcggcagcttctttcgttgacgtgggctacaatggttgctaaaacctgcgtgccagaagccagaggtggggaggcg

SEQ ID NO: 299547 - DNA, 122 bp, Homo sapiens
cctaaaggcatttaccctttaagtcccctgggatgctggttactgtcactgatggaggaacggtgaccctgacctgccactgagactctacattatctggattgagaagacaacttttgctg

SEQ ID NO: 299548 - DNA, 122 bp, Homo sapiens
ccttggcttatgagtcagctgaaagcgacatcatgaagaggcttccaaggaacccaaagacggataatctggtgaaccaccgtctcattggcatggcctatggacagattggtgcgcccaga

SEQ ID NO: 299549 - DNA, 122 bp, Homo sapiens
gctctggccatctttcactacctactggtgtttgaggggtaattactgcttgctggagagcgggagtttgtagtattcataaccgttgaggactctctgaccccagctcgctgctcttgcca

SEQ ID NO: 299550 - DNA, 122 bp, Homo sapiens
cggtgcagggaggaccccgccgcagccgccgcgccctgccctcgtctgctctccggagtccgctcaggccgcccggctagccggctgtttgctgctcctgccgttgccatggcgacgggcaa

SEQ ID NO: 299551 - DNA, 122 bp, Homo sapiens
tacggggctgaggcaggtccttccgtaaaatggaactgaatgagcggcgcttaatccatccgccaaaggccagtctcccttgggttttcaacaggtaacatgagcttttaaaaatgagtctt

SEQ ID NO: 299552 - DNA, 122 bp, Homo sapiens
gctccactctgtccccaaggtgcagaggggcctgctggaaaaaacctccctgaaaaagaacgggaaagagaagaagttctactacccacagataaatctccaagggctgccctgggccatgt

SEQ ID NO: 299553 - DNA, 122 bp, Homo sapiens
taccattctggaccaaagcaagaacgcgtataaagtttttcggtgacgtttttttcttggcgcatttataagcgacccggggccggattccaggagtcggccccactcctgtgttcctgaag

SEQ ID NO: 299554 - DNA, 122 bp, Homo sapiens
ctgcagacgtgcacggaagctgctttggccaggggtttggaggttaactagcaaacgcagcgtgagtcacggcggcactaggaactgaaaccgtgttagccatgcccaggtttaccctccga

SEQ ID NO: 299555 - DNA, 122 bp, Homo sapiens
tgctggtgactccttgtaaaatgggggtggagaatcgaggggtgggaaatgggtgggaagcgctcgaggctggcatctcaaggcctccatgggcccgtctagagatccgaggtgtgcactga

SEQ ID NO: 299556 - DNA, 122 bp, Homo sapiens
agcccgcgtccgagctccaggccttggaggagccaggcgggcagctgacagccccggagccgctcccgggttccgcgcgcggtggcagccaggccgtgcctccccgttcccctcccgcgccg

SEQ ID NO: 299557 - DNA, 122 bp, Homo sapiens
accgccctctccctaccggagcgaggaggcaggaaaagcctagagacgcctggtcccatccgcctacccagtccccagccggcctgaagggaggaagaggaaggaacccataatcatcccaa

SEQ ID NO: 299558 - DNA, 122 bp, Homo sapiens
gccctgtcctgcagcggggatttgcgagctcaacccggcaccccactgattacaggattacgttggacgaatatttgagcttagtattccctgttcactgtgtggggtggtggtgggtcggc

SEQ ID NO: 299559 - DNA, 122 bp, Homo sapiens
tttttttcttttctgtatgtgaagggaataaagagacaaaaatagtgcttaaaaattagacgtcagacagaatataacaatccacagtttcatgatagtggttgagtattttaaattcaata

SEQ ID NO: 299560 - DNA, 122 bp, Homo sapiens
accactagcagttaaagacgggtctgaatttcctcgggctcggccggaaagtgaggatggcgatggaaatgccaccctccccgagtctggcctctgagagttaaagaagccggtcccatccc

SEQ ID NO: 299561 - DNA, 122 bp, Homo sapiens
agtccctggagtgtggggcaagactcacccccgggggctcggtcctcagcatgtgcagtgcggccgctgcgttggcttgcagctgcagccacacgggccgggtgagcagcaggcgctcccgc

SEQ ID NO: 299562 - DNA, 122 bp, Homo sapiens
tccctagtttgtaggagcatcgcccagcctcagcctctgtgtgcatgtcatattctaccccgtgcgtgttcacgtccagagccgtgttttatcaggacacggtcatttggataagggagcca

SEQ ID NO: 299563 - DNA, 122 bp, Homo sapiens
tacgttcagatctcatttaaccctttccaaggaccacagagcattctactctggtggcgccgtgctggaactggacctcttagagccccctgggctgtttgcagtgtggccttattgctgac

SEQ ID NO: 299564 - DNA, 122 bp, Homo sapiens
gtaaaagtaaggcatccataagatcaaagccacatttctttgctctctgcaccccattcccgcgccggccaggttaagcctcctgcgtggccagcaccccttggcaggggcagaactccctg

SEQ ID NO: 299565 - DNA, 122 bp, Homo sapiens
ccagccagagaggacagtggagcccagacacgtctccttgggattcactagcccccagcccgccaaaccccaccccagccctacacagcagtctggcctgagacgtcactggggacttatct

SEQ ID NO: 299566 - DNA, 122 bp, Homo sapiens
gaaggcaaggtccagagatccgagtgacttgcccagggacacaaggcaaatcggtggaatcgtcgaggggtggaggatcagccacagccccccgcctcccacgccacctcttggaaaccaga

SEQ ID NO: 299567 - DNA, 122 bp, Homo sapiens
tctttcccttacccccaggctttttgcaggaccttccagttcacctggctggaggaggaccgtgagcctggacagtggcacaaaccccgtgcccgcgctcatgcaggcgcaccctcatacgc

SEQ ID NO: 299568 - DNA, 122 bp, Homo sapiens
ttgtcttttcctagccgaatctggattaccaaggcttccggaactcgcaggcttccggagcgacgcaggagccggaagtggctgaaaaaaaaaagaaaaagttacaccaacgagaactgcgc

SEQ ID NO: 299569 - DNA, 122 bp, Homo sapiens
acacaactagaaaacaaaaagatgcaagcaaaacagtgagaatgaacctcacagcagtcacgttaaatataaatgctgttaacattaaagcctcagaatagaatttcagaaatcccttctgt

SEQ ID NO: 299570 - DNA, 122 bp, Homo sapiens
ggcattgcttctcctcagctacttctcagttactggtcctcatttggagagatggatatccggctggaagcatcccctacccgctgggagagtgggtctacagctcagggtctacatgtgga

SEQ ID NO: 299571 - DNA, 122 bp, Homo sapiens
gacatggataacagaagtgaacatcactgtctcaggagagtgggtctgggagcctggacccgagagctctgaggcctccggagagcaagtgggaggagagggggcgctgggggctgcatgca

SEQ ID NO: 299572 - DNA, 122 bp, Homo sapiens
cccgcggtgcccttccgccgcgccccagcccccccatccccccccgcgctggcccctccccggggactgctctgccttttactaatttgtcctctcgcggaattggcccccggcctgcggag

SEQ ID NO: 299573 - DNA, 122 bp, Homo sapiens
tggctgcaacttcgcactccgcgcctctggcaaccagaagagaccctggcatctccaaagcgctttatctcagtccattggaaccagtcgtgctgaccgattcacacctcggctaacgcaca

SEQ ID NO: 299574 - DNA, 122 bp, Homo sapiens
acagcaaagtctgagctcctggctgcactggttgggagacaagaatccctttgcttaatccgacttatgtggcttactacctacatgaccttgggcatgttatttaacctatccgtgcctca

SEQ ID NO: 299575 - DNA, 122 bp, Homo sapiens
agtttagaaggaggaactaattgcccaagacaccatagctagcaatggcagagcctaccccggggcaagcactgagaaggagtccagattctctgagtgtcatttgccattttgttctcacc

SEQ ID NO: 299576 - DNA, 122 bp, Homo sapiens
aaagcagctgtagtcctaataatggtccccaacttttaaacacctaaataagaatgactacgagtcatatccgagagtatgggatccccaataaaaggagggagaagatcatattctctttg

SEQ ID NO: 299577 - DNA, 122 bp, Homo sapiens
agcagctaactcactctaacttgtggcaactttttaccttcccatctggaaagctgggggcgggggcgctgcacgaggacgaatattcggagctgaaagagttaaacggtggggaacaaata

SEQ ID NO: 299578 - DNA, 122 bp, Homo sapiens
cgggagggcacggtactagagaagggtttctgctacattacccaggaagcctgcccttcacgcgtgtccctgccattgtgctgctccgaaaccgcacggctctcgaatgttaatgcctacct

SEQ ID NO: 299579 - DNA, 122 bp, Homo sapiens
aggattttggtttttcctctgagtgaagtgggagccactggagaattttgagctgaagaacgacacaatctgacttacattctaaaaggatgtctctggctgctgtgttgagaacaggcatg

SEQ ID NO: 299580 - DNA, 122 bp, Homo sapiens
cccctggtccctgaccccatccgtgcccatccccagaatgggaacgaccagacccgccgccgcctggctgtgtactgcctgaaggatgcctacctgccactgcggctgctggagcggctcat

SEQ ID NO: 299581 - DNA, 122 bp, Homo sapiens
ttgcggctcaattcgtgcaacctcagttaccagggggtcccggggccagcgcggaattcgcggaattcaccaagccgcagctgcctgccgctgaatgcgaagagggcgcaggagactggcag

SEQ ID NO: 299582 - DNA, 122 bp, Homo sapiens
tttgggggaggtgcctgcaggacccaacatactcaatgagcttccagcgcaatgtccgatcgctcggggccgactgccaagggaaaggatggaaagaagtattcctcgctcaacctgtttga

SEQ ID NO: 299583 - DNA, 122 bp, Homo sapiens
gtaccctcgcgacgcgggtggcctggggagggtggcggagggcggctcgctcggtggcaccgctcccctctccacactgtggcctcagcactcgacgcgcagacacctttagcttccccggg

SEQ ID NO: 299584 - DNA, 122 bp, Homo sapiens
gtgtgtgtgtgtgtgtgtgtgtgtgtctggaagttggtgagggcggcagggagttgcgggcgacagacgaaccatcacactctggcgtctgctctggcccgcgagtagtgtacgtggagggg

SEQ ID NO: 299585 - DNA, 122 bp, Homo sapiens
attctcaaactgttttggtgtcaggacgcctttactcttaaaaattattgaggccaggcacggtggctcatacctgtaatcccagcactttgggaggccgaggcgggcagatcacttgaggt

SEQ ID NO: 299586 - DNA, 122 bp, Homo sapiens
gatatgaaatgacaaaatttcaccactcccttaaacatgtttgcagtcaaaactagaaatcgctgagattgaaatatgtgtccaaattcagtcctatttgattatcctgccagacaccatat

SEQ ID NO: 299587 - DNA, 122 bp, Homo sapiens
tcttttcaaaatcaactagagacaaagaacagcccagcaaacaaaacgctgggttttttgcgttggcccaggtcctctccacgagcctgctgtttccctcttagacaacgctgacagtcagg

SEQ ID NO: 299588 - DNA, 122 bp, Homo sapiens
gcagacaggagcccaggtttaaggtattttgtggcttgcccaccttgggggcttgcatagcgatgaatgctaggtatactcctgccccacccactgcaatgccagcttcttccccatccagc

SEQ ID NO: 299589 - DNA, 122 bp, Homo sapiens
cgtgcccgcgctcccgaggggggcgcccagtgggctcgggatttcctggctgcgccaccgcgcgcctcgcccccgacgcccgccacctgtgccctgggccgccttccctgacgccagcggcc

SEQ ID NO: 299590 - DNA, 122 bp, Homo sapiens
tttaatgtgtgtaaatatttggccaaaggtcacaaagtgtgtaagtgacatatttggtatcgatttctgggcctaagtgcagcaccattttttgctatagcatatttcaagggttttttgtt

SEQ ID NO: 299591 - DNA, 122 bp, Homo sapiens
caacccatggagggcccagggtgcctggtatgggcatcagttggtgggggtgcgggggtgcgtgtccccattccctgcaacagcaaatggggctccttcttcagccctccccttcccagccc

SEQ ID NO: 299592 - DNA, 122 bp, Homo sapiens
ggcgctgaaacgagcgtatcagcaaaagccatacccgtcaccaaaaaccatcgaagacctcgccacccagctcaacctgaaaaccagcaccgtcatcaactggttccacaactacaggtacg

SEQ ID NO: 299593 - DNA, 122 bp, Homo sapiens
tttacaggaaaacatgttcaaaggtataattactaaagtgctcctggttacacaataatacgtctttactgaaaaacaataaattaatgagaaaagagatgcaaaaaacctcagaggaaaat

SEQ ID NO: 299594 - DNA, 122 bp, Homo sapiens
tctgggcaggacgtggcagaccccgcaggtgtgtacaaacaggcagtctgaagtcatccccgtcctgatatctaggagggcaggcggcatctggcagaggttgacccctgagccacagccgt

SEQ ID NO: 299595 - DNA, 122 bp, Homo sapiens
gaggggccgtgaccccatcggccaccactgggcacgcgtgaacactactcggacaggaaccgcaggggcacaccctcggacaaccactcctgagtcattctcaccaggctcggtgaatccaa

SEQ ID NO: 299596 - DNA, 122 bp, Homo sapiens
tcaggatggagggcgcggcttttgactgagtgggggcgggcccgggctgcaatcgagaggcgttgagccgtaaatcagcaccacttcccgcccagggcgttctgggtccccgcccaccggca

SEQ ID NO: 299597 - DNA, 122 bp, Homo sapiens
gtttgaagttctccaggttccggaactctaccagggtgttgccgtagtaatagttggttacgtaaatccgctcatccttggccagggggtccttcatccaggccccttcattccgcccatat

SEQ ID NO: 299598 - DNA, 122 bp, Homo sapiens
tgagacatctgtggaggtagaccagtttgggagaccaggcagtagaatgcctacagaggccgattttgcatttctgtgtataataattgaggcaagggactgtatgagagtcctccagggat

SEQ ID NO: 299599 - DNA, 122 bp, Homo sapiens
gaggggaagagctgaatgaaatgcaacagccgaaagtgcttgggaaatgcctgcaaatgccggcagtctgatgcacgcagagcctgaaccaggggcctcggagctgaggctcagagtgggcc

SEQ ID NO: 299600 - DNA, 122 bp, Homo sapiens
gggacttggtgatcatttgatgtggaaagagaaggatctagattgattcctagctaagtgcgattcctggataagaatgattggtaagaaaagaaaatcgttttggggaaaaaattatgggc

SEQ ID NO: 299601 - DNA, 122 bp, Homo sapiens
cccagcctgggtgacagagtgtaaccttgtccccaccgtgcctcccctcaagaagattttcgtatgtgcaaaaacactgccaggctaggaaaacaaagtccttaaatagcttaatttgaagt

SEQ ID NO: 299602 - DNA, 122 bp, Homo sapiens
gactttatttatggattgtaataacaaccacaagaaaagccatacatcttaatgaacatacgcctttgttctgtcattttaaagagtggtgtttactatgtgtgtgcttgagcattttcttt

SEQ ID NO: 299603 - DNA, 122 bp, Homo sapiens
gtgtctggcggcgtcagcacccctgtgacaggcagcctttctccgggcttagagcgtcagcgaagggattatttcaggccgacacttggcatggagagttgtcaggcaaatgcatttttgaa

SEQ ID NO: 299604 - DNA, 122 bp, Homo sapiens
acaacaggtcaggtcaggccaggcacagttgctcacgcctgtaatcccagtactgtgggacgccaaggcaggcggatcagttgagtccaggagtttgagaccagcctgggcaacatggtaaa

SEQ ID NO: 299605 - DNA, 122 bp, Homo sapiens
gccagcgtgctggcatctgccactgcatgttggtatgctcttccaccagtgtattcctctcgatgtccagctgcctgtgcgttcctctactgatctgttcctcttgacgtccagccgcttgt

SEQ ID NO: 299606 - DNA, 122 bp, Homo sapiens
atgttttaaacaggcacaggaaaagccgagcccttttgaaaaatactttgcgagtcctctcgttcgacgtggtagctgaactttttttcccctcttggaatcactcctgccacacgttggct

SEQ ID NO: 299607 - DNA, 122 bp, Homo sapiens
gagacagtcacaggattggttgtttttttttttttaattcctacttcctgaaactgaagccgtttatgagaaacagtgtgtttcagagaggctgtaccagaattaactctgctcagagttag

SEQ ID NO: 299608 - DNA, 122 bp, Homo sapiens
ccccgagggcgctgctggccgggccgccaaagcctttcgcccccccagcgcccctcgccgcggaagtcctgctggagtcccagcctggcccctggcccagctgtcctttacctcttgcccag

SEQ ID NO: 299609 - DNA, 122 bp, Homo sapiens
accagtcttgttagagtaggcacaaaagcattcagagtgactgccactgtagccactcaacgccgagcctaggcctgctttttttgcagttagagtgaaactttccattggtggagtcaccc

SEQ ID NO: 299610 - DNA, 122 bp, Homo sapiens
gaaggggaagggagtggaggggaaggactgcggggaggaacgggtggctggggaggagcgcgtgatctcggctgttcacagaagaggaactgcgaagccacaagccctcggagctccactcc

SEQ ID NO: 299611 - DNA, 122 bp, Homo sapiens
tctccactgaggggtttggcaccagcaccccgcccagagcagtgccgctgcccaaatcctcgcaggcagctcatcaacgcaattgcaactccggctggagccccggacctgcaagcctgggt

SEQ ID NO: 299612 - DNA, 122 bp, Homo sapiens
agcggcgacgcggccggccggcgcttaaaggggaaggcgcggcggcgggagggcaaactgcgcatgcgcaacccgcgcgccgtcgtccctggcaacactggctgctctagcgcctggcgggg

SEQ ID NO: 299613 - DNA, 122 bp, Homo sapiens
actccacatcctggctcctatctctgccttccaggcatctcccagctgcacgctcgggcccggctcagagccctaagccctgcctcccggtcctggccgggtttcccagaactgcacggcgc

SEQ ID NO: 299614 - DNA, 122 bp, Homo sapiens
cctttgaaatgcaaacatgatcatattattctctggtgaaattatctcatatattcctatcgcatttaaaattcattcagaataatcccatgattatcaaaaccctgctcttccacaacatg

SEQ ID NO: 299615 - DNA, 122 bp, Homo sapiens
gcccaggaggtcggagctgtagtgagtcatgtttgctccactgcactccagcctgggcaacggagcgagacctgtctaaaacaaaacaagacaaaaaaacttaatggcagttacacagttgg

SEQ ID NO: 299616 - DNA, 122 bp, Homo sapiens
agactgtctggacgcagagagcaggctctgtgtgggagcggggagggcaagccctggttgcgaggcagggcttccccaggattcagcagggatctgaaggactttgcaggcacccagggaga

SEQ ID NO: 299617 - DNA, 122 bp, Homo sapiens
gttttaatgagtttcacagtgtgattttgattattaattgtgcaagcttttcctaataaacgtggagaatcacaggctgggctgggcactgctctcaccttggttcctggggcatccatggg

SEQ ID NO: 299618 - DNA, 122 bp, Homo sapiens
acctgccggtgcgcggggttacagcggcgctggctggcggcggctttaaaggacgctggccgcggagtgccgcgggttccgcgcctccagccccctttcgaatgtcaaacccaaggaacccc

SEQ ID NO: 299619 - DNA, 122 bp, Homo sapiens
tccagtgctgttggaaacacaggtcctgagcgatgagaccaggatggtggacatctgccacgctgtgacacgcaaaataacaaagagcccccctgcgctgtttagcctagagaattttcaag

SEQ ID NO: 299620 - DNA, 122 bp, Homo sapiens
ttcccacatctgctcctgagcttgggggcaggggggcaaccgcctgaggaacctctccagcgatgggagccgcccgcctgctgcccaacctcactctgtaagtgtgctacctctcccactgg

SEQ ID NO: 299621 - DNA, 122 bp, Homo sapiens
gccactaatggctcacagctgtcttcttgccagggagacctactcccagccattatgcatcggtgaaactcatctgatgcatccaccatagttccagtcagcacgaagccactggctgattt

SEQ ID NO: 299622 - DNA, 122 bp, Homo sapiens
agagtctcccaccaaacacgctgcctctttctctcagcacgcactcgcctgtcccaaagccgcacacccccagacccgcgggacgccccctccgtgcctgcagggccctcggctccgcgccc

SEQ ID NO: 299623 - DNA, 122 bp, Homo sapiens
tgatggttttgtttttgcctctctcacgtcatctagagctgtgggtggtgagaagaacaccgaaagctacataatagtacgtgatgagctcgtgcttctgttcaatggccgcgggtggacga

SEQ ID NO: 299624 - DNA, 122 bp, Homo sapiens
ctgttcacagtggggaggagtttggacactcctgttctggggttggtgggaagttcaccccgttcgcagtgaggaggagcctggacactcctgttctggggtgggaagttcgccccgtttgc

SEQ ID NO: 299625 - DNA, 122 bp, Homo sapiens
gggcactggccagtggtgccagctgccgggcacccacctgtggcctcaggcaggctcctccgagcctctggggctccccaagaatatgccagagagaaaggatgaggtggcaaagggcagct

SEQ ID NO: 299626 - DNA, 122 bp, Homo sapiens
gggtggcggcaggtgcgtctccagggcagagatactctcttgtgtgtgaggtgtgtgtgccggtgcaaacctgtgcacctcagtgtccatctggcatggggcgcacctccagaccagaccct

SEQ ID NO: 299627 - DNA, 122 bp, Homo sapiens
agggagccgagcaattagcaaggcgcgggcgcccgcttgcccagagggggtcggggagggcgagtggggagaccagggcgcgagggcaaagggctcccttcctggcaggctgcggtctgcag

SEQ ID NO: 299628 - DNA, 122 bp, Homo sapiens
accacttgggtcagcacactgcactcactagcgccaacctgggctccacgcagcagaactcggttaaaaatcgtctgttcctggtcacttaggagttctagggggcagggggaagcaagaaa

SEQ ID NO: 299629 - DNA, 122 bp, Homo sapiens
cagacccacgtctgccaccccagtcccaggtgcgaaacaggggcgctacctctttaaaagcgtccggggctgagtctctgccgtaccatgtgattgcttgaaaggccgggctgggagcgctg

SEQ ID NO: 299630 - DNA, 122 bp, Homo sapiens
agaccacacagtgtgatgggccgtggaggagggcactcagaagctgtatctgcccacctgcggtgaggggaggagaggggaggcttcctggtgaaggtgatacctggaggacagggggaagt

SEQ ID NO: 299631 - DNA, 122 bp, Homo sapiens
ggtgtgggcggggctcacgggcggggcgggtgagtgggcggggcctcggcgtggtaggcgcgctgcgtaaagaggcctgcagtcccgcggcgcggggcaggttccgggctgcttaggttggc

SEQ ID NO: 299632 - DNA, 122 bp, Homo sapiens
cctctttgtgcagccagtagctgcagagctcttcgtcttgtattcatggcagatgcacagcgagtgactgacacgttccagggacggcgaatgggaaagagcgcgggcggccgggggagggt

SEQ ID NO: 299633 - DNA, 122 bp, Homo sapiens
agggaaccaagacgaagaggtgggtcctgcagcttgggcgggagcctcctccgttcttttcggacgcactccacccccgcaactccggtggaagccgtggcgcggagagccggctttgtggc

SEQ ID NO: 299634 - DNA, 122 bp, Homo sapiens
tcctgcagatcacctttccaccctggaggtgctggctttggtgggcagcctctccttgctcggcattctgattgtctccttcttcatatacaggtgagctgtgatgtggggggttgagtgag

SEQ ID NO: 299635 - DNA, 122 bp, Homo sapiens
tcgcctgttgattcccttttgttacctgactgcggggttggagatgatggatgaggcactcggggaggcctgcggctgctcagggagggcacttggggtgggggtcaccttccaggggtcta

SEQ ID NO: 299636 - DNA, 122 bp, Homo sapiens
cttgctctggagcctccctggggcggggcggccgcctggctctgcagggcttccccgggacgtacagcccagccaggatccccaggcctgcggtgggaggttgcagagccctgcctggagct

SEQ ID NO: 299637 - DNA, 122 bp, Homo sapiens
cagcatctcaccagctcccgacatagccagtttgcccactgcaaatggccaaacattaagcgtacaaattgcatgcgataccaccactaactttatagcatctgtggaatgctgacaaaaac

SEQ ID NO: 299638 - DNA, 122 bp, Homo sapiens
gctgctctaatggtccggacttccgtgtgtgagtttcccccgtgcgccccggcagtcttgcgctgctcctaagagttctggcttgtgtgtgtagctagacccagggaggcggccgtctcccg

SEQ ID NO: 299639 - DNA, 122 bp, Homo sapiens
agtgcagggtctcctcctggccctcccaggctcccctaactgcctctctctgcctctcctcgctggccgtactcagggtggactccattatgctggtggaagagggcttcagtgtgacgagt

SEQ ID NO: 299640 - DNA, 122 bp, Homo sapiens
cctgatgctgcctagcagcccgtgggctccaggcctttcaggtaagagcaggacaaccgccgctgcccacccagccacacacagcactgggcacactttaagcacccgcaccaggcacacag

SEQ ID NO: 299641 - DNA, 122 bp, Homo sapiens
tggactcaagcgatcctcccactgggattacaggcgtgagccaccgtgcctttcctggaccgggggctggagggctcttaatgcctttgactccttatctgattttctgagcttccatcctg

SEQ ID NO: 299642 - DNA, 122 bp, Homo sapiens
tgcacctctggccttccctcactttccccagccaggaccacattagcacaaaacactaggcgacagctgtcctaggcatggagctgccgtgagctagaatcgcttgagcagtccaaagaaaa

SEQ ID NO: 299643 - DNA, 122 bp, Homo sapiens
ctctggcgggactgattcgcactaggggcccaacaggcaataaggacccagcggattggccgaggataggccagtcccctgggcagcagcgccgcgccgggactagaggggaacgtgaggag

SEQ ID NO: 299644 - DNA, 122 bp, Homo sapiens
cgttaagatgtggctacttcccttcgcgttctacctcgattgaaaattttctgaggcctccgtagccatgcttcccgtacagctgtggaaccgtgagtcggttaaacctcttttcattataa

SEQ ID NO: 299645 - DNA, 122 bp, Homo sapiens
ttttacgctttggtttttagcttgcattgcataaacgttgtcgccattaaattctggctgcggacccgaagtgtgtgcgggcccaggacttactcgaagggcgcacttcttgggaatgcgca

SEQ ID NO: 299646 - DNA, 122 bp, Homo sapiens
cggagagaaacatacagggattttttttaaaactgactgcgaggtaagcagtgcgagaaccgtgatgccgagtgcaccaggtcttggtgtccccggcagtgggaagggcaaggggaaggcag

SEQ ID NO: 299647 - DNA, 122 bp, Homo sapiens
ggtggaggacgctgcctctggttctggagcacacacgtgctgcactgacgtgccgactggcgccgagaccttcatagctgcggtcgtgtatatttgtatataccacatgagtatttctcata

SEQ ID NO: 299648 - DNA, 122 bp, Homo sapiens
cagtaggattatctggtggagatgggaaaaggtaaagactacttcattccagcagcaatacgtaaagtgggatggataagggcccagatattctgactaccactttttcatgtacttggatg

SEQ ID NO: 299649 - DNA, 122 bp, Homo sapiens
tattaaaaaagaaactgcatgtgtaagattatcattatctgttgtgggtgggggtggatacgtagagtggatgatttgcaaaagacaggaagatcctcgttatatttagggtatcttttctt

SEQ ID NO: 299650 - DNA, 122 bp, Homo sapiens
gagaatctgggatgtaaacgaagcacacgcacatgcaatatttgatgagcgctgtctctacggctcacaggtagtaagtgctggagctgattctgagtgcaagtcatttgaataacagaacc

SEQ ID NO: 299651 - DNA, 122 bp, Homo sapiens
tggaatttttactaattcatggaattgtcagacttggaaaatccttggacatacccaagacgtgacttgtgggtatgttatgaaattaagagcctaaatcaaatgcccttctcattgaacta

SEQ ID NO: 299652 - DNA, 122 bp, Homo sapiens
caacctcaagtttgccttttttgtgtgttttctggttcctcttaggcccccgcctcaccccgcccccaacaagataagatccaggaacctggcagcctcattggaatagggaggagagagag

SEQ ID NO: 299653 - DNA, 122 bp, Homo sapiens
agtcagtaactatttgaaacgtcaatgtactggatgatgattcaaatacaggaacatagtcgtttttactgcagacttgccctagcagaggcccattgctggaggttccgtcaaagacttta

SEQ ID NO: 299654 - DNA, 122 bp, Homo sapiens
ctccggcgtcggggctctggctgagcgttactgccgccgctcgcctgggattacgtgctgcgtcttgctgctactcaattgctcgggggtccccatgtctctggcttcctccttcttgacag

SEQ ID NO: 299655 - DNA, 122 bp, Homo sapiens
cctgtctcctgatcattttcactccaccaacatgtgcttatgtgcttaactagagagccgcgcttagagtcactatttacatatcttcctgatcaggcccgtctgttcctgcacctgctatc

SEQ ID NO: 299656 - DNA, 122 bp, Homo sapiens
gcgcgggggacgccggcgcgcgccgccccacctcccggcgcccgcgcccgcgccccgccccgcccccgagccccggaggacccgcccatatccccgcccacagccccgccccgcgctccgga

SEQ ID NO: 299657 - DNA, 122 bp, Homo sapiens
gcatttagctgggtccgggtctgtcacccgtctgaccaccagctccttgagggcaagaggcgcctgctgccctcagggtccgcgcccagcccgcagctgctcagatccggagacgggaaggt

SEQ ID NO: 299658 - DNA, 122 bp, Homo sapiens
gggacagataaccttacatctgagcagtgtcaggaactgcagaataacaaaagcaggtaacgcccctctctattgagttggaccatatctgaaaaccataaatgaaggtctggaagtttcag

SEQ ID NO: 299659 - DNA, 122 bp, Homo sapiens
gttcctcctttttcttgccactccaacattgatgaaatgtagagtaattgaaatttacttcggagatacagcaagggactccaaaaggccatggagagagaatttcaactaaaattgaaaag

SEQ ID NO: 299660 - DNA, 122 bp, Homo sapiens
agagcggggagcctcagacccagccgagccccacttctgggcttagagcttgacccaacacgttcgcaccgtagcgagcgaggtccacatttagccatgccgcaggcaaaagaaggattcgg

SEQ ID NO: 299661 - DNA, 122 bp, Homo sapiens
gcgagagaatgttattattctcaatatcgcagggggtgcacacacccttgtgatattgttcgtaatacccaggggatgagaagaaaacattacccaaaatttcgtgggagggcgtaaacgcc

SEQ ID NO: 299662 - DNA, 122 bp, Homo sapiens
tcccgtaaagcagccacaccctttttgtgagtccccagagatcggctgccgtgtgtgttccggtcaagcggtctgccacagctgtgggttttcaggaaaaacccggcttcccttggctctga

SEQ ID NO: 299663 - DNA, 122 bp, Homo sapiens
ggctgggccagggtggggcgtggcccggggcgggggaggggcggggctgccaggcaggggcgggacggagaacacctgggtccctagcaccaagactggctttttattcattgccaccgcct

SEQ ID NO: 299664 - DNA, 122 bp, Homo sapiens
tgctgctgtcctggcctggggccaggcgtgtgccagctcctgtgtttgttgtgtgcccggcgtgtgctgggtgcccgagtcgggctgggtgtgtctgggtgtggccctggggtgtccctttc

SEQ ID NO: 299665 - DNA, 122 bp, Homo sapiens
aggcagctgcccgggacccctggcaccgaccgcagcccccagaggcccccggggggtttccgcctgagcctaaaccgaagacagggcatgttttcagtcatcccgaccccacagactcagcc

SEQ ID NO: 299666 - DNA, 122 bp, Homo sapiens
ccgtggggtgctatgaaagccggtgtgattttgagctctgcagggctgtccccaggctgccgacattgcaggaggggtccagtcctaggcacacaccattgtcacttcaccaggctccacgg

SEQ ID NO: 299667 - DNA, 122 bp, Homo sapiens
cccaccccgccccagctgtgtcctcggcgcccagcctggggcagccgtccccgtgagccccgcgaggggagcctgtcccagccacctcgccgcttcaatttcctccaggtccacaggcccag

SEQ ID NO: 299668 - DNA, 122 bp, Homo sapiens
caacacacacaccgaccttctaaagagccttctgtgcgccagcttccgttccaaacggaacggatctccgctggagacaaaatgcgacacaagacgacccgcccttacccccagggagctta

SEQ ID NO: 299669 - DNA, 122 bp, Homo sapiens
ccttgttgaaagtcaggaccaggtaaattcaactgttgaggtgttacagcctattaaagacgccagtgagacattttggtattgagtcaaccagatactgataccatcccttgttcactgac

SEQ ID NO: 299670 - DNA, 122 bp, Homo sapiens
gatgcagcttcatacaccacggcttgtgtgaagactctggggacttttgacatagttgttcggtggcaggcaggctaagcaatcctctgtgtatatttgatagcaccctctttcccatcaca

SEQ ID NO: 299671 - DNA, 122 bp, Homo sapiens
aaatgcaaaatgaaatgatttccatccacttctcccacgggcaccctccagagcctcatacgcacgtgaccttgtttgatacggtgtccggaatgtggtgctaagtctaaagttttaacgca

SEQ ID NO: 299672 - DNA, 122 bp, Homo sapiens
cccccgcagatttcaccgccccaagaggccagtgggctgggccagggcacacgttcctgacgcgcggctgcaccccacgagcccgggcggctctcgcgcgtgaggctctccttgcacgtggg

SEQ ID NO: 299673 - DNA, 122 bp, Homo sapiens
gcatcagtttgttcgatgaaggatcacaacatagacagtacggctttcttgcttcctcttcggtggttccttgtctcccacctccaggacagacaggagtccttgacatcgtgggagaggca

SEQ ID NO: 299674 - DNA, 122 bp, Homo sapiens
tcatctattcaacaaacttctctggggtgcctgctctattccattctttatgttcggtgtcgaagtcttggaacaggaacttcccacaacaaagggaactgagcccaagaaataataatcat

SEQ ID NO: 299675 - DNA, 122 bp, Homo sapiens
gaaatagccacagatattagagatgaaaacactttgtgaggtcagttcatcttcagttggcgtcaggtcgggcctcagtcattattttctagtgtttcataaccaaagtgagtaatggatgg

SEQ ID NO: 299676 - DNA, 122 bp, Homo sapiens
caccggagggcaaggcgcacgctccgcaatttttctccgcccccgtcttccggcttctcgcgacatccgcccagcggcggccggaatctcgcgataaaggctcattgtctcgcgggagcgct

SEQ ID NO: 299677 - DNA, 122 bp, Homo sapiens
ggcttctccaagagcagcaccagctctctagcagaagtgaggaaaggggcaagggctgggcggggatcacacagcacaacggcagcgcaagcaggctcgctgtcttgtgggccaccccacac

SEQ ID NO: 299678 - DNA, 122 bp, Homo sapiens
aagctcagcccttggcaaatgagcttgggaccttcctaaaacctaagccaatgataggcccgatcttgcctgagaggggcacgtgagagacccccaagctggagaggcagatgtcctggtaa

SEQ ID NO: 299679 - DNA, 122 bp, Homo sapiens
agagacaaagtttcaccatgccgcccaggctggtctctaactgtattttaaaaatacaggcggccgggcgcagtggctcacgcttgtaatcccggaactttaggaggctgaggcgggccgat

SEQ ID NO: 299680 - DNA, 122 bp, Homo sapiens
gcaccgcacccagaccaagttcgaggacgccttcaccctcaaggtgttcatcttccagttcgtcaacttctactcctcacccgtctacattgccttcttcaagggcaggttggtgggcacct

SEQ ID NO: 299681 - DNA, 122 bp, Homo sapiens
gcattttatccgcccccccttatctcgctcccctccccccacacccccgccccccgctagcgctccccctctaatgtgtgatctggaagctctataaagcctgatgtaatccgtaatgcagt

SEQ ID NO: 299682 - DNA, 122 bp, Homo sapiens
taccctgtgcccagggcttgtgaaacagatatggcttccacaaagggcaagccctgggcacgtccctcccctgcccagctgctcttgctgcctgccccctggcacctggctgggaacgtcac

SEQ ID NO: 299683 - DNA, 122 bp, Homo sapiens
attgattctaagacacacatctcacccaccctacccaatctaacatctctgagattacaccgcaggctctaattgatgccatttaataattactgtcagccaggtggcagtcttaacctgcc

SEQ ID NO: 299684 - DNA, 122 bp, Homo sapiens
tttgctagcctccggaaccacccaccgccatcctcccccaccctgcataccaggagtgcccggtccacaccaggcctgcaaagcccccccagaccccgagccgcacggcctcccccagcggc

SEQ ID NO: 299685 - DNA, 122 bp, Homo sapiens
gtggggtacagttaaatttagccctaaatgcatttatttaaaacacatacacgaaaaaaacgtgtgttcaactaaaaacccggaaaaggaaaatcagaggaaacaaagcacgagaaaaaaag

SEQ ID NO: 299686 - DNA, 122 bp, Homo sapiens
ggccttcacccatcgcggtggtttccgcagcagctgtgagcccagagcggttgcaaccagcggcgcagctacctgccttcagcgttttccgacttacaaagcaccaccaagcatttggcatc

SEQ ID NO: 299687 - DNA, 122 bp, Homo sapiens
cacgtccccctggtttccacttacggctcaggaaaggatgcatctcaaggatcctgggagcggaagtgaccaggcacaagggtctcagcaaatgtctccagattagagtcatttctcccact

SEQ ID NO: 299688 - DNA, 122 bp, Homo sapiens
tgccagctgatggccctggcaattttcccagggcaggtggtcctgacctggctgagcccacgcagatcaccagggacatggcttgactgcccctcccagcatgcttccgggggccagaagag

SEQ ID NO: 299689 - DNA, 122 bp, Homo sapiens
tgaaaggctgcattggaatgtgtggggaagaaatggccctttgaatgtgttcaaagcctccgtggcccctggctggggaaagccaagggcagttgtgctcagcaaacttcctggggagcctg

SEQ ID NO: 299690 - DNA, 122 bp, Homo sapiens
gacttctggactttgggcagggcagatcctctgactctctggctgcagaacagtttcttccgtgctctggcctgagtgccacagccagggcctctgctctgtacacaggtaagaaggcttca

SEQ ID NO: 299691 - DNA, 122 bp, Homo sapiens
cctttcctagtcaaagaaaggggtgacagacggcacctggaaaatcgggtcactcccacccgaatactgcgcttttccaacaggcttaaaaaatggtgcgctaggagattatatcctgcacc

SEQ ID NO: 299692 - DNA, 122 bp, Homo sapiens
cgaccgggtccgctcagccttcgactaatttccggtggtcggagctgcaaaattaaaggccgcgcgggggcagcgccggcggctgctaggctgactccgccctgccggggcaagccagggag

SEQ ID NO: 299693 - DNA, 122 bp, Homo sapiens
cccccgacttctttgcagggatggtgccgtcgggcctgccgggcagggtgtgaggagcttcgtcctgagatcgctggtcacttgaaggtctcgggagagggcgtcctgccctgccaaactgg

SEQ ID NO: 299694 - DNA, 122 bp, Homo sapiens
aggcttcattggcgacctggtggggcctcgcggccctgctccctgacgtcagcgccgccgcggtgatttaacagcttttgttttgggcagaagaacctatgggcacaaaaagcaggaacgag

SEQ ID NO: 299695 - DNA, 122 bp, Homo sapiens
tggaggcgacacctccacaagcagcgtggaggcgacacctccacaagcagcgttatctgacggaaccctcacaacaacccgttttacagatgagaaaactgagcctcagagagccgcagagg

SEQ ID NO: 299696 - DNA, 122 bp, Homo sapiens
ttcctcattctcctgttttccagaaggaaggtagggaggtagtgacagtcatctcccaggcggtgtgcacaaggtgggtaagctctgctggtaaagactgccctccagtggctgacttggga

SEQ ID NO: 299697 - DNA, 122 bp, Homo sapiens
aaaatctctttgcataaatataggctgggcatttgtcctcggcaagagcctgccatgagccggcagtcagggtttgactggccctttaagtccaatcgactcactcggcagatctgaagtga

SEQ ID NO: 299698 - DNA, 122 bp, Homo sapiens
tgaaagcccctgggggtgaacttgcaggtgttactcacaagaatcctgcagcataggaatcggatagattgtttgtgcctccagctgaggtggtcaccacaccttcaagccaaatcttcttt

SEQ ID NO: 299699 - DNA, 122 bp, Homo sapiens
aaatatgtacagtgtatgtgtctagttatctaacaacttccttattacctatctatctgtcgagccagtatacagtcatggtggagagcttgggctctgaagtgggacagggtgtgaacctg

SEQ ID NO: 299700 - DNA, 122 bp, Homo sapiens
tttccaaatcataatgtattttagtggtgagaggagctcagtaaaggaaattaaaggcatcgtggactccacagagcatggaacacaatgagctctcaaaaagtcatttgttggcagatatt

SEQ ID NO: 299701 - DNA, 122 bp, Homo sapiens
ggctgcgcagttggaaaggtggcagtgggcgttgcggttgctgcggtctgggcccagtagcggaccgtgttgggagggagctgggttttcattttgtctgcaggtaacctggcctcattaga

SEQ ID NO: 299702 - DNA, 122 bp, Homo sapiens
tcacagaaaggagtaaggtagcctttctttgcgtagattcccctcctccatgcatgaaagcgatggtctttctataggaatcaaatacacaaacccagactccaccaaaatataactgacag

SEQ ID NO: 299703 - DNA, 122 bp, Homo sapiens
ctgaataagaaatgcatggtttttggcatcggctccagcagaacactgctctccctcccgcgtgtcactcgcgccccgtggatgtcccgcggccgagttccgacgcgtggcaggcgttgtcc

SEQ ID NO: 299704 - DNA, 122 bp, Homo sapiens
ggggccttcctagggagtgggcggggctagttggtagggctcactccgcggtcctggtgccgcgtgcaggtcggtgcgcgcttctcccgaggtggaacgggcggcagtcaagcgccggcgtt

SEQ ID NO: 299705 - DNA, 122 bp, Homo sapiens
ccccaaaacaaatggaggacagaagaaaaaagaaaagtagttaatacaactattactctacggaaatattaggggtagcgcaaacaaagttctgacactaaactttactgagccctgcatcc

SEQ ID NO: 299706 - DNA, 122 bp, Homo sapiens
cctctctctcaaactattttcaaacctgcttgagaacctgccctcctcagaaagtgaagccgactcacctcagaaaacttccctccgaataataatcttttcataccttcttggtgcatgtg

SEQ ID NO: 299707 - DNA, 122 bp, Homo sapiens
gatttctatacataagaacaaaagcaaacacctaggacagcaaacgccaggcggtacaggcgggaaggggctctccacggagatcgaggacacgaagcaaactgcctcttgcttgccttccc

SEQ ID NO: 299708 - DNA, 122 bp, Homo sapiens
tgaggataacgacatttgagagaagccaatggtattggaaggccagaatcgaacttaagccgcttagttggtacaactgtaaaccctccctcacagaggctgggccctgcaatctttctaag

SEQ ID NO: 299709 - DNA, 122 bp, Homo sapiens
tggcacctaagcactgataaatgtctgccacggggtgaggggtggattttatttagttctcggtgaccttggggagaccaatttctgatcagtagtacgaagagaaactacaaagaaaggga

SEQ ID NO: 299710 - DNA, 122 bp, Homo sapiens
ggtaatggctcttatgtgaagatggcttctgagtcctttggtctgaggctggggtttacacgtttctttgctgagttggagatcactttgaagggtttgcatttctcaatggtgagagttta

SEQ ID NO: 299711 - DNA, 122 bp, Homo sapiens
gggctgtgcaaatccacgttcccgacgcccctccaccccatcccaatctgatttttgagacgtgcattttcaggtagtcctaaactgtgaacagcgagctttgtgtgttatctagtgggggt

SEQ ID NO: 299712 - DNA, 122 bp, Homo sapiens
gcctgcgcacttgctgccaccagaaactggaggacatgatccaggagcttcaggttgggccggcaggggccgggggggccttgggaaccctgttgccttctctggctttctgcaagtcctgg

SEQ ID NO: 299713 - DNA, 122 bp, Homo sapiens
tgaagagcttacccgggagcttcctctcctatgggccctggcctctgtctcctgagccggcgattcaggcctggtatggctgtcttcactcctggcccctccatcccggggaaccagcggcc

SEQ ID NO: 299714 - DNA, 122 bp, Homo sapiens
cctcgcgttccctcagccccatcacaccggctgacaggctggcatttccctcccgcctggcgtttccccccgccggtcatgtcgacaagcaccatgggtttcctgacagacggaaatatcaa

SEQ ID NO: 299715 - DNA, 122 bp, Homo sapiens
aattttaatagaactcaataactgtgttgccttgcaggctccgagtgctacaggcagacccgagtccgagtcttcctacggttcattgtccccccctggatttcctagggactccagatacg

SEQ ID NO: 299716 - DNA, 122 bp, Homo sapiens
cgtgtggcccagcgtccaccactaacgccgttcaatatctacctcaactcccctctaacgcgagaatgtgtatgagagaggcagggagagttcggagtaaaattaacccgaatggacagcgc

SEQ ID NO: 299717 - DNA, 122 bp, Homo sapiens
ttgaccaaaacccaccaaaaccaagatggcaatgaaagggacctttggtctttctcactgcgcatatgctaattataatgcattagcatgttaaaagacacccccaccagtgccatcacagt

SEQ ID NO: 299718 - DNA, 122 bp, Homo sapiens
ctaaaatccaggcaacaggaacagcatagccacaggaccgggcgtcagtcacattctccccgctggccgaatgacgcaaataatgctcaaattccatgctgcggtttgctttgactggcgga

SEQ ID NO: 299719 - DNA, 122 bp, Homo sapiens
tgctgggcacggtggcactttggcaggccacggtgggaagattgcttgagctcaggagttcgagaccaggttgggcgagaccttgtttctatttaaaaaaagaagaagaaggctgggcgcag

SEQ ID NO: 299720 - DNA, 122 bp, Homo sapiens
tggacttggcttctctactgcgctcccgatcccaggtgtggggtcgattctgtcttgcgccgattggaggcctctgctgtgggtgtggtttcacgtgcactgtctctggctaaaggtctagg

SEQ ID NO: 299721 - DNA, 122 bp, Homo sapiens
gtcattggcggctcccaagatggcgtccatcatggaagggccgctgagcaaatggactaacgtgatgaagggctggcagtaccgttggttcgtgctggactacaatgcaggactgctctcct

SEQ ID NO: 299722 - DNA, 122 bp, Homo sapiens
caaaacccactaaaatgatgaaaagcaggattggaaagcacttccagcaatgcctgggagcggacggacaggtgcatcagctgacaagaaacacagaggaacttcccgaaactagagatctc

SEQ ID NO: 299723 - DNA, 122 bp, Homo sapiens
gttggcgaggagtttcctgtttcccccgcagcgctgagttgaagttgagtgagtcactcgcgcgcacggagcgacgacacccccgcgcgtgcacccgctcgggacaggagccggactcctgt

SEQ ID NO: 299724 - DNA, 122 bp, Homo sapiens
attccccaattgcttaagcatgattatcagaaagtatagcaatatggcgttgtttgccaacgggcaatgagtactgctgttgctccctgttctatgtcctggccatcttcagccatgtccat

SEQ ID NO: 299725 - DNA, 122 bp, Homo sapiens
ccgggactgaggtacatggttaacacaggctgtgcgtgaaggggcttttgacttttcccccggctccggcctctcgcgtctctctcctagggctgcggctgctgctgcctggcgggcacaag

SEQ ID NO: 299726 - DNA, 122 bp, Homo sapiens
ttagcattgctctgaaatcctctcatgctgcacttttatttttactcttctgagcacatccgggatgcccaactctctggaaagagggattaattttttttttcggtccagatttttgagat

SEQ ID NO: 299727 - DNA, 122 bp, Homo sapiens
agatggagtagagggcaaatagcaaaagttgttgcactcctgaaattctattaacatttccgcagaagatgagtagggagatgctgccttcccttttgagatagtgtagaaaaacactagat

SEQ ID NO: 299728 - DNA, 122 bp, Homo sapiens
caaggggatgggctcatccagacacttggccaaaaggaacaaggtgtcctgtggaaatttcgagattcttgcggcttaggttcctgggcctggagctttcccggggagggtcctgatctgca

SEQ ID NO: 299729 - DNA, 122 bp, Homo sapiens
tccaataaatcatccaagctggagctgtgcttcatcacccttcattaagtatcttcaaaacgattttcctagttttcctttcctttcaacccaactgctcatcagagttgagacattcaatc

SEQ ID NO: 299730 - DNA, 122 bp, Homo sapiens
tatcaacatagccaaagaaaaacaatcaagacatacctccaggagctgtgtaacagcaaccggaaagagaaacaatggtgtgttcctatgtgggatataaagagccggggctcagggggctc

SEQ ID NO: 299731 - DNA, 122 bp, Homo sapiens
tgacgggcgaagagcctgaatcacagggattaaaattgaagactagctttcctcctctttcgaccttttcctctcacagcacagtggctgtcgtgcagttaagtggcagaggccactttgtt

SEQ ID NO: 299732 - DNA, 122 bp, Homo sapiens
ctgggcctggcagcccctccctccctgtctcctgttaggaggggcagattttcaggtggccgggacaggtgaaggcagagaggagtggctgtccacctggggaaggtgagtcatccttcttt

SEQ ID NO: 299733 - DNA, 122 bp, Homo sapiens
gggcccgctccccaccgtcctggaagtgctgcagcagcctgtccgcgtactccacccacacgcagttggggcagccactcatgcagcagtttgtgggcggctggagctcaggtggcagcgat

SEQ ID NO: 299734 - DNA, 122 bp, Homo sapiens
tcggctctcggcagcagaagagggcccagcccctgcagagctgctgggggtcccaggcttcggccatgggtgggggtctggcggctcagggccactcagggcggcttggctggccctgggac

SEQ ID NO: 299735 - DNA, 122 bp, Homo sapiens
atcacccctgagaaatcagggaggggccaggagtttttaataatcaaagcaacctcacaccgaagtctaagggaaagcagaggttcggctgagcaccagggcccctggcagctcagcatggg

SEQ ID NO: 299736 - DNA, 122 bp, Homo sapiens
tagacaacaggtctccttgtctctcttaattctttttctgcagaacaaccagtagatttccgtagattactggagagaataatcgcaatattcccaggatgtatgcagcctgggctgcccac

SEQ ID NO: 299737 - DNA, 122 bp, Homo sapiens
cagggtccagctcctggatcgcaggtcgaggaggggccacgggcggctcactgaaacctccgcctcccgggtccaagccatttccctgcctcagcctcctgaatagctggtattacagggat

SEQ ID NO: 299738 - DNA, 122 bp, Homo sapiens
ccacaaatgaaggcctctgaagcagaactgccctggatctttactgtgctggtgccctctcggactttctcttgcccttctgtctctggcctctcattctcccccgagaaatggaaactaga

SEQ ID NO: 299739 - DNA, 122 bp, Homo sapiens
aattaagtcccttggatcagaaaggggaacttgcgcatccttgagagtgctctttccttgcggttctccacacccgcctgggctctggggtggggcaaatctgcgctcgcatccttggtccc

SEQ ID NO: 299740 - DNA, 122 bp, Homo sapiens
agtcatggctcgctccaggtcccagcacgactgcttcagggtgtccacctccgagctcagcgaatcctgccgctgctggctgctgtggctgcactccacctgcgcctgcagcttcgtgctga

SEQ ID NO: 299741 - DNA, 122 bp, Homo sapiens
tttatatggaatccagctgcagagctgtgtgtttgcaagcaggtcgcagaacttacttgccgagatcgtcctcctttcccctcagcagagcagacgctaacagtccacaggagcccttcctt

SEQ ID NO: 299742 - DNA, 122 bp, Homo sapiens
ccagagacggcgtccttgagccaaaagcagctaaagagcagccaaaggcaggcaaggagccggcaaagccatcgcccagcagggataggaaggagacgtccatctgagcagcctgcgtggcc

SEQ ID NO: 299743 - DNA, 122 bp, Homo sapiens
gtgacgtgggggtggaccgggtagagcggggtcggcagggggccgagtccgggcgccccccgcatcctgacctgtctcccacacagggttcgtgggcccccaagaaggagccgtacgcccgg

SEQ ID NO: 299744 - DNA, 122 bp, Homo sapiens
tgaggaacataggaggggtgttatcctctggagctgcaagaacacaggtgatattccagccgataatgtattttttatgttgaagaaattgtgccacttccaaataaaaatgttctgtagac

SEQ ID NO: 299745 - DNA, 122 bp, Homo sapiens
gggccggccgaaggctggctgtaggcaggcggctgagccggcggcgggtggcctgcccaacgtgtgctgggtgggagaaggcgaggcgtcagcgatgctgtctcttccgtgaggagcgcaga

SEQ ID NO: 299746 - DNA, 122 bp, Homo sapiens
atttggtcctaagcccttccaggttggagatgctcaagtctatcatgttttggaccagttcgcactgctgtaaggctttttgcaaactcagaggctgctgctcctcgcttttcgtcatgttt

SEQ ID NO: 299747 - DNA, 122 bp, Homo sapiens
cagcgatgtgacttcagggaattcatgtgcacatcaaaatttgagaacttccaggctgggcgcagtggctcacacctgtaatccccagcactttgggaggccgagacaggtgtatcatttga

SEQ ID NO: 299748 - DNA, 122 bp, Homo sapiens
cactttggccagcgaggtccgcgctctgcgggtgggcttgggtcgtcctcctgggacatccgtcacccataggaacgatgctggtgaccttaatttggctatgttttgcccagactgaccca

SEQ ID NO: 299749 - DNA, 122 bp, Homo sapiens
ccctctttgttcttgttcttctcatgttcagacaaactgtctgaaacgagttttaaagcacgttcagtaatagaaacaattttctgaactgcctgtaactcctcttcagttggataaatggt

SEQ ID NO: 299750 - DNA, 122 bp, Homo sapiens
gcccgggcccgcggattgccgggtcggttctcagtcaccgcacaggtgccctggagagtgcgaccaccccctgccctccgccccgcgccggccctcggctcagtgccccgcccttcctggag

SEQ ID NO: 299751 - DNA, 122 bp, Homo sapiens
aggaacagccacgactatgactcgggccacaaacatcttggcctctgttccttctgtgtccgcacaagccaacttcagaaatacaggcatctcacagaagaagtgattcagtcgatggccac

SEQ ID NO: 299752 - DNA, 122 bp, Homo sapiens
agcgtgaaagcagtcagagatgacacgtaagcaaatactcccgaccggcctctggtaaagcgtccgttgtggaagtgtttaacagacctaacaacctttcaaaccgcatggcatttgtttcc

SEQ ID NO: 299753 - DNA, 122 bp, Homo sapiens
cactgcggaggcggcgctggccaggtggatgcccacacggtgaggagagcatggcgggaacgtggagtgctggcagctgcctcgtgctcacaaggtcctgatgctttccaaggcacctgtcc

SEQ ID NO: 299754 - DNA, 122 bp, Homo sapiens
gaaggcctggccctggcgtcacgttcagagccaaaaggagtagctgataggtttcctttacgaaatggaataaaggactggctgagggcaggggagggcacttttagccgaggccttggggg

SEQ ID NO: 299755 - DNA, 122 bp, Homo sapiens
ggcaaaagacttctaataaaacacattctaaacctgaaacaaaggcgatatctaaataaccgacattacatagtaattacattcctcactattttcctaaaaccatcattttcgatgtctgc

SEQ ID NO: 299756 - DNA, 122 bp, Homo sapiens
ccctttgccaggcaggcgtctgggcagatgcaggccggcgcactgtgctcctggtcctggcgcgagcatctcctttccagcctgcccggcgctagggctccatggaaccccaagctctctgg

SEQ ID NO: 299757 - DNA, 122 bp, Homo sapiens
gaaggcaaactacaactcccaaaggcccttgcgcggactcagcgcgcgagggacgaagggcggtccactgtaaggggaaatgctgaggatcactgggctcctcccggctttctgaacgcaag

SEQ ID NO: 299758 - DNA, 122 bp, Homo sapiens
tttttatttcttcagtgttttttcagagttggacccccggcgtcttcacgctaatgccaccgtcttcatttctctctggctgcatctgctcttcatctccatgcggttatagttttcacctc

SEQ ID NO: 299759 - DNA, 122 bp, Homo sapiens
ttgacccccttcctcctcaacagccctccagtgccctggtagccgccagtccccgcctggcgttttgaggttccacaatcaactttggcatgttttgactggcagggtgagtgaggtctgtc

SEQ ID NO: 299760 - DNA, 122 bp, Homo sapiens
ctaaagtcctccagtacttttccactagtttacctccaggtgcaggaaaccaccatggcacgtgtgaatctatgtaacaaaactacacgttctgcacatgtactccagaacgtaaagtataa

SEQ ID NO: 299761 - DNA, 122 bp, Homo sapiens
acatgcatgctccgggtccccagcccagcgtagaaaccaggagccctggaccgcgagcggcgggatccaggaggcgacaacctgacgcccctgccggaccctggacactcaggacctagtgc

SEQ ID NO: 299762 - DNA, 122 bp, Homo sapiens
cctgcacagctccacaggggatgttggcagcgattctgaggtcttcttttaccctgcccccgcctgtcctaggtctgttctcagagcgatgggccgcggagactgatctgccgccatgattg

SEQ ID NO: 299763 - DNA, 122 bp, Homo sapiens
caccgcgagactatacctagctgcccacccgttactgtttccatggaaacagcctgaattcgccgtagccggaaattagtgttccatagtcccctgcatctttattcactgcacttctgaaa

SEQ ID NO: 299764 - DNA, 122 bp, Homo sapiens
caaacgaacgagccgggtcaagaatcgcgaacgcaccgaccctgggacctcgaggctaagcgtggttgatggggtgggaggaccccgtacccctcactccaggatccctcctggcctaggaa

SEQ ID NO: 299765 - DNA, 122 bp, Homo sapiens
tctcaccgattaacctccatttctaagctctgtctgattgagggaagcaatgacagaaaacgcttggcctgtcacatgactgatccttgctgtcatgagccatcgttttctaactgcaagct

SEQ ID NO: 299766 - DNA, 122 bp, Homo sapiens
aagaaatactcaagtgccagagcaattagccatgcaccggaggatgtcttagaatgtcagcgggctctgctgtgacaactggctggaggccatttcctgcagggtctttgtaggtgtgtgtt

SEQ ID NO: 299767 - DNA, 122 bp, Homo sapiens
atgtactgctttgaaagtagaaatcccagatgtattgagtcagaacttctgtaagtgagccgaggcacaggcagcatgaaaacagtcctggcgggcatcgacaggcccgggccgaagaactt

SEQ ID NO: 299768 - DNA, 122 bp, Homo sapiens
accagacggggcccgggagattgtacctctacctctcctgccggggctcttagggaatgccggttgcagggcttgtgtttggagctgaactttttatttcagtcttgcctgtcattgtacct

SEQ ID NO: 299769 - DNA, 122 bp, Homo sapiens
gacagctcttgggccaagactcagggagacattgagacagagcgcttggcacaggaggagcggggtcagggcgaagtcctatggccccaggcgtggctctcagggtttcaggccccgaaggc

SEQ ID NO: 299770 - DNA, 122 bp, Homo sapiens
taccggttggtacagatacacatacttgaagtaaggagctggtaaacaattaaacaaaggcgttaaacatttggagcccttaagacggtgtgtacttggaaaggcagtgctaaacaggaaag

SEQ ID NO: 299771 - DNA, 122 bp, Homo sapiens
gaatgacttaagtaagttccttagaatattatttttcctactgaaagttaccacatgcgtcgttgtttatacagtaataggaacaagaaaaaagtcacctaagctcaccctcatcaattgtg

SEQ ID NO: 299772 - DNA, 122 bp, Homo sapiens
ccgggcccctcagcaagttctgctgggtccaccatgctgaagggtgtgcccacagcccaccgtccccatgtccaccagcccccatcctctctcctagacccatgcaggtgccacctcccttc

SEQ ID NO: 299773 - DNA, 122 bp, Homo sapiens
ggtcgttgaggcgagggtgaagttacctgcgtgcgtgctggggctggcatctgcctggttcgcatttggcggtaaatatcaccgtctgcacacggggaggcctccgatttccccattgtttg

SEQ ID NO: 299774 - DNA, 122 bp, Homo sapiens
cagagggcgggcgggggggaactcaaggcctgcttgatacgtccgccattttgggcgcttcgctgatggtgtcggtgagcgcgtttcccgcctgagcgcaactagcggcgggtcgtgggcac

SEQ ID NO: 299775 - DNA, 122 bp, Homo sapiens
actccggcagctttatcgccagagtccctgaactctcgctgtctttttaatcccctgcatcgaatcaccggcatgccccaccatgtcagacgcagctgtagacaggagctccgaaatcgcca

SEQ ID NO: 299776 - DNA, 122 bp, Homo sapiens
ccgggtttcctcgtcagtctccttttcgcaaaacaactttgggcctctactaggggtttccgattctaagaactaacattttgttttgttttctgttttgagacagggtctcgctctgttgc

SEQ ID NO: 299777 - DNA, 122 bp, Homo sapiens
cactggactaggcctctgttccgtgggagttgaaaagatttgacctggaagaaaccctagcgattattcagttaagccgcaaccccaccccctgttttatataggtaagggtgcttcacggt

SEQ ID NO: 299778 - DNA, 122 bp, Homo sapiens
tccggcgggagcagctggtagggctagggctccctggccccccttgaaggggttgggctgcgtgggtgggggctgtgcggggctccgggggccacactcacgccctgtgtcgcccgcaggcg

SEQ ID NO: 299779 - DNA, 122 bp, Homo sapiens
cacagttatgaacaccaagagtttccataactcgaggtttcacatgtgaattatttacatcgtgcagctttgggaacaaggaaccacagcagaccaacacatcaggggccacagaggaagca

SEQ ID NO: 299780 - DNA, 122 bp, Homo sapiens
ttccctttggagtgctccattcctaacaccagttgttaagcccctggtcctgaatgtggccgggggtgaggaagtgggaggagaccatgctggccactcagtggtggtgcccatggagtttc

SEQ ID NO: 299781 - DNA, 122 bp, Homo sapiens
ctggctagtgactcagaccagactgagaacccaaatccaagtgcagcctctccagggagccggtttttttaacaaactatggctggagaaaaactcccacacccccttattgttagtttgat

SEQ ID NO: 299782 - DNA, 122 bp, Homo sapiens
atttatcactttttaaaaacaagagattttccccaaaagtgaaggaataagaaacaaatccggtgtccatgcattcccaaactgcagtcttgatcccaagatacctcctcctctctcagacc

SEQ ID NO: 299783 - DNA, 122 bp, Homo sapiens
gtaaccttcaaagccatagctgctgcacggcttcctgaccgacttgttcctcggcgagagcgaacagtagtgagtaaggagcaggagcctgcggatcacagagccgcagcacctaccaccgc

SEQ ID NO: 299784 - DNA, 122 bp, Homo sapiens
cgtagggagggaggacacgggtccccgccatttcagaagctcagcgtccctgcacgtgtgcggtcttgtctgcctaggcatgtgtgcgggccctggggctgctgccagcagaacggactggg

SEQ ID NO: 299785 - DNA, 122 bp, Homo sapiens
ggggatggcatagcgccccgccgcgcactgtgccaggtggagtgggagtcctgatcctaccggctcatcacattccgcacattcccagtgggcagggtggaggaggggctagccagggagga

SEQ ID NO: 299786 - DNA, 122 bp, Homo sapiens
gagcttgtgctggtcaccgcggtttccgcaggacagagtccccacagccgctgggcaccccggtcccattcgcggccactttcctgtctgaagaccgcatgttgccgggctgtgcttacggc

SEQ ID NO: 299787 - DNA, 122 bp, Homo sapiens
gagggtgcagaacaggacccaggcgcagcacagaacagccctccaggcgggcatactgcccgcttctatgctgtcaactctttagggagagagctcactgttctgtctgcctcccaggatca

SEQ ID NO: 299788 - DNA, 122 bp, Homo sapiens
ggggcacttgggggcgcaagcatgtgtctgggtgtctacaccgagcagggtgtttgcgcacgtccgggtgtgagtcgtgggagcccgtggcccacaccagcctcctgggctgacgcggaaga

SEQ ID NO: 299789 - DNA, 122 bp, Homo sapiens
cgctgcttttatgagctgtaacactcaccgcaaaggtctgcaacttcactcctgagccagcgagaccaccagcccaccatgaggaacgaacaactccagaggcgccaccttaagagctgtaa

SEQ ID NO: 299790 - DNA, 122 bp, Homo sapiens
aatgcacaggtttgcaaaatctaaatttgtcagataactcactcttcaccccatttaggccgctttaaaaaaaaaagagaagtgaaaaggaaaagaaacaagggttgttgaaacaagcacat

SEQ ID NO: 299791 - DNA, 122 bp, Homo sapiens
gcgtggtcatgggcacccgccggaggggcgtggtcatgggcacccgcgcgcgcccaggggcgtgtccttttcagcacccaccgaggcgccagccccctgacgcgctgcgtggaatccaaatc

SEQ ID NO: 299792 - DNA, 122 bp, Homo sapiens
tgcaagccaagaggaaattgagagcaatcaaacaggctgcttttcatttggctcaaaaaccgacttgactcaaaataccacagcagtattgactgctctggtaagcctcaaagtcaaccccc

SEQ ID NO: 299793 - DNA, 122 bp, Homo sapiens
atggctaggccccccagcaggcaagggtaatcaactgtacttaaaaaagtgagcactgcacgaagggttgcctttggatttctgaaaaatacccccaaggaactgaacggaggggtgtacac

SEQ ID NO: 299794 - DNA, 122 bp, Homo sapiens
ccgacgggccgtggcgtaggagcctccgggcagcaacgcgctcggctcgcacagcagttccgcgccttccagagggcgcgccccgccctcccgtggcccagcccctatcctccagtgacgtg

SEQ ID NO: 299795 - DNA, 122 bp, Homo sapiens
tgcgggggagggcggggggcggccgccgaggggctccgggcggggcctgtccaaggccgtcgcctgtccaaggccgtcagcctcatttggaggttgctgggagagttggagccctggatgca

SEQ ID NO: 299796 - DNA, 122 bp, Homo sapiens
gggaatcaattgcaatcgtctggcagagttggccagcagagatcagccggcgtgagtcagcgccggagggtgaagcaggtggcagtagccagggtctagtgattgggaagcccgctgtgttt

SEQ ID NO: 299797 - DNA, 122 bp, Homo sapiens
taaaaggggcgtttggcagggacggctttgccaagtctgcatgatttgactctgcaatcacgagttctgaaacctcaacctaattcccaagattactgagatcttggggtctgtcgtcagca

SEQ ID NO: 299798 - DNA, 122 bp, Homo sapiens
aaggccgaaagtcgctgtgcagcacccacccaaggctggactcgggggaggtagacgggacggtgtctgtgactaaacggttcccacaccttacacgccgcaccgggattatgttttgaaag

SEQ ID NO: 299799 - DNA, 122 bp, Homo sapiens
ctgctgcggggacttcctatatttcttctttcttttgtgtaaaccagttgtcagcagcctcggacctagcccggttcctgtgaacccctcccctctgagctgataatactcgcggcttcccg

SEQ ID NO: 299800 - DNA, 122 bp, Homo sapiens
aaaaggtagggagcccagttctgtgtctccccagcggcgggcaggagagcagcatcaggccggtgagctgcaggctgacttgggaggggtgccgcgggggtctctcatctgatgtgctcgtc

SEQ ID NO: 299801 - DNA, 122 bp, Homo sapiens
accatccaaaggttggcccagggataaggccaggaagcaccagctgcttgacagtaaagtcgctggtcctacgtgtgggctctagggggcgatgcagtgtaaggtctgtcctgggcataggc

SEQ ID NO: 299802 - DNA, 122 bp, Homo sapiens
tccgcctgagcacagacatcttcctcttccctgccagcagcccaggctgcgctctcaggccggactcggggccactgtccaggccctaaacttccataaatgtgctgagaaccccgagactg

SEQ ID NO: 299803 - DNA, 122 bp, Homo sapiens
ccctgacgcccacccctgccctggctggaaaatctgaagttgatggaggtgcttggtgttcgtgcacagccgcctgggactcacgggacagccccataagtcacagccggttcccgcagggg

SEQ ID NO: 299804 - DNA, 122 bp, Homo sapiens
tcgtggtaggcggggtgggcgggacggcaaatccgcggctcctgcgtctattgggctgctcggggcagcgcagctccgcattggccaggccctcgctccgcccggcttccgcgagcccattg

SEQ ID NO: 299805 - DNA, 122 bp, Homo sapiens
ccccactccgagaggcggaaaagttacctgggatcagcagggagcccgggcgcgccgcggcgtggggactaggctcgggcgcgcgtcctcggcggcggtgcgcaggagactcgggcgtgggg

SEQ ID NO: 299806 - DNA, 122 bp, Homo sapiens
gcagggctgcggcagatgtagaggccggcatcgccgcgcccaacaaagaagacggcatctcggaaatcgtagacaccagggtccagaaaaagtcaaaaaccaaggagaaacaagaaaagatc

SEQ ID NO: 299807 - DNA, 122 bp, Homo sapiens
gtgctcaccccatgcaggcagggccacgccgggccaccactacctttcccaacaatggcccggtgtgggcagcccagtgactcagatcctgtccataatgcaacagagcacagcaaagtcag

SEQ ID NO: 299808 - DNA, 122 bp, Homo sapiens
ctcccaccaccacttactagttacaaaggaaaaagaatcactttctagaggcaaagctggcgacaccacccgagccaagtgatccaagttaacatcaccaggaatgggacaggccagcttca

SEQ ID NO: 299809 - DNA, 122 bp, Homo sapiens
gaggatccggaagtggatgggcggggcgaagggtcctcgtatataaaagggccccggccgcgcggggtctctaatctgccattttctgtccctgagtgagtctctggcgtcccaaattgcct

SEQ ID NO: 299810 - DNA, 122 bp, Homo sapiens
agggttaacacactattcagaggggggttgcgaagcccctcttcctcctaaaaatcaagtcgcagccaggccctgagacttctgcactcccagctggcgaggaatcggctttggtgagccct

SEQ ID NO: 299811 - DNA, 122 bp, Homo sapiens
acccacaggtgggaggctggctgaagggctagtggtggggggcgcctccttctcaccccgcgatggctgggactgattcattcattcagtgtgaattggactgagagcactgccatacgcgg

SEQ ID NO: 299812 - DNA, 122 bp, Homo sapiens
acgcctccgctggaggggtgggaccccggaagcagggaaccgaggggctgggctggggaccgcggggtccgggcggggcagaggggccgcgaggccggccaggaacgcggggcggggccgag

SEQ ID NO: 299813 - DNA, 122 bp, Homo sapiens
ggaggcaacctactgcgggcctctgcactgctatctgatggtcccaggggcaggcttggccggttctggggtgcagttgtctcctccgcagtgagaattaggcccctctcagcccagtcaag

SEQ ID NO: 299814 - DNA, 122 bp, Homo sapiens
aagtattaaattcattcacgagtgccggctccgcggtgagagctgccttgtacactggtacgtgtgtctcttgcttaatagcgccttagcgtattctggtcggcttggcttcccatcaagtg

SEQ ID NO: 299815 - DNA, 122 bp, Homo sapiens
gacaggtgtgagccaccgcgcccggccacgcactctggtaaagacgaaaactacgtcctgcgccccggtaggttctaagctgccggaaagtgaatggtgaatatgaggtttgagttagcact

SEQ ID NO: 299816 - DNA, 122 bp, Homo sapiens
tttccacaatatgtgatttgttgttatcagccagcactattcaatgtgggaagggactaccgaagagcaccacaggccagaataaatgaatattgagaggcagagattaaggtccatcttgg

SEQ ID NO: 299817 - DNA, 122 bp, Homo sapiens
cgagcgagcgggtccccgcactgcagcggcgccgccctccacgcccgcccccgcgccgcgcgcagctgctgcacccccaacgccgcccgcgcgggcctgcagcccgtctccccccgaccgcc

SEQ ID NO: 299818 - DNA, 122 bp, Homo sapiens
taaatttctaccttccttttcaaattttaagtgaaatgaagaatgcgaggtgaatggaaccgtaatgctgaatactgctagggagggtttaaggtattgtataactgacaagcaaacaacgg

SEQ ID NO: 299819 - DNA, 122 bp, Homo sapiens
tattcaatactgcattacaacagttgcctgatttctgtcaaggttctgaccgtaatgaggcgccaggatatagtcagattttcagttggaaaaacttggctttatgaagtctgcatgtgaag

SEQ ID NO: 299820 - DNA, 122 bp, Homo sapiens
tcaagggctgaggccgcaaagctgtggccaggacttgaatccaggccggtggggtgtagccggcaggttcaatcacgtgctcgtcccggcctgtctcacgtgggcccggaaggccggggtga

SEQ ID NO: 299821 - DNA, 122 bp, Homo sapiens
caggttcacctgctacgggcagaatcaaggtggacagcttctgagcaggagccggaaacgcgcggggccttcaaacaggcacgcctagtgagggcaggagagaggaggacgcacacacacac

SEQ ID NO: 299822 - DNA, 122 bp, Homo sapiens
aaaagggtacgctcttcaaacgcatacgtttaaggcaattccagaaaccctcggctgtgccgcgactacacggccattaaagaaaagacgactctatgcccgccgtaatgttctcagatcac

SEQ ID NO: 299823 - DNA, 122 bp, Homo sapiens
cgccagggccgcgcccggagtactggcctgagtggaggcccaagccggggacctggccggcgcacgggcggcctcccgggagctccccatgctcctctcacccactggccgcggcggctgcg

SEQ ID NO: 299824 - DNA, 122 bp, Homo sapiens
tgaggtcattctccccttttcttaaagaatagcacaagtttggccaggtgcggtggctcacgcctgtactcccaacactttgggaggccaaggtgggcagatcacgaggtcaggagtttgag

SEQ ID NO: 299825 - DNA, 122 bp, Homo sapiens
gagagaggctatcaagagtggaagagtggcgctgagtttctaaagagctctgattctacccgcctctcctgcgctccccacacagttcagacctggtcccatgtgctcagatgcggccacag

SEQ ID NO: 299826 - DNA, 122 bp, Homo sapiens
gccaccagccgtggtggcgaggaacagcgtgggctgcagcgccctcaccataaccgatggcgacaactgaggcaggcccaggacttagaaattagcattcaaaatgtacagcctaaacaccc

SEQ ID NO: 299827 - DNA, 122 bp, Homo sapiens
aaggcccgggcctggggagatggaatcggtggcagagccaggagggactggccccggcagcgtaccaggcaccccgccaggcaggtacctgttcctggagttagcaagcagccccgaccgtc

SEQ ID NO: 299828 - DNA, 122 bp, Homo sapiens
tgtgctgcgatgctgctgtgcatagtcagccttcgcactgggcagggagatgcctcccagcgtcttctttctcaggactgttttccctgttttagggcttgtgcttttccacataaatcttg

SEQ ID NO: 299829 - DNA, 122 bp, Homo sapiens
gaccggatccagcgatagattctttaagccagaggtctgtaacctttttagcaccagaaccggtttcgtggaagacagttctcctacgggggcagatagtttcggaatgaaacttccacctc

SEQ ID NO: 299830 - DNA, 122 bp, Homo sapiens
agatgctaccgacggtggggtccaaagcggcctgaaccagcccggagatgccagcgcctgcggaggtggaagtacacatgcccagggcgccctctgcagttcaggccgctcccggaagctgc

SEQ ID NO: 299831 - DNA, 122 bp, Homo sapiens
aatccactggcctctccgaaattagcacagaccattttcccacgaccctttctcgctgagcgtgtgattccaaaactgtccacaagaaggtgctcgggagccagaattcaggcgttcccggc

SEQ ID NO: 299832 - DNA, 122 bp, Homo sapiens
agaagcgggaggccggttccggttgcatcagcgagggattcacggcgaaatgagactgttcgtgagtgatggcgtcccgggttgcttgccggtgctggccgccgccgggagagcccggggca

SEQ ID NO: 299833 - DNA, 122 bp, Homo sapiens
cgagggctgctccacggcatctgcgtctccgccctcttgttgaatttctcccaggccctacgtgtccggtcctttgagtggcctctctggtgcattactaaatggttgttctcccaacagct

SEQ ID NO: 299834 - DNA, 122 bp, Homo sapiens
gcggcttcggcacctgctggggtctcggagcacaccctggccaggtgagggcgatcactccgtttctctatccagttacctttgtacgttagaaaagcaggagctcaatacacctggctctc

SEQ ID NO: 299835 - DNA, 122 bp, Homo sapiens
aaagaggccaaacaatcacagcggccagggtgcaggctacaggaggcccagtgcaggaggcgggatgtgttatcaccacaacctcccccaatgctgcccccaccagggctgctttcccagga

SEQ ID NO: 299836 - DNA, 122 bp, Homo sapiens
tgcagcgttcgcaatgattctggaaggtgtttactagcctgtgataagaatctcttcttacgtaaactagccagagtgaagtctgttctttgccagtaaacttttaccctaattggtgtgat

SEQ ID NO: 299837 - DNA, 122 bp, Homo sapiens
cttgcctctgatccttctaagaggcgcaagttggctgcctttccagaatcctctgattttcgttgatccaaggggctggaactgagcttcctttttcatgccaagtagggtccaaacaacag

SEQ ID NO: 299838 - DNA, 122 bp, Homo sapiens
tcttgagtacgagctccgcctcccgccttggccggagaggctggtccgcccggctctgcacgcgcctggcgctccacccccgccaaatcgaccacaccgggcgctggaaggagcaccgggag

SEQ ID NO: 299839 - DNA, 122 bp, Homo sapiens
catctctcagcctcacactccgatcttcagcagcccccgctatgcgcccgagtcttgggacgtcatcccggagctcctagcctgcccgggaggcagagccatcaggtaagagacggtcacaa

SEQ ID NO: 299840 - DNA, 122 bp, Homo sapiens
ggcggcgcgcgcgggcggggagcagggggcgcgcgcgggaagcccctccgctcaccatcacgaccgacgcccccagaatcatgaagatcatggtgttcgcgctcatggacatcgggcggggc

SEQ ID NO: 299841 - DNA, 122 bp, Homo sapiens
ccgcccgccccgcaggcacctgtagggacgcgcctcagcctctccgccctcgcgccggcccgcctggttctgtactttcctgctgttccgcgcttttgccaggaccgcggcagccaggctgg

SEQ ID NO: 299842 - DNA, 122 bp, Homo sapiens
tcaggagcctgcactggcttcctttaaaccaataaatcaaaatcctccttgcggaagacgcgggtttccacaggcagctccccgtggagggctcccagctgatctgtcacggtgcgggatga

SEQ ID NO: 299843 - DNA, 122 bp, Homo sapiens
ctcagcggcagcaaccgagaagggcactcagccccgcaggtcccggtgggaatgcgcggccggcgcccgcaccccatttataggaagcccaggctgcaagagcgccaggattgcaaaaggtc

SEQ ID NO: 299844 - DNA, 122 bp, Homo sapiens
gctccgcagtagctctgagaactgccttaagctccggcagcgattccctcaggttagaggcggaaggggaagaaggggcctggagaggtgtggttctcgtggtggcgcggccctcgctgact

SEQ ID NO: 299845 - DNA, 122 bp, Homo sapiens
cacaaaatgctggtgtggttttatggccaacacttccatttatttatcaacagattcacccgtgtctgtgtttgccagtgcttcttgcatctcatctctgggttcaatttctgattactgat

SEQ ID NO: 299846 - DNA, 122 bp, Homo sapiens
agccgcccccggcccagccccggcccgcagcgctctcaccaggcgggcggccaggccccgcgctccgcactccgcactccgcgctccctcccagcggcgccgcctcctggctccgagcctcg

SEQ ID NO: 299847 - DNA, 122 bp, Homo sapiens
gctgcttgacacctattgtccccgtttgggcgtcaaacgatttcgcctgaaggaccctagcgtcgattgctctcaaaactcaaggggcctttccttcggccttgccggggccatccccacct

SEQ ID NO: 299848 - DNA, 122 bp, Homo sapiens
ggagccaagccggcacgtgttgctgggtcccattgcggatggctggcccccttcttactccgctagtgtccctgacaccagcttccccaccaccagcttccccaccacgtgctttgctggag

SEQ ID NO: 299849 - DNA, 122 bp, Homo sapiens
agggctctaattccgagcatacagcggtttcacccgaggtcagtctttctaagtacgcatcgcctcaggatgggacaagagctccacagaggctgcctggggtgcccggctacgggttagcg

SEQ ID NO: 299850 - DNA, 122 bp, Homo sapiens
ggatcgcggccgcgcgcgcgcgcactcacgctgctctcgggcgctgggcggggagagccgcgcgcaccggttaattctgccaatcatgcgtctgggcctcccatcgtgtgggccaagccccg

SEQ ID NO: 299851 - DNA, 122 bp, Homo sapiens
cccgcgggatgcagacccggatcagtcaggcttgagggctgctccgcatagaccaacgtccggggaaggcacacagtggccgagggcccgcgcgcttgggctacggctgtgatggtatctgc

SEQ ID NO: 299852 - DNA, 122 bp, Homo sapiens
gaatcaggaagtcgaagccacacagccgagaaggggcagctggcgtctcggaggccgtcacgagctgtcactccgcgcccgcctgagttgccgctcaattaccaacttcaacccggggccgg

SEQ ID NO: 299853 - DNA, 122 bp, Homo sapiens
gtcacccatggccaatgatgtaatcaatcacggctctgtaacgaagcctccataaacacccgagaagactgggatggaggagcctcagggtagctggcctcatggagggtggtgcctgcggc

SEQ ID NO: 299854 - DNA, 122 bp, Homo sapiens
cccactgaaataaatataatttcatcacttcccttcagaaattccaccactgtgttcattcgtattcagctgaaagaaaaataaggacataaaccctatacttatttggatgcttttgctgt

SEQ ID NO: 299855 - DNA, 122 bp, Homo sapiens
ccctgcgggtgggtgtgtcgttcttctatcccaccctaggaactcccgaaaactgaagaccgccgggtcgcagaaggggagaagatggggcaggggcagaaaccctcttctttcctgaagta

SEQ ID NO: 299856 - DNA, 122 bp, Homo sapiens
cgcaatgtgtgtcccagtggatgtgctgctgggggagggtgccgggacctgcggcccgaacgcgggggctgctggcctgtggtttgtgagtggctccacgccagggtgtgacatggaaatag

SEQ ID NO: 299857 - DNA, 122 bp, Homo sapiens
ccaggaattgttctgggaaagtcagaaaaacaaagtattttggtttctttttaaatgatgcggccaccttctagaataaacagaaactgctgctgtttctgaagagataagatatagaaagg

SEQ ID NO: 299858 - DNA, 122 bp, Homo sapiens
ccatgacccatctggtatctcacagctggaagctcttggaatctaacaaggaccctctctcgaaagcagatgccaacatccgcctccccaaaactgttcctgaaatctctgttcacctgttt

SEQ ID NO: 299859 - DNA, 122 bp, Homo sapiens
ccccgccggcttcttttttcttgttctctgctgccttcagcacctcgaaggggtccgattcgtcgtcaaataactggtcgaatcggttggtgaccacgcagccgaagccttcctgtaagtgc

SEQ ID NO: 299860 - DNA, 122 bp, Homo sapiens
cgggagggggacgcattcctcacccgctcctcttcatctcttgcgtccgtttaccttccccgcccagattcagtacctctcgccagactctcacctggatcccagactccttcttctccagg

SEQ ID NO: 299861 - DNA, 122 bp, Homo sapiens
cagaagtaaagatgtacacccgtttcccttcaatcttgtcagcacttggggatagccacacgctagctttcactataataataggtaaacattcttactggttttagttattttccttaatt

SEQ ID NO: 299862 - DNA, 122 bp, Homo sapiens
ccctaaacgttaatgcataagtaaccttggtcaccaacagatgtgagggcacgtgacgttcgggctgcgccctccccgccccggccctgcacacagtagggccgcaccgcgctttgcaaaca

SEQ ID NO: 299863 - DNA, 122 bp, Homo sapiens
aatgatggcgggaggcggtgggagggtgggcgatggttttgttcctttgctcgttcaccccggtggggagccggggagccagggagcagagtgtgggaactgggtggagatgtctgcggaac

SEQ ID NO: 299864 - DNA, 122 bp, Homo sapiens
accacaggtgtgcaccaacatgccccaccagttttttaattatctgtacagatgagatctcgccacattgcccaggctggtcttgaactcctgggttcaagtgatcttcccacaatattggg

SEQ ID NO: 299865 - DNA, 122 bp, Homo sapiens
gtaagcgggtctcagggtggagaatcactctgaaggattaaaggtggggcccttggaaaacgatgaatcctgaagcagaaagcaaagctagccacttcaatgcacttttaatggggttagca

SEQ ID NO: 299866 - DNA, 122 bp, Homo sapiens
cccatcaaattcctccttctgggacctcacgttgcacttaaacagattagcaggtaattgcgttgcataggttatctcccagcctatatcttgaacatttccagcctgaagacagggcatac

SEQ ID NO: 299867 - DNA, 122 bp, Homo sapiens
tgcctggctgtgttcagaaggaagctggcctgtgtgcttctctccggtgggctcagccgacgtgtgagacttgttctgttaccaaatgaaccgggctgccacgctgtgacaggcgtttgtcc

SEQ ID NO: 299868 - DNA, 122 bp, Homo sapiens
gttcatcggaggtctggtgggcgccgcgcggaagaacctggcctatcggcataacttccgcggctgcatagaaaacgtaatcttcaaccgcgtcaacatcgcagacctggccgtgcggcgcc

SEQ ID NO: 299869 - DNA, 122 bp, Homo sapiens
tgatctttttaccgtcttcctcaattccttcccatactttttcttcattgttttccctatcgctgtcacgcaacagtttcttttctgtttagaaaatttaatttaactgttttgtaacctga

SEQ ID NO: 299870 - DNA, 122 bp, Homo sapiens
aaaaaaaaaaaacaaagtaaaagtaaaaaaagaaaggaaaatgttgaagaaactaaacatcgacaagaatacagagcacctgaaactttcatataattggtggcaagactgtaactgggaat

SEQ ID NO: 299871 - DNA, 122 bp, Homo sapiens
ctggaaccgccgggcaggatcctccgccccctagaacctggagacagcggcggtagggtgcgggggaccgggaggcgaggagaggatggggagaaatggcgaggggaagagctggccggttc

SEQ ID NO: 299872 - DNA, 122 bp, Homo sapiens
cgttgggaggggcggggggagtgggcggggccgagatgggggcgtgcgcgctgacaggagcgccgggggagtgagagacgcctcctggcgggagctggcggctgtggaccccagcgggggcg

SEQ ID NO: 299873 - DNA, 122 bp, Homo sapiens
cctccggcggcagcttcagctcccctggggcagctctgatgcggggcaaaggcaggaagacgcccatgtgccatggcttctgcttcttcccaatgaactgcagttaattaaacaacacagac

SEQ ID NO: 299874 - DNA, 122 bp, Homo sapiens
ctgcaccctcctgtctgggtggtggatgtgggtttgagaagtaggagagcagggtggtaccgtgtgggctcttaccctttatgtgattttggacaacagtgccttccattaaagttcttttt

SEQ ID NO: 299875 - DNA, 122 bp, Homo sapiens
aagtgaggagcgtctctgcctggccgcccatcgtctgggatgtgaggagcccctccaccccgctgcccagtctgggaagtgaggagcacctcttcccggccgtcatccagtctaggaagtga

SEQ ID NO: 299876 - DNA, 122 bp, Homo sapiens
ttttttccaaggacaattcagaacggtctgacaagggatttttttttttttcctgcctttcggcctcagaggccatctgggaaaaagagtttagaatttccctgccatttccatgccgtgct

SEQ ID NO: 299877 - DNA, 122 bp, Homo sapiens
cctggaccaggtcttgacctgctcctatctcctctcccctgtctgtagtaccaaggcttccgggtccagctggaatccatgaagaagctgagtgacctggaggcacagtgggcacccagccc

SEQ ID NO: 299878 - DNA, 122 bp, Homo sapiens
gtgatgagcgaccgagtccccgacagcatcgtcaagggcacaggtacggtggctcggtcccgccctcactcaccctgcagagggcactgggcctgtcatcaagggcatgggtacggtggcat

SEQ ID NO: 299879 - DNA, 122 bp, Homo sapiens
gagcgcctactgtgtgccaggcgttgtctggggacacggctgtgaaccacttcccagctccgtcttggagctgacattctggtagagggaaacacttgaattggactgcatgaaatgcccca

SEQ ID NO: 299880 - DNA, 122 bp, Homo sapiens
agcaggatgtccatgacggccagcattgagaggaagaaatacatgggcacatgaaggttacgttccatgacaataaccactatcaggatgctgtttcccaggactgcagtgatgtaaatgag

SEQ ID NO: 299881 - DNA, 122 bp, Homo sapiens
aaaaatgactactcttccctgtcagcatagtctgtgtctctgggggccagtgggaggaagcgacccctggagtttgctacagaaaagccccaggcccaagcctttctcagtctgtagcttcc

SEQ ID NO: 299882 - DNA, 122 bp, Homo sapiens
gttatcccgtcgggtgaaacgctacatttaaatccccgcttgtgaggggactgaggggtgcgcaggtgtttcctggtgtgtacaccaagaacacatcttggcgaggtttctctagggtgcat

SEQ ID NO: 299883 - DNA, 122 bp, Homo sapiens
tcctactcatgacaggatgggaagtcggacacacctctttataacccctccctctataatcgccattagattttctttcctaagggttaaacagaaaccagcccttttgaaagactcactcc

SEQ ID NO: 299884 - DNA, 122 bp, Homo sapiens
atgcacatacagagtcagtatttaagcaactgaaatgtatgctgaacagtagccagttcccgtcccttagcaaagtcatttccctgggattgttcatctcccatggcaacaatacacagtag

SEQ ID NO: 299885 - DNA, 122 bp, Homo sapiens
tggagggagtcactttctgcaaagtgcgttggagaggactgggccctgggtccgggctgtcgaagcaggaagtggatgtaggggacaaaagctccgcacctgccaaatgcgagaccttagag

SEQ ID NO: 299886 - DNA, 122 bp, Homo sapiens
cctcactggccctgccgctctaccagtacaccagtgagtccaccccgcgcctccgcagcgcgcccagctgcatcctcctggccatgttcctcgtccactactggcatcggtgcttaatttac

SEQ ID NO: 299887 - DNA, 122 bp, Homo sapiens
ttcagctgtagagtcattaaccctaaactccttgttcatggaatcaacagccgactgtgccgtcctcaccctcggggcgctgccctgtggagggaacgtggtccattccggagcgcagctct

SEQ ID NO: 299888 - DNA, 122 bp, Homo sapiens
ctgaggcccagccctaagcacagacccaaaaggcctcctggaagttgcagcctctcgggccgggcaggctccctccgtggaggcttctctgggttacctgagtgtgacttgagaatcccacc

SEQ ID NO: 299889 - DNA, 122 bp, Homo sapiens
ggattgtcagggtcagaggacaatgtcctctgaaatccaccagtattttactggactttacggtttacagtttaccaggtaccttacagtttaccaactgctttccagtttataatttacca

SEQ ID NO: 299890 - DNA, 122 bp, Homo sapiens
aaaaaatctctggagtgagatcacgttggagacgttttggaaactgcccttttgcctgtgcgttatagtacatgtgccacagcaaatctgcgcgcgccccagagtgggaatgggtcttcctg

SEQ ID NO: 299891 - DNA, 122 bp, Homo sapiens
agccctttaggtggggttggacttgctagtggcacctaacctccatccccagacccttcccgtctctgccccactgcccatctgttttttccaggttccttagagagaaaaaaaggcgtttg

SEQ ID NO: 299892 - DNA, 122 bp, Homo sapiens
agttacattcattcatcttcacatcggcgctgctctctgccgtggttaccgagaaagagtcgaggctccctatcctgctgtggtgaatggtgctacacagaatggaacagcaaaaacatcta

SEQ ID NO: 299893 - DNA, 122 bp, Homo sapiens
ccttgcttgtcctctgtcctgcaatcaaggtgcacaaaaagcacatgtatttgtgaatgtcggaattgtcatacggtgtcacttgaagaagactcactctggaattaagactgcagtgattt

SEQ ID NO: 299894 - DNA, 122 bp, Homo sapiens
cttaggctttatacaccttgccagccaatgaccgcgccgtctcctttccggtcggcgatccgaccaatccaagaaggttggtgcaatcttcggctctactcggctgttttcgctgatgcggg

SEQ ID NO: 299895 - DNA, 122 bp, Homo sapiens
gttgtacaaatagcaaatgttgcacaaattgctgtccattggggggtggtgggaggctgccgccatgtggcagatggaaggtctctgttccgggagcgtgtgccttagggcatgtcctcctg

SEQ ID NO: 299896 - DNA, 122 bp, Homo sapiens
agtgcaaactacaagccccagaaggcaatgcgccagcagtgatgggagtgggcgcggaggcgcgggctccccgactacgcctgcgcagcggggctgagttggagaacgtcttagactacaag

SEQ ID NO: 299897 - DNA, 122 bp, Homo sapiens
tgtgaccattactgcccagaatccaaagctcagaagccaaggccggctggagtgcagtggcggctccagaactcttgcctagaggaaatttgagggggcatttggagactggccccaaagtc

SEQ ID NO: 299898 - DNA, 122 bp, Homo sapiens
atcggagccaggactctcacccttcagtgttatgctgccttaatcaggcacacatacaggcggggagaggcaggtttccggacaccagactaggctggtgccggtcaggctacaccagggaa

SEQ ID NO: 299899 - DNA, 122 bp, Homo sapiens
gcacgcacgcgcgccttagtggggcgccggcccgcttcccaggcagatcgcccttggcctcgcctctggctcttttatttgcacaatcaccccgaggtgggtgatgctattgttcccacttt

SEQ ID NO: 299900 - DNA, 122 bp, Homo sapiens
ttggcctttccggtcatgcccgagaggaagctgaaggtctgtcgcagggaggagcctacccgggtacctgaatgtccttccagctggctgcagctgcatagagaaaaagaagacatgaggag

SEQ ID NO: 299901 - DNA, 122 bp, Homo sapiens
cttcattaatccacaaaagaattgatgtgctttcttgggagtatcctgtcttgtttgatccgcatgatcaaagagtttttaatgcaagaatcatagagtgttagactggttacaaaaatggc

SEQ ID NO: 299902 - DNA, 122 bp, Homo sapiens
gctacttagccaaggctgtgcatgccagccggagccaacagcttcagcaaacctgccctccggggagagtggatttcattgttttcaaagagatacaggaaatcagaattttccatccttcc

SEQ ID NO: 299903 - DNA, 122 bp, Homo sapiens
ccgggagcagcgccccggaactggcgcctcacagacagcgcggggcggccgccacggtggcgggaaggccaagcgctggccctgggttgttcttcacccataaccccttcacctgtaacccc

SEQ ID NO: 299904 - DNA, 122 bp, Homo sapiens
aaaaattacacagaggaaattctgggccatgggggtgcaagcagatagcctgccttgtgacgaaccacacaacctcaggttgcacactgggaaggggagatccaggattgtgaaagctgatc

SEQ ID NO: 299905 - DNA, 122 bp, Homo sapiens
cggacaaacttgccgaggattggctgagccttcagttttgaaaatcatagttttcgcccgcgctgcgccgcctggttgctcctcccgtgcggtgagtcccgaaggcccggagccaagtgggt

SEQ ID NO: 299906 - DNA, 122 bp, Homo sapiens
tgtagtgagtgccgttgttggtcttctcgttgccttgttcctgaaaagacaggcagcgttcgattcccttgcctttcagccccccaaaatgagggaaagaggagacagtgaatccccacctc

SEQ ID NO: 299907 - DNA, 122 bp, Homo sapiens
agcctacaccaaagtgctcatatgatatgtcacccaataaaaagtggtcagatggctacacgtatgacattaaaaagcagaaacacattcatccttcaggttcgcctttaccttgccatata

SEQ ID NO: 299908 - DNA, 122 bp, Homo sapiens
ggggaccggtcaccgaatgcgcgtcaaagttcgccgcgtggagggtgaagaaagaggctgcgcctcaagacttccagaaacgtatcctgtgattgcagccagcaggctttctgccgagtcca

SEQ ID NO: 299909 - DNA, 122 bp, Homo sapiens
tgctccacgagactcactgctccacatggctgagtgctccacgcgactcactgctccacgcggctcactgctccacgcgactcactgctccacgcgtagcttctgacactgccgagcatttt

SEQ ID NO: 299910 - DNA, 122 bp, Homo sapiens
atttctgttcctctccagataaactggggaggcagaggggggaggaaaatctgggagaagcgaggctgtcctgggcgggggtaggggagcatcccgcgcgcgtgttcctgcatgtggctgcc

SEQ ID NO: 299911 - DNA, 122 bp, Homo sapiens
ttggggtgaaaactccagatcctttaatgatttttcctctcgaatccaaaccagccagggcgtgaactgagggcggtgagggggtacgggcatctccctgcatgcaacgcggtttttgtata

SEQ ID NO: 299912 - DNA, 122 bp, Homo sapiens
cacgctttccacacagccatgctcaggcctccgggcactgcaggcctgcaggggcctccccgcctgggatctgaggtgctctccaggtgcgagctgggctcctgagcattgcaggtgccggc

SEQ ID NO: 299913 - DNA, 122 bp, Homo sapiens
ctccggccaggccttgctgcgctgactgcaacacaggctgaaggctcccctgccttcagtcggccgagtgacctgcacccctcccacaggcccggtgacggctatgactgtgctcccgaaca

SEQ ID NO: 299914 - DNA, 122 bp, Homo sapiens
ccagctactcaggaggctatggtagggggatgaagctgcggtgagatgagagcacgccaccgtattccagcctccaccagagggagacattgtctctggatactgactggcctaggggttaa

SEQ ID NO: 299915 - DNA, 122 bp, Homo sapiens
gccctttccctcactgctccctggctggccccggggaccgaggcaggaaaggaaaacatgcgcctgttgggctggggcccactggttgcagctggagccttcctcacctgtgtgagctcagt

SEQ ID NO: 299916 - DNA, 122 bp, Homo sapiens
tcgctggggctcgcacttcagcttcccctcccccggcgccctctggggctccgagcccggcgggaccatgttcaccagcaccggctccagtgggctctgtgagtaccggcctccgccatcct

SEQ ID NO: 299917 - DNA, 122 bp, Homo sapiens
gatgatctgcctacctcagcctcccaaagtgctgggattacaggcatgagccaccacccccggcccctctgtgctatctctgaaggcagcgacctgtctccagcccacaggatcccagctgc

SEQ ID NO: 299918 - DNA, 122 bp, Homo sapiens
aggagactagggtggtggcggtgggggtgccagcggctgagccggagccggagccggaggcgggggaggggaagagggcggccggggctgcgagcgcgcaaggctggaacatgagccgggct

SEQ ID NO: 299919 - DNA, 122 bp, Homo sapiens
gacagctggcagcccgataagggcctgctcgcccgagataatggcagtgggcaggcgcctcgcggcagtttagaatttcttgggtctccaagaaaggttctattaagcccactgaccccaat

SEQ ID NO: 299920 - DNA, 122 bp, Homo sapiens
ggagccagcctttctcgaaggatttctcagtctgtcagactgggctacagaaatgtgtgacgtgccgggaagtgtcagggaaagtgtggctcaggagtgacctgggttgtaatcttagctct

SEQ ID NO: 299921 - DNA, 122 bp, Homo sapiens
atgccggccgtgtccaagggggacgggatgcggggcctggcggtcttcatctcggatatccgcaactgtgagtggcgggggcggcgtggggccggggccggggccgccggcggagacggggt

SEQ ID NO: 299922 - DNA, 122 bp, Homo sapiens
ccgggggagccctagcaaccttcccgcgtccttagttaccaaacaggaaacgctccagcccgaaggcgaaacttccggttgagaactccctgcctgcaggccgaagaatctttttcttacct

SEQ ID NO: 299923 - DNA, 122 bp, Homo sapiens
acagaagtggaaaactgaatctgtgggtcagcggaactggaatccagatcttttgcaggacgccctggggggatggcacgtagcccccagagccgttggccaccggacggcctcctcgggtg

SEQ ID NO: 299924 - DNA, 122 bp, Homo sapiens
aattggaagatttaacattgtgaagatttcagttcttttcaagttgatttgtaaattcagcgcatgttcaataaaaatcctcgtaagatttcaagggcgcagtggctcatgcctgtaatgcc

SEQ ID NO: 299925 - DNA, 122 bp, Homo sapiens
gagcctccgcttcctcccctgaaagtgcaggtgatgttgtctacctgcgggtctgtggtgcgggaatggaggaagtgcgacaagagggcgcaggacggggcccggagcctgccatcctctcc

SEQ ID NO: 299926 - DNA, 122 bp, Homo sapiens
tctctattaagggctttattttatatataagaaaaccgatgcttagagagatgaagtcaccggcccaaggtcacacagcaggttcaaaggattaggaattgaattccggccaatgtgggttc

SEQ ID NO: 299927 - DNA, 122 bp, Homo sapiens
tgtgtggcgtgcggcaggggtcgttctcagccaacgaggcttggtggggcgggtagcctgcggtgccccagacaccgcgtgcaagcccacaggtccgttaacccttgcatggagtgctggag

SEQ ID NO: 299928 - DNA, 122 bp, Homo sapiens
aaacagatgtcctgcaagagtcgtttcttgactgtgttcgctaatttatgtcacaagcatcgtgtgcgccattagccatccgggattgtaacggtgcgcgcgtagggaccggacagcggggc

SEQ ID NO: 299929 - DNA, 122 bp, Homo sapiens
cgtgatccgcccgcctcggcctcccaaagtgctgggattacaggtgtgagtcaccgcgcccggccagttattcttaactaggtaatacactcctgaggagcaaaatgtattttaaaagatat

SEQ ID NO: 299930 - DNA, 122 bp, Homo sapiens
actgtttcccaagctagtctcaaactcctgacttcaagtaatcctcagcctcccaaagtgcgaggattacaagccgggttgttttaagaactgctagtaataatcatgatagtagtagtaac

SEQ ID NO: 299931 - DNA, 122 bp, Homo sapiens
tcaagggcaatgtctttcatccttattttcctagggtttggtatagcatatggaaaataacgggtcttcagtaagtatctactgaaagaactgatgggtgagtgggtctaaattctgttttt

SEQ ID NO: 299932 - DNA, 122 bp, Homo sapiens
caagctaagggttgtgtttacactatgatgattaatgatctcggcctaaatgtgctgtttcgctgatcttgagctgctcagttggctagaaaaaggagggatggaacaatgtttgagcaacc

SEQ ID NO: 299933 - DNA, 122 bp, Homo sapiens
aggagaacacactgaggagagaactccgcgtgaacacaatgcgggagaactccaggtcaacgcacggagaggagaacgcctgctgaatgcacggggttggagaacgccggtgaacgccggtg

SEQ ID NO: 299934 - DNA, 122 bp, Homo sapiens
gactgtggggatcctggtaggggaggccgctgctgccgccgccgccgctgccgccactgccgcccctgatgttgtggctgttggtctgagagctgcagcctccgccattactgtttatccca

SEQ ID NO: 299935 - DNA, 122 bp, Homo sapiens
ttcaagtgattctcccgcctcagcctcccgagtagctgagattacaggcgcccaccaccacgtccggctaattttttgtatttgtaatagagtcagcgtttcgccatcttggcgaggctggt

SEQ ID NO: 299936 - DNA, 122 bp, Homo sapiens
agaaatttattgtctcacagttctggaggctggaattctggattaaggtggcagcagggccgtgctccctttgaaggctttacaggagaatcctttgcctcttcctagcttgtggtggttgc

SEQ ID NO: 299937 - DNA, 122 bp, Homo sapiens
ctgctgggatgttcagagggtgtgtttcctgcctcgcgcggtggcaactggcagctggggcgctcagctggccgtggtgacaaagagtgacagcagtgccaggcgcacccgtctccacgcgg

SEQ ID NO: 299938 - DNA, 122 bp, Homo sapiens
ttctcctcccaggcgagcacgaagtctaacccatcgcggggtcagggggacagttaggagcggtctgaccccgctctgtcccacttttatctgggtggaaaaggggatctgagtccatcagt

SEQ ID NO: 299939 - DNA, 122 bp, Homo sapiens
cgtgatccacctgcctcagcctcccaaagtgctgggattacaggtgtgagccaccatgcccggccacatgtgtgaatgtttaaaacacaatgttgggtgggagaggcaaattacagaagggc

SEQ ID NO: 299940 - DNA, 122 bp, Homo sapiens
cgtcccgggcaggttagacttctgtgagccgcagccccgaaactgaggttggtgcagacccgtcctgggagccaggaggtgggacctgtccccgccagtccgcgagctctggttaaggccag

SEQ ID NO: 299941 - DNA, 122 bp, Homo sapiens
tgtttctggtggcctggaaggtggcagaggacagagcaaatgccaggcctgggaaggctgcggctcgtgggtacctctgctgttgaggtgtggcccatctaagcagaggagagaaccaacgc

SEQ ID NO: 299942 - DNA, 122 bp, Homo sapiens
ttcttccagtcacctcggcccggatcgggaagtgtcaagcgggcgctcccccatctccgccgctattaccactgaacccggaccccctacccaggtccagggccagccgccatgacgaacgg

SEQ ID NO: 299943 - DNA, 122 bp, Homo sapiens
tacttttaggaagctgggttgatgtgatttctctagaagcatctttcagacttgaatccacgtgactaagttgtatgttcagttgaatttttcagtgagaatttagcatcgtagttttgaga

SEQ ID NO: 299944 - DNA, 122 bp, Homo sapiens
tgatttccacacatctctctgctgtcccacctgaccacaagaagaacccgaggccccgggcggtcaggagactcagtggctgtcactcactgggcagtaaagccagtaaatcacccaccttc

SEQ ID NO: 299945 - DNA, 122 bp, Homo sapiens
ccaaatggaaactgcttagagctactttccatctgaaaataggcactgcttaaagaacagcgcttcatactatgacatgtgatcatttctgattgcgtgtggttataatagcctgtataaaa

SEQ ID NO: 299946 - DNA, 122 bp, Homo sapiens
ccactggcagcaggaaggggctccgtgccaattgtgtgcaaatggcctgcgcggcccactcgaatctcttttcagaacagcagtcctttgccatcgatcctttgaagtgtgagttttggaac

SEQ ID NO: 299947 - DNA, 122 bp, Homo sapiens
tatagggggatcctgcaagcagaaatctgtggtgggcgggcggcaggtgagcaaggagaacgtgtctgtaaaggaagcacagggaacaggtggtggctttgtaagacagttggaacccaagg

SEQ ID NO: 299948 - DNA, 122 bp, Homo sapiens
ttctttttcttgaaagcactgtcttcagtctcctcacttgtccctttctcctctggcaagcgtaatgctatcaacatttgaaagtggcctgattccctggtgtctggtaaatggccttgctg

SEQ ID NO: 299949 - DNA, 122 bp, Homo sapiens
gggaagcttgtcactgttttgggccagtcaagtgtttgtcaccgccaaattggctctaaacgttgtggcttccaaacacttcagggacatttatccttaccgagcgtggccttgtacggctc

SEQ ID NO: 299950 - DNA, 122 bp, Homo sapiens
ccggcactgtaccttgaatttacaagccaagaaaaagactcagactgaaaagaagaccttcggtatcatcttcctgaaatacatcagactctacaaatgagttagaagacccagatccaatt

SEQ ID NO: 299951 - DNA, 122 bp, Homo sapiens
cgcagctggcagctgagggggacgcagtggtctttagtgccccccaggaggtccaggtgacgaagataaaccctccacccccgtacccaggaaccatccccgctgcccccaccacagcagca

SEQ ID NO: 299952 - DNA, 122 bp, Homo sapiens
agacaaaggccattctcctcaggaccccaagggggagctgcagggccagaatgtgctgaccgtccggtactcgctggagctgactgctgcccgctttggcttggatgtggaggccgtgcgga

SEQ ID NO: 299953 - DNA, 122 bp, Homo sapiens
cgtggagattgcttgcgctggggtgccacacttaggctgagctgcaggttttcgcacagtcgcgagttaacctctgcttgctccagaggcctcgtcctaatccacctcggctgacggcgcgg

SEQ ID NO: 299954 - DNA, 122 bp, Homo sapiens
ggaaaaaagatagtatatacagggtttggtgctatctaaggttcctggcatccactggggcgtcttggaatgtatcccctgaggataaaaggtgactactgtatatgatagcttgtatttat

SEQ ID NO: 299955 - DNA, 122 bp, Homo sapiens
tgggccaaggacagggggctgcaatgcaaagactggaacttgcagcacggcaaactagagcgtggcaagattagcgtttcagactccagacaaggccacttccctctccaggaaagacgatc

SEQ ID NO: 299956 - DNA, 122 bp, Homo sapiens
gacttcccactttttgttctgaaaggaattaaggactgcaggtttccagctctgtcttcccgaggccattatgaacagattaaatggaaggacaaattctaaataactgggctttcaacatg

SEQ ID NO: 299957 - DNA, 122 bp, Homo sapiens
gtgggcgcgcggcgccgcggccattggcccgaggcacgtgtccaggagaccggcctgcgacgtcactcgagggggctctgttaaaaataagaacaaaaatccagagtgaaagtgtctcaggt

SEQ ID NO: 299958 - DNA, 122 bp, Homo sapiens
ctcctgaacagggttgactggtggggatccttcagggccgagaccaggtggcgaacccgccgctgctgttgcagccaatagagcatctccactttgtcactcttcatcttgtccaggtaggg

SEQ ID NO: 299959 - DNA, 122 bp, Homo sapiens
tcgctttgtaaggtggatgttattatcctgtcctatcgctggagaaacaaattcaggacacgtaagcaacttgcccagtgttaccacccacagagatgacgtcagtgtacttaaagaataca

SEQ ID NO: 299960 - DNA, 122 bp, Homo sapiens
actctggaggacctgagggaagggtggttgccgtgaagcctctctcacccagggggaatccggcctagaaaatgtgtgtagggctctttagaaactacagacacttcttcagtcgagactag

SEQ ID NO: 299961 - DNA, 122 bp, Homo sapiens
gccgccgcacggagaccggcgagaacagaaggtcagaggcgggcggaccgagctggtcagcgccgggccgcggcggccggggcggggaccggggaggctgcgcggggcccgccccctacctt

SEQ ID NO: 299962 - DNA, 122 bp, Homo sapiens
tggttacccgtgagtcacctcgctgtgccccctgcccagagcgggaaccctggctgcgcacgccctcaaatatctgcaggtgctgttcacaatcgccatagggccggtgacatacccaggaa

SEQ ID NO: 299963 - DNA, 122 bp, Homo sapiens
gctgccgagctccaggtgacacccacggtggttcgtggacactcaccatgaggggaggtgcgtggcgtggtgaagcctgagggtacactggctgtgccatgtgcatgcccacgtccaggacg

SEQ ID NO: 299964 - DNA, 122 bp, Homo sapiens
acaggctgcctcgggagcctccctgctgtgctgcaggcaagcaaaataacaccaaatgcacgtttgcgtttgccttcttctacggggaggtgtttggggactggagccagaagatccttttc

SEQ ID NO: 299965 - DNA, 122 bp, Homo sapiens
tgcttattagtagaaaaaagagcaatccactgaaagccgcagcaccatctggaggaaaatcgatgtctctatatttaggccagatgggagcagcgtcaacggaaccgagcggcacatgtttg

SEQ ID NO: 299966 - DNA, 122 bp, Homo sapiens
tgttcctggcttttcgttccatcagttggaatgagaatgtttatcaaagaatggtactcacgtggctttcagatgtccttgaagaaaagctgctttctccattgtatttattgcaagagcag

SEQ ID NO: 299967 - DNA, 122 bp, Homo sapiens
agctggctctgcgaatagtgcgagtcttccaccagctccgtggagccgcagtccgggcagcggcctctgcctggcatctcacaaccggccccaaagccgcggaagccttcagagactcctgg

SEQ ID NO: 299968 - DNA, 122 bp, Homo sapiens
tagcaaagcaagtgttgaaacttaacactgaatactaaactgattccctaccggatctgccggaagagaagcatgcagccatttgggaagctgagggtcaaggtcatttatattccaggtat

SEQ ID NO: 299969 - DNA, 122 bp, Homo sapiens
atctggagctgcctctgaactaagcgtcgccttatgccaggaaggcccacaacagggccccgccttggcccagcttgtcctttgtgcctggaattgccgaggtccttgctgtctttattttt

SEQ ID NO: 299970 - DNA, 122 bp, Homo sapiens
ctgatgctgcagtagacttggtgcactcgcgctgtcgtttcggtatatgcctaggggtggcgcggctgggccctgtggaaactgcttcacttctgaggacccacccgactttttcacagcac

SEQ ID NO: 299971 - DNA, 122 bp, Homo sapiens
tatgacttaggtgtatatgcagttgcaaagaaaacctgaggaccttgaagtggggctgtacggagagtatctgcccatttccctggtccgtgtcttcatggaaacaaatactagacaaaaac

SEQ ID NO: 299972 - DNA, 122 bp, Homo sapiens
ggacgggggtttaggagaacggcgaggagcgggcgcagaagggtggcggggccgccgggtcgttgcgcggcagttgcgtccggcctcttgcgcgcggcgcccgggaaggggcggggccgagg

SEQ ID NO: 299973 - DNA, 122 bp, Homo sapiens
ttaggcaaggaaagaggacctccgtcttccggtgcgcgtagaaattggggctggagactgcgcgcgccggattttcagctgctccgcccagctcagccctttgctggcgcgccgggactctt

SEQ ID NO: 299974 - DNA, 122 bp, Homo sapiens
acccgtggacggccaatcacaggcgggttttccggctcttcctggtccctactctcgcctcgtgctgagtcctcgaatcacctgccatggtaggagccgccgcacttgttgcacattttcgt

SEQ ID NO: 299975 - DNA, 122 bp, Homo sapiens
ctccctggccagggaggggaccctcgggatcctgaaacacccctcccacctgccagtacccgccaagatgggtccctgatttgctgtgtggccttagaccagtggctgccctctctgggcct

SEQ ID NO: 299976 - DNA, 122 bp, Homo sapiens
gccaggaaaagagttgctggagccctatacatttttaatttcgatgaatctagacaccgtcggcgggtgccaggcttccacgagaacaattgacaccctaactgcttcaagattaaggcagg

SEQ ID NO: 299977 - DNA, 122 bp, Homo sapiens
aggcggcgctgtccctgatcgagcggcgggagcgaggtgggtccgggttgggcccgaggtcgcggggggaggcggacacgacttcgcgggaaactctgtacacggccacttccctctcaccg

SEQ ID NO: 299978 - DNA, 122 bp, Homo sapiens
gctgcgtcggcctgagcagggcttagtttagaagtaatttcctgacgttgccgagggagccgcagtcgcctcagatccggtcggcggcggcggcggtggcggcggcggcagcgcgcctgcgc

SEQ ID NO: 299979 - DNA, 122 bp, Homo sapiens
gattcttggaaacgggccacagtgattcctctggccacattcagggtcaggttttcagttcgtcttcctggtgtttccgcgcctcattctagggggaggtttagtcgttcctttctctgctg

SEQ ID NO: 299980 - DNA, 122 bp, Homo sapiens
tgagataagcgaggagcacataggatgtcatctccacctcagcagagggagcctggggttcgtaaaaatgccccactggtgccttgggtttctgagggcgctcccaatggacagagttgtct

SEQ ID NO: 299981 - DNA, 122 bp, Homo sapiens
tgtccccgtcccggacgccctggttctctgtgtaggtcgcccgggccccgtccctcctggcgagtgccctgccctacccctctggccgcctgccagtccgcctgttcctgtcgctcgggctc

SEQ ID NO: 299982 - DNA, 122 bp, Homo sapiens
gtgtccctgagtcgtgggcaggtaagagggtgggtggagacccgtgttcgcagctgttgtcgctgaggccgcagtcgtctttccaggcctacaggatttggcttccagcccctgctgccttt

SEQ ID NO: 299983 - DNA, 122 bp, Homo sapiens
agacggcggcacggccaccagactcagctaaagggcggagtcgcgaggagaagccagtggcgaggggaggaggaggcctggatctccccgcgaaggctccagtccggcttttgcctccgact

SEQ ID NO: 299984 - DNA, 122 bp, Homo sapiens
tagatattgccatggcatttgtaaactgtcgtggtgctggtgggggtggtttttagcgtgcgcatgcattatgatttgtgtatgatagtggtgaaggttgcttttgttgccatcttggttct

SEQ ID NO: 299985 - DNA, 122 bp, Homo sapiens
gcatcagggttggcttgggagcatgagaggtgagcccagggctaggcctgggccaggccccggcagcactgctacttgggaggagccacttcacctttgtattagttattaaaaaatataat

SEQ ID NO: 299986 - DNA, 122 bp, Homo sapiens
cttattttttacctttattattgaaatataactttgcagcatgtaaaattctaggttaatcgttgtttttcagcagttcaactgtgtcgttctagtgccttttggcctttattgtttccagt

SEQ ID NO: 299987 - DNA, 122 bp, Homo sapiens
agttctttgcataagtcccatggttagtgaacctacactccgttcttaagtaaggagctgcgtttttatgggtaaaatggagtagaggcagcattagctggccccgtctctgagtaatcccc

SEQ ID NO: 299988 - DNA, 122 bp, Homo sapiens
ccattggccacctggtgcccctctctccctggatttatacacaaggcgcctgcctgggatcgcctgggtggagtctttcttgtcgcttccccttttctccctctaggaaatgagcccactcg

SEQ ID NO: 299989 - DNA, 122 bp, Homo sapiens
tgctccacggcgcccagtcccatcaccacccaagggctgaggagtgtgggcgcacggtgccgttctcgcaggcagctccacctgcagccctggtgtgggatccacttggtgaagccagctgg

SEQ ID NO: 299990 - DNA, 122 bp, Homo sapiens
catgcctatgagtcataaatgaccaggtggaagacacagtggatgaggagacccagtgtacggtagcagcaaacaagagaaaacacttaggaacaacctaaccggcattcaggacctctgtg

SEQ ID NO: 299991 - DNA, 122 bp, Homo sapiens
ctgggcgcatcagcccgctctggcgagcagatgtcaatctgaggccggccgccctcttcccggagactcccgtgccggcccagtgggacgctcgcctctttcacttgagccttgacagcagg

SEQ ID NO: 299992 - DNA, 122 bp, Homo sapiens
aaatctgacagtaaatagggcctctctccctaggaagatatacatcgccactcctaaaaacgtgtgcacagaatttcagggattccctgatgcccagggaggaaccctaagttatcacctct

SEQ ID NO: 299993 - DNA, 122 bp, Homo sapiens
acctcgtgatccacccgccttggcctcccaaagtgctaggattacaggcgtaagccatggcgcctggcctcattcgtaatgtctttaaactggaaacagcgtaaatgtctgtcagctgtaga

SEQ ID NO: 299994 - DNA, 122 bp, Homo sapiens
aagtgcagttgcaggacctgccaggagcccgcagggctgcgggtggttcttgcgtaatcgcgccaagaaagacctggttccagtttcagggacaactcgcccataaacttctactgcgcaac

SEQ ID NO: 299995 - DNA, 122 bp, Homo sapiens
ctcaaaccactgggcagatggagttggctttactaagatagagaggcctgagtgggtcagcgttcagtgaagggagccataaactgagtttgggaattttaagttcaattcacataacttat

SEQ ID NO: 299996 - DNA, 122 bp, Homo sapiens
agggattgaaaaaaagaccagcacgtgactgatgagcatgaatcagagggtgaggtcagccgccagctgggctgtttccctgccgcagagaaagagaaaaaaagaacagctcttagaggcca

SEQ ID NO: 299997 - DNA, 122 bp, Homo sapiens
ctttacacccccagggagggaaagttggaagcccagtgaatggtcgaagtcctttctgagcgcagctttcaggattaaagttcccggattcgaggtaagagtcagtctctctcactctctct

SEQ ID NO: 299998 - DNA, 122 bp, Homo sapiens
tttacttcccagaaaaataggagctaggattgcagcagagccaagccctggcagccctttcgggcgtccccaggcagtgccctgaagcccaggctcgccttttgtgcttcctgcgtccgctc

SEQ ID NO: 299999 - DNA, 122 bp, Homo sapiens
ccaaccccctacctggcctatagtcatctgtgaggtggcagccaaagttgtagatgagatcgaggtgacgtcgctcctgtaacctgatgcccacatctcggaaggcatcctgagccatgagc

SEQ ID NO: 300000 - DNA, 122 bp, Homo sapiens
tcatctcgtgtatgagaggttggatctgagacgtcttttgagtctggtcgtagtgaaggacgcaaggtgtcaattctagtgagaacaatttccaggaagccatgttccgctcttgagcgagc

SEQ ID NO: 300001 - DNA, 122 bp, Homo sapiens
tttggagctctgaagagcccggcgacgcctgcgctggccaggcgccgtgcccacgggaggcgccgtcctctttgtaactcgagcagaccctggcgggccagttgctatggcaatgttcctcg

SEQ ID NO: 300002 - DNA, 122 bp, Homo sapiens
tccaaaatggcagaggtaccaatgtgtttttataaataaatttcttacttatcaggcttacgttgcccatggctagggatagtactaatggttataaagcaattaaaacaatgcctgacaaa

SEQ ID NO: 300003 - DNA, 122 bp, Homo sapiens
gagggggaagaggcttcagcggggaggctgcccagggatattggccaaccagctaatcaccggagctgagacgcagaagtgaaaactgctcagcaagcttctggccccgcgccaatgtggca

SEQ ID NO: 300004 - DNA, 122 bp, Homo sapiens
gcggagggcgggcctgccccccgggacgggttctttctgcgcagccccccaggcgctcggcgcccccgcctcctgctcaaggtcaaggaggctgcttccccagcaggaaggcggactggaaa

SEQ ID NO: 300005 - DNA, 122 bp, Homo sapiens
atttcctgtctgtgccactctttgtcctgacctcatttcctgtatgcaacacactgtgcccggactgcatttcctgtctggagctctctctgtcctgatctcatttcctgtcaggagcactc

SEQ ID NO: 300006 - DNA, 122 bp, Homo sapiens
gacacgtaggcttggctttctctgggacgggcgggtcccgtgcttggaggtgaaacatttcggttggtgggaggccggcgcgctgtatctgagtgtgaggcctaccgggagggactggtggc

SEQ ID NO: 300007 - DNA, 122 bp, Homo sapiens
agagcctcagagtcaaaaatgaaagtaaactatgtatttccttattgcaaagggcggaaacgtgtaattacagattgtgaaactgctgctcagaattccagactcattatcaggaagtgcct

SEQ ID NO: 300008 - DNA, 122 bp, Homo sapiens
tgcggggagctggggagggcctggccctgccgggtcccaggccacctgggccgcagatgtcgcccatttccgggaggacctgaccccacagtatcaaaagtgtcacctcaccttcccctgca

SEQ ID NO: 300009 - DNA, 122 bp, Homo sapiens
atatttaatttcatctccagatagctttgagctgtaactaccaaactttctaaagttatacggcattctattatatgcttgaatatgtgctccatccttctaagaatgtcactgagaataca

SEQ ID NO: 300010 - DNA, 122 bp, Homo sapiens
ctgattctactcttcctgaagaactcctacttcctctttaaggtccagggcaaatgtcaccgctcatctgaagcagtcccttagctcagtgactcctctgggcaaaacaaatcatgtatcct

SEQ ID NO: 300011 - DNA, 122 bp, Homo sapiens
cctggcggttgcctagcagcggcagcgccgggcgggggcgggtggtcgggggcggtgatgcgggcgcaacgggggcgggacgcaggggcggggactgccgcggggcggggcctgaggcggct

SEQ ID NO: 300012 - DNA, 122 bp, Homo sapiens
atatatcgcttcgggcccggcgggggggcacccggacgggggaccggggagccgagctcacgcgcccccaatcgcttcttgcccgcggactcgggcccaactggttggctgccggtggcaaa

SEQ ID NO: 300013 - DNA, 122 bp, Homo sapiens
ctcttgctctcagccctggattggtccattgtggggtctctcgccagaaataaagcctctcgccaacaaagaatccctgccccaggtctgtcgtgcctaggccctggcccagagggctccca

SEQ ID NO: 300014 - DNA, 122 bp, Homo sapiens
ggtagggctgggggtcgaccgcagccgggtgcgcccctcccaggttcccccctccctgatcgacccctaccccgccccgccccctgtgcgcccgggcgcgctctcccaggaatctccggaga

SEQ ID NO: 300015 - DNA, 122 bp, Homo sapiens
cctttcctaatcaaagaaaggggtgacggacggcacctggaaaatcgggtcactcccacccgaatactgtgcttttcccatggacttaaaacatggcgcaccacgagattatatcctgcacc

SEQ ID NO: 300016 - DNA, 122 bp, Homo sapiens
taggttaagtaagggggaaaaatacttcatttgaaatatttaccatttagaacccagtcacgctcttgttgactcttgtcaccatggatacccatggcaggccacctaagttaaaagacaag

SEQ ID NO: 300017 - DNA, 122 bp, Homo sapiens
tgagctcttccacatttgtgtggcccaggaacacatccaaagaggcgttgctttgcgcttcgtgttccttgggatacagggtgtgggcagctgtgaggatccagcggtcgcccagcagggcc

SEQ ID NO: 300018 - DNA, 122 bp, Homo sapiens
agcctccgtggccaccccctcatccaaatcctcccctgtcgccacctctgatatttccaccgcctgcacctcagaagcggttgctgctgctgccgcggttgaaaccgccacctccaccacct

SEQ ID NO: 300019 - DNA, 122 bp, Homo sapiens
tttactgtcaaatagtcaattccacaggtgagttttgccagtttctcctagacactagcacgttgaaattgatttgaattgttctttttaataggaaagtaattgaagcagtaattaatgta

SEQ ID NO: 300020 - DNA, 122 bp, Homo sapiens
gctggtcatctcaactctgcgcgcatttttcctgctgcttctggtcgaggctcctcggaacgccgcgcagccctgcccgccacgtgtgtgagtgcgcgcacggggcccgcggcctcctccgc

SEQ ID NO: 300021 - DNA, 122 bp, Homo sapiens
ggccaggaactgcacgtctggaaacgaggtaactgcgctgagaccagcgcggggacagaccggtcgtgggacatggggggttccacggggggacaaggacttccaccggccataggtggggg

SEQ ID NO: 300022 - DNA, 122 bp, Homo sapiens
cttcaatgctttttgtgaagatgaagctttcagccatggaagacatgaagcccgtgggcacgtaggcctcatctgcttctgaagcagtggctttccacactgctgctgtcttccggtggacg

SEQ ID NO: 300023 - DNA, 122 bp, Homo sapiens
caggaggcttggtgatgaaaacgctctggccacagaggaagaccacaaaagcaaggccgacgcagacagtggggatcgcataaccagtgacaaagctgacgttctgctgaatataggcaatg

SEQ ID NO: 300024 - DNA, 122 bp, Homo sapiens
cgagctaccagttctagaacttatgagaactactctaaagagtgtggccatctatcagcacgaggtaaaccacttagacctcagcacttcaggggtggccgactagagaaaagaggccagaa

SEQ ID NO: 300025 - DNA, 122 bp, Homo sapiens
agttttacttcctatagctatcatacaagaacgattcaaagtgccaattgttgccaatgtcgtgtcattcatggatatgtcagtgattcttccttgctgtggacagcagccgacattcagtt

SEQ ID NO: 300026 - DNA, 122 bp, Homo sapiens
agtaaatattttaaaagcactttgtgaaacattttctcttaacgtcggagactgcagcaacgcatgggaaggatgggaaacagggtgaagcagagaagcaggacccggcagtggcaagcact

SEQ ID NO: 300027 - DNA, 122 bp, Homo sapiens
aatagtaatacttcacagtgaaattgtacactagaatgaaagaatgcataaaaagtgcctcgtaccctgccacgcacagagagggtgatacacatcggtcccctcatccagcatcttctaat

SEQ ID NO: 300028 - DNA, 122 bp, Homo sapiens
cggggaaggctggggagggaggggaagagaggggaagggaggaagaagtgccggcttcctcggctccgccctcgcggaccgattcctagactcgcccactccttgtaaactacgcggacttg

SEQ ID NO: 300029 - DNA, 122 bp, Homo sapiens
atcaccatccgggaacctggggagcgagaggcggccgcccccttccgcggcccgcgcgcccggcagcagtcgcacttacacaatggctggtaggagccacagactggagatcgcaggctgcg

SEQ ID NO: 300030 - DNA, 122 bp, Homo sapiens
cagccgagaaggggcagctggcgtctcggaggccgacacgagctgtcactccgcgcccgccggagttgccgctcaattaccaacttcaacccagggcaggccacggggcctcccgccgcccc

SEQ ID NO: 300031 - DNA, 122 bp, Homo sapiens
ttttcaggaacaggattttacacatttcccaggattggcggatctgcgctcgcctccacccgcctgcgagctccatagcccggatcctgtaccagggggatacttaggacaggtggggggaa

SEQ ID NO: 300032 - DNA, 122 bp, Homo sapiens
ccactttatggatcgcgtggtgactcgtttcattttatttatgtgtgttcctggaaaggacgctctatttccttcgtgtctctacctggtaggtaaatcggccgcagaaaagaccaatgcta

SEQ ID NO: 300033 - DNA, 122 bp, Homo sapiens
gtaacggatgaaagctatggagcccccaaatacgcgcaaatacctaaccataaaaatgtacgtgaagtttattttgtaaccttggaaattgatttacttaaagtaggctgaatagtttgagc

SEQ ID NO: 300034 - DNA, 122 bp, Homo sapiens
gacagccgctcccgtgcacttgtccagtcattcgggtggcatactgtccgggtggaagcccgccaaaataatccatttggaagggacggagggcttcgtcagaaattgccttcttgtagcta

SEQ ID NO: 300035 - DNA, 122 bp, Homo sapiens
ccgggcgctccccgctgtatggcgggacttgtagttccccagggtcgtcgtgggcggggccgcagcgaaggcgggggcgggaatgctcgggcgcgagtcgtttgctacaacttacctacagc

SEQ ID NO: 300036 - DNA, 122 bp, Homo sapiens
tgtagctgtggatgaagaagaagggtgaagttaaccagggtttgggttttgctctgggaacgtgccacaggaaaaaagagacaaaggatcagaaggtgtctgtgacctgtgatcatattgat

SEQ ID NO: 300037 - DNA, 122 bp, Homo sapiens
cctactcggacagaggcgctccaggacaaggctggggcgagcgcgggggttccctctgctcggagcccaaggaaaattcgaccacccagcctggggctggacagcgcccagaccaggggctg

SEQ ID NO: 300038 - DNA, 122 bp, Homo sapiens
gggacttggctgagtgggcaccggctgcctcatggttctcagccacagagttctagaaaacgttccacactctggagccccattgtcagccccaggcccagccccaggggtgctcccggtgc

SEQ ID NO: 300039 - DNA, 122 bp, Homo sapiens
tagcggaggagctggggtctgttttggctgcctcatcagcatcagtgaactgcgtccctgcgagatttgatacaatttaattaacctaattaaaagctctgattgcagagatgattggggta

SEQ ID NO: 300040 - DNA, 122 bp, Homo sapiens
gttttccttccccagtacccaccattgcccacctcataaatcctcaaaacacctaccctacgttggaggttctcactcacttttccagacgctgagcatctggccagtttgtcagagaggga

SEQ ID NO: 300041 - DNA, 122 bp, Homo sapiens
ctccgcgccggcggagacatgaggcgctgccggtgggccgccctggccctggggctgctgcgcctctgcttgggtgagtggccgctgggccgcgctggccgcgtggatggcgagggagatgg

SEQ ID NO: 300042 - DNA, 122 bp, Homo sapiens
atctcctccccaggagggtctcaagttgccttcctctgccgggaagggcccccactcccccgctccaggccctaatctccacccggcgtcccagtctgagcggcctggcctcagctctccat

SEQ ID NO: 300043 - DNA, 122 bp, Homo sapiens
gggctgggctgagatctctccagcagaaggatatcatcttggcagcctcggcctcaccctcggcctgcacaattttctgccgctgttcctgctttgctttttctaccaagaattgggcccgc

SEQ ID NO: 300044 - DNA, 122 bp, Homo sapiens
ttagcatacaaaaagacacttaccacttaagggatttcaagggatttaggagctgtgtgccgggatcaaatggcagagactaaatatatatttcttattatattacaacataatggtggtca

SEQ ID NO: 300045 - DNA, 122 bp, Homo sapiens
caataaaacatgctgctgctggtggcggagctccctgtccctttgccccaggtttcctcccggaggcagacagtctcccagagctgagggcttgcctctggagaccccagccccagagggct

SEQ ID NO: 300046 - DNA, 122 bp, Homo sapiens
ggtcatttgttttcattgccaccacaatttcagacattaataaaatatgcagccatcttccgtttattgccagtaacttaaaaaatccagtgtatatacttggcactatactaaattaatga

SEQ ID NO: 300047 - DNA, 122 bp, Homo sapiens
cgtaaagggggccatcccatccacagaaagagtcgcttgcagaaatgattttaaaactcccgggtgccaggacgtgaggagaatccggcagggagggacgggagaatttccaaaggtgccgc

SEQ ID NO: 300048 - DNA, 122 bp, Homo sapiens
agccaggcggagagcgctgcccgctttagagaactgttaggcggctgccgggcgacaacgcgggaaaagtgccttacacagcgtaagggctcaatccacattaaggaattaggcaggaaaaa

SEQ ID NO: 300049 - DNA, 122 bp, Homo sapiens
ttcatttgcataacgtcatctttccgcccaccgcagccaatcgcggcccgggagccggctcgctggcggcgccaggccacgctctctcattaacatcccgctcccggtggcgcaggggagcc

SEQ ID NO: 300050 - DNA, 122 bp, Homo sapiens
aagaacttctactcatagaagaagtagccctaccagaaatagctgtgcagcggggtgaaacgttttatttagagaagtgtatagacacttaacacgaaataaattataattaagaccatgaa

SEQ ID NO: 300051 - DNA, 122 bp, Homo sapiens
gggtgccgtgatgcacatgcgagagccctgaggtcccctctgagacctgggaaggactcccgtgacagttgtatgaggcaggctgggttactccattccgctggcctttctcttctaattgt

SEQ ID NO: 300052 - DNA, 122 bp, Homo sapiens
aatctgtaggctatacaggaatattatgcagccataaaaaggaaggaaattctgccattgcggtaacatagatgcaacttgagggcattatgctaactgaaataagccagacagagaaagac

SEQ ID NO: 300053 - DNA, 122 bp, Homo sapiens
tattttgttgaagtttgcggtgggcccgggggacgtggggggcgagcggcaggcagcggccgggactgttttgtttaggtctccatccacctgtggggtataaatctgccagcctcaaggcg

SEQ ID NO: 300054 - DNA, 122 bp, Homo sapiens
ctgaccgggcccctgcgggagttactgcgcatgcgtgccgtgggcccgggaggagtttgccggggaggagtgggtttggaatcggggttaaaggaaagagatccagatgtcgcacgtgacct

SEQ ID NO: 300055 - DNA, 122 bp, Homo sapiens
ggtggagagtgggagacgcatcttcatgaaatttcagaggggaactctgcccatccactccgaaccagccgcagctccacgagcatctcacgccacccctctgcatcaccagggcggccgtg

SEQ ID NO: 300056 - DNA, 122 bp, Homo sapiens
atgggcccatttgcagcccctgtgaagggagacattgagctgttgctggcagaggaggggcggctcctgggcactgcttgccaatggcctctcggcagctctgtgacagctgagctttgttc

SEQ ID NO: 300057 - DNA, 122 bp, Homo sapiens
gggcaagcctccatgcccaaacatggtcaagtctgagcacacagcctggagacacagactcggagagcaggtacccagccctgaggaaggcagctgttacccaagccctgcacctccatctt

SEQ ID NO: 300058 - DNA, 122 bp, Homo sapiens
tcctcgccgcggtttcacgtgggttttctctctcctttctgtctgacaggcctagccgcccgtgactctcacactgtctcctgcatgacgggtggcgcctcccgcagcttcccttctctctc

SEQ ID NO: 300059 - DNA, 122 bp, Homo sapiens
cgttatataatggagcagacactgcctgcgacccctgctgcaggcatgcatttgtgaaggcggttgtgattatttggtatctgtttccatgtgtcatgttgggtttgcattgaggctccgcg

SEQ ID NO: 300060 - DNA, 122 bp, Homo sapiens
catccagaggggtgacagtgacagagcgctcatggccctccacgggcaccacctggggcccgtctttgtccttgaactggaccacaaaagagtcgaactggccctcaggaaccgtccaggag

SEQ ID NO: 300061 - DNA, 122 bp, Homo sapiens
gagcggtcagtggcgctcagcggcggcgaggctgaaatatgataatcagaacagctgcgccgcgcgccctgcagccaatgggcgcggcgctcgcctgacgtccccgcgcgctgcgtcagacc

SEQ ID NO: 300062 - DNA, 122 bp, Homo sapiens
ccccagccccagccccagccgagcacccccggccccgcctgcccggcgttcccttttgtgcggcgctctcccgtccgcatccgcccgatcctctggaactccccgcggacgccggggtccct

SEQ ID NO: 300063 - DNA, 122 bp, Homo sapiens
caagatttttggtttattctttaatacttagctttgacgttgctactctgtgaagccttccgtgcctcccataggcacttgtactatgtacctatatccgtcatatatatctcagttactga

SEQ ID NO: 300064 - DNA, 122 bp, Homo sapiens
cccatccccctgcctcccgccaacctcggggcctttgcacagccggccctctccatgcagcgaatttcttccgcggggcttgtggctggcccggcccctcaggccttgctcagaggcacgcc

SEQ ID NO: 300065 - DNA, 122 bp, Homo sapiens
gcggtaacgccagtgcctgggaagacgcccgttgccaagcggactgtggtctagtggtagcgtcagtgtcaaggaaaaacacccgctacctagcagaccgggaaagggagtctccctttccc

SEQ ID NO: 300066 - DNA, 122 bp, Homo sapiens
gccaacagagtagggcaacaagaccaggatcccttcggggcattactgagcacacggcctcggtctggaattctggacacattcttcaccttaactgggggtgcattggggatttaaaaccc

SEQ ID NO: 300067 - DNA, 122 bp, Homo sapiens
agatgcggcctttctctatgtctgcagaacacaggtagtaaaatgaacctgcaggtgcaccgttattcgccgggtgttctgcaattgtcatggaggtgccacggaggggaagtcaggacagt

SEQ ID NO: 300068 - DNA, 122 bp, Homo sapiens
ggccggaaattctgacaaaaagttttggccctctggtcctaaaagcaactacttcctgatcgctcctagtcctggggtggggatgcagttctctggctgagtgccccgccggtgggctgagc

SEQ ID NO: 300069 - DNA, 122 bp, Homo sapiens
tccattcgccccgcagctgggggtggggttgggattgggacctgggcccccagtgctgtccgggtcagtgctcttggcctctttgctctcgtcgtccctggaagagtcagactttttgcccg

SEQ ID NO: 300070 - DNA, 122 bp, Homo sapiens
ttgtgaaaagaggatacaaacagtgcttattctatggaccatagaaaaatgcccccttaacgacagctgcagcaattcatggacctctatagctatgacacataatttagagagtgaaacaa

SEQ ID NO: 300071 - DNA, 122 bp, Homo sapiens
cagtgacaaaacacaagcccacatcccagggcctggagtatttgcatgcatttgcatagacggcaacgcaggtccagctaaggcctttttctacataaagtgacatcagtgcagggctggtg

SEQ ID NO: 300072 - DNA, 122 bp, Homo sapiens
tcacatccctgacggggcggcggggcagaggtgctccccacaactcagatgatgggcggccgggcagagacgctcctcacttcctagatgggatggcagccgggaagaggcgctcctcactt

SEQ ID NO: 300073 - DNA, 122 bp, Homo sapiens
ttctcctgaatccacagtaacagctgcaaacatgaactctgactgttcagatggtgccctcggtctgtcctcctcactgcctcacactaccctgggaccttcccatactttctgctgaaacc

SEQ ID NO: 300074 - DNA, 122 bp, Homo sapiens
tgagcatgagttacacgggcggcgactcctatgtgatctgagcatgagttacacgggcagcgactcctatgtgatctgagcatcagttacacgggcggtgtctcctatgtgatctgagcatc

SEQ ID NO: 300075 - DNA, 122 bp, Homo sapiens
gacgagaaatggtgatatttcatgtatacaattagctgttacacagcaacaataaaatcccgggtcttcttaaaatctaaaggaaatattaaacaagatacacatctacaggacctttgact

SEQ ID NO: 300076 - DNA, 122 bp, Homo sapiens
tatgattgtgccactggactcctgcctggacaacagagttagactttgtctcaaaaaaatcgagtttgtaataagcagaaaatattccaactcagagcgaatagtcagttcagcacagattt

SEQ ID NO: 300077 - DNA, 122 bp, Homo sapiens
ggactgagctgggaacggtccctgctggacagttccgtgctcttaatccttcctcgcctacggtctctgattattgatgcttgccgtgtgtcctaaaagggaccgcttccggtttatttgct

SEQ ID NO: 300078 - DNA, 122 bp, Homo sapiens
actcatatcaaatactcacaaatttcttttatcattattaactttgtgatgaatgcaatgcgttacagtagaaacctattaagagttgacaccaggaaagtaggtctgagtctcaatgctga

SEQ ID NO: 300079 - DNA, 122 bp, Homo sapiens
catcctgaaggacctggagcagttggccaagatgctgggacacagtgccgacgagaccatcggcgtggtccacctcgtcctgcgcaggcttctccaagagcagcaccagctctctagcagaa

SEQ ID NO: 300080 - DNA, 122 bp, Homo sapiens
ggcgggcagcgggcggtggccgggggcgggcaggccgtggggggcggaccccagagggggcggagcagggcccggcagccgagcagcctggcaacggcggtggcgcccggagcccgaggtgg

SEQ ID NO: 300081 - DNA, 122 bp, Homo sapiens
taccaaaaatagcccaagtgtcaatgcagagtttcaatgctcatcaatactaaacatatacgtttttggtggggagggagatatagttagcccttctccttgcttgctaccctcttgtttcc

SEQ ID NO: 300082 - DNA, 122 bp, Homo sapiens
actgtccggccggcagggccggccggctgctctgagtgcgtgcggggcctgccaagcccacgcccacccggaactccagctggcccgccagcgttgcacgcagccccagttcccgctggcgc

SEQ ID NO: 300083 - DNA, 122 bp, Homo sapiens
cttctaggagcattaaaaactttcccagtgacttaaagaaaccacacacatgcacgtactcgaagtgtatccctagagtggttctactgtgttggttctttctctcatctttgggagcctgt

SEQ ID NO: 300084 - DNA, 122 bp, Homo sapiens
ctaggacctcccgatccggccgttatcgccaaccgtatctgtgtggtttcgtggaggaagcgcggtggaccttgaggggagggtacgcgcaggcacaataaagcagaaagccgctataataa

SEQ ID NO: 300085 - DNA, 122 bp, Homo sapiens
gtactttgaatgaagaatgaatggagaatgggcatgttttcatgctgggaataagagatacgatgtgttagaatgtcctgtgaaatgtagcagatagctgagcgaaatcagactgcctcact

SEQ ID NO: 300086 - DNA, 122 bp, Homo sapiens
acctgaatgtagtcgcactgtatcttttcaatgatccaaacagctgactccctgggcttacgccttcataacgctggaaccccctcccgcccgctttgttcctctccctcttgcagcagatg

SEQ ID NO: 300087 - DNA, 122 bp, Homo sapiens
tgcgatacaatttcttattattcaagccagtttctgtcactgtttcctattacacagagccgaaaacaccctaaagataaacatactcagttaaatgactccagctctgtgttgacactttg

SEQ ID NO: 300088 - DNA, 122 bp, Homo sapiens
aagtgcatcgttcaataaatggtgtggaaatgtagtgcataacacacacagcgtcacaaacggccaggctgcggtgagcagtggctctgcgggcaggcggagcagcagcacagccaagaagg

SEQ ID NO: 300089 - DNA, 122 bp, Homo sapiens
aaacatatttctagacacatgcatggcacttcttgaagtgaagcactacacacagcacagcggaaaatgtccctcactccgccatttcagtcagaatcccaacactctcagtccactaggaa

SEQ ID NO: 300090 - DNA, 122 bp, Homo sapiens
aggccgacccctcgaagtagacgttgaactcggaggccggggcatagggcacgcggatggcgatggtcaggaaatccggctcctggctgaggctgaacgccggggtcagcatcgcggcacca

SEQ ID NO: 300091 - DNA, 122 bp, Homo sapiens
cacatttaatgtattttggttatagttggctaggtttcttttcctttttttaaattctgtcgtatttttgcaaggacatacactattattaattctatgtgatggttctttcaccttttggt

SEQ ID NO: 300092 - DNA, 122 bp, Homo sapiens
gtaggcataggagaatttttgtctttgttttaacctttgtcctaaacagatctgatctggcgaatcttcacatattgtttatttcctttccataggaagtgcttagcctccaagtatgggct

SEQ ID NO: 300093 - DNA, 122 bp, Homo sapiens
gggagctgagttgctggtagtgcccgtggtgcttggttcgaggtggccgttagttgactccgcggagttcatctccctggttttcccgtcctaacgtcgctcgcctttcagtcaggatgtct

SEQ ID NO: 300094 - DNA, 122 bp, Homo sapiens
cgccctcggagctgggggcggggcctgagcgcggaggggcggggccaggcctctgtggggcggggccgctgcgaggctggagtcgaaggtgctgagtcgtcgcctcccactgaagcctggga

SEQ ID NO: 300095 - DNA, 122 bp, Homo sapiens
atagacggcaagagcagatactgcagctgtaagggatacaatagacggcaagagcagatacgcagctgtaagggatacgataggcggcaagagcagatactgcagctgtaagggatacaata

SEQ ID NO: 300096 - DNA, 122 bp, Homo sapiens
gagaaggcagcttcaaggtttatggctgtgggagatggaaggtgtccagccaaggacccacgcagatgctgatgacaattgcgtgatggtaaaagggttacccctgaagcactctacaattt

SEQ ID NO: 300097 - DNA, 122 bp, Homo sapiens
cccaaccaattgaatggagccgcttctcaaccaagggcaccccaaagtaacccaggaaaacgagctcaggtcctgatgggaagagggtttggacaagccccttagactctcctccctttgga

SEQ ID NO: 300098 - DNA, 122 bp, Homo sapiens
tagagaggaaaaacaaaacccattcctttaagaaagattccgcctcctctcataagcaagcgcctaatggtaattgtagagtttactaagtcaaacacttactactcagcattgagagaagc

SEQ ID NO: 300099 - DNA, 122 bp, Homo sapiens
tcctgcaatgcacaacaaagccccagcaaccagggagtatccagcatcaaatatcagtagcgcagaggccaggaaacactgcattgcagcagtagaatttcactgagctagaaaaggaggca

SEQ ID NO: 300100 - DNA, 122 bp, Homo sapiens
tccccctccacaggtgagttccaaatcccgttacattctcagggattggttctcttaccccggcaacccgagagtcgtgttcctcacacgggccctctgggaacagaaaacctgagttccca

SEQ ID NO: 300101 - DNA, 122 bp, Homo sapiens
cgggactagacgcgacctcgcggggctgaggctctgtcccttattggctgggtcagggggcgtggcgcggcttgaccaatcgcgggcggcgcgcttaggcacgtgtgtggacaggcctgaga

SEQ ID NO: 300102 - DNA, 122 bp, Homo sapiens
acgtatgaatggataaatgaaagaatgaacaagacattcatttcactgaagaaataaatacgataaggagagaaaatgaacaaattctgaactttggaaagtaaaaagctagaggaagaaaa

SEQ ID NO: 300103 - DNA, 122 bp, Homo sapiens
gtcggagggcgcacctttgtaattgcggcctcccttcgccccttaagtgccgcttctgggcgcctaggctggatatgaaagccccgttcctaatcctctgctctggtcccctcctctggact

SEQ ID NO: 300104 - DNA, 122 bp, Homo sapiens
ctatggcccaaggtgccttgctgccaatcttccccagagggtgccatctcccctcagcctcgctaagccccgcagagtgagaagtgttgttttcctgattacacaggctcccatcgtccctc

SEQ ID NO: 300105 - DNA, 122 bp, Homo sapiens
aatgctagcaccatttggttcttgaattccgcccaaattgtcagaaaatacgccttagaacgttgttttcacaagtgccaggctctgtttttagggttttcagtggatcgaccagcttgccc

SEQ ID NO: 300106 - DNA, 122 bp, Homo sapiens
cccggagtggaagctgaagcctgcacagtgtccaccctgttcccactcccatctttcttccggacaatgaaataaagagttaccacccagcagacactgtttctgtgtagtgcctgggaaca

SEQ ID NO: 300107 - DNA, 122 bp, Homo sapiens
gggtgacggacgcacctggaaaatcgggtcactcccacccgaatattgcgcttttcagaccggcttaaaaaacggcgcaccacgagtctatatcccacacctggctcggagggtcctacgcc

SEQ ID NO: 300108 - DNA, 122 bp, Homo sapiens
ttggctccgccgaagagaaaaccctgccgacagcccttccgatctcgtcagcgattgggccgggaccgtcccacaattactcttgttgctgggctcggaaatagggagcggtgctaggttgc

SEQ ID NO: 300109 - DNA, 122 bp, Homo sapiens
tcagggtgtgtgtgtgtgtgtgtgtgtgtgtatgtgcgtgtgcgtgcacatgtgtgcctgcgtgttggtataggactttaaagctccttttggcatagggaagtcacgaaggattgcttgac

SEQ ID NO: 300110 - DNA, 122 bp, Homo sapiens
agagatgagcactgttaagatttgctgtaggatttccctttcatttcagagccactccggcggagacgcctcagcaaggatgcagtatggcaagatatatttaaatatgaaggttattcctt

SEQ ID NO: 300111 - DNA, 122 bp, Homo sapiens
gggcttaaagtgaccagtttccccatttggttgccccagtgtttcttgtggctagggtgccgcagtgttccctgtagctagggtgcaaggggagggtttgcagggaaagacttctttcttct

SEQ ID NO: 300112 - DNA, 122 bp, Homo sapiens
aaactaaaacaaaggcaaaagtaaatgaaatctgcccctgagtgattgctattggttacccgaagtaactctattgagagtacctggaagtagtctctattgagtagttttatattgaatgt

SEQ ID NO: 300113 - DNA, 122 bp, Homo sapiens
gctctcaggtcttctaaggagaaggtctttttatcactcccattttacagatgaggaaatcgaggctcagagacaggaagtagcttgtgccattcattagggtcccaggcctggtacctcct

SEQ ID NO: 300114 - DNA, 122 bp, Homo sapiens
atgagccgcagggaggcatctgtgatgtccaggcctgccaggcgcagctccacgatgttccggagcttgctccgattgtccatctgacctggtggggcaggaaggagggggcaacccgtcaa

SEQ ID NO: 300115 - DNA, 122 bp, Homo sapiens
tgaaatgcaaagaattgttaaaaacttccaaaattttagctcaaactctctctagtatttcgcaaaaacaaaaggaaatatttactaaagaaacaatgaagcatacgtacctatgagtagaa

SEQ ID NO: 300116 - DNA, 122 bp, Homo sapiens
gttcaattacagccgtgagagcctcctcatcaggcagcattaaaactgcagcagacaggccgggcgtgttggctcacgcctgtaatcccagcactttgggaggctgaggtaggtggatcacc

SEQ ID NO: 300117 - DNA, 122 bp, Homo sapiens
cgggggttcctcacccttccttccacccggacaccaccgccacaacccgaggggcaggagcggagcctaagaacaaagaaggtcccccaaaatcccccccacgccggcaaaacccggagccg

SEQ ID NO: 300118 - DNA, 122 bp, Homo sapiens
tctccctggctgtcccttcaagcagggggaggtcctagccgtagcatccaccttctgctgcggccagaaaagagccagtgaaaaccactcagaacttccctgtcactgaaaggccattaaat

SEQ ID NO: 300119 - DNA, 122 bp, Homo sapiens
ccgcagtcctcccggctttctaggtgcgcggggctgtcgtgttccagtccctgtgttccccgtcgctggagtgcagcttaagtgcgaatcatttcttggaaagtttagagataattttgtca

SEQ ID NO: 300120 - DNA, 122 bp, Homo sapiens
tcctctatgttgtgtttattttattttccatcacatttataacccctcagttaaatgatacgctaatgaaatctaaaactgtagtgtatgcttctagtctttcaagaccatttgtcaggtct

SEQ ID NO: 300121 - DNA, 122 bp, Homo sapiens
tccctgggatgcgaggggagggagtcacccatgcctttatgaaagatgcttctagcgtcccgcacatggtctgcacctcctgatgctaggtcaggactgaattgtataaaaggcagaagctt

SEQ ID NO: 300122 - DNA, 122 bp, Homo sapiens
ccaccgaccggctgctccgagtgcttgcctgctgagcccacacccacctggaactcgcgccggccctcaagcgccgtgcactgccctggtttccgcccgtgcctctccctccacacctccct

SEQ ID NO: 300123 - DNA, 122 bp, Homo sapiens
aagtacccaggtaaatggtacttccccactcagtctgaagacacagtgtccgtgccctctcggatcccttttctcttacctgtggtgtaaaatgtggctccagaaggtgatcttggacaagt

SEQ ID NO: 300124 - DNA, 122 bp, Homo sapiens
caggggtgggaatacagggggtgggaggtgtgcataagaggtgataggcacaggccagcccggtacagacccctaggcgtcctgacaggtggatttcgacaaggtcattgtgccctgccaag

SEQ ID NO: 300125 - DNA, 122 bp, Homo sapiens
cgcccaccaagggctggccgcagccactgtagctgagctcagagccttctgtgtggtttgcgggggcaaggtcagctgccccctgccctctctctggggctatttgaggaatgcggcctttt

SEQ ID NO: 300126 - DNA, 122 bp, Homo sapiens
gaccgtccgagccgggacccatcgggaactggggaagaagcacagggcatggcagctcagcgggccctggccctctgcacccctcacaggcagggggctgcagccacgcttgagtcctggcc

SEQ ID NO: 300127 - DNA, 122 bp, Homo sapiens
gggatggagggagtgggtgagcgccagggtcgtgcccagggctcctaactttggcaagagcgtcacgctggggcagggcgcgcaggggtctggatccgacggacgtcccaggctcactgtcc

SEQ ID NO: 300128 - DNA, 122 bp, Homo sapiens
tgattccacttctgtcgaggagcttcggggctcagagaggtgatgacgtgcccaaggtgacgcaactcgtgaacagccgtgcctgccttgggcgcagcctccggcgccagagctgggctctt

SEQ ID NO: 300129 - DNA, 122 bp, Homo sapiens
gacagcaaagctgtcccggctccgctaatagattgggaccactactcccaggagtctgcgcgcccgaccggagcgtccatgcgcagtgggagccactttgtatcctatcaggcgaggagagg

SEQ ID NO: 300130 - DNA, 122 bp, Homo sapiens
tgaggctagttaccacgtcagtgagctgacagggaaggtacccggctctactgcccgtcccggacgactcatcctggcggactgtgcagtcccaccctgacttcggcctcaatttccaggaa

SEQ ID NO: 300131 - DNA, 122 bp, Homo sapiens
cctgcccacacccgccccagccccggcccctgcccctagccgcgcccgcgccccctcccccgcagcccctcccatacgctcgggccccgcccgtcaccgcccattggcgctggggccgggcg

SEQ ID NO: 300132 - DNA, 122 bp, Homo sapiens
aacaggagtcacactctgcggcctgccgaccctgcggagagaccagcggcccacgatgcccgttccctgctcctagcctgcccactcccttgggggccccccagcaggccctcagcagcggc

SEQ ID NO: 300133 - DNA, 122 bp, Homo sapiens
ccgccacagcaagggaaaaaactttgcgcgtgcagcccctcgatttcgcttcatgacaaccgtgctagagattggcgcccccaattttctgatgagctaacggaggctcagagaggggcggc

SEQ ID NO: 300134 - DNA, 122 bp, Homo sapiens
aggagacgtcaggcccggccacctccaggtccccgccatccctgccatcccgccccttcgcgtcctgggaaccagctcgcttccgagccgcacgcatcgagcctccaggcatgccccgctat

SEQ ID NO: 300135 - DNA, 122 bp, Homo sapiens
ccccccagctccagctgcagccctgtgagcctcacccaggaagacaccactggccgcgcccgggatgccctggatttcggtgacgttgttctggatgaagtactcgtcacaggcggcgctgg

SEQ ID NO: 300136 - DNA, 122 bp, Homo sapiens
aaggggccttaattttctgaagaaaaagaaagtggtttgaagcttaccttttcaggctcccggtacttgctgtatctgtatccaggtaaaggaacatatagggtggtgtggaaaaaccccca

SEQ ID NO: 300137 - DNA, 122 bp, Homo sapiens
cggaccctgcgtagggccccggggacacttgcttccctggttcacacgcactgtgcttgtcgcaccagtggttggcacccaaaagcggcaagaactcccaaaatgaaagataaggcttgagt

SEQ ID NO: 300138 - DNA, 122 bp, Homo sapiens
catacaattttttttttcaaaggctcccaacatttaaaaattgtgagagttggtcaggcacggtggctcacacctgtaattccagcactttgggaggcaaagacagtggatcacttgagggc

SEQ ID NO: 300139 - DNA, 122 bp, Homo sapiens
aagctttcgtgaaacagtaaggattcagcaggggcgcttttagctccagcgaatctccatcgccgtggatgtgggttatatgctgtaaatggactgctaccattagtccgctctttggctta

SEQ ID NO: 300140 - DNA, 122 bp, Homo sapiens
agcctgatcccacagattagggtaaaatatcccggggggccgaagtggaaaccggagttgcgtcattgctcccacccgatatcaccttggcagcgaccgcggctgaccacgttcccggcctg

SEQ ID NO: 300141 - DNA, 122 bp, Homo sapiens
tcttctcggagcggaaggcctctcgcctagtccttaaagaaatacccacctgcagccgggcgcggtggctcacgcctgtaatcccagcaccctgtgaggccgaggcgggcggatcacctgag

SEQ ID NO: 300142 - DNA, 122 bp, Homo sapiens
accagccagggcaacatggcaaaaccccgtctctacaaaaaaatacagaaattagccaatcgtggtggtgcatcatgcctgtagtcccagctccatgggaagctgagatgggaggatcactt

SEQ ID NO: 300143 - DNA, 122 bp, Homo sapiens
aagaggtttttttgttcagccgggagcgtcggcagactcgtgtcttaagagccgagctcccggaaaaagaaattcctagcccttttaagggctgacaactctaagcggtctacgtgaaaaag

SEQ ID NO: 300144 - DNA, 122 bp, Homo sapiens
ctgggcgccctctggggcgtggctgactgtccctgtcggacctgggggtttctctggggccgggctccgtctgttggaagagggagaccctctagggctgggcccctcccccgggcgctcaa

SEQ ID NO: 300145 - DNA, 122 bp, Homo sapiens
ggactgcgcggagccgccagccagccctgagggtgggcacccaggtcccgagtcagtcaacggcccagagccaggccgaccactcctgacctctcgtccctgggcccccactctggccccat

SEQ ID NO: 300146 - DNA, 122 bp, Homo sapiens
gtcgctttagagtctcgcgagaacagccccttttttttgtgttgtcatgcctccaaaaggcgggtcacatgaaaactgacacaggcttcagccaaccgaattgttttttaactctcttctcc

SEQ ID NO: 300147 - DNA, 122 bp, Homo sapiens
tcattacgcctctctccagccaaagccactcaagggtgtggtggtgtaatgggcctgccacgcagatgggctgcgaaatacacagcccatctgtctttatcatgctcatttcctcttttatt

SEQ ID NO: 300148 - DNA, 122 bp, Homo sapiens
ctccagagccggtcattccacccagggggacttcagctgccactggacacttcaattgtacgctgcgaccagttgccaggaaggagagggctggcaagagagccgcggcagccgtggcaggg

SEQ ID NO: 300149 - DNA, 122 bp, Homo sapiens
aaagactcggtccttctggaatcttgtaacggttctaacagctgggtgcgggtggagctgcgggtgagtcctcggctccggatccatttctctttgttccctaggaccccctcccacagagt

SEQ ID NO: 300150 - DNA, 122 bp, Homo sapiens
ggcaaccaacctccgggtcacatccatccagatgtctcccacagggaaacgggtgtcacacggagcaccaggagagcatcaggtccctgtccgccgagctcacacgcagctgttgcgtggag

SEQ ID NO: 300151 - DNA, 122 bp, Homo sapiens
ttctcaccatcgcgccaaactctcttcgctacagcagctgccgacaccgccgccgttacacgagcttaactacaacgccgctaacagccaatcctcgcgagaggagccgccggaagtcgtcg

SEQ ID NO: 300152 - DNA, 122 bp, Homo sapiens
ggaggatgttccaccccccaccatctccggcgacctcctggaactggggagggctcagcccgggtggcaggaggaggacaaggactcctaaggccacacgataaacgcccttctcgctctcc

SEQ ID NO: 300153 - DNA, 122 bp, Homo sapiens
cgctgcgtttccctgacgacgacaggtagtccaatggaaatgtggcacctctttctcctgcgcgcggccccgccttttccggccccaaaacttgcgctctcattggtcagtggcctccggaa

SEQ ID NO: 300154 - DNA, 122 bp, Homo sapiens
ggtagtggcagaagcacatgagcaggaagggcagcaggtagcaggccaccaccagccccacgctgaaggccgcgcccagctgcgcggggtccggggaggtccggtagaggcagccgtggaag

SEQ ID NO: 300155 - DNA, 122 bp, Homo sapiens
cctggcatctgctgatgaagcctctgcccacatcaaagcctcttccttgcaagacactggcgtccgttgggatcagcccaggacactccccttctcctcgtcactctccttggactgcttca

SEQ ID NO: 300156 - DNA, 122 bp, Homo sapiens
cagggctgtagacgtgatgggccatgtggtgcagtgtacaataagggcaagaagtcttcacgagcgtttttatatgcactagctccagcccttccacaggaaagggcaacaggacagagtgg

SEQ ID NO: 300157 - DNA, 122 bp, Homo sapiens
atacccttctacaggtcagatgtggtactggtgggctggatctttaatgacacctgccaccggcgcctccttcttgcacccaggccccagccgaaggtcgcgtccctcccccatgccccagg

SEQ ID NO: 300158 - DNA, 122 bp, Homo sapiens
tgacatcgtgatctgcccgcctcggcctcccgaagtgctgggatcacaggtgtgagccaccgtgcctggcccagttcaaggaattgttattgggacctgtgatgtgccaggcactctgccac

SEQ ID NO: 300159 - DNA, 122 bp, Homo sapiens
caacagttaggattctgaaattggaaacagagagttagatgtggccagtcaggcacagaccgcagtggagcctcacagagacaccctcacccaggggctgcgagagggccctacgggccccg

SEQ ID NO: 300160 - DNA, 122 bp, Homo sapiens
tgtttgggtttgattgtgtttggctcttcgctaagctgatttatgcagcagaagccccaccggctggagagaaacaaaagctcttttctttgtcccggagcaggctgcggagcccttgcaga

SEQ ID NO: 300161 - DNA, 122 bp, Homo sapiens
agacatttggctgtctcattaatattaagtaaacacctgaaaacacctttctggtagcctcgaaaatcagtgaacacatacacatcatattctaaaaccaatttgttgatgataaaacatat

SEQ ID NO: 300162 - DNA, 122 bp, Homo sapiens
gtgtctgcccggcagaggtgtctccctggcgcaggtgtctccgtgggtgctgatgttccccgcagtagggtgtccccccgctcggcggagaggctcacagcggagccagcgccaggggaagg

SEQ ID NO: 300163 - DNA, 122 bp, Homo sapiens
tctgttcctggaaagcccagtgtcaacgcagatgaggaagtcggaggtccccaaatctgccgtgtatgtggggacaaggccactggctatcacttcaatgtcatgacatgtgaaggatgcaa

SEQ ID NO: 300164 - DNA, 122 bp, Homo sapiens
tcagaggggaactcactactcaggaggtgacggtgacgtggtgccggtccctgaagtacgcgcacaagctccggaggttgcgggagctgagggaggaaacagggacacgatcagattcgctc

SEQ ID NO: 300165 - DNA, 122 bp, Homo sapiens
tccagctcctgagacattaaagtcacttcctgtccttggcctctgtctgtactttctgggcgaggggacctggtggagattgtaccagtccagggggcaggcaaaaggggagactggaggca

SEQ ID NO: 300166 - DNA, 122 bp, Homo sapiens
tgaccggttaccatagagaccgcgtcggggtgggcggagcgtcgcttctgagctgtgccacggccacatcagctcggccagaaacgcgaacacgtcggaacagtgacttccggcggaagaag

SEQ ID NO: 300167 - DNA, 122 bp, Homo sapiens
tcagcactttgggaggctgaggcggttggatcacttgaatccaggagacacggcgaaacccggtatctaccaaaaaatataaaaattagccgggcgtggtggcgcgtgcctgtaatcccagc

SEQ ID NO: 300168 - DNA, 122 bp, Homo sapiens
ttccccacttccttcccctgggtcagtcccaggatatctaccccccacaggctccccagacggcagcctcccgcggacccagcccctaacacaggtgcagcttctggtgctgcgcgaggtgc

SEQ ID NO: 300169 - DNA, 122 bp, Homo sapiens
cgctcccactgcttcccgcccgctcccccgcctgctccccgcccgcgagagccgcgcacgcgcactcggccccgccccgcaaccgctgctgttgacgcggcgccctccccagtcgcaggctc

SEQ ID NO: 300170 - DNA, 122 bp, Homo sapiens
aaagaagcagtgcagggtggcttctgccggggcacgggacgaaattggggttcgtcccctcgtgatcccgagcttggagggcatctgaaagagacttgggcctcggagtcgtcccctgtttt

SEQ ID NO: 300171 - DNA, 122 bp, Homo sapiens
gagggctgctgggagcagcagcagcttcctctgagagagggtcttatctgctccagcacccgccaccccgcccagcccccatgcttccaggagttagccttgccctttccagaataatagct

SEQ ID NO: 300172 - DNA, 122 bp, Homo sapiens
gggggcgcgaggtgtgggcaagagtgccatcgtgcgccagttcttgtacaacgagttcagcgaggtctgcgtccccaccaccgcccgccgcctttacctgcctgctgtcgtcatgaacggcc

SEQ ID NO: 300173 - DNA, 122 bp, Homo sapiens
tgtgatcctaagcaatttaaattttctgtctgtaaaatggtgatcatgttactcaccctacgaggttgtctatgcaggttatatgttatagccatataaaggaactagcacagtgccagcca

SEQ ID NO: 300174 - DNA, 122 bp, Homo sapiens
tgtaagcttcctgaagactgtcctgctcctcaatgtcccatcccctcccgaactgaccagcggtgctatctacggggaagcaccggggcagttgttgttgaattgatttcagttaattcagt

SEQ ID NO: 300175 - DNA, 122 bp, Homo sapiens
cccgctgcccagatcggcagccgctgctgcggggagaagcagtatcgtgcagggcgggcacgctggtcttgcttacagttgggcttcggtgggtttgaagcacacattagggggaaatggct

SEQ ID NO: 300176 - DNA, 122 bp, Homo sapiens
agtggatgtgtttagtcgtgatttttaatgggtttttgatcattgttcctagctgcataccggttttgtcctagacaggatatagctgaagacaaatactgactttttccttcatctaatac

SEQ ID NO: 300177 - DNA, 122 bp, Homo sapiens
cagtccacatgccatggcttagttaccttcagacccattgagatgctggggagagccaagcgagccatggggctgagaacaggggtgctaaacagggttctggagtcagagactgctttcag

SEQ ID NO: 300178 - DNA, 122 bp, Homo sapiens
tcaataactgcatgaaaatatatacgtaagacttctgacccaactgtccatgtggaggggcggccgcacgtggggataaagacctgccgatgaagcgcagtggtaattttacatgtcataac

SEQ ID NO: 300179 - DNA, 122 bp, Homo sapiens
tgaatgatgaaacacgggatggccattgcactccctggcttttccagagatctcggtcctcggtcctgatgcaaccgtctggatcttttacacaaagcgctaggcgagcgctgggtgctagg

SEQ ID NO: 300180 - DNA, 122 bp, Homo sapiens
ctccgctgcctccgcggcctcactcatcccgccgccgcccatcaacacccagcagcccggcgtggccaccagcctgctctacagcggctccaagttccgcggccaccagaagagcaagggga

SEQ ID NO: 300181 - DNA, 122 bp, Homo sapiens
ctttcagctgatgccaagagcctctttttggccagcacttactaagcaccagagacacagcgagaagcagaagcatacgagcacatcagtgtgattctgctgtgatgaagggcaagagaggg

SEQ ID NO: 300182 - DNA, 122 bp, Homo sapiens
tgcggccggctccgccccgcccaaccctcaccctcacgctcacgctcacgctcacgctcacgctcacgctcacaggctcccggctccacattcctcgcagggctccaatccggacccgcccg

SEQ ID NO: 300183 - DNA, 122 bp, Homo sapiens
cggccctggtgcgttctccttcccagccaacaggcagcccagacacagccccctcgcgcccggaggtgtccccgctccctggatccccgactgcctgcctttgggggtcctcctcagctgag

SEQ ID NO: 300184 - DNA, 122 bp, Homo sapiens
tgttccccaaaaccagactgatgatttcgaacaaccacccagaaattaaagttccattctcgtcaactcaagtttgtctcactctcctctctgggtctgacagcgaaagagatgttcgggct

SEQ ID NO: 300185 - DNA, 122 bp, Homo sapiens
gggcgcagacttcgagagcgaggacgagggcgaggaatttgatgactgggaggacgactacgactatcccgaagaggagcagctcagtggtgccggctacagagtatcagccgctcttgaag

SEQ ID NO: 300186 - DNA, 122 bp, Homo sapiens
taaataatgccagttgcaactcactaaattgatttcatagcccactaatagatcacaatccggtttgaaaagcagttaagctagtcatctcatttttagaccagcccaggtaggtgctaatg

SEQ ID NO: 300187 - DNA, 122 bp, Homo sapiens
cccaacctgggatcccattttcctttcctccccaggagccccagcaaatcttgcaataagcgagcgcatgctggcttgtggtccaccaggacccactgattgttttcccacttggcaatttt

SEQ ID NO: 300188 - DNA, 122 bp, Homo sapiens
atcttccatgtatctgatataaaaaccacagtcaagtacaccctcaataccacagcaccacgctgactaagcatgactagctctttcaaacagttatttcttaaatgctcacttgcagctta

SEQ ID NO: 300189 - DNA, 122 bp, Homo sapiens
cgtcagctgccgcgaaggtggcagtgaccacagcctcgtgactgattcacagcctggctgcgcttggtcttgagaattttatgttttgctgggcagggtctcccccgtattgaagcttccct

SEQ ID NO: 300190 - DNA, 122 bp, Homo sapiens
ggggcaaagatgatgccattgtccaactaggtagaactgataaagaaaataaaaatggaacggccagagagatagaggaaaactagaaaaatgtggtctcaatagaattcaaaagaggaaac

SEQ ID NO: 300191 - DNA, 122 bp, Homo sapiens
ttccacagccgcctctcccagggtgctggccatcagtattgcccccggcgcccccagccacgcaaacctgttctcagatgcacccagacctcctggaactgcagctctggggttccaagtgc

SEQ ID NO: 300192 - DNA, 122 bp, Homo sapiens
aagcagcagtgcggttccctaaagtgctgggcagcgatgaggtttctctctccaggccctcgggcagctcactgagcagccagtgaccccgtggtttctgtagaaggggaagtaggaaaaag

SEQ ID NO: 300193 - DNA, 122 bp, Homo sapiens
cccagcagcagcggcggcggcggcgcctccgagacacagaccagggtttgttcaaaatcacgcgcccagccccattccaccgccgcatcccataatacgctgggccctccccgcccgcgcgc

SEQ ID NO: 300194 - DNA, 122 bp, Homo sapiens
cgcgtacgcaacctgcttggcgccactgacctggtgaggaggcttctttaaggccgtggacggttcctacccgcgcgcggagaggaccgacgtgaagaagctgccaaagtataacaagtact

SEQ ID NO: 300195 - DNA, 122 bp, Homo sapiens
taatcccagcactttgggaggctcaggtgagaggactgcttgagcccaggagtggtggcacgtgcttgtggtaccaagctactcagctctgccacctgtgtacaaattgaagctgagttcag

SEQ ID NO: 300196 - DNA, 122 bp, Homo sapiens
gcatcctcaaccttggccccacaatgaatcacccgagaaaattaaaaaaccaccagggcccgagccgcagcccaggctggaaagtggggtgttcaggaagaccccagtactttttaaagctg

SEQ ID NO: 300197 - DNA, 122 bp, Homo sapiens
gcggcgccgggcccgagctgaggcggctgatgcggctgggcgccctccgccatccgcccgcgcccccctcgcctccgggagccgggcgacccgcgacaggccacctccccctgggcctcggc

SEQ ID NO: 300198 - DNA, 122 bp, Homo sapiens
gtcttttattgacaaacaccaagagtgaccaacttgccctctactcaccctgaactttaccggttttagccccaggaatcccatgtcttgtgaatctgctcagctccaggaaaacaggtaca

SEQ ID NO: 300199 - DNA, 122 bp, Homo sapiens
tcgccgagggcaccttcagccatctcaccaagctcaaggaattttcaattgtacgtaattcgctgtcccaccctcctcccgatctcccaggtacgcatctgatcaggctctatttgcaggac

SEQ ID NO: 300200 - DNA, 122 bp, Homo sapiens
ctggaagctaattggcccggggtcttcccagccctgtgctgtttgtgtgctattttaattcgcttatgaaaagcccccgctttgatgtccgggaccagataaggccgggaggggaccctcca

SEQ ID NO: 300201 - DNA, 122 bp, Homo sapiens
ctgggctaaaagctgtggcacttctcctttctgttagtgttttcttcttccagggctaagcgcacagtcaggcattgctggccctgacgacttcggagctgatcctgctgaagggccgcact

SEQ ID NO: 300202 - DNA, 122 bp, Homo sapiens
tttgattccctaaattcaaaagactttctcttgtgtattatcaaagacagaagctgacttcgctaacccacaaggaaaatagacactgagtctgagggtccaccaggtttcctttccacctg

SEQ ID NO: 300203 - DNA, 122 bp, Homo sapiens
gcagcccaggacgcctgagcggcagaagccatgtgcacaggaggtccctgggagagccttcgggaatgcctcggacctgaaggccgccagtggtggcagggatcgcagaatgggcgcagctt

SEQ ID NO: 300204 - DNA, 122 bp, Homo sapiens
aataagaaatatttagatgccctctattgcagtgaaaaagcaaatggttgctatatcatgcgtaaaggtaatctcttcaaggattagcactttaggtcagatcatggaagcctggttttgtt

SEQ ID NO: 300205 - DNA, 122 bp, Homo sapiens
tgggagggggagaagctggaggtcgggctggggggggcgggaccccctcgtctgagtctgcgcattgagagcggaggcgggtccaggcgcgggctcgcgcgcccgggcgggtcctcgcgggg

SEQ ID NO: 300206 - DNA, 122 bp, Homo sapiens
aaccccccagatccctgtatctcccttccttctccccgcctattatttctacttggaagtcgtttttcttaactaggactcaactgtgaggggcgaggagccctttatgaaaagccggggac

SEQ ID NO: 300207 - DNA, 122 bp, Homo sapiens
tgacgggtgttctgggggctgcacctcctcggcagaggctttggggggatgggcaggccccgcacctggctctggccttcacctgggcagcaccgcgagtgtcgctgtcctccgagatgtcc

SEQ ID NO: 300208 - DNA, 122 bp, Homo sapiens
cgtctcttagcctcccgcttgccccgaaaggctggatgtgggcaccacttggcgggcagacgggtgggcgggtgctccaggcaacttagacatcttctcaggagggagtggggaaccggggc

SEQ ID NO: 300209 - DNA, 122 bp, Homo sapiens
actatggcctctcaaacacagccacagccatcatcacggtgacagatgtgaatgacaacccgccagaatttaccgccagcacggtgagtccctcgaagctgcccagtgacgcatggcccgtg

SEQ ID NO: 300210 - DNA, 122 bp, Homo sapiens
cagttcagaccgcggcctccgtggggcccgggggtccagtgcccgcaccactatggggcccgggactgggctccctgtccagacctccaacccaggcacagttccaaaaagaacaaaacaaa

SEQ ID NO: 300211 - DNA, 122 bp, Homo sapiens
gccactctttctctgtctccgagtcttgggcctcccctttatttctttctgaagtctctccggagcccaagccaccccacacccaaaccccgcagctggatgggagtccaggccacttccct

SEQ ID NO: 300212 - DNA, 122 bp, Homo sapiens
aaccaggaacttctcaaaaagacagaaacagaaccctgcatcccaaaacagagacagtgtcggggtatgctatgaggcagaggcaacgactcctctgaggcccaggattcctttgcaacgag

SEQ ID NO: 300213 - DNA, 122 bp, Homo sapiens
taggctcagggtgcaggtttccagggccacggaaacttctatgggtgctggttccaggcccgactgctctcacggcctttgccttgctgtctggggccagccctcacatgtaccctggagct

SEQ ID NO: 300214 - DNA, 122 bp, Homo sapiens
tgaattcactgtggaaaagggtcttaaacaaattgacgaatatttttcggtaagttaggccgaccactccagcatggtacaccggtgtgaagaacaataaagagactctcagcagatcaaaa

SEQ ID NO: 300215 - DNA, 122 bp, Homo sapiens
cgactgtggccggcggcggcctctgcttcccggacaaagctggagatgctgctgcggagtcggccctgggacctgcttcttctcttggctccggggcccgcagccgtcggggcccggaaggg

SEQ ID NO: 300216 - DNA, 122 bp, Homo sapiens
tctgaagaggtcaaggagggcaggacgctatgggagggcgttcaccgtctttgcgtcagccggtctcacctgatgggtctgtgtgggaacggtttccgccggtgtctgctttcagggcagca

SEQ ID NO: 300217 - DNA, 122 bp, Homo sapiens
ggttggagctcacacctgctggtggcagcaagccgactgcccggcggggggtgggcagcccgggagccacagggctccccagagacagccgcttgggctgcaatgtctccaagctacagtcc

SEQ ID NO: 300218 - DNA, 122 bp, Homo sapiens
tgagcctcctacagtgcctcaaggtcctgtttgtcaacatgaactgcctgacagaggtgccggccgagctgagcttgtgccgaaagctggaggtcctgagcttgtcgcacaactgcctgtcc

SEQ ID NO: 300219 - DNA, 122 bp, Homo sapiens
ctcccgacgggctgaaacagggttgttggtttgcagggcctgcacagggccctcagcactcggataaagaaaggaaagacggacaccagcctgcgcccacagcgagaaccccagagtgggag

SEQ ID NO: 300220 - DNA, 122 bp, Homo sapiens
ccgtcctccctgcctgtaaccgtctgtggtgattcgcggcactgcaggaccatgatggcccggatctgctcggacgctccgcctcagcttctcatggccgccctcgctattgccacccctgc

SEQ ID NO: 300221 - DNA, 122 bp, Homo sapiens
gagcctgtctgcttctcacgaaatgcagccacaaccggctcggtattttttcctatccttcgtgttgcagattcaagtgccccgtacaaagggaaggaagggcacaagtggctgctcccgcc

SEQ ID NO: 300222 - DNA, 122 bp, Homo sapiens
aataatcatgtaattaagtctcagcttggacctagatcctgtttcgatttcttctctcatcgtgccaggggcgatgaggttcagttgtgcttctggaaggatccagggttgagggttctcca

SEQ ID NO: 300223 - DNA, 122 bp, Homo sapiens
tgccaacaaccttgctagcacggcgttcactcccttgcccactggcatttgctagcacggcgttcactctcttgcccgctggcactgtgttctttagacgaagatcacgcatgtgtaaatga

SEQ ID NO: 300224 - DNA, 122 bp, Homo sapiens
tcaccctcctccagggagggcattaatccactcatgaggaatccatcctcatgaccccaacggctcacatcaggcccccacctccaacactgggcatcaaatttcaacatgaggttggggga

SEQ ID NO: 300225 - DNA, 122 bp, Homo sapiens
atctacacgagagttgctgatgctcttcccagagctggaatgctctctttcatcttctcccgcagccaaattccacttatcttcattgaaaatgaagtttgcagtaccacatttttgctcta

SEQ ID NO: 300226 - DNA, 122 bp, Homo sapiens
cctgacccttaacaaaggccaagccagaaataaactgcataaagtacagagtacagaaagcgttctgaactgcagcaagttcactgcctttccttcccatattcattcatgcctttggccag

SEQ ID NO: 300227 - DNA, 122 bp, Homo sapiens
atgcacaaacagcacccgccctagaagacacccattaaagagctctgtctgctactctggcgacccgcctcccggggcaccgcagcctaggacagggaatcgggagtcaccgaagggggggt

SEQ ID NO: 300228 - DNA, 122 bp, Homo sapiens
ccgcctctccagcctacgctggatgggcgggcggggcagggggtggggcgggggtgggcacggcagcaccacagacatgctgtgggtgctctccactaagggtgggtcctgggtttctcgtc

SEQ ID NO: 300229 - DNA, 122 bp, Homo sapiens
cctgaacctccgagcacataggaccttttctctgagggcatgctgacttcacaagactgtcgcccagggcagcccaggagcatctgcttccagtagacggggcccttgtacagttgccagct

SEQ ID NO: 300230 - DNA, 122 bp, Homo sapiens
tcagctggagtgcagcacaggtgaaggtgaatcaatctcggcgctgcgcccacagcacagcggtttcggtttcagcagcctcgagacccggaaaaggaagcccgaaggactcggagcactgg

SEQ ID NO: 300231 - DNA, 122 bp, Homo sapiens
cttcactgcagcatagagagaagagtgtcaaaatgactcatacgtaggctagcaaactcacgggccaaattctgccagaggcctgtttttgtatggccagccagctaagaatgttttttctt

SEQ ID NO: 300232 - DNA, 122 bp, Homo sapiens
cgcagcagccgagagaactgctccggggtaatgttaagcgcctgcattgctgtgcgctcccgggacgcggggccaccgcccgctactggctggccatccgcatctgcggggcagcgagggct

SEQ ID NO: 300233 - DNA, 122 bp, Homo sapiens
tggtccgcccgcgtcccccgacccgaggtcagcctacctgccggccccgcggcggcagcgcgctgcagcccaggctgatgtagacaggcagcttctcctgggtcagcgacagccggtaccca

SEQ ID NO: 300234 - DNA, 122 bp, Homo sapiens
ctgtacgtgatcgtggagtgcgccgccaagggaaacctgcgggagttcctgcgggcccggcgccccccaggccccgacctcagccccgacggtcctcggagcagtgaggggccgctctcctt

SEQ ID NO: 300235 - DNA, 122 bp, Homo sapiens
gcggcagatgttgcagcgttaagttgtctctgaagtggctttctgtcctcgtctccccaccgcaacggagtcaaactacattagatctcttatttgtgcctaaggcaagtttgggagcgcag

SEQ ID NO: 300236 - DNA, 122 bp, Homo sapiens
gccacagcagcccggggagaggtgggctgggctgcaggtcctggcgttgtgctggatcatcgcgcccgtactctgaagttttctccgtggcgctctttgagaggggttcctcctgcatcttg

SEQ ID NO: 300237 - DNA, 122 bp, Homo sapiens
tactcccgctaagtctgtccgctcactgctggccaaagctgccctgcgtctcctccccaccgccagccagagggaacctgcaatttcacctcatttagaggtaaaacatctaaatttaacgt

SEQ ID NO: 300238 - DNA, 122 bp, Homo sapiens
agcctgcccttggtgctgaggacgaggggcctcgctttactaggaggccctgccctgagccggggtcggcctcccttgtggctgccttcctgaggcaccctctctcctgcaccccagacatg

SEQ ID NO: 300239 - DNA, 122 bp, Homo sapiens
gagccgcctcccctgggtcaggtctgatgggccggtgggcgcgctagtggtggccgccaccgccgaaaccgtcgacctcctgggccccagttccgcgtccagccccgcggcagcatggacta

SEQ ID NO: 300240 - DNA, 122 bp, Homo sapiens
ggaacccgggtcgggatggaagaacccagggagaccgaggccgccgaggcagaagcagagcggagacagtcgcggacagtacctctccggagctggccatgtcgccggcgggtccgaaccgc

SEQ ID NO: 300241 - DNA, 122 bp, Homo sapiens
gtggaggaggcacggggcagggaccagccactgttgctggcacactggtgcacgcagcaccgtggcagatggacctgagagaaagcaggagggacagcacagtggagccaagaaagggctta

SEQ ID NO: 300242 - DNA, 122 bp, Homo sapiens
ccagccaacacagcgaaaccccgtctccaccaaaaaaatatgaaaaccagtcaggtgtggcggcgcgcgcctgcaatcgcaggcacttggcaggctgaggcaggagaatcaggcagggaggt

SEQ ID NO: 300243 - DNA, 122 bp, Homo sapiens
ccgctcgctggcgtcgggccgggtgtctttccatccgcaggtatccgtcggcggggtgcccggcccgacgtgactacccgacaaagaatgcaaagagccaccccgtgaatcattctccgcgc

SEQ ID NO: 300244 - DNA, 122 bp, Homo sapiens
gggcagtctctgtgttcaaagtgattttagttcaaaaaatgaattgatgttagaagggcacgcttttcctgaggctgttactggtgggctgctcagtgtcactagggtattttgagtccaag

SEQ ID NO: 300245 - DNA, 122 bp, Homo sapiens
cgaatcctatcctcctggaactttatcttgcttattccatgcgcctccagtctgtcttctcggcgtcttcatttcttcactctgtctgagttctagggggttttccaagcttgtctgatcgg

SEQ ID NO: 300246 - DNA, 122 bp, Homo sapiens
gggacggggctggaggagactgcgcctccgagaaaagtccggtctcgttggaggttctcgcgaaaaggaggccatccccctgcttgttggcccttagggtaaagtctggacggcgtcggtcc

SEQ ID NO: 300247 - DNA, 122 bp, Homo sapiens
gtagaaaggctcataggtaataagatctggacgttcaatgtcataaattgccttgaccttcggaatggctgctaaatccttgtaatccaggatctcattgtctacttttgcctggcaaagtt

SEQ ID NO: 300248 - DNA, 122 bp, Homo sapiens
tctgcgatttctgggaagttaaactttgtgtcactgcttctacttgtgataaaatgaaaccgctttcaaagagaagattcctattcctagcctttttgggtaacttctactacctccactta

SEQ ID NO: 300249 - DNA, 122 bp, Homo sapiens
aaaaaaaagcctcatacttcagagcaagtagggtgggcgtctgttctcatccagcccgtccgggtttaacttagaagtgtgtggcccctcagaagcaggagggtgggcatctgctctcatcc

SEQ ID NO: 300250 - DNA, 122 bp, Homo sapiens
aggagccgccggtgttcatgcagatgcccctccccgggccacagggctctgcctcgcactcgttcacatctgagaagaacgggtaggccaagaaaagtcaaaggaagcgtcgttatctgggg

SEQ ID NO: 300251 - DNA, 122 bp, Homo sapiens
ggggtcgggcacgagctaggacaggcgaccctaggacaagtgaccctcacacagccccaccgtgcctgcctgcctgcccaccttggattggccagtggtcttgtccttagccaggtagatgc

SEQ ID NO: 300252 - DNA, 122 bp, Homo sapiens
ccttcatcaagcctatgagaaatgcattcaagaggaaagccctgatatccttgaagaactcgatggtggctattctctgtaggcccgaaatgacggagggaacttatgctatcaagctgggc

SEQ ID NO: 300253 - DNA, 122 bp, Homo sapiens
gaattctatacaggcattgctgaggacacctaagatgacgcaatctccgcgcgggtagggcggggctccgcaaggacctcatgccttagagatcgcctgaagagcggaagccttctgtcgag

SEQ ID NO: 300254 - DNA, 122 bp, Homo sapiens
aaagaacagtaaactccggcgcaggcacctccagtagagggcttgtttttaaaatccatccgaaagggccaatcagacgcggcagtctgagtgcgcaggcgcggattggtccgcagctactt

SEQ ID NO: 300255 - DNA, 122 bp, Homo sapiens
cccacagggggagaagatatatgaaaaattattccatgtgactaccaccaagctgcttaccgaactggttattggtaggaagggaagccctacacctttccgagcaagaatatacacaatcc

SEQ ID NO: 300256 - DNA, 122 bp, Homo sapiens
ccacgcctcccaccccgcccccacactcccgagccccgcctcgtctccacactccggcggcgcctccctacccggccccgcctccgcgctcgggctgccagccctcccttgcacgttccggc

SEQ ID NO: 300257 - DNA, 122 bp, Homo sapiens
ctcacaatcaccttagaggttaatcagaataactgggatcagccacggacacctggtgagcgattagcccgcagagtgactacaatcctgaaagatacttgagaaactgtttaacaggcaac

SEQ ID NO: 300258 - DNA, 122 bp, Homo sapiens
ccagccgagcccatcctacgccgcaaccaagatcactgcccaagctcccagccgagcccccgtcctactccacaaccaagatcagtgcccaagctcccagccgagcccctgtcctactccac

SEQ ID NO: 300259 - DNA, 122 bp, Homo sapiens
aggcgccgcccgcgcctgctgcccaccctggggaccctcctcagaaacccagcacaggctcggccccaggccagacagacaccgcccaaagaggtgcacgcattccctgcaacctctccacc

SEQ ID NO: 300260 - DNA, 122 bp, Homo sapiens
cactctttcatctttgttctcatagtcatactaaaatattgcagaacaccaccacatgaacgtttagcaggtccctaagctcaggagcctggaccaggaagcttgagaaatcaactctcagg

SEQ ID NO: 300261 - DNA, 122 bp, Homo sapiens
caaagagtggacgttggtctcaggcccggggttccggagaccccagtccctcgacccacccgcctgagccaaggaacccagcgcgtccgccctaaacgcaccctcagccccaacctactctg

SEQ ID NO: 300262 - DNA, 122 bp, Homo sapiens
caccaccaaagccggcaactcaaaaagcccaaaggaaggcaatcttgccaacaaccagaacgctcctaagaacctgcaggagcttgacatccacaggtgaagtcaaagtttctccggccaga

SEQ ID NO: 300263 - DNA, 122 bp, Homo sapiens
gggttgggatttcaggtgtgaaatcccacctgaaatccctggccattctcctaaacttaccgagctgctgttaacctgtcttggtatgggatggccctgcagtgtagccttcctagagttcc

SEQ ID NO: 300264 - DNA, 122 bp, Homo sapiens
tcaggtctcctaggagagcaggtttatgagcatgcgcagcggattttccgttagggaagccgatggggcgcggctccttggagcatgcgcacacaaactttccgctaggaatcaagcgagca

SEQ ID NO: 300265 - DNA, 122 bp, Homo sapiens
aggatccttaacagtaagtacacgagacagcagcattctgaatggcaggaggaaggcaggcgatcagcacagggctggaatcatctgttcctgaccaccagcaagcctggcactgccggggt

SEQ ID NO: 300266 - DNA, 122 bp, Homo sapiens
ctgatgaggctggaaaaacatcaggaattaaacttatggccagctcatcagaggagcatgcggcatccacaggatactctggttgttttttctgttgaaaaaaatttccaagaattttttac

SEQ ID NO: 300267 - DNA, 122 bp, Homo sapiens
gcgctctgcgccaccccgcgttcccagctcccgtgcggcgctcgccggggggtctgcggccgaggctctgcagcccccagccccatccgggtctgccgcagccccccggacggcgcctcctc

SEQ ID NO: 300268 - DNA, 122 bp, Homo sapiens
gagtcctgctgttggtgtcggagcacgaggggaggcacggtgcggagagcgtcgcatatgcgcgggaaatcaagaactatgatatttttctgtttaaacagctttttttaatttgctatggt

SEQ ID NO: 300269 - DNA, 122 bp, Homo sapiens
tctgctctccccagtcccggtccgcgaccacccggagcccgctccgccggccttgcgcggcgcgcccagggaaggcatttccagcccgcccacccaggtatgtatcaaccctgctttccggc

SEQ ID NO: 300270 - DNA, 122 bp, Homo sapiens
tttcactcttcggctcgcttcgctcgctatctgtagtcaatcgtctactcctgtttcccacgcctgcacctttgtatgtgcaatggacactgccaggaaggccatctcctcatggtttaacc

SEQ ID NO: 300271 - DNA, 122 bp, Homo sapiens
agcttccaggttcccaagaagggctcaaccatcatggaacacttgctgagaagagccactcgtaattgaaaaccaaagaaatataggcattacggtgctgccagtagtttaatttaaagagc

SEQ ID NO: 300272 - DNA, 122 bp, Homo sapiens
tcactggatttggaggcagtgctactggtggtttagattgcacactctcagctacattgccggggttcagaatcagctctgtgtcttcctacatatcacagtttgctcaacacacatgtgtt

SEQ ID NO: 300273 - DNA, 122 bp, Homo sapiens
ttgtgttgacaaacctctccatgggtggtgcatctgaccctatcccaacatgccttaggacgctcatctccttgactgtctgccatcccctcccaaaactaagtggaggctctgtcttttcc

SEQ ID NO: 300274 - DNA, 122 bp, Homo sapiens
ctgaaacaatttcattaagctaaaggcctgtaaatcattggaggtcactgctctgccctccgcgacctcccagaatgcttttttcctctctcccgttcccccgtctcccttttactggaagt

SEQ ID NO: 300275 - DNA, 122 bp, Homo sapiens
aagctggaagatgacgccaaggacaaccagcagaaggccaacgaggtggagcagatgatccgagacctggaagccagcatcgcccgctacaaggaggaatacgccgtcctgatctcagaggc

SEQ ID NO: 300276 - DNA, 122 bp, Homo sapiens
gcacctgcagtcctctgacgacggggatttctacgcccctcccagctccccgcctctctccggactccctgcagaggttgctggagccaaattcaggcccctgccccctcgcctgtctctca

SEQ ID NO: 300277 - DNA, 122 bp, Homo sapiens
aggacaatgcatctcagcacctcagattttttttctttcttttttactggaagcttgcttcggcagatcctatgacatttgttcctgagaacagctgtctgttgtttcaccagcttcccaaa

SEQ ID NO: 300278 - DNA, 122 bp, Homo sapiens
gagcagggaggagcctggtccctcctcttcctgtgtggaacccgggattcaagctgcaggcgggaagcgctctagcaggggctcgccttgcgagagtccctgattcgagcctcttttcttcc

SEQ ID NO: 300279 - DNA, 122 bp, Homo sapiens
ggttctcaacgctggagttgagacagctctgggggggctctgtcagctccgctcacttggcggctggtgtgagggcctgggggccaggctgctcgcagacccaggcttagtcccaggcctga

SEQ ID NO: 300280 - DNA, 122 bp, Homo sapiens
cctcctcctccatcggttggtcttgggtctgggtttcctcaggcatctggaacgacaccgcgccggtttaaaaccttgcaggacgtctacagaggcaacacgaaattccatcgcgttctcca

SEQ ID NO: 300281 - DNA, 122 bp, Homo sapiens
attaaatctagattccaagttaatgtacgtatatcataaaacctcagagtgaggtcttcacgtagagtttcagggaaagaacttcaaatggcaagcccaatgttgcagaaaaccatgactca

SEQ ID NO: 300282 - DNA, 122 bp, Homo sapiens
ctgagtgcgaaggaacagaaaaccttcaagaaacaaattatggcatggagaaggggacagcggtaaccaaaaaaagctggagagtttgtctgagcctaatcaaccatggaaaaagtttctgt

SEQ ID NO: 300283 - DNA, 122 bp, Homo sapiens
cccccggcgcggcgggacactcacttgatagcgtaggtcatgcgatctggccgcaggcagcgcaccatgcacagcttctgcagggccgtcttgttcttccactccttggggaagatctcctt

SEQ ID NO: 300284 - DNA, 122 bp, Homo sapiens
ttcccgcgacagtccacttgagggcgctgtggcaacagctagcgccgggaggcaggaagccgatcgggggcggggatcgaaggcctcagacgtcgacgccggcgtgggcgcgagcacggtgc

SEQ ID NO: 300285 - DNA, 122 bp, Homo sapiens
ttcttttaatttaaaatttttttgagagcctgttctctacaaagcacatactaggctctgcggcaatgcagaaataaataaaacccagtccctgttctttggagatcacagagcagtgaggc

SEQ ID NO: 300286 - DNA, 122 bp, Homo sapiens
tgctcctccttagtgtccagggcaaaacatagggcctctggtactgcattttgagagccacgcaggcagacacagtcatttgtgggcagctaaaacctccaggatattttttaaaacataga

SEQ ID NO: 300287 - DNA, 122 bp, Homo sapiens
ggcgagggacggggctgggcccaggctgtggcgagtcctttcgggttgtgtgacggccggcggtcacacatgccacacccccaagcctgggccgagggccatcccggtcacacataggcctc

SEQ ID NO: 300288 - DNA, 122 bp, Homo sapiens
gctaggccctctgcaccctctcctgaggcccagtgccctgaggcagccccctttaaggagcgatcggccttccagaagagctccagtcttaattttagcttggaggcctgccacaggaggct

SEQ ID NO: 300289 - DNA, 122 bp, Homo sapiens
gcccacgcccggcggcccattgcccagcggcaccccctgcggccagccagggaggtggaccgcatgctggccctgcagccccgccttcgcctgcgcctgcccttgccccactcctgaatgca

SEQ ID NO: 300290 - DNA, 122 bp, Homo sapiens
tttggtattaataaaccagggagggggcagcttcaaagccaactgtttgccaccagggatcgagggattgagggatcagcaccctccaaagggcactttgctttttatgccccaggggagta

SEQ ID NO: 300291 - DNA, 122 bp, Homo sapiens
ggctccaagggtgtttttcctgtatccttaaaagccatggctgctgcgcggctccctgaccgacttgttccttggcaagagcgaacagcggtgagtcaggagaaggagcgggcggatcagag

SEQ ID NO: 300292 - DNA, 122 bp, Homo sapiens
ccccggggtctcagggccgtcccgccggtcccagggcaccgctcctgtgccccacgccgccgcttccccagttgccccctgactgcaagagtctcctggttttcggcttgtcctgggactcc

SEQ ID NO: 300293 - DNA, 122 bp, Homo sapiens
gaggggtgtccctgtaccccttgcacacaggaccctcactctgcagggataagccagctgcgcctgcagcctagggtgccaaggaggctgctgattgtggcccacagcctcatctgaacgcc

SEQ ID NO: 300294 - DNA, 122 bp, Homo sapiens
tgcttgcagggccgggtgccgaggcgagatagccagcttccctgtttcttagaatatttccgtaaaccagactgcatccgagcagccgggtggtggtacggctggtagcagaaggtgcagat

SEQ ID NO: 300295 - DNA, 122 bp, Homo sapiens
tctccagctgcagcccacagagaaattaataagactccagaaaaaaaaaaaaaaaaggtgcggggggcggtgggaataaaacaaccctccacgcaaccaggccggctctgctcagccgcgca

SEQ ID NO: 300296 - DNA, 122 bp, Homo sapiens
ggctttcccgccagcgtctacctgtagagagtgagacgaagatggagacaattaactggacgaagcaggcaaaatccccgataattgaggccgggtgccacggggtgactttccctttctgg

SEQ ID NO: 300297 - DNA, 122 bp, Homo sapiens
cttctccactcagtggtgccgtggtcaggggctggggcagcaaatctagctgggtgatgccggcagtgagcacccatgcccactcctggctttggggcttgtgcctgctggcacagcatgac

SEQ ID NO: 300298 - DNA, 122 bp, Homo sapiens
actgggcctccttgctgccttcccggccgtgagggtccagggaccaggagacgccagggccgtgagggtgtgggagagaccacccagggagggggaggcccccgacgagtccccccgcacag

SEQ ID NO: 300299 - DNA, 122 bp, Homo sapiens
tttgagggaggggtctggccggcgagacgccaagaaccccgccctctggccaatcagaagcgctcttcagcaactcggccgcgcccctccccacgtggcagagaccgcgctccggctaggac

SEQ ID NO: 300300 - DNA, 122 bp, Homo sapiens
caggaagagcacgggacagaccaaacaggcgctaccaagtatgggttccagacccccacccggccattccagacgcctccctgtgctgcgcacacagcctccccgcacccgctctgcagctc

SEQ ID NO: 300301 - DNA, 122 bp, Homo sapiens
ggctcgggacctgcccggagctggatcaggcactgccctgaaccctcccacaccagaggccgccaccagaaggcggagacaccggcctccttcaaggacagtggcccctctgtaaacaggcg

SEQ ID NO: 300302 - DNA, 122 bp, Homo sapiens
ttccaagatgttccaagagtcttaaacacctggtgcagttccgagcacaaggcacacgaacggtgctattagcgtttctaaccccgcagagaactcctcgcaccccagtcctcaaaatcccg

SEQ ID NO: 300303 - DNA, 122 bp, Homo sapiens
cagaggctccgccggctccgctcggctcggctcggctcggcgcgacccgcggcgctaggccgggtgtctgccactcactgtcacccgcagccaggctggccaataagcacggggggcggaga

SEQ ID NO: 300304 - DNA, 122 bp, Homo sapiens
ttcctttacgtgcgtctagctggaatcttccgtccactatctcctcgcacgcatcagcggcgtcagcagaggctgttgctaaggcctgtccaggctgcggtgggcacatctaatctacagcc

SEQ ID NO: 300305 - DNA, 122 bp, Homo sapiens
cgggcccttggcaaccggctttctgcactggacgctgccgcccagagagctgctcatcgacgtttgggagagagggagggaatgttttaggattcccagcccttcggcacggggaaaatgga

SEQ ID NO: 300306 - DNA, 122 bp, Homo sapiens
ccagaggctgccctgccattcaggctcccctgccctctggctttcaggtggcttggccaacgggacgggctggcaggagtctgggcagtggggaggaacaagaggccagggtaattattccc

SEQ ID NO: 300307 - DNA, 122 bp, Homo sapiens
ctttcatctgacccagggttaaactgtggcttgggactgactcaggtcctctcttggggtcggtctgcacataaaaggactcctatccttggcagttctgaaacaacaccaccacaatggaa

SEQ ID NO: 300308 - DNA, 122 bp, Homo sapiens
gggggcggggcgggggaggggaggtaggacccgctccggaaggcgctgtttgaagcttgtcggtctttgaagtctggaagacgtctgcagaggacccttttggcagcacaactgttactcta

SEQ ID NO: 300309 - DNA, 122 bp, Homo sapiens
ctgccttacttgactctgtaaaccaggtcctttaaaatatcccgcgctcgtttttaccagcgctgaataagacctgtgaggcctttccacccttgtaaaatcaactggacttacttacggtc

SEQ ID NO: 300310 - DNA, 122 bp, Homo sapiens
cctgctggtttgctaacttgctgttggctttacttcaataatattgagccgagcctgtaacgagagaaagaggaggagctgatctcactgagaaaaaaatacactgctgtgatagaacatac

SEQ ID NO: 300311 - DNA, 122 bp, Homo sapiens
acagaccctggggagaccgaagcttgccactgcgggattctgtggggtaacctgggtctacggaagtttcctgaaagaggggagaagggtttgcatttttcctatggaggattcttctctct

SEQ ID NO: 300312 - DNA, 122 bp, Homo sapiens
taagggcgctcgtgcccgtctctctgcactaaggaacgcacctccacatgtctgagtgcacgtccctctccatgtgtgcacgttccgtgttcacgccgcccatgtctgtgcaggggcgcttc

SEQ ID NO: 300313 - DNA, 122 bp, Homo sapiens
tgccgtccccacgaccagggtggctctgcttgttctcccgctgcgccagaggcagctccacggtggcatccagaccccagtgagcagcgggtccagaccttccagcctttggctctccagcc

SEQ ID NO: 300314 - DNA, 122 bp, Homo sapiens
attcccacagacttgcagaaggggagatgagtctgtagtgtgtacttttaaattggttagcgactgtttgctgtgaaatgggcacttcccctagacactacttacatgtccttgaaacaatg

SEQ ID NO: 300315 - DNA, 122 bp, Homo sapiens
ctatatgactagcaaccctttgccaccccgaacacattcctactcttcctattcaaagtgcgatctgtgattcggcagatctgagagggaggcatcagtgtcacctgggagcttgtcagaaa

SEQ ID NO: 300316 - DNA, 122 bp, Homo sapiens
gtctctaaaaaaaggcagaaaagccagaatttactgcccagtccacaaacggtggctaagcgtacaccacacgaaaaggggctttttttttttttttgagacagtctcactctgtcgccagg

SEQ ID NO: 300317 - DNA, 122 bp, Homo sapiens
cacgaacgaggccatggccaagacgggaaccaacgctgactgggtcactctcgtagccagcgccgcagctcccgtcccgccggccgtcttgacgcgaggcctgccgggaaacggagtctcgc

SEQ ID NO: 300318 - DNA, 122 bp, Homo sapiens
atcctcctgcctgggtctcccaaagggctgggatttcaggcgtgcgccgccatgccctgccgcaggctttccgattctgaaccatagagtcaatgaaactgtcctccatcccctccagagat

SEQ ID NO: 300319 - DNA, 122 bp, Homo sapiens
tctctcctaccctgctggccactggctcacagccccttttatcaagtcctccttttctatcgacttcctcagggctttttctagaccttcttcagccagatctccccaggtgattaatctgt

SEQ ID NO: 300320 - DNA, 122 bp, Homo sapiens
gttccgctggtccctgaacaaaaactcctaccctactagtacacagcccacaacaatgcacgctgccggcgctacagcccctaagcaaccggccggaagtcggccccacctcctcctgatgt

SEQ ID NO: 300321 - DNA, 122 bp, Homo sapiens
tctttgagccattccagggagagttaaatactgaacaattacgcaactcttttgtcaacccgtgggtctttccagctctggtccaaaagaaagtctctgcagcaatacctgctattcctgga

SEQ ID NO: 300322 - DNA, 122 bp, Homo sapiens
gctgtaaagaacctgaagaaatcttgggtttggctatcctttaatccgataggccatttgcgcaccaagtggtcaaacaccgtttcaaatgaccgggtgaacagcacttccaatgtggtgtg

SEQ ID NO: 300323 - DNA, 122 bp, Homo sapiens
ttgatcaacttttttttttttttttttctgagtgggaagttaaagcctgatgcataatctcgaaggaatgttcatttttatcggaagaaatgcagctgaggcctctgtttggcctttctctt

SEQ ID NO: 300324 - DNA, 122 bp, Homo sapiens
ggaggccagagtctcctcacattcatattcacaacactgcggatataatccgagattacccggaaatgatctgctgagacaaaagaaaccatgcccatcggagaaacctaaggaggccagag

SEQ ID NO: 300325 - DNA, 122 bp, Homo sapiens
acatgactccactgtggtctcccgtcctgtgggtgtgcatgcttcatccatccattgcaacgtcaacagacccctctcctccttccacttctctcctcctgttttctagtttgaaactctta

SEQ ID NO: 300326 - DNA, 122 bp, Homo sapiens
tcctttccagtctcccgggattacaggagctgttcccgactttgcctcccgtagctgttccgcacatggcgggaatgttgttcctcagcccgggcgagccttacttaacctttcctttcctc

SEQ ID NO: 300327 - DNA, 122 bp, Homo sapiens
ggtggacacagcgctcgttcgccctcctgcacgtccgctgagccgcagggacaggcaacacgctgtggcgagtcctcagacaggccccgcctcaggctctgccttcatgatttccacttgcc

SEQ ID NO: 300328 - DNA, 122 bp, Homo sapiens
gccattcataactatgtgggtttgcttgcatatattcaggtgaacaggaaggagcgaggtcggcacctggcatgtacactgctgatgctgagataccaacttatacaaatgaaactttttgt

SEQ ID NO: 300329 - DNA, 122 bp, Homo sapiens
ccttgtcctgacctgttctcggcaccttaaattattagaccccggggcagtcaggtgctccggacacccgaaggcaataaaacaggagccgtggccgtgtgtgtggagtgggctacagcgtc

SEQ ID NO: 300330 - DNA, 122 bp, Homo sapiens
tacactcatgctccgagggtacgtttgtagtcattctcatcagtggaaatgcccacctgccggcagaagttatttggaaccaagcaagagcactgtccctggctgtggtgttgtttctctag

SEQ ID NO: 300331 - DNA, 122 bp, Homo sapiens
tctcggtggcccagaataaacttcagccgaatgagaggatgtctaggcggccgccccccgcgcgccggcccgggagcccgggttccatctgcccgcggcccggaggtgcgcccctgcccgct

SEQ ID NO: 300332 - DNA, 122 bp, Homo sapiens
aggggcttgtggctgagcatcatactccttatctgagggaaggcatctgatcctccttcacggcccctctccttcccaggggccccacattgccactccactttattcctaattcttggctt

SEQ ID NO: 300333 - DNA, 122 bp, Homo sapiens
cctgctggtttacagtgatttactcacagattaccctctgacgaagggggccccagcctacgcgcctctctcgtatatcaaaaaggaaatcctgaagacatccctataaacgcagcggggag

SEQ ID NO: 300334 - DNA, 122 bp, Homo sapiens
gcagacgcggagccgagcgcgcccgcaggctctttgctcagagctcagccctacatagatcggcttctgccatggcctccaaacaaaccaaaaagaaagaggtgcatcgtatcaactcggcg

SEQ ID NO: 300335 - DNA, 122 bp, Homo sapiens
gctgctcctcgccagtattgtgcccccagcacttagctgagtgccggcacgtaggaagcacgggtggtgcctgtggatgagctcacgcgctctgctgctgcttagccgtgtgctcttaagca

SEQ ID NO: 300336 - DNA, 122 bp, Homo sapiens
gataagccttccgtttacatgcatggagaaattttaacagaaacaccttcagagatcttgcggcgctaggaatttccatgagggcaacaccggggaggcgggtggcttttcatcttgcagct

SEQ ID NO: 300337 - DNA, 122 bp, Homo sapiens
ccgaagtcagattaaagggctcgaggacggcggacacaggggtgggcgccagggatgcggcgttaggggcgtcctctggaggcaggggcgccggcacaccctcttcagccatcaggatctgg

SEQ ID NO: 300338 - DNA, 122 bp, Homo sapiens
ctacgaatacgcggtgtcttacgtcgcttcctccgttcttcgttgcactggccaacgggacgcttagtctttcggcaacggggtgaaaccttccttgtgcctgaaaaaacggtacttcgcgg

SEQ ID NO: 300339 - DNA, 122 bp, Homo sapiens
taatgtctgttccctaggtgacatataggactactcaaacctcttaccacacaaagtgcacgatcacgcagtcctgaaaaatacacgttaggtttatattttgtgtaacagtttatggaaaa

SEQ ID NO: 300340 - DNA, 122 bp, Homo sapiens
atgacttcgcatcacaagggaaccatggcttgcaacagcacctggcacgcagaaggtgctcggtaaggtggaaccactgctctactcaccccggaggatcgccttaagccccgcacactctc

SEQ ID NO: 300341 - DNA, 122 bp, Homo sapiens
tcctagagctctgtacacaccaccctcccgacctcagccctccaactcccgataaccagccgacctcctccaaccgtgcggaagaaaagggttggctatttccgtggcccaagtaatagtca

SEQ ID NO: 300342 - DNA, 122 bp, Homo sapiens
ctgcgccacgcgctcccagttccacttcctatctcctgctggacggacgtagagcgtccacgcccgcccagcactgccggctgccaggactacaagcggcacgccaacgtctaagtcccgcc

SEQ ID NO: 300343 - DNA, 122 bp, Homo sapiens
accctaggggtgcgaggtgcagaccgagccctcacatctcccaggccgcagcaggtgggccgatggcttccccgaggcctggcaccccaggcctggctctgcgccctgaggctcccaggtcc

SEQ ID NO: 300344 - DNA, 122 bp, Homo sapiens
gcctcaggccccagattccaccagcacaacaaccctgttacccagggcagagggatgctccgcattacggctcttaccgaaggttgctgtacgcccgagccaccttccctgaaatccgatcg

SEQ ID NO: 300345 - DNA, 122 bp, Homo sapiens
cttacctttttctctcttgctacaagagaaagcagaggcagcctgagttccctgcactcacgcagagagtgtgggtgggtcctgattactggcagactctgatattgagagcagctctgctt

SEQ ID NO: 300346 - DNA, 122 bp, Homo sapiens
tcacggataaagcctctctgggcggccaagtcgcctgtttgtctatggtttcagtaaatacgtctgttgcggcatctagcggctatgggtggcaacgcggctgataaatttcgggctggtgt

SEQ ID NO: 300347 - DNA, 122 bp, Homo sapiens
agtagggaaaagggctccctttttctaaaagaaaaacaaacctcttctccctcgcagcggcggagaaacgtttgagtggccttgaacagaatccctccctagggagaggctgcctttctccc

SEQ ID NO: 300348 - DNA, 122 bp, Homo sapiens
gggtagtttgaggtgcttgaggatgcagcagtgaacgatgttgatgacagtctctgccctcgggcagcttcctttctagtaggagacaatatggaaataagagagtatcgttggcaatacta

SEQ ID NO: 300349 - DNA, 122 bp, Homo sapiens
caggggaagaggaagtgcctttggtcctggggaaggttggcttgtcttggtgggtggggacggtcattatcagctttctggacacacagacagagacagacaggatggacttcctccggcta

SEQ ID NO: 300350 - DNA, 122 bp, Homo sapiens
aaatgccgctccctgcaactactgagcccagaggagcgtgtttctgtcaccgactataagcgactgctggattctggggcattccacctgttgctggacgtcaggcctcaggtggaggtgga

SEQ ID NO: 300351 - DNA, 122 bp, Homo sapiens
ccggccccgggttgaagttggtaactgagcggcaactccggcgggcgcggagttacagctcgtgacggcctccgagacgccagctgccccttctcggatgtgtggcttcgacttcctgattc

SEQ ID NO: 300352 - DNA, 122 bp, Homo sapiens
ggggaagtcaggaagaagacgccgagtgaggtcacggtgcccacgagggtggattcccctcggcctgaccacgccaggaggtggccgaagggaagagggtggggcaggggctgctctgcacc

SEQ ID NO: 300353 - DNA, 122 bp, Homo sapiens
ggaatattcgtgctctcccaggtgacccatggtgtcaccaggtaactgccaggtgaacctcgcagagcagcctcttctgcaaagaccaataggatactgctgcattttccttaagttactga

SEQ ID NO: 300354 - DNA, 122 bp, Homo sapiens
ggagtgctgggctccgagcaagtctattgcatgctttcctggccaaagctatatggaaagcgggaacagcaggctggggagatgacgctggggggtggggaaggaaagcgtctcgaggtccc

SEQ ID NO: 300355 - DNA, 122 bp, Homo sapiens
atggaatttccagaaggcagcaagcaactttaaagaaaatcggatagggacctctcatggcgagaaacgaatcttgtatatcctaggaaaaatgaaacgaagattggctatctttcattctc

SEQ ID NO: 300356 - DNA, 122 bp, Homo sapiens
gattgtagtggagtttaagggggtcaagcagtcccaataagtgtgagttctcattgtctgcgatcccatttctgcttggaagttggctggagctgcaggctggctccccagcaactgctggg

SEQ ID NO: 300357 - DNA, 122 bp, Homo sapiens
cccctgacctatggaagggaactcatgttggccggacattttaccatgtgccaggcactgcgggcactttacataaagcagccaatgtcagaactagaaagcgggagagctgggattcagag

SEQ ID NO: 300358 - DNA, 122 bp, Homo sapiens
ccaatttcggaatagcgcggcccgggcggcggcgtgcgctgggaggaatgctgggtctgtcgctagcgccaaacttgaccacgctgcgaccttttcactctgtgctctgaccttcaaatctc

SEQ ID NO: 300359 - DNA, 122 bp, Homo sapiens
ccccgacagaaagctggtcagaaaactggccactcctctccttgccatggggtcccaggccgggctccagccccctcttggtgatgaggctcctccttgcaaaggccagtcctctggggaga

SEQ ID NO: 300360 - DNA, 122 bp, Homo sapiens
taccttcctcccgacacccgcggcgtcctcctgcatccaccctcagaggttatcgaatgccgaggagcccaggatgcacttccgaggctcactggtgactttccggagatacttaggcaaat

SEQ ID NO: 300361 - DNA, 122 bp, Homo sapiens
tttcacgtactgcccgcgggcttcaaaatggtcagcgggccggttgtacgctgtccacaccggttctcccacaaacagccgcatggccttcgtgtagttctggaaaacagacaaacacaccc

SEQ ID NO: 300362 - DNA, 122 bp, Homo sapiens
tggacgcccgaccccacccctgccctcggccctccagcgcagctgcccagcctggagccgcgcctgaagtgggcccgcagtccaggaaaggcgttcaccaaaccctaggccaagggctggga

SEQ ID NO: 300363 - DNA, 122 bp, Homo sapiens
acagcacgtgacgggctctgcagagctctgggaaccctgcggggtgaccacagcacgtgacgggctctgcagagctctgggaaccctgcggggtgaccacagcatgtgaagcgcactgcaga

SEQ ID NO: 300364 - DNA, 122 bp, Homo sapiens
aagtggcgcagagccagatgtaggctgccgcgagaaatcacctgcccaatggcgacctgtcgctctcgcctggcagcaggtgaggctcatttaatggtcagcggcccctgaacagtcctctg

SEQ ID NO: 300365 - DNA, 122 bp, Homo sapiens
ccagggctgcgggcctccgcctgatccgcgcgagcggggccgaaagccgggtcgggggcgcggcctggccacctgcgggcccctctgggccccgctgcctccttcgctgttcgccgtcccgg

SEQ ID NO: 300366 - DNA, 122 bp, Homo sapiens
cctcgggaatcaacccgatacccgggattgtggattcacatcccggccgtcacatcccagcggctgtcagctctgactgtacttggaatcagctggggagtttaaaataccacgctcctggg

SEQ ID NO: 300367 - DNA, 122 bp, Homo sapiens
ccgctcgcccgggagccttcgcgactccccggctcgcctgtcccggcttgatggatctaccgaagagaaaagcgctggaaagaacctggaagccatagcaagtgagccccgcttccaaattg

SEQ ID NO: 300368 - DNA, 122 bp, Homo sapiens
ttcttctgtgggggatttatctcttcttcctcattcgttaatttattcaatcacttatatcggcatgggctcatgaatatttcttttgtactttgagttataatccaatatcacttgtttta

SEQ ID NO: 300369 - DNA, 122 bp, Homo sapiens
tcaatcttgatttttgaaaaggtccaaggatgattacgacgtgcgtaggttgcgaaccatcgaaaagcacccaccaatgtgtcaacctggcaactcaggaaaaagccaataaggagcctgac

SEQ ID NO: 300370 - DNA, 122 bp, Homo sapiens
tacaatctcagtgtcgtgttttatctggcagccctaatcccagctccagcacttattagccgtgtaacacagtgcactgctgaacatctctgtacctcagcttcctcctctgtaaagtgggg

SEQ ID NO: 300371 - DNA, 122 bp, Homo sapiens
ctcctctcctccagccccggccggcctcggctcggcccccggcccgccccttccagccctcggcacctcccgccggccgcttggctccgccactcggcactcactgcccgggccgcccggac

SEQ ID NO: 300372 - DNA, 122 bp, Homo sapiens
aggaggaggaaaggggcctcagctcacttgggcctggctcattagtgtgatatctgcttgcggcaggtttccttggcttccatctttagtgaaggcaggatatggagcaggtaatagagctg

SEQ ID NO: 300373 - DNA, 122 bp, Homo sapiens
gtcccggcgtctcggtggtcccaccgcgccggttgtcgccgcgcgaagccgcccgggccccgggacacaaggacccgaatcaggagagtctctccagtcggcatggtggctctggccgtccc

SEQ ID NO: 300374 - DNA, 122 bp, Homo sapiens
actagttggaaacaatgaggacaccttcagtctacattaaaccctttatacaggtgtggccggcaagatggacgaatagaaagagctcttgtctgcagcttccggagagatcaatgcagaag

SEQ ID NO: 300375 - DNA, 122 bp, Homo sapiens
ttttcattgcctggggatgagagggagagacaacgtgtgtcttacacatctcccaacagccgacttagatgtgatccgttctcccagagggagcaggtttctttgaacttttcctttttatg

SEQ ID NO: 300376 - DNA, 122 bp, Homo sapiens
agccctcatgtttcattgtcttaatgtcggggagcagcctggtgtcctgccccaggtgtccgcatttttgcatggtaaggaaaaggcttacttgcccttcagctcataaaagcagaaggtgt

SEQ ID NO: 300377 - DNA, 122 bp, Homo sapiens
aacggggagagcacgggccccccctcgcagcagccgccgcccccgtcctcgtcctccctccgcggacaccaagtgcgtcaccacggagaccattccctcgagcatcacgggaagtgtagtct

SEQ ID NO: 300378 - DNA, 122 bp, Homo sapiens
cccgcatccggcatcccagcggccgggcatgtagcagcggcagcaacggcggaatatgggcgggaaccactcccacaagccccccgtgtttgacgagaatgaggaaggtaagagagcgagag

SEQ ID NO: 300379 - DNA, 122 bp, Homo sapiens
accagttgcactcggaagccattttcaccaacttccggtgggtggcaagagaaggggcaccgtgttagcaacaacgaacttcccacggcctgcagcccccacggaccacgcagcgcatgtga

SEQ ID NO: 300380 - DNA, 122 bp, Homo sapiens
cagtgcagtcgcatctgcggagtgtctctatgggagccagtctaccaccgcccagggggccgggacccttgctgggcctgctctgctggcaggagctggagttggcggaagtgaagagagtg

SEQ ID NO: 300381 - DNA, 122 bp, Homo sapiens
aagtcctctccagttcaactcccaagctgtcttcttcatgaagcctccttcattttctaccgtccattttcaaagccctttatggctaccttccctagaatgctcattgcactagaaagtgc

SEQ ID NO: 300382 - DNA, 122 bp, Homo sapiens
cttcattagcttcacgtctcaaactgcctctgcaatgttcttcatgagattaattaagtgcgagaattaaatgaggtgagccgcgaacggggcctagcatagtgcggggcgcactcagcagg

SEQ ID NO: 300383 - DNA, 122 bp, Homo sapiens
gaacacccatccatatgcagtgtttgagaactaaggcagctcccttgctctgttttcctgcgcctagcccccggacttttgtgccgtttgcagctctttttcatttcgaatacccgcataga

SEQ ID NO: 300384 - DNA, 122 bp, Homo sapiens
accgcccctggcccctggccccagaagccagtacccgcccgccgccgcctcttctgccagcgccgccgcgtctctctagcgctccgagctgcgtccccatccccgcccccacctcagctgtg

SEQ ID NO: 300385 - DNA, 122 bp, Homo sapiens
ccacttcataaatcacaggtaccttggacttagaatgcacaagccctgtttccatggcctcgatttcagcagggacagatactgcctggagagagagcttgccaaccttctgttttaagcac

SEQ ID NO: 300386 - DNA, 122 bp, Homo sapiens
cggcgcagaaggtgctgtcccaggtaacacgggacacgcgaatgtcctcatagcactggtcgttcttgaccggctgcccgaacacatgccggaatttgctctgccggaccactttgcggaag

SEQ ID NO: 300387 - DNA, 122 bp, Homo sapiens
agcatcatcaagctgagcttccagctacaaaaggaagatccagtttctattaacaaaaagcgagccctgcttcaccagttacagcagcacccacgggacctccacaagaacaagacctcgaa

SEQ ID NO: 300388 - DNA, 122 bp, Homo sapiens
ggaagcccgcgtcaggcccaggaggtgcgccagctctctaggatgctggccaaggtcccccgcacttggccggatccaggcagggagtgacggacctgctggcatcctcctgaccccggttt

SEQ ID NO: 300389 - DNA, 122 bp, Homo sapiens
agttgtagatggtctggaagtcggcccgcacgatgttgctgatggtcagggtggagatgacgccctcctcggtgctgatggtctccaccgtatagcgccccgatgtgcccgactccagaacg

SEQ ID NO: 300390 - DNA, 122 bp, Homo sapiens
acccaaggcaagccgaacccgagataccattttccgtttgcaggggcctggagatccacacgagggcgcgctcacgttccagaagccgcgtttgaccaagaggccgcggtaccttgtctgtc

SEQ ID NO: 300391 - DNA, 122 bp, Homo sapiens
ctgcctttagtatctaaaataaaataaccctcgttgcttgcattactcaacgcatttctgcgtcttggcgtctatggctaaacgagtattaattagacagtccgcagagagctggctgggga

SEQ ID NO: 300392 - DNA, 122 bp, Homo sapiens
gtccctcatgccccaattcctatttaacggcctaaacagatcttgaattaatctttcctgcgtttccacgcccacttagagtccctcatctctggccctattttctcaatgccctcccatcc

SEQ ID NO: 300393 - DNA, 122 bp, Homo sapiens
gattcaagctgcaggcgggaagcgctctagcaggggctcgccttgcgagagtccctgattcgagcctcttttcttcctcttcaatcaatactactctctcctactcaccattcaaaccgtct

SEQ ID NO: 300394 - DNA, 122 bp, Homo sapiens
tgcagatgaagaaaccaaggcatagagaggttcagtcatctgtccaaggtttgcatgacacgtgaccccagcatgcttaagggcatttctgaaggtgctctagaggtagccgtgcaaagacc

SEQ ID NO: 300395 - DNA, 122 bp, Homo sapiens
caaaggacaaagcgacagcagacggggcaggcgagacgtgaggcgagacgtgaggcgagccgtgaggcaagccggctcataaacgctcctaacggggaaaacagacgaacgaggagttggtg

SEQ ID NO: 300396 - DNA, 122 bp, Homo sapiens
attgcccggggccagcagggctggccggctgctccgagtgcggggcctgccaagcccacgcgcacccggaactccagctggcccgcaagtgccgcaggcagcccccgttcccgctcacgcct

SEQ ID NO: 300397 - DNA, 122 bp, Homo sapiens
cttcaatcactgataccctttcttccacttgatagaatcagctactgtagcttgagcatacgtcacgtagttcttgtgccatggttttcagctccatcaggtcattttaggtcttctctatg

SEQ ID NO: 300398 - DNA, 122 bp, Homo sapiens
aagcttgcattagtgacttcccaaatttctatttccagttggacctttctcttcaactcccgtctctataaccccacttgaacaggcatctcaaacctgactaaaactggctccacctacct

SEQ ID NO: 300399 - DNA, 122 bp, Homo sapiens
cagaggcacaggaagctgggtcttgatcacgctgaactccagacgctctctagatgtgcacgcatgtgcgtgtggagtgtgtgtgtgtgtgtgtgtgagagagagagatgtgttggggtggg

SEQ ID NO: 300400 - DNA, 122 bp, Homo sapiens
tgtctgcctggaactgaatgaaccctcctaccggaactgaaccctccaaccagggagccccgagtatcggcagcagtcagcagtgcccctggacgaagagacccacgcaggcgaggacgtgg

SEQ ID NO: 300401 - DNA, 122 bp, Homo sapiens
ctccttcagtttgccccaagtcacaggggaagagaggtagaccagtccaacatttacctacgagagtaccagaggcccagagatggagcctcactcgtctaatagggtcacacagcaaagtc

SEQ ID NO: 300402 - DNA, 122 bp, Homo sapiens
tgagtgttttctgcgtagcagtcccctcccttctgacttgagtattaattgctacattaccgctgccatgtaagaaagacagtcagcaaagcctgggagagctccagctcctccctccctgc

SEQ ID NO: 300403 - DNA, 122 bp, Homo sapiens
cgcagggtactgaccagggcaggagaccagagatgaatcaactccagcccgggagctcaccgtccagcaggggagataaggcagatggaaaagtaactataaaataaggcagacggtgataa

SEQ ID NO: 300404 - DNA, 122 bp, Homo sapiens
ggcagcactggccacatccacctgtataaagagtcagctgacctatcacaggctcgctggcgtggtgatgagaccggggcttgtccttccagtgtagctttcagtccgactgcggagtggag

SEQ ID NO: 300405 - DNA, 122 bp, Homo sapiens
gccccacccccgaatcttgacatttgctgccctcgactctgtgcgttgctcaccctatcacgttcataggacccctgcccctacaaataaaacaaaatacaggcagctttaaaatgccagcg

SEQ ID NO: 300406 - DNA, 122 bp, Homo sapiens
aaggggcgcggagaggcaggaagcggcctggggaggctggggtggccgggactacggacccgaccgcatagacgcgatcagcccctcttggcgttccggtgtagctgaccccgccccgggct

SEQ ID NO: 300407 - DNA, 122 bp, Homo sapiens
cccacatctctcccaaatatgactgcataagggctcatgctatgggccagattgacgcttcgtaattggtattagtcatatgtttatgttgtattttttaaaaagtcttaactcctttaaat

SEQ ID NO: 300408 - DNA, 122 bp, Homo sapiens
agggactgcaccccacatctggaggcaacggggcacggccgcaggcgtggtctgggggtgcggcctgagggcggaccccctgaggccccgccccaccccaaccccaaccgggcgtcccccag

SEQ ID NO: 300409 - DNA, 122 bp, Homo sapiens
gggcaccccctaccgcaccccccagccggcccgcgccgccgccgccgtcgccgcatcccccgccgtaattagtgctgctgccctccatgtgggctcgattaaaccgtgatttagccgaaaga

SEQ ID NO: 300410 - DNA, 122 bp, Homo sapiens
agagtgctgtctttccgtctggttcattttcctcggtaaagtcaccgtgagactcccccacgcggctgcacgcatgctccttccctctcacagccggcgtcggtgcaccgtgtgcacgcgcc

SEQ ID NO: 300411 - DNA, 122 bp, Homo sapiens
acagacttagtacccatagtcaccctcaatttcttctgtacagcactactctctgtacagcgttcccttccttagctagagtcttcatcccacccagcaagcactgaaatctaacagtgggg

SEQ ID NO: 300412 - DNA, 122 bp, Homo sapiens
agccttcacttcctctggtcgaggtctagaatctgagacctaaatgaatttggttgacaccgtctctgtggctggtggaattttggggaaggtgggcagggccaagtggatatcgctgccgc

SEQ ID NO: 300413 - DNA, 122 bp, Homo sapiens
gcctctctgactcaaaatgcctacacctgttgaaggataactcatgtgccacagcgaggtcgaggctggccttctcttttcttggtacatttgtagtgaatgtttgtcagaaaatataacta

SEQ ID NO: 300414 - DNA, 122 bp, Homo sapiens
cttcctccctctgctctcccattttcctccccactccccttctcccatctcagtaaaatacgtttcctaggctctttattatgtggcggatgattttaaggggccatttatttagtttttct

SEQ ID NO: 300415 - DNA, 122 bp, Homo sapiens
aaagcataacccagttctgacaaaggttttcagccagggctgggcctgcctttgactcagcgatgtgtcacattctctctgccggaaactctcattcttaacaccagtcatcatggtcctgg

SEQ ID NO: 300416 - DNA, 122 bp, Homo sapiens
tgtactgatacaaagttgtttgtcaggaattgtccttgatttacagaaacaacattggttcgtgattggctatccattgttgagctatgcattattaggttaatttgcagctgcttgtggca

SEQ ID NO: 300417 - DNA, 122 bp, Homo sapiens
ccatagcaaagggttgcccttggctacaggaggacgcgggctggcaggcttggttcctggcgagtttctaagcccccgcctgcggtctgaggcaccggctgaaccatgtcggagatcctgtg

SEQ ID NO: 300418 - DNA, 122 bp, Homo sapiens
taatctcccaactccaggccctgaccctgagtgagagcgaagtgggggcagggcaaagaccgcagatcagccctgacagatactccagccctcatgatgtgaaggtgaagacctatctgact

SEQ ID NO: 300419 - DNA, 122 bp, Homo sapiens
cgccagtctcaggagcgccgcaccggtcacgggtggaggtcagccaggcctccgtaagcgcggtccccttccaggagtagccttcgcctgggctcttgagtagatgccaagtaattccgcat

SEQ ID NO: 300420 - DNA, 122 bp, Homo sapiens
aaaatctttaggaaagtgatcatggctggacagcttcatgccccagaggcagcgagcacccgtcccatggctgccaagtccacagtcggggatgaagcagtcgggtgatgctcccaagtccg

SEQ ID NO: 300421 - DNA, 122 bp, Homo sapiens
cccaccccagcctctggaggtccaggatgaatgcctccctctttctgtcctggtaccttacgtgacctccggacggcagtgtcagtgttggaaatggcaggctgctgcaaatatgctaaaac

SEQ ID NO: 300422 - DNA, 122 bp, Homo sapiens
attattgctctctgtttagaaatgctatgttgatgtattacacctcagaacaactatgaacgtgccatctgcagcaggaaggtttattagactacaaatcaggatacagatgttggagggaa

SEQ ID NO: 300423 - DNA, 122 bp, Homo sapiens
gattttctcttagagtagaatgtatggttggttttacatttgtcattccattcccagggacgtgcgggagacagacgccttcctcttatctcaaccgcattgaggccttcttctttcactaa

SEQ ID NO: 300424 - DNA, 122 bp, Homo sapiens
ggtgcgcgtgtcggtgttgactccccttgaagctggtcgggctgttgtgcatcttcctgacgctgtatctggatctgggggcggtgctgagcccggcctggatcacagctgaccaccagtac

SEQ ID NO: 300425 - DNA, 122 bp, Homo sapiens
ctggctgcccggccttggctgccacagctaggtctcggggcgtctgcagggcagagggcgcgcccgctgcgtccccagctcgctgcaggcccaggcagcgtccaaagcgcccccggggcgag

SEQ ID NO: 300426 - DNA, 122 bp, Homo sapiens
agtggaaccggactcgcgactctgctgtgttcctgagtgtagtgctcagcctccatagggcgcggtgggaggcctgcctggtccaaactcagagagacgcaggaaggctgacgtggggaact

SEQ ID NO: 300427 - DNA, 122 bp, Homo sapiens
ttaaaggtatgcttaaaaatagttacagtctaggatctgtgacaaatacatgccctggatcgcagacgctctaggaattctgaagattagcattcttagagtggttggaaaagacagaattc

SEQ ID NO: 300428 - DNA, 122 bp, Homo sapiens
cgacctggcgctgtctcgcctaccatttccggaagtgccacgttacacctttcaatgtcacgttttcctacagagcagagcaaagttggaagccagcctggggggtcagacagaccacccca

SEQ ID NO: 300429 - DNA, 122 bp, Homo sapiens
ttccgttttgagttaaatgaactcgatgccttcgtatttcacgcttccgatcttggtctccggcaacaggaagcgcccgtccagcgtgaaggccatgatgtaggaggcgactctgccgctgt

SEQ ID NO: 300430 - DNA, 122 bp, Homo sapiens
cgcagtccgggcccggcgcgatgggggccgccgccggccggagcccccacctggggcccgcgcccgcccgccgcccgcagcgctctctgctcctgctgcagctgctgctgctcgtcgctgcc

SEQ ID NO: 300431 - DNA, 122 bp, Homo sapiens
ggaaggtcggtcgccatgttgggaaggtctgcacttggcctttggtcggccatgatgaggcggtctgacgtggctcttagagccgccatggtgggaaggtccaagggggattaaattttttg

SEQ ID NO: 300432 - DNA, 122 bp, Homo sapiens
tgctaaggctcagaaaggttaaattcctgccaaaggtcatatgactcacaagggcagagccgagactgcgatccaggtctgcgtgatgacacatcccggactctttctactacaccacacca

SEQ ID NO: 300433 - DNA, 122 bp, Homo sapiens
atttctttttagttcacagaggccttatataaattactttttactttggcacagcacttacgcttctgctaacactgaaatgggttcgcattcctgaccacaaaaggacagagatgaaattc

SEQ ID NO: 300434 - DNA, 122 bp, Homo sapiens
ttccctggatgagagaagcacggggcccaagatctattcctgagttttgttcagctctgacgtgctgtggttatttactcccagatggcagccgccaccacaccaaccacagccaccacaga

SEQ ID NO: 300435 - DNA, 122 bp, Homo sapiens
agagtcagagctgctccaagagcatgcggggtgttgtagttctaagaagcgaggcttgcccgattctgtgcctgtgcgcatgctgaaagcaggggcgggaccggggcggtcttccagcaggg

SEQ ID NO: 300436 - DNA, 122 bp, Homo sapiens
ccacactcccggaggccatggcgccggcctgcgggggcgcacgggcatgggccccggcgccgagctctgcactgagcccaactctccggcgctctctccggttcgctgttcctgagaggcac

SEQ ID NO: 300437 - DNA, 122 bp, Homo sapiens
atgctgggacttagggctactcctcactgctcactgagtttccaaggcatgatatgtgctcgccatctaggcaaatttacacaaaattgattaatacttcacttccatgttattgaatttga

SEQ ID NO: 300438 - DNA, 122 bp, Homo sapiens
gaaatcctaaccctcaaaatgacggtattaagaggcagagccgttgggaggttgttaggtcgtaaaaagccctcatgaatgggattagtgtccccataaaacaggccccaagagacccctca

SEQ ID NO: 300439 - DNA, 122 bp, Homo sapiens
tgtcccgctcgctgaagctggcggcgctgggcagcctgttggtgctgatggtgctgcactcgccgtcgctgctcgcctcttggcagcgcaacgaactgaccgaccggcgcttcctgcagctc

SEQ ID NO: 300440 - DNA, 122 bp, Homo sapiens
tctagatgattgtaagtcatgcctgtgtaatgaagccaccataaaaactcaaggacaggccgggcatggttgctcacgcctgtaatcccagcactttgggaggctgaggcgggcggatcacc

SEQ ID NO: 300441 - DNA, 122 bp, Homo sapiens
cgttcatccgatctaagacacctgagctggctggagtacggggagggctaagggcttccccggttctaatttcgggtctcatttccctgcggcaagaagacacctcccggctccccgcggag

SEQ ID NO: 300442 - DNA, 122 bp, Homo sapiens
tgccaatgacctgcttcctttcacggacgggaagcacctcatccgtctgaaccatcagctcgctgtatgactcccacagaacaggggcccagaacatccgggctgtggctccttggcccccg

SEQ ID NO: 300443 - DNA, 122 bp, Homo sapiens
caccttattacgtcagcttaattgcttccctgaccccagattttaggtaaactgtctatgcgaatgctttcataattgccatcataatagcaatattatattgaagtgtgtcagtcttttgt

SEQ ID NO: 300444 - DNA, 122 bp, Homo sapiens
cgacccctgccccggcccggggagagctcgctgcagccggccctcgggttccgcggagggcgtcgcttgtcacctttccgccaggtttagaactcggccgtcaggtgtaggacgcgccgggg

SEQ ID NO: 300445 - DNA, 122 bp, Homo sapiens
actttcttgtgtctctttttcaacttgccaggggaacagccccagagtgggcagatgccgcgcccgcataaagcggcaggggccaggaggaaagggcggcagaatggacgccacggacggta

SEQ ID NO: 300446 - DNA, 122 bp, Homo sapiens
gggtgatggtgctctgcagggcgggcagcagcctctcctgcatctcggggctgcacaggacgtagtcaggggccacgcaggtctggccggcattgaagtagcagaaccaggccacgcggttg

SEQ ID NO: 300447 - DNA, 122 bp, Homo sapiens
acccactcccactccactgcactgtgtttaagtgtacctactcaagggtaactacctacacggtagttaagagtagggtctacagacagattacctggattcaaatcctggctctgcttaat

SEQ ID NO: 300448 - DNA, 122 bp, Homo sapiens
agagcttcaagaaacctagcgacctggtgaggtgagggcatggctacgccgcgcgggttccgctctgaagactggaggtgcaggcagctgctcctttggtgattttcactgcagcagggcca

SEQ ID NO: 300449 - DNA, 122 bp, Homo sapiens
tcttgtctttataaccctgtatctgttgtcactgattcagctattcagtctgggacaaagcgacttttaagttctagagctatgaggaagctataaagggaatacagttcactctgtagaga

SEQ ID NO: 300450 - DNA, 122 bp, Homo sapiens
ttcatgcaaaaccatgttatgtaaatcagtgctgggttgagcacactcaagtcagagtcacgaattgggtcccccaccgcccatccagggtgtctgaaggcctaggccagcatgcccattat

SEQ ID NO: 300451 - DNA, 122 bp, Homo sapiens
ggccttatcactggggcgctgcaacatcacagaaagtgttagtcccagggctctccctggcgcgcgcggctcctgtgcttgcttcttattggcggacctggccctgggggcggagccgcggt

SEQ ID NO: 300452 - DNA, 122 bp, Homo sapiens
cactgcgctgctcccagcgcagaggggccgtgttccgggaacacgtttcctgctctaaaacgtccggtgtgttccggcccaagtgcctgctcaggtttaaagggggtttcttttgctagtac

SEQ ID NO: 300453 - DNA, 122 bp, Homo sapiens
ctaccggaagtgaaaccgaagaaaacgccacgtcgaaggcgtgggttgccgtaagtgcgccgtcgtcacgcgcctagcttccggcgatgggtggtcctgggatccggaggggaggcggggtg

SEQ ID NO: 300454 - DNA, 122 bp, Homo sapiens
ttcagttggtaccacctttcccaaatagtttggagcagagcactccggtctttgtaataacgtactcctaagagctgttccagtggactcacgcaggcgcaggagactacacttcccaggaa

SEQ ID NO: 300455 - DNA, 122 bp, Homo sapiens
gacaacgtaccagggaataaatgttttcaggaagcgccttcaaatgcctcgctgatttctcgtgacttcaactgacttcgccttcttcttccatttctggagacttcaaaacaaaggcgaca

SEQ ID NO: 300456 - DNA, 122 bp, Homo sapiens
ggtctgtgacacagaggagacgactgcccagcttaccccggctgcgcattgtggagaacacgatgatatgcccacatccgccggctgcatttcttcagaacgaggtgccactgctcacgctg

SEQ ID NO: 300457 - DNA, 122 bp, Homo sapiens
gccggtgcccgccccatgcccgacccgccttcttcctcccctgcctcctctgggtcctcccgcccttcacagccatgctcggactgcagggccccggccccgccttggcgcgtctgaaggat

SEQ ID NO: 300458 - DNA, 122 bp, Homo sapiens
tttggtaaacagcacctagtttcatcattcttacaagacataaaacttagaatcaccgtacgtttttttttttcactttctcatgcacttcacaactccatcgagacaaaaatctctaaagc

SEQ ID NO: 300459 - DNA, 122 bp, Homo sapiens
gaggacgggactgaccctctggccactaggggtctctcttgctccgctctgtgccagagccgtcgccaggagccctgggatccggaactggggcagaatccaggagcagggtgggccccgag

SEQ ID NO: 300460 - DNA, 122 bp, Homo sapiens
agtcaagcatgctgatatcatgtctatcgggggtctgatggcctcccatgcccagtgcagcggacttccacagggccactctttcatttctccaaatttttcagtctctcacatttgtaccc

SEQ ID NO: 300461 - DNA, 122 bp, Homo sapiens
gcgcaggatgcacccaacaccaccgtcgcaggcagagtcccgccccgccaggcgacgtcacgtgacgcacattcgctcaagtccacatccgggcatccacctggccctggggcggagcctgc

SEQ ID NO: 300462 - DNA, 122 bp, Homo sapiens
ggtcggggttgggaacgcagaagtgctcgcagaggtcgttgcaggactgcgtcgcggatgcggtgcaggagcgcccgtctgcctgcagggcggcgccggctgggcactggcagcggggagcc

SEQ ID NO: 300463 - DNA, 122 bp, Homo sapiens
agtggagtcccgccccacgcccaccactgatggaagaattctgccttgatcgtctgtgatcgtcaagaaaacaaattctgatgctgtagagttgtgcttgggagtgtctcttaattttaaaa

SEQ ID NO: 300464 - DNA, 122 bp, Homo sapiens
atgtcgccacccgactccctggggtttcccagggctcagaatccaaatttggtttaggtacgtgggtgccgaatgcaaaacaaaacaagcaaaacaaaaaccagcaagtgaaagacgaccta

SEQ ID NO: 300465 - DNA, 122 bp, Homo sapiens
tgtccaggctcactgatctcaaatgctgaactgctaaggatgtcatgtccccaaaggagccgccaggctcagcctcacttcctggaaggcgtgaacattgcaagaatgtggaagtgaaagag

SEQ ID NO: 300466 - DNA, 122 bp, Homo sapiens
ccagcagatcacgggcacgcattcgccacccaccgaacatgggcttgaggtgggcacgagcgctttttgccggaacgtgtaggggtcccccgggagacccagaaaccacagcgcctagctgc

SEQ ID NO: 300467 - DNA, 122 bp, Homo sapiens
cccacgagcgccgagcgcagccctggctcccacctgcgcctctccctccacacctccccacgagaagagggagtggactcctgcctcggccagccccaaagaggggcctccacaccgcagcg

SEQ ID NO: 300468 - DNA, 122 bp, Homo sapiens
agctcgggcctgtgtaattgtaggagaagacactcagcagtgattgccatggcacagagccgtggtcattgttgctgttacaaagaagaaaaccatctgagttctaactccttggttgctta

SEQ ID NO: 300469 - DNA, 122 bp, Homo sapiens
agtaaggggtctggacctccggacgggccgttgttcatcttaggaaattcgcactccagccgccttaaggcctggcccggtgggtttaggaaattcgcactccagccgccctaaggcccggc

SEQ ID NO: 300470 - DNA, 122 bp, Homo sapiens
ctcagggggacctgctccaggtacctcagcgtcagcccattgacccacacacagcccttgcggctcagggccttgaggcagaaggccagcagggcactgcctttctccaggtagggctccag

SEQ ID NO: 300471 - DNA, 122 bp, Homo sapiens
cgcatgcgcgggcgcacacgaatgcgggcgcacacgaatgcgggcgcacacgaatgcgggcgcacccttgagtcccctccacaaccgcggtttgatcccagcggtccagtcggccggtgctg

SEQ ID NO: 300472 - DNA, 122 bp, Homo sapiens
actgccgggaggccaggaccaaatgtgtctccttccggcttttgcaccacactaactaaccggcgccaggccgcagagccgccctggccttcggcgagaactcaggcgagcgcggcgcacgc

SEQ ID NO: 300473 - DNA, 122 bp, Homo sapiens
ggcccccccatcggggcactcggccccccatcggaacactcggccccccatcggaacactcggccccctcatcggggcactcggccccccgtcggagcactcgcccccccgtcggggcactc

SEQ ID NO: 300474 - DNA, 122 bp, Homo sapiens
actccaaccatttagctagactttcctgtttcccagctagtccctcttcctgactggcgacgattcccactgctgcttacataccctgtgccctgtccctcctctgagcctctgcgtgtact

SEQ ID NO: 300475 - DNA, 122 bp, Homo sapiens
aaggaaggtagacgtcaagggctgaattacacaggacacgccacatcaccaggtcccccgcgcacgggtgcagggaaccttgtgtggaggtttgactttcaatagatcgcagcgagggagct

SEQ ID NO: 300476 - DNA, 122 bp, Homo sapiens
acgcttctttcaaaagctcctgtggttacaccatccttcacgtggcctttaatatccccacgtgccgcggctgcattggaacccagcgccacgctccccagtctctcgtgggttccgggcag

SEQ ID NO: 300477 - DNA, 122 bp, Homo sapiens
catggatttgttgagtcctgacaagtgccaggtcttgttcttggtgctggcgtgcagcagcgaacaaaataaccctccctcggggaggaagcagacaataatcaaagaagataagtgaacaa

SEQ ID NO: 300478 - DNA, 122 bp, Homo sapiens
ctcctcattcacaaaaaattgacccacgttgaaccatgatgcttctccccactccagcgtcgagccaggcggcgataggccaccccgcacgcccgtcagccggcccggccccgcccagccag

SEQ ID NO: 300479 - DNA, 122 bp, Homo sapiens
gtgtttattggctccttagaaatcagagtcagtaacaactgtacagaggcccccatcttccgtgcgcccacccttccccactcccgcccggtggccccggaaaaagcagcttcatgtgggca

SEQ ID NO: 300480 - DNA, 122 bp, Homo sapiens
gctattcatgatcaccaggctattgagcgcatagcagtacacagccatagtactgggtcccgcgctgcccgccgccgcggctcccgctcctgctccgccgccggcgcctcctcctcccggcg

SEQ ID NO: 300481 - DNA, 122 bp, Homo sapiens
ccacagacaccctccaccccccaacgccaggctgtgccccccattttccttccagccaggcgctcggccacgccctccaggttccacctcccaccacgtgccaagccacgtccccaagcccg

SEQ ID NO: 300482 - DNA, 122 bp, Homo sapiens
tctagaaggggcagttgctccacacaccagccaagttgttgccatgtaggaatgcagggccggtgttgccaaatcacaggtctcattattcaagagccgacaaaaataatattttctgtgtg

SEQ ID NO: 300483 - DNA, 122 bp, Homo sapiens
cgacagggccagccgccgacggcgcccgctggcctgcgccgcagtgccgccgctcacagccgccgccacccagagcccggagcccggaacccgccgctcctcacatcccagcccaggccgct

SEQ ID NO: 300484 - DNA, 122 bp, Homo sapiens
tgcccttattcaaaaccccatgcacttcaagtctcttttagacaacacatttcaattttccgggctgactagtctccctgtgcagaggcagttgagaggctttgctctgcagagggaaaaga

SEQ ID NO: 300485 - DNA, 122 bp, Homo sapiens
aattgggttgtttttctattgctgagttatatgagtttttgatacattttggatattaagcgcttattagacatagggtttgcatatatgttttccaattcataagctgccgttacactttg

SEQ ID NO: 300486 - DNA, 122 bp, Homo sapiens
aggagccagcagccaatgaagcaatccttggaagaggccaggcagacagcacagcgttatcgaggaacttcttacttagcacgaaggggcaaaagcgggcgaggcagcaccccaaagccagc

SEQ ID NO: 300487 - DNA, 122 bp, Homo sapiens
ggctagggacgttatgtaagttgagccacgctacgctaaaagttccacactcaattctagcgtctcggctctggactaccaagttccggagcaagcagacagaccacctctttacgttcccg

SEQ ID NO: 300488 - DNA, 122 bp, Homo sapiens
aaactttgaaagggcccatctgctttttgtcttctgtttctgtttcttcagctcctttttcgctataaaactaaacatctctgcacagctcattgagacgctcagttttctttataaaatgt

SEQ ID NO: 300489 - DNA, 122 bp, Homo sapiens
agtcagcagcatcacatccggccccctagggcttccctgggttgaaatcaggggcagaatcggattctgccaggataggggtgggggatgtgggatagaggtgccggtagggatggggtggg

SEQ ID NO: 300490 - DNA, 122 bp, Homo sapiens
aaacctaaaaagttaagccctagactctttagtgcctgaaactggggcagccaaagaaaacgaggaagaaagggagagtgggtacaggaccacagagagtgcattctcggtgccccaagtcc

SEQ ID NO: 300491 - DNA, 122 bp, Homo sapiens
gcaattcatagagtaaaaagtgaaaattcccacttcctctcttcaattctcccaccaacccgaaaagtaagggaccaacaggtgcagcgaccactttctagtgtatccttcctaagttctga

SEQ ID NO: 300492 - DNA, 122 bp, Homo sapiens
aagtggctggtagtatattgtagataaaggccacaccagaaagggtgagtgtgaggtaagcgagctcctgtggggaatttgcctgaccagagcacaacattcacattggcaagcagctgaag

SEQ ID NO: 300493 - DNA, 122 bp, Homo sapiens
gtatttggttttctgatcttgtgatagcttgctgagaatgttggtttccagctttatccacgtccctgcaaagggcataaactcatccctttttatggctgcatagtgttccatggtgtata

SEQ ID NO: 300494 - DNA, 122 bp, Homo sapiens
gcagagccgccacaaggcctgccgggagtagtagtttgtatagttcgcagccggccagggcggagccgggtgggttggtggggagggcggggaaacaagcctggaccacaactcccaggagt

SEQ ID NO: 300495 - DNA, 122 bp, Homo sapiens
ggggcagcttggtcttggcgagctcctggctggtgctgcggggggtggcggggtaggaggcgtcgtggaagatggagggctcgatgtcgtgcaggaacagcagctcgggctccaggtccagc

SEQ ID NO: 300496 - DNA, 122 bp, Homo sapiens
cagccgctacggggcccaggggcgccgcatctcgttccctgccgcagcggtctggccgggcgatggtggtttcgcctcagcggttcccagaagcttctcgggtggaagaaggatccagccag

SEQ ID NO: 300497 - DNA, 122 bp, Homo sapiens
gatccaggaaattcttgtctgctctacctcacacccaagctcaggtgaccggtctgggtgcggcgtggagatggcgagagctaagtgctatggccgcgaaagggtgaagggcaggggaggaa

SEQ ID NO: 300498 - DNA, 122 bp, Homo sapiens
agtggactcaaagcgagggaagcggcagtggtgggtttaatgaggctccccgggcacacgcggtctgtgggcaggtgggtgtcctttgcatcacaagaggtgtgttttgggtgggatgaggg

SEQ ID NO: 300499 - DNA, 122 bp, Homo sapiens
agatatcactaggatgcttgtttatggtctcatgatttaaggccctgtcaaggtcaataacgtagatttgttccagcagataaattatacctgaatgtttgattgttcgtgtcaattttttt

SEQ ID NO: 300500 - DNA, 122 bp, Homo sapiens
gtgtctgcatcttttccatgtggataatcttggttcacctctagcacaggaattcttcaccggggctcctaggatgggctgggtgggtgggggtggaggatgtctgtctcccctgagtttgt

SEQ ID NO: 300501 - DNA, 122 bp, Homo sapiens
accgtgatgggagctgcagcacagtcgggggtgtaggttatgggggtgagtacggtgccccggaggcgcggctgatgtgtcttcctttctctatgaccgggtgtgcaacggacctctggtct

SEQ ID NO: 300502 - DNA, 122 bp, Homo sapiens
ctgtaaataactgaattttcttctggactgcgcatgaggggagaaagatgtctgcagtttcggtttcctggaaaatgaaacctatctcatttgttgcctgtgtcaaggggcagtgcttcagt

SEQ ID NO: 300503 - DNA, 122 bp, Homo sapiens
tttataaattaaactttatcataggtacgtaggtataggaaaaaaccagccaggaggccccgcacttcggtgttttctactagctctgcctacctccgtctgcgccgtctccctgactagtt

SEQ ID NO: 300504 - DNA, 122 bp, Homo sapiens
tatcttttcacaacaaaggctcagaggaagcgtagcaactaacttgtccaaggtttacgccggtttctagggggcagagctggcgctatccaccccgcctgtatctccaaacccgcttcagc

SEQ ID NO: 300505 - DNA, 122 bp, Homo sapiens
aaacggtcgtgcttggccagtagagagagaccatacagggggatggatgctggagagactcgcaaaattatggctcaaggctattgtaaaaattgtcgagcgtaaatgactgcgatttcaaa

SEQ ID NO: 300506 - DNA, 122 bp, Homo sapiens
gggcgccttgtcggggccaggcgggagggcgcacggcctctagcgagaggacgcaaaccacggcccaggctctcacagacctttggccatctggacacacagcggcctcctcctatgaggcc

SEQ ID NO: 300507 - DNA, 122 bp, Homo sapiens
gggaaggccagggcgggcggctgcggcgggaggcggccgagatgaaagtgtcccggctggcgggcaggcaggtggcctctcctggccctgtcagcactttttaatgtccccttggttagaat

SEQ ID NO: 300508 - DNA, 122 bp, Homo sapiens
ttatacatcagttctgaggtaggtgttactagcctcatttttacaaaggcagaaacaaagcgcaaagaaccttgcccaaggtgacagatagggtaagtagtgaaggcaggattggaacccca

SEQ ID NO: 300509 - DNA, 122 bp, Homo sapiens
gccagtccctttcactgatgaaaccagcctactttccatggtatctaataataaatgttacggctttgcctttagtgatggtagttcattttagatccccaaaccacttccaatgtaagagt

SEQ ID NO: 300510 - DNA, 122 bp, Homo sapiens
ttaggtcagggaatttctttggttgcagcccattttgcctttggttgttaatggtagaaccgtttccccacaatctgcaggaaataagaatcagaaagaaggacacaccattccatagcaca

SEQ ID NO: 300511 - DNA, 122 bp, Homo sapiens
tcgccttgatcgtggctgggtcgggcccaccgggtaggcactgggggccagggtgcgggccggcgcgcaagcctcgcctcgtgatcttgccggcgatccttccccacccactccctcccgca

SEQ ID NO: 300512 - DNA, 122 bp, Homo sapiens
cccagcaattggagcgctgagtcgaagtcctgattccacgataggcggatgaagccctaacgctgaaattctttcctctaggtctttggcagcggctggggccaaagcccgggcaagaccaa

SEQ ID NO: 300513 - DNA, 122 bp, Homo sapiens
cgtggtcacagcgggtagggggtggctgccgcagcagggaaggccggcgacacagctccccgtcccggagcacctcgggcaggagcttgcgcttggtctccggcagcagcataatgctgaga

SEQ ID NO: 300514 - DNA, 122 bp, Homo sapiens
tgtttgttttctaaccagagttaagttagtaaagccctccccttcaacagtcacctatagcgtaacaagttcggggagataatagtcaaacaaaacagactgtatcctgcctcgaagtagaa

SEQ ID NO: 300515 - DNA, 122 bp, Homo sapiens
tcaggatgcttgggaaagggcagaaaccctctgcagcctcccagccaggcctgcagacagcggatggtctgtctgtgcctccctgggcataccccagctgattgggtcatgctgttgcccct

SEQ ID NO: 300516 - DNA, 122 bp, Homo sapiens
cggggtgaatcgtgctcctgaaatggggactgtggtgcacagtcacatcatcccttcacacggcggccaccaggacaccttcagggcacttccggtggcaggaaacatccccaggcctgact

SEQ ID NO: 300517 - DNA, 122 bp, Homo sapiens
ggggtggacagccccggcctgtggaccctctgcctcagcccatctcaagcagcctcctcccgtggtcctgctcgctgccaccatgctgtacctggcaccacttcaccagtccccaggggcag

SEQ ID NO: 300518 - DNA, 122 bp, Homo sapiens
agtgatggagttgccattcaaacccaggcaagctggccctggagtccttgtttctaaccacgatacatactactcttcaatgaatattttatatttgtatatggtttatatgaattaattat

SEQ ID NO: 300519 - DNA, 122 bp, Homo sapiens
gcataaacctggcacaaaggccactcctccagcttgacctcaccccgcaggaccggacttcggtcaccccttggtacaggctggcaggtgggagggaatgcacgattcactcctggggtcgc

SEQ ID NO: 300520 - DNA, 122 bp, Homo sapiens
accccctgccgggggcccttcctgcacagctcggggatcccagccctcggctgccactcccgacccagagcccaggcccagcctctgccccaaccccgccaagcctgtgtgcacgcctgcca

SEQ ID NO: 300521 - DNA, 122 bp, Homo sapiens
cctgactcacggtgactattgtagtttctgtgaacctctgggttttggtcccactgttgtcgagagccttgaccaagtgtaaacgaatccattacggatgaaagttgcagccttggagggtg

SEQ ID NO: 300522 - DNA, 122 bp, Homo sapiens
acaggctaggatgccagagttagctgctcggtggagatcatttgaggtcagcagaggccacgatattatagatactaacagaccccgatatggggagaaaagcaaaagcaggagcctgaata

SEQ ID NO: 300523 - DNA, 122 bp, Homo sapiens
gtggtgtagccccagctactcgggaggctgacttggggggatggcttgagccccggaagtcgaggctacagtaggacgtgttcccgccactgcactccaggcccgccttccggcgctcagat

SEQ ID NO: 300524 - DNA, 122 bp, Homo sapiens
gccggtagtcgttggcttcgtgcttggcctggcggagcagctccgcgttgcgggcagcagcgtctgtcaggtctgcaaactaggtgggggacacatatggggggctgtgtgggcccatgggc

SEQ ID NO: 300525 - DNA, 122 bp, Homo sapiens
tgagcttgttttcctacaactagatggtctcatctgtgggtgataggagacagtgacacccgaagtatggtgcttatgtcaagtctacccattttggctgctgtcactgcagaaaaccctgc

SEQ ID NO: 300526 - DNA, 122 bp, Homo sapiens
taccgtggtttccgctgtccctcgcgccacagaagaggccggagggggaccggcctgacgcgggtgggcaaagagcgggcagagaactcaccagcagctgcagaaaacacagccgagttgct

SEQ ID NO: 300527 - DNA, 122 bp, Homo sapiens
agaaagaggtaaaaatgtgtttcctgtcgctaatcatgccaggactgtgactctaggcctcgctggctcatgtctcttcgtagaacatcaaatcatcacataacaacatgaccactgcgggc

SEQ ID NO: 300528 - DNA, 122 bp, Homo sapiens
ctcccggcggcaggcctgggcggcgctaaggtagctttctcctgggttgtgtttggccaacgcgtgtcttgactagattcagtggctcccctgaactcagggaagtcctacctacgtagcga

SEQ ID NO: 300529 - DNA, 122 bp, Homo sapiens
caacccccagggctgatttagtgtaaggtttagggaagcgggtcatgcagggtctggtggcgcttctgaagcctaagtatttaggaatctaaggcctttcagctgtgttagcaaatcacagg

SEQ ID NO: 300530 - DNA, 122 bp, Homo sapiens
caaggttttctcaaaggtaaactcttggggacagctgttgtcaccagtggtacacctgctcgttcaggattttagggggcccatcccgctgtttccagcccagcgtcaggaggggacccacc

SEQ ID NO: 300531 - DNA, 122 bp, Homo sapiens
actctcctgtggagatacctcctacaatgaaatccagttggctgtgtccagtgtcatcttcgtggttgtgcctctcagcctcatccttgcctcttatggagccactgcccaggcagtgctga

SEQ ID NO: 300532 - DNA, 122 bp, Homo sapiens
tgaagcaacaatctaagctttagcttggccccttttagccacagctcaagctagagcaggcgggaaacaaggcaccaagtcctgaagctgcacagagcagtggggccctgggcctggcccat

SEQ ID NO: 300533 - DNA, 122 bp, Homo sapiens
tagtggcaaccagaagcagatggagaacaggttcttgggaatctgttggcttacaacgtccgagggtcctttttcataagaagctaaaacaatgtccataaaaggcagcaagttcacaaagt

SEQ ID NO: 300534 - DNA, 122 bp, Homo sapiens
actgcggcgcgctgctggacgaagagctctcctccttcttcctcaactatctcgctgacacgcaggtacggccggctggggctgcgggcccggggccaggggtgctgagctgcgggggccgc

SEQ ID NO: 300535 - DNA, 122 bp, Homo sapiens
acactctgcagccctctgtaatacggcctgcaaaaggccaaactgcctgagcaggcctctcgtgcgtggtagtggttctgcacctgagagggcgtccgtcttttcgtggtttgcctctgcgg

SEQ ID NO: 300536 - DNA, 122 bp, Homo sapiens
cttgacctgcagtgcagacctggagctgagacgtcctccatcaaggccaaaagctccacacgcccagctgcctgggctcgccccagcctccagccccacgtgacggtctgcctcccagaccc

SEQ ID NO: 300537 - DNA, 122 bp, Homo sapiens
gaggggccaaaccaacgggctcgctgttggagggggtgacttggagagcgtaccgagaaacgagtagtttatggaaagccttgggggaaaactagacaaaaatacaaagggctgttttccat

SEQ ID NO: 300538 - DNA, 122 bp, Homo sapiens
tcgcctaggaatcaacccaagaggcctcaccttcctcccccgacttacccccggccccaccgccaccctttccaaccagagcaaagacaggggcctcctgggccaatgagacagcaaaactg

SEQ ID NO: 300539 - DNA, 122 bp, Homo sapiens
caaagtgctgggattacaggcgtgagccaccgtgcctgtcaatacattttaatacagctgcgaagagaagtcaagggacaagggatagtttttaaaatagatggtgctaaaacaatacatca

SEQ ID NO: 300540 - DNA, 122 bp, Homo sapiens
agggcgagggtgagcaaagctgcggggacctgtgtgtgcatgcgtgtgcgattgcctctacgtgtgtgtacgtgtgtgtgcatgtgcgcacgggtgtgtgtgcgtgtgtgcacgtctgtgca

SEQ ID NO: 300541 - DNA, 122 bp, Homo sapiens
ccccggcaggcgcgcgtgggctcggcgtcccgcgctccctcctcgactgtgcggctcccgcgctgccgggtttcctgttcaacaatataaccagggaggcaccggcggagagcgccgggcag

SEQ ID NO: 300542 - DNA, 122 bp, Homo sapiens
aaatgggctctttgtgcagtcagcagaagagatccacattctatatctttgcagggaggtcgactagaagggcgcctgctatcaatcaccccgactctgggattgcaagaggacattcagtc

SEQ ID NO: 300543 - DNA, 122 bp, Homo sapiens
ggtggtgggggttggtggggggggcagttttcctaagaaggagactcctgtaaggagaaacgtgaaggaagaaaagccaaggaatgaatatgtcagtgagtggatccatttttcacaaggga

SEQ ID NO: 300544 - DNA, 122 bp, Homo sapiens
cggagtgtgacgggttcccatcttgaaccgtccggggttgagtagtacaataaactaacacggaactccagcttccaaaattctctccagtgcctacagagcctcgcggagagctgtgattg

SEQ ID NO: 300545 - DNA, 122 bp, Homo sapiens
tccccatccacctttcaaccggagagacggcagagcgtgacctcggggaagcacgtcccacgttccatacatgtggaaggagctctgtgtttctgatctacccgagggtcctggactgttct

SEQ ID NO: 300546 - DNA, 122 bp, Homo sapiens
gacaccttcagctccctataatgacatctctgacctgaccaatcaggactcctggttcatcggcttcccccccatctggaatgctggggagactgatttgagtaacaataaaactacggtct

SEQ ID NO: 300547 - DNA, 122 bp, Homo sapiens
tctacaaggtgagatgtttttctcataagcctccagtctaacaagtgcagttgtggtctgcggcatgctcacacagtgtaatagcaccttatttttctttatcactctatattctgcaaaat

SEQ ID NO: 300548 - DNA, 122 bp, Homo sapiens
cgccgcgccgccgggcccggggacctggaggggggccgctgctagctagcttcgcgaccccgctcctttgaggtaggccccgggcctctcacagtctcataggggtaaactcactctgccac

SEQ ID NO: 300549 - DNA, 122 bp, Homo sapiens
cgattcatcctgcactccttagttgcatcagtcattccacaaacacggattagatgccttcgacatggcaggcttagccctacagacactgagataaagaaatgaagttccctgtcctcaaa

SEQ ID NO: 300550 - DNA, 122 bp, Homo sapiens
tcattaagccttggaaacagtgacatcacaagtgcctgcccggtagccgcccacatatggcgaaccacagagtgatccgagattcgtctgcaagaacaggggagaactaaggtcccaagcag

SEQ ID NO: 300551 - DNA, 122 bp, Homo sapiens
tctagctctcccactgattaattctaactgggccacaccccacctcctcgccagggaatccggatttgacagaagaatatactcaaggggtgacttttcagtgctgtcctttaggtgtggtg

SEQ ID NO: 300552 - DNA, 122 bp, Homo sapiens
taataatattcatctcatagtattattgagagaagtacatgagatcatacacagataaggcgtttagtaagtgttcattaaattttagtcttgttactgcaattatttcatcaagtgaacaa

SEQ ID NO: 300553 - DNA, 122 bp, Homo sapiens
gaaacgggtgccccaaccaactgggctctaaaatgagatcctcctgggccccatggggaacgggggttcccactgagctgccccccacaagacgtcctgatttgcagagccccaccggagac

SEQ ID NO: 300554 - DNA, 122 bp, Homo sapiens
cggaaggggttaagtccttaccagtcggggagagttttctgcggcgcgttttacaagtggcggaattcctggggccacctatttagtctcttggaggaaaatataactctagacaaaacgcc

SEQ ID NO: 300555 - DNA, 122 bp, Homo sapiens
agtttcactcttgtcgcccaggctggcgtgtaatggcatggtcctggctcactgcaactccgcctccagggttcaagcgattcacctgcctcagcctccagagtagctgggattacaggtgc

SEQ ID NO: 300556 - DNA, 122 bp, Homo sapiens
tgcaattcagagtagaggcatacaatgcactttatgaaggacacaggataataacaaaatcgctgataatgctaaagatagcttttaatgaatcttgtttctgggtattattggaagcattt

SEQ ID NO: 300557 - DNA, 122 bp, Homo sapiens
gaaacactactgaattataccacacagaccggagcgatgctggtccaaagggcaaccggacggcttaaaagcggggcgggggaacgcttagagcccgtagagggacacggaggcgctgggtg

SEQ ID NO: 300558 - DNA, 122 bp, Homo sapiens
ccagggtgggagattggggtgatattactccccgcaaggaggggggcgtcggcccccctgcgatgtggttcgtcatatccggtggggagtgggggttgatattactccccttatgtgggcgg

SEQ ID NO: 300559 - DNA, 122 bp, Homo sapiens
gccactcgctctccagtccctgcccctttccccggccccactcactcttcatcttggatgcggaagccggtgacaaccccttgccgacactggacggaaaagaaagaagcaggaaggttgtc

SEQ ID NO: 300560 - DNA, 122 bp, Homo sapiens
ccggggggcgcggcgggtcctccacggagaaattcaaggaaggaggctccggctcatagccgacaccttcgcttccaagagaattgcctcacccggggcgtgaggaaagggcggcagagggg

SEQ ID NO: 300561 - DNA, 122 bp, Homo sapiens
ataaatttatttatacaaaatctggggtaaagatctaccttttagatcacatatttgaaacgtctgggcatgcctaattctatgtgttcaggtgtttctgagggtcataggtaaaagcatgt

SEQ ID NO: 300562 - DNA, 122 bp, Homo sapiens
gccttcctacatccaggaaagggaggaaagccctgtccctgcctgagcctgtgaacccagcgaagaggcagtcgggctgattttacatgcacctctgcacttagagggatcagggcgttctc

SEQ ID NO: 300563 - DNA, 122 bp, Homo sapiens
cggacccgaggattcggtagatgtccccgaagacccgctgccgctctaaggcggtggaagcgagattctccggaaacccagggaatccgatgctcgcacaggaccaaagcccgaggccgcgg

SEQ ID NO: 300564 - DNA, 122 bp, Homo sapiens
aagcagcagaaaaggctgggtgtagtggcgcatgcctgtaatcccagcactttgggaggccgcgatggggggatcacgaggtcaggagatcgagaccatcctaactaacatggtgaaacctc

SEQ ID NO: 300565 - DNA, 122 bp, Homo sapiens
tgatcatttatgaccttatgcaaatcatttctcttccagaagactaatgatactagtatccgccctgatgactcagagtctttgttagaattaaatgtttctcccaagtatctcttgaatct

SEQ ID NO: 300566 - DNA, 122 bp, Homo sapiens
cgaggcaggcgggttcctcctcactgaagtcatggacttggctcgctgcggaggggccggcgcgcgaacgtggcttgagccaaaaaagaaaaagtgcacacaatgtgtttcttgttagggac

SEQ ID NO: 300567 - DNA, 122 bp, Homo sapiens
gacgcaggagaagcgcttcaaggacccgggactagtggaccagctggtgaaggcagacagcgagtggcgacgatgtaagtaccgggacgggcgggttacctccttgatgctaaacccaattt

SEQ ID NO: 300568 - DNA, 122 bp, Homo sapiens
aaataaacaatgcataagattgaaattgtgcactgttctgagcagcatgattaagtctcacgctgtctccagcccaggatgtgaatcatccctttgtccagcgtgtccatgctgtatatgct

SEQ ID NO: 300569 - DNA, 122 bp, Homo sapiens
tggcacatgtagactgatgcaaggaactgatctcactatcaggagcgcaagggacggcggcgcaagggacggcggcgcaagggacggcggcgcaagggacggcggcgcaagggacggcggcg

SEQ ID NO: 300570 - DNA, 122 bp, Homo sapiens
aacgcgaggacacaggaaagcggaaagcaaacagcaaatgcaatgagagccacacaggcccgtggcgcagcctctgtactagcaaagagaatcactagagggaagagagggtcccccgcggc

SEQ ID NO: 300571 - DNA, 122 bp, Homo sapiens
cagagactgccactgacctcgaccagcagtttcagtggaatggtgagatcagaacgcagacgggagtggggcaggccatgaaggtcagggtgatgatgcagtgaagacagacaactcttgtc

SEQ ID NO: 300572 - DNA, 122 bp, Homo sapiens
gtttttcccgttgcccagggtgcaggttcgcagccctgtcaaccagctccgagccggcagcgaaacctgaagtggaccctgtggaaaatgaagctgtcgccccagaattcaccaaccggaac

SEQ ID NO: 300573 - DNA, 122 bp, Homo sapiens
caaggtctgctgcagtggtgcttaagaagcagttccttttatctaagctcctctgatagccggtggcagtctctaatcctgctccctgcttcattcggctccggggaagcagaatgaaaggg

SEQ ID NO: 300574 - DNA, 122 bp, Homo sapiens
atgcattaagcaggaggtatgtatccatacttaacaaatacacaagactcgtatttcacacgggtacattttttccagcagccttcctttaacccagaaaagagttatttaataaatgctgt

SEQ ID NO: 300575 - DNA, 122 bp, Homo sapiens
actttgcgtgcttgatggccccgtccaaggtgctgaagagcgcgccgcattcctccaccacgcagtggaagtgggccttgtggaggaagtcacactggccgtcacagaagtcctttgtacca

SEQ ID NO: 300576 - DNA, 122 bp, Homo sapiens
ctgaagcggtgaatgccctggggctggggacgcacaggctcgctggcccacaaccaaagccgcttcctctggaggaggaagtccaggggtgccagggttccacttgctttcttcttcaccca

SEQ ID NO: 300577 - DNA, 122 bp, Homo sapiens
cacctgagtgtcttcatcttggaacgtggtaaagatggaaaaggactgatttagcataaccgaactattttgtgaatgaagcaaatactatttactaaataatgcagatgtgcatctacttc

SEQ ID NO: 300578 - DNA, 122 bp, Homo sapiens
cattgtattcatgtatgtgtatcaatacatacgcatggaaggtggagtgcttttagttcacgtgtgtgcccacgtgcgcaatgtgttcatgtatgtgtatcaatacatacgcatggaaggtg

SEQ ID NO: 300579 - DNA, 122 bp, Homo sapiens
gctgacacctcgatgtcagacacctggcctccaggacggtgagagcgggttctgttgttgcgagccacccagctcttggcacttggttacgcgggtcacaggacaccagtagagccatatct

SEQ ID NO: 300580 - DNA, 122 bp, Homo sapiens
ccccaggctgggccccaggaggcgcccgcccaccgcagcgcgccccgcccccgcgccccgcgtcctcacgccctggtcccgccctcgcgtcccgcgccagtcctcccgctttggtcccgccc

SEQ ID NO: 300581 - DNA, 122 bp, Homo sapiens
ctctgtgggaacagcagcccgcagggaggccatggtgttccactgaacacaaggatttcacggaccacggaggagccccctctgtccctgtgcagagcaagatgcgaacacgacgctgtcca

SEQ ID NO: 300582 - DNA, 122 bp, Homo sapiens
tcagccgggcggttcagccgcaggaagatcagaccacagaagcggaagaggcggggcgtgcggacctgccaatcaccgcctcctacccggccccgcccctgagcacggcccctgctgccctg

SEQ ID NO: 300583 - DNA, 122 bp, Homo sapiens
caggccgcttgcagacagcaggtaccttgttggcccgcagggagatggtgagggaacccccgctgtccatgccggtgttcaggcgcagccgcatcacggagggcgtgtccgaacacaccctc

SEQ ID NO: 300584 - DNA, 122 bp, Homo sapiens
tcttaaatttctcctgtctgctgagtacaggatggaaagggttggatttaaaattctggtcgagtgccttcagcagggaaaaaaaaacatgaaggtttctattggttattaaggttaatttt

SEQ ID NO: 300585 - DNA, 122 bp, Homo sapiens
agggagttaggcagcaagcccacgacccatcgggcaccccagcctggccttcgaggttatcgtggtcctaaataaatgcaggccaggtgcgagaagcccggtagttaggtctgctcattctc

SEQ ID NO: 300586 - DNA, 122 bp, Homo sapiens
tattcatccctgagtttcagattaaaagtcacttcctttggaaaccttacttcgctacttcgctacttactgcactacttcgcagcatcacaactatgatggaaatccttacttacgttaaa

SEQ ID NO: 300587 - DNA, 122 bp, Homo sapiens
gggtctttcgcagaccctgcttccctggagctctcttctgcaaaagtgaccaactgggctcggagttttaacttgcccttgttacctgaggccactgtgactatcatgggtcaaaagtgcta

SEQ ID NO: 300588 - DNA, 122 bp, Homo sapiens
ccccacctgccccatctgggccgaggctcctcccttgcctggggctgggccagggccggccgccatcctcccagcttggcttagaccagcacctgcaggggactggggagagtactccacct

SEQ ID NO: 300589 - DNA, 122 bp, Homo sapiens
gcggagctcgaaccgagctcctggaagcgctgacgcagagcgcagggagagccggagcggcgagctccaagcctggcatggacctgcagagacccgattcctaccagggaggagctggccct

SEQ ID NO: 300590 - DNA, 122 bp, Homo sapiens
gcaaaccatgacaataggcagtcacccgaggtcaaataaaaacggagtgggtcccccgcgcgccgccgccccccgcgtccctggcggcctcccccgaggcccccggcggcctcacgagcccg

SEQ ID NO: 300591 - DNA, 122 bp, Homo sapiens
ccttgtcgagccgcccccgaggcttggagtcgggctgcatccctgggggtgcctttcattcgtccactttctgaatgcagaacctaggcctcccgactcccccttccccactgtggtgccct

SEQ ID NO: 300592 - DNA, 122 bp, Homo sapiens
atggactggtccattatgacatcttaccaactttaggtcactgtacagcatgaaaacgcccgtggggcaggggccgattcctggataccctcccagtctgccctagaaagggaagtcatcaa

SEQ ID NO: 300593 - DNA, 122 bp, Homo sapiens
gggtgaagacgtagaacagggagaagagcccaaagaggagcatctgaatccttgggccaacgggaaatcccagtaggaggaactctgtgatggatgttatattgtcccccatatccctatga

SEQ ID NO: 300594 - DNA, 122 bp, Homo sapiens
gcctttctcccctgggcccgccctgacgtggcttaactcaggtagcgacaccggaagccacggtcttggcagagcagtcacctcgaggccgacactgttcagctagtgcatggtgagcagca

SEQ ID NO: 300595 - DNA, 122 bp, Homo sapiens
ccaggagaccctgtgcccagcaggagtcagttctcagtgatcgtccatcacaggaatgagcgtgggttgggcctccctagccctgcccagcacaggtcccggataggtgagtcccctctgac

SEQ ID NO: 300596 - DNA, 122 bp, Homo sapiens
tgcactcggcctacgggaaactgaagcccggcccgagaagagcgggtcttggccttggcgcgagctttgcctccctgcttaccacgcccagacatggcaaaaggtctattacctttacggtc

SEQ ID NO: 300597 - DNA, 122 bp, Homo sapiens
gtcagtcagtcctgggaataccgtgtattcctgcataacagtaccttagagctttccttacgtgcttacctggtggcaggtgactgttctgagtgctttgtgtattaacttgtttagctgcc

SEQ ID NO: 300598 - DNA, 122 bp, Homo sapiens
agaaggttgccggtgaacgggacggataggctggggacgcccggggaacggcagagatctcggcgcgggagacagagtcccggcaaggggtcccgcgcggaggcgggggcgggcgctgaagg

SEQ ID NO: 300599 - DNA, 122 bp, Homo sapiens
ggaaaaaagatccgtaaacccaggacgatttattccagtttgcagttgcaggctttgaaccggaggttccagcaaactcagtacctagctctgccggagagggcggagctcgcggcctcttt

SEQ ID NO: 300600 - DNA, 122 bp, Homo sapiens
tgaaggcaagtgataatcagactaggaagctggctggacacaaccttccagtgggagaggcggaggtgagggggcagctgcttctttaactaatcaagggctcaggttccagtaccttcctt

SEQ ID NO: 300601 - DNA, 122 bp, Homo sapiens
agctttaatggagatagtgtataaataattgtttactagacccaaatcttttagtatgtgcggtccagtgtgagagagttatctttagaaagaataaatcatttttctgattccaagtgtta

SEQ ID NO: 300602 - DNA, 122 bp, Homo sapiens
cagcctggcaccctcatcgggcctgttacgcacgttctggtctctccgtgcccacagacccgccaagctcaccagccaatgtgcagccagcacaagcccgacctgctaggggcctcagaaca

SEQ ID NO: 300603 - DNA, 122 bp, Homo sapiens
tgagtcagggcaaggatggggtgcggcccagagccaaagttcccaggatcctttcctaaacgctgagatcagagcacaccccactacatccctcctcatgtcaccttctcaacctggggccc

SEQ ID NO: 300604 - DNA, 122 bp, Homo sapiens
gaattctgtcccagatgctgtgtttcacgccagatgacagcaaagctctcccctgacatgcgggcacactccagactcccccagaggccctcctggaagaaccactcaaggacccaagggcc

SEQ ID NO: 300605 - DNA, 122 bp, Homo sapiens
gctccgagccctcaactccaatgaagtacagtcgtcaagaaacggtggtctaaataaagccggagactcactcactgcaccaatcagcaccgtgcgtccgtctggatctcggcgccggctgc

SEQ ID NO: 300606 - DNA, 122 bp, Homo sapiens
cctcccggggcactggaagattccagggacgtgtctggtacgcttcagcctggttgaggtcgtcaccgcagaagggagttttggggtttggcccaaggcccggtgacaaacaggagctgcag

SEQ ID NO: 300607 - DNA, 122 bp, Homo sapiens
gaacccattaaaagaaaactccacatatatggtcaaataatatttacagcattccagatccgctcaatgagggaagaacattctcttcaacaaacagtgttgggaaacttggatatccacac

SEQ ID NO: 300608 - DNA, 122 bp, Homo sapiens
agctccactgcccaaaacaaagatggccgagacgactcccatgcccacacgcaaaatggacgctgactatgacgttccctgcaacaatcctcaactggccccgccccaccaatttggaaccc

SEQ ID NO: 300609 - DNA, 122 bp, Homo sapiens
cacaggacgccgggctgggccggagccagaggcaggaaggtgggcagaggctgcagcgggcgagtaggagcgctcctgatggctgctctcaggagaaaccaaggccgagtgtgcagagtcgg

SEQ ID NO: 300610 - DNA, 122 bp, Homo sapiens
gcgcaagcccagtggtggctccgctccccagtctgagcgtatctggggcgaggcgtgcagcgtcctcctccatgtagcctggctgcgtttttctctgacgttgtccggcgtgcatcgcattt

SEQ ID NO: 300611 - DNA, 122 bp, Homo sapiens
tctcctcctccttcttcttcctcttctttttttcctttatatagagactgagtcttgctacgttgcccaggctggtctgaaactcttggcaattctcctgccttggtttcccaaagggatta

SEQ ID NO: 300612 - DNA, 122 bp, Homo sapiens
gggagggagtaggtgggctgtcaggacctgggccacacacatgcgaggcactcccagagccgtggggactcgctctgtcacactgggctgctctctcctttccccagagccagcagcctctc

SEQ ID NO: 300613 - DNA, 122 bp, Homo sapiens
ccccgctcgacgacggcgagggtgtgggagctactggcaggcaaattggtgggagccgcccggcccagcctgccttgccgagtcagcgcgctcttgagccgctgggcccttcccggtgcccg

SEQ ID NO: 300614 - DNA, 122 bp, Homo sapiens
ccaacgcctgccctcccggcgccgcggcgggtcctggcggtggattggggccgacccgggcgtgttcgtgtggagcacctgccctgtgcccaacactatcctagatgctttggagggtggag

SEQ ID NO: 300615 - DNA, 122 bp, Homo sapiens
tgcgctgctcgcggccggcaggaggaagcgggcctccctgctgttgcctaggatatgtcccgaggtgcctcccatcggacatcttacgtgggtgtttttgctgatgcgtttttgaagctcag

SEQ ID NO: 300616 - DNA, 122 bp, Homo sapiens
ctcccagttttaaggacgaatcatgtatgggcccccgcaagagatgggaatgagccagggcgccgctggtctctaagccacgagccacagccatgactaactaggaaactaggacaacagct

SEQ ID NO: 300617 - DNA, 122 bp, Homo sapiens
agcaatttgtggatttattttgcaattagaaacaactcacaaaacaactaccagttctagcgtgggctgtggtagattgagcctttcagagagtgtatgaagtggtggtttcagctctccag

SEQ ID NO: 300618 - DNA, 122 bp, Homo sapiens
cagcatggaacttcaaaacacattgaaccccagaaaatcttcgctatgttggagattcgccggctgataaaagcaaaacaatagataagatggccaggtcgaccttcagccttctcggagaa

SEQ ID NO: 300619 - DNA, 122 bp, Homo sapiens
caagccgcactgccgccgtctgcgcccgacactgacgtttgcggcggcgcgcggaagtgacgtcaggtcccgtcgtcgctgcgtggaggggttccttctcgctaacctcttcgcccggaagt

SEQ ID NO: 300620 - DNA, 122 bp, Homo sapiens
gtctcagtgatgacttcccttaaaagctccgttcttttgtcttctcaaaggggtttggggcggggagaggggtaggaatgtgaaagtggttcaagcctccttgccgcctcttccagaagaaa

SEQ ID NO: 300621 - DNA, 122 bp, Homo sapiens
ctcctagaggcccagcctctggtcctgtgacctgcaggtattgggaatccacagctaagacgccgggacaccctggaagcctagaaatggtgagagtgcggggtccaacatcccgagagagg

SEQ ID NO: 300622 - DNA, 122 bp, Homo sapiens
catgttggccaggctggccttgaactcctgaactcaagtgatctgcccactttggcctcccgaagtgctgggattccggatgtgagctaccacatctggccatttcaagggtttctttcttt

SEQ ID NO: 300623 - DNA, 122 bp, Homo sapiens
gtgacgcagcggttgctacgggccgcccttataaataaccgggctcaggagaaactttagcgagtcagagccgcgcacgggactgggaaggggacccacccgagggtccagccaccagcccc

SEQ ID NO: 300624 - DNA, 122 bp, Homo sapiens
ttgatgagcttagggtgttttttttttgaaagtcagctgaaggatggttagacagcacagcgaagactgctaaatgcactgaccccccccattagaatgtgatttttgttcctttttatttc

SEQ ID NO: 300625 - DNA, 122 bp, Homo sapiens
caaatatctaaacaaaatgctgtggtctcttaccagcacttaaaaagttaacaacagcaccgaatagaattgctcaaggcagtgaaggttaaaccagcatttggaaatgctgtgagaacaca

SEQ ID NO: 300626 - DNA, 122 bp, Homo sapiens
aagcacgcttcacaagccataccactttacatgtgtttagcatttgcacttttcaaaattcgttcatgctatttattacctttttgatccttacagcagcttgtatggtaaggcaactcttg

SEQ ID NO: 300627 - DNA, 122 bp, Homo sapiens
atcataggacactttctaccagcactaaaacagcggaacaaaggcctcctccaaatctcacgctgccccggccagtgtccacggggtaaaggccccaaggaaagagagcagggctgcaaatg

SEQ ID NO: 300628 - DNA, 122 bp, Homo sapiens
tttcggcagccttctcaaggagatccatccaggcccttgaacaccttctcctggactatccgggaatcggcaggttcagtcgctacttctacttcgtccagaatctgtttgccggtttccag

SEQ ID NO: 300629 - DNA, 122 bp, Homo sapiens
aatgctgaggagatgaccaagtaccacagcgatgactacattaaattcttgcgctccatccgtccagataacatgtcggagtacagcaagcagatgcagagatgtaagtccattctgttccc

SEQ ID NO: 300630 - DNA, 122 bp, Homo sapiens
ctccattgaatcccttccctttgggggtggcctccctggggcttgggacatagccaccagcgcgcagggtgggctgggcccgcatccttactccgcttatcccgtgcccctcctctcaccct

SEQ ID NO: 300631 - DNA, 122 bp, Homo sapiens
agagaattccaggcaggctctagcattatgtttttcacagaaaaagccggtgcagtagcccggatgcccagatccactcatttcccaaaccggttcccacacccgctgcccaccacctggcg

SEQ ID NO: 300632 - DNA, 122 bp, Homo sapiens
ctgtactgttaaatttactaccaggaagcatctcagttgcctttttaaccctttccttcacgtaaatgtaggctcaccagggtaggagctttgccttgttgatggtgcacacagccctggaa

SEQ ID NO: 300633 - DNA, 122 bp, Homo sapiens
tcggaaagccctggcctagccgcaggcccctccccccggccagctggctcgctccagctgcggctcccttatttaggcaaggaggcctagggatgctcaagggcaggcggggtgtctgcccc

SEQ ID NO: 300634 - DNA, 122 bp, Homo sapiens
gggaggaggaaggcgccgctcttacctgcatgagctcaacgtttccaaagaaccggctcacgggcattggctgattgctgtcgtcatctagaaagacgctgttgtccatctgaagtggtggc

SEQ ID NO: 300635 - DNA, 122 bp, Homo sapiens
tgaactcgtgacctcaggtgatccacccacctcagcctcccaaagtgctgggattacaggcgtgagccactgcccccggcctattaaccattcttaaatgtcgggtgcggtggctcacacct

SEQ ID NO: 300636 - DNA, 122 bp, Homo sapiens
ctcagagaagcaaggagaccctagccagctgtcgggtctacccctagagggggccgccctcggcctcaggtcagcccctctggacccaggggtgggaagtcactttggtggggacggtcctg

SEQ ID NO: 300637 - DNA, 122 bp, Homo sapiens
tttgtaaaccaacatatttccagcacttggccttgcatctggcagccactaaataaacgtcgaatgaataaagtgttcctcacagcagggctcccttcttactatccgaaagacaagggaaa

SEQ ID NO: 300638 - DNA, 122 bp, Homo sapiens
gtggctggatgacaaatcgtcagaaaaggtgacgcgagaaggaagccaggtttatgaccacgagtgagttctttaatttgacaaagacagttctgttatgcttctgttggttaaccatcaag

SEQ ID NO: 300639 - DNA, 122 bp, Homo sapiens
acctgttgcctagagagcccacacagtgatgcaggtgcctgtttacattggctgattgcccggactttggaaatgcaattatcccccaccaccccctcagccactttctccagcggactagg

SEQ ID NO: 300640 - DNA, 122 bp, Homo sapiens
gtgatgaatgtcactagacagtggggccctcaaggacctggcaaatgggggcttggacctcggatcggcctcccacgcgaagcttgctccccaccagcatccccacgttggtggcgacgctg

SEQ ID NO: 300641 - DNA, 122 bp, Homo sapiens
gccggcctaccccagatcatccaaaagtaagaagggagaagggaacagggaccacgggtgcgcctggggacacgccccgagagccccctttgtggcttcatttcccgtccctgctgaacttc

SEQ ID NO: 300642 - DNA, 122 bp, Homo sapiens
agcgtggggcttctgggaggtgatgagctgtcatgagtgggattggtgcccccagaaagccgccctgcccctcttcctgggagaagccaccatctatgaaccaggaaacgggccctcgtccc

SEQ ID NO: 300643 - DNA, 122 bp, Homo sapiens
ttttggataactttccttaacactttcttctaggtgcggacgaggggctcaataaaaaggcgccctccctccaggcgattccgaaggtcacagtcagactgtggagaacttggagatttcag

SEQ ID NO: 300644 - DNA, 122 bp, Homo sapiens
cgggcgggtccctggccggggtagcacggaagggtctcccaggcggcgtagtagggcttccgtgttactggaaacctacttccggctgcaaatgggaaaaggagcctctaccttaaccaatc

SEQ ID NO: 300645 - DNA, 122 bp, Homo sapiens
tttgtgcttcctgtttgagaaattcagttgcttccatttcgcatgttctgcacatttatccgatgtaacctcaaaagaataactggtaataagggaaggaaacagcagcaacaatcattgct

SEQ ID NO: 300646 - DNA, 122 bp, Homo sapiens
tcatggaggagaaagcggagagcccactgtcatcccctaaaattcatggacttgaagagtcggagaatccctggctcccagaatctactgacagttactgaatgaggaaagagagaaaagtc

SEQ ID NO: 300647 - DNA, 122 bp, Homo sapiens
ccagactctaaagaattgtaaaagaaggacgcctggtttaatctacaggcatcactcagacgctctccataaaccgaatggccaggaatgcaatgagaaaactgacaatctgactgatttcc

SEQ ID NO: 300648 - DNA, 122 bp, Homo sapiens
cgagccacagaagccaggcacaagagagaacgtcctgcgcggttccatctatgccaacatcgagaacaggcacaactgatgtatgggacggaagtcagaaaaggggttgactgctgagccgg

SEQ ID NO: 300649 - DNA, 122 bp, Homo sapiens
atggaggtcaaaagacttcgatgtacctaggcagataagtgcaagcaagcactgagcccacgtggtctccctccccacacaaccactaagcaatgccaatgtcaggggaggaagaagaaacc

SEQ ID NO: 300650 - DNA, 122 bp, Homo sapiens
agagaggggatttagttcacttaaactaccctgcttccgcttcttcctgatacagtcgtgcgtttttaggttcttcgttggctgcttttgtgattgtgtaggttgtacatgcagattagttt

SEQ ID NO: 300651 - DNA, 122 bp, Homo sapiens
aggtcccgcacgccagcaggtgcctgcagccttgcagcgggcaccactccaccgagtccgcggtcagctcggtgtccaccgtttgcagggcgaaacagcccatcatccagccctcggggaag

SEQ ID NO: 300652 - DNA, 122 bp, Homo sapiens
gggaagcctggctgagacgggaggtctcgggagcctccgtcttacttgccacctggttgccgccctcccctcggagaccccctgtctggagacacgccccaatgtggccccctctcgcgggc

SEQ ID NO: 300653 - DNA, 122 bp, Homo sapiens
ggaaaggaaagtcgtggagaaggccagcacctgcccggtgtggggagcagggcccgggcacgtgaacctttccctgcggagctggtgcctgtgggtgcacgggtgtggtgcgttttaattct

SEQ ID NO: 300654 - DNA, 122 bp, Homo sapiens
ccccgcgggccacggagggtcgggcgggtagggagcggggtcctgggtccccgctgaagccgaggagattcacggataggccgtgagcttgcaccggaccggcgctcccacttacgggaccc

SEQ ID NO: 300655 - DNA, 122 bp, Homo sapiens
ccgggggcggagccgcagagggacccgcggccggccaatcagagacgtagcggagcccggcggactacattgcccagtaacctcctgggctccgctgtgtttttctattctggggtgtaagg

SEQ ID NO: 300656 - DNA, 122 bp, Homo sapiens
acttcatcagtgaaagtcctttaaagaaacacataggcattccttgaacaacattttaaacggcaaatgggactctaatcttccagttgccccctattgactttaaaccaaagctttgattc

SEQ ID NO: 300657 - DNA, 122 bp, Homo sapiens
tcaatacaagcttaatttgaattaataaaaggaaatattttctccctttgaacttatctccgtaaagccattgtgcctcctcttgggggtcacgtgttcacaatcaatggcctttgaggagc

SEQ ID NO: 300658 - DNA, 122 bp, Homo sapiens
ctgaaactctgtacccgtaaaagaactccacttcccctctccctaggttcctggcacccccgtttctctgtgaagaagcctgctccagacacctcatatagtggaatcacacagtattcgta

SEQ ID NO: 300659 - DNA, 122 bp, Homo sapiens
ccttactctcccctgcaccccgggatgccccgcttcttcccaggactcttccctccctgccgcacccagcgcccactgccccaggaccccgcactgctctccgccccccgccgccccgggca

SEQ ID NO: 300660 - DNA, 122 bp, Homo sapiens
gcagcggcggggcgcctgctcttccttccgcttgcgctgtgagctgaggcggtgtatgtgcggcaataacatgtcaaccccgctgcccaccatcgtgcccgccccccggaaggccaccactg

SEQ ID NO: 300661 - DNA, 122 bp, Homo sapiens
ggatgccctggccagcgaggctgggtcacaggtcagggaggtcctggccgtccacagggtcggccctcagctcagcccgccaggagtcagggaggagactcgctgggagtgggagggcagca

SEQ ID NO: 300662 - DNA, 122 bp, Homo sapiens
cgtaggcggcggctgcgggcgccggggcgcactagcggacggcgtgggcgcgcggccaggcgcctccccggcccccgcgacccaactccagcccgggccggaataagttgctgccgccggcg

SEQ ID NO: 300663 - DNA, 122 bp, Homo sapiens
taggaaatggtctcaccccatcagagaacatttttaacttcctagaagccaccatttccccggggcattatcacacactcccacccggacatattacctaagagagtacttataaaaagagc

SEQ ID NO: 300664 - DNA, 122 bp, Homo sapiens
gcacgctcagcgtggggaagttgccgcgcccgtgaatgggaatcggctcgctcagaagagcgtccagtcgcttcacctgtggccagctcagcccactcaggtgccgtccggggaaggccgat

SEQ ID NO: 300665 - DNA, 122 bp, Homo sapiens
cagacaccagcaacagcctcttgggatgccctgagttgcttcccatttcctctttctagccgtccttttctagtgtgtgctcactcttcctaggaacttttaagacttcttggtacctatga

SEQ ID NO: 300666 - DNA, 122 bp, Homo sapiens
caaacatcagatagaaatttccgagaatgcttctgtttagattttatgtgaagacaatcccgcttccaacgaaatcttcaaagacgtccaaatatccccttgcagattctacaaaaacagtg

SEQ ID NO: 300667 - DNA, 122 bp, Homo sapiens
gagctaaacaatctgtaaagctgttagtgttctttctgatgctggagcttagagtccacacggcagtcagttaagggaagacgggtgtaaaatgggaggcagttaagaacaagtggaagtaa

SEQ ID NO: 300668 - DNA, 122 bp, Homo sapiens
ctccagggccttgcagcagtgaggtgtggggcgttcgcagttcccctcccagcttgtgcccgctgactgctggcgcactctctcctaggccaacgaggtgacggacagcgcgtacatgggct

SEQ ID NO: 300669 - DNA, 122 bp, Homo sapiens
gcattgagatggactgcggcttaaaggagccatgaccttgcagacctgctgctgccatcgcgggtacatgggcggtgtggggttctggcttcccccgaacaggtgcagaggacggacagtca

SEQ ID NO: 300670 - DNA, 122 bp, Homo sapiens
ccgccccttttatgcaaaagatccgagcgggcctccgcccccgcccggcccggctttcaacgcaggtcctgtttccagcagtcactcggcgcaccaaatgtcctccgggcgcttccaacaaa

SEQ ID NO: 300671 - DNA, 122 bp, Homo sapiens
ggagtctctggttgatgccgtcaggcaggtggggatgtccctgtcccgcacagtagtgaccggcagggctcatccgctgtgggctgaagtccgctgccctccacgcgggcttctcttgtccc

SEQ ID NO: 300672 - DNA, 122 bp, Homo sapiens
atctctgagaactcagactgctcaagtacacactgtcctggcaggtccacacatgttatgcgtctggccaacatacacacacacgagcttcatgttcagaaaacaagactgtgtgtgaaatt

SEQ ID NO: 300673 - DNA, 122 bp, Homo sapiens
cagaggtggagaggtggagggtgctgctgctgggaatcaaccccctcagactttccactgcgaagcgaaaccgtaagccctggggtgcggggggcgggccgggaggaggggaagtggggaag

SEQ ID NO: 300674 - DNA, 122 bp, Homo sapiens
cgcgcgaaagggcagggccttggccgggaagtaccgcccagcgaaaggctggcaagggtgcgcagctggagcgtggcctcgggtacccctttccaggcagccgaactccccgtatcccagct

SEQ ID NO: 300675 - DNA, 122 bp, Homo sapiens
tttcccgtccccttgggttacgataacaacatcacccctttccagaagttgcttattttgcgctgtttccgtgtggatcgggtctatcgggccgtgactgactatgtgactgtaacaatggg

SEQ ID NO: 300676 - DNA, 122 bp, Homo sapiens
tgtgaggctgacactgctcagcgtggctgtcacacacaagcctcgagatgtcccatcagacggtggcacgcgtttctgctgcacttgtggctaaaacggctctactggcagtattactatca

SEQ ID NO: 300677 - DNA, 122 bp, Homo sapiens
ttctcattttgggttttctcttctcctactttcctggggagagattaagggctcattaagcggaggaacccactttgaggagagtaaagcccaagcttgcctgaagaatgcatctccccagc

SEQ ID NO: 300678 - DNA, 122 bp, Homo sapiens
gaggtgtcctgtctcctgcagcgcgagatggtctactgcctggagcagggcctcatccaccgctgtgccagccagtgcgtcgtggccttgtccatctgcagcgtggagatgcctgacatcat

SEQ ID NO: 300679 - DNA, 122 bp, Homo sapiens
cccgtctgagtcagtgactcacctggcacccctggcagctgactttcctggcagttcactcgagtctcttgcctctgctcacaaaagcctgcgcctttattcagctttcctcaccgcttccc

SEQ ID NO: 300680 - DNA, 122 bp, Homo sapiens
gtcacttttgcacccttccttccccgcctccccaactttcctttctgaatcttccaattccgccccagctggaggcgtgcgggtcctcttgcaaaccagaccaaggatgtcgccccgatccc

SEQ ID NO: 300681 - DNA, 122 bp, Homo sapiens
ggttaatgcctgtggcacagcaaaggcctctgagatcctccctcctccagctggctcaggcgaaagtgtcctactggggtatcttgatagttaaatattttgactatcacctcttgccctca

SEQ ID NO: 300682 - DNA, 122 bp, Homo sapiens
aagtccccaatatcttgctctgcacataggtggcactcaacacatattaaaagactgaatcgaaaggtgtctccacctttcagcaagccaggcagtttgcttgaagtgttaagtccagattt

SEQ ID NO: 300683 - DNA, 122 bp, Homo sapiens
agtgtactctaaggggcccttatggcttagtatttatgccctaataaacaaccatttgaacgagtattatactcctcagtacctaaccctttataaaaaagttctctaaattgttatgccct

SEQ ID NO: 300684 - DNA, 122 bp, Homo sapiens
ggcctccggcgacccggcagcgacgcgggcggggacgcggtgcatcgctactgcgcccggcggacagcgacttgctgctcaaaaagaataagaaccagggtttttgtttgtttttttttttt

SEQ ID NO: 300685 - DNA, 122 bp, Homo sapiens
gtccggctgaggagtctcactcgcaggaaaggtggcgtgtgacgggctggagccggcctgcgaagtctgcctggtggccatggctcaggggcctgtgtctcccggacgcccccagcggggcc

SEQ ID NO: 300686 - DNA, 122 bp, Homo sapiens
atcccagtttcttatcaaaatcaaaactcctaagtcccaattccaacaagtaccataaaacgtctttaaaatgcgattttgagaaacaatcacttctttatcataaaatatagctatagaag

SEQ ID NO: 300687 - DNA, 122 bp, Homo sapiens
gccagtaggcagttcacatggtggggagacggcagggccacaccaacccccaggggtaaccggacttacgtgcatgtacgagtgtacacacacacgcacgaccctggtgtctgagcgagagg

SEQ ID NO: 300688 - DNA, 122 bp, Homo sapiens
cccgctcagggctccgcgtggagagagggtcgttccgcactcgccccaggggccggcgggcggctggggattccagccgcttcaccccgctccaggcagctaaaagccactgtggggggagg

SEQ ID NO: 300689 - DNA, 122 bp, Homo sapiens
actcgggacctcaggtccacaccatcaaacactgccctgttacggaaactcgatacatgtcggcttgcatgaatgaacccatacatttgaattcccccgggagcagtgtcttgaaattagcc

SEQ ID NO: 300690 - DNA, 122 bp, Homo sapiens
aattattcctactcctatacagagctttatgtttgttgtaggtccctttattttaaaatccgtgaagaaactggagcagacataaagaaatgtaatttaacagttgacggtaggattttgga

SEQ ID NO: 300691 - DNA, 122 bp, Homo sapiens
atgcctggggggcagctgtgagctcaccggtcacacctgcacagtggtgtggggtgcaaacgctttcttcctggcaggctctgctcagttagaaataaccttgccttgcagcactgatctct

SEQ ID NO: 300692 - DNA, 122 bp, Homo sapiens
ccaccagagggcccttcagtgcagagatggtcggcgcggcctcaccgcggtcaggagcagcgcgaaaccccctgtgccctcggccgcctgcagcatgagcctgcacaggagcccccgacacc

SEQ ID NO: 300693 - DNA, 122 bp, Homo sapiens
acaaactctttgctccattatcttacacttgagcagaaaatcgttagaaatatttggaaacgaaataatctgtcaccttcttacgaaaaaagctgaaaatagtgcataaactgatttaacct

SEQ ID NO: 300694 - DNA, 122 bp, Homo sapiens
tacaaatgcagatgctagaaccccaccccagacttccaggatcagaatctctggggatggcgatgggcagtctctgtcctaaccagatttctagatgatcctcatgcacatccaactgtgag

SEQ ID NO: 300695 - DNA, 122 bp, Homo sapiens
gaagaaggtggatttggggccccgagggcgggcacagggtgggtctggggtcctcttggccgcgacggtggctcgcgggccctggcgtccgcccccggccgcgttcgcggcctcgccggacc

SEQ ID NO: 300696 - DNA, 122 bp, Homo sapiens
cgcgtccccaagcgcccgcgcttcgcctcccagcttgctttaaaacactaggcgcaggagcgatttaaactggctaaggaggccccacatggcgcttccagagtccagactgctgaaaccaa

SEQ ID NO: 300697 - DNA, 122 bp, Homo sapiens
cgaccttcctcttccctatcttcccggcaggaccagtccatgggcaattggcagatcaagcgccagaatggagatgatcccttgctgacttaccggttcccaccaaagttcaccctgaaggc

SEQ ID NO: 300698 - DNA, 122 bp, Homo sapiens
ttttttgagacagaatttctctcttgttgctcaggctggaggagtgcaatggcgcaatcgcggctcactgagtcctccgcctcctgagtggctgaaattacaggcacccgccaccacgcccg

SEQ ID NO: 300699 - DNA, 122 bp, Homo sapiens
ccatcccctagccgggtcccgggaggaagagatgccccggctctctcgttgacccggcctcgaacgccgacctcgagcgcagaatactcccgagtgctgggttcctgatacccagcccggga

SEQ ID NO: 300700 - DNA, 122 bp, Homo sapiens
gcgcgcgatgctggggctggcggggtccccgtcaccctcgtccgggcgcgcacgcgcacgcgcacgcgcgcacaccccctcgcgctccctcacgccgccgacgttccatttttgaacctgcg

SEQ ID NO: 300701 - DNA, 122 bp, Homo sapiens
aaccagcaacagccccaggcagcagagggcggtggggcgggtggtgggggctcgagggggcggtagagcgggtggtgggggctcgaggggacggtggctggtgggcaaccacacaccattac

SEQ ID NO: 300702 - DNA, 122 bp, Homo sapiens
agggaggaaacagggctgggaaccgttctgtgagagcagtttgtagtgtctgtaagaggccggcctgcccacctctctgccttcccctctccgttgctcagcctgtcccagccacactggcc

SEQ ID NO: 300703 - DNA, 122 bp, Homo sapiens
agcccgggagcacttccgccctgttgtgaagtgggtgtctcggtgggtgagtccgggtggcggggcgggggcagctgagacgcaggctctgggctggagacttaggaggtggtggtgacaca

SEQ ID NO: 300704 - DNA, 122 bp, Homo sapiens
ttagaaacctctcagtggggtttttcgaaatgaaagtctaactccttgtctctttctgaccgtttccatgctgaacctcatctttctaatggcccactcctccaggggcctgcctgacgccc

SEQ ID NO: 300705 - DNA, 122 bp, Homo sapiens
atgtatgtacgggggcttcactcctctgtcttgtttgctttcttcctcttagactaagtgcggggaggaaaaggacagcctgcatcggcctcgctggcgcacaatgagaaagctgcgacccg

SEQ ID NO: 300706 - DNA, 122 bp, Homo sapiens
ggccacggcccgaggggcggggaaacacccatatttggccttatatgggcagccgcgtcacggacggcactcattcacataaaacgctgcgcggccggcggaatccccggcttctagggcgg

SEQ ID NO: 300707 - DNA, 122 bp, Homo sapiens
ttagtactaaaaagcataacaatgttattcatatgcttgctttaaaatttttgatataagcgaggtacagaacagtaggtatactatgctaccactcatataaaatatgggatatttattca

SEQ ID NO: 300708 - DNA, 122 bp, Homo sapiens
gggtggcgttcctgggtggcgttcctgggtggcgttcctgggtggcgttcctggggtactcgggagggagacggagagccaggcttgcttgcacccaggtggctgggtctgctaagatccct

SEQ ID NO: 300709 - DNA, 122 bp, Homo sapiens
ctctagatttggggcaggagttgggggatcttatagaactagttggaggtggattcctgtcgtcagggaacactcttaactcacctatgtagggaaagtgggctgaaggccccggactctct

SEQ ID NO: 300710 - DNA, 122 bp, Homo sapiens
tgaaccttctgggggctctggctgctgccacagctctggggactgctgctgaccagacctcgaacatcacagagcaacccttatggagaaacttgcaaccaggacctgtcccagagtgatgc

SEQ ID NO: 300711 - DNA, 122 bp, Homo sapiens
gaagtcaaaggacttccaaatgcacggacgtcaaaggctaccttcacccgggtagccttgcgaatggccactgctgcgagtggggctttctggggattgtagtccataggcctccttgcgca

SEQ ID NO: 300712 - DNA, 122 bp, Homo sapiens
cgcgggtccgacactttcactttcacgcggggggaggcctaggggacaggttcggggcggcgcggcgcaccttccggactccggcccaacccccgggcgcacctgggcgggcccgctctgcc

SEQ ID NO: 300713 - DNA, 122 bp, Homo sapiens
ggcagttctgatcggttttcaaggacattctaagtgttcgccataaaccctgggcccaggcgggaaaggggggaggatgttgattgttggaacacacacctgtccaggtgcaggggagctgg

SEQ ID NO: 300714 - DNA, 122 bp, Homo sapiens
ccacagaaaactgttctgcaggacttttttttttttaagccactgatttagagagcaggacgtctggcttccgagcaggaaccttcatattgccagtgatgaaagagagaattaaatacggg

SEQ ID NO: 300715 - DNA, 122 bp, Homo sapiens
gcagatcccacagcagcagcctttggtctcgcgccaagacctgccccaccagatcccacccgccccaccggcctgccccaccagatcaaaccagagcagcagccttccgtccagcgccgaga

SEQ ID NO: 300716 - DNA, 122 bp, Homo sapiens
ggtccgcgtggccttgccagctccaccttccaggaacctcctccccaccttttcaaagggcgctagtcctttccagcacccaggagggtgagggactccctaactcagcccttgataacccc

SEQ ID NO: 300717 - DNA, 122 bp, Homo sapiens
atgaagcggccgtcctcacatgggtgcccttgtgtcctgtgtgcacaaaagcatcggggccgaggaggccacgctgtgtctgcagagctgggtccgcgcgtgttgctgtccggctcccagga

SEQ ID NO: 300718 - DNA, 122 bp, Homo sapiens
ttcagaactttagattgtggccatatgaaaggcagctttcttcaaggagaggtggggtagcggagtagtcacttatgccttggtctggctgggtgaatctgcatttttacacaaacaatagg

SEQ ID NO: 300719 - DNA, 122 bp, Homo sapiens
tgggggtgggaagggctggggcgggaactggaggcccacgcaggtcgcctgcggtgtctgcggcctgtgcctctggggccgcctggccagggagggcaggagatgcctggtacatacctgaa

SEQ ID NO: 300720 - DNA, 122 bp, Homo sapiens
ggaggcgcggaagccaggagtccataaaggaccgtaaaattgcggcccacttgggcagcccgggtgctgcagccctccgaccagtttgcacgtcggtcagaggtccaaattaccttgtcact

SEQ ID NO: 300721 - DNA, 122 bp, Homo sapiens
actaacccctgctgggtttcactatgagaaggcaatcggcatgatgcccagcaggtgccccggaaaagtcagaagagcatattggtcagacatacagggaatccttgtagtgtggcaagaat

SEQ ID NO: 300722 - DNA, 122 bp, Homo sapiens
gcacggtccacaccccgaagcttgccgatgccctcggcggcagcccgtcctgcagagccgcgttccctgcgcccaaagcaaggtcggacccccaccgggattcccggaaccgggtgtcccgc

SEQ ID NO: 300723 - DNA, 122 bp, Homo sapiens
ccgaccttcttgtcgttaaggacacacggctgggagcggctgcgggaaaggccgctggagcgtctcgccagctctggtgttgaggcaggtgtgctgttggctgagggaggacagtattccac

SEQ ID NO: 300724 - DNA, 122 bp, Homo sapiens
cccttatagttccacgatttacattcttcatgataatcatctacttttttgttttaaatacgagcggtggttctctgctcctccttttttttttttttttttttttttttaaatttattttt

SEQ ID NO: 300725 - DNA, 122 bp, Homo sapiens
agtactgcagctaccacatggattaagacagacagggtcccagctaaggggtcaaagactcgcatgtgattccttccgcaccactcactaaccaggcaccctccgccgagcaatttgagctc

SEQ ID NO: 300726 - DNA, 122 bp, Homo sapiens
cgctctgtttcactccccccaggcggagcccacgcgtggggtcttgtgcgcgtggtcccgcggcagcccacagccctctgctctccgtttcaggctgtgcaccccggctgtccgcactcccg

SEQ ID NO: 300727 - DNA, 122 bp, Homo sapiens
ggtcctcaaagaaacagaagtcggctccctcaaggccacatggccaggaaggacggtgaccggagctcagactccaagctcccaaccttccctctgtacccaccagttcccctgtgcccttg

SEQ ID NO: 300728 - DNA, 122 bp, Homo sapiens
gaggcgagacgagtgctctccccacacgtgtaaccctgcatctcccagtttcagagcttgcgttcattcatatgcaggcagtggtttaatatttgatcaaaggtagaatagttgcactaaat

SEQ ID NO: 300729 - DNA, 122 bp, Homo sapiens
aggagagtgcattttgtgactgaggtacacacatgtaagaaataaacaccaaggacatctcgatgttaaagcagctaacaagtcattgttatgggccattaaaaatcaacagccaaacctgt

SEQ ID NO: 300730 - DNA, 122 bp, Homo sapiens
acgttgtgatgtcagccctcttcctgcactagcaaaagtgccattaatcagcctttctgacggttacaggaattcttaatgatgcatttatttacacagatttctctgctctgggtaaattc

SEQ ID NO: 300731 - DNA, 122 bp, Homo sapiens
aggtcaattgggcctggttccatgttaggggcaggcatggtcatgccaatgactcagtgccgcatgcaggcagaggaaatgcttcagattcagccaactatagccctgctgtaaggtcttca

SEQ ID NO: 300732 - DNA, 122 bp, Homo sapiens
tactatggaatagatacactgcttttgccttcccagcattgaatcctctttgtctagaaacgacaccttagttttcctttggggaaccacatcactctacgcttgagtgattctggtgggac

SEQ ID NO: 300733 - DNA, 122 bp, Homo sapiens
tggccggcctcggggttgaggctcagctcgggataagtgatctttggggcccgcagaggacgtctccccaagacccagtggcaaccgggtgagcttcccccaaggcaccattacacttccta

SEQ ID NO: 300734 - DNA, 122 bp, Homo sapiens
ccccaggatgaggctggcccgccaaaccaagatgggctttccactgctctatttggcacccgtccccctccgccggggccctgattggcagagttccgaggctgcagcccgccacccccggg

SEQ ID NO: 300735 - DNA, 122 bp, Homo sapiens
gattcctacttgctgacgcggaaagctcaggtctggagagccgttatctatagatgcgagcgtgacgatcaacagcaatgcggggttagtggttctagaccgatggcactgacgtggagggc

SEQ ID NO: 300736 - DNA, 122 bp, Homo sapiens
caacttgaaattcactatctacagttaactaacatcagggtgcagggagggaccctgagccgcatccctgtgcacagcaggggctgggctgtcattgcaagagagcaaacctggtctccctc

SEQ ID NO: 300737 - DNA, 122 bp, Homo sapiens
tccccctaggcccaagctttgtcctctgtgctggggccctcatctgcatcacaaagtggccgtctgtccctgtctgggtctgtagggaagtgtctccctttctcagactaaaagctggggta

SEQ ID NO: 300738 - DNA, 122 bp, Homo sapiens
tcactagggagtgccagacagtgggcgtaggacagtgggtgcagcgcaccgtgcacgagccgaagcagggtgaggcattgcctcactcgggaagcgcaaggggtcagggagttccctttcct

SEQ ID NO: 300739 - DNA, 122 bp, Homo sapiens
ccattttctagaactgagctagttcaggtgctgcctgagtcattcacctacagaaaaccacgggatgggtgtgaactgatcatctaccttcatatatatttggcattttaaaaagttaaata

SEQ ID NO: 300740 - DNA, 122 bp, Homo sapiens
tgtgcacgtgtgtgagtgtatgagtgcatgtgtgtatgtgtaaatgtgagtatatgtgtacgtgaagaatgcataaatgtgtgtgagtgcaggtgtgtgtgtatgtgtgaagactgcgtaag

SEQ ID NO: 300741 - DNA, 122 bp, Homo sapiens
aaagccacgttccgaactgacaatcgctgatctcggctcgcgcagagactgcgggagcgtcggggccgacagagacggattacgtcaagaaatagttcctccacctacctcggtcggcctcc

SEQ ID NO: 300742 - DNA, 122 bp, Homo sapiens
tctatcaggctatcctggggaactgctccaggctgaaacaaaccaccagttaggacgaaccgcctttgatgtgaaagctgggaagctagaatgtagtttcgccttatccttagcgggtcggt

SEQ ID NO: 300743 - DNA, 122 bp, Homo sapiens
cattgtgcagtggtaggtgtcagtgatccaagtggggacccagtccctcaggccacacagcgcatgtccattgccttcatgccgcaggagactgagaggtcatgcatgagggccacttctct

SEQ ID NO: 300744 - DNA, 122 bp, Homo sapiens
tcctcacgtcaccaggtcgctccagtagttgctcgccctctattggccgatcggcctcggcgcctccgccccggccgcccctatcccgaactgccattggttttgcctaacgccactcgacg

SEQ ID NO: 300745 - DNA, 122 bp, Homo sapiens
gcggattgcccacctcccctggcaccctccatgccccacacgccttacttgatgctgcagcgctctctgaacatggcatggcttgtgaaggtgtggctcacatctaggtcattctggtgcat

SEQ ID NO: 300746 - DNA, 122 bp, Homo sapiens
ggagacgcagctatgcggtgtctgataagtggaccggacctggaagcgccgggctgtggtcgcccaaaggcgtggtgcccgcatcagcctggctgccctgacccaggaaacaccgaccctgt

SEQ ID NO: 300747 - DNA, 122 bp, Homo sapiens
gtcgcggcttctagctgtccaggctccgccccctgtgagtgtgtaagtgtgtgatgctgccgcggccgccgccgccgcctgtgcagccgctgccgccgccgccgccgccgccgccgccgccg

SEQ ID NO: 300748 - DNA, 122 bp, Homo sapiens
gttcgtcttctccacctgctccgcgcgcctcgcatgtgtctggggggaaacacatccaaacgtcgacttaaatgattcagggccgaggaccgtgagaggcagtcttcactttttcatctttc

SEQ ID NO: 300749 - DNA, 122 bp, Homo sapiens
ggcttgacctctgatggccgttgcaacaacatcaaagcctttggaactttgtagggggtacgaggggctaggaaaccaagaaaacatctttttaaaaatataagcgatcgggccgggcgcgg

SEQ ID NO: 300750 - DNA, 122 bp, Homo sapiens
ctgcggagtgagcagatgaaggccttgtcctgatcccttggaaacacagagcatcacagacgtgcctcatcacatgccaggcctcagagtcaagggtggctcccctggcccaggcatccctg

SEQ ID NO: 300751 - DNA, 122 bp, Homo sapiens
cgccgccccccccacccctcccccagacaaacgatatgacgcacttaactataaaccccccgaccccccgtggcttctgggaatttcccagaaggttctgcatgggcagatgctgagggagt

SEQ ID NO: 300752 - DNA, 122 bp, Homo sapiens
ggcgcgtcacctgggacctgtgcctctgggatgaccacagtacaagagtgtgtgtgtgagcgtgcacgtgtgtatgagtgtgtccatgtgtgcctggatgaatgtgggtatgagtgtgtgga

SEQ ID NO: 300753 - DNA, 122 bp, Homo sapiens
aacagatcgctgctcccaagcagatttcgccggtacaaagcgccgcagccgctcagcctccggcagcggcaatccttgcgcctgcgccgcagaaacccctcctgcagcccagggagaagcct

SEQ ID NO: 300754 - DNA, 122 bp, Homo sapiens
ccgactcttaacgttgcagccagcctgagactccacagcgcgaggctgctccccacctgccgattcttgccccgataagtgtgtcatccgtaaatctgatctgtgatccactgttcaactct

SEQ ID NO: 300755 - DNA, 122 bp, Homo sapiens
ttggtcaggctagtctcgaactcctgacctcaggtgatccacccgcccggccttccaagccgcgcccggccagaaatggtcatttctgaatgtaccacgtgtaatgccaaaggaacccaaga

SEQ ID NO: 300756 - DNA, 122 bp, Homo sapiens
atggcgggagctggtcgcggagcagcggtgtccagggtgcaggcgggtcctgggagtccccggcgagcgcgggggcggcagcaagtgcagccgctggggaagcagcgcccagccccgtggcc

SEQ ID NO: 300757 - DNA, 122 bp, Homo sapiens
cttttaggcttattttctttttcctgttccttgagaaaacaatacagaaacagggctgggcgcggtggctcaagcctgtaatcccagcactttgggaggccaagacgggcggatcacaaggt

SEQ ID NO: 300758 - DNA, 122 bp, Homo sapiens
gaaaacgtcttgcacgtgcgaggggcatttcaggagtttcctgtctgtcaggtgagaaggcggagatatgaccttagaggtcagacccatgataaacttgagcccctaacgaaagggtgtct

SEQ ID NO: 300759 - DNA, 122 bp, Homo sapiens
ggggacgtctggcaaccagaggtctgcagttcagtgaacggagggagataagagagcagacgattccgggctggagcaggcgccagggttgccagacttacctcatttttccgcagaagctg

SEQ ID NO: 300760 - DNA, 122 bp, Homo sapiens
tccccacggcctagcgccgataattgcacacgggagtccgggaaacgttcgcggagtacacgtttgaattaatgactccgaaggggggatcggccgaccttccaccgcatcccacaaagaaa

SEQ ID NO: 300761 - DNA, 122 bp, Homo sapiens
gagtccgctgcctgccgggaacttggcgtctttcgggcgagggaagagaaagcattcccacgccgatggttccagcaaaaccccaggaatgctctgctcctggtcttgtagttgacacctcc

SEQ ID NO: 300762 - DNA, 122 bp, Homo sapiens
gcgagagtagtaaaggcactgattggtcacagcatgggagcctcggtgctttcccgaacccgacgcggccgggaggagggaaggagggaggggcggcgaacgtggttcagtccggcaaatcc

SEQ ID NO: 300763 - DNA, 122 bp, Homo sapiens
ttgagatctgtgcagggtctgtgcttccgccttattcaaactgtcagatgccagaaccttcgatctttactttgatacatttccacacttattactgcctcacaaccccataggaaatagca

SEQ ID NO: 300764 - DNA, 122 bp, Homo sapiens
gccctccgctgtcacgcagcagcaagcttaatcccgcataaaaaacgcatgcgccgagagcgtgcccgcagcagggcccacggaacgatgacagcaggcacctcctatctgcccccgccccc

SEQ ID NO: 300765 - DNA, 122 bp, Homo sapiens
acctccccatgcgccacctccctggacgtggccacagctgcagcctggatcagcccgtagcggccaccttcgcaggccagaggcaactccacataggagtagtagtgctggtcccggagaca

SEQ ID NO: 300766 - DNA, 122 bp, Homo sapiens
agggaaggaatggatgtgtgatgggtgcaggtggaaatgaatgaatgaatgtgtggcaggcgtgggtaggaatgaatgaatgtccacatggggcagccctgccctgcccacctcgccctggc

SEQ ID NO: 300767 - DNA, 122 bp, Homo sapiens
gggcctgaaccaggctatcgccttcaccggagatgcctatgacgccattggcgagctcttcgcggagcagcccaggcaggacctggatcccgtcatggacctattagcgctgtatcaggggc

SEQ ID NO: 300768 - DNA, 122 bp, Homo sapiens
acaaaaaccaccaaaaaacagaaacctcaaaccacttctgaatgacttcagactatctttcggctcctgaatgctgcttttgcatactgttactattgtaacacactaaaatgatgcctatc

SEQ ID NO: 300769 - DNA, 122 bp, Homo sapiens
ggagaggaggtcctggccttggcggactcctcagaccttccccagggcccagtggtgtaccggcctgggggctgaggcaccgcgccccaccccagggaagccccagcttctctccttccttc

SEQ ID NO: 300770 - DNA, 122 bp, Homo sapiens
gcagaggctcaggcttgcttctttctccgctccccatcccttgcctgaggctgcctgggacgtgcttctgggagtggggcctcagcctccctaggctacttgagaactggcaccaaatcaga

SEQ ID NO: 300771 - DNA, 122 bp, Homo sapiens
gggaaaccgtggggccagagccctaatccaccatccccaggatttactccgggacagctgcgtggatgggctgtgtcctccctccctcctgcccggcttcccctccttcgctctcttccttc

SEQ ID NO: 300772 - DNA, 122 bp, Homo sapiens
acagccatgctcggagcagccccatccgtgatggccgagaggcggtggaaacagccccaacgcacatccactggtgaatgaacaaacaaaacgtggcacgtacaaatgatgcgggatatatg

SEQ ID NO: 300773 - DNA, 122 bp, Homo sapiens
cccacccccgggctccctctttaagtctctagctcaaggtacccgcctctccaaagggctcgtcccgcctgagggcaacgctccccgaggtccagcgctaggcgcgggcgctagactggcgg

SEQ ID NO: 300774 - DNA, 122 bp, Homo sapiens
aatggaggagcaaggaaaaagaagttagctttcatgtggggtaataatggatgatgaacccgacaagtagactgaaggagatataacatggacttttatatctttgtttctagaatttttat

SEQ ID NO: 300775 - DNA, 122 bp, Homo sapiens
cgggaccgtgaatcaccggcccgcggtgccgccggcctggagcccggcgagtggccacggcgtccgcagagcgaaacctgccccgcaggccccgaaatagcttgttgtggaaacacttgggg

SEQ ID NO: 300776 - DNA, 122 bp, Homo sapiens
ggctggggagaggcggtttctgggtctccgaatgaggtcacacaattaaaattaaaaaaacgaaaccaaaccaacccctccatttgcgttgcgctttcagggtgcttgaggctttcctgtgc

SEQ ID NO: 300777 - DNA, 122 bp, Homo sapiens
cgggcccagcgcgcagcggcagcggctgcaggcacaggcggtagaggacgctgtcgtgcacgtcgggcagcaggtagtcgcggcaggaggccccgaggagcacgcgctcgcacgggaagcgc

SEQ ID NO: 300778 - DNA, 122 bp, Homo sapiens
gagaggcaagaactggtctagtcacccccgctgccttcaggtctgccttgtacctgacatcgctgcaggaacactgctggaggctggggcttggctgcaaggtggtattctctagcactttc

SEQ ID NO: 300779 - DNA, 122 bp, Homo sapiens
agtgcctcaccttgtggggcctgagcagctaccttgagaccatgtgaggtggcacctttccggggtggactcgtgcggccttgaggacaggcacagggcaccctatcccaagccgtccaggc

SEQ ID NO: 300780 - DNA, 122 bp, Homo sapiens
aaacccgccgcggaggagccggtggctctagtgcggtggagccaggcgtggaagtcggtccggcgcggggcggggggcgggcgggagctacaagcggcggcggcggcggcgaccgtgaccgt

SEQ ID NO: 300781 - DNA, 122 bp, Homo sapiens
gttgctggtccaacttggggctggccatgataaattcattgggctggcagacagtggtagcgactcctcccagggcaatccaggggtttagtatggtttggccacccattacagatgttcct

SEQ ID NO: 300782 - DNA, 122 bp, Homo sapiens
tcacttggggaggcggggagcctgggtctcaccctataccacccgcatgcagatcatggacgagatcaaggaaggcatccagtacgtgttccagaccaggaacccactcacactggtcatct

SEQ ID NO: 300783 - DNA, 122 bp, Homo sapiens
gagcacctggctcgggacgcccaacaggtttcgccatcataaaggggcttcccccttggtcgtgactacactgcaggtgattctttgaatcagcgtgagtgtctcgttctccagccgtactt

SEQ ID NO: 300784 - DNA, 122 bp, Homo sapiens
ccgcactctagtcccagtatttgctaagctattgctttaaagacaccccatttctttacccgcctccaccagacacgcgcacaccctccgctttgctgctccatccttttctggagaggagg

SEQ ID NO: 300785 - DNA, 122 bp, Homo sapiens
ctcccgcatttcaccactctgtgcgtgtccacgaaagccccacggagactggtcttggggcggcaaataaaactttagcaagtaggtggattcacaaataggggttctgtgaatcatgagca

SEQ ID NO: 300786 - DNA, 122 bp, Homo sapiens
aactgaaggggtggggcgggagatgaggcagggaagccaggagccttgacaaccagtctccgagtttgaacttcatcctgtgggcagaggcgtcctgaggatgtttgaatagggccaagtgg

SEQ ID NO: 300787 - DNA, 122 bp, Homo sapiens
gttgctcccttgatggggaagactgccccttgtgtctagggacatctgtgaagacttcaccgtagtatccaccgagcacccactgtgtaccagcccatcagggcttggcacaacaaaactgc

SEQ ID NO: 300788 - DNA, 122 bp, Homo sapiens
tttaaaaaaattgtaaagaggaagaggttcatctaactataaaaggaaaagatgaaggcacgtgatattattcggtcccacaatccttaagaaaaacggtattttgcaagtttgtgtgtgtg

SEQ ID NO: 300789 - DNA, 122 bp, Homo sapiens
acatctgcctcccactgttcctacaccccaagtatggaaaggtcccctctccagggcccccgaggactggaatccacattcgcacctacggccttgagtggtgctgggcatacagcccacta

SEQ ID NO: 300790 - DNA, 122 bp, Homo sapiens
ctccgttccttccgtcactcactcactaatcactgttcctgagttccttcacttctcacccgtcatttattgcgcacctattctgtgccaggcactcggccaagcactgcgaggccttcaaa

SEQ ID NO: 300791 - DNA, 122 bp, Homo sapiens
ttctccagcagccagggccgtgcgcttctagaacattccccgtggctttcctaaagggagcgtggatggagccagggtgtgcagatttctgtgagaaatattttcacctgggagccccaagg

SEQ ID NO: 300792 - DNA, 122 bp, Homo sapiens
ttaagtcagtttgatggggagactctgggactccagagaggcaaggttgcctcttcgtttcgcttgtcctataacaaccttgtgcactaacgaggtgtggaataaggtgaaagatgattgtg

SEQ ID NO: 300793 - DNA, 122 bp, Homo sapiens
gcctctgcccgccagctgttcaggtcgggtggggaggctgcagtgcagacccctgcccggcgtctccctggagactgccttccctcccatatatggtgcgtgctgctggctgtcccccctgt

SEQ ID NO: 300794 - DNA, 122 bp, Homo sapiens
ttctgtagtcacaggagctgtagagaggaccccaggacatctgaaagccaggaaatggtgcgtgtgcatagccggttgtcccgagacggggtagaggctgcctggaaccggccggaaccggc

SEQ ID NO: 300795 - DNA, 122 bp, Homo sapiens
ggggcagggtgtacacctgtggctctcggggctgccctgtagggacagaggttggcacagcggtcactcccagggcagagggtgggccgagctgacctctgtccatgtggccctcgcacccc

SEQ ID NO: 300796 - DNA, 122 bp, Homo sapiens
gtgtggttctatctgtagggttgtcttgctgggtaacaaaatcattcctctatctctttccgctctgctagactgtgtgtcttctcctgtgggtgggaacatggtacattttccactgatat

SEQ ID NO: 300797 - DNA, 122 bp, Homo sapiens
gaaggagctcactaaatacactagccctttccatgttttctccttcactagtttccgcgccgcctcctcttcctcaaattcggcttggcttctctagactctacacttgccccctcaaacct

SEQ ID NO: 300798 - DNA, 122 bp, Homo sapiens
tctgcttcgccaggagtccgggcatcgcggagattcatcttcgtcctggcacccaccatgcggtgcccagccagccctgcacttggtcggccctgctcgagaatccaacctggttccatttt

SEQ ID NO: 300799 - DNA, 122 bp, Homo sapiens
actcgggaagcgcaaggggtcagggagctccctttcctagtcaaagaaaggggtgacagacggcacctggaaaatcgggtcactccctacctaatactgcacttttctgatgggctttaaaa

SEQ ID NO: 300800 - DNA, 122 bp, Homo sapiens
aaaggcaggcactctgagatcaccatctttgtacctacataactgtcactagctaagaatcgctgtgcaaaaagacaaaaacacacaaaaggaaaccaacagatagtaccgtttgtaaaaga

SEQ ID NO: 300801 - DNA, 122 bp, Homo sapiens
gtcagggatgctcccaggcccttcgctcttgctttcagctagtcattgtcgagcgccgcccgtgacaggcgttttgccaagccctggagttactgaagtgaacaagtccctggtctctcggg

SEQ ID NO: 300802 - DNA, 122 bp, Homo sapiens
tagggtgggtgggggcctgaggggtggcttggagccctggcggtggctgcctgacgtcaccggcctctctggcaataggctgcgagctcagctccctgaagcggcggcgaaggcggcggcgg

SEQ ID NO: 300803 - DNA, 122 bp, Homo sapiens
gtaggggcttggagaggcctgggagctgtagtccggagcttcagggccagccaggaagcccgggggcctgtaggactacaactcccagaaggccaagcgagacatgcctgtttcccttcctg

SEQ ID NO: 300804 - DNA, 122 bp, Homo sapiens
attgtggtaaattatacattacataaattttactgttttaaccacttttaagtgtatactcggtggcattagatacattcacatttttgtgcaacccaaaactctgtgcccattaatcggta

SEQ ID NO: 300805 - DNA, 122 bp, Homo sapiens
ggatcaatatttcatggggggaaggggctccagttaccagccccgcaccaagccggaaggcgccgcccgcgcctgctgcccaccctggggaccctcctcagaaacccagcacaggctcggcc

SEQ ID NO: 300806 - DNA, 122 bp, Homo sapiens
atatcagtgcaattgaaagttaaacccggaaaccccaaattcattagccacccattcacccgacaagcctgtttctcaaatcaacaaacttgagagccttttcccagtggcaattgaattgg

SEQ ID NO: 300807 - DNA, 122 bp, Homo sapiens
aatgctccgccccctggaggacccgctctagaggcggaggtatccgtgctgtccagtatccgtggctataattggtcggacacgctggggaaatactcttacaggcctctagggggcagaat

SEQ ID NO: 300808 - DNA, 122 bp, Homo sapiens
ccacgccctcttcggcagcatgcaggtgaggggtgggggttgggggataaacgacccagccgggacctggtgacacagggctggtcccttgcccttgtggatttccagtgtagtggggcagc

SEQ ID NO: 300809 - DNA, 122 bp, Homo sapiens
ctcagctcctcggtgattggtccatttggagaggcctacgaaaaactcccggcctgagtccgggaggccgcggaggtttgagggcgggagtgagttagaaacaaggctccagacggccgagt

SEQ ID NO: 300810 - DNA, 122 bp, Homo sapiens
cccaacggctacgccttcaccaccggctctgacgacgccacgtgccgcctcttcgacctgcgggccgatcaggagctcctcatgtactcccatgacaacatcatctgtggcatcacctctgt

SEQ ID NO: 300811 - DNA, 122 bp, Homo sapiens
ccgacgcccttggctggcacctgcttctcccccaccggcgtcttccgcggctctcggggccgcgccccccgcaccagctcccgagccttggccttcgcccgagcgatctcccgcctagaacc

SEQ ID NO: 300812 - DNA, 122 bp, Homo sapiens
agaccgctcacagcggtaccggggcggggagcagggcgggcagggaatcggcccgcccttcgtcctgcccctcgccctactctgtcaccgcccctgggaagagtggaacccatacttgctgg

SEQ ID NO: 300813 - DNA, 122 bp, Homo sapiens
agtgattcacctgcctcggcctcccgaagtgctgggattacaggcgtgagccaccacccccggccaactgctattgttgtaatagattgtaacaaagccagtggtaatgggtagcccaacga

SEQ ID NO: 300814 - DNA, 122 bp, Homo sapiens
atagctgggattacaggcacccgccatcatgtctggctactttttctatttttgtagagacggggtttcaccgtgttggccaggctggtcttgaactcctgacctcaggtgatacgcccacc

SEQ ID NO: 300815 - DNA, 122 bp, Homo sapiens
agccctctttgaggcccacgaagcccttgcttatatgggacttaccaagtttaagagttgcgtgcacaaggaatggaactccccaacagtgtaaaggcaaacatgactgaagctttcttctc

SEQ ID NO: 300816 - DNA, 122 bp, Homo sapiens
gaggatttgaactatgcatttattccaaggatgtgcattccagacagagagaatagtaagcgcaaaggttctgaggctgacgctggtttgacatgtttgagaaacatccaggaggacactct

SEQ ID NO: 300817 - DNA, 122 bp, Homo sapiens
ggctggcctgtctggagctcctgctgggagtgagcaggaggagccaaagctgcacggacacgccctccctcctcccaaattacctgagatttaaagacacaggccagccacagacctgccta

SEQ ID NO: 300818 - DNA, 122 bp, Homo sapiens
ttagtgctccctgttcccccatggtcacatagagcactctttctgctgttgggatcagaccgctgccctcccccatcctatcccatcccccgcccccagcccggcaatgaccacagcagtgc

SEQ ID NO: 300819 - DNA, 122 bp, Homo sapiens
gagagagataacatataaaaagtcacaaggtgggtaacagtgaaatgaaggcaacttctgcgtcctactccagagctcttgctctggttccatttggatcataattactgtgatgaaatctt

SEQ ID NO: 300820 - DNA, 122 bp, Homo sapiens
accgtaggccctcaaccgctactgactggatgaatgagcttgtgagctggagccactgggcgtaaccaccagcaggcctcgggggaagcccagctctgcctgtgctgacttactgtgtggcc

SEQ ID NO: 300821 - DNA, 122 bp, Homo sapiens
caagcccctggacctgcggcctaagaagacacgcgccacgcgccaccggctcaacaagcgcgaggagcacctgaagaccaagaagcagcagtggaaggagcggctgtgcctgctgcggaagt

SEQ ID NO: 300822 - DNA, 122 bp, Homo sapiens
taatagaagaaaacgaatttgcagggcacttttaaataatcgtagccttcaggcataatacgtgatataaatatattcttaatcagtcttccacatctgagatttattttttgagtaaaacg

SEQ ID NO: 300823 - DNA, 122 bp, Homo sapiens
acccactctcagctcccgcaggagggaggcacggggcgttcatctttctgcgcctggcttcgttccagttccatccacgctgccgcgaacggcaggattttgctcttttcagctgaagagta

SEQ ID NO: 300824 - DNA, 122 bp, Homo sapiens
gcaggggctggagtccagggcagctcccaggaaatgcacgtggcatgcctatcagaagaacggcctcctcactcccatccctctatttccaaacagtaagaccagcgagacatacgctccca

SEQ ID NO: 300825 - DNA, 122 bp, Homo sapiens
gcccagccttttctgtgactaaatgcttggcagttaacaatgtataattatggtgtgtgtcgtttccaaggcaacatgcatctgtcactcccgctgaggctgggaagattgaaaggggccat

SEQ ID NO: 300826 - DNA, 122 bp, Homo sapiens
gagacgctgcactcgacgacgggggagtacaaatccacatttaatggaaaccggtaagctcgggctctgctagaccctgcagctgtgaagctcttggtgctcctgacccccgggggccggtg

SEQ ID NO: 300827 - DNA, 122 bp, Homo sapiens
ctgcgcaggagtgtggtcttgcggagatttgacctacgtacttagcgtcatgacgtagtacgtaggggctggctagccgccatcttgcttctttttctcgctcgctcgctccccctcggaaa

SEQ ID NO: 300828 - DNA, 122 bp, Homo sapiens
gccccaggccaggggacttccgaggagggtcccaaccggctcggagagagtgcaagagagcgcgagaggaggcggcaggggctgaggcagccaccgccactgccgccgcgcgacgaatttgt

SEQ ID NO: 300829 - DNA, 122 bp, Homo sapiens
caccttcatcatctcctccatcctggagagcgatgagttcctggtcatcgatgtcatccacgaggtggcccacagttggttcggcaacgctgtcaccaacgccacgtgggaagagatgtggc

SEQ ID NO: 300830 - DNA, 122 bp, Homo sapiens
aaactggactttattacgcgctgcccccgcccccttccctccccccaccccaacccccctcgccaccattgccactggcctgcgcttagctggctgctatagcagatatctgttggacggtg

SEQ ID NO: 300831 - DNA, 122 bp, Homo sapiens
tctgttctgcctccagcttcaataaactctggctttggaaacaagattcatagcagagaacgaccaaaggggaaagaaacccattcttttcccactcagagtagaatggggatgtgtctatg

SEQ ID NO: 300832 - DNA, 122 bp, Homo sapiens
cctgcacatggggctgactgcctatgggaaccgcagggtccagcctggggagctgccattcggggctaacttgactctcatccatacaagagcccagcctgtgatttgtagcaaggtatgac

SEQ ID NO: 300833 - DNA, 122 bp, Homo sapiens
gagggcagagtggccagacgcgacagcgtatactgggggaaagacatattggcgacccagcgcacatctgcctataatacttaaataatcttaagatcgtggataatagtgatcttattaaa

SEQ ID NO: 300834 - DNA, 122 bp, Homo sapiens
gagaggccccccagctgcacagtcccgcagtggtctgggaactgcccgtgtggcacggaccgggaggaggtggcctgggagcctgagagagagggcggggcgcggggggaggtgggtggtag

SEQ ID NO: 300835 - DNA, 122 bp, Homo sapiens
tggaaggcaggaccgaaccgctccttctttaaatatataaatttcagcccaggtcagcctcggcggcccccctcaccgcgctcccggcgcccctcccgtcagttcgccagctgccagccccg

SEQ ID NO: 300836 - DNA, 122 bp, Homo sapiens
gcactccgccaccgcggctgcagcttctgctagctcggagcctgcggactccagccggcgcgaactccgccgcgactctttctggctctctcgctcactgccttcggggcggaaccgcgggc

SEQ ID NO: 300837 - DNA, 122 bp, Homo sapiens
cgaacaggacgagcagctgccccccgagctgcaggaggaggcggcggccgccgcgcagcccgagcacaagcagcagaagctgtggcacctcttccagaactcggccaccgccgtggcccagc

SEQ ID NO: 300838 - DNA, 122 bp, Homo sapiens
aaaacaaaacaaacaaaaaaacccctacttataactgctgctaatcagagtgtattttcacggcaacttgaatctttgctcctaaaggctgtcctcaaaacctgaccaaatatactttactt

SEQ ID NO: 300839 - DNA, 122 bp, Homo sapiens
acacacacccctgaaggcaccgtgtggccggacttaagactcgcctcccagcctggtggccgctccctaaaaccacgagcagccctgagcacaggcagcgtgcgcggggctcagcgaccagt

SEQ ID NO: 300840 - DNA, 122 bp, Homo sapiens
tcctcagcttggggcagccattggcctctgtctcgttttgggaaaccaaggtcaggaggccgttgcagacataaatctcggcgactcggccccgtctcctgagggtcctgctggtgaccggc

SEQ ID NO: 300841 - DNA, 122 bp, Homo sapiens
agtgccccaagtaaaataaggataaaggaaagtcagtgttgcaaaatgtggtcttgctaccgttgctgaatgccaggggttccgcctaggtctggtggcttgccacagagaaagccaattac

SEQ ID NO: 300842 - DNA, 122 bp, Homo sapiens
ccttgcattaagttgcccagggtcacacagctactaagttgctcagcctagatttgatcacggttgtgctaaaagtattttttttttctcctacaaaaggactgtgtcctcagagactgacc

SEQ ID NO: 300843 - DNA, 122 bp, Homo sapiens
ctgggaattgtagttcctccgtgagcggccggcagcggcgaggccgccggcggactccagcgcctaggaagccctgcgcaggcgcaagcgtttcccaggcaaccacgccgcggcccgaggct

SEQ ID NO: 300844 - DNA, 122 bp, Homo sapiens
gagagtctttcttcacagattggaatgcgccctgcggtttttctgtgcaggggtcaaaggcgatccctttctccagggaagaaagcagacctcctccagattctgtgcccagagggcctggg

SEQ ID NO: 300845 - DNA, 122 bp, Homo sapiens
ctgagtcctataaaagacacatccagcttcagcacctcatctgctctgactccccagggacgtgtctgtgcttttgcatgtgaccagggtgagtggcaacctgggataccagaagggtatta

SEQ ID NO: 300846 - DNA, 122 bp, Homo sapiens
ggcaggcatgaggtttcctgaaggagaaagagcttgtggggcccagtgtggctgggggggcgctgggactccattctgaagccaaaggcactgggaagggcttccgcagaggagggtttggc

SEQ ID NO: 300847 - DNA, 122 bp, Homo sapiens
gaaaagacctgcacccacccccaaaggggcggggctggtgggcggagaggaggcggggcgcgctccttcagccccgcccaccagccctggactccggctcccgaggagcggagctagcgggt

SEQ ID NO: 300848 - DNA, 122 bp, Homo sapiens
ccaaggcctgttcctgtggaccctgggatgcaccacagtgggcaggtgcctcagtggccccgggaaggagcccgggcagctgtgcttggttaggaggcctacgctgccaggctctgccgctg

SEQ ID NO: 300849 - DNA, 122 bp, Homo sapiens
ttaactattttgacagatttaaaaattatgtagtaagactttatttcaatgttgacaggacgggttcccatgtgtgtttttgcagagggttattcctgaaactgacttgttactaggaccac

SEQ ID NO: 300850 - DNA, 122 bp, Homo sapiens
aacagcgcgggagcacgcgggacccgctgcgacgtggcccaggagcctgcgccgccgcggcgcagaggagaacgcacaaattgtatttcagcgccaggtccttccgggttaatgagctgaca

SEQ ID NO: 300851 - DNA, 122 bp, Homo sapiens
tgctatgtatatttaatcttaatgaaatcccaaggaaaatattaattttaacactaataacgataaatgggcattgtactcacatagtgttcttactcccaggggcacaaagctcttcacaa

SEQ ID NO: 300852 - DNA, 122 bp, Homo sapiens
tgaactcctgacctcaaatgatccacccacctcaacctcctaaagtgcttgaattacaggcgtgagccaccgcacctggccaaaatctctgtgttttactttccagaggaaaataacctgca

SEQ ID NO: 300853 - DNA, 122 bp, Homo sapiens
actttgaaaagttcagaaaacactttttgctgttttcttcagagcttcaaaaatttgatgcggttcattacctataatttgaaaaaactgccctacatcataggatttttaatctgagggct

SEQ ID NO: 300854 - DNA, 122 bp, Homo sapiens
atcttttgcagaaaccttactattataacttgctactctccagataccaattcttcatgccgagagcatcggaaatgtttttgtgtcttactgatgttttcatgatcaacttgtaaatgtaa

SEQ ID NO: 300855 - DNA, 122 bp, Homo sapiens
tccagtccgctagcagtctggggacagataagattcctgccctagttcgccgtggcgccacgttaggtactgacaatcaagctacgaggtatagctctatcctgtaaagggtagccaggcca

SEQ ID NO: 300856 - DNA, 122 bp, Homo sapiens
tcccatccctgctgatctccatccactcaactgacttcatgacccaccaacgggctatagcgtacagtgtgaaaagcacagcgactctgaaaccatgttattaatgataacagtttccacac

SEQ ID NO: 300857 - DNA, 122 bp, Homo sapiens
gggcgccgccgcggcgtgggctttcccggggagttctgggagttgtagttcctctttctccggctgtctcacaccctctgtcccctcccccaacttccccacctacttcatccctcaactgc

SEQ ID NO: 300858 - DNA, 122 bp, Homo sapiens
ttacttggagagagctagatgtatcctgtttctgctgtgcatttggccaacagtcatgggcgtgtgaatacgtgcctttggtgtgtttgtgttcaattctcttcatttctttttgtgtcttg

SEQ ID NO: 300859 - DNA, 122 bp, Homo sapiens
atgacatttcaaaagagccaattgttaactgtttgggaattttgcaaactggtgttaaaccgtggatctcttcaatttggccatggagggagtacatttactccatggaaatcagcaaacaa

SEQ ID NO: 300860 - DNA, 122 bp, Homo sapiens
catgactggctcaggaggcttctccttctggcaaaagcatattcctgaatttaaccaaagcggcatcagaggctttactgagaaaactgatgaggaaagccaggtatccttagcatgttatt

SEQ ID NO: 300861 - DNA, 122 bp, Homo sapiens
aatctcccaagacagagaatgtttcaacttcttagtcccgcttgtccctgccccaagtatcggccctgtgaatcagttctggtaactatcttgcaagagcactgggcagctcaggcttcttt

SEQ ID NO: 300862 - DNA, 122 bp, Homo sapiens
aaagctgagcagctctgcagggctccaggccttgatctcccccgcttcgggtggatgcaccgttcccatcttccgcaggccctggggtggacccggaggcgacaaaccttggcaaaagtgca

SEQ ID NO: 300863 - DNA, 122 bp, Homo sapiens
tcttctgtgctcttagagcttggtgatagtttctggtgtgtgggtggaggtggaggcagccggcacaggggacaaggccactgtaagaagtttgtaatctaattggagagaaagggtgaaaa

SEQ ID NO: 300864 - DNA, 122 bp, Homo sapiens
tagagctggatcagctgggtcagcgctccctggtcaaagaaagtcattgagggatcaaaccgtaaaatggtgctaatagtgatgattaagaatcaggttaggcggccaggcgcagtggctca

SEQ ID NO: 300865 - DNA, 122 bp, Homo sapiens
aaagctcggcggagggcggagtggtgcctttaaaaggccgggcgccgccttccgcctgcccgcctcctgcgccgccccttccgaggctaaatcggctgcgttcctctcggaacgcgccgcag

SEQ ID NO: 300866 - DNA, 122 bp, Homo sapiens
gagctcagggctgcggccagcaggagccagtgtgcacaccctccaggcggcagctgccagcgagggcccctgtgctggccacaagcggggccaaagcctgcctctgctttcctctaacaatt

SEQ ID NO: 300867 - DNA, 122 bp, Homo sapiens
tttgggtacacgctatggtcttgtggatattgacgtagactctgggtacgcgctatgtctcgtggatactgacgcagagttcggctatgctctatcactacccatctttgttgctcgggttg

SEQ ID NO: 300868 - DNA, 122 bp, Homo sapiens
aatgaaggcttcaccttggctccattctaccagtacggtttaagcctctgcaagaggctccgcccagtgaacggagaagactggggccccatcaaccccgtcctagatatgaggtggttcca

SEQ ID NO: 300869 - DNA, 122 bp, Homo sapiens
ccagggagtgtcctgactctccacccccaacccccaacccccaagtcccaactacctgcccgacttggtgatgatcatctcggtgcccagctcatggaatttgtcccaaagctccttggtct

SEQ ID NO: 300870 - DNA, 122 bp, Homo sapiens
ttgggtgccctgtttctttttgttttttgttaagtctggccatcttaacctggattcatccgcgcctgaagccaaacacaccctgggcgtcccaggaaggagcagggtttcctgcactccca

SEQ ID NO: 300871 - DNA, 122 bp, Homo sapiens
tggagaggggaaaagcctcctgagcagctgaatgcctttggttgtttccagttttcgccacgctaaatttcattccccatcctcctcctcttgccctacaacatagcttagcttagagttaa

SEQ ID NO: 300872 - DNA, 122 bp, Homo sapiens
aacagggcacgcaggggctggtacctcggtaggagagccgcaggcggggcacactggggccggggctggggccagagctacccccatggagcaggaggccccctagcagccagcaaatggcc

SEQ ID NO: 300873 - DNA, 122 bp, Homo sapiens
acagggcgccgccacaccagcaggaaggaggatggctgtgtccggagcctggcggggaggcggcctccccagtatgtgagtgcagggatctgccagaaccacctggccctctgtagggcgtt

SEQ ID NO: 300874 - DNA, 122 bp, Homo sapiens
aggcggggctagattccgctaactccctgtccccgcccaccgccgcttccgtgtcgcctacgtcacctccccatcacgggaccccgccagcctacgtgatgacgcaagtgcgcagagccaca

SEQ ID NO: 300875 - DNA, 122 bp, Homo sapiens
tcacatcccagatggggcggcagggcagaggtgctccccacctctcagacgatgggcggccgggcagagacgctcctcacttcccagatgtgatggcggctgggaagaggcgctcctcactt

SEQ ID NO: 300876 - DNA, 122 bp, Homo sapiens
ctgcaccttcatgagccgccccaggtaagagcggtagtaagacaggtaaatcttgctcagcgtctccacatattcatccctgatctcctttgctgttgctcgttcattgcccagcagaaact

SEQ ID NO: 300877 - DNA, 122 bp, Homo sapiens
cttgcctgacaccatttgggacaagagtcaaaccaggtccatctgatcacagactagtgtcgttagccgtgcactgtcccaggagcttctgtggggacaccagggaatgactgaggccacac

SEQ ID NO: 300878 - DNA, 122 bp, Homo sapiens
caacggcgtacacagactcgccctggtggggttaggcagagcgggaacccaaagccccagcgccccacccccagctcgcggaccccgctccctggggagagggcgaggctgcggcaggtgcg

SEQ ID NO: 300879 - DNA, 122 bp, Homo sapiens
atgcctattcgcagctcgctgcagcggagtcatctactgctgctggcaggattttcattgcgacgggttgttatgtgcatttcaggacataccccgtgggttgtccctgattcagttacatt

SEQ ID NO: 300880 - DNA, 122 bp, Homo sapiens
agatattggaaactaaggcacagaagggttaagtaccttgcccaagggcatcctagggagcgctctgaagttatgccttgtgatgccacaattatcatcattctaatcacaggcctctaagt

SEQ ID NO: 300881 - DNA, 122 bp, Homo sapiens
ttaacttagcccaggtatccgaagaagtttccattgtcttgaatgaagagggagcaaaagcgagggttaacagattctgtttctacattctaaaaacaattgaggttgggggagggttgtta

SEQ ID NO: 300882 - DNA, 122 bp, Homo sapiens
caacttttcagggcctcttacattcttgtccagcagctgccccatggctgagtctggaaccgcaacccaggaagctgtgtgggtcactggaggccttcttgccagcccagatgaggtcactg

SEQ ID NO: 300883 - DNA, 122 bp, Homo sapiens
cacccccgggcgcagacctgacccccaagcggatctgacccccagcacagacctgacccccgagctcggacctgaccccaagcttagatgtgacctgagctcggatctgaccccgtcagagt

SEQ ID NO: 300884 - DNA, 122 bp, Homo sapiens
tttatattgatttatttcccttttggtttaaatttaccacctacggttatccaaaatacacgaaggcctgtgggtttggtatatttgttttgttgtcacactgtaatgctgtgcaaatacat

SEQ ID NO: 300885 - DNA, 122 bp, Homo sapiens
ttagtgaccctcttctgtgaagctacatctttatacgttcctttgtattagtgcttctttcgctgccaatgttgtcaatatgtatctgtctcctcatcattcttaggattatttaagggcag

SEQ ID NO: 300886 - DNA, 122 bp, Homo sapiens
gaaactccagaactggaacttcctgccgctgtggatgcgctcgctgaagccctgggatgccgtcgtctccaagttcaccggctgcttccagatgcgctgctgctgctgctgccgcgtgtgct

SEQ ID NO: 300887 - DNA, 122 bp, Homo sapiens
acccccagaatcacgatgatcaggagcaccagaattcctatccccagcagaagcttacagcgcttatccccgtcttccatgggcactctgcaatagtcatacgaagtagatgccatccagat

SEQ ID NO: 300888 - DNA, 122 bp, Homo sapiens
ctagccttgggcagcttaattcatctcagatttgcatttaagaaactgagggccgggtgccgtggcccgtaatcccagcactttgggaggccaaggccggcggatcacgaggtcaggaaatt

SEQ ID NO: 300889 - DNA, 122 bp, Homo sapiens
atgtcttggactgcttcgtttgaggcttctgcagcagctgctgccgctctacacaaaaggcggctccgagagccaagattatgtcttcagtgcattacgggcacatgcagtgcgtatatctt

SEQ ID NO: 300890 - DNA, 122 bp, Homo sapiens
ctgcaacctccctgcctgattctcctgcctcagcctgccgagtgcctgcaattgcaggcgcgcgccaccacgcctgactggttttcatacttttttagtggagacggggtttcgctgtgttg

SEQ ID NO: 300891 - DNA, 122 bp, Homo sapiens
atccgcctgcctcggcctcccaaagtgctgggattacaggcgtgagccactgagcccggccgaattgtcccaaactcttttggggcttttataaatttagagtttctgagttgatactcctt

SEQ ID NO: 300892 - DNA, 122 bp, Homo sapiens
aggcaggctgggcgccgccaccccgaaacctccgagggaggaccagccagcccaggttggcgctggagctgcagcgccacctgcaggccaagaagtctttttctgggaggctggagctgcag

SEQ ID NO: 300893 - DNA, 122 bp, Homo sapiens
actctacacctgtgttctactgtatgccagccagccagcacaccagcaccataaggctttcgtcaaactcaaagcataacaaaatactgcggtctttgaaaaaaatattaaccatttcttta

SEQ ID NO: 300894 - DNA, 122 bp, Homo sapiens
aaaatgttgttgggtgaatgctgagcaacagccacacactgaataaaccaggcaggttgacgtcacaggggagggcacagtgttcctggactctgagtgggtggctatttttcatgccaagt

SEQ ID NO: 300895 - DNA, 122 bp, Homo sapiens
aacttggaagcaaatctgctcctcgttgagccttgagatcccgtctgataccttaactaccgtggtgagacactctgagccagaggtatccaactaagctatacctggactcctgacccaca

SEQ ID NO: 300896 - DNA, 122 bp, Homo sapiens
cccgggactggggccactatagattccagaaaggggcggttgggtcgagggcgctggcggcgagaaccgggacagctgcggggaggggaggagtgtgaggacagcagggctggactggcccc

SEQ ID NO: 300897 - DNA, 122 bp, Homo sapiens
cgcgtgcggggggtgcgggcccgcgcgttcctggaaagggctgacgtacgcggccgagggcggccgggcatcccccgtgtccccgctgcccttctcagccgaccccggcgcccgcacgttgg

SEQ ID NO: 300898 - DNA, 122 bp, Homo sapiens
aaaacaaaatactgtcataatgttttatttatatgaataataatacatatttttctgaatcggggatagaatgtacctacaagatggaagcaatgttaaattcaattgttaaaaggcgtgca

SEQ ID NO: 300899 - DNA, 122 bp, Homo sapiens
gccttcgttcttggcccactcctcctgcgcccttctgttcttgcttggggagcagcttgacgggctctcgggggcatctggggaaggctctgacctcgacctctggaatctagggtctgtgt

SEQ ID NO: 300900 - DNA, 122 bp, Homo sapiens
agcaggaaagccagtggggctggagtgtagagggcagagggagggagtggcatgggaggacgcgtcagtcagcctctgccatgtaacaaatggccctgaagttagcagcttgcaacaaccac

SEQ ID NO: 300901 - DNA, 122 bp, Homo sapiens
acaaaatccccaggtgatttgcatacataattaagttttagaagccctgacctgggagcacgttccattattataacaactttctgaacacaagagggcagtatttcctaccccctcagagc

SEQ ID NO: 300902 - DNA, 122 bp, Homo sapiens
gcctccctgcgccctccctgccccgcccgccgcggccgcccattggctgctggggaggcgcgtggccccgccccacccggccgcactcccgtgaagtgctcccgctaggtgctcccgccaga

SEQ ID NO: 300903 - DNA, 122 bp, Homo sapiens
tatggtgtgcgggccattgttcagtgcattcctgcttggcttcgcttcatccagtgcctgcgccgatatcgagacacaaaaagggcctttcctcatttagttaatgctggcaaatactccac

SEQ ID NO: 300904 - DNA, 122 bp, Homo sapiens
gcaaaatgtgagatgatcatcaataatccactgaaataagtttaaaaacagaatcctggccgggcgtggtggttcacacctgtaatcccagcactttgggaggatgaggcaggcagatcact

SEQ ID NO: 300905 - DNA, 122 bp, Homo sapiens
accacacatgtcatcatcccctttgtacagaccataaaactgatatttagagagcttaaacgtcttgcttgaggcctcaagtggtaagtggcagaactcagcttgaagtgacttgactatta

SEQ ID NO: 300906 - DNA, 122 bp, Homo sapiens
cagcgtcccgagcagcagcgccgcgaactggagctggagccccagccggggccacggcctcgaccccctgaccgcactcgccatagcgcctgggcagctgcacggctggccaggtccctggg

SEQ ID NO: 300907 - DNA, 122 bp, Homo sapiens
tctggtgcgcgccaagttccctgcttcttgcttctgtgtccccagggaagccctagctcccgccaccagcccggtggaaacctcccttcttttacattattttgtttttattttaatttttt

SEQ ID NO: 300908 - DNA, 122 bp, Homo sapiens
ccggggtgggggtgtgggaagcgcaggagaggcggccatgtgcacacccgagggggtgaccgggcacagggccccagtgcaccccaagagccgtgggctggggagggtcctgaggcctctgc

SEQ ID NO: 300909 - DNA, 122 bp, Homo sapiens
agcaggagcacgaggaggccacacggaggtgcccgtgtggatgctgtcggccgtggcccacgctgcacacggcaccctgcacaagagcgcccagcctggggtggcctctcccccgctgtgct

SEQ ID NO: 300910 - DNA, 122 bp, Homo sapiens
agaccggaaccctcgcaactcgttttgacgttttctggtcggcggtaaaagctcggttcccggccctcccggaagttgttgcacagttgtttccgggaagcgggactccaaatgggtcgcag

SEQ ID NO: 300911 - DNA, 122 bp, Homo sapiens
gagagagaaggaaggtcgccaggcagaatcgctgcacatctagacccaggggaaagagaacgaggaagagtcttgaagaaactttaaattcacagttcctgcattcaactcctctaagggct

SEQ ID NO: 300912 - DNA, 122 bp, Homo sapiens
gggctgccggcgagaccctgaaactgaacctggaagcgctgtcttgagcctgagctggggcggccgcccgccgtaaatacccgaagagcggggcctcagtgtagcccgcagggccagcggcg

SEQ ID NO: 300913 - DNA, 122 bp, Homo sapiens
tgatgggcggggtgaggcggggctcgggctggggcgggccctatcgggggcggggcctgccgggggcggagccggggtgggggcggggcccagcgggggcgggaccggaacggagccgtgcg

SEQ ID NO: 300914 - DNA, 122 bp, Homo sapiens
acgtcactccccgggggcgggctcagtaagtggagctccaccgtcattggtccggggccccgcagtaaccaggggaactgcaaacagtgtagaggccgcttccggttcgagctcccggaacc

SEQ ID NO: 300915 - DNA, 122 bp, Homo sapiens
aaggcgagaaggaacagcacgtgcagcggctttgaggcaggagcatgctggtgttgggaccgacttcacgggctgtgtgacctgtgtagtcatatgaggtgagctctgttgttgacctgaaa

SEQ ID NO: 300916 - DNA, 122 bp, Homo sapiens
cctggcttcaagttgttccgtgtttctgaactgaaccaatgtatttcttaaattgtgaaccgaaccaatgtacttcttaaatgtatttgattgaagtctcatgtctccctaaaatgtacaaa

SEQ ID NO: 300917 - DNA, 122 bp, Homo sapiens
gtgtgctgatggtgtatgtgttggtgggagtctgttgtgcgatacgcagatacattgtggcgggaccaacatctgctgaagttctggggctctagacgcttacccagcaagctgcagagact

SEQ ID NO: 300918 - DNA, 122 bp, Homo sapiens
gtcacagtgataacgcctgttttctaaacaaaagtccctctgtgggcaaggtctcggagacgtctggagctcttgcccagctcccctctcgcgtggctggatcgtgtttccttgcatcacga

SEQ ID NO: 300919 - DNA, 122 bp, Homo sapiens
atgaaataaaggtgacatgtcataatgagggaaagggagttattccacaggctgagtcaccgctctcctgcaggtacagaatgatacagcctacagaaattcagagcagactgtcagactgt

SEQ ID NO: 300920 - DNA, 122 bp, Homo sapiens
aaaggttcaagtgagaggtgacaaatgtctaaattcagataacagcaacaaacaagaagacgaacaaacaatgattagaaggtagctatgagggatctgctgcttacttggagaaggaagga

SEQ ID NO: 300921 - DNA, 122 bp, Homo sapiens
attattcagcaggaaactagtgcacacgtgggctacgtacacattgcacatgtgagcacacgtgcacatacacaccccaccaccacaaccaccgccaccgccaccaccaccgccactgccac

SEQ ID NO: 300922 - DNA, 122 bp, Homo sapiens
aaaaatcagattccttatagtgtcgcataaaccctacataatctgtaccccttgtttccacgcatgtcccttgacacctacagctaacccctttgttggcttccctccagcttccctgtcct

SEQ ID NO: 300923 - DNA, 122 bp, Homo sapiens
acacgggggaactcattgatcatgcggatctcatcatcctctgcagcctctgctgatcctcggccacttgaatgtgaagggtccaaggagccaccacgggggtagggtcctccagctcctgg

SEQ ID NO: 300924 - DNA, 122 bp, Homo sapiens
agaagaaatgaagaatccctgagtgaggacaggagtcttggaatgactccacggtgcacccgcaccctgtttcatctcaggcggcatcctgtcagccagtagaagagtggccggcctgaaca

SEQ ID NO: 300925 - DNA, 122 bp, Homo sapiens
cagcccggccccgtgcggccactgcggagcgttaggaacattccctaaaatggcggccggcgcgtcggaacagggcgggaggcggcggcgcgtgggggcgggacggggaggggcgcggccag

SEQ ID NO: 300926 - DNA, 122 bp, Homo sapiens
cactcacctggcagttggcgccggagatcccggcggggcaggtgcagctgtagccaggctcgccggcgggggccgggtgctgcgggtccggctcagggcgcgaggtgcacacacccccattc

SEQ ID NO: 300927 - DNA, 122 bp, Homo sapiens
ggtgaagatgtgatgtgtagatactgagcaagagaaaatggttggggggcaaagggtgatcgtgtttgaggttataaacaaccacaaaaccgcctttgagagttgagtgctctgaacgttaa

SEQ ID NO: 300928 - DNA, 122 bp, Homo sapiens
gtttatagccacaccaagtaattttaatagaactcaataactgtgttgccttgcaggctccgagtgctacaggcagacccgagtccgagtcttcctacggttcattgtccccccctggattt

SEQ ID NO: 300929 - DNA, 122 bp, Homo sapiens
aaaccacagaagcagcagcaggaggccaagcaggcagaggaggcggcgggcccagctgctcgacagcagtcccggcagccccttgagccgctgctgcagccacatcgggccgccaggcgcgg

SEQ ID NO: 300930 - DNA, 122 bp, Homo sapiens
ccggggaagttgtcgcagagcatggtgtcgggagtggagggcttaggtagcaacagagtgcgtttcctcagtgggatggattcctagtctcagaaccttctttatatatcccagctctggtg

SEQ ID NO: 300931 - DNA, 122 bp, Homo sapiens
cgggcaggagctggggccaggcgtgtggttagcgcagggccaaggttggaatggccgggccgagggtcgcagcctggaggggagggtcctggtcgggccctaggaggggcgtggctgggttg

SEQ ID NO: 300932 - DNA, 122 bp, Homo sapiens
tcaaagtctgagaagccctactctggggcgcatctgctttcaacattcattgagagtcatcgtcgtgcttaaaagcagtcaggtttggaattctgaggaattacttaacctgagcctgtttg

SEQ ID NO: 300933 - DNA, 122 bp, Homo sapiens
gtccctgccccctctaggagccatttcgatccgtaccttgggacccgacccttgggttagcggtgcctgtgagagcgagtgggatgggcagagacaggcctttggattgggggagcctctag

SEQ ID NO: 300934 - DNA, 122 bp, Homo sapiens
tgccaggttcacagagggctgtaagcagggatgaggcttaggtggggcttggaaccaccccgggtgcctggccagggaggctctggttgcagggactggcagcccggcagacgaggacagag

SEQ ID NO: 300935 - DNA, 122 bp, Homo sapiens
tcatataggattgttgcagatgtaattagttaagatgaggccacactgaaggaaggtgggcgcttcatccattatgactggtgtccttaagagaggagaagatatgaagacatacacattgg

SEQ ID NO: 300936 - DNA, 122 bp, Homo sapiens
gcagcacacttggaagctgctgcaaggcagcagagggggaggagggtggatgctgggttgcgggtgtgagcaggcaaagaccacaaacacatcactgagtaaaaatcacacagtggtctcct

SEQ ID NO: 300937 - DNA, 122 bp, Homo sapiens
ggggcagctgtttccagctgcggtgagagcaactcccggccagcagcactgcaaagagagcgggaggcgagggaggggggagggcgcgagggagggagggagatcctcgagggccaagcacc

SEQ ID NO: 300938 - DNA, 122 bp, Homo sapiens
attggggaatgtccccccagccgcacctggcccttatggcgtaatccagttgagcctggacgggaaataaaaaggaaaatgtgactcacagcaagtgcaaatgcagtctccctcccaggggc

SEQ ID NO: 300939 - DNA, 122 bp, Homo sapiens
aacttatttaattctcacaacagccatgtgaggtgggactattcttttgattctgatcagcgctgtgggcaagtcccttcagcctgttatgcctcagcttttatgtctgtaaaatggggatg

SEQ ID NO: 300940 - DNA, 122 bp, Homo sapiens
cgaacacccgctcccccaccgctgaaagctccatgttgactcgccgcttccccccttggccgcttccaggagcagaaaagcagcagccagcgcacgacagaccataatactctcccgctgac

SEQ ID NO: 300941 - DNA, 122 bp, Homo sapiens
ttcttaagatgctacttagaggatggtagggactgagaggaggaggcagaaggagcatagcgacctctttggagatgtaagtgactgtctacatcatgtgtttgtagagccatgggaatcaa

SEQ ID NO: 300942 - DNA, 122 bp, Homo sapiens
ggcgcccgcagccaatcagcacgagggaagctcggggtgtgagccgcgcatcgggggcctcgaatcggaagggagacgtcgctcgctgattggtcccgcctccccagtctagcgtgaggcga

SEQ ID NO: 300943 - DNA, 122 bp, Homo sapiens
gggttaaggtctcgcagccaaagctgcggcgtgctcactgcccagtcagggcagcacctgcgtgccaggcccagccctgggttagggccccgccgggccctctgtgcataccgccgacactg

SEQ ID NO: 300944 - DNA, 122 bp, Homo sapiens
aggcaggcacgcaggaactgggctttttaaacccttaagcccaaggaaatcgtagcatcgcgggacagggaaaatgaaagactttggaagtcgtcaggaatttgactctgtgagttggtttc

SEQ ID NO: 300945 - DNA, 122 bp, Homo sapiens
ttgcacagcatagaatctgacacagaaggtactcagaaaatttcgttttccggcctggcgcggtggctcacgcctgtaatcccagcactttgggaggctgaagcgggcagatcatctgaggt

SEQ ID NO: 300946 - DNA, 122 bp, Homo sapiens
accgtgccccagcccttgttgagtctttatggcttatctcacgtcatgagaatttttgcacgcatgctgctctgtgacacccctgtaggagggaagaaggagcccacttctcaagagccagg

SEQ ID NO: 300947 - DNA, 122 bp, Homo sapiens
acagacagctctgcaagaacggaggccctgtctattttgtacccagctgtacggtactggcgccgaaagacgttcaataaatacttattgaatgacgaatacgcgttaggagttggtaaaat

SEQ ID NO: 300948 - DNA, 122 bp, Homo sapiens
gttccactcacgcctgccagggagccccgaggtgggaatgcgacccgaggtggaccctgacgaggcctggcgtcctacccgcccgcccgcgatccggatccgtccggctggctttcacgctg

SEQ ID NO: 300949 - DNA, 122 bp, Homo sapiens
gaggttgtcagatctctgaagaacaatcgactttctaagcagagccccttctctgagtctcgcggtgccgcgttacatttgtaaatgccagcgcgctgctaagcacgtccccgtgaatagaa

SEQ ID NO: 300950 - DNA, 122 bp, Homo sapiens
cgtctctgcgcgcccgctggggccctggtcctgcagttggcttctcccgacacgttccttcgctgccgaaagcgattcgcccgcgctctaccgagcccagccagctcctacctcggcccggg

SEQ ID NO: 300951 - DNA, 122 bp, Homo sapiens
catgcggaaggttccagaaaacgtgaagggcgggggctgtggtcgctagtgagttctggccgggaagggagggcactgttaacccctcccggccctgccgtctgacaaacctggagtgggcg

SEQ ID NO: 300952 - DNA, 122 bp, Homo sapiens
tcatggctgacagcggtgtcactggtgggaaggaaaagacccaaagactgggagagaggacgctggggagtcttaacttagacgggggcttaaaggtctcttacaagaggggttgtttgggt

SEQ ID NO: 300953 - DNA, 122 bp, Homo sapiens
tgggtgaataatcatgcagacatccccgtgtgattaaacaccaagcgaagactgtcttcccgagtccgtgaacagcgccagagttttgggtccacagataaaacgcgtctccttcatctcta

SEQ ID NO: 300954 - DNA, 122 bp, Homo sapiens
ctagctctgacactctatgatttatctgagttggagacagatacattcgtgtaataaaggcggaagcatggaggatctgggtttcctggagcaagagatcttcccgctttcccccagagcct

SEQ ID NO: 300955 - DNA, 122 bp, Homo sapiens
atgataaatggcaactgaaagtgtttcaattagagaccataaggtctggtgggggaactccgcttggatagaacagacctggctgaaaccatcagggctgctcagcgctagtcagttgctct

SEQ ID NO: 300956 - DNA, 122 bp, Homo sapiens
cctcggaccacagagcactttctccccctgttgtaaaaggaaaacaattggggaaaagttcgcagccaggaaagaagttgaaaacatccagccaagaagccagttaattcaaaaggaagaaa

SEQ ID NO: 300957 - DNA, 122 bp, Homo sapiens
gtgtggggggtccccagccctgaggtcttcatgcttccgtcttagaacactaaatattcccgaatcagatcatggccatgttggggggaagactgatgggtttctaaagcaggaagcagtgc

SEQ ID NO: 300958 - DNA, 122 bp, Homo sapiens
tcctgtgtatcccaggtccaggaatgggtgcagcacatccttcagctgccgcttgacacgcggcaaactgtgtcatgtgtaaacaagaacaggacatggctgtcatatccaagagcacatgt

SEQ ID NO: 300959 - DNA, 122 bp, Homo sapiens
ccctgttggtcctgatgctgtttctgcctccccagctcatttactgtgtttcacatttttcgtcacgtggcccctttttctgcctctgtcgcggcccgatttaatcctctgcgcaggcagtg

SEQ ID NO: 300960 - DNA, 122 bp, Homo sapiens
gcggcgtcaggcaggagtttgacttcctcagcctatcatggcacgttgccgaggcttcagcgccttacaggacctcgctccaggctcttctggctccaatcaaaagcagggctctttcggac

SEQ ID NO: 300961 - DNA, 122 bp, Homo sapiens
gggaggaatattcatatgttttatgggaacaggcagtgaacttctccaaactggtaataccgctttccttttggtccttttaggacttcttctactcatcgtcatggagatcgtcaactgtc

SEQ ID NO: 300962 - DNA, 122 bp, Homo sapiens
ggctgctcaggtccacctgcaataaacccaggcctgcctctggcagcaaggacagggcctcgtgggtggcagcagcactggtcctcgtggctgtgggtgtgggtgggtgggtaggtaggtgg

SEQ ID NO: 300963 - DNA, 122 bp, Homo sapiens
acaggaggtgagagtcatggggtgaggggcctttgcctcaaagtgaaccccactggctcccgggatgcctactcacccatggggctctctccccaggaggaatttcccaaatcccagaagat

SEQ ID NO: 300964 - DNA, 122 bp, Homo sapiens
caacagtagcttccattaactgagcacctgctctgtgtcttggctaaaggcatggactttcgaggtctgtgggcctggtttgaatcccaatctcaccacttcctcatggtgtgatcctgagc

SEQ ID NO: 300965 - DNA, 122 bp, Homo sapiens
acctgggctctgctgttccgcctggacaccccagtttcggggagcaatggtgtgccgaggcgcactggggtacgtcgcgttccccgctcgctccgggaagtacctgcctgcggggcggatca

SEQ ID NO: 300966 - DNA, 122 bp, Homo sapiens
cgcgctgcttctgcagctgaagctggagctgccgttcgaccgggtggtcaccatcggcaccgtgctggtgcccatcctgctggtcaccctggtcttcaccaagaacttcgcaggtgaggccg

SEQ ID NO: 300967 - DNA, 122 bp, Homo sapiens
tggctcacgcctataatcccggcactttggcaggccgaggcgagcgaattacctgagctccggagttccagacccgcctggggatcacggcaaaaccccgtttctacaaaaaaaaaaaaaaa

SEQ ID NO: 300968 - DNA, 122 bp, Homo sapiens
gacagggaacacttggagccccattactccatgagataaaggggttttccagacattatccggagagtagaatttggtggtggaggcagtgtgaagggactccaagggtgggaggatgctcc

SEQ ID NO: 300969 - DNA, 122 bp, Homo sapiens
ccgctgatctcctgggaagaaagcttccgaaaaggacaccgtttcaggggcgagtgacgccggggtgcccaggccgcgccccagttccgggtttgcacccggtcttcttgccctgccccgcc

SEQ ID NO: 300970 - DNA, 122 bp, Homo sapiens
cgaactcctgacctcaagtcatccgcctgctttggcctctcaaagtgctgggattataggcgtgagccaccgtgcctggcccaagatctcttctattacagtcttttgctttactgatcaag

SEQ ID NO: 300971 - DNA, 122 bp, Homo sapiens
cgccggccccccgcccctccccgcgtcgccgggccggcgcggccaggcgggcccagaccgcggaagcacactcacttccacatcgcggcccttgttcttgaagctcttgatgcggtggttct

SEQ ID NO: 300972 - DNA, 122 bp, Homo sapiens
actgaaaagagactgaaaagcagggctgaggagtggcggcaaccggcagcgtccagctcccgcacctcgctgcacatcgcacctgagccccgccgcgaccgcatcgcgctcgctgcgaccca

SEQ ID NO: 300973 - DNA, 122 bp, Homo sapiens
ccacttcctcctgtccatcgtcctcatgtcttggccccagcagagttagtttctttctttcgtgtacaacacaagaggcattgtcattattgtttatgcctttctctcccacatgcaattac

SEQ ID NO: 300974 - DNA, 122 bp, Homo sapiens
tgcgaccccgtcagcaagggctgcagccgcggtggttgcggccgcggccaggaccggatccgaagccagggtctccaaggccgctttggctaccaagctgctgtccttgagcggcgtgttcg

SEQ ID NO: 300975 - DNA, 122 bp, Homo sapiens
tgtttgagggcgagtgtgtgtgtgagtgtgggagcgcgctcgcgtgtggccggggatccccgcggtccccggccgagagaggcgcgggcggggaaaggcagctccctccgggcccttcgctg

SEQ ID NO: 300976 - DNA, 122 bp, Homo sapiens
cgcctagatcctgcagtagtctgccctgcagtctgcgctttcagacctccggaccctcctcggacctcggccagacctccagacccctcctcggacctcggccagacctccggacccctcct

SEQ ID NO: 300977 - DNA, 122 bp, Homo sapiens
attttacaagattagattctaaacatctctagactggccgtgccctgttcagaatgtgaccgcccccaccatcctctgttgtgttaacctgcctcccgtcaccccgtcagatatttccgtgg

SEQ ID NO: 300978 - DNA, 122 bp, Homo sapiens
ccgaacaccttaggcctcacagaccttctatttgaggaatgtgctcccccaatcccagaccgctcctggtggggcgggcgcgagcgcaggaccgcggagcctgctgcgttgctcggctgcag

SEQ ID NO: 300979 - DNA, 122 bp, Homo sapiens
cgagctgctgagtggggccagtggtcccggggcgtcctgacttccaaggctctgggccttcgtgctgcggccaggagcgcgtcgccaagcgcctccccaagggtccccctgcaggggttcct

SEQ ID NO: 300980 - DNA, 122 bp, Homo sapiens
cagcatgaaggtcgaagctcacaccacctctgcagactcatttcacccctcacctgcctacggtcacctgtgtggttggtaagtccttgagccctcaaaggcctaataacgtagatgagttc

SEQ ID NO: 300981 - DNA, 122 bp, Homo sapiens
cccgctgagctttcacaaaccgaacacaccgtgcggtcacgaggcggctctcccgaacaccggctctgcacccccagggcccggggaaccaagacttccccaagggcccagcaaaagtgagg

SEQ ID NO: 300982 - DNA, 122 bp, Homo sapiens
ctgggctccggtccacctccatgcgcagggctgcatcctcagtgcctggcccgcctgtggcgtccagcatcccgaagtgcttgcggcgctcctcccgcctccgtgcacgctcccgctccagc

SEQ ID NO: 300983 - DNA, 122 bp, Homo sapiens
gccgagcatgtctgtgcttccgtctggaggagccgggagccctggttggcccaggtgtctcgcagcctcgtggctggctctgtccacagggtccacgagctggaggggcacggataaaaatg

SEQ ID NO: 300984 - DNA, 122 bp, Homo sapiens
ttcccaaagctcataaagtttccaataattaatggtgccaccaataatattacctccccgcgcaaaagaatgttacctaaatacatttaaagcatagatactttggagagtcaccacgtaat

SEQ ID NO: 300985 - DNA, 122 bp, Homo sapiens
ggtcctggaattgcagttaagattcttccggtcctcccaatccacctttcccgagacgctcgagttcacttacttaagcgtcagccttccccaagatggcgttatctttgtcgccaacccca

SEQ ID NO: 300986 - DNA, 122 bp, Homo sapiens
agggggggcggcctgcgggtgaccaaggagatagccatgcagcgccacgtgggggacctccggctgctggggagtccccggccacacccagttccccaggcctggcctggcaggatggtagc

SEQ ID NO: 300987 - DNA, 122 bp, Homo sapiens
ggctgcagggtgcccaggggcggaggccgtcaaggaggccgcttcgagaggggggaaggccggagcagatactaagcaggaacagacttgggcccaaaaattccttttcaaagaaacaaaaa

SEQ ID NO: 300988 - DNA, 122 bp, Homo sapiens
gccaccccgaaccccttccgccccgccgcgagccaggccgcgggatcccggtgccggccccgccacacccacccgcctcctaggccaggcctgggaggactccgcggctctttctcgggcgg

SEQ ID NO: 300989 - DNA, 122 bp, Homo sapiens
ggcggctgcctttgggccgcctggcgcggagccccaggctgcaggcgccgcgtgtgcgggcgggaagttcccacagttgcaaagaggcagcgaagtatgtgttccaaactttccacggttcc

SEQ ID NO: 300990 - DNA, 122 bp, Homo sapiens
gattagcgccgggcacgacacgcaccgccccgcccggcactccctgcttcgcccacgacacgcccctccccgcccggcaaactgcccggagccaaggccccgcccccagagagaacctgccc

SEQ ID NO: 300991 - DNA, 122 bp, Homo sapiens
ctctggacaccccaggagcctagaagtggcctgaatcagaggctctcattaacctggtgccgacctgagtcattctgattctctccttcatagtaatttgaactggagatgtggtgagaaag

SEQ ID NO: 300992 - DNA, 122 bp, Homo sapiens
aagaagcggaagcggatgaagtcccccgcggcaggggtgaaggcccagaagaagtcctcgcgcaggtaggctttctccagggtgaagtgctggtatgtcttcaggctcgtgctcacctctgc

SEQ ID NO: 300993 - DNA, 122 bp, Homo sapiens
tttcctcctagttagaaccacacaggttcttcttcgctcagctctgtatgttccacctggcgggataggatgtcttcagtcccctctgtctctgccaattatgggtggttatacttggttct

SEQ ID NO: 300994 - DNA, 122 bp, Homo sapiens
taacattctatctaaatataaagtgggaccacggtcttagatgaatgtggctgttgagagcggcaataatccagaatggctactctgatctacgttgataaggaaattggagaaccaggcac

SEQ ID NO: 300995 - DNA, 122 bp, Homo sapiens
ccaaagtcaggtcagcacccccggccggcgctgcgcccagcaccctttcggcagctaccccgggtacttctgaagaccactcccagagcgccacgccgccggagcagcaacgggcagaggac

SEQ ID NO: 300996 - DNA, 122 bp, Homo sapiens
cgccctggcattcaaataactcccgcgagaggcggaaatcccgcgagactgccgacagagcgtagggaagtggaaaagtggagcctgcaccgcccgctcccggcacccccggacaccgcccc

SEQ ID NO: 300997 - DNA, 122 bp, Homo sapiens
ccagggatgcagagttggcagacaggcacggggcaaagaccctccccgggaggggatcagcgtccagcgctgtccccgcctcttgcatcaaacctttcccaggtttccagagaactacagag

SEQ ID NO: 300998 - DNA, 122 bp, Homo sapiens
gaaactccaagcagagccacggggaggccacacggctcaggcactggcatcaaggatgggcgccaggttttcttaaaaacggaccccacttaaaggcttgttatatgggaccgggaccacgc

SEQ ID NO: 300999 - DNA, 122 bp, Homo sapiens
gctctcccttccgcccgccgctccctcccctccgccagctctcctcctcccgggcgcctgcggctgccctgccaaaacttctgcagttcccatgcccttcgcggcgactccagggctctccg

SEQ ID NO: 301000 - DNA, 122 bp, Homo sapiens
tcagggcagcatcccgctcgaggatgcagggttctcaccaagcagtgagggggactcacgcgccgccggggagcggagccaggctccgagaagggagcaggctcgagccgctgggttttcgc

SEQ ID NO: 301001 - DNA, 122 bp, Homo sapiens
aagtactataacagggagattaattcgttatctaaataacaatctttgctattgatccaacgtactttccgccaccttttgtgttggtccgggaggcccttaaaaaagagaatatacaaagc

SEQ ID NO: 301002 - DNA, 122 bp, Homo sapiens
cgcgctgacatctttggagaggaggcttaggaaggcgaggcgccatcgctcattctcggtcgtgtctgtcctgcttactagtcgctagtggggccactggccttctcgccaaacctctgggc

SEQ ID NO: 301003 - DNA, 122 bp, Homo sapiens
ggagtaagatatgagaagttgcactgcgcatccagagcccagagtcctatgggctgactgcgactgggttgaggctttgatactgagttttcgctagaataacctccagattcttcctctct

SEQ ID NO: 301004 - DNA, 122 bp, Homo sapiens
cgggggcggggctgaactgggtttgcgaatgggtaggacgcacccctagaatgggtagcacgggggtgggctggtgtgtgggcagaggaaaatggaggcgctgaaaatcagattttctttaa

SEQ ID NO: 301005 - DNA, 122 bp, Homo sapiens
gttgctcagcttctctgtctcatctttacaccagctgaactctgttgtttctccctagaccgggcaaggtcccccaggccaggatgtcaggcctggtgttggggcagcgggatgagcctgca

SEQ ID NO: 301006 - DNA, 122 bp, Homo sapiens
ccgtgggggcgggctcacgcaagcgccaagggaccggtgggaggagttcgggtgtggatgcgcaggcgctttgagagacggtgaagccggtggccggtggccgggcgggaccaacaaagatg

SEQ ID NO: 301007 - DNA, 122 bp, Homo sapiens
tgtaccttcctcagtgatgtatctatgttcatctatctggccttgtgaatatttttttgacgtaacatgagctagactgagtatgaatggctccaaacttaggagtgactaggatttacaga

SEQ ID NO: 301008 - DNA, 122 bp, Homo sapiens
ggtgcctctcccagcccccacttttctttttctgtttcctcaggccaaactgcaggggcacgtggaaccactgaggaagcacctggaggcagtgcagaagatgaaagccaaggaggagaggc

SEQ ID NO: 301009 - DNA, 122 bp, Homo sapiens
acttatcttgcttcccacacaaggttgttaatgcccctcacgttaagccaataactgtgacggccttctgtaccttgcaaagagctgtacaagtgggaggcatcagtatagcagtagtagtg

SEQ ID NO: 301010 - DNA, 122 bp, Homo sapiens
ggttaaaattgaagtgagtaatcttcggtgcataatgcaattgttaattttagctccttgcgtgggtgccgttctgacttgaacagccggctgtagccttcattagagaagaagcaggcagc

SEQ ID NO: 301011 - DNA, 122 bp, Homo sapiens
gctcccgggaggcggcagcggctgcagcgttggtagcatcagcatcagcatcagcggcagcggcagcggcctcgggcggggccggccggacggacaggcggacagaaggcgccaggggcgcg

SEQ ID NO: 301012 - DNA, 122 bp, Homo sapiens
cagcagcgcctcagctttccccgcctctcccaggtccgtggcacttgccgtggactggggcgaaggctactttgttcctttgagtcctgtggggtctgaggggacatgtgcatttttgagag

SEQ ID NO: 301013 - DNA, 122 bp, Homo sapiens
ggtctgtggctttgttcttgaagtcagcaagaccaagaatccactggaaggaatcaattccggacacataaggccgggcacggtggctcacgcctgcaatcccagcactttgggaggtcgag

SEQ ID NO: 301014 - DNA, 122 bp, Homo sapiens
ccgctggcggaggcgcgcgcgcagtcccaccgctctgagtcgctgagtgaagcggcgcctcgcgcgtcaggcaatctggccaattgcgcatcttttccgcctaccgcacggccccgcccctg

SEQ ID NO: 301015 - DNA, 122 bp, Homo sapiens
cctccccgcacaagtcgcctcattagccttccccgcccctgtcccgggcatcggcccctgcggaggagttcaccgcctccccacgggtgatttcttatccgccccggatacgtcctgggaaa

SEQ ID NO: 301016 - DNA, 122 bp, Homo sapiens
ggtcgctgcttctcttcatctcccagcccccagggtttgggaccgacattcactagttttcgagttgcttcctgagtagttactggagccggagagtcagctccattttgccaattgattga

SEQ ID NO: 301017 - DNA, 122 bp, Homo sapiens
agcccgcgcaccgctggggacaggccacgctgcggcagcgtgtgcacacggcatgaggtccgtctccaccaagccagcctggggtgggatgctgtgggtctgaagagaggaggccaggtaga

SEQ ID NO: 301018 - DNA, 122 bp, Homo sapiens
ggcatccaggtcacccgcggctgcaagattaatggctccagcgaggagccaagaacagctcggcgctcactcgctccccggggagcggaaacgcctcccggccggcccccctcttctcaccc

SEQ ID NO: 301019 - DNA, 122 bp, Homo sapiens
gcactttcctgcaattacacaatacaacactaagaatgcagccacaggctgtggtcacaacgcagtgagctggccagttgggtgacatcagcttgtcatcaccagggtagatttacagctag

SEQ ID NO: 301020 - DNA, 122 bp, Homo sapiens
attacccatttccccaaatctatagcagcttaataatcagaaagtggcagacataattatcgtagaaggggggttaggaatggaaaagtcaataccaatgaaaaacagaaactaaaaatgca

SEQ ID NO: 301021 - DNA, 122 bp, Homo sapiens
tgggccagaaggttctctggtggaggcgctcttcctggtgtcccgcccagtaggttcgttcgcaccgcttcttccacactctttctccctccttctcctcgccccgccttccctccctcctc

SEQ ID NO: 301022 - DNA, 122 bp, Homo sapiens
gcgctgcacctatcggtattccccgacctccaccccctcggcctggcatgcattcgccaccgccgcgaccagccccctcacctggcacctgggagagccagcccgccaggtcggtgaggctg

SEQ ID NO: 301023 - DNA, 122 bp, Homo sapiens
cgcctgcgcggcgcggtgccaccgatcccggggcggggcatcttgacttccggggcacgtcggctccaccccacttgggtgacgtctgacgtctgacgtctaacaactttggtgcttgggga

SEQ ID NO: 301024 - DNA, 122 bp, Homo sapiens
agtgctgctctggactgtactgaaggcagacggccggttcaggaggccctggtcctgctgcgttgacgaggcctgctccgggggatggaagggctcggtctgtacaaaagaaaaggaagggg

SEQ ID NO: 301025 - DNA, 122 bp, Homo sapiens
ggcgtgggggttcgaggctttacagctggggtagttccagtcttagttcagactaagttccgatcttcgagccaccagctaacagctggatgaccttgagcacgtttttaatgtctgtgcct

SEQ ID NO: 301026 - DNA, 122 bp, Homo sapiens
ctcaggaatttggattctaaattggccgctctagtttgaagctttttaagggctaacacacggtacttaactttcacaggtagactttcaacaaagtctgtatctaaaacataaccgataag

SEQ ID NO: 301027 - DNA, 122 bp, Homo sapiens
gttttaggaacagggcgagcgaggaaggcttcgggagccgggcgggccggggctgagctccggcgcgggcggcgcaggagtcgtctccccgcagcgccccggtgcccggagcccccggcgag

SEQ ID NO: 301028 - DNA, 122 bp, Homo sapiens
ccaaagcagcatgtcgtgttgaagctcacccagcgtgacgcaaaaagtggccaacccctgcggagcctgagaccatggcgaccaatccgcactggtgggagaccgtctcccgccccatcacg

SEQ ID NO: 301029 - DNA, 122 bp, Homo sapiens
gtatggtgccaggttgtttgaacccgcagacggccgttgcactctgtgtttagtgagtgacgccgtccacggcagctttgacctttgtgggctgcgcacccagagccacgcgggtcctggtg

SEQ ID NO: 301030 - DNA, 122 bp, Homo sapiens
ggagcgctcctggagtcctgggtgagcccccggagctgctacctcacgagctcctgtaggcggccggccccgtcttggcctccggggaacccactgtagcctctgggcaaggacccagggta

SEQ ID NO: 301031 - DNA, 122 bp, Homo sapiens
gaagccagaggacccctcccactcctgtctaaagcaggttggtgacatttgcgtttgtggcggctatttgcaagttccgtcccacttgtccttgcagagagctatgacttctgcggttgcct

SEQ ID NO: 301032 - DNA, 122 bp, Homo sapiens
cgagcgtcactgggtacagaccagattcagccggaagagaaagcgccgcagggagagactcgaactccactccgctggtgagcagcccctaaaccaagcgacgcagcatcgtaagcccggag

SEQ ID NO: 301033 - DNA, 122 bp, Homo sapiens
ccagggcatgcggggcaggtcgcacaggtagcaagattgtctccgggacgaggacacctgcgccgccgacatgatgcctgccctggggaaggtaggcccccgcccgggctgtctccgcggcg

SEQ ID NO: 301034 - DNA, 122 bp, Homo sapiens
tctcacgcgaacgccagacgtggtggctctgcgcgtgcgcagagctaggtcttgcctacgcggtcatgttctggcttcccaagtaggcagaattggtttcccctggaagcaaaggtacctta

SEQ ID NO: 301035 - DNA, 122 bp, Homo sapiens
cgggttctcctggttctcaggcctttgggcttagactgaaactataccaccagttttccacggcagatggtgggacttttcagcctccaaaattgcacaatctaattccttataacaaatcc

SEQ ID NO: 301036 - DNA, 122 bp, Homo sapiens
gtgagccgagatcacgccactgcactccagcttgggcgacagagcgagactgtctcaaaacgaaaacaacaaacttaagacacataacctgaggtgttaagaggagctagtaactagaacct

SEQ ID NO: 301037 - DNA, 122 bp, Homo sapiens
ggggccgcctagggaggcaccacctcagccgccagagctttccgggcgggcggttcgcggcgtggcttgtacatttctcagagaagctgccttgagaaagtgaaaagtccttgatctgtacg

SEQ ID NO: 301038 - DNA, 122 bp, Homo sapiens
aaagcgtgtacagctcagggtggaacatgcactccatgaatagtggctctcatactgccacgtgggctctatgagcttaggatttttaacagttgctcctactcccgtacagacgggcagga

SEQ ID NO: 301039 - DNA, 122 bp, Homo sapiens
ttgcgtcgttatgaaaccttcgggcgtaggctccgcctgtggtcggagtcagcgcacctgcgcagaacctcgttcacatagtacccaggttaaggcccgacagctgcagcagctccttacat

SEQ ID NO: 301040 - DNA, 122 bp, Homo sapiens
tcagttcccagacggggtcgcggccgggcagaggcgctcctcacatcccagacggggcagcggggcagaggagctcctcacatcccacacaatgggcggccaggcagagacgctcctcactt

SEQ ID NO: 301041 - DNA, 122 bp, Homo sapiens
tatttaaagattgtggctaatagtagagtagatacccctggtatttcccagagcagagctcgcattctgggaatcttaggtccatgtgacttcctgagtcagtgattcacactgagaaaaga

SEQ ID NO: 301042 - DNA, 122 bp, Homo sapiens
atcacgactgtcgcttctacgtggctagcattgaccaataggagaccgtagtgatagcgacggggaaattcaaacgtgtttgcggaaaggagtttgggttccatcttttcatttccccagcg

SEQ ID NO: 301043 - DNA, 122 bp, Homo sapiens
gcttcgcgtgtgtgccgaggaattcacgggcagtacataaactggactccctgcttcattcggagtaacaaaaacacatacagaatttaatctacggccccacctgcaatttctgcaagatc

SEQ ID NO: 301044 - DNA, 122 bp, Homo sapiens
ggggaacaacagacgaccaacccccgccccaggagaaactcgcatctgggtgatcccactcgcccctcactagtgccccacgtaggagaaactttgcccttggactcccggctgcggcgggc

SEQ ID NO: 301045 - DNA, 122 bp, Homo sapiens
gaactgtcgcccttccaggatgtggctccctgctcttgtcctggccactctcgctgcttccgcggcttggggtgagtccttctgaagtcaaatatgcggggcactttttgaaatccttgttc

SEQ ID NO: 301046 - DNA, 122 bp, Homo sapiens
gaccccaaatcacaaagactgtgttctggtcccatccctggcactcagtgaggacaggaccgtatctgtgttactcaccactaaatactcactgcctgctacagtgcttaccatgtaataaa

SEQ ID NO: 301047 - DNA, 122 bp, Homo sapiens
tccaaaatcacggcctggaaaaaatcaaggcgctgatttccagagattccccagagctgccgcgagggggcgcccggccctgccaaacccggagggcggcgcgcgcgaaccgtgtccgaacc

SEQ ID NO: 301048 - DNA, 122 bp, Homo sapiens
aaatgtgcagaaccaggagcagcctctgctctgcccacctcgaggccctgcttggcaaagcggctttctgagcctgctgtgagggaacccaccagccccgcgctcctctcaggataacaggc

SEQ ID NO: 301049 - DNA, 122 bp, Homo sapiens
aggatgccaagtgcattgttcaaaacatggctcccctgtctgccgtgagtcgtcttgaggcggggctcctgtaataaccttcccccaaggcctctcctctgcagcaccccgctggacacctg

SEQ ID NO: 301050 - DNA, 122 bp, Homo sapiens
gttcttgaagacctcttgcttccccagtactcctgctttggaggttccggcgaagggggccgggagtcaatcttgagctcctccaggctggtgataggaggattactgaagttgtaagggga

SEQ ID NO: 301051 - DNA, 122 bp, Homo sapiens
tataaacttactttcaaatataagtcaggagaggccaatgtttattactgaaattaggtacgtgactatttaaatcaacagttctcaaggaggggagaaggacaggtccctatcaccagggg

SEQ ID NO: 301052 - DNA, 122 bp, Homo sapiens
agacaccatccaggtagccaagaggacagggaacccagtctggagagtagaataacgtttcgctccaatttgagatcccaaaatgagatgctgcccgggaccagaagtcagtttcttaggag

SEQ ID NO: 301053 - DNA, 122 bp, Homo sapiens
atactgggacgctccataaggctgggggtgatacatcacctccgcacaactcatggcagccggggcagtggcggcccccgagctgccgccgccgctctacgcgctggcgcgaggggcgcggg

SEQ ID NO: 301054 - DNA, 122 bp, Homo sapiens
ctgcgggagcggagtggtcgcccagcgcgcggggggacgcgggctgcactcccgggcaggcgctctgcaatgagacagtaaatgcatcccccggtaaggcgcacggctcactcgggttttcc

SEQ ID NO: 301055 - DNA, 122 bp, Homo sapiens
cgtacaaaccgtagatgtttattaataaaccggagtccgtgtcttccctcccctcaggcacgtctcgtcccgacccctccctcctcccagcccacacccttactgcgcccttggccctgggt

SEQ ID NO: 301056 - DNA, 122 bp, Homo sapiens
ctcagaggaaacgaggtgcggaacgtagctagctagcaggaatctcgggttggcctccaccgctgactcaaggcctgagccctgacctgccgagttcgtatccagcagctgctgacagccct

SEQ ID NO: 301057 - DNA, 122 bp, Homo sapiens
actcggggccgggccaagaacaccacctcttcaccctgtaaggggcgtgccaagcgacgacgacagcagcaggtgctgcccctggatcccgcagagcctgaaatccgcctcaagtacatttc

SEQ ID NO: 301058 - DNA, 122 bp, Homo sapiens
cgggaccgctccctggggggcgggcggggtccgcatggggcagtggcgtcggggagagcgcggggctgcgctccctggggccaagggagtcccggaaggcccgtgaggaccctgcggtgtgg

SEQ ID NO: 301059 - DNA, 122 bp, Homo sapiens
ctcaggtgatccgcccacctcagcctcccaaaatggtgggattacaggtgtgtgggccaccgtgcctggctgattcagcattttttatcaggcaggaccaggtggcacttccacctccagcc

SEQ ID NO: 301060 - DNA, 122 bp, Homo sapiens
ggggcggcggttcagtgcctggttcgccagctggcgtgcgggccagccccaggctgctgtcgtgcagcttgcggacatgcttcttgaggtcaaagttcctgcagaaacccttgccgcacgtg

SEQ ID NO: 301061 - DNA, 122 bp, Homo sapiens
ttatgttttctgccttagttggggtcctggttgttcgtgctgtattccccggaagcttaacgctttttattcagagaacctaagcgtctggagagcaaactcccgtgggctctatctaaggc

SEQ ID NO: 301062 - DNA, 122 bp, Homo sapiens
cttgggaaacattgattattgggtttgggatggggccagaagcccacttgtatcctgtttcgccgggggagcctaatctacactcaagtttgtgaattcctcgcagtaattacttctttacc

SEQ ID NO: 301063 - DNA, 122 bp, Homo sapiens
gttagcgccgcgtggagttgcagaaagtccgggagaaggagtggcccatatgtgcagccgcgcctggcgcaggaggcttccagggccggctccctgcactgaaggcagcctccgaggggcct

SEQ ID NO: 301064 - DNA, 122 bp, Homo sapiens
agatttgtgaactccagacatttcctagaaattgaatcgtataatatgtggtcttttgtgcgtggttttcctttgcgcaatggatttgaggtccctccacgctgtagcaggtgtcactgctg

SEQ ID NO: 301065 - DNA, 122 bp, Homo sapiens
cctgatcggggctcctgccagggcggccatgcctgctgctagagcctctgagaaaacagccgcctcctccccttcccatggcttctttgtctcttctccacagagaccggagtggggggcct

SEQ ID NO: 301066 - DNA, 122 bp, Homo sapiens
gagctcctcccgggtgttctcaccttcgagagctcagtgtgtcatggtcagcagatgaggcgctgaggtgtagagatgagcaagtcataaccctgcctttggctgtagacttgctgtgtagc

SEQ ID NO: 301067 - DNA, 122 bp, Homo sapiens
agagatgcccaggcccggaaggacacttaggggaaaccagctgctcactttggtcttgtccgcaacggacctcttgctgccaggaaagaaaggcgtcgagtcctgtcctgttgggtaggcgg

SEQ ID NO: 301068 - DNA, 122 bp, Homo sapiens
tcagcagcgccgcggccacgccccgcctcgttcccaccgcgcggggagcgggtccccgctcgggatgattcacttcgctccttacctggaggctcgcgcgtccccaccccttgcgacccgcg

SEQ ID NO: 301069 - DNA, 122 bp, Homo sapiens
aaagtgtaaatggaactctggatttttagccataacaagatttttacactgtatttcccccgatgtatctgccttaagattcttcagtcacttcatgttgactgtttagcctctgaaaactc

SEQ ID NO: 301070 - DNA, 122 bp, Homo sapiens
gaaagcaagaaagagactttgcttttgcagcctttttaatgtctttcagttcaaagtactcggcatgccaaagagccatatttggggctatctttttctgtgccaaaccaacaacaccaaac

SEQ ID NO: 301071 - DNA, 122 bp, Homo sapiens
ctacacgtctattttattctacacttttattaacctttctgagtacaagtttaccatacacgcttcttaacatagggataattcgagcttgaaatagactttatccaggagatagctgtttt

SEQ ID NO: 301072 - DNA, 122 bp, Homo sapiens
ttaccaacgccacccgacccgaggcgggcggctctcgggtgctgttggagctggagccgccggctgggaccagcccctgtaccttgccctccaccaccacgggtgccttgtacgcctggtcc

SEQ ID NO: 301073 - DNA, 122 bp, Homo sapiens
atagtgcttttccccagaactatgatccctaacatgctgagttcagtttaaagctgtaatcgatgttgacatgctaaaaacatagtgttcggttttttgtatgtactggctatgaagcaatg

SEQ ID NO: 301074 - DNA, 122 bp, Homo sapiens
atcctgatttattctagtggcagtgttttggagtcacttaaccctgtcatcctggttggccgtcccttctcccagctctaacggtgagcagctgataccctgctaggtgctggagagtcaga

SEQ ID NO: 301075 - DNA, 122 bp, Homo sapiens
ttttgggaggacctggcatgttgagcaggaccagctgcgcatcctgggacttgttgaggacgacgccattgagcttcacagccgtgtgcatccgcctgacgttggactggtccctgcagggg

SEQ ID NO: 301076 - DNA, 122 bp, Homo sapiens
acatgggcgtggtcgtggcccctaagcaccctcagactttgtcacagagggcaaggtgggcggggcacgcacactgagtccaggtcctcctgaaggtcaccagcacagcggggccctgtgtt

SEQ ID NO: 301077 - DNA, 122 bp, Homo sapiens
agcccgccctcccgccactgagcagccgttcattgggcaagggctggtgacacaagatggcggcgccgaacaaggaaggaccctgtctccggggcaaccgggaagccgacccggcgcctgat

SEQ ID NO: 301078 - DNA, 122 bp, Homo sapiens
tcgggcatctcagcccctctctatgtggcagggatccaaggatcggcactggcccctcagcgccctggctccgcccctgcccacagcctcatctgtcagctgcccagccccagcctggctga

SEQ ID NO: 301079 - DNA, 122 bp, Homo sapiens
gagtagcgtaatgaaatcttacacatcctgctccgtcccacctgggatgtgaatcagccacgcggcctgcccgttagtcacttcgtcttggttaacagctcgactgcagtggtattatggtg

SEQ ID NO: 301080 - DNA, 122 bp, Homo sapiens
accttctcctcccgcactacccaataggcatgttgggggggcggggcctccgtgaagtcccggcctcctgttcgttctctccgcctcccgaggccccgggtgagaaacgggggagacgcgag

SEQ ID NO: 301081 - DNA, 122 bp, Homo sapiens
ctgagtcctgaacgtaaagatcatcacaaacctatgaaacatcattcccaaacaagatagcgtaatagtatctaggagattacaaacaatatgcagaaaagggaaccaaccaaataaaccaa

SEQ ID NO: 301082 - DNA, 122 bp, Homo sapiens
cccggcgggctccaagtgcatggcatgggctgcccacatgagtcagacctgcaggtgacacgaagaagggcctaaaaccccacaggcccctgctgtgttccttcctccactcaagaggacat

SEQ ID NO: 301083 - DNA, 122 bp, Homo sapiens
tgttctcggcaggagcggagagtttgctccaccaggccaggtacgggggagctgcggccccggccctccttcctgcatctctccctaggggcacacgggggtgggtctcacagggcaggggc

SEQ ID NO: 301084 - DNA, 122 bp, Homo sapiens
gggggagcggcgagaaatgaatgcagaggggccctgccctactcacacgcatgcacctgccgcctgctgcgcgcaggggagacacgtggattgcaaaccccagcgagcccagggtccaccgc

SEQ ID NO: 301085 - DNA, 122 bp, Homo sapiens
tacgcctgcgcagaggggagacgcgagcgccgcgtggacgctgacctcggtccgcgcctgcgccttggtttcttcccggcgattggttcccatctctgagggagacgcctcacttcagtttt

SEQ ID NO: 301086 - DNA, 122 bp, Homo sapiens
gcctggccaatgcctatgggtggcccctctggagtgctcactaacaagggtgagtgctctcgctaagaagtgtcccccgcctaatcatgtgtttataggatagtacacgttccccaggccca

SEQ ID NO: 301087 - DNA, 122 bp, Homo sapiens
taggcgcactcaccgctctgacgggtgcagacgcgggagttgtcccagactgtggagtggcgggcacggccccagccccccttcccttccctgaccccttcttgccatcgccccagacatgg

SEQ ID NO: 301088 - DNA, 122 bp, Homo sapiens
ttacaatcaagaggaattgttgcaattcttcatgcctgcctctgtgctaagagtgtaagacggctatcctaaatcctcattatctacttaggccgccttgcctgagccccctctgtctatta

SEQ ID NO: 301089 - DNA, 122 bp, Homo sapiens
gtcaccaccacgctggtccccgcgtacgccccgtcacattgtgtctgtgtgggcccatgccggccgctggccccgcaggtagaaaacagccaagacccctcggtgcctgagagcaaggagcg

SEQ ID NO: 301090 - DNA, 122 bp, Homo sapiens
gggtcaaggtgaaagggttggatccagggaagcagtaccatgtggccatcgatgtggtgccggtggattccaaacgctataggtaatgggccccatagaatggtactctatgcccaggctag

SEQ ID NO: 301091 - DNA, 122 bp, Homo sapiens
atgagtggaaacaacatgacccaggggaaagaaaaatgagtgttgggagacaagaataggcggatttttgtgatctcattttaaaactggccatagatgaaacaggatagttattaatgtgc

SEQ ID NO: 301092 - DNA, 122 bp, Homo sapiens
ccggggtccccaaactgatggctgctgttaggagtgcgccagctcagtggagggagtccccgggaacatttctaaagaagaggagaggagagtgaacatatcagttaggaaagacctgtatt

SEQ ID NO: 301093 - DNA, 122 bp, Homo sapiens
ctcccacctccgcgggtcaccccaggaaccagcggctcccgaccacgctcgcgcggaccacggaacagcgacgcgcaagcaggtctctttcgtcagcgtaatccctccgcagaaagccgcgc

SEQ ID NO: 301094 - DNA, 122 bp, Homo sapiens
agagctggtggctcatcagggtaccagcccagagggtggaggggagcgagcaggagagcacgcacacctctgtccccaccccaagtctggagagacagcagcctcaccccggggcaggggag

SEQ ID NO: 301095 - DNA, 122 bp, Homo sapiens
tctgcggctccttcccagcccccggcctagctctgcgaacggtgactgcccatccttggccgcaatgagccaccacccgtcgggcctccgggccggcttcagctccacctcataccgccgta

SEQ ID NO: 301096 - DNA, 122 bp, Homo sapiens
tgtgggaccttagctaagctacttagccagtgaagccctggtgtttttcctaatacctcacggagagtttatacactgcatactatctgcaaacattgaggacacatgtggcacctaagagt

SEQ ID NO: 301097 - DNA, 122 bp, Homo sapiens
ggccggtctgcaatcgtgaaaggggtggagtgatacccgcccaagccccgcctcctgccccgcctcccgactgcaacctgaatccagtagaggcagcatagcagccattctggaagtggtgt

SEQ ID NO: 301098 - DNA, 122 bp, Homo sapiens
cacgccccctcccccgcgcgccacgcccacagtccgcccctgcgggcccgccgcgctcctcgcccggcctcgccacgcctacaacccgcctagccacgcccacatgcccctccccgtccacg

SEQ ID NO: 301099 - DNA, 122 bp, Homo sapiens
ttcagtagcctgagtcccttcttctttttctttcacgttactagggcagttgttcgctgacgccttaattctggaacacgttccttgcccagattcttggtggctgcttgttcccttctcat

SEQ ID NO: 301100 - DNA, 122 bp, Homo sapiens
cgggcgggcggcgagaagggctgtctagggcgcacgcctcccgcaggggcgtcagagggtcggggccgcaggaaaggaggtgggcgaggactagcgaatgtagaagggaagggcgcagagaa

SEQ ID NO: 301101 - DNA, 122 bp, Homo sapiens
gtctttacccatccattgagccaggttggggtttgactttagttactggctcctcatcttcgtcttctcagagccgtgggtactgccacctgctcacccactctccctagccccagagcgca

SEQ ID NO: 301102 - DNA, 122 bp, Homo sapiens
ctcctgctgtagatctatttctgggaggcactgacatgctgactcttgctatggggtcggcggggagtggggagctgggcattccccttcttcctcaggacatcccgggagccaaatacgac

SEQ ID NO: 301103 - DNA, 122 bp, Homo sapiens
agccacttccccagcagccctgggcaggggtgggggacaccgtgtgctttcctgggttcacgctggctgctgagtggaagaggccgcaggggcgagggcggcggccaggaccgatgaggaag

SEQ ID NO: 301104 - DNA, 122 bp, Homo sapiens
cgcggcccggccggagatggagtctgagaacgggcccaacctcaaaggcacagggggcggcgcgggggctggcgtctggccctcacagtgtcacgcgtgaggtcgggacggagcgtccgcgc

SEQ ID NO: 301105 - DNA, 122 bp, Homo sapiens
atgtattagggccagagaattctgactcccattaaaatgagcagctctgaaaggagggagcggggaatccctccctgccactgtagaggatttatgggttgcccttaagttcccaaaccaaa

SEQ ID NO: 301106 - DNA, 122 bp, Homo sapiens
aggcgagaggggactgcaagcatccgggtcggctcctggccggagcaagatggctgagggcgagcggcagccgccgccaggtaaggccggcggggccaggccgggccggggtcgggtagggt

SEQ ID NO: 301107 - DNA, 122 bp, Homo sapiens
gaggctcgaggagcgtccgcctgccgcccagcccctgccggcgttgtcatcgctgcccagcgcttcggaccctcgctgccccaggaagacccctagaagaaggaggaggggaggacagaggg

SEQ ID NO: 301108 - DNA, 122 bp, Homo sapiens
ttcttccttctggtgggtttgtggtctcactggtttcaggagtgaagctgcagatcttcacggtgagtgatacagctcataaaggcagcagcaagatttattgcaaagagcgaaagaacaaa

SEQ ID NO: 301109 - DNA, 122 bp, Homo sapiens
ggctcgcgcgccccggcagtcagcagctcacaggcagcagatcagatggggattacccgccggacgcaaggccgatcactcagtcccgcgccgcccatcccggccgaggaaggaagtgaccc

SEQ ID NO: 301110 - DNA, 122 bp, Homo sapiens
agggacgcgccggagcgggaccgacgggaccgagcgagcgaccgacgcgccacccgccgacgcctcagccgcttggggcccgcacggaccctctacttcagtgagtgcatccagggtcgcag

SEQ ID NO: 301111 - DNA, 122 bp, Homo sapiens
ggccaacacggccaaaccccgtctccaccaaaaaatacgaaaaccagtcaggtgtggcggcgcgcgcctgcaatcccaggcactcggcaggctgaggcaggagaatcaggcagggaggctgc

SEQ ID NO: 301112 - DNA, 122 bp, Homo sapiens
ctgacagcctgggtttcgcccgcaggaggagctgagcagaaggcggcttcgggctgcgaacggcttcagggaccacccacccctgcaggcaaggagacggagggcagcctcagcgactcgga

SEQ ID NO: 301113 - DNA, 122 bp, Homo sapiens
caggctgagggcttcttggttcctggagacatgcccagctacagcaaacacagggaaacacgaagggggcagctggaagatttggtcttgaacttggggggtgggtaagtgatgatccccac

SEQ ID NO: 301114 - DNA, 122 bp, Homo sapiens
gcaggcgcagtgagcccaaatgcgaacttaggctgttacacaactgctggggtctgttctcgccgcccgcccggcagtcaggcagcgtcgccgccgtggtagcagcctcagccgtttctgga

SEQ ID NO: 301115 - DNA, 122 bp, Homo sapiens
tgtctgtcctatgaaattgttctaatttctgttatcctgagatctcagttgcaggcattccgcaacctctcggtgcttgctttgtagattcttgttctggaactgaagtcatgggtatgatg

SEQ ID NO: 301116 - DNA, 122 bp, Homo sapiens
gagaaaactaagatgccagggctgctgagcatctcagggttgccaagatccatctgctctcgggtcatctcatccatccctgtctccacttctcttaccagacttcctttccagctcttcca

SEQ ID NO: 301117 - DNA, 122 bp, Homo sapiens
ttggtgaaaagaaaacgaaccaggaactattcggaagtgtgattggctgttgctaggaaccgtctcaaggccttatgggccctggttacggaagccgaggaaggctgagcgcgggctctcaa

SEQ ID NO: 301118 - DNA, 122 bp, Homo sapiens
taaagaaaagttggtgataaatatgttaggctaaaatactaagaactttagcaactggaccgaggaaccagaaagtgtatgcacactgggaattttaacaaaagatccccatgttctcctgc

SEQ ID NO: 301119 - DNA, 122 bp, Homo sapiens
catcctccctccagcccatgagggtccccgggataaagtccagaggagccacaggggacacggctcagtgggaggcagcccggcccatcacagtgccagccctaggccttgctgttattatt

SEQ ID NO: 301120 - DNA, 122 bp, Homo sapiens
ccccacccccaggagttcagtaggccttggcacattccagctgagagccggtgagagtcgcgcgttccagggttgggatgctaggccccggtggcgtgcgtttgtgagtgggatcttccaat

SEQ ID NO: 301121 - DNA, 122 bp, Homo sapiens
ctacacttaacaaggggagcccggaaaagtggcaaaaccctagttagcaaggctgaggctcgcagagacctaggcatcgaattttttaatggtccaaatcgcagggaaagcgagcactccct

SEQ ID NO: 301122 - DNA, 122 bp, Homo sapiens
ggccaccggcattacctggcggggattggctggatcctgggaagagcctttcctgcggggcggggccacctgcattacctggcggggattggccggatccgggggcgggcctcccctgtggg

SEQ ID NO: 301123 - DNA, 122 bp, Homo sapiens
gccggtaccgcgggattttaatgtgcaactgtgagctcgcaggctgttaaaggaaggccgcgccttggccggtgcaccttccccagggcaaggagaaagcgccgctcccggcctcagccgca

SEQ ID NO: 301124 - DNA, 122 bp, Homo sapiens
aaaactggattgggatgctggctgcacactccaacttcacgaagaagcctaggatccctccgggcggcggatcacgcctgtaatcctagcgctttgggaggccaaggcgggaggattgcttg

SEQ ID NO: 301125 - DNA, 122 bp, Homo sapiens
gacctcaaattaaacctattacaccttagatcccaattacatggaaatccacaacctttccgaaatgtgtctaagcgctaacataaagacccactccattcaatattcctactaactggttt

SEQ ID NO: 301126 - DNA, 122 bp, Homo sapiens
gctggcagaacgcacccataacttggcaacactcggaggatggatggcaaataataccagcgactgaagggttaattaatgattgcagattaattgaacaccttctgtaatcagacacctgg

SEQ ID NO: 301127 - DNA, 122 bp, Homo sapiens
ctgcatttatgtaatagaagctaatttatataactgtctatatggatgctcaaactcatccgtttaaaattaaaactgttcccttcctcaaaactaaatataccttcaccaaccagctccat

SEQ ID NO: 301128 - DNA, 122 bp, Homo sapiens
ggagtagacaggaggcatccaaccagcctgagggactcagaaaatgttacaaggagaagacggcctccaactggagcactgaagaatgagaagaagctacatgggtgatgctgtttgactct

SEQ ID NO: 301129 - DNA, 122 bp, Homo sapiens
gccgagactctgtctctccaagataggacagatcttgctcccaccctactctaggctcagcggggtagtcattctctgggttcatcccaggacaactgtgtcatccccttggcaatctctgg

SEQ ID NO: 301130 - DNA, 122 bp, Homo sapiens
gctgggcttgttggcatgtgcctgtagtcccagctactcaggaagctgaggcaggaagatcgcttgaacccatgaggtcaaggctgcaatgaatcatgatggcaacactgcactctagctca

SEQ ID NO: 301131 - DNA, 122 bp, Homo sapiens
aggggccagcatgcccctgctgggctagcaagagcagttgacatgggcagggctggaggacggaggtggttgaagcatcagaggccagaagagcagttgtctgagacaggggtggacgtgtg

SEQ ID NO: 301132 - DNA, 122 bp, Homo sapiens
acgaggctgcttggacggcaaactctggatccagtgggagccttcgccaccttcgctggccgcccgcaggccaagccccagctgcggacgccactgcttccgccttctctgctggctgcggg

SEQ ID NO: 301133 - DNA, 122 bp, Homo sapiens
ccacccggctccgtcccgacgctgccggcgaggctgcgccgatgctcccgggtgcgggagcgggctgaccgtgtggacccggcaggagccagagaagcccctcctgccccggcctccccgcg

SEQ ID NO: 301134 - DNA, 122 bp, Homo sapiens
caagacggtggcttggacaacatgctaaataaactataaactagatggtatttgaagctacgagagtagataaaaatgacaggaggaccaaggagaaacttgggaacgccaatgtttaagaa

SEQ ID NO: 301135 - DNA, 122 bp, Homo sapiens
aaaagtgttttactaccaggagttcacaaatctgtggacagcacaccagtgaggattccacggtgttggggaggcaggcagggtggtactcatgacccagaggcagagacaggagcaagagc

SEQ ID NO: 301136 - DNA, 122 bp, Homo sapiens
cgcccgggccccgtgggcaggcaggcaccggctctcaggaacagcgcctttggagggtggcgtgccagccgcgtgggtgtgcccgtggcgggcgccggggcggcgtggggaccgtgtgtgcg

SEQ ID NO: 301137 - DNA, 122 bp, Homo sapiens
ccttctcccgtctttttctactctaaggtgctcttccaagctactttcctcctcagctatcgttcccctggatttccagtaagagagggtgaaatcatgcctgcttatcttctttctctttt

SEQ ID NO: 301138 - DNA, 122 bp, Homo sapiens
aaagtttgatatcaaagtatctgaaaagcatagcattcaccagttgtcgaagcaccgttccgggacttgcagcatcagcttcacttgagaacctgttagagatgcacattctcgggccccaa

SEQ ID NO: 301139 - DNA, 122 bp, Homo sapiens
gcctcccttggtcaggtgttcactcctggacggtgcccaggggcagagagtgtgattgaccggtcaggagccacaggtggcagcagctcccacaggaggcaatggtcacctggtggcagggg

SEQ ID NO: 301140 - DNA, 122 bp, Homo sapiens
agggcaatctaagtctgactcaccgtcaattaccccaagcgcctgtccgtagtttcccaacggccattccctgacaattacttgcttcaagtaagcacttgcagtatattaatgagtgaaca

SEQ ID NO: 301141 - DNA, 122 bp, Homo sapiens
caatgggattggagcagtaaggccacacccctattctgcattctagtgtggccctggttacgcctcctctggctcagtcacacagcagccttgtaggtgactggaggtgttcgctgatgtgg

SEQ ID NO: 301142 - DNA, 122 bp, Homo sapiens
tgcagcggcggggacggcggtgcgcggagccgggcatctcccgcgcccccccgcctctcccgcgcgccccccccgtggaagttacacacctttggattgcatttcgccgtcaccttctcccc

SEQ ID NO: 301143 - DNA, 122 bp, Homo sapiens
tcatgagcccctctggggtggcaggcactgtactgatgtttcccaaactgcaggcttttgcgtctcctctttatatttggccatatccatgtgtccttattcacttacctaaaaaacagtac

SEQ ID NO: 301144 - DNA, 122 bp, Homo sapiens
agctcttaatctccagaatctgacccaggtaatcctcagtggggctggattctttgttcccgttcctagcagtcaggtctccaacagggccctggactgcctggaggcaagacttgaactcc

SEQ ID NO: 301145 - DNA, 122 bp, Homo sapiens
tgtgcgccgccgggacctggagcgacatgtcaagtcccgccaccctggccagagtctgctcgccaaagcgggcgacggcccgggtgccgagcccggctatcccccggagcctggggatccca

SEQ ID NO: 301146 - DNA, 122 bp, Homo sapiens
gactctccgcttccactgtagttcctccagattctggtcaacacagcctgcaggatcttgcggaacataaatcagatcatgtcacgcctcaccaaactcctgccagagtaaaagccaaaatc

SEQ ID NO: 301147 - DNA, 122 bp, Homo sapiens
gcagccgccccgcgcccactaggtggcgcctgcgctctagtgggcgcttcacaggcgcagcgacagcgacagcgacagctcgaacctgagtcccaggattccggggactggagggcagcgcc

SEQ ID NO: 301148 - DNA, 122 bp, Homo sapiens
tgctctctgatattttttattctattttatttcaattttataaaaaccctggctttgacccgctaatgggagttggaatccatagtctatagattgtgaaactagatgtctctttaagatca

SEQ ID NO: 301149 - DNA, 122 bp, Homo sapiens
tgttttatgagcctctacatttgtgaaaacttgatgctgcctgaaacgtcttgctctccccgctacccgagacacaagtgtcacatgtccctttcatgtccactccctgccctcccttcatg

SEQ ID NO: 301150 - DNA, 122 bp, Homo sapiens
agacgaggccaagcaaaagggccgggaggaggaaagggcccgcagctcagctcagccgggcgaggcgggaggcaggcactcagctccctcgctggctcccacaccgccgcagcgccgccacc

SEQ ID NO: 301151 - DNA, 122 bp, Homo sapiens
gctccggtgctcacaggccatgggacagtccagttccctgcagacccagcggggcatgggcggacagagccgcaccgtgaagcccgcctgttatttccatcgggtggtcctggagacgacac

SEQ ID NO: 301152 - DNA, 122 bp, Homo sapiens
tcagcctgtgggcgggcctgtgtgcacagggaggggccgcccggctcaaagtcctggtgccggggccagcagcacttcctttgcagaacaagtcctgggctcaggcctcttccctgcgccac

SEQ ID NO: 301153 - DNA, 122 bp, Homo sapiens
ctcaggtgatccgcccgccttgacctcccaaagtgctgggattataggcttgagccaccgcgcctgctccagatgtattacttaatgtcctgcaacatcctctaatctgcctccaggggaag

SEQ ID NO: 301154 - DNA, 122 bp, Homo sapiens
ggaaaggcagcttctgcagtgcgtggagttctgccggtatcgctcgctggtctcactgtgcggggaacccttgtctttcaaggtgaagtgcttggagtagagtttatactggtcgttgttgg

SEQ ID NO: 301155 - DNA, 122 bp, Homo sapiens
ggtactcactgcctctggcccacttaccatcagactgggccaggccactgtctgccttcacgctcgcactgctccccctgttggctgtccacgcgggcacacaagggaaagttcactgggaa

SEQ ID NO: 301156 - DNA, 122 bp, Homo sapiens
tcactgggagcagggaagtcatcatcatcatcctcctcctcaaagcgggagtacgatcttcgggaatattcgtcctggactctgtccaggcccttcaccaccttcttggccgcatgcttttt

SEQ ID NO: 301157 - DNA, 122 bp, Homo sapiens
taggaagaataaatgagttgaggaaagcagtagaattgaagatgaggaaaggaaaagaggcggtgttaaaattgccacaatggtgaaagtaggtagctttttaaccgcggaataacagaagc

SEQ ID NO: 301158 - DNA, 122 bp, Homo sapiens
acacagccccatcctcctgctgccgtgggttaatgttagcgcagccccgtcctctgctgccgtgggttaatgttagcgcagccctgtcctcctactgccgtggactaatgttagtcatcgtc

SEQ ID NO: 301159 - DNA, 122 bp, Homo sapiens
tcttctgtataaaaccctttcatcacctttcaacacttacttaagcactagagagtctatcgcacccaagggtgacccttatctcctggctaccaattgcatttaccttgtctcacttatat

SEQ ID NO: 301160 - DNA, 122 bp, Homo sapiens
aagacaatgtggaagcagagtgtgggccctccacaggtgtagcgaggcggcgtgctaccgcgaagaaggagggaagacgcctgagcccagccggtgccctgctgcccctctgcctcttcggc

SEQ ID NO: 301161 - DNA, 122 bp, Homo sapiens
ccagttcttatctgttgtggcagatacgattgcttgctcatggttcgaccctgcagtctgcgcagataccgcctttctcactttaacaccaactgcccatcaatgtctcgctgcctggtctc

SEQ ID NO: 301162 - DNA, 122 bp, Homo sapiens
tgccagcatctcttggagtccttctgaggaggcaactgcatacgaacatcgcctctgtctcgtgctgtgacccggggagagactgtgggcaaaacccagtggcgtccgagggtctgtgtggc

SEQ ID NO: 301163 - DNA, 122 bp, Homo sapiens
caggtaagacgcgcatgcgcgggagaggaggcgtgggggtcgaggctgatgcgctgtctccgtccgccccctactggtgagtctgaaaatgaagacaaagggaggcgatggacggtagcgac

SEQ ID NO: 301164 - DNA, 122 bp, Homo sapiens
ttgagccactgcactccaggttgggcgatagtgcgagactctgtctcaaaaagcaaaaaacgaaaagacaaaaggaaaaatacaactagagaactagagaaggctctttgactatattgttt

SEQ ID NO: 301165 - DNA, 122 bp, Homo sapiens
cagagcgggcttctagaaacttccgggcctcggcttccttacccacccctaacattctgccgcctagggcgccaagccaagttcgcggcttaaccatttaggaaaccggtgcctgctttgca

SEQ ID NO: 301166 - DNA, 122 bp, Homo sapiens
ccaagatagcccagggctcacccccggctcggggaagctcagggtcttggggtctcagggcggggaggcaggacgacgcattggcgacagcagctctccgtatcaccccatcccccaagtca

SEQ ID NO: 301167 - DNA, 122 bp, Homo sapiens
tccagccggcatcttccctgctcccctggggtgggggcagccaatggcccgagggtggggcgctcgcgagggcctgggagggcagcttccgaccgggagccccgcgggagctcgggaagagg

SEQ ID NO: 301168 - DNA, 122 bp, Homo sapiens
gtgtgtggcctcctctccttctctctctggagaagttagctaacatttttgcctgcagtacgtgattcacatctttcatctctggctgccacatgtagagtcagatttggtgccagtaccac

SEQ ID NO: 301169 - DNA, 122 bp, Homo sapiens
atgctcagcctggctatttatgggggtgtatagtgccccttggccgggctgggcccccatcgggcctccggagtgaccctctagccagctgtccccttccactggctgcaggagacccagat

SEQ ID NO: 301170 - DNA, 122 bp, Homo sapiens
ccgtggttagagacgctgttcccctccgcgcctgactccgcagttactttgttacttaaccgcccttctgctcatttgacaagccctgagcgcacatttgcagagcttccttccgggacttc

SEQ ID NO: 301171 - DNA, 122 bp, Homo sapiens
caacaagcttggagctgctggagtttccaaagatctctggatcctgtagtcctcctcccgcgccagccaccgaagaacgctgcggacccagctcgctcctggtagcaagacccgaactgtaa

SEQ ID NO: 301172 - DNA, 122 bp, Homo sapiens
gactagctcctcgctggagtccccagcattcgtccagacccagtctcaaatcaaaatcaacgttcggggcgggtgcggtgactcacgcctgtaatcctagcgctttgggaggccgaagtcag

SEQ ID NO: 301173 - DNA, 122 bp, Homo sapiens
gaatcccttcggagaccaggtcagggtcactgagcttgcccagcagggcgccgcctcggacgccgccccgcctctcaccttgccagcgccgcgctcgggccgcgaaggtgcgtgcggcgctc

SEQ ID NO: 301174 - DNA, 122 bp, Homo sapiens
cacatgagcttatgccatcatgaagtcagaccacaaaagtgcttgcaaattctgcatatgcgcacttcctgaatgcattttcctatccgtaaaatgaggtacaacaggattttcagctgagt

SEQ ID NO: 301175 - DNA, 122 bp, Homo sapiens
gtgatctaaaagcgaaagaatgtagctaaccagtgtcatttgggatcttctgaagtagtacggaaactccacattcttcagaccaacttgcggcatgccagcacattcctctccgatgaggt

SEQ ID NO: 301176 - DNA, 122 bp, Homo sapiens
cgtgcagcagcgtcaggcagtggcatccagggcagcgacgaagcggcctggggaaattgacgcgcgacaggggccgctgaggcaggggcttggcccatcctgtggggcgcacccagggagtg

SEQ ID NO: 301177 - DNA, 122 bp, Homo sapiens
ggagattgcatttggcaattaaaactgccatggtgcctaaaattgggctcaattgtggcacggggtgggggtggggtggaggtgagatatgctaacatcctcctaaccattgttctaggaaa

SEQ ID NO: 301178 - DNA, 122 bp, Homo sapiens
actgccagtgtcacccaggcacgggggctcatggatactcatatgctgccgccagcggaacgcacccttccctctactgcggcgcgaggggcgggtagagacgaaggctggtaggaaactct

SEQ ID NO: 301179 - DNA, 122 bp, Homo sapiens
cgcccctgctctccggcaggtgttccacgtggccatagcgtttgcgtcacaatgacctggcggacaggtgggagccacagcgtacaccccagggttccctctgtgctgtgcgtagtgcctac

SEQ ID NO: 301180 - DNA, 122 bp, Homo sapiens
tgctggcacagtgccctgggtgccagcccactgtcctgcatgggctcagaggagctggaacggtgtcagctggtgccagctccctgggggcagggcaggccgggccaggctatgtgaacaga

SEQ ID NO: 301181 - DNA, 122 bp, Homo sapiens
ggaccctggccccattgtagggggacgcccggagaacgaggactctcctcgcttcccagacgtccccacccgccccgccggccccagtcccttctactgcgagggcacggagcccgggagcc

SEQ ID NO: 301182 - DNA, 122 bp, Homo sapiens
ggaggggccggctctggagtgcgtgaaattcctgggctcctccagcagtctcaggctcagcgctcagccctacacatcgcctcttgcatgcaactcacagagagggagaggcaacctgtcct

SEQ ID NO: 301183 - DNA, 122 bp, Homo sapiens
tgaagaaagtatcttcagggaaaagaacactagtgaggggttaagatgaggatcaggaaccgaccaggtattcagcaattagaatgtgactagtggagaagagtagatttagcagtctggag

SEQ ID NO: 301184 - DNA, 122 bp, Homo sapiens
agggagcctccccagggcagcattgcatagtgaccagccgactggccttagcctgacctgcgctgagtgggggaggccctgcctccctgccgggcacctttggggaaggggtgcgtgaaggc

SEQ ID NO: 301185 - DNA, 122 bp, Homo sapiens
taaaactgtaattgcacagcctttaatgtgctctcatacatttattgttccttgctggaccgactgccctttcaataatgccctttcatgaacttttcctatttcctattctttttaaaggt

SEQ ID NO: 301186 - DNA, 122 bp, Homo sapiens
cggcccgggctacctttatatgcacgtggggtgggacttctgtgactccctcccctggcccgggctacctttacgtgcacgtggggcgggacttctatgactccctcccccggcccgggcca

SEQ ID NO: 301187 - DNA, 122 bp, Homo sapiens
aggacggagaaggcccggaagaggggacctgagggagccagccgggcgctcagcctgcttcgctgggatgcttgtcgaggtcgggacggcaccaccaaactcacctctgtgcgccctgcggg

SEQ ID NO: 301188 - DNA, 122 bp, Homo sapiens
tcagcactccttctcaccgtcacagaccatggctccctctaacggttgcctgtgactggtcgggaatttcacaggctctgaccattctcactcaccagccggcctggaaggaagtcccatct

SEQ ID NO: 301189 - DNA, 122 bp, Homo sapiens
aagctcccttattaaatgcttgtttatagccttggcccattttttctactttttctcccacgtcactttgtataaccctcttatacattcaggaaagcagcctttggttaaatggtacacac

SEQ ID NO: 301190 - DNA, 122 bp, Homo sapiens
aataaagctcagggttctgacaggcagggggaccaccccaagctggtttctggctgcatccgctggggtgacgtttccagcagggcaggagctatatgccccgggccggccttcagaatccc

SEQ ID NO: 301191 - DNA, 122 bp, Homo sapiens
tttctgttttctctggactccgaactcattgtttcattaaggattccaaaaggcgaatggcgtccagatggaaatctgatgggggcagaaagaaggcagtcgttggggtgaagctggttgat

SEQ ID NO: 301192 - DNA, 122 bp, Homo sapiens
cccccctccaggagcctttcatgcttctctgtgtctcagtttcctcttctataacgtggacgtaacatgttattccctccatagcagtgctccatatgtttagttatgattgttgctattat

SEQ ID NO: 301193 - DNA, 122 bp, Homo sapiens
tgtcaggttgagactcagttttccttttggggaaatcattttggctggagcagcttctgtcgtctttgctggaaccctttctgggccgactgtgtgtccaccaagaagcacagagtggccaa

SEQ ID NO: 301194 - DNA, 122 bp, Homo sapiens
gttaaggcttcagaagggcggcactgggtgggcgtgacttccaaaaatggggctacaccgcgcgttgggggcggggtcctcgccgccagttcccacccgatttcagtccccatctttggccc

SEQ ID NO: 301195 - DNA, 122 bp, Homo sapiens
gtgagctctagtggggtcagcagcaaggacccatcaccggaagaggcttctgagaggcaccgacttttgccatcagtgggcagcgagtgggctgtgtggtccccggacaagcagctgagtgg

SEQ ID NO: 301196 - DNA, 122 bp, Homo sapiens
tatgtggataattagagtatgaatgttggaataattgagataattgttattcctttgaaacgcaggaatcagccaccagtgtctagggtctactctcctgtaatgttaggctgcgtgagaac

SEQ ID NO: 301197 - DNA, 122 bp, Homo sapiens
ggtgtctcgggacgggtgtgcagtgatgtcacgggacgggtgtgcagtggtgtctcgggacgggtgtgcagtggtgtctcgggacgggtgtgcagtggtgtctcgggacgggtgtgcgtggt

SEQ ID NO: 301198 - DNA, 122 bp, Homo sapiens
cccaggcctggactcctgccccagtgctctttccaccaaagcaccttcctcgaatgcacccggtttcctgggagtgagcttctttgccactggaatgaacaaaaaatccagatgaggatttc

SEQ ID NO: 301199 - DNA, 122 bp, Homo sapiens
catcctatcggcgatgccagggtacctggtggtgccgccagatagcactgtgttggcatacgggtctttgaggatgtccacatcacacttcatgatggagttgaaggtagtttcatggatgc

SEQ ID NO: 301200 - DNA, 122 bp, Homo sapiens
tgggctcaaaggatcctcccacctcagcctcctgagtggcttgggactaccggaatgtaccgacatgcccaggtgcaataaagtatttttaagtaggtgtgttagttatttttccagacata

SEQ ID NO: 301201 - DNA, 122 bp, Homo sapiens
tctacctgctttcggcgctctatggctgcgggcgtcgctgccagggcaagcaggaggtggcgtgaggccgcccgcgcccgccgcggccccgatcggggcgggggaatccccggagaccagcc

SEQ ID NO: 301202 - DNA, 122 bp, Homo sapiens
tgctctgcctcaagggtgtctttttaacgtagggtcacttggaacctggcagaacacaggcgtgctttcgaatttcaataaactggggaaagagagaacttgggatttcaggggcttaaaaa

SEQ ID NO: 301203 - DNA, 122 bp, Homo sapiens
actccttactagatgtgcagtctagtaggagacataaaataatgaacagcaattataatacggactaaggtattgtaacaggggtcatgcaggatgctataagagtacctaaaaggggactc

SEQ ID NO: 301204 - DNA, 122 bp, Homo sapiens
ccttctgccttctccatccttcaccctctactgccaggtcgtctgacccagcgacaggcgcggtaaatgcgcgaccaaaccgcagaggtcccatgcaatctcatgctgacaggattacaggc

SEQ ID NO: 301205 - DNA, 122 bp, Homo sapiens
ggtgcctggttgttcttgtcggaagacacctggttgtcctcgttggaaggtacctggctgcgtgtgggacgatttcttgggtcgttgttgtcagaaggtacctggttgcatgtgtggaatga

SEQ ID NO: 301206 - DNA, 122 bp, Homo sapiens
gcagggcccagacgctggatcaggctgtgctgggggatcctagggaacccggggtgcatccgtcatatcctagtgtccagatgatgctagggaaccctagcactaggatgtgcccaggatgt

SEQ ID NO: 301207 - DNA, 122 bp, Homo sapiens
tgaagatggcacaataaccgtccagtgatgcctgaccatgacagcacagccctcttaagccggcaaaccaagaggagaagagttgacattggagtgaaaaggacggtagggacagcatctgc

SEQ ID NO: 301208 - DNA, 122 bp, Homo sapiens
ctctgggtctcgacttccttgtgagtgaaataaaggggtgggaccagatgctctttgagccgctccagtgtcaccctgtctggcttaggggctcttgctctggggtctacagagaggctgtg

SEQ ID NO: 301209 - DNA, 122 bp, Homo sapiens
cccggctccccgaccccctcccggctccccgaccccctcccggctccccgacccccctcccggctccccttgtctgggaagcagctctctccagtgtagccactcaacacggctggtttcat

SEQ ID NO: 301210 - DNA, 122 bp, Homo sapiens
atgtgaggagcgcctctgcccggccgtgaccccgtctgggaggtgaggagcgtctctgcccggccgccccgtctgagaagtggggagaccctccacctggcaaccgccccatctgagaagtg

SEQ ID NO: 301211 - DNA, 122 bp, Homo sapiens
gcagcaagatcccagctcggaccccggacggcgcgcgcccccgaagccccggatcccagtcgggcccgcagctgaccgccagattactgtgcatcccgaatcacgaccacctgcaccctcct

SEQ ID NO: 301212 - DNA, 122 bp, Homo sapiens
gtcctcagcagtctgtggccttctgtgaagcaaagccgttttgcaggctgggttcatccccgttccaggcccgcactagtggcgcctggttatcaggtgtggtgaggagctttgctgccctg

SEQ ID NO: 301213 - DNA, 122 bp, Homo sapiens
cccagccccgccccgcccggccggttccctccgcggggccccggccactccttgtgcaagcgcaggcctccaaagggtttgggcttcttgcccaaccgccgcgcttatctccgagtctgccc

SEQ ID NO: 301214 - DNA, 122 bp, Homo sapiens
acgcaaaccgcgtccgtgcacgagtccgggagccacagcctgggccacggcaattgactgcgaacccacaacaaaccattcccaccgaagctgtcacgcgcccggagggaagtggccgccgc

SEQ ID NO: 301215 - DNA, 122 bp, Homo sapiens
cgcgggccgcactttaaaggaatctcaccagattttctccttggaaggggacgctctcttcgccgccttttaaaaacagcaaaattgctaccgttccaagcaacaatattctgtttgcatca

SEQ ID NO: 301216 - DNA, 122 bp, Homo sapiens
actcctaaatccaatagaatgctttctgttgcccgtaagataataggaatttgttggctccgataactgaaaagtgcaaatcctgggaaaccagcatgggctctggccacatttctctgtga

SEQ ID NO: 301217 - DNA, 122 bp, Homo sapiens
agcagtcccttcctccaacgcagatccctgccctgctgctttcgctgggagcgcgcgctccgcgtttccaaggcagcagcccacgccgccccacgtgacggccccgcttccgggtctgggcg

SEQ ID NO: 301218 - DNA, 122 bp, Homo sapiens
tgtttgctatgttttattcacttgtctatttttcttatgttggaattgtgtaaaaatggacgtgtctgttttacaggtgaacatcattccaataattgcaaaagctgacaccattgccaaga

SEQ ID NO: 301219 - DNA, 122 bp, Homo sapiens
caccgctcagccttcttcttctggggcctccacgagctggggagcaccagcgagacggtacgggagccaccctcggagcagccatgctgggagccggggccagagacccaggctggagctcc

SEQ ID NO: 301220 - DNA, 122 bp, Homo sapiens
caaggggacttagggtcccaaaagtgaggagctgttggcctccctctggtgggtagaagccgcaattacagactttctgggaaaccggcctggccacacccttcctctgagactttacctac

SEQ ID NO: 301221 - DNA, 122 bp, Homo sapiens
gccgggaacggcatttgccagagccgaggcggaagccggagcatttgggggacgggaccgcgggaacccggaaacgcctgggctgcaccgagctggcggtggctacggcgacgggagccggc

SEQ ID NO: 301222 - DNA, 122 bp, Homo sapiens
tctccgcggcgctgggctgcagtcaagccaggctcacccttgcagggctgcaccaagggacgagatgtgacggtgacagacgatggccaaggccatcttaccgagtgccaggcacgggcctc

SEQ ID NO: 301223 - DNA, 122 bp, Homo sapiens
cctagtctggagcccacttccctctggagcttgcggggtcctccccgggcttgaccgtcgcgtcctggacagggtgtttggccaccttcttgctggcggggtcttcactgggcctgggaagg

SEQ ID NO: 301224 - DNA, 122 bp, Homo sapiens
agattgcgcaacccccagcactcagtccagaacatctggagaagttggttgctggcgccccggtgccggcctctccacctcctggggcaggggccaatctgctctccaagtgattctctttc

SEQ ID NO: 301225 - DNA, 122 bp, Homo sapiens
ctgtggcgccggcgcggcacccacgctccacgagccagtggcggccgccgacccctacggcggggtgtgcctgtgtctctgtcccccaagactcaggcttgtgttaggggctctcgccccct

SEQ ID NO: 301226 - DNA, 122 bp, Homo sapiens
gaagtttttaattaattaattaaagcccagccttttctgccatctggaaaagcatatatacgtatataccctcaagcacatgcatgctgaagccaacttttattacccactgaagaaagagt

SEQ ID NO: 301227 - DNA, 122 bp, Homo sapiens
tccagcctgggtgacagactgagactctgtcaataaaaaaaaatgtgttctacactatcacgttaatgagttaatggcagtaagaatagtaatgtattatgaggaggatacatgtgtatgca

SEQ ID NO: 301228 - DNA, 122 bp, Homo sapiens
cgtccttggaggcaggtgctggcggcaagacgagctctcggaggatgctgcggcgcggggcgcgtcgcccccctcagtccaccagagcccggatacctcagaaattcggctctgggtctgtg

SEQ ID NO: 301229 - DNA, 122 bp, Homo sapiens
ccagaatggtttcaagcaaaggctgttttagcagatccggctcccgcaaagcatgagagccgctaggctgggcttcccttccacacgtctcctgcaacctggccacatctaaacgaagagcc

SEQ ID NO: 301230 - DNA, 122 bp, Homo sapiens
gaccacaggtcccacctgcacaggttgcatctggggaatgggcctgtggcagaaaatgtgcggcgcggggcggggggtcccaaccaggcagccccaacctggactctcctccacccccgtcc

SEQ ID NO: 301231 - DNA, 122 bp, Homo sapiens
tttctcagccacaaacgcccgctaatgcctcttttatcacggaattaggggatttagggccggtcgcacaaaggggccctcgatagcggccataatcaaaccccaatcggccgaccttggac

SEQ ID NO: 301232 - DNA, 122 bp, Homo sapiens
ctggtacaccccaggcctgtgagtctttagaggttgagtttttgtctgaaagagatatggcgcctacaggaggtcagggacaggccttctgtttcttgggaggccctaccccaccccttagt

SEQ ID NO: 301233 - DNA, 122 bp, Homo sapiens
aacatgtagctagaaaacccaaccgaggatctgtctagaatacttccgatatcaatataccgtagttgaaaccagaaccgtctccagctgtcagcagtcttggcggctactgtacagctgtc

SEQ ID NO: 301234 - DNA, 122 bp, Homo sapiens
ctgcccatggtagggggcgtcctgccccactccagaacgctgggccccatcccgagtgcccggcagggtcccttaccgcagtgctgtcacccggtgccactcgccgtcattgatggggtcct

SEQ ID NO: 301235 - DNA, 122 bp, Homo sapiens
ttagtctctcttttctgtaagaaaggcataaatctggggtgcttttttcccaaatattcccgcagaaagccacctttccaagcacagaatcttatcagtgcctaggagttcagccgacttag

SEQ ID NO: 301236 - DNA, 122 bp, Homo sapiens
tgtgatgtcacagcgggcggggtggtgtgtgcccagcctggtcccacagtccatagtgagcggcagacagaggggtggccagtttgttgttttacctaaaaggtgttttccacgtggagtgg

SEQ ID NO: 301237 - DNA, 122 bp, Homo sapiens
tgagccccggagccggcggcgctggggccagaggggccggacgggaggtggcggaggtggcggcggaggcgaaggggcggcgggacgcgggcctggcccgtgtgtgtcctggcggcctggcc

SEQ ID NO: 301238 - DNA, 122 bp, Homo sapiens
agcagcacggtgctcggggccaccacacccagctgccccgaagcaatgtgtgcaggaccccggccacggaggcagacaggcttcggacagcccactcacccaccggcagggctgcgggggct

SEQ ID NO: 301239 - DNA, 122 bp, Homo sapiens
tgcaaatatttcacagcaaatcccattgctaggctgggccaagaccaccttacctgatatcgactaattctctcctgtttcaactgttcaaatttccgttttaactctgcctgccgttctac

SEQ ID NO: 301240 - DNA, 122 bp, Homo sapiens
gcaaactttcttttgggagacccgcccggtgccaagcggacccaagagactgacaggagccggagggggcagcagagggggatccaccccgtgcgcctttgccccccaatcggaggcaggcc

SEQ ID NO: 301241 - DNA, 122 bp, Homo sapiens
gagatgggacagattttgggaaagatcatgatgagccatcaaccgcagccgcaggaagagcggagcccccagcggagcacctcagggtaccccctccaggaggtggtggatgatgaagtgtc

SEQ ID NO: 301242 - DNA, 122 bp, Homo sapiens
gttagctccctctgggcgcggatctggccagaagtgaatgcaccaacatccataactcctcggaaaagccggctgactcccctcgctcctttctcggatccgctgcctacgcctctggagcc

SEQ ID NO: 301243 - DNA, 122 bp, Homo sapiens
agtccggaagggaaactcacagggccgtgtgtgaccgaggacggagggcggcgcggacggcgccgtgttcgcagtgctcgaaatccccacgaccggcctcggacggcgaccccggccggccc

SEQ ID NO: 301244 - DNA, 122 bp, Homo sapiens
aaaggaggcagatgccaggatgtaatactgcaaaactatcatcttgctatataaaatggtcgtctaaaagcaagctgagactaaacaggtacaagttgcacaggtagtgaagctcagtgaga

SEQ ID NO: 301245 - DNA, 122 bp, Homo sapiens
cataattattcactgcctttttcctagaaccaaatcatggtaatgattttctcaagtaagcgtcccataattctcttgattctatcatacacactcactactaagtttgccctcaaattatt

SEQ ID NO: 301246 - DNA, 122 bp, Homo sapiens
cgacgcaggtgtggactctcaggtgtccgctgatgcaggtgtgggccctcgggtgtctgccgacacaggtgtgggccctcgttcgtcagagggcaggttcggatctctgaaaaccctatagc

SEQ ID NO: 301247 - DNA, 122 bp, Homo sapiens
ggattaaaatcgaggttgccgggggacccccaggcaggagctgagatttgtgtggagcggcgaagtggggcggcggcgcgtttggctttgacttctgatcccccgaagcgctctggggtcct

SEQ ID NO: 301248 - DNA, 122 bp, Homo sapiens
acgctgcgatctcctcggcgggcccaagagctccagacgcgcctgacaggcactcggttccgcccctagcccgctgctccagggcctccaccgcccgcgctctgcactctgccgccgactcc

SEQ ID NO: 301249 - DNA, 122 bp, Homo sapiens
tgacatgagtggttaatgcttgaaagtgaaacccatcaataagacaggatgttctccaaccgcattaagctgctcaacatgggtacaaggctgagtgagtttagccagggtggggttttgcc

SEQ ID NO: 301250 - DNA, 122 bp, Homo sapiens
ggagggccccctcctttccactgcatcccacaccagacacgcccacgccctcctctgccccgcaagtcctccccggatgcgcttccaggtctagctctccagctagtcctgctgccaacaaa

SEQ ID NO: 301251 - DNA, 122 bp, Homo sapiens
tcggccgctgggcttgtgccttttttatttggcgtgttcccttcctgccgctgcagccgtcgccgccaccggttgggggtcggctagaagggggagccccggctgtcagcctgggcgcagct

SEQ ID NO: 301252 - DNA, 122 bp, Homo sapiens
tgggaaatgaggggccagtgcccccacgctcactgcaggggatgtgagagggcgagtggtcgctcagccacacccacacccgtgtgtacaggacccacgcccgcccgccttgctgtcccgcc

SEQ ID NO: 301253 - DNA, 122 bp, Homo sapiens
actgtgctgactttactttaggcaagaaattgctctctatgatgtctacatgagacacaacgacatagcttgtttggtatttttcaaacttatcctttagatatgatccatctgtgaaccag

SEQ ID NO: 301254 - DNA, 122 bp, Homo sapiens
ccggcagctctcaccttaagctgcctggctgaggtcagcagtaagttacctggcagcgtccgggggcctgcagccgaggacagggctggaactacacttcccagtgtgccaggcggggcggg

SEQ ID NO: 301255 - DNA, 122 bp, Homo sapiens
tctatcctcctctgtctcagtctccccagccttggggccggtgcctcttccgggcttcggcgaatgagacctgcggacctgcccccgcgccccatggaagaatccccggcgtccagctctgc

SEQ ID NO: 301256 - DNA, 122 bp, Homo sapiens
aatcctgtcacttccggttatgattaacatccactggcttttgccatttgctggacaatccggagcaaagtctggggccaatctgtttagtgtcacttatttttcaggtttggtttcttcat

SEQ ID NO: 301257 - DNA, 122 bp, Homo sapiens
tatcctgagttttttccctctccttctccttcctcacgcccaccccgcttctctcgcacacggtcatctttacatatcaagagaaagcaaaaaggttccaagaggtacttttctttttagaa

SEQ ID NO: 301258 - DNA, 122 bp, Homo sapiens
gcagaggtgtcacagctgctcaagattccctggttaaaaagtgaaagtgaaatagagggtcggggcagtgctttcccagaaggattgctcggcatcctgcccttcccagaagcagctctggt

SEQ ID NO: 301259 - DNA, 122 bp, Homo sapiens
aagtcttccaactcaaggaatagttttctcatgatagaattgcagacatcagatccctaacgggttggaagattgggagatgagaaacagggtggttccgtgaaatggcatcctttggtaaa

SEQ ID NO: 301260 - DNA, 122 bp, Homo sapiens
gcgcgcgcgggaagcggaggcggagtgggcacgtgcggcacttccggggcggggcgggcacgcagcccttccgaaggcccgcgcgagccgctagttttgcccacgcacttttggcacagccg

SEQ ID NO: 301261 - DNA, 122 bp, Homo sapiens
ggggcacgtggtcacggttgaaatgcaaggtgaggcgggcacagttattgtccaggtggccggagcgtggcaggcagggggtgctcggtggctcttctgcgccgcactccccccaggcctca

SEQ ID NO: 301262 - DNA, 122 bp, Homo sapiens
cagcagggcagtgctgcttcctcacccggcagggttagtggctacgaaagacaccgggcccgaaacgctgggaccagctcctgtctggccctcgtggaacgtgcctgccaacacctgctcca

SEQ ID NO: 301263 - DNA, 122 bp, Homo sapiens
cccgaaatctaaaacaaataagaccagtcagttctctagttagcttttttcctttcaagtcgttagcaatataaactctggaaagcctaaactttaatgcacccatctcagcaacatctcct

SEQ ID NO: 301264 - DNA, 122 bp, Homo sapiens
ctccaaggaggcccgtgccagccatgagccttttgttctgggaccgctccgcatctgctgcgctctccccgcccggggaagctcgctcccaaggcacagcttggtcccttccccagctacct

SEQ ID NO: 301265 - DNA, 122 bp, Homo sapiens
ctgacagccacggctcagagtcagctgttagctgatctcctgccgctgatattgtggcctcgaaattatcactagaaccagcttgtgctttgtggctctggtgggcagcctaggggaggaag

SEQ ID NO: 301266 - DNA, 122 bp, Homo sapiens
caaaggggccctgggctaccgtccaggacaggcgcagagagctggaggtctcctcagccacggtcagttcccccaggtggggaggtagctccttctccaggggagctgtgcagagggaggag

SEQ ID NO: 301267 - DNA, 122 bp, Homo sapiens
aggcactcaagtcccactgcgcacgcgccctgtaggccgggccggagtcacgtgcgccaacgttacgcacgccggcgactctcgcctcgcctaggcctcagctccctaggttttgcttcgcg

SEQ ID NO: 301268 - DNA, 122 bp, Homo sapiens
ggtcccgcagcttcctgagctgacctgcgggcaaactctgcctcagcagccccccaactacgtggcaccatggccccgactgtacacaaaagagccatccttgccctaaatgtctgtgtgat

SEQ ID NO: 301269 - DNA, 122 bp, Homo sapiens
atcaactccattagaggtttggccctgagctcctcgatcctggtctcgttcatgcacgcacggtagtatacttgcgcctttctctctgcctcgctcacgctggccgtggagttttctggaac

SEQ ID NO: 301270 - DNA, 122 bp, Homo sapiens
ccgccacaagcattttttctcgtcggcagctcagttttcagctgtgcttagtctggtttccgctcctctgggttttctcgtttcatcttggtgttttttgggtgttctttcgtttattcaac

SEQ ID NO: 301271 - DNA, 122 bp, Homo sapiens
aggcaacctgtcccacaatatactttggaaagagcttattagtgagatcaattcaacttccgataaattgttggaaagcagtcaatcaaactgtgacataagaagaaaacttgcaaacttac

SEQ ID NO: 301272 - DNA, 122 bp, Homo sapiens
ccggctgaccaggaacctgggcgagcagcggcgggggcccgaggggtcagtaccagtaggcgcggctcacacgctcgggaagactgcgccctctcccccatccctcctcggaggcagccgca

SEQ ID NO: 301273 - DNA, 122 bp, Homo sapiens
taaaatagactaaactaatcagtggcagctatcttaaagcaagatataccttctacagcacgatctacccaaatgcaaatctgggcagagaaatacaaaatatttttaggactgacaaaatt

SEQ ID NO: 301274 - DNA, 122 bp, Homo sapiens
aaggaggcgggcgagaacgccccggtgctcagcgatgatgagctggtgtccatgtcggtgcgggagctgaaccagcacctgcggggtctcaccaaggaggaggtgacccgcctgaagcagcg

SEQ ID NO: 301275 - DNA, 122 bp, Homo sapiens
tgttcacagaactttcactgataatagacaatggggaaaacccttcaacaggtgtcccagcggtgtcctcgaaactgggtttcattcacatcacggcatcccctcagcagtaaaagggatgg

SEQ ID NO: 301276 - DNA, 122 bp, Homo sapiens
cgactgccattctcagcccctcccagcccctgcaccagtccaaaaacctccttccatttccgatgatagttcgctatgaaaaaggccaggagctagcctcgcatggactggtgaatagcaca

SEQ ID NO: 301277 - DNA, 122 bp, Homo sapiens
tagcctgggacccagccgctggggtaggggaccaagccagctgtgcggagggaagcgcaacggcccaaagtaggtttagaatatgagtaggttttaaaaactgtactggatgtaaaaaggga

SEQ ID NO: 301278 - DNA, 122 bp, Homo sapiens
gctgctaccttgggtaaggtaattctcctctctgaagctcctgtcagcttctgaggattgcgtgggatagcacataccaaattactgcacacagagcctggtgtacacttaagcacacgaga

SEQ ID NO: 301279 - DNA, 122 bp, Homo sapiens
gaaggtgatgggctgatgctccaggccggacatcaggctccgtgacagctggttctacaccgtcttctccggctgtccctggggtcacgcccctctcctgctgcagaaacttgggtttcctc

SEQ ID NO: 301280 - DNA, 122 bp, Homo sapiens
gcatggcaggggtctgggtccaggcatcccagacggctcatcactagcagagtgattctccgtttggctttccttttctgagcaggcccaaagtgggcctaggccagtggagcctttaacca

SEQ ID NO: 301281 - DNA, 122 bp, Homo sapiens
tggggtgctcgaatgagcccatggggtcaggctgcagagattcaaggatcgcatcccaaccgtggccctaaatgcgaccgaccatgttgagtaatgggccatctcagtggggcctctttgag

SEQ ID NO: 301282 - DNA, 122 bp, Homo sapiens
caacaaggggcgcattcttccccggctcctcagcctcatacatcccattgttcccggggccgattcagatggcaagaaaacagcctatgcagcacataaaagagatgaggcaaaaatgaaaa

SEQ ID NO: 301283 - DNA, 122 bp, Homo sapiens
tcacagcctgcctgcctcacgaaaaaaaaaaaaaaaagactccacagcccgcctgcctcacgagatcacacgctcctcacttacaggggttcgcgccgtccgccactatcagcattcgcaga

SEQ ID NO: 301284 - DNA, 122 bp, Homo sapiens
tggtttggccaatggtagagtgactcgtaaatcggcctgtcaagctcagccaatgagaggcggcgttaaatcaagttctgtcagcgcttggccaatgaaaggccctgggctgaccataaatc

SEQ ID NO: 301285 - DNA, 122 bp, Homo sapiens
gaaatgaaaagaacgctctttccacaatgatgtgtaaacccagggggagtcgagggtctgcgctgggttgctggaagaaatgcccccaccctccctccaccctgtggactgagcaggcaaag

SEQ ID NO: 301286 - DNA, 122 bp, Homo sapiens
cattgctgccaacagtgggttcatatgcctgttaaactgtctcttgctcctggtctcctgcgtggtcatactgtactccttaaagacccacagcttagaggcaaggcacgaagccctctcta

SEQ ID NO: 301287 - DNA, 122 bp, Homo sapiens
attgtgttgagcttgggcctccttttgtagatgtcttgctaatatctgatactcgtctatcgcctccaccagctggccccaagagtcgaagtcggcgcctctcctaaaactggcgccccagc

SEQ ID NO: 301288 - DNA, 122 bp, Homo sapiens
aatgtagggaaaaggtcaccgatgtgtcagctgctgcctgttctgggatcgctggtgctccgggcggcatccccacctcagggtcgtcttcatacccccatcactctcctcctccccaagtc

SEQ ID NO: 301289 - DNA, 122 bp, Homo sapiens
cagggagtaggctggaacaaaactgaaagggaacctgaatggggatcctgaagaggcatccggtgggtaagtgctgacctgctggtgaggaacatttaaggggattctctggcattacctta

SEQ ID NO: 301290 - DNA, 122 bp, Homo sapiens
ttgaattgtcttatgtttggggggctgatgacaccctcttttgtcaggtacagctcttatcgttcacatgaccattaccaaaggcaaagagtgctacaaaaggagcgtgcaatagtgagtag

SEQ ID NO: 301291 - DNA, 122 bp, Homo sapiens
ctaggctcctgctggatccctgcaaactgcctggtttccccactccagtgcccaggttgtcgagccatgacgagtgcaggtctcatcgcccagcctcattggtctccagtttcctatcccaa

SEQ ID NO: 301292 - DNA, 122 bp, Homo sapiens
agtagagattcccttagaaattggcagcgactttaagaaggggcaatggatatctaattccgtacttaaatgcttattcatgcagtggacttgctagtctatcacctgtggctatctgagtt

SEQ ID NO: 301293 - DNA, 122 bp, Homo sapiens
ccaggcagcaggtgatgattagtgttaggagagtgtgtgaaccatgagactcacacacagcgttcttcagattctaggagaaagggaggaaaggagctagagagatggaggttgggtttggg

SEQ ID NO: 301294 - DNA, 122 bp, Homo sapiens
aaataaataaataaataaataaataaataaataaataagctgtttcgcagaaacagaaaacgaaatgccgcatgttctcacttctaagtgggagctgaacgttgggtactcatggacatcaa

SEQ ID NO: 301295 - DNA, 122 bp, Homo sapiens
cacttctcagacggggcggctgctgggcggagggtctcctcccttctcagatggggcggccgggcagagacgctcctcacctcccagacggggtcgtggctgggcagaggcgctcctcacat

SEQ ID NO: 301296 - DNA, 122 bp, Homo sapiens
cacaacctttccaaagggcccctggctgtgttgttgattctccagtggtttgtgtcccaacgtttcctggcattacctaacctggattctggttgacagctcctgattggtgccctctgcat

SEQ ID NO: 301297 - DNA, 122 bp, Homo sapiens
ccaccccagcccagcacagcacagattttctttgagcacctgctcggagttcctgtccctcgtcgctccttggttttccctcatcgactacatacagtctgttggatgtcggtcaaggtatc

SEQ ID NO: 301298 - DNA, 122 bp, Homo sapiens
gtgacttttgtgattagaaaaaagcatccttcctcctggtgaatgcaggccatgtcagggcgctcagcttgacaaggagacagtaggctggattttagatcctattcatttcttgggctaag

SEQ ID NO: 301299 - DNA, 122 bp, Homo sapiens
cccagccggatcagttgcgaaactgctctgcgagtagccttcggaccacctctcagggaacgatctggggagagttcgaaaactagcacctcagtgagctgtcgaactcgctcctccacttt

SEQ ID NO: 301300 - DNA, 122 bp, Homo sapiens
cgcttttcctgtacttctgggctgagctgagggtcaacagagaggaaagccattcagctccggagtccccacaacaagttggttgaccctgcggccatgagcggaactctcaaaggcatgtt

SEQ ID NO: 301301 - DNA, 122 bp, Homo sapiens
atggctagccctaattcctcacaaacctcctgaaattctgctatctcagagagaactctgcgggagcccttccatacaccatcttgacacctcctgacacctgtgctcttttcagttgcaaa

SEQ ID NO: 301302 - DNA, 122 bp, Homo sapiens
gtgctcatgggctccatcttacttgaggctcctccaaatgagtgcctcagcagaaagatccgagctggctgggaggtatataaccattccatgctctgtggctagtgtttgaagaggaggaa

SEQ ID NO: 301303 - DNA, 122 bp, Homo sapiens
ggtctcaggccatgcttaattcttccacgctggtttattggttcctgtgttccaaagctccgcatgtaccctgtttaaaggacggtccacttccaccctatacagttggagggtcacccatt

SEQ ID NO: 301304 - DNA, 122 bp, Homo sapiens
attgactggctgcgtgtcttggagtgaaacaggagaagggctgcttccctttttactcaccgccagtcagaataattcatttcctaaggcagcctacctgtgacagtcacaggtgacctccc

SEQ ID NO: 301305 - DNA, 122 bp, Homo sapiens
agtgttagttatagtgtgaaaatctggtgtgctgtcagaaaagggcaagacattaacttgcgaattttgacttccagtgttccatagctcaatgatggctgaaaagcctctcttatgaatta

SEQ ID NO: 301306 - DNA, 122 bp, Homo sapiens
agaagggaagggatgtattagagctttgcacctgcagctctttcccctcagaaaggcaggcggctgagtgagtcacaggaagatggacaaatgtccacccacactgcctgaccttcagtggc

SEQ ID NO: 301307 - DNA, 122 bp, Homo sapiens
cgttcctgcagtttctctcatgttcagaagggctgcggaggaagtcgggatgggctagggcgagagacctgatgaaacaacctgccgagaatgggtacacagcagtcggtggtgaggggcgc

SEQ ID NO: 301308 - DNA, 122 bp, Homo sapiens
tatcaaggaggctcacagtgcttcgacgcattaggttgtgtggtccgccgaggacttgcccggtgacagaagtgctgcttgctgaggtgaccacgatgtgcccggtgcttcctgggaagacg

SEQ ID NO: 301309 - DNA, 122 bp, Homo sapiens
gttagttaggaagcggcaggagtccccatggctctacagaatcagccggcggcagtggtgcgggggtcctggtgctgcagctgcaaagctgccacgtagagggtcctccagagaatcactga

SEQ ID NO: 301310 - DNA, 122 bp, Homo sapiens
gaggagcagtggggaagctgagcccacagaaggcatctaactaaagcctgtggtcacagtcgcaaagcatagctcgacacatctctctggagtgatcactgcaacctcttctagctctaaaa

SEQ ID NO: 301311 - DNA, 122 bp, Homo sapiens
gtaggagaacccagcagacctgaatgtatgcaggcagctgtctgctaggcttcccaggggcgggccctgacctccccacttcccaggtccaccccaggagacgcattcctctctccccagcg

SEQ ID NO: 301312 - DNA, 122 bp, Homo sapiens
gcctctatttaaatcttttctgataggctcagccggggacccagacactataatgattggcgcattcttccgtccttcaaaggggcgggttctagagtcagttttgcctcagcgggccctgg

SEQ ID NO: 301313 - DNA, 122 bp, Homo sapiens
cccgctgggtccccactgcaactgcatccagtgccgtatttcagcacatgggcggtagcgcgtttatgcagcgttttcctacccccagccctgcatgctatggagaattttgtatttgccta

SEQ ID NO: 301314 - DNA, 122 bp, Homo sapiens
catcacttaaatcaccctctaggagtgtatgctagaggctcgtggagggcagtgcagccccgtctcccaggttaccaggagacggcccaggctgcagggcccctcagtgtgccatcaactcc

SEQ ID NO: 301315 - DNA, 122 bp, Homo sapiens
gacgaggctgcacagaacacgtgtgtcgtgctgagctgggcgtgggaaggcgtcacgtgacgaggctgcacagaacacgtgtgtcgtgctgagctgggcgtgggaaggcgtcatgtgacgag

SEQ ID NO: 301316 - DNA, 122 bp, Homo sapiens
ccacttttcggtctcctctgccgacaccgagcacgcgccgcttgcagctggcttgggtgccgccttcgcctccatacccagccaccactcagctacagagcccgcggcagaggaggagcgcg

SEQ ID NO: 301317 - DNA, 122 bp, Homo sapiens
tcctctaggtgaggagcctattccaggggctccagtctgaaagcctagaggcgaggggcgcgcactacaattcccagaggtccccggactcaagggcggtccccgccccccgccttctccgc

SEQ ID NO: 301318 - DNA, 122 bp, Homo sapiens
ggagcaggaagcgtccagtgtggagcaggaagtgtccagcgcggaacaggaagtgtccagcgtggaaaaggaagcatccagcgtggaacaggaagcatccagagtggaacaagaaacgtcca

SEQ ID NO: 301319 - DNA, 122 bp, Homo sapiens
ctaacattgttctaacattgttcattccttctaacattcccttccgctttgaggttgatacgaagatctatgatttaacgtttgtcaaatactctaggcttctcagatgaaagacaacatta

SEQ ID NO: 301320 - DNA, 122 bp, Homo sapiens
cagcttacaaggttggcaggatgaacctgcttttgagaggctgggttattggcccaaggtcgcacagctaatgagtgctaaggtgagattgaaagcaggctgtgcttgtaagttcaaagccc

SEQ ID NO: 301321 - DNA, 122 bp, Homo sapiens
agctgcaggtcccgaaccctgcccctgcgggtaggcagctgagggctgcgagaattccagcgcagcgccggcgggctggcactgctgggggacccggtgcaccctccacagctgctggcccg

SEQ ID NO: 301322 - DNA, 122 bp, Homo sapiens
taatggagctgccgggggaggggagttgtaagcagagcgctgagcctcgcagctcgcattcggagggaagctgacatccacaccaagtcgagacttccagggatgtggccggggagcagtca

SEQ ID NO: 301323 - DNA, 122 bp, Homo sapiens
ttggatacagacacccaccgggaggccaaatcggccctcggacccgcggcttacctcttgcggctccccgcagctgccatgacaccaacccgaagcgtgcaccccacttccggccccagaat

SEQ ID NO: 301324 - DNA, 122 bp, Homo sapiens
gagctccccgcctgcgggacgcacggagaccgcggtcagcgcgccgcctggccggcccagcgcgcccagcccgcgcccagccccgtccactcccgtccagccccgccgcccggccgcagtcc

SEQ ID NO: 301325 - DNA, 122 bp, Homo sapiens
ttgtaatcaccatctgtaaccacagcctgatcctgcagctctggccctgctcccccagcccggacaagcaaggaggagaaaaaccaggcccaactggggccgctatagcctcctgattgcca

SEQ ID NO: 301326 - DNA, 122 bp, Homo sapiens
ctcctctcctctatggcgttatctccattgcttccagcctggttgtgctgttcttcctcccggagacccagggacttccgctccctgacactatccaggacctggagagccagtgagtgacc

SEQ ID NO: 301327 - DNA, 122 bp, Homo sapiens
cactctagcctgggcgacagagcaaaactccatctcaaaaaaaaaaaaaaaaaaaaagaacgtggagcaatgaccataaagagtgaagctgacactgagaagtgctggcatccccctccgta

SEQ ID NO: 301328 - DNA, 122 bp, Homo sapiens
ctccactcattgcagtcctgaccacttcggtcacaagtggcacaaatcaggccttcaccacgctccccgcgcccttcgcctgctaggaacactgctagacgcccttgcccttagggactggg

SEQ ID NO: 301329 - DNA, 122 bp, Homo sapiens
ttaagggacttgcccaaggtcccccaacaatgtgtcagagttagcactcaaagccctgtgcgtgggttctgcaagtcatctttggaacctctaagctattctgctcccaatctcctttttag

SEQ ID NO: 301330 - DNA, 122 bp, Homo sapiens
atgactccagatgaagccggggaggccgagcccctgacagctgctcacctcctggggtcacggcagaacccaactgaacgggccaggaaggccatcgttcccgactcgcctccaggtgcccc

SEQ ID NO: 301331 - DNA, 122 bp, Homo sapiens
gcagggccagggggcaccggtgcaggtgagcaccttctggaagttgctaggcagggtgaccgggcccacggtgagacgcacggggcagcccaggctcccattggacacgcagtcccgcagct

SEQ ID NO: 301332 - DNA, 122 bp, Homo sapiens
gggcgaccggaggcgggggcaggggctgctggaccaaggatggggcgggggcagccaagacgagaaggtggccggcgcggcgggtggggcctgcgggggccgggccgggcgggggttctggg

SEQ ID NO: 301333 - DNA, 122 bp, Homo sapiens
ggcccgggtgctaagcccctcactgcccgggccggcagggctggccagccgctccgagtacgggcccgccaaacccacgcccaccgggaactctagctggcccgcaagcgccgcgcgcagcc

SEQ ID NO: 301334 - DNA, 122 bp, Homo sapiens
aaattgaaaaaaaaggacaaagagtcggtggcgctcctctgcagggcgttctgtgcagagcgaggcccagggcgcagccctcagagggctgcaggcccaccctgcccagtgcccgccgccgt

SEQ ID NO: 301335 - DNA, 122 bp, Homo sapiens
ggcttgctttcccttttatcttccagtaactacagcactgcttccacagaagtagccacacgggcctcaccaatccagtcaaccctttggaagaaaatacagcctgtttcaatccaatgctg

SEQ ID NO: 301336 - DNA, 122 bp, Homo sapiens
caggagcgaggcgagaggatgatgcggggtgggctactggcacgtgagagccagtggcaccgagagggcgccccggcggcgaggaaggaggcgcgcgtgggaggaccaggctaactccgtca

SEQ ID NO: 301337 - DNA, 122 bp, Homo sapiens
cggagctgggacgccgctgcctccagctctgggaagcggctggggctcacctggggaccacgtgcggaggtactagaaagcatgcaccgactagtcgccgtaccttccaaaaatacccatgg

SEQ ID NO: 301338 - DNA, 122 bp, Homo sapiens
tgataggcttcttgtagatggtaatgagcttgtccaggaccacgatggcggtggtgaagacgcggtaggagtgcaggaaggtgttgaggaagtcgatgctcaggaagcgcaggtccgtcagc

SEQ ID NO: 301339 - DNA, 122 bp, Homo sapiens
aatgctgtagagagccagggctgccactcttggctgctccacaggttgcttctccagatgcggagatggggagaagggacctgtggccccaggctgaggtctgtgaggggcctgctgctgtg

SEQ ID NO: 301340 - DNA, 122 bp, Homo sapiens
ctgaccacgcctcccggataacggtgacaaccccgcggcccaatccatgcccaggacggtcgcccagcgctacaggcctagcccgccccgcccctgccaattgccagtcacaactctcctct

SEQ ID NO: 301341 - DNA, 122 bp, Homo sapiens
cttgtaagctcgccccattccctgtagggacctcagtgtgtgctaacctggcagacctcccgagcatcagcagccacagcagcatgaaggggtgtgcgccctgcccggtctggctggttggg

SEQ ID NO: 301342 - DNA, 122 bp, Homo sapiens
tcggcagccaagttttgctacttacgggagtactgaaggccctcggtgctggccagccagcgcgtgtacgggttgtcgctgctgtcgtagaaggggttcttcaggggcaggctctgcaccgc

SEQ ID NO: 301343 - DNA, 122 bp, Homo sapiens
gaggggcgcgacccggggaaggtagggactgcggattgcggaaggccgagcagcggggctcggcgggagggcgccaagcagctcaccttcacgtgctcatagtagctcccggtgttcagcag

SEQ ID NO: 301344 - DNA, 122 bp, Homo sapiens
tgatctgtgacagcccacctcactgtcagcaaagatgggagcctctgtgttgccggcatacgactgcagctacccagggcccgtgcggacagaggacgctcctcaggagcacgaccctatgc

SEQ ID NO: 301345 - DNA, 122 bp, Homo sapiens
atgagccagaggcaatgaagatctacacaccacagggctcacaccacacgccaggcatcacgcaccaaggcccggcgtccccagaggtgggcccaaggggaaatggaggaacagaaggaaag

SEQ ID NO: 301346 - DNA, 122 bp, Homo sapiens
gggtgaccccacgggctcttggtagcacctggctgaacacacaagggaatgatgttgacgcggggacaggtgacggcacgtgcccttggtgtgattctcccgtttcttcccttgcctcctct

SEQ ID NO: 301347 - DNA, 122 bp, Homo sapiens
caggcagagggatggctggaatgaggcgtcagaggcagaactggctgagccacctgccctcggcgccaggcaggccacgcccaccagccacagctgcagcacccgcccacccacgtggcccg

SEQ ID NO: 301348 - DNA, 122 bp, Homo sapiens
ggaaacgagacgaggtctccggggagggggctgtcgggaactcggctgggacctcaggggcgaccctggctccacccctgggcacccggcaggtttgcaaactgctgggcgaggagctgaag

SEQ ID NO: 301349 - DNA, 122 bp, Homo sapiens
gaagctgaaacctggacaggggaagtgacccctggcggagggtcgggcgggacgcgggggcgggtcctggccgcagccctgcccagagagtgcgggcggaagacggggagagcgagaggctg

SEQ ID NO: 301350 - DNA, 122 bp, Homo sapiens
cgcgcgtccccggaccgcccacgtcccatcagccccgcgtctcccggaccgcccacttcccgacagcccccgcgcatctctgtggcagctgccccggtgcttcccgccccgccgcgcccgcc

SEQ ID NO: 301351 - DNA, 122 bp, Homo sapiens
gtgataaaacactgtcggcactgtctctttaaaagagtcaagcagaaaaagctgtgtaagcgctgattggctgcctgtttggatacatctttaggggagccttgaaactgttagcctaggtt

SEQ ID NO: 301352 - DNA, 122 bp, Homo sapiens
gctgaatgtggctggaggttacgattgctttggtcccaccacccctcagaggatgccctgcgcagagtcttgggtctgactgacctcggcagcacccagcccataaggtcctgttaatcaaa

SEQ ID NO: 301353 - DNA, 122 bp, Homo sapiens
cgccagagacgctgggagtccgcactggcatcaccttctgagtttctgatgctgatttgtcgttgcgaagtttctcgtttcttcctctgacctccgaggtccccgctgcaccacggggttgc

SEQ ID NO: 301354 - DNA, 122 bp, Homo sapiens
ccgcctccctgcgcctcctcactcgcagcgcccaggacctcagaaagggcctgccccgcgcgaatccccagtcgctgggacttacttggccaccaggtttacagacttcgcagccgctgaga

SEQ ID NO: 301355 - DNA, 122 bp, Homo sapiens
gtggatcagccctgttcagcggcctgagcggagagcggggccagaggtacaagcctgggacggcccgcaggctctgggagacacaagtcttctcagacttaggcctcatgggaccccagggg

SEQ ID NO: 301356 - DNA, 122 bp, Homo sapiens
tgggaggggaaattaaactttgttctgtgaagcattcatacttggggattcatttaccaccggcagtgtgctactgcaggaacacaggagaagcaggggcatgtgaaaaaacagcagtctca

SEQ ID NO: 301357 - DNA, 122 bp, Homo sapiens
ttttagctgaagataattataattttatttcagatttctgttattaaaaaggtctggaatcggataggttgagatcaacccgataccacgatatttgctaaaatttatttgaacacacagaa

SEQ ID NO: 301358 - DNA, 122 bp, Homo sapiens
gtgggtggactggagggcagaggcaggctctgggttctgcacccatttacatatcccctgcgcactgtccggagcactccttcccttccctggttcctcaaggcacggctcccccaggcaga

SEQ ID NO: 301359 - DNA, 122 bp, Homo sapiens
tagagccgtcgttgagaccgtcggtggtttagggtgacggtaaaatggcggaaaacaaaacggtgaagtgaagaatgcagcgtccccctggcagtttctctcagctctccctccaccccata

SEQ ID NO: 301360 - DNA, 122 bp, Homo sapiens
acaatttcttatgaggggaggtgatgttcccatgatctctgcaaaggaatagccatgtttcgcactatgcaaacttctctgtactacatgattggaccaagtgggcacctatgtcaaagggc

SEQ ID NO: 301361 - DNA, 122 bp, Homo sapiens
ccactttgtcactgtcactgtcctctttgccttagtgctttcaggagccctcatcatcctcgtggcctccccattgagagcactccgggctcggggcaaggttcagggctgtgagaccctgc

SEQ ID NO: 301362 - DNA, 122 bp, Homo sapiens
ttttgagttttgatccgaacctcgtgaaggcattaccttaagaggaccttaatgaaagcacgctgattttcaggctctgtggcgcaccttacgcaaccctgctgacagcatctcccacgtgg

SEQ ID NO: 301363 - DNA, 122 bp, Homo sapiens
ctggacgtgcggggcgcgcggagcttctccccaccgcgcgccgggaggcactttggataccgcgtcctgcaggtcggaaacgggtgagctgtgccccacaagtcctcctcctgatgcccgcc

SEQ ID NO: 301364 - DNA, 122 bp, Homo sapiens
agttcataccagacaggagaagacagataagacttgaagtgtggggaagacctcagcacccggggcccccagggctgcacaggggctggtctgcaccctgcctgtgccctttctgccactgg

SEQ ID NO: 301365 - DNA, 122 bp, Homo sapiens
caggggccagcccagggctcaatagggcaggttctctggggagagctgtgccttcctttacgcaccagcgagtatatgaactgcctccgcggattccctgtaccccacaccgtcagggccga

SEQ ID NO: 301366 - DNA, 122 bp, Homo sapiens
aggatcaccttagatttctgctggcacagtattttccataaattaatctcctgattgaaccgtagtcctatagtagttatctttggatgaaaacctaatgcagctcgaggaggaagtggagt

SEQ ID NO: 301367 - DNA, 122 bp, Homo sapiens
gtgtgtttactctaggatcacctctcaatgggtcacttggcaagggcatctttgcttcttcgtcagctccttttgacacgggggtgaagggttttctgcaccacactttgaccacaagcatc

SEQ ID NO: 301368 - DNA, 122 bp, Homo sapiens
taccccacactcctccctagcgctgatcccagcggagctcaggccgcagtcccctcctgccggctgcggaagctcccagaagcggagactcaatcgcccccctgcccctgctaccaggccag

SEQ ID NO: 301369 - DNA, 122 bp, Homo sapiens
cccgcactgccaagagggaaacatgaattagttacattgccgtggtgctcactgggagttcgctgtatggaccagatgggtactgctccgaatttccattcaagtctgacattcttttgtca

SEQ ID NO: 301370 - DNA, 122 bp, Homo sapiens
aaatttaaagtacacggattctcaacatatagttatcaaaaaaaagtgacggtgaaactacgggtccagtgccatgacatttataggcactcaaagccttgcctctacctctgcaaccccga

SEQ ID NO: 301371 - DNA, 122 bp, Homo sapiens
tgaggtcacatccccagtaagtgaatctaggattatgtctcttcaaggctctgatcttttcgccaaatcacactgcccctggctactagaagaaacactggcttcctgatcaggacacttgg

SEQ ID NO: 301372 - DNA, 122 bp, Homo sapiens
ccgcttacttctggttccgcagactagaatggatgggagtctgagtaggataccagaaagcgagaaagacccaagaggagggggagaatgtaaggacaagcaaacaggagggatctggctgg

SEQ ID NO: 301373 - DNA, 122 bp, Homo sapiens
atgcgtcctggggtagtacacgctccagtgggggccctgcatgcgtcctggggtagtacacgctcctgtgggggccctgcatgcgttctggggtagtacacgctcctgtgggggccctgcat

SEQ ID NO: 301374 - DNA, 122 bp, Homo sapiens
ctcctccgcctgtctcttggaaacttttttttttgcagcccggttggcggctgtggggagcggaccgcaggtccggggcggcctcccttgggggggcagcccgggccggccgaggccgctcg

SEQ ID NO: 301375 - DNA, 122 bp, Homo sapiens
aactgaggaagtaggaggccaccgggtggatgttcacgccggctgccgggtggcatgggccgtcacctcggttcaggtagcacaaggcgcccatggcgtggaatgaagagtggttgaccaca

SEQ ID NO: 301376 - DNA, 122 bp, Homo sapiens
tgctcaagatgtcctcgccgtgcgagaagctgatccgcagggacatcgcccgcacctacccggaacatgagttcttcaagggccaggacagcctgggccaggaggtcctcttcaacgtcatg

SEQ ID NO: 301377 - DNA, 122 bp, Homo sapiens
cttgccaatgaggaattgaggtagggctggtttatgggcagtgacctgtacagttgcacacggcatgtggaagggccctgtgtttggtttcatgctatgctgtcactgagctatcacattct

SEQ ID NO: 301378 - DNA, 122 bp, Homo sapiens
ctgagacggggtctaggccgggataacgggatagtccattgctgggccagggctgctgagcgtgggtggggactgccgactgcagtacagacccagacggcaggagcccggcaaagcctgcc

SEQ ID NO: 301379 - DNA, 122 bp, Homo sapiens
gagcatctcggcgtccagcgcctcctgcagccgctgcgccagatccaccttgaggccgcgcgagtccaggccccgccgctgcagctccgaccgcagctcggtcactttcagccgcttcacct

SEQ ID NO: 301380 - DNA, 122 bp, Homo sapiens
gcggggtgtgtgtgagccgagcttgcgcaccgctagctcccaggacgtcggcgcagggggcgtgacccccccaaaggggtcctgggccaaggtgaactttaattttgtatgtatgcagaaat

SEQ ID NO: 301381 - DNA, 122 bp, Homo sapiens
gtatagtttgtgccctggtttttgttagcttgcttacccttctctgccgtgatttaggagcgccatgtggaggaatggctcttctcctgcagcttctcagctgtgtgacttctttggaaaga

SEQ ID NO: 301382 - DNA, 122 bp, Homo sapiens
gcgcagtggctgtgctggtggtgggggctgctgtgcagctgctgcgggcccccgccgctgcggccgcccttgcccgctgccgcggccgccgccgccggggggcagctgctgggggacggcgg

SEQ ID NO: 301383 - DNA, 122 bp, Homo sapiens
aggaggcgtccatggccgggaccctctggcccatgctgctgggggtagatgtggggtccacgtcatcccacccctgaggagcgtggtcgcacgtccaccatcccatccagtccccagggtac

SEQ ID NO: 301384 - DNA, 122 bp, Homo sapiens
cacatctagcatctctttctgctctgtgttctctacgtaggtaaagaataggtaataatccgttcttagagctttaaatgtctgctgtgtgctaacaactccctcttttatatcccagtcca

SEQ ID NO: 301385 - DNA, 122 bp, Homo sapiens
attgaccaggtcacagatgcatttatgctgtgacagagatgtccctccgggccagggcagcgcagcatgctcctgacacagcttggcctgtgccatgaagaaggcagacagccacagggggg

SEQ ID NO: 301386 - DNA, 122 bp, Homo sapiens
gccctcttaggattgcaagagcatctcaccccagactgcagaagcggcttcaattagagccgtgatgtgtgactgtccttgtcctggggagggagcacaacactgtgccagagagctggggg

SEQ ID NO: 301387 - DNA, 122 bp, Homo sapiens
gtgacctgcctcctcctctgcaggctggagctgcctgagggcagggctctacctcccctgcgtcacactgtgtgaggctgtgtctctgccatccaaaagggggccccttgagaatggtgatc

SEQ ID NO: 301388 - DNA, 122 bp, Homo sapiens
cctggccccactcctggcacttatcagccctgataccttggagcaaacagattcatcctccggtctctgtttcctcatctgtgaaacgggaagtggagcaaccagctccagcgtgagcaccg

SEQ ID NO: 301389 - DNA, 122 bp, Homo sapiens
aaagagatttattatacggagcggctcccatgattatggaggctgacaagtcccaagatccgcaaggtacgttgacaagctggaggcccaggagagctgatgatgtagtttcagtgtgaagc

SEQ ID NO: 301390 - DNA, 122 bp, Homo sapiens
tttcttatcataaagtttgttttaaagaagaactgcccctctaaaaaaataataaactgtcgagggcggtagccccgtctagaggtttccgactttgctctgtgcccacctgaagcctcccc

SEQ ID NO: 301391 - DNA, 122 bp, Homo sapiens
ctggaaaatcgggtcactcccacccgaatactgcgcttttcagaccggcttaaaaaacggcgcatcacgagattatatcccgcacctggctcggagtgtcctacgcccacggagtctggctg

SEQ ID NO: 301392 - DNA, 122 bp, Homo sapiens
aagaacaagaaaactttatcattgtgtccctcactggccaaacgtggcactttgaagccacgacgaatgaggagcaggacacctgggtccaagccatcgagagccagatcctggccatcctg

SEQ ID NO: 301393 - DNA, 122 bp, Homo sapiens
tggggtgcagtatggaggtggggcaacgtgagtctattctgggccatgtcgttggctcagcgggcgaccttgactgagtcatttcactctcaggagaggctggagctgagccagtgcacctt

SEQ ID NO: 301394 - DNA, 122 bp, Homo sapiens
cgaactcaagagcagagttgtgtgaggacacacacttcgaatcgtgatgcatctgcagtccgctcccgccccttcccaccccgcgcgttgggtgcaggagccgtctttattttctatttcat

SEQ ID NO: 301395 - DNA, 122 bp, Homo sapiens
cctgagttcgccgtaaagcgcccgccctctcgcctctacgcttccagttgcggcttattacgtcacagtaattgctgtaccaaggtcagaatcgccacctgaggcctgaatatcagcgtaag

SEQ ID NO: 301396 - DNA, 122 bp, Homo sapiens
cctggggagccatgccagggcgttctgcccagcacagtcacacctaaaagggtcctcagccgaaccccatccccttgaataccagctcgtgacggctttgagcagaacatgtcacgggaacg

SEQ ID NO: 301397 - DNA, 122 bp, Homo sapiens
accggcgtggtgtactagtaggtgacgcagaggcctccacatcaggccgaggtctgacctcgacgagagacgaccaaggatcccctgcacgctgcggacacaggaagccagtggaggcccag

SEQ ID NO: 301398 - DNA, 122 bp, Homo sapiens
cgtgggcgagcgggccccggcagtgcacacacacggcaggggcgggcgacagatgcagtgcgtgcgccggagcccaagcgcacaaacggaaagagcgggcgcggtgcgcaggggcgggcgcc

SEQ ID NO: 301399 - DNA, 122 bp, Homo sapiens
cgcagctcaccgccctctcgcctctcccgggtctcagtcggtccccggcacagcagctgccgccacactgaggtcactacactgccctccgctcctgaccctgcagcgccccctccccccga

SEQ ID NO: 301400 - DNA, 122 bp, Homo sapiens
tcctcagttttctcatctgtaaaaggggatgacacaccactagccacaaagaaacatgcgcgaaggaccccaccggcccttccccgagggccagccctgcccctcagcctccccatcctgcc

SEQ ID NO: 301401 - DNA, 122 bp, Homo sapiens
cactggccagaagggggagagcaataggaagcccttagggagttgtaagcaaggaagacacggagtctgatgggagacttaggagaaaagtccagcttctccaaagaagatgaaaaaggagg

SEQ ID NO: 301402 - DNA, 122 bp, Homo sapiens
ccaggcccgttgccttcattttacaagaggcagcttagaaaggctaatgacttactggaacgtgcacagctggagccaagcagtgcagggatttgctcggggctggccagctccatcaccct

SEQ ID NO: 301403 - DNA, 122 bp, Homo sapiens
tgggctgtcctctttcctaggaggaccctggagcccagcccctaaatgataccacgtgctcggtcctgccaccgcctggtgaacgctggatattcgacttgaggtgggggagaatcccagcc

SEQ ID NO: 301404 - DNA, 122 bp, Homo sapiens
tgtttcttctatggcttatttcacttaggacaatgtcgtcaaggttcacccttgctgtggcgtgtggcggaatttccttcctctttagggctgagtaacattccattgtacggctgtaccac

SEQ ID NO: 301405 - DNA, 122 bp, Homo sapiens
ggagctgaagataattaaaggtcaggacataggaaggttcagcaagtgtggagtcatccacgtgagaccagatgagcccagggaggaggggagagcggagaaatgctcagttgtcccttctc

SEQ ID NO: 301406 - DNA, 122 bp, Homo sapiens
aattagcaaaagaaaaattgctaatttgctgcagttggaccaggctgacgtctcaatctgcggagtgtcagcgcagtgaaagaaaatgtttcacactgtgtcggcgagagcaagcagctcta

SEQ ID NO: 301407 - DNA, 122 bp, Homo sapiens
acccgcatacatattgccctgttctatttacctgcccggcatacaaagttctgtcattgtcgtaaataaagagatatgtttattgaagacaaagctcagctagcatctcttatccaactgta

SEQ ID NO: 301408 - DNA, 122 bp, Homo sapiens
tttatgtacaaagcaattagttgcatgacagacagtgaccacgttctcaaaaattacacccgcatgccaccacattgcctgttaaattagaagccgatttaagatcctgagtttaagagcca

SEQ ID NO: 301409 - DNA, 122 bp, Homo sapiens
cgctggggtccgagtccgcccactgtggggatgttgtctgctcttgccgttagccccgcacgttctctgcatttcccctggtctctcccctttgatctggaggcgctgtttcaacggctgtc

SEQ ID NO: 301410 - DNA, 122 bp, Homo sapiens
ctggacccgagtgggagtgagggggaaacggcaggatgaagttcgccgagcacctctccgcgcacatcactcccgagtggaggaagcaatacatccagtatgaggtaccggcacggctgggg

SEQ ID NO: 301411 - DNA, 122 bp, Homo sapiens
gcggcggcgcgggtgtctgaaggatggtttggccgaggcggcggcaacggctgctggcggcggcggcagcggcagcggggcctcgggctctatagagccgagcccgctgggtacccgcccgg

SEQ ID NO: 301412 - DNA, 122 bp, Homo sapiens
aggcccggacgggtgggggttgtcccacttccgaaagaccccaggttctaggtgtgggggcgaggcctgtaacccctactcgaagggcattagggaaccgccagcgggcaagagggcgggga

SEQ ID NO: 301413 - DNA, 122 bp, Homo sapiens
acaaaaacatacataagtgcagtcccaaaatgcactacatagcagagtagtcagctctatcgtggtgatcaaaataatgaacatcggggtaatgactggttctccccaggtatacatgttga

SEQ ID NO: 301414 - DNA, 122 bp, Homo sapiens
caactttaaccaacaccctgcacttgcagatccctcttccaatttcagtatttgcaaggtcggtgattttgtttgtttaaaaatctgcagttattgtgattcctcttaaaaaggcctgagtt

SEQ ID NO: 301415 - DNA, 122 bp, Homo sapiens
ccccggcgggcctgggatttgcgaatgtgtgaaggcattagctgccagttgtaactggaacgcagcctagaggcctcactcctccagcaggaagccttgtagtgcagcgaatctggacccgg

SEQ ID NO: 301416 - DNA, 122 bp, Homo sapiens
gtggttcttgtgctggaagcattcgtaggcccggacgaagttatagtcatcggcactctccgtgctcaaccgggccaggatgctcacttcaatctgaccttgtcgggcataggatgggtggt

SEQ ID NO: 301417 - DNA, 122 bp, Homo sapiens
ctctgtgtgtgactgtgtgtgagactgtaactgttctgtgtgtatgcgacacaccgtgtgcgtgactaaatggtgctgtctgtgtgactgtttcaggacctggactagcgtcggcacaaaat

SEQ ID NO: 301418 - DNA, 122 bp, Homo sapiens
attgtctccatcattaccatcttcaccatcatcgccatcatcctcttcatcccttcctaacgctgacagaatcccctggcttggtaccaggcactcttttaagtacttgacattgttttgtt

SEQ ID NO: 301419 - DNA, 122 bp, Homo sapiens
tgggctcaagcaatcctcccaccttggcctcaaaactacaggagtgagccaccccacccacgctatttttttgttgttcttgttgttagtagaaatggggtttcactatgttggccaggctg

SEQ ID NO: 301420 - DNA, 122 bp, Homo sapiens
ccaacctccacctgtccacctgcggggttgggactgcctccttgctggcatgtttgcagccgggctgcgccccaccctgccggctggttcgcggcacgttctggatgtttcccgagggtttt

SEQ ID NO: 301421 - DNA, 122 bp, Homo sapiens
cggatatgggcggaggaatcgcctggtgcctcacattcaggctagtgaattggaccgctccgccccgtccagccccgttccgccccgccgcaggctgggatccaaggggcgtgatccgacgg

SEQ ID NO: 301422 - DNA, 122 bp, Homo sapiens
ttgggggacgggtgatgcaagcactcccttggatgctctggctggtgactcactaggtcacgtgtccccaaaatcaactggcttgaagttgagcaaagtatgaggacttgctcaggaattag

SEQ ID NO: 301423 - DNA, 122 bp, Homo sapiens
ctcctcctgcccagctctgaggagaaagtccctactatggagtctgacgtgaacgtggaacgttctagggctaaccaattaagctctggccagagcctgtccggtgcctcaggagctggcaa

SEQ ID NO: 301424 - DNA, 122 bp, Homo sapiens
gtgatgcttctgagctgcatctttaaacgcttttgcattgggagctagaggagtcgccgccgctgtgcaggggtgaggatggcgccccactttcctcacacagtgacggtcttgttgctggt

SEQ ID NO: 301425 - DNA, 122 bp, Homo sapiens
atagtacctttaaccccacccaccaaatacattttccttctgtgcaacttaccagttccacgagactattattggtgagaatgagttctgtcagacagggcagagcctgatcaagtccctca

SEQ ID NO: 301426 - DNA, 122 bp, Homo sapiens
ccctcccagctccccaccgtcctgcccgtccccggggctacctggaggaggtggccagcgcgatgagcagagcctgcaggatgccacggatgaagacgatgggattcttcttggtgatgaag

SEQ ID NO: 301427 - DNA, 122 bp, Homo sapiens
gtggagggcgcctgccccctcgggacccaggggaggacaggacaaggtcatgataggtctcggctgagtgctgggggctcattcttcccgagaagccgtgccagttacttggaagtggtcaa

SEQ ID NO: 301428 - DNA, 122 bp, Homo sapiens
ccatgtagaggcctgggaggcttctccttggagagactttgttccaaaaataggcgcgtccgacttcgttcccgtccggctctgcaccatctgacggtgccgttgtaagactagagtgcgat

SEQ ID NO: 301429 - DNA, 122 bp, Homo sapiens
gactccctacgcccagccccggccgccgccggcgctgcctggcccgaacccgcggaggggcgccggagccccgagcccagggccagacctcctaccgccgctcctcgccgaccccacctcgg

SEQ ID NO: 301430 - DNA, 122 bp, Homo sapiens
aggagggaggaggtggcggggtccttggtgttgcagtagcgccccgggtgctgcctgactcggccagcgccatccacgccattcccatctctctgttgaatttctaccaagtggagctttta

SEQ ID NO: 301431 - DNA, 122 bp, Homo sapiens
ccatggccccgcaggctcctccacttcccgctctgggttcggctcttctctcgcaggccgcgtttctcagccaggcttaggggaatccctcgaagcacgtggtcccgctgcgccacagccag

SEQ ID NO: 301432 - DNA, 122 bp, Homo sapiens
cgggctctggcccgccccctgtgacaccagccccgccccaccccgccccgcatacccgtgcgctgccgcgcatgctccgagccccgcccccgtgcgtcacagaatggcctcggacacccagg

SEQ ID NO: 301433 - DNA, 122 bp, Homo sapiens
gaggcgtgagcaggctccagtgcacggctggcacccatgtgggcaacccaggagttccatcgctgacacatctcagagccatcctcacgtgcacctggagggaaggaatccacctgaggatg

SEQ ID NO: 301434 - DNA, 122 bp, Homo sapiens
tttctggattactgaagatatctccaacttgtttgttcactctttgacagagtattccagcgtcttcaaatatatcatttctcaaataagcaccctaaacagcagagacattttatacagtg

SEQ ID NO: 301435 - DNA, 122 bp, Homo sapiens
gccaccaactgccacaataggcagcaatggactgatgttctttagggaggacgtgaatctcgttccaaatgctggccagtcattgggtttctgcagcactagaaacatctatggttgcaggt

SEQ ID NO: 301436 - DNA, 122 bp, Homo sapiens
cctgtgttcacgacacccttatctgactcagtagcagcccaaagcacgggcggtggggctcgcaatctggatacgccaaagagaagccacaaagtgcttcctttaaatgacgagctgaaagt

SEQ ID NO: 301437 - DNA, 122 bp, Homo sapiens
gaggtcagtggccttgaggtccccctgcatggaggagaggctcacgtcggcctccaccttcggcgcagacacatccaccgagtcctccatggacttgcctggggccgacaccccgaatgatg

SEQ ID NO: 301438 - DNA, 122 bp, Homo sapiens
ctgtactgtttacttgcaggatgtggaagcacagcatgtaatgtaataccagatgttctacgtgggaggaatttcataactcatacattttagcatgcttttttctaactgcgcccatctcc

SEQ ID NO: 301439 - DNA, 122 bp, Homo sapiens
atcgacccctttcaccgcgcctgacgtgagtactcctgccccttcacgggccaacaggagcgaggtcggccctgcctcaaagggcctgtgatccccctaccgtgtgatgatacaaagagcag

SEQ ID NO: 301440 - DNA, 122 bp, Homo sapiens
ggggcgggctgcgcgaggcccgggggctcagggtacagacgctattcttgctgggagagccgaacgcacagcaccccgtgtggggttcccaggggagtgacctggcctcggagtcagcagcc

SEQ ID NO: 301441 - DNA, 122 bp, Homo sapiens
aaatttttatttcaacatgaatcatagatatcacccttatttttccatcagttattgtagcggtatgtttttaaagtgcagcttactctattcagccttattgtccagtagttctacgtaca

SEQ ID NO: 301442 - DNA, 122 bp, Homo sapiens
cagattcttgcccgccgcgtgaggcaggtaacagacctttcctaaaacctacaaactgcgcgacagatctgttcccagatgtggtcaggttctcactcatgtaggcgaagccacctgcaaca

SEQ ID NO: 301443 - DNA, 122 bp, Homo sapiens
accaaacaccctgcattaaaagacaagcctttggagtttttcaaaagaaaaaatcgtgaacgcaaagaacagaagtaattattgaaggccaccacttcatcaaatgtgtctgcagtgagagc

SEQ ID NO: 301444 - DNA, 122 bp, Homo sapiens
aggaagagagagagagacagagagacagactcacagactgggaggaccggagactcgacgcgaggagagacagtgaaaataagtgaacaaacatagagacacgggtccaagttataagaggg

SEQ ID NO: 301445 - DNA, 122 bp, Homo sapiens
aagcacattacaaaaatataaacagagcataatcttagtttttgaaaataaagatgtacacgttgcattaaaaagtctgcaaaaagagaggagggagggcattaggaagaagagctaatgcc

SEQ ID NO: 301446 - DNA, 122 bp, Homo sapiens
tcaatgtcttatcaagtgcctgaatctgtgcactgggtctggttgaatagtcccatcagtcgtgcaccttgcagataaagagacaggttcagagagttgcggtaacttgcccaaggtcacac

SEQ ID NO: 301447 - DNA, 122 bp, Homo sapiens
tttcgcgactattaaaccaggtggctttttccttcagcatccccaggagaagtacgaacgcgactacaacagccggcacaaatgggatcatgcctgaagtacccatggggcacagtagaaag

SEQ ID NO: 301448 - DNA, 122 bp, Homo sapiens
aaccagtgcccaaatatgtcccaagatttttacctaagactttcctcagtatccactggtcgtctggaagaataaacttctgagtggtggcaactcatgatccctcctctgttggtacagag

SEQ ID NO: 301449 - DNA, 122 bp, Homo sapiens
tttcccatttgaaaattagattatttgtttgaattgtagggaatacaagttattttactgcgtgtagctgctccccaggtttctggatgccattgttaaaaaatatcatgacttagatttta

SEQ ID NO: 301450 - DNA, 122 bp, Homo sapiens
actgtcagagtacgtgcacatatgttgttggggcctcgtgctgggctagggaggtggagacgtggagagtgtgttggagaacatggcttatgccaggatcaagcagagaacaagagaaaaaa

SEQ ID NO: 301451 - DNA, 122 bp, Homo sapiens
tgtggtgttaagagggcagggaatgaggaagttggcacctccacatgccagaaatgagagcggtcaagctgttaggatgtggctccctgaactgtccttcaaaaaccaaatggctcactgga

SEQ ID NO: 301452 - DNA, 122 bp, Homo sapiens
ttgttttcactattcctgaagtttttctgctgtggcccagcacctgccctggcacctgctcggcatctgctcattggcaagccccggacggagttggactggcctagctgagaggtttagga

SEQ ID NO: 301453 - DNA, 122 bp, Homo sapiens
agtcaaggctgcagtgagcatgatcctgccattgcactccagccagagcaaaaaagagagcgaaaccccatctcaaaaaaaagggaagatttagctatgttggacttacctgtcctcatgga

SEQ ID NO: 301454 - DNA, 122 bp, Homo sapiens
aaatgtttgtggtatcatcagagcaaagcaggactatagcttcctccttttgggacctatcgctttgcactcctgcgataaagttcttggcacccatactgttgactcatattgggcttgca

SEQ ID NO: 301455 - DNA, 122 bp, Homo sapiens
aaagggccttgaggctctcagagaagcctccctattccaaatatagctcaaggcataaatcgcatgacaatgtctactctcttggagggctggaaggtcggaaggcatctggctcgctcctg

SEQ ID NO: 301456 - DNA, 122 bp, Homo sapiens
tccggaccgggccagtttggaattgacgaaagcagcctccgcccggtcgagccagtctctcggttttctcggcggcttcttgaggatgaggcatttctaggttttctcctcctcgagcaaat

SEQ ID NO: 301457 - DNA, 122 bp, Homo sapiens
acaggctctgatccttaaattgcaacattccaccattgggctgaatgatctcgaaactcccggagaggaggggcttctctgagcagtgctcagcacaacagggcttcctaaacagccactat

SEQ ID NO: 301458 - DNA, 122 bp, Homo sapiens
aggaccaggaactacctttccctgagacacttggtctgacagtgggaaatgggtgggttgcgtgcagagcaatgggcctgctgatgccaaacaagaggaatgataccagccaatcaacaaat

SEQ ID NO: 301459 - DNA, 122 bp, Homo sapiens
ttaagatttggcctcagggattaactctcaatgtccacctttctcttgagtcctgtaaaccggtaaagcagactaggtatgtcacttgaagcctggaggttttctcaggggccccctacatt

SEQ ID NO: 301460 - DNA, 122 bp, Homo sapiens
agacacccccactcactctcttggcgatgcacaaggtgcgcaggccttccgccgcatacacgttgaggtaattctgagttttgctccgaatctttttttgatgcctccctctggcgtcaact

SEQ ID NO: 301461 - DNA, 122 bp, Homo sapiens
agggcattaacaccagagcaaagaggccgggctcgccaggcccacagctttgggaggaaacgtggaggatgcctccccctaagatgtgctttgggctcaaaggattgactggagtttgcccc

SEQ ID NO: 301462 - DNA, 122 bp, Homo sapiens
attgatccgccgcggccgtgccaccgtctggtaaatcccggccgcggtaatgaacctccccgcacaccgctcacaaagcacacactagccctggccccagcggttaatatttaactgaataa

SEQ ID NO: 301463 - DNA, 122 bp, Homo sapiens
cttctctgtagctgtgaccctgataccgcgtggtgtgctccgaacacatggtgcccagaacgaaggcggcgtccagaagccctaggtcccagaggtccgctcagcggcaggcgcataaggcg

SEQ ID NO: 301464 - DNA, 122 bp, Homo sapiens
tgggaggtgagggatttgctttgcctccaagtcagaaagaaaaacacagaaggggcaaatcgcacaccatttgtgtgaattccccagggagtagcaaggcctgagaggggaaggagaggagc

SEQ ID NO: 301465 - DNA, 122 bp, Homo sapiens
cacatttcacccttggcctactttgtttatcttgagaccactgaagcatttagtctagaccgtacagtgttttcagtgtgtcctgttcattctttcccaagcatctgttttttctcaagccc

SEQ ID NO: 301466 - DNA, 122 bp, Homo sapiens
tcacacacacacaccgtcaccggcgtcacacacaccgtcaccggcgtcacacacacacaccgtcaccggcgtcacacactcacaccgtcaccggcgtcacacactcacaccgtcaccggtgt

SEQ ID NO: 301467 - DNA, 122 bp, Homo sapiens
actctcttttgttctcttcctcccctctactggggcctacccacccctccacgccctccccgcccccattgctatttgccaaacttgtgacctgagaccacttggcatttccgtgggatggc

SEQ ID NO: 301468 - DNA, 122 bp, Homo sapiens
ggccgggacactcatagtccctcagacttgtggacccctccaagtttccgaaggggacttcgggtcactccctccctccctgagggggtggggtggactaagacgccaccccgcgctgaccg

SEQ ID NO: 301469 - DNA, 122 bp, Homo sapiens
tgtttcccagtctattgaattcaatggtgacttttgttcaattgttcaatacgtatttaccgaatacccaccatgactaatgcattgtgctacgcactgtgggtggtgaagaaataaaatag

SEQ ID NO: 301470 - DNA, 122 bp, Homo sapiens
tcgcaggcggggacggggcggtttcccaaataacgggggctcgggggagagtgtcctggccgaacgttgaggtcccagcgccctttgaatttgtatggcgctccgtgggttggtaccccgaa

SEQ ID NO: 301471 - DNA, 122 bp, Homo sapiens
atacctagtagccagagtttggtttctaaatgctgttctcaagtaaaagaaagcaaggatcgttggagaatggtcaattccaacgtgggggcacgaaaaatgtaacatggacttgaaccgta

SEQ ID NO: 301472 - DNA, 122 bp, Homo sapiens
gcctgcatctcccgagggtgccgggccaccggccgcccagggctgcgtgccccggcacagcgtcatccgcagcctgttctaccaccaggcgggtgagagccctgagcacggggccctggccc

SEQ ID NO: 301473 - DNA, 122 bp, Homo sapiens
ggtgagttacagggagccatgggagtggagtcaggaagaggaggaggcgggaggagaggacgcagagagagcacaaggagacatagtggcagcataaagatagaaacaaagataatggccat

SEQ ID NO: 301474 - DNA, 122 bp, Homo sapiens
ccgcatctccagcctcgtttcccctacctcccatccactcctcccagactccagcctcaccggaccacccacttggccacattcaccatctggacttgcctgtctctggggcttcatggggt

SEQ ID NO: 301475 - DNA, 122 bp, Homo sapiens
ctccctgggggcagctcgtggtgaggctcccctttcttgcggagattctcttcctctgtgcgccggtctctcccaggacaggcacaaacacgcacctcaaagctgttccgtcccagtagatt

SEQ ID NO: 301476 - DNA, 122 bp, Homo sapiens
tgaatggatatggctaacaatagaaatgaggaatgaatgaatatagccaaggatagaactcgagagttgtaagatacacagtggagacttcctatattgcagtaggcgagaaggcgtggggt

SEQ ID NO: 301477 - DNA, 122 bp, Homo sapiens
ggggcgggcgtgaggactgtccaggacaccgctgtagggccggccaccccgctcccgctccgaggcgcctccgtcctcaaacagcaccgcaccgctgagcttgttgaagacgatggtgttca

SEQ ID NO: 301478 - DNA, 122 bp, Homo sapiens
gaactggaggcagaaagacctgctgcctaagtgccacgatctgtcagggcagaggccgcccgcagctggggagtgacctcagacgcaggtcctaagctgcaggttaaagaggcaaatgcgcc

SEQ ID NO: 301479 - DNA, 122 bp, Homo sapiens
ggaataaatttgcctgtcttttctcccagacaaatgcagaggaggaaaacaaaaagaacacgtattttatgaacgcaaatttgggacagtgacacctccaatcattattttatggcatgatg

SEQ ID NO: 301480 - DNA, 122 bp, Homo sapiens
gaggtaagacccagggtctgtgtccgggagtcctggcccaaggcgggcgcagtctccagccgccccacccctggctgggggctctgctcagggagcacggccggcaggggggaggaggcgtg

SEQ ID NO: 301481 - DNA, 122 bp, Homo sapiens
aaggtttggatttgggtctgaactgggctcgtctggccatagaagaacatgagctggtggcgtcctcaggaaatcagggtgtgaggcaactggacgtggatggctccgggtccccccggcca

SEQ ID NO: 301482 - DNA, 122 bp, Homo sapiens
cacatcaggaccccggctccggactcaccatgttcatgacggtcaggatgaacctctgggcggcctcggccccgtggtactgcaccatgtcggcgtcggccaccaccagggtctccaccgtg

SEQ ID NO: 301483 - DNA, 122 bp, Homo sapiens
aatcatttaggaaaattcctccgaggcaaatcgggtgtatagagcttttagcttccgtgacgaagtctttcaaaccatgagcttgcaacctcccattttatgattgctttcgtcttcttccg

SEQ ID NO: 301484 - DNA, 122 bp, Homo sapiens
cctccaagtcccattgttgaataggcggttggatatataagtctggaatttaaaagagaccgatcaagggggcgagatatacatttgggagtttactttaaataccaactatatggcatgga

SEQ ID NO: 301485 - DNA, 122 bp, Homo sapiens
tggccccacaagaccctcagaccttaacccgcctcagcagccaggaagagccactcgacacgccgacttcctgattgtcactgaggaaacttccggcacacgtcggaagttattcacaactg

SEQ ID NO: 301486 - DNA, 122 bp, Homo sapiens
tggctcagagcaacgcctgaggctgatgcccaagtgaaatgctctcctcccaaggcctcccggcctggtcgcccttcctgggtgatgcattggctcccacgtaccggaatgaatgctgagtc

SEQ ID NO: 301487 - DNA, 122 bp, Homo sapiens
tcaaaaaagaaaaaaaaaaaaagcaaagaaaatgccaaaggtcacacaaatagtaacatacggaagagaacagaatggctcccaaacttcagatactgcatgtattagtctgttttcacact

SEQ ID NO: 301488 - DNA, 122 bp, Homo sapiens
cccggcgagccgaggctgggagcgcggtgatggccggtccccgtgagcagagggcagcggcggcgggaccggggactctgggccaatgggtaaagccaggaggaagcccgtgcctggcccgt

SEQ ID NO: 301489 - DNA, 122 bp, Homo sapiens
tgattgttccctgagcttttcacaccaaaataatggtaactggctagtgtgtgcccgttacgctcactactcccactcgagatcattcctattaatgactctgaggcttcacctaacaggcc

SEQ ID NO: 301490 - DNA, 122 bp, Homo sapiens
gcctgacactcagcagtgacaggtgtcttagctcaggctcccaatccgcagccagcgccacgcctgccctaggcatcccatccagctgttcccctgagcccacctcccctcccaggccagag

SEQ ID NO: 301491 - DNA, 122 bp, Homo sapiens
ctggagggccggcaagggtattcattcatttagtcatttgataaacagaaactctggctgcgtgaaagagttaatgttatttctgcaatcctggcaggcccaaggagatgattctgcaaatg

SEQ ID NO: 301492 - DNA, 122 bp, Homo sapiens
tctgtgaaggaacatcaaggaccagacatccagcttcccctgcagcccaggtccccctagcggtgcttctcttcagattgaggacctattctttggagttccgaattcctagtagtccagcc

SEQ ID NO: 301493 - DNA, 122 bp, Homo sapiens
ggggtcagaagcagtattgatgtgtttctgccaagtaggcagatcagaccagagcagaaccgtgctgcgcaggagccaggccaggcgctggccaaaagctgggggcaggagggagcttgtcc

SEQ ID NO: 301494 - DNA, 122 bp, Homo sapiens
ttcagccaatcagagcagccagccaccgggaagtgcctcggagactccgccccagaccagcgctgccgcttgccagccccccagttgaccccatagagcatgcgccgtaggcgtttctaaga

SEQ ID NO: 301495 - DNA, 122 bp, Homo sapiens
gacaccacagccctcctcacgccttaaggaggtgatgctggacagctgccagcctccccacgtgaaaacgaagctttttttccagcccccctaaatggggcttgtgcatggtggccgaaatt

SEQ ID NO: 301496 - DNA, 122 bp, Homo sapiens
tgggcacaacagtttcatctcagttattgtgggattcaatgaggtaatacatagatgaagcgccgcctggcacagggtacgcactcaataaatgtgtttcctgtctcccttgctgggtaggg

SEQ ID NO: 301497 - DNA, 122 bp, Homo sapiens
tgtcccctgacctgcgccccgccctgtggagtgaggcctggttgcccaagctggctgggccgggctgtttgctgcttccaacaaacataggagagaatgtattgctgcttttgattgccagt

SEQ ID NO: 301498 - DNA, 122 bp, Homo sapiens
aaaaagtaaaaatctcaataagttttatatttactccattgaaaacatttttctatattgcgctaaataaactattatttaatttcaccagtttctttttacttttttaatgtgggtactac

SEQ ID NO: 301499 - DNA, 122 bp, Homo sapiens
acactgacatccaaacactttaaagctgccaaggtggacggaacaccttgaattcccagacgcgctccactgagcatgcccagagcctcaggccaaaccccctcctacccgccaaggggagg

SEQ ID NO: 301500 - DNA, 122 bp, Homo sapiens
gaggactcaggaggtgccgcctaagccccagcatctctctggagtggtttcctgctcgcccggggacaacagccaaagcctggtgccccggctctaccccatgggcagagctggctcagtcg

SEQ ID NO: 301501 - DNA, 122 bp, Homo sapiens
ggaggaatacgccgtcctgatctcagaggcccaggccatcaaggcagacctggcagctgtcgaggcaaaagtaagattatcatcattgatcctcagcctttcctgctgtggaagcagagatt

SEQ ID NO: 301502 - DNA, 122 bp, Homo sapiens
aggtggggacagtgtgggggacagcatcagggacagctggggacaccatagggacattgtcgggacagatggggatggcatgggggacagtgtcagggacaggtggggacagtgtgggggac

SEQ ID NO: 301503 - DNA, 122 bp, Homo sapiens
taccaaagagcctctagatactatttccagcttcggggaagtccatagtaggtacttccacgggtagagaacattatcttagactgggataagggttggtattcgcagtccccttcctacgt

SEQ ID NO: 301504 - DNA, 122 bp, Homo sapiens
cagcccccggagaagacggcgcccccaacgcccgacccgcgtggccgtggcagcgccacgcgagccctctaggcgaccgcagggccacagcagctcagccgccggtgccccctcggaaacca

SEQ ID NO: 301505 - DNA, 122 bp, Homo sapiens
tggtcctgagcgcgcggagcttgagcgcggcggcggcttcttggggggtggctaagcgtgcgtgtgacgccgcgcacgctctcgtcccccgtcccgctccttaagtaagagccgggggcaga

SEQ ID NO: 301506 - DNA, 122 bp, Homo sapiens
taggtattgattcagctaaaactataatttcctaactatactcaacacgagctactttagcgaaaggaacaagtggtgctttagctgcagtctcagaaatcttaggtctcacatccacaaac

SEQ ID NO: 301507 - DNA, 122 bp, Homo sapiens
agggacgcgcagcttttgtattacagcctccaggccccagcactcttaaaaaccaacccccggaggagcccagcttacggccactccacatcgcgacaaacgatcccacctcttttccggtc

SEQ ID NO: 301508 - DNA, 122 bp, Homo sapiens
ctgaacctgaggtttgcataaagactttcaaggagcaaatgcatttagaacttgagcttccgagattaccaggaaacagacctacatctcctaaaatttctccacgcagttcaccaaggaac

SEQ ID NO: 301509 - DNA, 122 bp, Homo sapiens
tttgtatgagtgctgttgcgcacttccggtggaagcgctgaagcgagtgggtggagtttacggagccggtgggcggtaggcggtgctacgggtagctgggtgctgtccaaaggcgacagggc

SEQ ID NO: 301510 - DNA, 122 bp, Homo sapiens
ggggatgctcccacctcaggcccctgaagagctgtgactacaggtgcatgctaccacgcccggctaattttttaattttttgtagagacagggtctccctatgttgcccacgctggtctcaa

SEQ ID NO: 301511 - DNA, 122 bp, Homo sapiens
ccttttctacccctcgccctcccaagagtctgaggagatgtatttgacattcagagatgtcgcagcaccctgcccggtaccggtcagcccagcccgggtcgcgttacagtttcatcagctat

SEQ ID NO: 301512 - DNA, 122 bp, Homo sapiens
ttaaataagggtgtgattattgtgtgaataattgaagaatgttggggagcttgcagtcctcggtgtaccgtcccctgccagcaggcctctgggccctgcccgtcacgggtacaactctgctg

SEQ ID NO: 301513 - DNA, 122 bp, Homo sapiens
ctgctggctcaggctttgaaagcccaggccccttacccggctccagctccgcgggctggccggccacctgctcacactgtctaagctttttcaaggctgtccttggcatccattcggaccgt

SEQ ID NO: 301514 - DNA, 122 bp, Homo sapiens
ctacggggacatgaggcccatcactgttgggggcaagatcgtgggctcgctgtgtgccatcgccggggtcctcaccattgccctgcctgtgcccgtcatcgtctccaacttcaactacttct

SEQ ID NO: 301515 - DNA, 122 bp, Homo sapiens
agctccaagctccaagctccaggccaaaggctgaaaggcacgtgtgtacataatctcttgcgtgtctgtaaggaaggggtgtatgctcagtttcctatgtgctggaataaaaggtgtgtgca

SEQ ID NO: 301516 - DNA, 122 bp, Homo sapiens
gctgccctccttgccctgggagccgggtgagtcgcactctcgcttccaagaagctgcacacgtgtgtgccataggaaaggagtctggagcctccgggagttaatttgagatgacgtgtgctg

SEQ ID NO: 301517 - DNA, 122 bp, Homo sapiens
gggaagggaaggggcttatttagacggggattatcaagccattttgccaacgtggccagtcggaactccatcctaccaggcatggcagaggtagagcagacctcagcggtcacacggagccg

SEQ ID NO: 301518 - DNA, 122 bp, Homo sapiens
acctgctgtaatttcgctgtggttcgtgaggacgcgtcctgggctgccctgagaagcctacgtctccccttcgaggcccgggaagacctccaaccccgctgacaatgctgggccctcagcca

SEQ ID NO: 301519 - DNA, 122 bp, Homo sapiens
actttttggtctctaccccttgcacacatccgctagtgcctcaataaagaaatctagacacgtggtgtccccagccctggcccaggccagcaagctaaggcaagtttggttaatagctattg

SEQ ID NO: 301520 - DNA, 122 bp, Homo sapiens
agaccaagtgccaaagtcactactagaattagtttctagtccagggtcaatctcagatcccgtaagataatgttactagcttgctataaaactaaaaaccattatatatgttgggggtgggg

SEQ ID NO: 301521 - DNA, 122 bp, Homo sapiens
gttatgaaatggtcttgtcatgtctcgtttcttcagtcacagaaagaccatgtgtgatgtcggtgttctgtgagattatttatgctcaacaggagaatattgagggatgatggtgaatgcca

SEQ ID NO: 301522 - DNA, 122 bp, Homo sapiens
cgggtattgagagcttgcaggtaccagggctccggcactacgtgtttcacaggggccactcggtagacctcttggtgaccttgaggtcaggtaccacgttcccattttacagaggaggaaac

SEQ ID NO: 301523 - DNA, 122 bp, Homo sapiens
tcaggagcagttaataaagcagtggccattttaacccctaagccacgggcgtctgttccgcggtagcggatgacagagctgcatcaagcgccgcaggacccgctgggcatactggtgtatgc

SEQ ID NO: 301524 - DNA, 122 bp, Homo sapiens
tcttcagtttgaaaaggtcccagaactcccctggaatcctcccacttccttccaacagcacggagcctgaggacccagcctaaccctgagtcatacttgggaccaaatgaggaatggggaga

SEQ ID NO: 301525 - DNA, 122 bp, Homo sapiens
cccgaagctagatgacggagtcttgaaagactttcaccaaatatgggccggggctggaaacgtcctgcgccgcgcgccgccggaaacctcgattcttggcaaccgcggtgactgtgggcgcg

SEQ ID NO: 301526 - DNA, 122 bp, Homo sapiens
aggagcctgagattgagggactaatggatggagggagtggagatgcagacttgggagagacggaagaatgaatgacacagacggggtaatctgagcagcaggaaaagaatccagagtgcctc

SEQ ID NO: 301527 - DNA, 122 bp, Homo sapiens
ccttggggtcaatggagagttgagggtgcagagggatctgaaagggggaaccaaaaatatcgggctttgaaattctgtggattttcaaaggcggttcccaaccttgtcaaaaactacagtgg

SEQ ID NO: 301528 - DNA, 122 bp, Homo sapiens
ggggtggggcgcggcgggctgggcgggcgaagtgggtgcggccgggtgcggcccgggtcccgcgtcacctcccgcaggccagcccgccccctcgccgccgggtcccagtccctcgcgacgcc

SEQ ID NO: 301529 - DNA, 122 bp, Homo sapiens
tgcccagccctggtggtctctaccccgctttgtctctgggtttgcctgtgcgggactttccgtgtgacatgtggtccttctgtgcccagttcttcccagcatcatgttcccgggttcacctg

SEQ ID NO: 301530 - DNA, 122 bp, Homo sapiens
ccgggctcgccgtttctgctttctgcagccctgctttacccgggctcggttacataagaacgtgtgtgtgtgtgtgtgtgtgtgtgtgtgtgtgtgtgtgtgtgtgtacgcgcgcgcgcgcg

SEQ ID NO: 301531 - DNA, 122 bp, Homo sapiens
tgaagaacatggtagggttgtgtggaatgtagggtgaagacaggtggggagaagcagggccgggggctgatggcactcattgatgttttttgttataagcctttaagaattatttgattttt

SEQ ID NO: 301532 - DNA, 122 bp, Homo sapiens
ggacccgggaggggaaaagctgatgtattctctgcaaggccagaaacttgatcagcttctcgtccagcatatttatctcgatttctattagccaaagagaaagattaaaaagcagctgagat

SEQ ID NO: 301533 - DNA, 122 bp, Homo sapiens
aagccatggccgggaacctggatctgactgcagggaaacagaagcgtggtgggcgctgggcgatgatggaatttctaacaaatgctttgtttctgctaaagctaacttgcgcttccatctct

SEQ ID NO: 301534 - DNA, 122 bp, Homo sapiens
aacttctggggcccgaggcgtccgaatgctcgaggaacgatgatctgcaaagcaggattccgcagcaagttggtgcccgcggaagctgagcatcaatttgctcttagggaattttccatgtt

SEQ ID NO: 301535 - DNA, 122 bp, Homo sapiens
tcccaaagtgctacgattacaggagtgggccacatgcccggcctcacttcttaaaatattcgggttaataaacattcttcagaaactcaagttattttttaaattgtttaacaaattgcttg

SEQ ID NO: 301536 - DNA, 122 bp, Homo sapiens
gagtttacggagccggtgggcggtaggcggtgctacgggtagctgggtgctgtccaaaggcgacagggcgtcgttaggggagcgagtcgtgaccggttgggccacactcaacgtgggacgaa

SEQ ID NO: 301537 - DNA, 122 bp, Homo sapiens
tgggccgcccctcgggcctcgcgcctcaccgcacagcctgcggcctacctgcgtccgccgcgccctcggagccgctgctgctgacccccgctgacctccgctgaccccgcgctaaccccgcg

SEQ ID NO: 301538 - DNA, 122 bp, Homo sapiens
caaaagaaagacattggctccaactgaactcttagaaggcagatgctaggatctgcagcccgagggtaagcgtaggggcagtacctggcagacagaggtttgccgggtgcactggtgacatt

SEQ ID NO: 301539 - DNA, 122 bp, Homo sapiens
cccgcccagctgcgcccccggccggccaacgctgcgccccgccccctaccgggacctaggcgctgattggcccctgagagaccctttgcgcccaggcattggtccagtggccgcctgtcgac

SEQ ID NO: 301540 - DNA, 122 bp, Homo sapiens
gagacagcacctctcgcgcccgggcgggcggcctcgtctctgcacccctaggcggcgctgcgctcctcaacacccggccggctccgctttcccagacggctgcccagcctccagcctagcaa

SEQ ID NO: 301541 - DNA, 122 bp, Homo sapiens
gggattgagttttgaactcggcaacaagaaactgcctgagttacatcagtcggttttcgtcgagggccccaacccacctctcccactcctaccctccccagtgggactgccccactgccccc

SEQ ID NO: 301542 - DNA, 122 bp, Homo sapiens
aaacaaaaagtgaagatgcttacagtgcctggctgcgtgtgtgcgggcagaggccccacgcgagaggctggggctgcggtgggcggcgtgtctgtggcgcacccctctctcctgcacacacg

SEQ ID NO: 301543 - DNA, 122 bp, Homo sapiens
cttctcccagggcagccatctggcggcgcatcggcgcgaccacgcccccgatcggcccttcgtgtgtcccgactgcggcaaggccttccgccacaaaccctacctggcggcgcaccggcgca

SEQ ID NO: 301544 - DNA, 122 bp, Homo sapiens
agggtaggcctgagggacgggcaggacctccccctcaccttgggctgcaccccaaccccacgcaccgggagtcagccttgccaggttgcagcacggaactgcacttcccgagcttttagggg

SEQ ID NO: 301545 - DNA, 122 bp, Homo sapiens
gcgtccctcccagactgggctcggctgagcgtgtgcggagcgagacctgggcaaccggggcgtggccaggtgggggcgtggccagtgggagcggcaggtggggcggggctcgtcggtcgggg

SEQ ID NO: 301546 - DNA, 122 bp, Homo sapiens
acttggtaaaatggaagtaataacaccaattttatagtattttgtgaggattaacttaagcgatgtatgaaaagctcctggcacactaagaatgatcaacatatggtaattttctcaaattc

SEQ ID NO: 301547 - DNA, 122 bp, Homo sapiens
gcagcgaccggcagggacgaccaatcgacttatcctgcgttgtgctaaagacctagaaatcgagcgtggtacattcgatcgacggaacgtctgggccctagtgctaagttgggtgactgttc

SEQ ID NO: 301548 - DNA, 122 bp, Homo sapiens
tgggccccggagggccgcagccatgagtgaaatgtccagctttcttcacatcggggacatcgtctccctgtacgccgagggctccgtcaatggcttcatcagcactttggggtgagtgagcc

SEQ ID NO: 301549 - DNA, 122 bp, Homo sapiens
tagctgtgctgacggtgttcgtgttgatgttgccgatgatgctgagagcctctttcagcacgtggtgcatgcgcagcatctcgtcgcgccgctgtgcctgctccgccgactcctccaggagt

SEQ ID NO: 301550 - DNA, 122 bp, Homo sapiens
ccccgcgcgctcattggcagccccgcccccgccgccccacccggcccggggacgcgcgggcgcaccgagacctctgccttacaaggccgactctgctcaggccccgcggaccgccgggtatc

SEQ ID NO: 301551 - DNA, 122 bp, Homo sapiens
tgtagccccagggggccccagccctgctgcgttcattcattcagcccgcttttgcggacccgcccccagtctgcgtcagggacagacccctccgccctggatgagcccggcggggaagcttc

SEQ ID NO: 301552 - DNA, 122 bp, Homo sapiens
gcacacagagagggaatgaggcggaaccgttcgggggctcgttgacactgcagagcctcccgcagcatcgctgccttaaatcccgcctttccaggcgtgcgcgcacagcgagccagaggagg

SEQ ID NO: 301553 - DNA, 122 bp, Homo sapiens
ggatggaggaggcccaccaccctgtacccctggcgccgggcgcctgccctgagccgcgtgcggagggcctgggtcatccccccgatcagcgtatccgagaaccacaagcgtctcccctaccc

SEQ ID NO: 301554 - DNA, 122 bp, Homo sapiens
ctgtgaggtttctgtaagaaaggggactccataggatgccacagctaggtgagtcctagacgtttagcatgatgggtagtacagaggggagaaaagctgtgcctgcattgattattcacgtg

SEQ ID NO: 301555 - DNA, 122 bp, Homo sapiens
ccttcaactctgccacagtcgccatttttcaacggccgccagggccgcaccgcggccctgcgcacgcgcagctccgccccactcaccctgcggcgtggtctgtagccaataggcgcacagct

SEQ ID NO: 301556 - DNA, 122 bp, Homo sapiens
gaagtgggaacctggccagctcagttctcggctgcccttcctgaggccccaaatgaatggcgtgtgcatcttcgtcgaagatattaatacgccacccccagctctgcccacaagacacacac

SEQ ID NO: 301557 - DNA, 122 bp, Homo sapiens
caactgggcctcccgcgcagcagaaaaggggaatccagtcgggcccacccttcctgccagcgcagaccgcaagtctggccccatcctctcgccgggagtcggccaccccgaccgtgggcagc

SEQ ID NO: 301558 - DNA, 122 bp, Homo sapiens
aggtggcagcggctcccctctcagtgtttcttttgtttcatggccttaaccagcccccggcgcgcgcggcggcggcggctacgccccacgccgctctccgaatgaagccggcgcgctctgat

SEQ ID NO: 301559 - DNA, 122 bp, Homo sapiens
actccaggacaggcacagtcagggcgtcgcgtgggcctactgtggcaaaggagacgtccgcgcgaatccggtcctggggaaagggcagttccaacaacctttcatccagaagcctgcacagc

SEQ ID NO: 301560 - DNA, 122 bp, Homo sapiens
cagctcgcattcggagggaagctgacatccacaccaagtcgagacttccagggatgtggccggggagcagtcacatgctgtagctttcatgagcacaggcatcagtcaggcagatgtttgtc

SEQ ID NO: 301561 - DNA, 122 bp, Homo sapiens
caggagaggcggcccaggccacgggggccatggtcttgatgcctgctgcaagtccctgcccgcagccccagccctcggtacctagcctgccacactcctcgcgcttggtgaagtatttgaag

SEQ ID NO: 301562 - DNA, 122 bp, Homo sapiens
ctctctctctctccccccttctctctctctctttttttttaaatcttggtacagaggaagcgggaagttacttagcacggttccgggtttctcgcgccccgcctgtcccccctccctatcac

SEQ ID NO: 301563 - DNA, 122 bp, Homo sapiens
cctcccgggttcaagggattctcgtgcctcagcctcccaagtagatgggattacagcaagcgccaccatgcccagctcattttttggtaattttagtagagacgaggtttcgccatgttggc

SEQ ID NO: 301564 - DNA, 122 bp, Homo sapiens
tctcaggaggacagggcagatgtgcaaggaagaagatggatgtcctcaagagagctggcccggccttgaatgcaaaaacctgaatattaagaataaatgaggaggtgatggacagggaaata

SEQ ID NO: 301565 - DNA, 122 bp, Homo sapiens
agacggggggcaaactcaccaacagttgggaggactggcttttacagcacgtaagaaagccggctgtagcccagagcctcggtgggagagcagaattattaataggtcctactgaggcctcg

SEQ ID NO: 301566 - DNA, 122 bp, Homo sapiens
ggaaagcattttatcagaatgtgattcagtttggcaagaaggttgagctcttatggacttcggaaagtgtgttgtgttagaaatgttccccaacttcattacaaatattctgggcttttata

SEQ ID NO: 301567 - DNA, 122 bp, Homo sapiens
gtgtggatgcggcacgggtcagtcttgctgttggcagctgggcgccccaactcatacttccgcttcttgtggcagggccttctcttgcccccagctttgcggcccttgtgccagttgtcccg

SEQ ID NO: 301568 - DNA, 122 bp, Homo sapiens
tggggatatagtaggtattctttcttggccattccgttttagttctaagggtggtggttgcgccttatcatgttctagagttctccttacttcttagtagccaatctctggttattccagta

SEQ ID NO: 301569 - DNA, 122 bp, Homo sapiens
cacagtcaatctgatgacccggtcggctactaagtgactaaccgcagggagtggtggagacgctggacaaagggatgattcacgtcctgggtgggaccgagcgggacggtgggagatttcat

SEQ ID NO: 301570 - DNA, 122 bp, Homo sapiens
ctggagtgcaatgatgctatcatagctcactgcagcctcgaattcctggcctcactcaagcgatcttctcgccgcctcggcttcccaaagtgctgggattacaggggtgaaccagcatgttc

SEQ ID NO: 301571 - DNA, 122 bp, Homo sapiens
aaacccagcgagggtgcgttcaccagtggggcttggagaccgcagagcagcctgacggagcgggactccaggcacaagggtgacccacagcctctccaggcatgagggtgacgtgtgacctc

SEQ ID NO: 301572 - DNA, 122 bp, Homo sapiens
ggccaggcgtcactgagactgtgggttctgggagccctctttgcttttactgtcctctgccgggctgcactcggaccccgtgatggaggacttgcacccgcgaagcacgtgggcattcagca

SEQ ID NO: 301573 - DNA, 122 bp, Homo sapiens
tggagagaaacttctgagaatcccagagggggtattaaaactctcatttttctgggcacacgttatgagccagccactatgctgagtgcttcacaaacataatttcatttattcctctcagc

SEQ ID NO: 301574 - DNA, 122 bp, Homo sapiens
aagagaatgatttgaagatggcttatgactgatattagttcagagtatactttcattgtacgggaaaagcttcagttacaaaactggaagttaccaagaagaaattcctcatgcaactagga

SEQ ID NO: 301575 - DNA, 122 bp, Homo sapiens
aatctcctgccttaggctcccatagtgttgggattacagacgcgagccactgcgccgggccggtttttttccccctctcagcccccgcgctccgccccgggaactccgggagcgctcctggt

SEQ ID NO: 301576 - DNA, 122 bp, Homo sapiens
cgccctccaaaagaactgtggggaagggctccatcgcctggccgagagaagccacaggcccgggggaaaggatgctccttccgccagccaggtccagcccccgcgcctgacaccggccggac

SEQ ID NO: 301577 - DNA, 122 bp, Homo sapiens
tgcccagccgcctgagcaggactggagtcttctcagctgggccctgggagtggacgcctccgggaagggatgggggtaggggctctccccaagactctgttagggctcagcccatggtgacc

SEQ ID NO: 301578 - DNA, 122 bp, Homo sapiens
acttgaaccctcatgatggaattccagatgtccttgcagttcaccgtggccacgcgcctacgtcatagccaaggggaactgagtggcgctccctccagaggttgtctttccacgtggggcgt

SEQ ID NO: 301579 - DNA, 122 bp, Homo sapiens
ttgagacgggctctccctatgtttccttggctgattttgaattccagcgctcaagcgatccgcccatcttggcctcccaaagagctgggattacaggcatgagccatgagccactcactcat

SEQ ID NO: 301580 - DNA, 122 bp, Homo sapiens
aagatcctaaagcaaatggctacttgtgcagaattagtcagctcgtgtctgctaggttggcgcacagtgattccacagccccacacatgtctataccatccccaggagagctagaggaaaga

SEQ ID NO: 301581 - DNA, 122 bp, Homo sapiens
aaggttgggcagaaaagtcttcaaattaaaatgtgcttacttctctgtcatacaaatatgcgaaaacagcaaccagattttgaccttttacttcatagaaactaccacttatttgtttaaat

SEQ ID NO: 301582 - DNA, 122 bp, Homo sapiens
ctttcccttaactagcacacaatgagaacaaaatatctaatggcgcagcatccactcatacgtctatgtttcaccagggaaaagtttttctacatacagtatccatgttaccccctcccttc

SEQ ID NO: 301583 - DNA, 122 bp, Homo sapiens
gcgtctcctgctgcgtcacgcaccccagctgagcgccctggacctgagccactgcgcccacgtcggggaccccagtgttcacctcctcacggcccccacgtccccactccgcgagaccctgg

SEQ ID NO: 301584 - DNA, 122 bp, Homo sapiens
ccccggaaaagggcggtaagagggagccaatgggcggccacagagggaaccgtgacggtgcgtcagaaggccacgccccagcggagctgtagctgcccgcttcctgcactctctgccggctg

SEQ ID NO: 301585 - DNA, 122 bp, Homo sapiens
cagcggaagcttctggatccagtgccagagccagcacagcagttctctgcctgtgttccacgtgtgggcccccgctggcccagccggccctggccagtgacagttgcgtgtaggtgtctggt

SEQ ID NO: 301586 - DNA, 122 bp, Homo sapiens
agttggaatttccttcccccagggcttcgggtctttggggtccggctggggaagctgaaccgaaagaaagctcccagacgaggtgttcccattcccaccgctaggctgcgcttcgggaaggc

SEQ ID NO: 301587 - DNA, 122 bp, Homo sapiens
atgaaaataatgctaagtcattccttcagatcctgggggttgggacaagagggacacaaacgcactaaaagcatgatctgtaaccttactgtaaccatctgccccagagcctccatactaag

SEQ ID NO: 301588 - DNA, 122 bp, Homo sapiens
cagccacctgcacccctgtggggggagcagatgttgtctggaggtgactctcctccagcgcgatggagctgggtccctcctccaggagctggattggggtgattaaatgagtctggagtttt

SEQ ID NO: 301589 - DNA, 122 bp, Homo sapiens
gcgtccccgccgcgcgcgcgctgctcctccttcttgcgggccgcgccctgccggcagtgacgtgccccgccctgcagccgcgggattcaaactcccggaagcggcatccacacctgatggtg

SEQ ID NO: 301590 - DNA, 122 bp, Homo sapiens
ctgggccgtctgtgcacctcctgaggaaacagcgggtttctcagctcctgcccctagtgacgcctgcctcagaagagccaatgcgttctctttctcaggactaggtgtctttgtatttgaaa

SEQ ID NO: 301591 - DNA, 122 bp, Homo sapiens
tctgtttttctgggactcagcgctgacttcaccgacactccgcggacaaccaatgggctgcggtgcccgccccctcattagcatgcctctggaaccgtccactctggcagcgcccggccagc

SEQ ID NO: 301592 - DNA, 122 bp, Homo sapiens
agggccagggcatcccagtcaggggtcacggggcccggaaggcattttcagcagccccagcggctgcattggcagctgcggttcgcaccgcagggttggagaagacaccagcagcaaattct

SEQ ID NO: 301593 - DNA, 122 bp, Homo sapiens
gggccggggagcggacctcccgcctcgggttttatggggctggacgaataaaggagcggacgggaaagaatcaggttctgctctaggggagaaggtggccttttaagttcttgtttaacgtg

SEQ ID NO: 301594 - DNA, 122 bp, Homo sapiens
ttcagctctgagacttgaggaagtgacttctccaagcctcaccttccttccctgtaaaaccgcataagagcagaacgcacctgcactgggcggaattgcggcccccccgcaaaattcacatc

SEQ ID NO: 301595 - DNA, 122 bp, Homo sapiens
ccccgccgtgggagaggcgggacgagacctcctccttcactttcttggagcctcggtggacgcgtagcccgcgctccagtcggagccgaacccccgggtatttgctgcagaccgctgggaga

SEQ ID NO: 301596 - DNA, 122 bp, Homo sapiens
acaacaatccaaacccaaccatcttaattgcacggcagcttaactgggagactttcttcccgggcggccccacccgggaccgcgccgcttcagtcgagcccaccgtctgggcaaacggcgtc

SEQ ID NO: 301597 - DNA, 122 bp, Homo sapiens
aaaagataaattcttaggctggccaggcttcagtcacaacacggtggggctccctggctgcgcccggcccggcagctacgggcccagcgcctgttggcggcgctgaggggtcgccgagaggg

SEQ ID NO: 301598 - DNA, 122 bp, Homo sapiens
gataacggagtgaattttaggagtctgcctaataaggggccgcccccaatagttttccctcgacttaggtaatgaattgcagatcgaaatgggtctagttttattcattcttctactcgggg

SEQ ID NO: 301599 - DNA, 122 bp, Homo sapiens
ccctgagccaagggggaaaagaagaaaaagtacctaacacaagcttcctttttgcacaaccggtcctcttggctgaggaggaggagctggtcaccctggctgcacagttagagaggggagaa

SEQ ID NO: 301600 - DNA, 122 bp, Homo sapiens
tcccctcctccaaggcatcttagcgctgtccgtggtgctgaccgccaatcccctggttgccgtttcgaccagctgggatctctggtgcgcccaacctcccctcccggcctcccacctttctt

SEQ ID NO: 301601 - DNA, 122 bp, Homo sapiens
cttcatacatcgagtgcaccagcagaagccctgatgtacccctctgcatttttcttgaggcgacattatcaagctactcctcttgctgaattcacagatttctggcatatgctatattgcat

SEQ ID NO: 301602 - DNA, 122 bp, Homo sapiens
cttcggccaggacattcccttgcagcctactcaagctgctatataaagccctgcacttctcggggctggatcagaacgttccttatctctctgcagcaggacgctgataatctgcccagctg

SEQ ID NO: 301603 - DNA, 122 bp, Homo sapiens
gaggtttcctgactgaggccttggagtgcactcctccgcgcctttccaacacgagggaggcgcaggttcctcccgcccaggaagatgcggcccctggtgcaggcagcaagcagggtggaccc

SEQ ID NO: 301604 - DNA, 122 bp, Homo sapiens
gcggcgagtcgcttacatgcccaggtcgctgtaggtgttgaagaactccatctgattgcacgcctgaatccagcccaccacccaggtctcgtggcgggggatggggggcatgaccacgcggg

SEQ ID NO: 301605 - DNA, 122 bp, Homo sapiens
tcatacactaagttcatcctgttccttttcataaactcaaacgctctcaaagcagcagcgcgttgagaagccccaagagtctgcgcggaaccagtgcgcaggcgctctgaggggcggaagcg

SEQ ID NO: 301606 - DNA, 122 bp, Homo sapiens
ttggcttcccgcgtacagacgtacctggctaaggaaaggtcaaataagcccagaaactggcgaagcgaagtctgatacatctcattaaccaagcgcatctcagtaatgaggaagtagaggat

SEQ ID NO: 301607 - DNA, 122 bp, Homo sapiens
ttgaagaattctgaggcttagagaatttggcggctgcctcagggtacgcctctggagtaccgtgcctaggttactaaacccttggatcgcgcttccccaaggagccacagacttactggctc

SEQ ID NO: 301608 - DNA, 122 bp, Homo sapiens
caccctccaaatccagcagacaccttggaagccacaggtagcttcaagaaacccattttacggatgagaacctgagatggagaaaggacaactggagatctctgagtctctgagcccacact

SEQ ID NO: 301609 - DNA, 122 bp, Homo sapiens
gtggccccgcggagggtgctgttcgccgacgaggccttggggctgccgctggcgcagttgcgccgctaccggccgtggggcgggcccggggcgggcaagatggcggcggcggccgggcaaga

SEQ ID NO: 301610 - DNA, 122 bp, Homo sapiens
aggctgggctagggaggcttggagggagaggaagaggggatctgggggaagattggggggcggggatagtccgattagacgagttccagagaagccagcctaacagaggtgacagtaatttg

SEQ ID NO: 301611 - DNA, 122 bp, Homo sapiens
ctgcgagtagctgctgttatgacatggccatttcattctccacaacaagagaagcagccgcggcttcagtcaccgccctccagcagcgtaagaggataaaagtgcgacttgccctaaaacct

SEQ ID NO: 301612 - DNA, 122 bp, Homo sapiens
gcctggcgcccttctgggcactgggcatggggtggtgaacaaagtcctccagaaataaaccgggtaatgagcccggcagcggccggggcaggaagggaccttcgcagagagtggtcaggcac

SEQ ID NO: 301613 - DNA, 122 bp, Homo sapiens
agccgcgccccccgtccgcctcggcctcctccccgggaaaatgggcacaacccggtccagcgctggggaatgcctgaggaagccttcagaacctcagacagggctgcttacttgcgacgttt

SEQ ID NO: 301614 - DNA, 122 bp, Homo sapiens
aatctgacatgttgacatatggtctttaaaagcaacaacaacaacactgttgaagtgaagcggacttcccctttgggatgctttggagaagttaggattgagggcatcctctcttctccaaa

SEQ ID NO: 301615 - DNA, 122 bp, Homo sapiens
ctgaagctatttctagaatcagtgctgctaaattccatgaagcaaggaatatagaacaaacgacatataaatagggaaggaaaatgggaatcctcagaaagtaaatcctgtaggctagcctt

SEQ ID NO: 301616 - DNA, 122 bp, Homo sapiens
ctctctgggcaaaaggcattcctagatttgtccaaggtacaaaaactaccactctaaccacgtttcttcgctgcccggggtcagagaagtaaaaacccattatttatttatttttaagttac

SEQ ID NO: 301617 - DNA, 122 bp, Homo sapiens
cccccggcggcgggctgtctccatggacaatagcaacaagtataccaagagccgtggccgcgcagccaagaagaaggcagccctgcagacagcccccgaatcagctgacgacagtccctccc

SEQ ID NO: 301618 - DNA, 122 bp, Homo sapiens
cactcacctcggtcccaggtggactgaagtccagagcggcgctgtgcagctggaagggcgcgcgatagctcaagttagaggcggccccggggcgcggcgcaggacacaagacctcaaactgg

SEQ ID NO: 301619 - DNA, 122 bp, Homo sapiens
agcaggtcctagagatcttaacaaaggcacgggctccagggaaggagaggacagccagagcgccatgcgtgtgaacacgtccacagtgacgggtctcactctcacaccaacgcctctccggt

SEQ ID NO: 301620 - DNA, 122 bp, Homo sapiens
tcgtgatccgcccaccttgctctcccaaagtgctggattacaggcgtgagccactgcgcccggccctgtcatttacctttttagcctgagtgtcaagggcaatacctggtctatagtaggca

SEQ ID NO: 301621 - DNA, 122 bp, Homo sapiens
ttctggctctttcactcagtcattcatctgtccctgagtcttccagagaaagaagtctgccgagtgtccagagcagacagcgaagcagggaatcaaggaagctcttggccagcttgtaggca

SEQ ID NO: 301622 - DNA, 122 bp, Homo sapiens
tgagtaaaccagatgtgtttcaggactgggaccctgcagtcatcaaccacctcacacctgcgtcagtaacaaacccaagctacagcatgatttttgttctacctcagcagatattttataga

SEQ ID NO: 301623 - DNA, 122 bp, Homo sapiens
tgcgagcgtacgcagggcggccggcggagcgccgagcaggcaccccgggagcgccgagcacgtcgagcaggccccgtccccgccccttgcccaggcccggccccaccccttgcccaggcccg

SEQ ID NO: 301624 - DNA, 122 bp, Homo sapiens
aaaggtggaaactcctgacctataagaaaaacagccagatgccgaggttgctaagatctccggtaagaacacagtgcccatctgtgacattttgaagagggaagcacgaagttctgtcagtt

SEQ ID NO: 301625 - DNA, 122 bp, Homo sapiens
agccctccgtaagcaagacaagcacccacctgcggtcagagcaggggtccggctcgcggtcggggttgtccggcccctcccggcttctcacctgcgcaccgcacggtccagccccggcggct

SEQ ID NO: 301626 - DNA, 122 bp, Homo sapiens
ttaccggggaagcgagaggtggggcgctgcaagggagccggatgaggtgatacacgctggcgacacaatagcaggttgctctttgtgctaagactgacaccatgaggacacagatttggggg

SEQ ID NO: 301627 - DNA, 122 bp, Homo sapiens
cgcacttcctcttcagcctcggttcagccacagagaggggcctcctcctgtgtagatgcccggaggggaggagcggtggttcttggggtgactggctggtggaggcaggatcttaatcactt

SEQ ID NO: 301628 - DNA, 122 bp, Homo sapiens
gcaccacgaccttcccagggtgacaccgcctcagcctgcagtggggctggtcctcatcaacgcgggcgctgtccccgcacgcagtcgggctggagctggagtctgactctagctgagcagag

SEQ ID NO: 301629 - DNA, 122 bp, Homo sapiens
ctggtttgaagctctcctgtttgacgaaagtatgtctcaggaaggtgcggtcccagctagcgcggttcccctggaagaattaagtagctggccagaggagctatgccgccgggaactgccgt

SEQ ID NO: 301630 - DNA, 122 bp, Homo sapiens
acaccgcgagggtccgcggcttcattcctgaagtcagtgagatcaagaacccaccaattccggacacacatggggatgctaggccaaaacccgtaagagccggccggcctccaggaggggca

SEQ ID NO: 301631 - DNA, 122 bp, Homo sapiens
tgaaccttctggcagaagagaaaggaaaaggcatagacagattttaagagcattctgtcccgttttaaagtgtagggtaaacataatcaacctggtttgtgagctgcctatttgacacatca

SEQ ID NO: 301632 - DNA, 122 bp, Homo sapiens
tgcagcccggccacgcagggaggaaggcaggcggcatccatctcccccgcgccgagagcgcgccgcggcgaccacctcacagaggagcgcgaatttcccggccctgtctcctcccctccccc

SEQ ID NO: 301633 - DNA, 122 bp, Homo sapiens
gaaaaccctcacaaagctttctctctgatgacacaaatcagagatgagtggtaaacatttcgataggaaaaaaaaagaaacacagatctaaaaaagataacagggataaatatagggttctc

SEQ ID NO: 301634 - DNA, 122 bp, Homo sapiens
gcacacaggggcccagtttgcaggcgaaggccagtctgctcttgggcctgagtccactctcggggaaacactggccccaggtgcagagctgggagtgctgggagaaggcagcacagcccagg

SEQ ID NO: 301635 - DNA, 122 bp, Homo sapiens
gggcattccccacagctgcaggcaccagtgaagcgtctaagggaccatcttggttgagggcggaagtgaggactgtgtcgcgctggaggagcccacagattctcccggacccacgtggaagc

SEQ ID NO: 301636 - DNA, 122 bp, Homo sapiens
gagctccgtacgcagcccgcacatctgggacccctccggggagcggcgggcacccgggcccggccatcccaggggatctccttgcggtatcgtccagcctgttctcggactttgagcggtgg

SEQ ID NO: 301637 - DNA, 122 bp, Homo sapiens
gagtgactccgactttgcgacgcacgatttctgattaaatccgagagtggcttcagacaccgacttttacaaagagaggtggggggaccgggagagcgagggagggggcggtaggaacggcc

SEQ ID NO: 301638 - DNA, 122 bp, Homo sapiens
ccagaccgccctcccccagacctgtccccgcccgggatcctgcgacccccgcccgccgcccggtcagctgacctggctcgctcgcctgctccccgcccgccgccctgtttccggtccccggg

SEQ ID NO: 301639 - DNA, 122 bp, Homo sapiens
ttttgggaatgaaggacaactgcggtgaggcgtctcttcctggcagaggatcgtgagattcgctgacagcgaagaagcacggcaaggggcatgttcgaagacccagagttgggtgtgcgggg

SEQ ID NO: 301640 - DNA, 122 bp, Homo sapiens
gagagaggaggtgagaggggcgctgcgttggcctccatcgactgtcggcctttttcagaacgcctacttcgggtcaagcttgtgttagggaatgccagagaagggcaccgccttgaacagga

SEQ ID NO: 301641 - DNA, 122 bp, Homo sapiens
ggagctgaaagcggagggagctttcgagatgtccgctgtccctcctctccttactgtggccgatggagtagccctgccctgtggcagccggggcccaggtggattcctcctgggaacgaccc

SEQ ID NO: 301642 - DNA, 122 bp, Homo sapiens
tgaggccatgaagaatgtggcctgtctgatcaacgagcgcaagcgcaagctggagagcatcgacaagatagctcgctggcaggtgtctatcgtgggctgggaggtaagtggaaagcacccca

SEQ ID NO: 301643 - DNA, 122 bp, Homo sapiens
tcctcgctgtgcagtgccctttccatgggaagattgttccacgggacgacgaaggacggccgctcgacccggaagacagggctcgtgagcagcggcggcagctgcagaagcaggagcgcccg

SEQ ID NO: 301644 - DNA, 122 bp, Homo sapiens
agagggacattatctttgttctagtggacagcaaatacaccttcattctgcacaggcagacgccaccatttctaccttccaaagtggttcactataaaaagttttttagaaaatgtccagaa

SEQ ID NO: 301645 - DNA, 122 bp, Homo sapiens
acagcaggcaacttggcattggagaagtcaggtagcaggcagggcctcggcccctgagtccggttccttggagggatcttgcagaagctaggcagctatctatcaaggagtgacactttcag

SEQ ID NO: 301646 - DNA, 122 bp, Homo sapiens
aggtcagggtgtggacacggaggcagccaggcctgatctgctgggggaaccacactgggccgggcgtggagaggaggtttgccgtgtgtgcagcagcttgcagggagccagctgccgagagc

SEQ ID NO: 301647 - DNA, 122 bp, Homo sapiens
gttgaagaaatgccattgcccaaggcactggttacaaagcggaagagcccagatcccagccgcaaacacgtgcttctttggctcccaaaccaaagttggctccagctaagtgctgcatgact

SEQ ID NO: 301648 - DNA, 122 bp, Homo sapiens
ccttcataaaccataaaaccttgaatgcactgaaggaatgcataaaccgatttcacttagcgctgggcctaaataaactggatccaacttctcaggctggacttcttccagcttcgggacac

SEQ ID NO: 301649 - DNA, 122 bp, Homo sapiens
aagctgagtacctggaccaagatggaagcagcagattggagaaagaacacatctgaaagtcgctgtggagatggaaatgataggacttagaaatcacatgggaagagccagagaaagtcctt

SEQ ID NO: 301650 - DNA, 122 bp, Homo sapiens
gagccgaggcctgggccaggaaggcccttgggtgccgtgtgggcgcagagcccaggagagcgcactgccaggcccggacctccccgcccctaccccgggaagaggcccgttcgccgcagggg

SEQ ID NO: 301651 - DNA, 122 bp, Homo sapiens
agaataaaatctcactctcccctgcctcacccgtccccaccgggcacgaaccggcgcctccgtggtcccatcacccaagttccccacctcactggggagaagcgccctttcccggcacccac

SEQ ID NO: 301652 - DNA, 122 bp, Homo sapiens
gggacccggcgatcgccacaggttgggactctgtgcggcgctggagttggcagccccgggcgctatggctcccttgaggagtggggagggaggtggccggggggttggcgcgcccctcgcgc

SEQ ID NO: 301653 - DNA, 122 bp, Homo sapiens
gagcctcgacctcagcatccagaaccgtgttggttcaggcctggaggccgcctacagcatcgtggccctgggcgaggagccggcccgaggtgagtgtctgctgcccactccccttcctcccc

SEQ ID NO: 301654 - DNA, 122 bp, Homo sapiens
ctgaataccttcaatttcccaccaaggagacttgtatctgtgactgcctccaccccattccgggaggctaggctggcctccacagttggaggttgcaggcatcccctctccagctatatcaa

SEQ ID NO: 301655 - DNA, 122 bp, Homo sapiens
tgacgcctctgcctctctcgcagccatcttctacacagcggccatcctgggcccagctgccggctacctgattggaggtgccctgctgaatatctacacggaaatgggccgacggtgagtgg

SEQ ID NO: 301656 - DNA, 122 bp, Homo sapiens
aaggtttcaaacgaactcagcgctgaagttactctgcagcgaccatcaagatctcacaatcgttttctcttcgcttacaaattcgttcccaccctccaccgttccctttgcacacacaattc

SEQ ID NO: 301657 - DNA, 122 bp, Homo sapiens
agggacccatctagctctgatacagtcagcttctaccttttcttcacattatggcttaaacgatcatagtgtaaatgcctaagggccaaccagagaattctaaatgtttgctctgaagggaa

SEQ ID NO: 301658 - DNA, 122 bp, Homo sapiens
tccgcagagcacaggctgccggccccagctctccaggcagtgtgggaccgcggggaggagcggggatgtgcgtgaggccgtccctcctgcctcgttcgcaggcacagagtagatggccggtg

SEQ ID NO: 301659 - DNA, 122 bp, Homo sapiens
aagttctgggccagggactggaagcccagtgtcctggcttcaggtttgcccctggctgggcgtgtaccgttcagccctatttgggagcctggttgccacacctagaggttcctgctctgctg

SEQ ID NO: 301660 - DNA, 122 bp, Homo sapiens
ccaacaagactccgactgccaaagccgcctccaccgaagcccccgccaccaccaccatggcggctcaagcaggagaagctggaagttgatctccggcttccaccagacaccacagctgagcc

SEQ ID NO: 301661 - DNA, 122 bp, Homo sapiens
ttgcaagcttggagctcgttcatgtcctgtaccacatgtgcccatactttaggggcaccccgaatgtggcctttatcatgtcaatttgcttattctgagcacaaagttagtcttttgaaatc

SEQ ID NO: 301662 - DNA, 122 bp, Homo sapiens
gagcccctggagccccggctactgcccagaagcttccctccttgcccctcctgggcctgccgcatggccggggacacagccagctccccccatgagctggtggcctcgtcaggaagacggcc

SEQ ID NO: 301663 - DNA, 122 bp, Homo sapiens
gtggagcgcctggaggccgacaaggccaagtacgtcaagagcctgcacgtggccaacacccgccaggagcctgtgcagcccctgctgtccaaacagccgctctttagccctgagactcgccg

SEQ ID NO: 301664 - DNA, 122 bp, Homo sapiens
agcttttttccacgtggctacgttggggacctccgtgatgcttcctgagtgcttactatgcgccaagcgctgctttcaccattttacaggttttcactctttcaatcgttctaagaagctgc

SEQ ID NO: 301665 - DNA, 122 bp, Homo sapiens
gcatctcagaatcatgcatttttcaagtctttgccagagagagtgaaccacactcatcttcgttgttttctagtatgtatatatagaatacatattggaaagcatatattatggatacactt

SEQ ID NO: 301666 - DNA, 122 bp, Homo sapiens
tctcgcagggcgttccgaaacttacagttatgcgcaacacaatgtttctattttcaaaggcgaacgctgcacgatcgcagtccagtgatacaaagtatgcctattagtgacttcacccgact

SEQ ID NO: 301667 - DNA, 122 bp, Homo sapiens
ccctgcgagtctgtgggtagcggctcaccctgctggactgcgcagatccagagaacgacacgagacctgcggttgctttggtttgccttttactaagttcatttctcagcctctctgcccac

SEQ ID NO: 301668 - DNA, 122 bp, Homo sapiens
tcgcgggcaacggactcgccagtcaccatctagcccagggacgacgcgggacggacgtgccgctgcgcgctgacatcacgctccaggccccgccccaccggccgcccatatagcgaaagcct

SEQ ID NO: 301669 - DNA, 122 bp, Homo sapiens
gttaactcccgcattgtaaaggcagcagactgggagctggaagggggcagccagagattccgcgaatgccttaggatggctctagctcaccaaagcttgaatccgttaatgaccaggtgctg

SEQ ID NO: 301670 - DNA, 122 bp, Homo sapiens
cacagggaaccggctcctgctgaaggtaaggacagggacttccctgggccagagcggccgcgtgctgggcccgagccacgtcacagcgatccctggcggccggcgggcggagcggcgtgggc

SEQ ID NO: 301671 - DNA, 122 bp, Homo sapiens
atttcccacctggcatcagcaacagctggagcctggcccatttacgatggcctacactcacgcagtactaatctaaagcaaatgtcatatgaaaagctatgtccctgccccttctcctgtta

SEQ ID NO: 301672 - DNA, 122 bp, Homo sapiens
tcttcagcccagacttccccccaaagacattggcttggtccccagctctggacacacacacgcaactcctgctctgtggacctccacccacgtgccaacaatagaccctggatcctccctcc

SEQ ID NO: 301673 - DNA, 122 bp, Homo sapiens
tgattggctcactgccccacccacccggggcttcggggcattccattggcctgagtaaaacgccagttaaataactacgcaaaagacgtactcacgggtaccctccccagagctccacccgg

SEQ ID NO: 301674 - DNA, 122 bp, Homo sapiens
agaatggagggggaagggctgacctaaatcgcagggaaacaattaggttcgctaattctccgcctccattacttgggtttctgatggtcttaaggggttcttctctcttctccactcccacc

SEQ ID NO: 301675 - DNA, 122 bp, Homo sapiens
ggtgtcaggaaagatgggccgtctgggggacagcagggagtccgggggaaacgcaggcgtcgggcacagagtcggcaccggcgtccccagctctgccgaagatcgcggtcgggtctggcccg

SEQ ID NO: 301676 - DNA, 122 bp, Homo sapiens
tttcagtttgtggaaagtgacgactttggacatccactgttccccagtagcggggctgtccgggtgaatgtacatcctctttggcatttcggggtcggccttaccagccaccatccaccgag

SEQ ID NO: 301677 - DNA, 122 bp, Homo sapiens
gtcaagtgagatgactcacttatacttttagtataagtatgtcccatgcaatatctggaacgtacttgtactaaggggtttctccctccatcggcacatcccaggcatcctggcagctgctg

SEQ ID NO: 301678 - DNA, 122 bp, Homo sapiens
agcaacttgaaagggggagctggccgcgtaggaggtgagagccagccgcaaaaatccgttcggcggcattttctcttcaaacccgcccggtcggatgtggcatttgaagaaagaaggcgtgg

SEQ ID NO: 301679 - DNA, 122 bp, Homo sapiens
ccttgctgttccctgggggaccagggacagcacggcccctgcatttctacttctcagggccgaagacccgacctctgaccctccacccactccggtgacctgcacgctaagttgggtggtct

SEQ ID NO: 301680 - DNA, 122 bp, Homo sapiens
gcccaggcagccacgtagcgctgcttcaggtcgtacttgatgatgttgcgggtgaaggcgcgattgtagtagaaggcgccattgtataccacgtggcctgtgccgatccagctgtacgggag

SEQ ID NO: 301681 - DNA, 122 bp, Homo sapiens
gataggaggcccccagccttctctgtgcccagccagtgctctgagcatttccactgtgtgcgtgggaggttctgatgcggtgggactcagaaggtagcaggtcaaatacttgaggtatgtgc

SEQ ID NO: 301682 - DNA, 122 bp, Homo sapiens
ccaaagcacaatttttgaaaatagtttacatctttgaacatttcagttgtgtcaactgcccgcaggaataataacaaagcatgatttctgctattgataatgacgatctaattgatgcagaa

SEQ ID NO: 301683 - DNA, 122 bp, Homo sapiens
agccttgagcctgccaccggaaatcctcactctcttcccaggagaactggacagctaaagcggtttaacctataggccctgggccctgggctggagactgacactgacaaaaacttaagggc

SEQ ID NO: 301684 - DNA, 122 bp, Homo sapiens
gacttcactgatactctgctcccttttccagcgggtctgaaatagaccaccgactagtgccgcagctgcccgaaactttgggaagtttggcgccaccagggggcctggggagggggcgcgct

SEQ ID NO: 301685 - DNA, 122 bp, Homo sapiens
acgcgctggggagacccagcctgttcggctccagggttcggagacatcctgggctgaaggcggcggcgaaccgaagaagccggcatattctgcccttcgcgaatctttttgcggtctgggct

SEQ ID NO: 301686 - DNA, 122 bp, Homo sapiens
ctggagtagccttggcttcgaccctgagactcttgattgcttcggtccccgcgccagtctcgtctttgtggtccctgctgagtctcgtaacttggcccgatggcggactgtggctttgagga

SEQ ID NO: 301687 - DNA, 122 bp, Homo sapiens
ctaagtcagggtttagggtagtgagtcacagacattctttcccccatcccttagggtttgcgcacacccaggaagccttcccctccccaacagagaccgctttgttagcacgacccacccgg

SEQ ID NO: 301688 - DNA, 122 bp, Homo sapiens
aaggctggcctggccagtccccctctccccaaagcctcatcattgccttcctccctgacccgtcctccggcacctagggaaagaacaggccaccctgccacctatataaggaaacagattta

SEQ ID NO: 301689 - DNA, 122 bp, Homo sapiens
ctctcttcatcctcagagccatccccttcctcatctgtaatgtgggaagaacacccacctcgcagggttgtttctggttgaaaggcagcacttgtcaggctccttgcacgctgtccacagcc

SEQ ID NO: 301690 - DNA, 122 bp, Homo sapiens
attggcttgtgtgatggtggagcagagtatctctgactgtggtggttatgcaaggctgcacgtatgtgatacaactgcactgtgctctacacacacgagcgcgtgtataactcaggaattct

SEQ ID NO: 301691 - DNA, 122 bp, Homo sapiens
aggccgcagcggctgacggcaggggaggagccgggtccactgccgggtggaggggcaaggcgagtgtgtgtccttatcctagcaattggggcgcgggcctgtgagccagttggagttgcggc

SEQ ID NO: 301692 - DNA, 122 bp, Homo sapiens
ggataaatttataaaaatacataaagcaaaatgcaaatggcaaatacatggcaaatataacgtgcagcaaaagtagagtggaggagtgaaatcctgagtccaggtgtagactgagagaatgg

SEQ ID NO: 301693 - DNA, 122 bp, Homo sapiens
agctacagtctttgtccctagtcccagccagcactatttatggttaagtctttctagaaccggaacttttctgaacagaggaacttttctgaacagatttgacattacccagacgcttgttc

SEQ ID NO: 301694 - DNA, 122 bp, Homo sapiens
gagggttcagctgtggggactccaagaccagtgctcctattccattccccatgatgtttgcggatgtcaccatggatattgtgtagggaagattggaaaggaaggccacatacatctcagac

SEQ ID NO: 301695 - DNA, 122 bp, Homo sapiens
ggcggcggaggagatgaaggtggcgtgtggctgtggccctacgcatccccgttctccatgcggcccagctgctcctccaggcggcagatgcggtcgccctgctccttgaccagcgccctcag

SEQ ID NO: 301696 - DNA, 122 bp, Homo sapiens
gaacccgcgcatctgaggaaagctaaacatttcacctgtagagtcggctgccctggccctcggaggcccacctttggccccagagtccctgaatcaatgataattaacatttttaaaaaatt

SEQ ID NO: 301697 - DNA, 122 bp, Homo sapiens
ccctcacctccttgactggctcagcctcaccggaggcaggacaagggcagagcttaataccggagtcgccagttaaacggcgatagcggcaggaggggggtgtgggggcaggggtcacccct

SEQ ID NO: 301698 - DNA, 122 bp, Homo sapiens
gccttcagtatttctcacgtcctgctgcctggagacctcccagacgcaggttgcctttcccgttcacgtgtcttccgtacacggcgcctgcagaccacaccgcgtttttctcagactgcccc

SEQ ID NO: 301699 - DNA, 122 bp, Homo sapiens
ttatccccaaagcagcccacgcccgggtgggcagggtcccccggggctgtatgaacagaacgtcagacctgggaaggccccattccagaaatggggcccctcactctggcacccccgggtgt

SEQ ID NO: 301700 - DNA, 122 bp, Homo sapiens
tgatcacgttaaaacggtgtaaggcacattacatcataggttaaaaggcctagaaaactccgcgctccccttgccagaactgcagactcgcgagcctaagtctccgagaactcagggattgt

SEQ ID NO: 301701 - DNA, 122 bp, Homo sapiens
ttttcccggcaggtccaccatcttgcagcagcagttcaaccggaccgggaaggcagagcacggctcagtggcgctgccggccgtgatgcgctcgggctccagcgggcctgagaccttcaacg

SEQ ID NO: 301702 - DNA, 122 bp, Homo sapiens
ccgcctagggtgccaggttcctgcacttcagaagaaggctctacacaggccatccagggccgggtccctggggtctgccctgagtcaagatggctgccaagcttgccacttctgatggccga

SEQ ID NO: 301703 - DNA, 122 bp, Homo sapiens
agtgagggtcctgagagctagtacagggactgtgtgaagtagacaatgcccagtgtttagcgtaagaatcagggtccagctggtgctccctaaacagcagctgctgttcactgttgaaaggc

SEQ ID NO: 301704 - DNA, 122 bp, Homo sapiens
agctggcaactgggacatcgtccggtgctgcaggtctcagccgaagggcgtcggaaactgcgctcgcatcgagcagtttccagcctcctgggtaaaggagcagtctcctcccttgcttggga

SEQ ID NO: 301705 - DNA, 122 bp, Homo sapiens
gccttccttggtgactcacaaccagctcccgtgtattggccttaaatagtgtgttgaggccgggagtggtgcgtgcagctgtagacggctcaggtatgaggaaactggctgtgcagaattcc

SEQ ID NO: 301706 - DNA, 122 bp, Homo sapiens
ctagtcctacctctggccttgatgccaagtttcagactgacatgctggactttgcaaaggcgccctctggagctggttgtggttggttttccgccaggtgcacctcacctaagagggtggcc

SEQ ID NO: 301707 - DNA, 122 bp, Homo sapiens
cccgcgatcaatggcacctgaagcttccccgggcgaggccgtggctgcctggcttggtcccggagtccacggccacagagactggtgccttgaagacgtggtttttataaccatagaacgtt

SEQ ID NO: 301708 - DNA, 122 bp, Homo sapiens
ggtcctccaggcacgagccgaggaagcgaagctcgagcgggatgcacaggtccagcaggccgcacaggaactccacgcgctgcggcgacggcagctccgagaaccagcggtacacgccgtcc

SEQ ID NO: 301709 - DNA, 122 bp, Homo sapiens
ccgcggagaggaggcgcagtctgcagatttttaagggcaaagggtggccgaagggctgctcggcggagagaaggcggcgagaacccggggcgcacgctcagtatctgcagctcctcttgcga

SEQ ID NO: 301710 - DNA, 122 bp, Homo sapiens
cagaccgcagcccagctgtctctccctctcgccactccacagggtccagactgctcctttcgaatagtacaggtggtgtgagccaggctgtccaaatggtgagaatactattcataacaact

SEQ ID NO: 301711 - DNA, 122 bp, Homo sapiens
ccttggctccctcaaaattcaagtccttagcagagctgagggtgaggacaggatgagacacggggactgagagagagaaaaaattagtcaagatttgtttctgcctcttactgtagattttg

SEQ ID NO: 301712 - DNA, 122 bp, Homo sapiens
atatgggctggggtggaaaataaccactgtaagcaggcagtccctgactcattccgaaagcgtgtgggcccaccacttactacaatgtgtctcacaattgaatctgctcaccctgccttcag

SEQ ID NO: 301713 - DNA, 122 bp, Homo sapiens
ttccccaagtttgcagcacagcttctttggtagcgataccactaactactgaagttcactcggcaacaaatttataaatcctgagaagccttgggcagtttctatcacaaaggtatgtcatc

SEQ ID NO: 301714 - DNA, 122 bp, Homo sapiens
cttccttggcttcagtagtttcttcacatgcatgccttgatcattatttagccaaaatttcgaggacacccttctgcagatctctggagcatgctctctctccctttctcctgtgcagtagt

SEQ ID NO: 301715 - DNA, 122 bp, Homo sapiens
ctgaaactctattctattcacacactagattggtagttggatgagtattgaagactaaatcggaagtaattttccctcagagttttgaagacagtgccgtatggcttcctagattctaactg

SEQ ID NO: 301716 - DNA, 122 bp, Homo sapiens
gacggagggtctcagatggcggggcttgaggcccacccgggctctcgggtcggcgagtcccgttggggagcccttgtgcctgctaggatatttagcagatgccaggcggccagaaacgtcct

SEQ ID NO: 301717 - DNA, 122 bp, Homo sapiens
cggagggggaaacaaaactacagcaagaccaccttgagtaccttgggaagggcagccccgcgatccctaataaatgaattagcatctcaaggaggagatcactgcggggctgatattgatca

SEQ ID NO: 301718 - DNA, 122 bp, Homo sapiens
agaatgtttcatactaaaactgggagagagaatttcttgtcctttcctttagaccaggggcgggtaaactttttctgtaaaaggccagagagtaaatgtttcaggttttatgaaccctacag

SEQ ID NO: 301719 - DNA, 122 bp, Homo sapiens
gaaagaagtgtgacctctgcttgaactgagagaacttgagcttaaaataactgtgagtcacggccttccctgaaccttcttccttcctgcaaggcccgaggttgttcccatagccgttccct

SEQ ID NO: 301720 - DNA, 122 bp, Homo sapiens
ggtccacctagcttcccgcttgtaaacaccagtccaaattggaagacgttcccagctgtccgtccaaggctggaaattctttatgtcgttctggaatagccactcatctctcctccctcact

SEQ ID NO: 301721 - DNA, 122 bp, Homo sapiens
tcggagacccggaggtaaccgtgtatgtgcgtgcgagtgtgtctgtgtgcgtacaaggtccggagaagcgaaacggtcgcaggttcctacagaccccgaccctgttcccttggccacctggt

SEQ ID NO: 301722 - DNA, 122 bp, Homo sapiens
cgaaaagcacctgagtaggaaaatatttacggggtaggtttctctcccatttctttccctcgagacctaccaacaggacagtcctgacagcgactggcccagtttcccaatacaacccagag

SEQ ID NO: 301723 - DNA, 122 bp, Homo sapiens
gaaaataagcccttcagagcagaggctgtgtaggatgtgctaaacatcctacaatgcacacgatagccccctatgtcaaagaattaaccagtccaaaatgtcagtagtgctgaggtggagaa

SEQ ID NO: 301724 - DNA, 122 bp, Homo sapiens
tcctcctcagctcctagtctggctgagttcacctgggcccttgaaggctcagggcctggccgtgatcccaggtggggagagcgtgggtggcaggaaagctttggagtcgaagtccggggtgg

SEQ ID NO: 301725 - DNA, 122 bp, Homo sapiens
ggccgcgggtccgggggcagcagcggggcgcggggcggagggaggcccggcgggaacgggcgccccctttgcacccacagccgtggaacgccgaggtctcagctcccctacggcgcgcgccc

SEQ ID NO: 301726 - DNA, 122 bp, Homo sapiens
gagaattataaatgaagtacataaagtccagcagtcacaaatgttatctattattaccatcgtcctaagactgcaatcagctatagtgaaagtagtctcaaagattgtttcataaatcatca

SEQ ID NO: 301727 - DNA, 122 bp, Homo sapiens
ccgagtcgaaatctgattcttcaaagcaagtattgctttacccttgtcctgaatgcagtccgtcatatgaccactaacttgcatgtgaccaaatgtttgcagagtgttttttagatatgctc

SEQ ID NO: 301728 - DNA, 122 bp, Homo sapiens
agtgacgtcacgccggcgcagttccggccgcgcagctctcgcggagaggggcgctcgaggcggtttgaggggacccggaggctcttacaaactggcagttcattgagaaaaggcagctttta

SEQ ID NO: 301729 - DNA, 122 bp, Homo sapiens
acgcagtctcccactaccacaaattatgcagtcgagcttcccacatttggggaagttgcacgaattagcttcgccctgcgaaaaccaccttcgtaaacacgatttttcttctgctaggtaaa

SEQ ID NO: 301730 - DNA, 122 bp, Homo sapiens
gcgacgccagggagaggggctgcgggccgcgaggtttctgcccaatggcccgagcagggacggccagactcacggagcttcagggaggagagtgtagcccaggttttcagccactctttttt

SEQ ID NO: 301731 - DNA, 122 bp, Homo sapiens
ccaggaaaacacagactgttccatctgtgtgcagaggggaggctggggccggattgccagcgatgtgtgggaagcacctctgaaccttcagcattcttgggctcatgcagggagcccgggcc

SEQ ID NO: 301732 - DNA, 122 bp, Homo sapiens
cttttttttaaaaaaaatggagagtggatggctacagcgctggggaagagttttctgactcgggacttttcctcaggaaacgaaaacactgaagaggtccagtttctcttccctggggaagg

SEQ ID NO: 301733 - DNA, 122 bp, Homo sapiens
cagccagaagcccagccagccccagactccagtgcaccagagcacgcacaggagcctgggcgcgctgctgtgaaacgtcctgacctgtgatcacacatgacagtgaggaaaccaagtgcaac

SEQ ID NO: 301734 - DNA, 122 bp, Homo sapiens
cctgtttgcctaggttggtgggagtgtaaactagttcaaccattgtggaagacagtgtggcgattgctcaaggatctagagctagaaataccgtttgacccagccatcccattactgggtat

SEQ ID NO: 301735 - DNA, 122 bp, Homo sapiens
gcttcctgcaaagtgttggctcggcacggtagaggcgcaggtaaaggccaagccccgaaacgtggctccgggacagtcacgttcccgcgccttcccaggacaactgcccaggggtgacctcg

SEQ ID NO: 301736 - DNA, 122 bp, Homo sapiens
catgtgtctctcctctttcctagtgggccaggactgctacacgagaatctggagcctccacgatgcccgcctactgagaaccataccctccccgtaccctgcctccaaggccgacattccca

SEQ ID NO: 301737 - DNA, 122 bp, Homo sapiens
gaccggttgccatcaacggatgctgcactggtcagagaggctgtacgagaccgggacaggcgagtcatgcaggatgaggccactgtggagacagcacgatgcacaagcagtcagagaggaag

SEQ ID NO: 301738 - DNA, 122 bp, Homo sapiens
acggcctggcctccctcccagtggacgctggaaaaacgccctgaaatggggagcggatcgcggtctgggttagaccagccttgtagaattgtgaacttaagttttgggagtgtaaacccaaa

SEQ ID NO: 301739 - DNA, 122 bp, Homo sapiens
accgccggttccccgcctcactctgatcgcccccaggctccatcccacacccggctcgctcgccaccccagagcttcccaggcttacccccgagacgcctggcgcggacctggtgtctcccc

SEQ ID NO: 301740 - DNA, 122 bp, Homo sapiens
gaggtgatagaaacgcaaagcagcgaccaatgactagctgagttgggctgggccggccgacgaatcacgaggcttcgcacccggatatggttatgggctcggaaatctagttcgggaaaagt

SEQ ID NO: 301741 - DNA, 122 bp, Homo sapiens
ccagcattgtcaggcatccgttgcccaggagggccttgcagtggttgttgaagacggcgtcgtggctcaggttgcccagcagcaccagctctccagagttcagagacagggcagggtccccc

SEQ ID NO: 301742 - DNA, 122 bp, Homo sapiens
ggaggagagcgcgaaggggcgaggcccgtttgcaggggccgctcggcccggggaagcccgcgccccgctcagccttgcagccccgcgcccggagcatctccctggaggaacggagacaaagg

SEQ ID NO: 301743 - DNA, 122 bp, Homo sapiens
ttccccccaccccgggtgctttaagaatgcgtttaataagaaatttctcacaggatctaacggaataaagtgccaccaaaataaccttttcgcagttttcgtaattgtgatggagtgggaaa

SEQ ID NO: 301744 - DNA, 122 bp, Homo sapiens
tccgggcctcatccggcagaaaccgtaagggttctgggttccgccgtgcgatcatggtgacgccgtttccacttgaggcctggtctcagaccacgaactacaaggaaaaccacgacgaccac

SEQ ID NO: 301745 - DNA, 122 bp, Homo sapiens
cccacgcaccacactgcttggaggtggaggagacccgcgcgctggcaggagctgacgctgcgtccccagcttgtccccctcgaatagcctccacctaccggggccaactgcttgaggtcagc

SEQ ID NO: 301746 - DNA, 122 bp, Homo sapiens
gcgtctgtctgaggccacacacgtcttccctgcacaggttacttcttgctgcagattctgcgcaggatcggagctgtgggccaggctgtgtccaggacggcgtggtcggccctttggctggc

SEQ ID NO: 301747 - DNA, 122 bp, Homo sapiens
ggctggggcgggggcccaggctgctgtggggccaggctgccgaggccccgctgaggagaccgtgtcgggatgcctgtccctgccccagcaggccttggcgacagcgtcaatgtcacagccct

SEQ ID NO: 301748 - DNA, 122 bp, Homo sapiens
cccctccaggtccctggtgccacaatgctcttgcccctgcggttgagttatctcttacaacgaactctggccagggtggggcatgggcctagaccctggagtcaagggacttgggttctaat

SEQ ID NO: 301749 - DNA, 122 bp, Homo sapiens
actagctcatatgagcaggtataagaggactaatttctcaactgaacacctctgtcccagcgacccctgccctccatcctgactgctcctcctaagagagatggcaccggccagagcaggat

SEQ ID NO: 301750 - DNA, 122 bp, Homo sapiens
gcctgcaggagtagaaacccggtggtgtcttgcagccccacaacctccctaaggggcagacgaccaggacccttgggctccgatacgctcaacgcaggccggcccgtcgatactcacattca

SEQ ID NO: 301751 - DNA, 122 bp, Homo sapiens
ggctggagctcttccctggggccccgcccacgatgagttcaggagctgcctttgtgcacccgtgacagcctctcctggcgcctcatttggcagagctgtgcatctggcccagttactgtggt

SEQ ID NO: 301752 - DNA, 122 bp, Homo sapiens
cgccagaacccagaagcacttactgccaggaacagggtactccagtgcgccatagcgtcgcggccgctgggcgaggggtgggactgcaggcaccgtgcagccgcggaccaatgagcgggggc

SEQ ID NO: 301753 - DNA, 122 bp, Homo sapiens
gtttcagagcctgatccgcagcgtggctcctcacagcactgcgagccagagcttggcgcgcgcggttccgtgggaaatctgaacactggcggctcagcagcccggtaatcttatcagggccg

SEQ ID NO: 301754 - DNA, 122 bp, Homo sapiens
tcgggacggcccagggggtctgtcctttgcctgggggcgcaggtccgcgagccaactttgcggctgatgaggccggacaggcggcagaaaggcgcggcgacccgggccggggagggcggtgg

SEQ ID NO: 301755 - DNA, 122 bp, Homo sapiens
caggacacccagggtaacatgcgggtggccacgcgcagcccaggcgcttgcaaaacttagcggagccgggccggggccgggcccggggaaggcgggagggaggagggccaggcgggagggcg

SEQ ID NO: 301756 - DNA, 122 bp, Homo sapiens
agggtgaattcccggagcggagggtgggcatggggaggatgtcccggacaaaaacggtgacgggcttccctgagagcgaatctgccacgtgggacgtcactagtgacaggtttggggatctg

SEQ ID NO: 301757 - DNA, 122 bp, Homo sapiens
ggagtgctccgtgcaggtggcagagtgacggcggaacgtgctcctgatggtgacgctgaacgaggaaaccctgaatagcatgcgccagacagcgagcactcgtcattctcattggagggccg

SEQ ID NO: 301758 - DNA, 122 bp, Homo sapiens
caacaacaaagacaagaggcagaaccagcctttgtcccccatgcctagccctgggaaagccggctatgggcaggagggagctggaagctgaggatgtctctgagggtgagggactgcaaagg

SEQ ID NO: 301759 - DNA, 122 bp, Homo sapiens
aaaacacgcagggcaggttgggcagcaagaagccccgcacaaagtcggcgtaggagaaggcgcccggctccgagacgaaggctacccggcccggagcctggccgacgccggggacatcgacc

SEQ ID NO: 301760 - DNA, 122 bp, Homo sapiens
gtaagaataattgaattaaacaaaaatgttaaaggccatctgccaaggtatgaaactcaccgatggtgttagaagtccggatagtgctgcctttgctgggaggcagtgacaaagggggcttc

SEQ ID NO: 301761 - DNA, 122 bp, Homo sapiens
ccttaacctctctctgcctaagtttactcatctgggaaactaatcgcagttctgacctcacggagttactgatatgggctaaattagtttacacagaccactcagaacactgcctggcacaa

SEQ ID NO: 301762 - DNA, 122 bp, Homo sapiens
taaaaataataaatccagttctttggaggctttcattctaaataaagaatttcaccagaacgtgcatcctggtgaacgtatttcagggactacttctgggttgacatttctcatgttatttc

SEQ ID NO: 301763 - DNA, 122 bp, Homo sapiens
ctctccattctggcgcccactaatggccttgccctgcctggcgtccaccgccggggatcgcgggcctcacgtgcccaaatcggacacctcgctgctgcctccgctacgagcctgtggcgaag

SEQ ID NO: 301764 - DNA, 122 bp, Homo sapiens
gagtatctcctataaaataaaagctctcctgatggcctgttcctgcacatttcctgaggacgccctcgatcacaagcaggttatagctatttaaaccttgccttacctgtactctttacaca

SEQ ID NO: 301765 - DNA, 122 bp, Homo sapiens
aagaatgcattttgcagattatccatgctttattagtacctgtttatccgctaattagaacgacaatcttaatctaggccacaatattttctgaagctcaagaaaataatttaggggaggaa

SEQ ID NO: 301766 - DNA, 122 bp, Homo sapiens
atatcatttatttgttttatttagtttcttattttcttctatgagtatagtaaccacctccgagctttacggatctgcgggtcctttcctcgcgcacgcgcacttgttagggagggcgggcc

SEQ ID NO: 301767 - DNA, 122 bp, Homo sapiens
ggggtcgggtcagccccaggtcgggttcgaagccgggtgcaggtctcaccttgacgcagtcgatggggtacatcacgcagtgctccaggatccctgccacggcgcctgccaccatgtgcgtg

SEQ ID NO: 301768 - DNA, 122 bp, Homo sapiens
ccgccccgcccccactccccgccccgcccccactccccgccccgcccccactccccgccccgccgctggcagcgggcaaggacccacgactcatcccatggcctccctctgggtaagtgctt

SEQ ID NO: 301769 - DNA, 122 bp, Homo sapiens
gcgacaccgccactccggaggttaccggcccgggtgttcgggtttccgagagtgccaggtcgacctcctgagggaccaatgtccggccagataaagtgccgactggcatgcaaacaaatgac

SEQ ID NO: 301770 - DNA, 122 bp, Homo sapiens
gaggcagaccgcgctgggcttgcagcccagctttcagattgctcctgtgccggagccctgcgaatcatgcgaatcatgaaactgaagacctggccctgaagtcccagtgcatatgaggagat

SEQ ID NO: 301771 - DNA, 122 bp, Homo sapiens
ggatgggggaacaaggcgatggtgacagcggcagcggccccgatggtgacatggtgacagcggcagcggccgaggtgacggtgacggcccggggctcgatgccctacaacaacatcgcgcct

SEQ ID NO: 301772 - DNA, 122 bp, Homo sapiens
aggagtggctgcctacattcaaaacgattctcaccaacttcttccacaggacacagggctcgggagcagcgccagcccgacatcggcggaggagcaccggaagttctgcagcactggctttc

SEQ ID NO: 301773 - DNA, 122 bp, Homo sapiens
acacatgcaggatggcgtccgcttgcctccctagtgttgctcgagaggcctgggtcatgacgccttcccttactcatgcattctcacggcacttgctgatttatttgaagactcccctattc

SEQ ID NO: 301774 - DNA, 122 bp, Homo sapiens
cagaacaagcgcccgatttcaggggagcccagccgaagggttccacagcgctcagcgagccggctgggagggagcaaactctctaactgcagaaaaaaacaaatcttgattccgctttaagg

SEQ ID NO: 301775 - DNA, 122 bp, Homo sapiens
gccaaactgtttcccaaaatggttgtaccattcaggatccttttgacacgtcctcatcatcgttctttgagctcttccttgctttttggtccaagatgttctaagctcttcttacactttct

SEQ ID NO: 301776 - DNA, 122 bp, Homo sapiens
aactagtgacacagaggcagctagtgctgcccgtgctttcccctcagtacccagggccctcgccttgctgtgtgcctgccaggtcttgctgctatcatctccttttcaccccattgaaactt

SEQ ID NO: 301777 - DNA, 122 bp, Homo sapiens
tctgagtcttgaaaggtagtagcagcaataggccgggtgcagtgtctcacaactggaatccgagcactttgggtggatctcttgaggccaggagttcaacaccagcctgggcaacatggcaa

SEQ ID NO: 301778 - DNA, 122 bp, Homo sapiens
cttggagttcattgaactcacccaggattttcttaggcaagcaaatcatcaaatcctatccgagacctgcagtatcagaaaccctggctgggaggaacagtaatctgtatcgtaacacactc

SEQ ID NO: 301779 - DNA, 122 bp, Homo sapiens
cagtccccactgaggcactgagacagggtcttggcccagggtccccacccacctgagctccgcatgtgagccgaccttcacccgcctgcctcagtttcccgtccacgaaaggggtgagcgcc

SEQ ID NO: 301780 - DNA, 122 bp, Homo sapiens
tccaggggcagtgaaaaatggtggcgttttccggaagatcgagggtgccctctggcgaggcgaggccgccagtgaaggagctcggctggtcgggagccggggaggctcgggggctgggggct

SEQ ID NO: 301781 - DNA, 122 bp, Homo sapiens
agaaggtcatgccttctctgccggcaaatatgattaatgtgtgtacagggaggagaaaaacgccactcacctggctatcagccagcctgactcatgcctctgggcatcttagaacaccaaat

SEQ ID NO: 301782 - DNA, 122 bp, Homo sapiens
gaaaccaaactattctcgtcgaagtgctttcccaggctcctaagacgcagcttccatactcgccgcgttctcagctgttggtcgtatcctagcaacggccctggcaccacctcttcctgccg

SEQ ID NO: 301783 - DNA, 122 bp, Homo sapiens
ctgcaagggattcttccgccgcagcgtcatcaagggagcgcactacatctgccacagtggcggccactgccccatggacacctacatgcgtcgcaagtgccaggagtgtcggcttcgcaaat

SEQ ID NO: 301784 - DNA, 122 bp, Homo sapiens
aatcgttgttcactttcttctctcttcagggactttctgctttcttaagaccggcgtccgcgatggcccgaataaaggaaagagcttctacgtgtgccgggcagacacgtgcagcttcgtgc

SEQ ID NO: 301785 - DNA, 122 bp, Homo sapiens
ggatgccagcacctgccaggtgccgccccggggcaagggccccagcagccctatggtgaccgccacactgtgccttaatgtctgccgggggcccaggctgtgctgtccctgcagcacgcctc

SEQ ID NO: 301786 - DNA, 122 bp, Homo sapiens
gggccctgtgcaactgtgcaggtggcatgtccatgaagccgaccctgatttcatgccctacgaaacctggatctgcccctttccccaactttccaaagaaatgccagttgattcaaataaac

SEQ ID NO: 301787 - DNA, 122 bp, Homo sapiens
ttctgtgcaactgaaaagaaagatcagcatgttcagtacactccagaagctgatttggagcgattcttccaggatatgttaagtgaaaagggcaaatacaaagcagtctacatagaatgtta

SEQ ID NO: 301788 - DNA, 122 bp, Homo sapiens
tccttgggttaaatcatttcctagagtggcccaaagaactcaaggaaacaatgccaggcacggtggctcatgcctgtaatcccagcactttgggaggctgaggcgggtggatcacttgaggt

SEQ ID NO: 301789 - DNA, 122 bp, Homo sapiens
gggaggatcgatcgagtctgggaggtcgaggctgcagtgagccaggatcaccgccaagatcgcgccactgcattccagcctgggcgacagagggagaccctgtctcaaaaacaaacaaaaaa

SEQ ID NO: 301790 - DNA, 122 bp, Homo sapiens
aaaggcacaacctttcatagagaccaccagtctgtgtagcgagggcaccagtctgtgtagcgagggctacacagatggcgaggggggggccctacactgtaaggtggaatataattgtgttg

SEQ ID NO: 301791 - DNA, 122 bp, Homo sapiens
ccgccggcctgggatccggaagtcggagcctagctgcgcgagagtttctgctcgctcaaccgagttgtcgtgttgccctcgcttctcagatccccgccggaagtgtaagtaagaaacttctc

SEQ ID NO: 301792 - DNA, 122 bp, Homo sapiens
tttaatctaatagctatacagagagagtgctgcatcaaaccaggaaacagtcacgattttcgaccacttggaaaatgtataatgatagaactctctgcaaataccaatgcatcattatcata

SEQ ID NO: 301793 - DNA, 122 bp, Homo sapiens
ctggggccaggctatacctagatccttctgcttgatctctcaggctccgatgtttcaactcgtcattccctaggctattaacttcaagcccttagatggcattcaagctccttggtgacctc

SEQ ID NO: 301794 - DNA, 122 bp, Homo sapiens
ttctgatttcggagcccaggaatcctccggtgcaggagttcccaggtgactctgatgcaccgggaggctggaggcgctcggatctagagaggaggcggcacttgtgcagtgcagtcgggaaa

SEQ ID NO: 301795 - DNA, 122 bp, Homo sapiens
tcagttggtgcttcacctgccgtggcctctttgccatcttgtgaaggagcgttaggagaacgtgggcgacgccggtaattgtagggacgccggtatccacggcgaacaggcggctggtttgg

SEQ ID NO: 301796 - DNA, 122 bp, Homo sapiens
aaaataaacattttggattttagctgtgctacaaagaaaataagatgatctatcagagagcgacctggaggactactttaaaatgagaagtcaaagtctgaggagacatttgaagtgagagc

SEQ ID NO: 301797 - DNA, 122 bp, Homo sapiens
taggcttcctctaccatgtcttcatcatggggacgtcctttcgaaaccatgttttggccccgcagttgtaggacggccactgtcttcagcgtctgagtgactgctgggtcccgcagtcgcag

SEQ ID NO: 301798 - DNA, 122 bp, Homo sapiens
gcacacctgttgctgggcgtggacttcagcgctgggctcctggctcttctgctctgtgttcgccttaacacgtgtccacattccaacatgtatgtgctggagcgtgtgcagcaccgagtccc

SEQ ID NO: 301799 - DNA, 122 bp, Homo sapiens
acccgaagcatccgcgaaagcgccccggttttaaaccccaaagagctgctcgcttcctcacgcagcagggaaactctgctcgctttccctgaggttagatttgtgttaaattctactaattt

SEQ ID NO: 301800 - DNA, 122 bp, Homo sapiens
gctcggacatggggaccagctcccttttcacatgaccttgtcatctgtgtgacgcacgtgcgtgtgccgggtcgtgtgtttccgtgtgtgtgtgcacaagcacagacacgtgcacgtgtgga

SEQ ID NO: 301801 - DNA, 122 bp, Homo sapiens
caaatgtgaccctccaggacctgagggctctgtgcttccctcggttctggaaggttctgacgacgacaccagggactcgccataggcatcctcttttctctgtgttgcatcctgagaggtct

SEQ ID NO: 301802 - DNA, 122 bp, Homo sapiens
tgcaggagtcgactgaggaaggaccctacctcctggaccagtccaaaagaagaactcctgcgagagagctccggaggaaaagggtagggttcctaaaataaccagggcattttggaataggt

SEQ ID NO: 301803 - DNA, 122 bp, Homo sapiens
ggcgcccggccgcgcccggccgcactcaaccgcggctccgctcgtgcctcgcctttcctccgcaagtccctgtgagccgcctacaggaacgagtgaatcagagaatgaatgagtggggagga

SEQ ID NO: 301804 - DNA, 122 bp, Homo sapiens
ggatatccgcagagattcgccaaccgtcttggcatgaaggtggaaacaacgggtcaccgccgccctgaatcagctcctgccaaagggctcattaaatccccctccagagcccccatcccagg

SEQ ID NO: 301805 - DNA, 122 bp, Homo sapiens
tctgtgccactcggcaacagacaccttgtctcaaaaacaaacaagacaaccaggatgggccgggcacggtgactcatgcctgtaatcccagcattttgggagggcgaggtgggtgatcagga

SEQ ID NO: 301806 - DNA, 122 bp, Homo sapiens
gtactgtgggagagcggcggctgctcctggaagttgtggtgtcgggagcccagccggtgccgccgcagccgccgcctagggcggtggggaggaggagggagccgcggggcttggcggggtcg

SEQ ID NO: 301807 - DNA, 122 bp, Homo sapiens
ttcttcgacatgcttccccttgggtcagagtgctgagatcctgcggtccacacctgttcacgcacgccagccagcaggcgtggctaccagctccaccgtgctaaccagtcgcgcaggactca

SEQ ID NO: 301808 - DNA, 122 bp, Homo sapiens
gatgatttattactatctattttctttacaagtgtagatgcttgatgaagtttgagaccacgcctgtttctgctcaccccagcaaagcagttagcaaattgtgagcctgcaactgtttgaag

SEQ ID NO: 301809 - DNA, 122 bp, Homo sapiens
gcaccgttccctctccctgtccacgcccagctgaatggatttttagtatttactttgtcacgtgcatgttcaacattaggaagcataattaaattttttacctttccctgtgttataaattc

SEQ ID NO: 301810 - DNA, 122 bp, Homo sapiens
tgccgcggcttttctatggtgcgccctggcccccttttcgcttccctgtcagtccgagcgcgctcatgcacgcacgtccagcttgcttggcgccgtggctaacactttgcgcgctcctgcgg

SEQ ID NO: 301811 - DNA, 122 bp, Homo sapiens
ctctccattctcttcctcctggtccttgctcatctctggtcgtgtccagggtagcacccacgtggcctcctccaccagctgcaggcctggcctcccatctgaaacggggcattcaggcctcg

SEQ ID NO: 301812 - DNA, 122 bp, Homo sapiens
ttgtctggggaaacgcgacggccgctgtgagtgccagtgttgacaaaggctgtgtcaggacgtctaagcagaggcctacctggaccaaaacctgtctggcttattttcaccaaatttgctag

SEQ ID NO: 301813 - DNA, 122 bp, Homo sapiens
tgggcgcggctggcagaaacggagccggagctgcaccaacccggcgcctctcaacgggggcgctttctgtgaggggcagaatgtccagaaaacagcctgcgccaccctgtgcccaggtacca

SEQ ID NO: 301814 - DNA, 122 bp, Homo sapiens
agaggctgggcggggtgggaatggggcgcccgaggccggcctggggcgcagcgcaggaggcggctccggtggctgcggcggcagcgtgagcgcgaggaggcggaggctgcggcggggcggac

SEQ ID NO: 301815 - DNA, 122 bp, Homo sapiens
agctcaggctagagcccaacaacaaagaataacctgtccagctcaaaatgccagtactgccgaggccaagaaccctgacttatcctgatacataggaaaagggttaagcaagaatcatctgt

SEQ ID NO: 301816 - DNA, 122 bp, Homo sapiens
gttggcttgcctctctcctgccagaatgcaacctggctttatgcacctagatgtccccagcgcccagttctgagccaggcacatcaaatgtcaaggaattgactgaacaaactaagagctcc

SEQ ID NO: 301817 - DNA, 122 bp, Homo sapiens
gcccctgggcgattctccctccggggaggaaagaagattcaactcttgattcaaatgctccggatttcactctggtttcgctgtgtggctttggacataggatttaaagccttcacgttggt

SEQ ID NO: 301818 - DNA, 122 bp, Homo sapiens
aatagaactcaataactgtgttgccttgcaggctccgagtgctacaggcagacccgagtccgagtcttcctacggttcattgtccccccctggatttcctagggactccagatacgatggca

SEQ ID NO: 301819 - DNA, 122 bp, Homo sapiens
gagcagatccgggtcttcgggtggccgcaatgtcccaagtggacgacacccacctagtcccgaggacaaccgacaaagtccttaatgggcccagaaggtgaggggagtccggcaatgagggg

SEQ ID NO: 301820 - DNA, 122 bp, Homo sapiens
gcccgcccttgaagccagaaggagctggtagactaggcagaggctgtgcgccagcacccacgcccacgccctggcggagaccttttgctggcaaagaatacttgggatctctgtgttgtttt

SEQ ID NO: 301821 - DNA, 122 bp, Homo sapiens
ccgaacctccgggctgcagggggcgcggagcgggcgggctggcccagaaaacaaatcctgcggtgtcgcatttcctgcaacgtgagccaggtcgggcggggtgaagggtctgaggccaccgc

SEQ ID NO: 301822 - DNA, 122 bp, Homo sapiens
gccctccccacccaccgccagcagattgatttattcccctgcaggctgccggggggccaccgtgggaacgcggcggaccaccttctcaatgccccgggaaaaaggcgtcagtctgctggggc

SEQ ID NO: 301823 - DNA, 122 bp, Homo sapiens
tattaggaaaaggacctcggggctggggccctggggcgcatctgtggaggactgaggggccggagcgggccagtcaacaaaggctttgattatatggatatttttaaaagagggagaccccg

SEQ ID NO: 301824 - DNA, 122 bp, Homo sapiens
tcttgtgtacacagcaccccacctgtgatgccctggtgaatgggatgcagcgacttccgccggttcgtttctttcatacttgctcgccgccaggattgcctcctgtcttgataactggcaga

SEQ ID NO: 301825 - DNA, 122 bp, Homo sapiens
tgcgctgggggccgagccggcgcgcggccgccccgggtcacgtgggcgagggagggagggcgaggaggagccttaaaggagccgctacatgctttttggccattttcccctgagagcggcct

SEQ ID NO: 301826 - DNA, 122 bp, Homo sapiens
tgtggcttcctcttaaacttaggaattgagtgtgtggttgcttctaagtgccttagaagccggagcggctcctggaaagagcctgcctgccacagcgggccttaccctggctgtgcccacag

SEQ ID NO: 301827 - DNA, 122 bp, Homo sapiens
cctcctggtactgattgctcatggctggggctttttcccagggcgcagagagcggatcgccggctgcctctcccggagggtgggatggatgggtgtgtgttgggggtggggttagatagcgg

SEQ ID NO: 301828 - DNA, 122 bp, Homo sapiens
gattgcgagtcaccgagtttcccgcgcggcttgaggtactggggaaccggaatcccccaccggcccaatcatgttgctgctggggtctctccggtgcccagcagtggttgtcagtaagcggg

SEQ ID NO: 301829 - DNA, 122 bp, Homo sapiens
tgtggaagctttgtactgtcactccgctcaataaagcctacagctgtttttctctcggtccgatctgtgtctctctctcaccgcgggctgccgccacaccaaatctttggcgtggctaaggc

SEQ ID NO: 301830 - DNA, 122 bp, Homo sapiens
cgggacgtgtgctcagacttgataggtagacagggacggtgccgatgacatgcacccactcggccttggcagctcccagtctcccatgaccgtccctcagtggctgtccagagactccctga

SEQ ID NO: 301831 - DNA, 122 bp, Homo sapiens
aagacgaaaagggcagggcggaaaagcagaccctgcctggaggtgctgggccagagctagcgtccgcaggtacacaggaccacctcaccagggagccccgtccggtcctcgtaactcctccg

SEQ ID NO: 301832 - DNA, 122 bp, Homo sapiens
atgacctatggccagtaaaagaaacactggaatgagtcagcaggacaagtctcacagctccgtagatctgggaattccttacactgccaagaggtagaacagagaaacctcataatacatgg

SEQ ID NO: 301833 - DNA, 122 bp, Homo sapiens
ccacgtctcggcctcgaggaaatattccgtgtcgggcccgtcctgattggacagttctttcgggttctggccactaggaagctttgtttaggtccggaaggcgggctttcctgggagtgggt

SEQ ID NO: 301834 - DNA, 122 bp, Homo sapiens
ggggcctgctggacggtgggccaaagatgtggtccgaaacctgcccttggggagtctggccgtgtggggaggggagaccacgcagcacccccaccggggcctggaggacgcccttctagacg

SEQ ID NO: 301835 - DNA, 122 bp, Homo sapiens
aagtgctgggattacaggtgtgcaccactgcacctggccttaaatcaccttttttttgggcggtgggagggggaggatggagtctcactctgtcacccaggctggggtgcggtggcacaatc

SEQ ID NO: 301836 - DNA, 122 bp, Homo sapiens
gactttctaattataaaatatgttcaaaacagaaattgttctgaggcacacaatattctgcggggataggacaaaacttcaaggaaagaaattgaaaagcaaattttacctcacaatttaat

SEQ ID NO: 301837 - DNA, 122 bp, Homo sapiens
tcacatttgagttcagctgctcctgatgtctctttcctgaaaatttcaatactaagagctcgagaaaccctgtatttggggaagcttatccttcaccatcaactttgggggtaggggtcaga

SEQ ID NO: 301838 - DNA, 122 bp, Homo sapiens
actcacgctgctgttgtggccagaccagtggaccatggcttggttgtgtgctgagtctcccgtcagcgcaaacgtggtgctggtcagtctcagctcctccatccggaagcgggtggctttgt

SEQ ID NO: 301839 - DNA, 122 bp, Homo sapiens
ctccgcctcctcgcccaccctccacgtggggcctctgcctggatgcgaagtccccgggcccggcttccctggcctttatctcagagagtgcgagaggcctcatctgtcttgtgagccttggg

SEQ ID NO: 301840 - DNA, 122 bp, Homo sapiens
tagctcctcagggactcctctgcgcgctccgggatccatacctggcaagcaatagcgcggcgaaagccgcacgccatgtccacctctacggaagtgcgccgcagtccgccagttccggcctc

SEQ ID NO: 301841 - DNA, 122 bp, Homo sapiens
cgttctagagaattcaggggccccatcccgggtttctggggtgcccgggcggcctgtgctcgtgagctggggtctccgggcaggcaggggcaggcgggctcccagcgccccaccaggaggct

SEQ ID NO: 301842 - DNA, 122 bp, Homo sapiens
tgttgttttaaatatacagcggggaagacaatagtactatttttgatagtccaattcatccgctccacctttccggaatgctgaggccgggaggcggcatgcagttttcgtgtgatccccaa

SEQ ID NO: 301843 - DNA, 122 bp, Homo sapiens
ctgcgcgactgcacttgcagtgtggcgggcctggcttctcttgcgaaagccgaagcctggcggcagcgcggcccgcaagcgcggagcttctgccggtggaggtccgagctcgcaacgctcac

SEQ ID NO: 301844 - DNA, 122 bp, Homo sapiens
ctcagagcccttcctcaagtctcattggtcaagttgaacgaacaagtgtcgctggcgagccggagagagagagagagcgagagcgagagagcgagcgagagagagcgagagagcgagagagc

SEQ ID NO: 301845 - DNA, 122 bp, Homo sapiens
aatcaaatagatatgtctcaatgagtgtgtccaactttcaacttttactactcgcacacacgtctcgttatattcaggttcagttttatgtctttacataaaacatctgttacttcatgaag

SEQ ID NO: 301846 - DNA, 122 bp, Homo sapiens
cgccctctccccctgcctgcctccctgcgcgcaggctgcctccgggctccccgggctcttcgggtgcctgctgcagaaggaaggcgctaaagccaaaaagcttctgcttgaatttctgggtt

SEQ ID NO: 301847 - DNA, 122 bp, Homo sapiens
ctcctgcggcgggccgggcacccagaagcgggcttaggacaaacacaggtgctccagacccgccaggccgccgcaagcacgagggctcgccaagcgctgaccccagccgagtgccatggcgc

SEQ ID NO: 301848 - DNA, 122 bp, Homo sapiens
gcaggtctcccaggcgggtttatttccgatcccacctcttcttcaggctgtggcctctcccgcagaagctcagcctccatgagttggagattctctcgccgcagcatccctcaggatggagt

SEQ ID NO: 301849 - DNA, 122 bp, Homo sapiens
tggcttcacgccaccgaggactgtcccagggccacaagccccagctgcagtggttggagccgtcggatgcccggcttgtgtctgtctgactctgaacagctgttcgcgcggacgacaaacgc

SEQ ID NO: 301850 - DNA, 122 bp, Homo sapiens
cccaccaagtctcatttcttgagttttggctttcaagcagagagcaactgaacctgggtccggttacaattcattcattcatttgttcattcatttgcctggatgattgcagcagcctctgc

SEQ ID NO: 301851 - DNA, 122 bp, Homo sapiens
gctgcgtcccgcgtggggcagcagaaggtccctaggcgcggggaggccatgggctgtgttcgcggacgcggctcgggtgtgccaggaccccgccggcctgcctgggtcatgtgctgggcggg

SEQ ID NO: 301852 - DNA, 122 bp, Homo sapiens
tggccgcaaggacccggacctcagggaggcctccgcacgaagtcggaccgtcctgcgcgccgcctaagtccaggcttgcccgtctgctgccaggcaacaacgcccctagtctctccgttcgg

SEQ ID NO: 301853 - DNA, 122 bp, Homo sapiens
agatgaagtgattggcgggctcgcctagctcaggtgagcgatgcttcccagaatagatgccgtggcaccactgcagtatctgcccatctccctcctggctccgcgcggccgctgcgtccgag

SEQ ID NO: 301854 - DNA, 122 bp, Homo sapiens
tgggaccttcctcaggtggagagatgctgcccgcagacgtgacccccggttggtttgctccgggcaatattttgcaccgtctaaattacatgtgcgatccggccactggccggagctgggcg

SEQ ID NO: 301855 - DNA, 122 bp, Homo sapiens
ccagaacttcctgattccaaagcttatggttaatcactacattgtcctttgacctgtgaccgtttgggtaatgtatccatatgatgaggcctacctgtggctagctcctacttagtaccagg

SEQ ID NO: 301856 - DNA, 122 bp, Homo sapiens
tcagctcagggatatcgcctaggccatctccatagagatccgattcgcggctggcgcggtcgccggtctgaagataaatttagcactctagagcacccgaaccctacaatcttcacgagcga

SEQ ID NO: 301857 - DNA, 122 bp, Homo sapiens
agtcatagcatgtataatacttcatcccttttttgtggctacatgatattccatggtgtgcgtaaaccacaacttgcttatccattcctctgtcaatggttgcttcttccttttggccattg

SEQ ID NO: 301858 - DNA, 122 bp, Homo sapiens
gtggtggtggggaaacaagaaaggaggcaaccgtctaggcgcctcctcctccgggggaggcgatcaccgtgcgctgctcgggacagctgcctctggtcgcatcctctttcggcctctgggcc

SEQ ID NO: 301859 - DNA, 122 bp, Homo sapiens
cgagccgccccgtccgcccgcgcgtcccgccccgcgggctcccggtggctgcttcccgtccgctgtcctctgctgccagtcccctgccccgggcaaagcccatctggtccgccgagcaggta

SEQ ID NO: 301860 - DNA, 122 bp, Homo sapiens
taatgctcaataaattgtggttcccacctcctgctccacggagcagacatgaaacaggtacgagaagcaacgagaaggggcggcagcagagcatcaacacacagggagtcctgcctactgtc

SEQ ID NO: 301861 - DNA, 122 bp, Homo sapiens
tcttgcggtgcagtgtgttggtgggtgctcatcatctcattctccaccatttgttcatgacgacatacccaaaggtacaatcacagacacaatgcgaacagcactgtaagagtcagagcctt

SEQ ID NO: 301862 - DNA, 122 bp, Homo sapiens
aataaaaaacaacaaaaaaaaccccttagcgttataaggtctgcaatctactgtaagatacgtagttctaggtggcatggcgtgatatacctgtgtgtgtttgtgctgtgaattaaatatat

SEQ ID NO: 301863 - DNA, 122 bp, Homo sapiens
cgtcctctgcacagctaggctgggagagacgttgctgcttgaaaccgcgtagcctgcagacgctaagctgggaggccgccccgattccctggagcgcatcccgggataaggggcttccgacc

SEQ ID NO: 301864 - DNA, 122 bp, Homo sapiens
tttctggaagactgggtgacctcgacgggcaggattgagaggtctggagacagggctttgcgtggctgagtcctgccgggctgtgctaggggcttgtgcagggacgtggggagctggatctg

SEQ ID NO: 301865 - DNA, 122 bp, Homo sapiens
tatttacttaatactgtggctgcttttgctctacaacacacagccgagtggtcacgacagcgactacagcatcctgatttgcactgctgctttgtacactacaagtcacagtgacacagtcg

SEQ ID NO: 301866 - DNA, 122 bp, Homo sapiens
acagaagcagcaggtccaggatgtactcagccccatacatggggttcacccggcggtagccgtactggatctctttgaagtcaatgatgcgccctctggtcttggcgttggcattgatcatc

SEQ ID NO: 301867 - DNA, 122 bp, Homo sapiens
cagcctatgacaggtccccgtccatagctgttcaaagaatgggggcaacctcagggtgcccggcagacgttaaagagaggcctcaagaggtggttgctcaccggatggtggttgtccacatc

SEQ ID NO: 301868 - DNA, 122 bp, Homo sapiens
ggaagaggattcgaaaaccctctctcttgtatgagggctttgagagccccacaatggcttcggtgcctgctttgcaacttacccctgccaacccaccacccccggaggtgtccaatcccaaa

SEQ ID NO: 301869 - DNA, 122 bp, Homo sapiens
cgcagcgcgagggcagcgggtgcctggctatttattaggaaaagccccgcgcggactctccggattgaggagggtgggaaactcggctgcccagcgctccacccgggcggccggggctggcg

SEQ ID NO: 301870 - DNA, 122 bp, Homo sapiens
cacgtgcggccgggagaggcgccgcgggccgggagtgtgcaggaatgtagcaacttgcagcgaaaagtttccctgcgctgccggccgggccgcggtgcgggcgggcgcgcagaggaaggaag

SEQ ID NO: 301871 - DNA, 122 bp, Homo sapiens
gtctagcgtaggttcacggcacggagagattttaaggctgcctaagactaaagccaaatacgaagtccacatctgcggtccgcaccttatctctccgcgcggcaggcgcgacgagggcgaga

SEQ ID NO: 301872 - DNA, 122 bp, Homo sapiens
acgtgtggatctgtcacgtatggactctcacgtgtggacctgtcatacatgcaccagtcacgtgtggacctgtcacgtgtgaacctgtcgtgtggtcctgtcgtctgtgggcctgtcacgtg

SEQ ID NO: 301873 - DNA, 122 bp, Homo sapiens
ccccttgcccacatgttctctgctacttgggctgagggcaaatggggaagaagcagagagcggtctaagaggatggagacaggcttaccctgcagatcctgactggcagatgtgaaaaagca

SEQ ID NO: 301874 - DNA, 122 bp, Homo sapiens
tgcccaaatctccacaaagccttgcttgcctgcaaacctttacttctgaaatgacttccacggctgggacgggaaccttccacccacagctatgcctctgattggtgaatggtgaaggtgcc

SEQ ID NO: 301875 - DNA, 122 bp, Homo sapiens
gctggggctgacttgagcagggctccccctctgtgtcctgtagtctcaggaatgctctagcgcccctctctggagacacttcagaccttccttgcttcctaagcctgcatcttcctagaatt

SEQ ID NO: 301876 - DNA, 122 bp, Homo sapiens
attggagtggccagtggggcctcgttgtcacagctgacacagagcagggcccaggccacccggcttctctctccctgtggttgtgagcgccggggtccttgggccgccatagagacaggcca

SEQ ID NO: 301877 - DNA, 122 bp, Homo sapiens
aggacactggcaggcaggagttagggaggagtcttaggccctgccaagctcagaggagggcgagctggagaagaagcaacctggggataagaaagaatgagccaatcagactttcagaaaca

SEQ ID NO: 301878 - DNA, 122 bp, Homo sapiens
aggatggggacgtgctgtgcccctagcggccaccagagggcaccaggacaccactgcggtcggctcagcggctcctgccctggtcagggggcgccaggtcctgcccctcctggggagggcgg

SEQ ID NO: 301879 - DNA, 122 bp, Homo sapiens
acaggcccagtgccagccctcaaaggacatagactttgaaacaagcgaattaactatctacgctgcctgcaaggggccacttagggcactgctagcagggcttcaaccaggaagggatcaac

SEQ ID NO: 301880 - DNA, 122 bp, Homo sapiens
tcagggagggcgtccttggcactggggccatgagaagctggtgtccatgttcctaaccaacgatgccacatggtcgccgcgatcacgtcgcacaccgtgtcctgtcacctctgccaggcgtg

SEQ ID NO: 301881 - DNA, 122 bp, Homo sapiens
acgaagccttggaggtaagacaagccctggattattcacaggccgctggtcaccagcccccggctctctcacggccgagcgagggtgctgcgggcagcggggccagatgggccgagacttgc

SEQ ID NO: 301882 - DNA, 122 bp, Homo sapiens
agtttactgggcaatccagctctggagtcctgtcagattacaccagtattagttctcaaacgtgggcatgcatcagaactacctagagggcttgtagattgctggaccgagcccccaagttt

SEQ ID NO: 301883 - DNA, 122 bp, Homo sapiens
gaggctgatgggatgcctgtggtgcagggtgaccccagcttccccatgtgggggatgcgccggtggtgcaaggccaccaccctgtgccctgtctctggcacagggatgatgacagcacacag

SEQ ID NO: 301884 - DNA, 122 bp, Homo sapiens
tccgactacggctacctacgtctcatctatagcttcttgaggggctggcggccggggcagcgtaatgacagggctttggtctggatgacgccccgccccgggccagcctgggccccgcaggg

SEQ ID NO: 301885 - DNA, 122 bp, Homo sapiens
ccatgccaagaacgtaagtaggctctactgaccaggaagttaagtaatatgcccgaggtacgttttcaatggaagaggctgactgagggtcacccaacttatatctcgaaatttcacaattt

SEQ ID NO: 301886 - DNA, 122 bp, Homo sapiens
acgtttgtggacgacgtttagagcttgctatcctgggcacacaagaacccttggactgttcggtgcaaagttggcaaatcctacacggcctgtgccagggtttactttctgcatcaatttca

SEQ ID NO: 301887 - DNA, 122 bp, Homo sapiens
gccgccggtatttctccatctggctctcctctacctccaggcaggctcacccgagatccccgccccgaaccccccctgcacactcggcccagcgctgttgcccccggagcggacgtttctgc

SEQ ID NO: 301888 - DNA, 122 bp, Homo sapiens
atggcagctgagcacccctccctccaggtgaagctgctggagctgcagcagatggtgttgcggcttatagcaactacaacaatgggcacagaaaattcctggccactgcccagaaccctgct

SEQ ID NO: 301889 - DNA, 122 bp, Homo sapiens
aaatgcatttttatggacggcatattgctaactttccattaatcctaaacaaaatgaacacgtcaatgtgaagtacggtagggatcaccacagaaagtttagaaggaagagcagcagacaat

SEQ ID NO: 301890 - DNA, 122 bp, Homo sapiens
cctggggctcacctgagcctgcttgggacgtgtgtcacttggatagttctgcaagcgattcgcatgcaataggcagtaaatgccgacgtcatgaatgaatgaagagaatactacaaagagga

SEQ ID NO: 301891 - DNA, 122 bp, Homo sapiens
gtgcaagtgggttcttggatatgtgtagtgtgagcatgtgtgcatgtgtgagcctgtgcacgtgcatgttgtaggtgcataagcatgtacacgcgtgagcatgcatgtgtgtgtacacgtgt

SEQ ID NO: 301892 - DNA, 122 bp, Homo sapiens
aaacgctccttgtgcgctgtagctctgaggtggctgtcatggcccggacggcgggggaggcgaggatggttgtggggaggcgaggatggttgtggggaggagaggggagcgtcaggagggtg

SEQ ID NO: 301893 - DNA, 122 bp, Homo sapiens
gacggaggaaccgacaggggacttgacgctccgccactccgaccagccgccccttgtccccgccgtcctcgtccgccactgagatatcccccacggtctacccacccgtcggctcccacctg

SEQ ID NO: 301894 - DNA, 122 bp, Homo sapiens
ttcccacggggcagcgggtcacgtcacagaggaacgactacgcatgcgtgcaaggtcctccgcgcgcgactacgctcataaaaggaaaaaaaagcgtgtgcggttctcgacgtgccgccaat

SEQ ID NO: 301895 - DNA, 122 bp, Homo sapiens
cacgtttaaaggccagtgatgcgcatgcgcgttatggagaccggaagaggagctggtgtccgtgggtggtggagtcaaaccggcactcccccgcagacctcaaccaggtcgctagccccgca

SEQ ID NO: 301896 - DNA, 122 bp, Homo sapiens
tgtccctttttaacttccaaccctgccagatttgagtccagggctttctagaagtctccacggcatcgggtgaccatagcaactcatgccaaactctcgggcccacggctccgcctaccgct

SEQ ID NO: 301897 - DNA, 122 bp, Homo sapiens
tgctccttcggccaccgaaatacaactcagcgtttgccacaaaactgctgctttttaacccggccggatttccgtgggctgcgtgtgctgtggtcgccactgtgcctgtggatggtgaattt

SEQ ID NO: 301898 - DNA, 122 bp, Homo sapiens
ggcctgggccggggcggttgccgttggggccgagcagcgcagaggttctaggcgggtgggcgtccagggtccgaggttgggagactgagggggtccccctaactcgccagtgggagaggggc

SEQ ID NO: 301899 - DNA, 122 bp, Homo sapiens
atatcttcaggctctagagctccaaaggagtcagcatcctgacaatcgtagttttggactcgggatttaaaccagaacatctggttaccttccagatggctgcttggtgtggggacctgtaa

SEQ ID NO: 301900 - DNA, 122 bp, Homo sapiens
gtttgggctctggaatcaggtgggtccagagtcgatatttggctccaccatcaccagctgcgtgtctccaggcaagtgacttacccacccagagccccatctctgacatggggacaacatta

SEQ ID NO: 301901 - DNA, 122 bp, Homo sapiens
gcagagtgaactttcctatcagcaaaggcggtaggctttcgatcttgttgttggacaagtcgatggtcctgagattgctcgtcagcttctgcaagtctgcggggaactggagaaaggagttc

SEQ ID NO: 301902 - DNA, 122 bp, Homo sapiens
atatgatcaaaccaggtaaagtcactcacttgagggacagtcgtgggtcgccataaggggcgtagggtgaaatgtttagaataaactccttgggagggtaggagctccatttctgctgcact

SEQ ID NO: 301903 - DNA, 122 bp, Homo sapiens
cctgcctagagataccactgagtccagaagcaagacctgtgagagtgcacagtgccacttcgccccatggctgaagatggtttgcccaaaatttattctcatcctccaacagaaagcagtaa

SEQ ID NO: 301904 - DNA, 122 bp, Homo sapiens
tattgctgtgacaccgcggggacgctctgaagggacgagtgtcggtgtggcaccggtgcacgctgaaggagccggcggaaccgggtggccatggggatgtgggcatcgctggacgctttgtg

SEQ ID NO: 301905 - DNA, 122 bp, Homo sapiens
aagggggactccgacctgcagaaagctgtaagtggctggggaccaggggatgggaggcagcgactcggcccatttgatgtggtccatgtcccgcagtgcctggtggaggccgtgctggtgct

SEQ ID NO: 301906 - DNA, 122 bp, Homo sapiens
tgtgagctacgctacccgcctaggagagtctgagaggccagtctctcttggcagtgaggccgtctgtccggaaatagaggcgcacattgggagggaaatgctctctgtgtaccactcggtgc

SEQ ID NO: 301907 - DNA, 122 bp, Homo sapiens
ccaacgcctggacctccgatctcccaggtcccagtctggacagccccagccaggggggcacgatgagcacccgcctagaggcacaagttgctgactctttgtgccgtccccgagctgtgccc

SEQ ID NO: 301908 - DNA, 122 bp, Homo sapiens
cccatggccacgtacctgcccggtcggctttgagtgcatcccagacgttgcagttgaagtcgtcgtacccagcaaggaggaggcgcccgctcttggagaaggagacagaggtgatcccgcag

SEQ ID NO: 301909 - DNA, 122 bp, Homo sapiens
gcgcctctgaccttttcccggagctcttcaatcccagaagctatagcacaacggctgaatcgccaggacccccggggaggcgtggcttcaggaccggaagaagctcctgttgccaagggaac

SEQ ID NO: 301910 - DNA, 122 bp, Homo sapiens
agcttcactcctgaagccagcgagaccaggagtccactgggaggaacgaacaactccagacgcaccgccttaagaacttcaacactcactgcgaaggtctgcagcttcactcctgagccagc

SEQ ID NO: 301911 - DNA, 122 bp, Homo sapiens
cggcttcagggccccctttcagacacccaggtgctagggtggctttttttcttttcttttcgcccttagtccctgcgtgtcctagtgccaactacctccttcctttccaggcgggaagcacc

SEQ ID NO: 301912 - DNA, 122 bp, Homo sapiens
tcgccgccctggcggggacggtgcagcaggcggcgggatgcggcggggcggcagcctgagcgccccggatggcccgcggcggggcggcctgcaagagcgacgcgcggctgctgctggggcgg

SEQ ID NO: 301913 - DNA, 122 bp, Homo sapiens
caaaattagtgagtacgccaaaaagcttatattcattggtgtgctagagccagctcactgcgttctcccaagagctacgtgtctcttcccaccattttgggggggaagcgacaggctcactt

SEQ ID NO: 301914 - DNA, 122 bp, Homo sapiens
gagaggccatgcccctccccacggccttccccgaggtccactcagacgttggtgtgggaacgctggggataggactgggtttcggacaggaaagaaaagttttgaactggcccatggatttg

SEQ ID NO: 301915 - DNA, 122 bp, Homo sapiens
gtctttgtcctggaccgtggtggtggagtggttgtacagtccctgggccatgaggtgcagcgccaggccgttcttgatgcctgtggctttcttgatcttggcgcgcttgttctggaaccaga

SEQ ID NO: 301916 - DNA, 122 bp, Homo sapiens
ggatgtgacagccactggctgggcccggatcgcaggccaagggagggcagcacggagacgcgttagccgctgaccgcggccacgtccacagagttacctgtaaatacacgtccggaccattt

SEQ ID NO: 301917 - DNA, 122 bp, Homo sapiens
atgctctggggaagcatgctgagctcaagacaattctcttccaggcgaagaattttaaggcgtggacagcaagatatcttcactgagatctgagatatctattgaaaaaccacaaaagaata

SEQ ID NO: 301918 - DNA, 122 bp, Homo sapiens
gcagagtcctagctcaggcttccagaagtcagtggtttgaaggggtgcccacccttgctccgttgggacatagggacgcaggtgcctgtctcagcccccacatgtgcacccccaggggcagc

SEQ ID NO: 301919 - DNA, 122 bp, Homo sapiens
cgagacgcgggtgcggagccgggggcggaataactggttgcgcggcgctttgaccgtaggcgctggagcgcgtgcgttgcgtgcgcgcgcggaggcggctgcgtcggggcgcgagaaggtgc

SEQ ID NO: 301920 - DNA, 122 bp, Homo sapiens
cccaagccagtcaggcggcgtcggcccttcccggccgcctcgcccccgcccgcgccccgccgcccgccctcaggcccggctataccatcccgccacgaccgcagcagcttggcaattgctgg

SEQ ID NO: 301921 - DNA, 122 bp, Homo sapiens
agcagcacccacccacggggcctgtgggtaccggcagggatccccgtgcaggccacctcccgtatggcgtgcccaggagtgtccggaggctgcccccagctcatgtccacctctgcatctgc

SEQ ID NO: 301922 - DNA, 122 bp, Homo sapiens
gtctccagccgccggtagttggggaccctgtggctggagtgcgttttcaccaggaaggagcgcggcatgttcccctcccgggcggcaggccggggtgggctggggcgggaggggcgcgcctg

SEQ ID NO: 301923 - DNA, 122 bp, Homo sapiens
ctgcgccctctgcaaagggctgatttctacagtcgctaggacctgcagcggcgctgctcccgcggggctccggccgcgctgcatgtcccattatagtcgctagagggcagcgctctcctgcg

SEQ ID NO: 301924 - DNA, 122 bp, Homo sapiens
gacccatcaccactttcctgttcatcatcgctggtgtcatcaaacttaacagggcacttccgattcctttttgatcttcttgcggagaaacttctctccagcatttttaacccatgtttttt

SEQ ID NO: 301925 - DNA, 122 bp, Homo sapiens
gttcttttacatatacctttgtgcacattcctggaaatggaactattggataagaaggcacgtgcattttcacttttttttttgagatggagtctcgctctgttgcccaggctggagtgcag

SEQ ID NO: 301926 - DNA, 122 bp, Homo sapiens
tgcccgtcagtcctcatgtctacctgggcgaccccattttgaagatgcagaactgaggtccggagaggcctgggtagctgcctaagggtggggtagaagcatggtgccggctcagccaccct

SEQ ID NO: 301927 - DNA, 122 bp, Homo sapiens
cccgcaacctggcagttactagaggtcttggaatccagacttctttgctttcgccatcaccgtcatcaaagtgggaaatgcacacttactgttaaaacctagtgtagggccgggcgcggtgg

SEQ ID NO: 301928 - DNA, 122 bp, Homo sapiens
cgagtctggggccaggacagcgggggtaggacggagaagccggacgtgcccgtggggccgcggtgtccttgctcccgaggccccagagcgggcgaccgcactccgattccagagggccctgc

SEQ ID NO: 301929 - DNA, 122 bp, Homo sapiens
gaaattgctgtttgatggtgggtaataaaggcagccgtggtgaccgctctcctgagcagccgccaccgccaccatgctccccgttctgctgacggagggaaacgctgctgcctgtctgaggt

SEQ ID NO: 301930 - DNA, 122 bp, Homo sapiens
aatggcagctctgctaacttgtagctcatcatctggaacacatggcttctgagatactaccgaaggggaagagaggaatggagaatgactcactctggttcttaactctttgaaccagaagt

SEQ ID NO: 301931 - DNA, 122 bp, Homo sapiens
ggctccttttggccagggctacccagctctatttcagttccctgtatgcctgtttgccttcggaggcagtgacaaatttgctaggttgcgaggtttgcactggtcaataaaccagtccaaag

SEQ ID NO: 301932 - DNA, 122 bp, Homo sapiens
taggggaggccggcagagcctgcctgggggtcggtaaggacgctggctttggtctgacaccggcagggagggacagcgacgagggcaggagccgcggctctacctgggaacgcaggatcatc

SEQ ID NO: 301933 - DNA, 122 bp, Homo sapiens
attaaccactaaaggaggagtcgagggcatctggttgagccaaggctgctcggctgccgccgagaaggggcgcctgaaagggaccccagcgaagagaatctgagtcccctctgacacccgcc

SEQ ID NO: 301934 - DNA, 122 bp, Homo sapiens
acgtaccttaaactgctgcaaaagaggcgtttctcgtggtgtcttgtgggagtggcggtgcgatccctctcagacttgtgagtccctgctggagtcagaagttttaggcgaatcccaggcgc

SEQ ID NO: 301935 - DNA, 122 bp, Homo sapiens
acactttctcaaaaccagggaagattgctgggaatctcatgggagattgagagctgtggccgggcatatatgaagtaacttttgctagagtatatggtcagtcactgaaggatattttggaa

SEQ ID NO: 301936 - DNA, 122 bp, Homo sapiens
ggctctgggcggcctcagcattgtagtgtcacccgccgccggcttcccgcacagtcaggacgaccccgcgtccggtgacagccgtccgacccctctcagaaaaggaacttcccttaacattt

SEQ ID NO: 301937 - DNA, 122 bp, Homo sapiens
cacactacatacccgtacagcccacaagcacgcagccacacgcgggcacagtgggacacgcgtggtgtcccatgtcccatacaaggaatcccagacggacaccccccaccacacacacacac

SEQ ID NO: 301938 - DNA, 122 bp, Homo sapiens
ccccgcggagggttgacccttcaattcggagtcccggcctgtgggcgggcgggggagcgccgcggctgtaagccgaggatcaggcggcggcgcggagagcgcgcccgggcggccagcgccga

SEQ ID NO: 301939 - DNA, 122 bp, Homo sapiens
caccaacggcagtgccaaaatcagcccccacatcaaggtggtgttctctgtgctttctctcgtccttccaaagtcggttctggcctaacgcatgtcccaacaccttgggttcatttgcccgg

SEQ ID NO: 301940 - DNA, 122 bp, Homo sapiens
aaagaagcagcctagacccccgagtcatgaagcagacagcagtgggtgtagacacggtggcggtgggtgtagacacggtggaggtgggtgtagacacggtggaagtgggtgtagacacggtg

SEQ ID NO: 301941 - DNA, 122 bp, Homo sapiens
ttgtacggagcgctccggcccgagaggccctggcggaggcgcccggcccgctgagcggttcggagaagccagaccctgccccactccaggggagaggaaatttccactcccgccgctatctt

SEQ ID NO: 301942 - DNA, 122 bp, Homo sapiens
agttagaaccgcagagcctttcccgacccctcggaagcgcagaagtatccgaaatctacccgtttcttgggtccagcaaaacttttaagccaggtaaaccggtggttctgtttgtgtaaagg

SEQ ID NO: 301943 - DNA, 122 bp, Homo sapiens
cgactctgtccttctgctgcttattaaagtaacacagacgatgagtccagaacgcgaggacgcacagaaaagggggacggaatacagaaaagcagggtgtggctggtcctcccaggtgggga

SEQ ID NO: 301944 - DNA, 122 bp, Homo sapiens
ctcccctgccccgacttcccaaactctgtcctatgaataccactctgccaagaaatgctccgttcctgagaggggctggggaccctttgatgagcctctccggctctcaggtctctgccttt

SEQ ID NO: 301945 - DNA, 122 bp, Homo sapiens
ctgttcaccgagtgttggcggaactggatgatgagagtgagcctcctgagaacccgccaccggtccttatggagcccaggaagaaactccgtgtagacaaagccccactgactcccactggg

SEQ ID NO: 301946 - DNA, 122 bp, Homo sapiens
gcaggtccactcccgtgttccggtcgtggctttaacaattcatggggaaagaatgcgccccgattgggagagcccctggatcacgtcttcccaagctcagtccctgtctcttggagggagtc

SEQ ID NO: 301947 - DNA, 122 bp, Homo sapiens
gctgcgagcacgtggggttgacgggcgccgcgtggaggcagcgagcacaacggtggtcaccgccgccagggaaccgcccgctcgctggggtccaggcgttcggggccaaatgagaatgtctc

SEQ ID NO: 301948 - DNA, 122 bp, Homo sapiens
tgccgggatgcccaagtcaggtacttctcgcggggcagctcctgtgacccctgcagccagcgaaccagcacatccttggggctgaagccgcgtgccaggcacgtcagcgtcaccagctcgtt

SEQ ID NO: 301949 - DNA, 122 bp, Homo sapiens
gcagggccaggtttgggccgcgagggccgaggagcagcgaggtgcaggggctgcgagggccgagccgggcgctgagggtccggcagggggcgtggagggggcggggcccggagggggcgggg

SEQ ID NO: 301950 - DNA, 122 bp, Homo sapiens
ttcacagcttcctcctcgtctgggatggtgcccaaattgccagctggcaaaatgaataaccgtgatctcaaaccccagcctgatatagtcttgcttccgttgcccactgcctatgagctaga

SEQ ID NO: 301951 - DNA, 122 bp, Homo sapiens
tggagggagaggcgcaggcgggaaccggcgagttccgggtgggcatgggcttggggggcccggcactctagcggccccctggcccacaagccccgggcagtgaggggcttagcacctgggcc

SEQ ID NO: 301952 - DNA, 122 bp, Homo sapiens
gctgcgagaaggaaaggtgtgcagagagggcaggcagaggcagccagcagcaagggtggccggagagcccagctctagggccagatggttcaggcacagatcctggctctgccccttcctct

SEQ ID NO: 301953 - DNA, 122 bp, Homo sapiens
gtcccctccctcttcctaaggaaaaggccagggctctgctggagcaggcagcagagtggacgcacagtaacatgggcaacttgaagagcgtggcccaggagcctgggccaccctgcggcctg

SEQ ID NO: 301954 - DNA, 122 bp, Homo sapiens
caactttaaaaatgaagggcatgaacttcaccttagtttttagggcctaaataaatgcctcgataaatatttgaaggatggattacttgtgataaatcagtcaagttatcttctagaacaaa

SEQ ID NO: 301955 - DNA, 122 bp, Homo sapiens
ttctctggggtccccagagtgggggtgggggccgcttgtcagcccccgctgcagacccagcggctgcagctgccgctgaggggaatcagccattttaagcagcaagcatttgttcaggcgct

SEQ ID NO: 301956 - DNA, 122 bp, Homo sapiens
tctgagggaggagaggagagggaggaaacaaacattcagtccataacaagagagatgagccgagagccacaacttgagccccaggatgtggccacatttaggaagatgcaagaaggcgagtt

SEQ ID NO: 301957 - DNA, 122 bp, Homo sapiens
acggggaaccgaaggccccgccccgcgggaggtgccggccggccccttgggcgctacgcacgcgcacacaggccgaactctcctggcgggacactagcccgtccgcgccaaaacctagcggg

SEQ ID NO: 301958 - DNA, 122 bp, Homo sapiens
cagacactccttgggatcactcacagctcaatttttatggcatttgttttacaaatactgcgttactgtggaggaaagaagtggggacatgcacagcatatttattttttctatatccaaag

SEQ ID NO: 301959 - DNA, 122 bp, Homo sapiens
tcagccgcagacacttgggcctctttgttttggatggcaatgtcacaccgaatgcaaattcgaggaggttctttgctgaatgcaggacaggaggcctgtgcaggagacaatgggagtgaaga

SEQ ID NO: 301960 - DNA, 122 bp, Homo sapiens
ccatccgtagccctctcccccaacgtcgccctcccggggtccttgtctagtctcagcaggcggcaaacggaccccaggcgtctggcgctcacccaggagactgcccagcggtttctggagag

SEQ ID NO: 301961 - DNA, 122 bp, Homo sapiens
gcaggccgccagcaccacgtgctgcaggaaggctccatggcccatgtggaggcgctgggccgggccgctcagtcctccaagcgcccctagagccatgatcaggcccaggccacggcccctgg

SEQ ID NO: 301962 - DNA, 122 bp, Homo sapiens
ttaaggcaggcagaggaaagcagcggtgagatcacaggaaaggctggagcctcccaaggacgctttttccccctcagaatccaccagggctatccctgacgggctgtaatgccccactcttt

SEQ ID NO: 301963 - DNA, 122 bp, Homo sapiens
cccgggcgctcgagctcttcctagagtcgctgttgaagaaggcctgccaggtgacccagtcgcggaacgcgaagaccatgaccacatcccacctgtgagcggcgaggagccgggaggggccg

SEQ ID NO: 301964 - DNA, 122 bp, Homo sapiens
aggaggaaacccaagctcaggaaggtcacgtggtagccgtcgggatgagactggggccttcggagtgcctgttattcccagacggtttactaagtggtgatctatatacgtaatgtaactac

SEQ ID NO: 301965 - DNA, 122 bp, Homo sapiens
aagagtggtttcttctttaaaatgtcattttgtgtcttggggaaaaagaaaaaaatctgccgtggctctttcaccagtcaaagtaaatactgaagaaatactttgcttgtatccacagctct

SEQ ID NO: 301966 - DNA, 122 bp, Homo sapiens
cacgggtcacgggctgagaagacagactcaaagttagctcttcccacgacggcttgttcacgcagacctgagtccggaggcgctcgctgcacttggtataattcccactttcttgtcttttg

SEQ ID NO: 301967 - DNA, 122 bp, Homo sapiens
acgtgtgttaattaggctcttccaggttagcctaggagataggagggaaaaaacagagagcgcctcagcaggctgctgaggcctgaaaggaaggttattcacaggcaacctgggcgtggttt

SEQ ID NO: 301968 - DNA, 122 bp, Homo sapiens
gcttttctcactggatcgtaaactccatgaggacagggctttgtcgatttcactcaataccgttattttacaacatccctattgctgggatctcagtatgcactccttaaatatttgcagaa

SEQ ID NO: 301969 - DNA, 122 bp, Homo sapiens
cacccagggttctaggacacctcgagggcggacgtggtttggctctcggtccagctggaccgggctgggccaaccgggagtcagctcgaactcacctgcttggcaggtgcgcgcttcccgag

SEQ ID NO: 301970 - DNA, 122 bp, Homo sapiens
ttccccagcccaagcctcagcagcctcccacttccacctcccacttcactccacacagcccgttaggagaatgcaggcatctgagcccagcagtggagaaaacaaaagcccccagaccaccc

SEQ ID NO: 301971 - DNA, 122 bp, Homo sapiens
cagataagacccctagttaggcaaatagacagagttgcacttacttcaaggacgaagaagcgagcacttttctggggggcatcaggatttactttaatggtcctggccgttttgaacgcctg

SEQ ID NO: 301972 - DNA, 122 bp, Homo sapiens
agggcacagccgagctgccaggccaggcacaacttcttgatgaatagagaggtgtggagccgcccgtcgttcatgtcgattctctcagtcaatcaaaacgctgccacagcaggctttgggat

SEQ ID NO: 301973 - DNA, 122 bp, Homo sapiens
gtggcaggaaagcttcatatcccaagcttaggacatgcagctgagaagatcccatgcaggcgtgaataggcaggcccatctcatgagggacaaagagggctaattgctcacggacctcactt

SEQ ID NO: 301974 - DNA, 122 bp, Homo sapiens
agagagagagctgcgtgctgctccagcccagcgggattccgggggatccgcctgggctaccgcgtcccaagagtgtcgcctcctgcccatcaccccgctagagggaaaggacggcggcgcga

SEQ ID NO: 301975 - DNA, 122 bp, Homo sapiens
tcgtgaggccccgctctctggctgtagttgtgcaggtggactacaaagcccgagatgcatcgcggcccctcctccgaggcccctcagcttccgcagatcgcctcagagtggtcccagcgaga

SEQ ID NO: 301976 - DNA, 122 bp, Homo sapiens
ctcgggagaggaaacggggaagaattgaagggggcggaaagagatggacaagagaggactcgttgggtgggttgcgtctgaatactagtgtagcttcttatggccgtgtaggactgcgtgta

SEQ ID NO: 301977 - DNA, 122 bp, Homo sapiens
agaggagagactttgacaaaaagcccatcaaaaaagcagctgggggcccccgaccctggccgcactaccattctccacttttggcctttgcatctgccaccttcaggttaccaaatggcatc

SEQ ID NO: 301978 - DNA, 122 bp, Homo sapiens
cagggcggctggaagagctgccatcgctggcacctgggcaccgtgcgagaggcctactgacgtgagtaacgaggcgcagtccactctcgcctctaatgggaagccacgaacagcccggacac

SEQ ID NO: 301979 - DNA, 122 bp, Homo sapiens
ccgtgttggggagccctgtgagtggcctggactgggcacagcatggccaagagcaggggacggaagggcagagagggccaggggctgtatgcactttctccctgagcccctcctgccccccc

SEQ ID NO: 301980 - DNA, 122 bp, Homo sapiens
tggggccggggactcagccccggcccctgggcacccagccatgtttgagaggcttccctccgcctgaccagaatcagagctgtgggtccatgaattgagtcacttcaaggtcttgctgcttc

SEQ ID NO: 301981 - DNA, 122 bp, Homo sapiens
caggcgtggtggttcatgcctgtaatcctagcactttgggaggtcgaggtgggtggatcacgaggtcaggagttcatcaagagaagcccggccaagatgctgaaaccctatctctactaaaa

SEQ ID NO: 301982 - DNA, 122 bp, Homo sapiens
cccgcctcggtctcttcttgtgcaccgctggcccgtccctcaggcctcctcgtccaatggcggagccgctgctctcgtcaccgcctcgcctccgctgctcgccatccccgccgctgcctggc

SEQ ID NO: 301983 - DNA, 122 bp, Homo sapiens
atgcgcaggagagcctctcaggctgccgccttcccctttcccccgccttcccctttcccccgccttgggcacggacagagcctgtaacactgaggagggctgtgtcactcactgccggtcag

SEQ ID NO: 301984 - DNA, 122 bp, Homo sapiens
tacataagactcttcgtaagtaatgaagagtctagaagcagagcaggttaaacaagcgcacgaataacccagtaaccataatacaggggagagtatgatgggcacaatgcgagcagaacaaa

SEQ ID NO: 301985 - DNA, 122 bp, Homo sapiens
ccctgcggggcaaggggggctggtggaatctggcggtccccagctgcccgtgtcccgggtcggtgcgctcggcgcacccgtggtgacagtgcccggcgtctgctcccacccgcccgcccgcc

SEQ ID NO: 301986 - DNA, 122 bp, Homo sapiens
aaatatgattatgtatagtattcgcatgattctagttaacttgtttcccttctgcctgctcggaccctctacctgccctacgaagggggcggagtgcgttcctgcctccccctgctcttccg

SEQ ID NO: 301987 - DNA, 122 bp, Homo sapiens
tgcagggatttcaaaacacttaacaaaaattgctctaagtaggccgggcacagtggctgacgcatgtaatcccagtactttaggaggccggggtgggcggatcacctgaggtcaggagttcg

SEQ ID NO: 301988 - DNA, 122 bp, Homo sapiens
cgaagtgtgtgggttgctagaaacccacccggctttgcttttgttgaatttgaagatccccgagatgcagctgatgcagtccgagagctagatggaaggtgatttaatgattacgctgataa

SEQ ID NO: 301989 - DNA, 122 bp, Homo sapiens
cagattcagggacacccccccccccaacagcgtggccaggctggctcaggcctccagattcggggacacccccccaccacagcgtggccaggctggctcaggcctccagattcggggacacc

SEQ ID NO: 301990 - DNA, 122 bp, Homo sapiens
ggaggggactctgcaaacaccgcctagagggtcccccagtttcccctgggagagtgggggcgccaaattgttgaggtggggattgctgttcccaatctgcagaggaggaaacaggttgcaag

SEQ ID NO: 301991 - DNA, 122 bp, Homo sapiens
cccggcagttcctgagtgggtgcgcaggcgcaagaggagcacaccgttgccattgcagaccgtcactccctgaggagcctgagagccggccgggtgctgggctcctggctatccctgtgatg

SEQ ID NO: 301992 - DNA, 122 bp, Homo sapiens
ggctcaggattctgaaccattgagatcagaaaccagatacttagccttctactgtagctacggaaccagattctggtgaatttgtccacaatcagccattggcctgtctggggagtttttgg

SEQ ID NO: 301993 - DNA, 122 bp, Homo sapiens
gccacaaaagagattcaactgcagctcccagggaaatacgaatgataacctgcagatgaacggctattccaaacccgaccaaaatcggtgtgtgggagctgtgtgtaaggatggggcgccag

SEQ ID NO: 301994 - DNA, 122 bp, Homo sapiens
aggttaaacaactaataacagacatttggagggagaaaaggtaataaagataaaagaaatcgaaatggaaaagagataaacaaatactaggtttggagctgtgtgagttcctaaatgtctat

SEQ ID NO: 301995 - DNA, 122 bp, Homo sapiens
aagggctaaaaattcagaagccaagtttctgatgccagctctgttcctcaaatgctgggccgcactggtggagtgccctctagtctgaactccacagctgcttcattgatacccctcccacg

SEQ ID NO: 301996 - DNA, 122 bp, Homo sapiens
ttgagtcagcaggaagatggattggacgatatagacctggcaaagcctgcaagggtactgcggaggggaagatagatgccaaaccagttcacaacacacagcgggaacattaggaatgccgt

SEQ ID NO: 301997 - DNA, 122 bp, Homo sapiens
ggcccgctttggggtccaggcaggttttggggcctcctgtctggtgggaggaggccgcagcgcagcaccctgctcgtcacttgggatggagaccggctttcccgcaatcatgtaccctggat

SEQ ID NO: 301998 - DNA, 122 bp, Homo sapiens
caaagtgtggtttaaaaaaatcatttatgaagctaatgtttgcagcttcaggaaactgggcgacagagaaaaaaaattatttactggagaaagatggagataagtatcagcagagcatccca

SEQ ID NO: 301999 - DNA, 122 bp, Homo sapiens
gggagagagcaggagagtttccacaggattcagagagagtttgtccgtatcttaactatccgagatcttctttccaaatccttctcaatttatttctgtgaagatatatttatacctattcc

SEQ ID NO: 302000 - DNA, 122 bp, Homo sapiens
ttccattatgttgatgtaatctgtaaccacagttttctctaacgggtacagctaagatcacgtctaaggtaacttggtataatttgtttatttttttttcagggggaatcaatggagattca

SEQ ID NO: 302001 - DNA, 122 bp, Homo sapiens
ttgcttcaagacttacatcatgtctgctaacagcccattggccaaaacaacttacagggacggctaagcccaggtcaagaggcaggacagcacactctacttactatgagaccaaaacaagt

SEQ ID NO: 302002 - DNA, 122 bp, Homo sapiens
gggcaaagcccccgtgttcgcggcgcccagggtccggggcggcgccggcacgcgcgcgggcggggcctggcgctcctccccggtcccgcccactgagcgtgcaaaccgcagccgcccgccca

SEQ ID NO: 302003 - DNA, 122 bp, Homo sapiens
cccttctcaccaacgctgaggagcactgcaaccatctgcaccgtggccgccccttctcaccgatgatgaggaacattgagactgtctgccccgtggctgccccttctcaccgatgctgagga

SEQ ID NO: 302004 - DNA, 122 bp, Homo sapiens
ctgcttggaaaacaccaggcttgctcatataaggagcgtgggccaggcctgagtattcagcgatggcatttgcatggtggccctgtctcatcttggctctgctctccagcttggcagcctct

SEQ ID NO: 302005 - DNA, 122 bp, Homo sapiens
agcgagaaaaacgacaatagcctggatgtaaaaagctcccccctgctcccggttccctctcggtagctcgttttggccaatgtctgaatccacctgggtagcgcctgatatgtatttaccag

SEQ ID NO: 302006 - DNA, 122 bp, Homo sapiens
cccacactttgtccctctggctgtgacgcagctcttcccccaacggcgcacacgcttctgcggtgaccaagtccacttccaaaccccctgcaggtttgctcgcttggctaggacggtggctc

SEQ ID NO: 302007 - DNA, 122 bp, Homo sapiens
atgctgtctttttacaatctattcttaaattagtcattattttggaagcaaagtagttaccggggtgattttgaagaggagtctcagtatgcttaatggaaagtttgcccttataagatgac

SEQ ID NO: 302008 - DNA, 122 bp, Homo sapiens
taggccggggggtggggggggcggtgcggaactagaggtcacgtgacgccgcgcgggctgcgcgggcagtggtgggaaggctggcgcgaggcgtgaggtggcgtgaggcgaagctggaatct

SEQ ID NO: 302009 - DNA, 122 bp, Homo sapiens
ttcttctcactgctgccctcaatggacatgagcagccttctctgggtcacgtaattcacacgaacatgcatacatattttatgaagtaacttctgcttttataaaagcaaagcaaaacataa

SEQ ID NO: 302010 - DNA, 122 bp, Homo sapiens
ctccttctggccctggttgggtccgcccgcagcgagggcgtgcagacctgcgaagaagttcggaaacttttccagtggcggctgctgggagctgtcagggggctgccggattcgccgcgggc

SEQ ID NO: 302011 - DNA, 122 bp, Homo sapiens
gcttgagttttcctgtgttttctaggaagatgtggacaaggcagtgaaggccgcccgggccgccttccagctgggctcaccttggcgccgcatggacgcatcacacaggggccggctgctga

SEQ ID NO: 302012 - DNA, 122 bp, Homo sapiens
ctaaaattgttgaggatactaatgggaaacacggccagttcagagcagccacgctaggcgcgaggcacaaaaacaccagttctgagtcagttacaaaaggtggaatgtgtcaggcctactgg

SEQ ID NO: 302013 - DNA, 122 bp, Homo sapiens
aggcacgggggcccgcccccgccgcagcgcgccgacacggctcgtcgggcctcggcctcacgcagtcctacgtgcagccccggctgcggacaagttcctccactcttgctgttcccccactc

SEQ ID NO: 302014 - DNA, 122 bp, Homo sapiens
agacgcaaagtcagttgctcagtgttgctctgactccgatccaaccaaccctcaaagattcgcaccgcgcggcacgcacccagcaggttccagcgtaaaagctgctccggtcccaagcgcgt

SEQ ID NO: 302015 - DNA, 122 bp, Homo sapiens
gagaaagtatcttgtctttctctacctcagattctgaaagtcaaatgttcatcttgtggtcgtggtgttcagtacgagagtgaatagtcataagttaattccctttgacacacttgaagaaa

SEQ ID NO: 302016 - DNA, 122 bp, Homo sapiens
gcatctagaatcacatgaaacttgagatgggttgatctcctgtcttgaggcccagctgggcgggtatgccagccaaggagagggctggggcgccgggggtgactctcgggaggtgaagcaca

SEQ ID NO: 302017 - DNA, 122 bp, Homo sapiens
ggtactaacctgagagtagaattgccgggtgagaaggtataggcggtcaactctgcaaatcgtgccaatggctttccaaagcggcggcacagtccaggttcccagcaacaggaaacggcagg

SEQ ID NO: 302018 - DNA, 122 bp, Homo sapiens
acaagtcccagcatccaccgcgcggcccaggactgtcagggtagtgggcgttgcgtgaggcgggtaaatgttcgcggaagcggcaaagacgacacggccttgtgggatggcggagtttaagg

SEQ ID NO: 302019 - DNA, 122 bp, Homo sapiens
agcttcactcctgaagccagcgagaccacgagcccaccgggaggaaggaacaactccagacgcgctacattaggagctctaacactaacagcgaaagtctgcagcttcactcctgagctagc

SEQ ID NO: 302020 - DNA, 122 bp, Homo sapiens
gctcgctcgataccgttaggccccgccctccccaaagtcccgccccgcccccgtcacgtgcgctgggcacttccctgctgcctgtaaatatttgtttaatccccagttcgcctggagccctc

SEQ ID NO: 302021 - DNA, 122 bp, Homo sapiens
gagggcggagggaaggtgtgcagagctcgggggtctcccaggacgcagcttggctcctaccggtttccaaggcatctgcaagctctgtcctgcgacctaaagcatggggacgtcccttccag

SEQ ID NO: 302022 - DNA, 122 bp, Homo sapiens
ttttctttctttctcagggaggggctttctatttcatggagcatgtggcagctgagtgttcgacttggaattacttctggcaacaagtcctggatcctgcctggcaccttctgtttgatggg

SEQ ID NO: 302023 - DNA, 122 bp, Homo sapiens
ccaggagtagcttcccgccccgctgccgagcctcggaggtctccgcagttctggggcccgcgaccccgacagcgcgcggaggccccgcccctctagggcccgctcctcccctgcccggcctc

SEQ ID NO: 302024 - DNA, 122 bp, Homo sapiens
ggaggactaggcagcagccggctgcagtctccagtcccggaacaataagcagcaggcggtcggcggagactctccctcattgtctgccgcggacctgcccccgtcccgccccttctgcctta

SEQ ID NO: 302025 - DNA, 122 bp, Homo sapiens
gagcggtcggcctgccgggcgcccgtcctcgccgcctcttccttcctcctgtcgcccgcccgccgccgccgagattcgcaatccccgccaagtcgggccagcaccccttgattggccacacg

SEQ ID NO: 302026 - DNA, 122 bp, Homo sapiens
ctcacccgatagtctgaggatagccagaccccccaaacaaggcttgaataactctccacccgtgaaagaattcaaggagagctctgcagccgaggccttccggtgccgcagcatcagtgtgt

SEQ ID NO: 302027 - DNA, 122 bp, Homo sapiens
acgcatttattgttggataattaaaaaaaaaaaaacccacccaagttacttacaagctggcgttgagcactccctggtattgtaatagagtcggtggaaatgtttgctgcattctggtgaaa

SEQ ID NO: 302028 - DNA, 122 bp, Homo sapiens
tttcgtgagtaggtcaactatattgcttgagaaaaaaaagtggactttctgcagaaaacccgagataattaagaaattaggatcttaatggaaggttccatgaaattttttttgtggtaaat

SEQ ID NO: 302029 - DNA, 122 bp, Homo sapiens
cggcgaggggcgggaggggccgaagacccgaggactgctgcgaggccgggttgggtaacccgagaggagggttgggtaacctgagatcagcgagggtgggaccttagagctagccgagaccc

SEQ ID NO: 302030 - DNA, 122 bp, Homo sapiens
ggctgggcctaggtgtgcgtgggggcggtgctggtctgctttgctgggagccatggacaccggaggaacagggccccatcagtgcggtcagagtgcaaactcggagcgtccttctctggaaa

SEQ ID NO: 302031 - DNA, 122 bp, Homo sapiens
gtatcagatacaaaagctttgctattagcttcatttcaccaatagccaaaggacacctggcgaagatcaggaatttcggatgaatgctcaaagatcataatgtatttaagaatgattcctag

SEQ ID NO: 302032 - DNA, 122 bp, Homo sapiens
aagaatgaatgaaagaaacgcacttggtttctgggaccaatgaccttagcctagaactgccgggacggtccaggaacgcaaaaatgtagagatgtgggagccaggggcgtagtgatgcaagg

SEQ ID NO: 302033 - DNA, 122 bp, Homo sapiens
cccgatgctccgctggaggggcaggcggcaggctaccttgctctccccaacccctgcaaacgcgctttccagggagcagcgcgcgggacccctgcgccacggctgggtggggcaggcgtcct

SEQ ID NO: 302034 - DNA, 122 bp, Homo sapiens
ctcccctcgcgcccgcggccgctgcgcggaggtctgcggagggcgcctggctcggtcggtcgctccttccttggcgggccctcgccgacccacggtgctcagccagccccattcttggcatt

SEQ ID NO: 302035 - DNA, 122 bp, Homo sapiens
caaaactgctctgattagatctttcactggatttccttatccaactggctgatttagaatcgtgtgagaacacagcataactgcagagatactatctcgtcggcgggtggggactgctggca

SEQ ID NO: 302036 - DNA, 122 bp, Homo sapiens
tgattggtttgctggctgcctcgggagaccctgttgccaggatacttggcgttcccgacccgacccccgttccccattggctgtcagggcaaaagccgccatctaatgaggagcgaggtgcg

SEQ ID NO: 302037 - DNA, 122 bp, Homo sapiens
catgtcccatttctttcttccataatcagctcctgatcccccacttccgctacaccatggcgatcaacacgctggcccagagtagtcttgtctccgaatggggaatttttgacctggtatgg

SEQ ID NO: 302038 - DNA, 122 bp, Homo sapiens
gcatttttactttatcgcggagcagaagcctgaataatggccccgtagtgatgaccgctgcggagccgggtgggcagttttctgtgggctgtgtgccagcgtccctggtagctttccaggtt

SEQ ID NO: 302039 - DNA, 122 bp, Homo sapiens
ctagccttgcacatgtcggccaaggcaggctgctgaaatgttgagtctgaacagtgagtccgtgaaagaaagggttcctgtccctgacagcttatctttaagttcaaggttttcacctaatt

SEQ ID NO: 302040 - DNA, 122 bp, Homo sapiens
tgagcaggcaatgacttcacaaaaggatttctcaaaggttagtcctgcaacagaagacagcgtggattggactggaagagtgggagggcaggtggagaaggcattgtgctgcaagtggggag

SEQ ID NO: 302041 - DNA, 122 bp, Homo sapiens
aggtaggatttttcgttcacgatgaaggcaaggagagggagggccagctaggtccgcggtcggaggagtgtctataaatagaaggtgaagtgttctaataccgacagggtgcgtcatagcgt

SEQ ID NO: 302042 - DNA, 122 bp, Homo sapiens
accttgtgatctgcccgcctcagcctcccaaagtggtgggattacaagcgtgagcaaccgcgtccggtcgaagctagatatttttatcttgcatgtagaaattcttcagcttaaaaaaaaaa

SEQ ID NO: 302043 - DNA, 122 bp, Homo sapiens
gcggcagttttggaaattctcgttttcctttttcttccccagcttttcttaattctgtaacgctggctttccctggaatccatctgtgtctctggtttcctcctggtccgcctgtctgtgac

SEQ ID NO: 302044 - DNA, 122 bp, Homo sapiens
ttcccgtgcgtcccggggctcctgggcctgtgcgtcccggggctcccgggcccgcgcggccgcggcagcagcagaccgcacacccccgcccaccgtcttggtgcatcccggcgctacggcgt

SEQ ID NO: 302045 - DNA, 122 bp, Homo sapiens
aggcctaaccattaagaaggaaactcaagggccagaacagggtaacagggaggagagctgcgaagggagagagaaatcaaatatcgccctctagaggagagagagcagtccacccttccaga

SEQ ID NO: 302046 - DNA, 122 bp, Homo sapiens
aacaacaagcacatccccttacaatcctgaggcacaccctgactcaagcctccgccccagcgccccgctgacaccggcaactgctgcgcgggtccctggtcacccctcttcagctcccggcc

SEQ ID NO: 302047 - DNA, 122 bp, Homo sapiens
gtttaggggtaaataacagtaaataattaataataataataataataataaaggagctgacgttcttagccttgtgtggttcttttaatgaggaactaaatgtaataccacctagatataca

SEQ ID NO: 302048 - DNA, 122 bp, Homo sapiens
gtccttgagcagtggagcctccggagggaaaggagtggatgcaaacccggttgagacatacgacagtggggatgaatgggacattggagtagggaatctcatcattgacctggacgccgatc

SEQ ID NO: 302049 - DNA, 122 bp, Homo sapiens
agtgaacaaactctgctacctagttgtattctgctattttggcttccttcttttttcctgcgctgttcctgattttagttgaggattaaacatgggctctgcaaacaggccctaaggctgtg

SEQ ID NO: 302050 - DNA, 122 bp, Homo sapiens
gcggcaggagggcgggcggggggcagggctccgggggactgggcgggccatggcggaggacggcgaggaggcggagttccacttcgcggcgctctatataagtgggcagtggccgcgactgc

SEQ ID NO: 302051 - DNA, 122 bp, Homo sapiens
tccacacacacacggacaccgcggagagtccacacacggacaccgcggagagtccacacacggacaccgcggagagtccacacacacgtaagaagagcagagtcaaggcggggctgagggta

SEQ ID NO: 302052 - DNA, 122 bp, Homo sapiens
agcagccaggcctggagtgcctagctgtgtatactgtaactgtcatctaccactcaaacacgggtcctgtggaccagagagtcagtcactgtaaccacaaaaatgtcatcaacacagggtta

SEQ ID NO: 302053 - DNA, 122 bp, Homo sapiens
acgtccaaccgcttcccctccctcgtagaactctcccacccgccgccggccccaatatggcgtcaataacaacgccgccgattcaaatccggcggcctcagagcgcttgcgcacgggggcgg

SEQ ID NO: 302054 - DNA, 122 bp, Homo sapiens
acatagattagggaaatattttaggtttggtgtgagggtccagtttaagactatctgaggcggttttagaattaccatcagcatttggaggttcctggaggcccctatgatctgatacaagc

SEQ ID NO: 302055 - DNA, 122 bp, Homo sapiens
cgcgcttaaacagcgcgaagtcgcccagcgcccgctggcgcaccacggcaggagcaaagccgcgcagcagcacccgcagcgccccctcgccatgcgtgcccagctcctccggcgcctgcggg

SEQ ID NO: 302056 - DNA, 122 bp, Homo sapiens
ctaaaaggccactgtgcaggtcagaaaacacaggaagctgggagagccacgctcagaaaccgggcctctgccagggaggctgttcacccagagaagcacagtgaaagtaggccctgtggcag

SEQ ID NO: 302057 - DNA, 122 bp, Homo sapiens
gcgcgagcggagaggcactcggcgcgcccggaggcgagctgccaactgaaccaaaaatgccgctgccgggagttgctcgcctagctgcgcagcagagatgtccaaaccctccacgcgggagg

SEQ ID NO: 302058 - DNA, 122 bp, Homo sapiens
taaaccttctttccagatggaaaattctcctaaagagaatctgccactccttgcctctttcgcttgtccctttctctgccaccagcacagactgtcattctgtcccctcactcagacaggca

SEQ ID NO: 302059 - DNA, 122 bp, Homo sapiens
taaggttcacctaagggagtgccagggccgggtaaggttcacctaagggagtgccagggccgggtaaggttcacctaagggagtgccaaggccaagactacttttgtacaatatgcacagaa

SEQ ID NO: 302060 - DNA, 122 bp, Homo sapiens
aagagggaacagcggggccagggtggcgcccaggactcggggcttaggctttggggggtgcgcggtgtcgcgtgcagacccactggtgtgaaaacgcccccagccgccagcctcccggcctc

SEQ ID NO: 302061 - DNA, 122 bp, Homo sapiens
tttgactactaatttttgtgcattcattactattgagtttcataatacctggcttgcctccgcccacggcctccggaaagcataaatgtccaggctaatgggagtgctgaaggctctgcctc

SEQ ID NO: 302062 - DNA, 122 bp, Homo sapiens
ctttgtcccacatcctttcaatccgctcctctaagcgcggtcctgagctttggtcccagacgcgcagaaggaagcggcctgaatcttacccagtcctcgacgcgcccagcgtcttgactgca

SEQ ID NO: 302063 - DNA, 122 bp, Homo sapiens
ctgtgaccaatttttccaagatccaaatgctttacttttatattaacttaagcaatcagacggcattccaatcttagcaatgaaatttagtcgtattagtctccggttagatttaactggtt

SEQ ID NO: 302064 - DNA, 122 bp, Homo sapiens
gatcacagacccttaacccctgacctcatctcaggtgcctccctctcccgagcaactctgcgcggagtctccgcagtcgtcgcccccatgccaaggttgcttggacaaggagggcggaggag

SEQ ID NO: 302065 - DNA, 122 bp, Homo sapiens
ccagaggcaggtctgatgaaggggaagcagacgtgaaggaggcagtgcccttggagactgcgtggggttcaagaagtgtggggataaggcttcccccagagcatgggccacagcagtggtgt

SEQ ID NO: 302066 - DNA, 122 bp, Homo sapiens
tccccgcccagagaaagcccaccctccgccctgggcccgggtccctctgcctgtcccgcccgcctcctcttggaatccgctgcccgccaaggacaacagcgccccagccccgcaccggccgc

SEQ ID NO: 302067 - DNA, 122 bp, Homo sapiens
tttctctttccagaggtgagcagtgtgggctccccgtgggttggccttgctgcctggcctcggggagccacgggcagcccttccatggcaaaggcaagatgtgggagaaagaagtctggtgc

SEQ ID NO: 302068 - DNA, 122 bp, Homo sapiens
aggtcccttctagctgtggcctgggtgctgaaggggtttccccccagtggggtggccagccgatctaggattccagccgccttgcacaaagctggaagacgaggggctgcagggtgcatggc

SEQ ID NO: 302069 - DNA, 122 bp, Homo sapiens
cctgggccctggtggggcggctgccgaggtgggtcccctgcccaaggcactgagggaagccgccccagttgacctcctggccgctttcgacgggcacgcccgggaacttgcagcagcgcggt

SEQ ID NO: 302070 - DNA, 122 bp, Homo sapiens
gcaccttttccttctcctcacagctgaggggcttcccgggaggctcgtccatcgggcaggcgacagaacgaaaagagcagccgtcgccgaccccaggcctgccgacaccgggacccagttgg

SEQ ID NO: 302071 - DNA, 122 bp, Homo sapiens
accacacaccgagaaggatggtgaggacgtaataggagccggcagcgagtctcccggagccggtggtgtggaggaggtgggtgagccagaaggcaaatatcatcagcatcagacgcgggaca

SEQ ID NO: 302072 - DNA, 122 bp, Homo sapiens
atccccacgcgggaggggaccggagacgaggacaagttcgcggaaactgcccgtgcgtgtcggggagagatgcgagtgcaggagcgcccagccgtaaagcacacccccgcccgcccccgcgc

SEQ ID NO: 302073 - DNA, 122 bp, Homo sapiens
attcagagtgcagaagccaaacacaagcatcccaggaaatgtggggagtgaaagtctgggcgtggctttcgcaagttcctaaaccacagagctcagtacagctgccaggaaaaaaagaaaaa

SEQ ID NO: 302074 - DNA, 122 bp, Homo sapiens
taagaccaggagttctagaccagcctgggaaacacagggaaagcccccgtctctataacgcgcctgtgatcccctgaggcaaggagtttgagaccagcctgacccggtctctacaattaaaa

SEQ ID NO: 302075 - DNA, 122 bp, Homo sapiens
tggcctccctcgaggttataccctcgcttaggttaggttgcttctaacagacatcctccgcgggcgttgaggcagccagcttcactgtcacccagacaatttttctctcgctctgccaaccc

SEQ ID NO: 302076 - DNA, 122 bp, Homo sapiens
acattttgccccatccaagtgtctactggaccctgcagaataattagtttattcctttgccgggaaattcttatttcattcttcatcctgtctcccgatgagtcaaatcaatgcttattcaa

SEQ ID NO: 302077 - DNA, 122 bp, Homo sapiens
cttccacacgccacacccgtgatcacagacacacgagcgtagtcacatgaggagaccactcgtgttcctcatggaaagcgcctgcccccaactttccaattttccatcgaattcaccgaatg

SEQ ID NO: 302078 - DNA, 122 bp, Homo sapiens
ccgcgcccggccacgtatatcttttttggagaaatatctattaaaatcctttgccttggccggatgtggtggctcatgcctgtaatcccagctacttgggagactgaggcaggagaatcatt

SEQ ID NO: 302079 - DNA, 122 bp, Homo sapiens
tgcctgtgaacagaagggccggcagtcttgggggcccgtgcagagcccggcgggagacgccgccttttccatgggaaactgctgggaatgtttctctaccacgggaatgtttctctaccacg

SEQ ID NO: 302080 - DNA, 122 bp, Homo sapiens
cgaagccccacccatagagcgaggttcggaagtccagtctcattagcatcccttgtcttccgcggtgttgcagacttatcctcagctcaagcgagtttggggcgttatggagccagccaagt

SEQ ID NO: 302081 - DNA, 122 bp, Homo sapiens
caacacctagtagccactgtaaggacaaatgcaacttaaaaacaagaggcttaattctcccggttgaaaatgggggaagaggtttccctccctctcttattctcagagcatttaccttagaa

SEQ ID NO: 302082 - DNA, 122 bp, Homo sapiens
ttgtttaaagccctgctatacagcctttttcaacttctctatgaactacatatgaagatacggaaaaatgcccctaaaaagtatgagttgataccacaacaaaataaatactagttgaatct

SEQ ID NO: 302083 - DNA, 122 bp, Homo sapiens
atagagaactatctgcagtatttgtgagtggatattcttttgattagtctactgagtgtacgacaagaaaagcacagaatgaccgagagatattggtcaaaggcagggttcaagcttcaatg

SEQ ID NO: 302084 - DNA, 122 bp, Homo sapiens
tcttcctcgcatgtcaatgtgtgcgtgtcatcagttgttcgaggaagctcgcgcatgacgcgacacttgccgtctgggctctccaggttcggcctgctgctttcacagcccagatcttcggc

SEQ ID NO: 302085 - DNA, 122 bp, Homo sapiens
gtagagccacctctgtcgggcagggtgggccgctgccgcagcctgagcaccaagaggggccggggaggcggagaggctgcccaatcccctgggcctctgccccagagcaagccggatggagg

SEQ ID NO: 302086 - DNA, 122 bp, Homo sapiens
ggcactgggtgtactgtgttgggtggtttctacatttaaagataagctagtgtgcttggacgtgtgggaaatgcatgtaacatttgcaataagggagattgggtgctgtgagaataatgggg

SEQ ID NO: 302087 - DNA, 122 bp, Homo sapiens
gaaggaatgaggtgttcctggtccactggcaacaaaactgtgctggcaaaggcactttggcggggtggcagtgggtcagtgagggtccttgtgctcacatacgtgctggtcgtggggtagtg

SEQ ID NO: 302088 - DNA, 122 bp, Homo sapiens
cctcaaatcaaggtctcaggtaaccctggcaatgggtcttcctgccagtagtaaagatggcgctgagagcacgagcgcactttcgcacacccccattacccacaatgcagcgggaataaggg

SEQ ID NO: 302089 - DNA, 122 bp, Homo sapiens
agagactggctctggtaaacttggactaagaaccattgtgtgagtgactgctaatggatacggtgtctttttgggtgaggaatgttctaaaagttgattgtagtgatggttgcacaactctg

SEQ ID NO: 302090 - DNA, 122 bp, Homo sapiens
ggggtgttgagggggcagagccctgaccacctgggaggcacaggagggccaacccctgcccggcctgggcagccttgacgctttggggcacaatttagctcaggttcaatttgaaatactgt

SEQ ID NO: 302091 - DNA, 122 bp, Homo sapiens
aaataaactgttattacctttcagaatcttcagattgattggtgaacattaccagtttatcgtcgtgtttctcatttttgttcatgagccatccacatggaatctaaaataaaaaaatatga

SEQ ID NO: 302092 - DNA, 122 bp, Homo sapiens
ggtgcaggggcggagtaccttcttcaatggacaggaactggcaaagagtttcaaaatagccgagtgcgctcccccacgccctggggggtcccgggcgctaggaccagggctccccggagaga

SEQ ID NO: 302093 - DNA, 122 bp, Homo sapiens
ctcccccggggctgcctgggcgctgggactggcatgatcagctgaactttgtggggtcagcgcttctctctggcttcccctcagcggcgccaaggcgaggggagcgcagaaccccggctcag

SEQ ID NO: 302094 - DNA, 122 bp, Homo sapiens
gccctgcttatggtgctggttttcctgctcgtggtctcctactggctcttctatggtgtgcgcatcctggatgctcgggagcgcagctaccagggcgtggtgcagttcgccgtgtcgctggt

SEQ ID NO: 302095 - DNA, 122 bp, Homo sapiens
aaggggcgagccaggggtaaggggcgaccggcgggacgcacagggtggccgtgaggctatcggagtgacggacaatggccagggcttctctggctcagcagggaggggcggaagtgccaaga

SEQ ID NO: 302096 - DNA, 122 bp, Homo sapiens
ctgcagtggatgacctttaattgatgcagtttataggtgctaagtattgtgtgtgctttacgttgcctcatgtgagtgcttcatagcagggtgtgacgctggccaagtgatatacctaccct

SEQ ID NO: 302097 - DNA, 122 bp, Homo sapiens
gctcacaaggcgctcccagtgcggttggagtgtctccagtggagctggcagttgggaggacggaggcccggcccatagcgggtggctgttaggaggtatggataaaggacctgtgtatcttg

SEQ ID NO: 302098 - DNA, 122 bp, Homo sapiens
gcccactggagggctgagggcggataaccacgataactgaaaacactttcctgagcgtctcggggctgaggaagagggaggattacacgcagcccactggctttgcaacctcgtctgtagtg

SEQ ID NO: 302099 - DNA, 122 bp, Homo sapiens
acagggaggaaacagccggcgttgctgtagcgcgtctgggaattacaccgggggactggccggcccgcttcgtgcctgcgggaagtcgggccgggggactcttcggaaactccgagcctcag

SEQ ID NO: 302100 - DNA, 122 bp, Homo sapiens
ttcactggagggattcgatagcagaattgaccaggcagaaaaaagaattagtaaactcatcgatagggctttgaaattattgagaaagagaagaaaaaaacaacaaagaatgaagaaaaatg

SEQ ID NO: 302101 - DNA, 122 bp, Homo sapiens
ggtagggctgttcaagggagggtgggctggccttgccctgccctgcccagatgttgacaacgtcacccattcccgccaccagcagtcccctctgggagaaggccaggtgccctgctccatgg

SEQ ID NO: 302102 - DNA, 122 bp, Homo sapiens
aaagcagtgcagctctgggcaaggcagccaaagcctggagcttggcctcccatcctggggcggggtggcgggggagggccttgggtcatctctggggccatttggggcaggttcgaaaactc

SEQ ID NO: 302103 - DNA, 122 bp, Homo sapiens
ctacctgaccgctctgagcccatgtttcctcatttaaaaatgtggtggtagatcctgactcggagggcagttggttgctagatcacgtctatcagtgcccgacataagggatggcacacaga

SEQ ID NO: 302104 - DNA, 122 bp, Homo sapiens
tctttcttttcccccaagtttcttgtttttcttcttttcactctgcttactccctcccatcgcccgttcgctcaggatgtgaggggatgcttagaaattccacagcccacgccagccgccag

SEQ ID NO: 302105 - DNA, 122 bp, Homo sapiens
aggccaccgttgtggcaaggccctgaatgtatcagagcaaacacctctccctgagctccccgccctctggctccttgaggttctctggggtcccggggtctggctccacaaggttctagtct

SEQ ID NO: 302106 - DNA, 122 bp, Homo sapiens
ctggccaacatggcaaaaccccatctaaaaacacaaaaattatctgggcgaggtggcaggcgcctgtaggcccggctactcgggaggctgagacaggagaatcacttgaacccaggaggtgg

SEQ ID NO: 302107 - DNA, 122 bp, Homo sapiens
agtgttactgctgggtggagaaggtgtcgccgagcggaaaggcgccgtcctgcaccaggtcgggggagaggcgcggggaggtcgggaccgctgggttgggccggggcagggaataggcgcga

SEQ ID NO: 302108 - DNA, 122 bp, Homo sapiens
tgcgaggacggctggagttcagttttggacatattaatgctgagatgcctgttagacatccgggtaggcgtggaggaggtcgctggacctgcatgttcagacctgtatgcagatcagccgag

SEQ ID NO: 302109 - DNA, 122 bp, Homo sapiens
tcattttacatatcaacttggttggactatggtgcccagtttttgttcaaacacaagcctcggtgttactgtgaaggtgtttttttttttttttttttttttttttgatgcgattaacattt

SEQ ID NO: 302110 - DNA, 122 bp, Homo sapiens
cacgtggcccccaggagcacagcaggggggcgcccagcagaaagccatggcggccatggacggccagagatgagactggacgccgccgggcgctgggctggagctgggggcagcccagggtt

SEQ ID NO: 302111 - DNA, 122 bp, Homo sapiens
atgttcgctcctctcccttctataagtgaaactttgctccggctaggtctgagggtggggcgtgagaacaggcaaatcggccccttgcctttcctcattggtccagctcagccctgccggga

SEQ ID NO: 302112 - DNA, 122 bp, Homo sapiens
ggctgtcgcaaggatggggtcagccccctgatagggtggtgccacctctctgcggggagccgcaaagttgggacagtcaccgggggtataggtggagctggaggtgaaggtggaactgggca

SEQ ID NO: 302113 - DNA, 122 bp, Homo sapiens
ggtgcacaaaggtccacagcagcaccgttcctaacagccaagtaggaacaacccaacgtccgtcagctgatgaatggagaaatgaaacctgtgtacccatacaatggatatcattcagcctt

SEQ ID NO: 302114 - DNA, 122 bp, Homo sapiens
tccaaaagataattttataaaagaatactggcttttccatttccattcaaacaacaaaggcgtgggggtccctgagaagggtgggaggcacggccccctcctcctgccctgtccagtgtgag

SEQ ID NO: 302115 - DNA, 122 bp, Homo sapiens
ccaccagctacaagtccagccacctccccaaccatgctgtccttcagcaacaccacatcacgtgttactgcagtcactcagctcacaatgattcgtgactcatgagtcatacattagacagt

SEQ ID NO: 302116 - DNA, 122 bp, Homo sapiens
ataccagatgagacctctgaacaaacaatccctgctccccactctcaccatgcactggggcggctgaaacagatccagccacaggtgtgaccacatccttgctctgaatcatcaaggttttc

SEQ ID NO: 302117 - DNA, 122 bp, Homo sapiens
agaatcacctggagagttttagttctggccttaccagcagagagtctgatttaattagtccggggtgggagtcccagcttcagcattgtttagaaaactccacaagtgattctagtgtgcag

SEQ ID NO: 302118 - DNA, 122 bp, Homo sapiens
gcagctcgttcatctgggtgtagtcccggaccgtggtgcctcagagggacgccacattctcgataagtagtaccttgccccgcagggagcccaggctcacaggctccccgccggccagcggg

SEQ ID NO: 302119 - DNA, 122 bp, Homo sapiens
ggtggggagggaagcctggggatatgagcttagtgagggccacccgccgtgaagatgggccgcctcatcacagccgaggtggagagagcgctgagctgggagcccagacccctgtcagtgct

SEQ ID NO: 302120 - DNA, 122 bp, Homo sapiens
taggcaatacgtgagctaagctgaagaccatcaaagtgagctggccagcgcttgctacctcggcgtggctgaggcctcctcgctggctgcactaccgataatatgcacgaggtggcagcaac

SEQ ID NO: 302121 - DNA, 122 bp, Homo sapiens
ccacagggtgggagatcagccctgggcccaaccacctggacgggagcgcagcaccctcgccggggccccacacatccctggccagccaccagcctcctggaagatgcctgcctcccaaactc

SEQ ID NO: 302122 - DNA, 122 bp, Homo sapiens
gcggccgggggcgccatcccctcatgttctggagaaggcgcaaatgtgagctggcggtagcggggaaagccctccgcccccgccaggggggacccgggaagcccggccggctctgtcggcag

SEQ ID NO: 302123 - DNA, 122 bp, Homo sapiens
aaccactggggtaaaggaaagatctcagcttccacagggagagagaatagaataaagtctcgtagatctggattcagagtgccttcagacctctcaagaacagtcatgaaagctagaagcat

SEQ ID NO: 302124 - DNA, 122 bp, Homo sapiens
tcctgacggccccggcgctcccgccgccgaaccgtggcccggtgtcatccgcttcggtcgcggcaagtcctgcctcttccgcctgcagcctgctaccctgcactgccggctcctgcggaccc

SEQ ID NO: 302125 - DNA, 122 bp, Homo sapiens
atccaaagctgcagagaaaccgacttcggcgctgaacaggcggagagtgaaacttaaagacggaggtcacaggctccatgtggaacacggaatgataattagctcacaagaatgcaaggagc

SEQ ID NO: 302126 - DNA, 122 bp, Homo sapiens
agccacaggcagggaacaaggccacggccagcaactgagcagagcctgcctgccggtcaacgctggccatagagcctggcagtggcctcaggcagagtctgacgcgcacaaactttcaggcc

SEQ ID NO: 302127 - DNA, 122 bp, Homo sapiens
agaaatgctttttggttgatttaaaccagatgctccgactatttttgtcccgtttgcaggcgcagaagctctgcataaggcaatactgcccccctcggccgaccgccaactgcaaggcgtag

SEQ ID NO: 302128 - DNA, 122 bp, Homo sapiens
caaagaatggtcaagacagtttcaaatggcctctaacctggacctctcagaagagggggacgaacaggcaacagcctcgtggttctccagcctccaggtgatggactgggttggactggctc

SEQ ID NO: 302129 - DNA, 122 bp, Homo sapiens
gaggccgaagcgaagaggcctggtgggttgtctcaacatccttttgctgagaatcgaatacgcagccgatgaacagccaggaagggtgcaaggaaacctgaaatacaaatgttctccctgaa

SEQ ID NO: 302130 - DNA, 122 bp, Homo sapiens
acaaggctggggactcttacccacgttggccaaagtcaggtgcagccggcccttcaccaccgagtggacgccgatgggcttgacgcggccaaaccccagcatgtctccactcaccaccatgt

SEQ ID NO: 302131 - DNA, 122 bp, Homo sapiens
gtacctcagctgcagcagcaactgcagttccggggcgggacctccacgcacgtactcgtgcgcgctggggaggaagtcccgcccctatggcaaactcagctacctgattggctgcctcgcgg

SEQ ID NO: 302132 - DNA, 122 bp, Homo sapiens
gagggtttcacggggctatgacagtgcagaggggaggcaggcaggcttccaaactgggcgcgaggtgggctcctgctgagcgaggaggatgggaatctgtccctagatccaggcaaaagatt

SEQ ID NO: 302133 - DNA, 122 bp, Homo sapiens
cgagcctctgagccaggaagagacaagtctcgcaggagaggttttgctgtttgttttcctcgggcttgacttctaacgagagaatttaattaagagctcgattgcctcgcctggggaatagg

SEQ ID NO: 302134 - DNA, 122 bp, Homo sapiens
gacccgcgctgcctaggcaaagggacccggcgaccaagacacccccgcgagggcccagggcgcgtccctcccgccaggccccagactccggctctgcgccaccccctcctacgccccggcgc

SEQ ID NO: 302135 - DNA, 122 bp, Homo sapiens
gctgatcaaaccaaagccccgagcaggaggctggtgtccagggaggaagtcagggccggtcgggaactttgaaaggcatcttggaaatgagcagccttagaagtgtggggtttcctccattt

SEQ ID NO: 302136 - DNA, 122 bp, Homo sapiens
ggaagacatatttagaatagagcctctaagaggaaagaagaagaccatattgccaggtcccgcacaatcagtgactccccacaaagtgaaacagctctccagcaggggcaggttgaggcatg

SEQ ID NO: 302137 - DNA, 122 bp, Homo sapiens
tcactgacagttgagcccttcgggcagggcagcctagcggctcttgccttgggctccctgcgcaggcgcaatggcagtccagtcgtcctcaaatcaatcccgccagggcgctggacgtgaac

SEQ ID NO: 302138 - DNA, 122 bp, Homo sapiens
caccctcgcgggcagcgggtcggagtcggggcctcgggccggctgggggcggggcatgggcgcggcgcgcggggcccggaacgccgagacaatgcggcgcgcggcggccaggaacggctcgg

SEQ ID NO: 302139 - DNA, 122 bp, Homo sapiens
cccttccctgtcacactcacatcaaaggacaatgctagggacctccaagggaaatacttccgcaccccagaaccctgggagtcacatttccatctaggcagctgcaggggaatggaggaaat

SEQ ID NO: 302140 - DNA, 122 bp, Homo sapiens
ggcggccagcctcgaggtagggggttattatcttccgctgcccgccgccccctcccacgccggcccaggctgaagctgactctgcccgcaggcctccaaagacttcatatgctccagatctc

SEQ ID NO: 302141 - DNA, 122 bp, Homo sapiens
gttttgcttccttgtgtgttttgtcatttgaaggctgttgttatggtggattccttcacacggttcctgttgacctggaacactattagcttgggaccactgtcaactaaatcttgttttga

SEQ ID NO: 302142 - DNA, 122 bp, Homo sapiens
ctgggtgacatcaggttctccgtggggattttaatccaaatcagatatggccttgttttacgagggatcctcttgggtctcagggtgtgaggattcataataagtacacgtccatccagtac

SEQ ID NO: 302143 - DNA, 122 bp, Homo sapiens
ctcccagccccctccctgtccccacgtgggggtccctccttaccttgggctctggccgcgcggatctgatgcagagctagcagtgtccagatcaaaagcccccacatggtgaccagcctgga

SEQ ID NO: 302144 - DNA, 122 bp, Homo sapiens
ctccctaaaccctggaggcaattttccagcccagggtctttgcataaactccacccacaccgccccccccccgccccaacctggaacgctctactcctgacagtgtctggggctttctcatc

SEQ ID NO: 302145 - DNA, 122 bp, Homo sapiens
aacttcgcggccactgaccttgtcttcgcaggcggcgcgagagggggctgcagttgggcgcggcaagagcaattaccagtgttagggcgccgggctcccccctgcagcagagggagggagtg

SEQ ID NO: 302146 - DNA, 122 bp, Homo sapiens
agacaaatgtcgttatgaagagcatgaaatttatacagcacacactctcccctgatcactcgggactcctcctgcatttcaaggtcactgtgtgtgaaggaggctcacggtgaggctgcagc

SEQ ID NO: 302147 - DNA, 122 bp, Homo sapiens
caaagccacgagagaggtgggcgccgtcggccaggcgccctctcggtgcgcacacacgcgcgtccccaggcgccgctgtgcccccgccgcccaccacgtgccctggccaagcccgccaaggg

SEQ ID NO: 302148 - DNA, 122 bp, Homo sapiens
gtctgcgacaagggccccacggggacggtgctcggcgtcccagagtgactgctcccctcccgcaggccgcccattgtgtccttgcccaggaccccgagaaccaggcgctggcgaggttttac

SEQ ID NO: 302149 - DNA, 122 bp, Homo sapiens
tcagctctggagcagatttgattctttggtagtcatagcttggatattatcaattattctcgccagaaacaaccccaggagaattggtccactgagaaacatatttacagttgaaccttgaa

SEQ ID NO: 302150 - DNA, 122 bp, Homo sapiens
acttttttttttaatttaaagaagtcacctgaaaacatgaactttcgagtttagaaaatgcgttcctgagagggaggccactggctgcccaggcagggcatcctcagggaactgggcctagg

SEQ ID NO: 302151 - DNA, 122 bp, Homo sapiens
cgaaatgacgtttgctgcgtagggacgtggctaaacgtgagggggcgtggccaagatggccgcgtgcgggatcctcgggtaccgggagcgaacgaggaggttctggctcaggtaagtcgttc

SEQ ID NO: 302152 - DNA, 122 bp, Homo sapiens
gtactgaaagaagtgctgtcccccctggtcacttgttgtctgtcctcctctccaggtcgccgcctcctttattagattcatccccagagagcctggctgcaggcagaatctgattagctaca

SEQ ID NO: 302153 - DNA, 122 bp, Homo sapiens
cctgtctttttaggcactgctctacccaaagtctggtatagtacccaatacagtgttaagcgctcataccataaatacaacaggatttataagagaaaatctcagtaaaatcatggagtaaa

SEQ ID NO: 302154 - DNA, 122 bp, Homo sapiens
ctgtgtggtgcctccaggcagtggcatgggatgtggcaagctggccacccagcagccccacgtgagtgtgacttggtgtgttagcttccagtcctcatgacagtgacagagaccaggccatg

SEQ ID NO: 302155 - DNA, 122 bp, Homo sapiens
taccagtgctggggagggaggcctgacttcagcaacagctgtgggtgggctggaggccggcgcagcttggggccccccgcgccagctgtctcagccaccacctgtgcggcgcttgctccgag

SEQ ID NO: 302156 - DNA, 122 bp, Homo sapiens
aagcacatcaaggcccatggccactttgtgtcccacgagcagcaagagctcctgcagctgcgcccaccccccaagccgccactgcccgcccccgacggcggcccctatgtcagtggggccca

SEQ ID NO: 302157 - DNA, 122 bp, Homo sapiens
atattccccaccctctcctagttctccgctctagttgagcaactttactggcaggtctagcggcagcggcgcgcgcgtgtgccgggagccccgggggacgtcctcggctggagcgccccacc

SEQ ID NO: 302158 - DNA, 122 bp, Homo sapiens
gtaacgtttgcgccattggacagcccggtgggcgtcagcacaggtggtctccaggagacccggatggtggcgggggtcaccccagcctggacggtaacatcttgtgggggtgctgggggtcc

SEQ ID NO: 302159 - DNA, 122 bp, Homo sapiens
ggcggctcgcgcgctggaggaggtggaaggagggtcgctgccctgccccctctgagcaggcggcagtcgagttttctgatcccaacacggcggagtgggtgcttaaggcatgggccttaagg

SEQ ID NO: 302160 - DNA, 122 bp, Homo sapiens
ggggaaggagaggggaccgtgcggctcccggaaccgtctgcccagagcggcagcgcctcccggtcactacaacaacggcggcccagtcaaaccccgcgctccaggcatggccagccgagccc

SEQ ID NO: 302161 - DNA, 122 bp, Homo sapiens
gggtcgggagaaagacggccgccccttcgggaacagagggactcgggggtcaaaccgtagcgcttccggccccgcctctgaggtcgacggcgacgcgaatctacgcgacgcgacgcggagct

SEQ ID NO: 302162 - DNA, 122 bp, Homo sapiens
atggccagccggaagcgggcttctcgcgaccatgtggcgaagccccattcgtcagctggccgcccgcggccctggtacccggtcacctctctgatctgcgcatgtgctgggctacgcccggg

SEQ ID NO: 302163 - DNA, 122 bp, Homo sapiens
ggacccagcagaggctgaaacaatacaagtgacttggttccaggtgggccagcagggtgacgtcctctagcaaaatttggcacccaagacaagtaccagaagaaaagaaagactgcatgtat

SEQ ID NO: 302164 - DNA, 122 bp, Homo sapiens
ctaaaaaaaaaaaatgtaaatctttcccaatgtccctatgatataaaacacgcatggcaacgacatcataacacaatactcagaaaattgtagccgcctttaaccatgacatttccccaaat

SEQ ID NO: 302165 - DNA, 122 bp, Homo sapiens
caccgggagggcgccgccatgccttgtacccccaccgtgcaggttgtggccggttttctccgcaggttgaacatggaaataaaagcaaacttgtatgaaaaaccggtctttctcctctcttt

SEQ ID NO: 302166 - DNA, 122 bp, Homo sapiens
gcccccagtgtccgcacagccttcaccactgagtagttccgcgccttggagaccgtcttccggtaccaccagtacttgggctctcaagagcggaagaggctggccagggagatgcagctctg

SEQ ID NO: 302167 - DNA, 122 bp, Homo sapiens
tagaggttgagtccgattaccgcgtttcttttgaggccaaacattgccagtcgccgccgccgcctggctgagaaaactggggaagaccccgactccttactggaaggaagcggaagtgagaa

SEQ ID NO: 302168 - DNA, 122 bp, Homo sapiens
cgtaaccagggaaagcacgcacgtcccacccccaccagaacctcagcagcaggaccgaggcgtctaggctgaagatgaagggagaggagatgaaggggcctaagccccttcccaggctgacc

SEQ ID NO: 302169 - DNA, 122 bp, Homo sapiens
gtgccctctccccgaagcctcccccacccagatgccctctccctgccagatcccccggggcgtcccccatctgcacgggtgcccttccccgagtcccccggccccgggagtttggaaaccag

SEQ ID NO: 302170 - DNA, 122 bp, Homo sapiens
agtgaggagcagctcctggatccacagctcagggagcagcagctattggatccaaaaccccgagacccaacatgcatagtcaggcaagaattgcagagcatgtgagtcctggggtagtagca

SEQ ID NO: 302171 - DNA, 122 bp, Homo sapiens
aagtagtgactgaggcaggacaggagcccaggctgtccggctccagggtcccggtcttgacggccactctaccccactctaccagtcgccccagtatggctgtcttcctcctgggcaccgcg

SEQ ID NO: 302172 - DNA, 122 bp, Homo sapiens
ctgtcctaaggaaagactttgcctcttcgccggcctccctttgggccgtcagggtggcagcgccaccccgtggctgaatgtggtggtgtaccacgcttcacgcaatctccttgcccagtgcg

SEQ ID NO: 302173 - DNA, 122 bp, Homo sapiens
agaagggatgtcatctgtggttccacacagccgccccctgtctagtatcactgcaggctgcgggtggcactggacctctctggtctagtactcttgggccacccccaagcccactgttcaca

SEQ ID NO: 302174 - DNA, 122 bp, Homo sapiens
ttctgctgagtgttctctgggaaatgctaaataaaattctcacacaggctccaaagtacccgtttaaatggctgtaacccctagcagctcattaagacttttgtattaccaaatttgagtcc

SEQ ID NO: 302175 - DNA, 122 bp, Homo sapiens
ctccagctctgaggagagtgtgaatttggagaccttagccacaggcgacacggaggctgacgagctctcagtgggactccagcggcctcgctcctgggcctcccgggcccctgtcaggtcgc

SEQ ID NO: 302176 - DNA, 122 bp, Homo sapiens
cccggagcaggccgtgcagatgctaggcgaggccctccccttcatccagcgtgtctacaacgtctcccagaagctctacgccgagcactccctgctggacctgccctaggggcgggaagcca

SEQ ID NO: 302177 - DNA, 122 bp, Homo sapiens
cctcacagctgctgaggctgctgaagccaaccacgcaggagcggcaggccatggtgcccccggccggaagcaggagggcccaggggggtgagcgagtgagcctggggttgcgtcgggtggca

SEQ ID NO: 302178 - DNA, 122 bp, Homo sapiens
cccaaccaagcacaggcctcccactgctaggaaagcagaactgtcctctctcagggaagacggttttatttagtaagagttttcacggtagggaatcaggtactgctgtgaaggtggtggag

SEQ ID NO: 302179 - DNA, 122 bp, Homo sapiens
gaccccaggctccctgaacagagcagccatagccaggccacatggggcagatacccaccccggctctcaagtccatgccagcttgcttctctacactaactgacacatcacaggagaaggga

SEQ ID NO: 302180 - DNA, 122 bp, Homo sapiens
agccctcggagagggggaagttggcgcaatgcaaacacaagctgcagcccttgggggggtcggcgtgggggggttggtcggcacaacacaacacaagctgcagcctccaggggggtcggcgg

SEQ ID NO: 302181 - DNA, 122 bp, Homo sapiens
gggctggtctccagctcctaaccgtgagtgatctaccagcctcggtgccgggattgcagacggagtctcgttcactcagtgctcaatgttacccaggctggagtgcagtggcgtgatctcgg

SEQ ID NO: 302182 - DNA, 122 bp, Homo sapiens
attgcgagcgcggcctcatttgcataggccgccggagtccgctggagcccggccaatcggcgcggccctccgctaatggccatgcattattcaccagcctaattgctcagccccatgcgcgg

SEQ ID NO: 302183 - DNA, 122 bp, Homo sapiens
agaagcgccaagcacctcctccgctctgcgccagatcacctcagcagaggcacacaagcccggttccggcatctctgctcctattggctggatatttcgtattccccgagctcctaaaaacg

SEQ ID NO: 302184 - DNA, 122 bp, Homo sapiens
atccctttcaggtaggcactattattattcccattttacagacagtgaaactaaaacacacgttatgtccccaatttgccatagctagtaaagccagagaattaaacacctgaagcttaaag

SEQ ID NO: 302185 - DNA, 122 bp, Homo sapiens
gtgcgcggacaccttgcctgcggggaaggcctacggaggccttgcagacagcgtctcagccgacacacagggccctttaagaaaagaggcaccgtgttctttaagagttctgtagcagagtc

SEQ ID NO: 302186 - DNA, 122 bp, Homo sapiens
cctctcatttacccaaaagaatcacctttctgcaatctccagtgctactggacaaacaaacgagcccaaccccaccgcccacacctcccaagcacccggctcgccgatcccgcctgcttcag

SEQ ID NO: 302187 - DNA, 122 bp, Homo sapiens
gccactgctggccaccctggcctctgctctgtgttcacgggggagcagactctggggaggcgcccctcctcaccacggcctgcaggccgggctggagcctgcgccttcaggggccttgcatc

SEQ ID NO: 302188 - DNA, 122 bp, Homo sapiens
ttcctgttacctgtagtactagtacactaatatactacctaatagtactgtaaactagttcgttcttgaggtagagattacatagaaaagacagggtaagtgattgagtctttcctgttgtt

SEQ ID NO: 302189 - DNA, 122 bp, Homo sapiens
gtccccctcatgtggtctctcccgaggtggcatcctgtgcaactgatgacatgtcggaaccggatattgacgtggacacagtcaggatggggagcacccgcgccccggggtcccttgtgttg

SEQ ID NO: 302190 - DNA, 122 bp, Homo sapiens
taattttagaaacgtcactgcaatactctgcagtatgttaggagattttcccacagtgggcgtcattatttttctttacggcagtatggttgcatgagttttgtaaccagccatattttgtg

SEQ ID NO: 302191 - DNA, 122 bp, Homo sapiens
aggctctggttctcaggggccgtgtgaggccacctctgccatgctgcaggctccccagcacgcagtggggaacccaaccttggagagccgagccggggaagaaaaagcgtctccacagcctt

SEQ ID NO: 302192 - DNA, 122 bp, Homo sapiens
ggccaggccaggccagctcctctggcagcagagcctgggcaggtgacgggcgggcgcgggcgtcgcagctgagggagtaaggaggctcccaggaaccggagctggaaacccggccgaggtcc

SEQ ID NO: 302193 - DNA, 122 bp, Homo sapiens
gcgcgcgcgcgcggggcaccctgggagagcggggccaggccccgccccttaaagggggcgcgccccagcgcaggctcagcaggtcagctcgcagggactcccttgcaagaagaccccggact

SEQ ID NO: 302194 - DNA, 122 bp, Homo sapiens
gcccagcggcgcagggggccgggctccggctaggagggtgggggccgcgccggtgacagccgatccccgcccctgctgcccgccacgtccctcacgtaccactcggcagaggcgcggggaaa

SEQ ID NO: 302195 - DNA, 122 bp, Homo sapiens
ccaccttcccgcaactggatcactcggcggaagcctcaggtgggccccggggtccaagtccgccgccgggagggcgggggcgggccccgaaccgccgactgcagggcgcgtcacggcagccg

SEQ ID NO: 302196 - DNA, 122 bp, Homo sapiens
agctctcatccccaataccatattcccaaagagataagtaggctatagaggctagaacaccggaaagtctttcaacttgagggctcagtaagacaataaataaaagacacaatactaggttt

SEQ ID NO: 302197 - DNA, 122 bp, Homo sapiens
cggaagcccggcagagccgccgagggcccgccgcccgcaccccggccccctcctcaccctcgtagaggtgtttgtccgacttgtgcttcttgtgcttcttgcccatgtccgaccgggccccg

SEQ ID NO: 302198 - DNA, 122 bp, Homo sapiens
tcttcggaccaagaaaaagaacctctggcagttgttttcgacaccggatacaagagggtgcgggagagaatttcaagagagagaaagacactctttggctgaaaactgaactttgctccctc

SEQ ID NO: 302199 - DNA, 122 bp, Homo sapiens
gcagcacctcctcgacggctcctccatctttgcggcggctcctccggctccgctcgccgccgccaccaacaacaacattcggagacgtcactcccgtcacgtgacccgacccggagctaaaa

SEQ ID NO: 302200 - DNA, 122 bp, Homo sapiens
gatgcagaaatgtcagagacattacatgggcaggacttgcggttggcatttggctggcagcgggggaggcgtcctccccaactaattcctcaggaacctcatgctgaggctgtctacaggga

SEQ ID NO: 302201 - DNA, 122 bp, Homo sapiens
aggagcttagaatccgaaggctgaagtcatacaacgggatggggaggggaacatagaaggcggccacctggctgatattagaggaaaacagctgcgaacagcacgggcctgagccgcaaaat

SEQ ID NO: 302202 - DNA, 122 bp, Homo sapiens
ctaatccccacaacctgtgactatgttaccgtggcgagagggacttggcaggtgggattccgttaaggatactgagttatccaggtaggcgcgatgacgtaatcacaagtgtccttatgaga

SEQ ID NO: 302203 - DNA, 122 bp, Homo sapiens
ctctggcttcctctccagcagcggggaactgacaggtggttttctatcgtcttagtttcccggggtggccggcaaatcgtatggactttctcaactgggaatgcaaccagcaggctcaaact

SEQ ID NO: 302204 - DNA, 122 bp, Homo sapiens
ccgcacgcgctcgatccgctcccgctcctcgtcctcgtccaggtggtgggagcgccccgccgccccgcctgtggcctccaggagcgcattgtcaggtccccggccatcctgggcctcataca

SEQ ID NO: 302205 - DNA, 122 bp, Homo sapiens
ggaaggaggtggaggaggcggcgggagtcctccccccctccccgcccgccccgccgccgccgcccgggctgttcctgtaaggcggggagacaatgagtaaactctccttccgagcgcgggcg

SEQ ID NO: 302206 - DNA, 122 bp, Homo sapiens
aatcccttggtggcgatgaaggtggtagttcacacaagtaacagtggaggcaaaggtaagcgcaagctgcctgtcccagatgctggcccatgtgtgagtgcttccctggagaagtccgcttc

SEQ ID NO: 302207 - DNA, 122 bp, Homo sapiens
cctttttttttttgttgtttgttttctggcacagtctgtctctatgactgagctgagtaacgtgtttcccgtgacaaaggcccctttcttacgacagtttaatagctccaatacgggggaca

SEQ ID NO: 302208 - DNA, 122 bp, Homo sapiens
agcgcctgcggcacccaggccaggagcctctctgagtcagggcttgtttccacaaccacacgtgcaacacaaccaaagtgacagatgactgaaaatacgcgtctggcttctctacaaaaatg

SEQ ID NO: 302209 - DNA, 122 bp, Homo sapiens
cattgaaggcttttgctcacttttccaagttgtttcgtttcgttttgtttctaatgtggacgatcatttaaaatgcctctggtggccgggcgcggtgactgacgcctgtaatcacagcactt

SEQ ID NO: 302210 - DNA, 122 bp, Homo sapiens
tcccctcaccctgcagtaatagacccttctggtgtatcttagttaaatcctgtggctaatcggatagcgacagccatcttctgctgttatcattttggagcacaagattttaaaaagaaaca

SEQ ID NO: 302211 - DNA, 122 bp, Homo sapiens
ctttttcagcaactttggcccacagcactctgataaccaagacaggcaaggagagatggacgagtcagagctggggaatccacagccaggggccatatggaaacgtttggggattagaatct

SEQ ID NO: 302212 - DNA, 122 bp, Homo sapiens
tcctctctggggaagacggatgcgccgggagctgccccagtgggtgcacatggagctcctcggggagctgggcccaccccaaggaccaccgtggctgcagctggcttcttcatgcactaggg

SEQ ID NO: 302213 - DNA, 122 bp, Homo sapiens
atatataattcaacaaagctccttctttttataaggaaactgaggcccagaagcacaaagcgaccaatctatggccacggagcagctacatacaacaggaagagctaggagtagaacccgca

SEQ ID NO: 302214 - DNA, 122 bp, Homo sapiens
gccgccctggtgacagaggacaacaatctcagcccgctgcggccggcggccgcggcccggcgcccgcgctcaccctggctggctcgcccacactcactcccgcgccgggctgctcagccgcg

SEQ ID NO: 302215 - DNA, 122 bp, Homo sapiens
tttcacgtccagattgtttacttatctgcgggaaacatatgtcgggagaagttcacattccggattctgctccgctgcccaaggtgcaattccggggaggcggcgaggggggaggggagggc

SEQ ID NO: 302216 - DNA, 122 bp, Homo sapiens
aatacaaggaaacactgtgagaaatgaggacagccctcgccaacaccgttaggtgaggatcgggctgtgctgttcaggcagcactcagtgtctgtgtgggtaagggaggcacacagagaggg

SEQ ID NO: 302217 - DNA, 122 bp, Homo sapiens
catggcttctgctgcttccatcacctgtggctccaaatgacttcagacagagctcagagccgggcttggagggcgagagcctgggtgggcggcccctggcaggagaccgggtgtcatgagct

SEQ ID NO: 302218 - DNA, 122 bp, Homo sapiens
catcttggctcactgcaacctccctgcctgattctcctgcctcagcctgccgagtgcctgcgattgcaggcacacgccgccacgcctgactggttttcgtattttttttggtggagacgggg

SEQ ID NO: 302219 - DNA, 122 bp, Homo sapiens
gtggagggacagtgcagctccgaaatgagcatctgagttcactgctggtgggcaccatcccggccaacaggccactagtgtgttctccctctttcaaacggggcggcgaccctcgtctgaca

SEQ ID NO: 302220 - DNA, 122 bp, Homo sapiens
ggcctggctccacccaggagtcccgaagccctgctctgtggaaggcctgggtcagagagccgggccacaggcaggcccacagcatatcctatgcagatcagatcccaatgcagccggggaaa

SEQ ID NO: 302221 - DNA, 122 bp, Homo sapiens
ggaccacccgctcgggccgtcagacgctgccctcccgcgcgcggaccctggcggactctgcgccccagctgccccagcctacacctcacctggtgggcctctggcgccccaaaacccagttc

SEQ ID NO: 302222 - DNA, 122 bp, Homo sapiens
gcgcggacacctgctaccaagcggagcttcagcaaggaagtggaggagcggagtagagaacggccctcccagcctgaggggctgcgcaaggcagctagcctcacggaggatcgggaccgtgg

SEQ ID NO: 302223 - DNA, 122 bp, Homo sapiens
ttgacatattttatatcgaatcctcacaaaagccatcaaagtggtggtatcctccactaccggaggatactgaggctcagtgaggttgaaattatctatcctgagtcatgcattaaataaaa

SEQ ID NO: 302224 - DNA, 122 bp, Homo sapiens
gctggaaagacatccaccatctttgctatattctgttggttagagagtcactagaacagccgacactaaagggcaggagattacacaagcgcattaacaccagatcgaggggcaccttagga

SEQ ID NO: 302225 - DNA, 122 bp, Homo sapiens
accccctgccccggcgcaggcgcgatcgcgggccgcccctcccgccgggcgccctgcacgcgcccccgccccgcctccgcaggctcccccgctccgggcgcctctgattggctctcggccgg

SEQ ID NO: 302226 - DNA, 122 bp, Homo sapiens
ccctgcatcctgcggtgtgggctggagctgcctcccgctctcacccagcgcccttcccaccggcgtagcaaccagtcaaacagggacgcgaacaacaagcaccaacttacaccttttccaat

SEQ ID NO: 302227 - DNA, 122 bp, Homo sapiens
gcgcggccatgacggcggagaaggcgctgcccctgggcaatgggaaggctgctgaggaggcgcgggagtccgaggcgccgggtggcggctgcagcagcgggggcgcggcgcccgcgcgccac

SEQ ID NO: 302228 - DNA, 122 bp, Homo sapiens
gcccttttcacgtggtatgctgtccacattggctgtgtcctgttgacagctgggaggggccgtaggcatggcgtttttcctgcagttgcaggcactctcacttgaggcgtgtctttttcggc

SEQ ID NO: 302229 - DNA, 122 bp, Homo sapiens
tgagatggaagaggacgacgatgactccgattatccggaggagatggaagacgacgacgacgacgccagttactgcacggaaagcagcttcaggagccatagtacctacagcagcactccag

SEQ ID NO: 302230 - DNA, 122 bp, Homo sapiens
ccagggatttggtaaatatcatggattgacttcctgtatggatcactccttgagaggaaacgtaccctaaatgaggtctacagaaatgggcatatgaaaattttggaatgcccatctcatcc

SEQ ID NO: 302231 - DNA, 122 bp, Homo sapiens
aatatatatgtagatagatcaattacatgtggacctggagcagccaacgccattgcttctcgttcccaccagcagccaagactcctcaagctgaaatgtttgggtcagccacacctttgcac

SEQ ID NO: 302232 - DNA, 122 bp, Homo sapiens
tagcctccaccttcccatccctgctttggagaaggaggaaaacgcagcttgagatctactcgaagaactgaccctcagctctcacaggctgccgccgagctgcaagcatgccgccgctccac

SEQ ID NO: 302233 - DNA, 122 bp, Homo sapiens
gcaggtcatccctggcctgcttaggcaactttggctggtgaatggccactgggctttcgacgtcctgatccatggagtcgccctccaggacgttagctggtggtttggagaaaagaaaagaa

SEQ ID NO: 302234 - DNA, 122 bp, Homo sapiens
acccgacgcgagggacgcctcagactgcgcaggcgcaagtattaactacttcacgatttgcgtgaacttttttgtcttctggctgcggattcgagtgtttcgaccgcgaattatgagggagt

SEQ ID NO: 302235 - DNA, 122 bp, Homo sapiens
ttgtctttcttgggcgggacatccttgcccggcttgggggctgtctccatctcgcccacccgaacggcgatccacgtgcaaaactcctctcagctgccacacagtcggcttgaaaactcccg

SEQ ID NO: 302236 - DNA, 122 bp, Homo sapiens
ttccggccgccccctcggctacagccgccatttccacgctccaccaatcaaatccattctcgaggaagacgcaccgcccccacacgccccgaccaatcgctcgcgctctggttgcgctggcg

SEQ ID NO: 302237 - DNA, 122 bp, Homo sapiens
accgttttgaggccggagacaatggaatttgcttacctaaaaagctccgccccttgatggcgtcacacgaaaccaaccacgccccatattgccgcatgcgcactcttaagaggtcgaacggg

SEQ ID NO: 302238 - DNA, 122 bp, Homo sapiens
gagcttccctggggagaaggcgccgaggtgcccggtgcgggccgaggcagggctgggcctcgcgggcagcaggcggaagaaggaagggcggtggggcaggtcccggctgcgcggggcagttg

SEQ ID NO: 302239 - DNA, 122 bp, Homo sapiens
aggtgaatgagcccggacggtccctacctaccaagtcctgaggagcagcggcaccaacgacgcaggcccgccccagcccgccagtgagccgcccatgccctctgctagcccggcccgcccgg

SEQ ID NO: 302240 - DNA, 122 bp, Homo sapiens
catttacagagtcaccaaggctcttgtcccattttgcaacagtgggcagcaatgaacattcggggtggggagggacgagaagaggagaggcaggaagcccaagaaaaagggtaaaagccatt

SEQ ID NO: 302241 - DNA, 122 bp, Homo sapiens
cccagaaggtaatcacgagtgtctctaaaaccccatctgtgacctttctgcactcagacacgggggccgccagcatcaccgggcagtgtgcgatgcggcatggcccgctggcttgtccggga

SEQ ID NO: 302242 - DNA, 122 bp, Homo sapiens
cgtctccagaggtaggacgcagctttttgccctgaacccgcgaagcggcagcttggtcaccgcgggcaggatagaccgggaggagctctgcgctcagagcccactgtgtgtggtgaacttta

SEQ ID NO: 302243 - DNA, 122 bp, Homo sapiens
ctggagtttgttccttctgatgttcccatgtgttaggagtattcttctttctggtgggttcgtggtctcgctaactcaggagtgaaactgcaaaccttcggagagagtattacagctcttaa

SEQ ID NO: 302244 - DNA, 122 bp, Homo sapiens
cagaagcagctccatctcggatgctgatctgccacgttgacctctgattaaccccagttccgggatgcctctaagatttggcttttatctactcttccttgcgtaagagcatctacttacct

SEQ ID NO: 302245 - DNA, 122 bp, Homo sapiens
gcaatctagagatgttaaagtatgcaggaggatggtgtgttaggttatatgcaaatactacgccattttatataagggactagcgcatctatggatgttggtatgggagtggggtcctagaa

SEQ ID NO: 302246 - DNA, 122 bp, Homo sapiens
tacagcagcgggggctgcaagacagcaacaatggcagctggcctcttcctctgggagctccgacccagggaagtgcaaagctgctaccggcctgggagccctggtgtgggggtgtttgcagt

SEQ ID NO: 302247 - DNA, 122 bp, Homo sapiens
ggaataattgtgacagtttattgatatatactttgatggaaacaataagtgaagcatgtccgatttattttctcgctctgcctgggggacaggtgcatgattatccctgaaggataccagaa

SEQ ID NO: 302248 - DNA, 122 bp, Homo sapiens
cgaaaggagggagctttccctctgtcctccagcctttggactgtctccaaacaagccattcgttcaccaaatacttattaagcacctaccatgtgcctgacaagggagatgtaacggtgaga

SEQ ID NO: 302249 - DNA, 122 bp, Homo sapiens
cgtcaccaggcccagctcatgcttcttggcagcctctccaggcccagctcttcctcccggcggcctctgcaggcccagactgtcatcaagtcggcctgtccagggccagctcctgcctcccg

SEQ ID NO: 302250 - DNA, 122 bp, Homo sapiens
aatccttctcctccagggcaccgccgtccttggagggctcctccgcgtggtcttcctcatcgctgcacccctggggctgcaccatgtagacaccctcgggaggcagctccaggccctcgcgg

SEQ ID NO: 302251 - DNA, 122 bp, Homo sapiens
agttttggcaaggtggggcgtagctcgtgtgtctgtgacccgtggcagggaagcctcatccgggaatgggatgggcttttcccaggtcatagaaacctcgaggcaaaggagaaggcacccgt

SEQ ID NO: 302252 - DNA, 122 bp, Homo sapiens
tacatgtctctggaaggtggggctctttatgtcctcaccacacccgagaacgcgagcagccgttgccaggccctgtcggcgggaggagcgtccttggtgacgtgaacacagacctccctctt

SEQ ID NO: 302253 - DNA, 122 bp, Homo sapiens
gcccaatagtaacttcctttggaggttgtagtaccgcccccagagccaattttccacttccgcttccggcgctgcggcagtccagatcaaaaatggcggtagttggtgtgtcctcggtttct

SEQ ID NO: 302254 - DNA, 122 bp, Homo sapiens
cggctctaccaatcagcaggatgtgggtggggccagataagagaataaaagcaggctgcccgagtcagcactggcaacccgctcgggtccccttccacactgtgctttgttctttagctgtt

SEQ ID NO: 302255 - DNA, 122 bp, Homo sapiens
atgaattgcccggctaatgtcactgccggacgcccgggtagtcgccacttggtttaaaggcggagctgttcttgcatttcaaagaaatccagattccgaaagtaagtaacaaccatgcccgt

SEQ ID NO: 302256 - DNA, 122 bp, Homo sapiens
gtgctgggactacaggcatgagtcacgacatctggccaagatctgttatttttaacaaaacgttctgtgttttcttcacaattttccgtttttaggctgaagacttctgtaatagtcatgaa

SEQ ID NO: 302257 - DNA, 122 bp, Homo sapiens
actacagctgtgtgcagtcgcattcatagcgcacagctcaggctgtgaacccaggagagacgacacatgtgctttcaccaggcttcacagcgcgtgagcctgggatcaggaagtgtgtgacg

SEQ ID NO: 302258 - DNA, 122 bp, Homo sapiens
cgcacgcaccctgcgcacacaccacacacacacacacgatcacacacacacccgcgcgctcgctcccacccggcagtcatccatcaatcgaaaagcacacatccagggccaggctcctcccc

SEQ ID NO: 302259 - DNA, 122 bp, Homo sapiens
gcaggggcttgtcttggaggaaagtgccaacaaagcctgtgccaactacagctgccgtgccgggccggcgtcaacaccgaaggagaggtgtgcagagacaaagcggcctgtcaggctgaaca

SEQ ID NO: 302260 - DNA, 122 bp, Homo sapiens
tgttacttcccgggatttggtaactgaactcttctgtcctgacataccttactgaagtctcgatttcttctctctctgcatatgcctggaataagagatcctttttcaatgtaacaattata

SEQ ID NO: 302261 - DNA, 122 bp, Homo sapiens
gagatgggacagaggtggccctgagggcctctgagtcctggctccaggtgtcccattcgtcggcccttcctgtgcttggctatgcaagccaatccattctctgcgattgcttgaaatttgta

SEQ ID NO: 302262 - DNA, 122 bp, Homo sapiens
gggcataaattaataatgccatccttcttctatcttataggaaaacagaaaaacagtggacggtgtccgtggtctttgaatcctttctacaggtccttctcaaatatcagctgctgaactat

SEQ ID NO: 302263 - DNA, 122 bp, Homo sapiens
tgtggcctgctctggtgacagatgttttattctaatgccattgttaagagaaacatggaccgttcgttgtggcctgagatggctgtgtgtttattaggaaacagaaaatgtagcaagtaaga

SEQ ID NO: 302264 - DNA, 122 bp, Homo sapiens
ggtggggaggtcaggaggttaagaggtcagcatttgtcccgcaagccgcctttcccggcacggttcgtcctaccactggggaaggagggggcggtggccaggttcatggctcctcccgcccc

SEQ ID NO: 302265 - DNA, 122 bp, Homo sapiens
attacacctcaactcacaatcggctcatgccttacaaccatctgtggctaagaggcaagtcggacttcctggtaaaccctcttctcttaggtgaagcatggagctgtgaccttattaacctg

SEQ ID NO: 302266 - DNA, 122 bp, Homo sapiens
gtgaagctgacagcgtaacagcagtgtcccttcagagggtctcagcacagtgcagaccctcgaaagacctcagagaactgtacctgtcccctcccagtggggctttgagattggccaaggac

SEQ ID NO: 302267 - DNA, 122 bp, Homo sapiens
caaaagatgatgccacattgtcaggaaaacgaatgcagtcgctctccctgtataagtaaccgcgacccatgggaggagatgccggggacctgggccgcgctgccaggacctctgctgtgtct

SEQ ID NO: 302268 - DNA, 122 bp, Homo sapiens
ctcccgcttcaggaacttgtaccagaacgtgtccacgcggcccggctccgccccgtcctgcgccgcctcctcggccgccagctccacctccccgagccacaggcccggctcctgcagggcca

SEQ ID NO: 302269 - DNA, 122 bp, Homo sapiens
caagccaagtctcgcgctcggccaggagccggggagtaccccaggtccccggtctggggccgccgctatcctaccctgcggcgcgcactcctgacctggccccgccccccggcggccgcgag

SEQ ID NO: 302270 - DNA, 122 bp, Homo sapiens
gccaacatggtgagaccctgtctctactaaaaatacaaaaattagtaggtcatggtggcgcgcgcctgtaatcccaactactcggaaggctgaaacaggagaatcgcttgaacccgggagac

SEQ ID NO: 302271 - DNA, 122 bp, Homo sapiens
gcctaggactctcgggagcggctaggaactcaatgcacatgctaatgagttatctggtaacgacgctctagaactagtttttttaccagacgcacagtgttcctacccttgtggtctcccct

SEQ ID NO: 302272 - DNA, 122 bp, Homo sapiens
agcccgccgtgcctgagcctcccaccccctccatgggctcccgtgcgacccgagcctccccgatgagcgccgccccctgctccacggcgcccagtcacttccaccacccaagggctgaggag

SEQ ID NO: 302273 - DNA, 122 bp, Homo sapiens
aggtactgttgcttggcagttccataatatatttaccattccatttatgttggacatttgcgttttttccagctgtttttttactgtgggacaaatctgttctctcgcgcacgctctctctc

SEQ ID NO: 302274 - DNA, 122 bp, Homo sapiens
ggaagagaaccagagaagtcggcgtcgcccaggagacggggttgggaaagccctgtgtcacgcaggcccctgcccggctcttcagccttctcctgggcaacattcacgaccttggctgtcac

SEQ ID NO: 302275 - DNA, 122 bp, Homo sapiens
agactgtggaaggcggggtagcataaaacacaatgggggactgcggaggaactaaaatttcgagactacatggttttgttgtgcaccagaagttcattagagaagttccttaattgcttctc

SEQ ID NO: 302276 - DNA, 122 bp, Homo sapiens
ccgcctcttccatgggggagggtccttgtgggtatgaacctggggtccccatggaagaaccgtgaagccggagctgtactccacgtgtgtcgggcgcagggagccctgtggggacacagggt

SEQ ID NO: 302277 - DNA, 122 bp, Homo sapiens
cgtggcttgcgaggactgcagctgcagggacgagaaggtggcgccgctggctccttgacgcgctcccgggcctcaggtatcagcccccgctctgggtgcgccccgccttttgccgttgtcat

SEQ ID NO: 302278 - DNA, 122 bp, Homo sapiens
gggaggcccaagccggggccccggggcagggggcgggggtgtagtggggtggggtgggggcgatgtccttccagagctgcccccctgcaccagggctttagctttgggagcctgcggcgcgg

SEQ ID NO: 302279 - DNA, 122 bp, Homo sapiens
ttctgctgtctccgcctctctcgttggggattgacgatttttctagccaataggagacgtcgggtcggcgggtggatgaacgcggccctctgtaatggcggagcgtggcggggacgggggcg

SEQ ID NO: 302280 - DNA, 122 bp, Homo sapiens
ccccagcccgccttctcaggtgggtttcagcgccttccctctcttctccccagtgcctcccgtccaaggaaggcattaacacccaaagccctggcggccaggtactgaaactgtcaagggat

SEQ ID NO: 302281 - DNA, 122 bp, Homo sapiens
ccgccccgtccccgccgaactgctcctccgacatagtgctagtgtctccgccgctgccgccgagactacacccgccgctgccgcgaaccgaaactagcagcaaagtaatccccgccgctgcc

SEQ ID NO: 302282 - DNA, 122 bp, Homo sapiens
gactcagcagccctgctggataccaaggcctgcaagggctggccccctggtgaattgtcccgtgccctgtgtatctatgagtcctgcagagatgacaaatcaggggacggggtcatgtctag

SEQ ID NO: 302283 - DNA, 122 bp, Homo sapiens
atagtgttgggagcccaaatagaaagtgtgttggtgtggcagggccagagtctaggaagccggagtgcaggtatcaggcacaaggggagggcctgagatgagagtttgtggaaagccagtct

SEQ ID NO: 302284 - DNA, 122 bp, Homo sapiens
ctgcccgtcgagcgcacgcggctttgccggaagccctcctgctcccggcgagccaggccccgactaggccctactgcccggctcagccctttgccctggacaccaggaaacagaagcccaag

SEQ ID NO: 302285 - DNA, 122 bp, Homo sapiens
gggaaacagtcactgtgaaatgcgctgcgtatctcattcactcacttcagctaatgattccgacttggcagacgctaaactcatggaggttcggtttctcctgatacaaaccaaatggctac

SEQ ID NO: 302286 - DNA, 122 bp, Homo sapiens
ccgcgtcacccggcagcaaccaagcagggtgagtgtgcgggctgcgcgggcggcgcggagcggagggagccgcgcggcgccacactcactcgcactcgcactcacaccggcgtgcacgccgg

SEQ ID NO: 302287 - DNA, 122 bp, Homo sapiens
tatgttgttcgccagtcgatggcctgccggtgcctgccagtgcctgttggtgtgctcttccgccggtgcgttcctctcgacgtccacccacttgtgtctgtgcccgccagcgtcttgaggtt

SEQ ID NO: 302288 - DNA, 122 bp, Homo sapiens
tgtgtccacaccattcctgtcgctaatgtggaagcagtggtgctggcctgacctcctccccgccggggctcgtgggagacagcaaccctctgtggatgtttgtctgacacatgtaaacacag

SEQ ID NO: 302289 - DNA, 122 bp, Homo sapiens
cttgcgcctccagcgggggcagaacctgaccaggaggtgggtgctggcaagggcagcagtcggactccatctcggcctcaggatccccgtcttcgccgtcgaagcgcggatcgttgttgctg

SEQ ID NO: 302290 - DNA, 122 bp, Homo sapiens
cctcaggagaagccctagaagtgatacaggctctggccgggggacccgatgtgctcgtgtcgcggcgtggggcttggtgaggaaccaccggagtgctcttgcatttttcatgacaaagacca

SEQ ID NO: 302291 - DNA, 122 bp, Homo sapiens
tggtggaagtggggagtccgttcctcagtcagatggagggggtccccttggatctcctctcggggcttgaaccctgatacttcaaggtctcttcccacctgcccttggtggatctggaaagc

SEQ ID NO: 302292 - DNA, 122 bp, Homo sapiens
tctgccgtaactggaatcttcataggtcatattgaaatcttcaaggtgaccatgccccaccggggtgctggggcagtagtcatggcagactcccggcctgggcccccaggattctaggaccc

SEQ ID NO: 302293 - DNA, 122 bp, Homo sapiens
tttctgtcctggagaagaagctataatcggtttccttgtgggcccggtgcgcagccatggcggacggtggcggcggcggcagcggcggtgcgggcccggcctcgacccgggccagcgggggc

SEQ ID NO: 302294 - DNA, 122 bp, Homo sapiens
aaaccactctgagggggactctgtagctttctccagactgccagagggattcatgacccccgatctagtggaaccaaactggagaaggcattgaaaaaccacactgaggggttttagctgaa

SEQ ID NO: 302295 - DNA, 122 bp, Homo sapiens
gggactgagtgccgttgggtggagaggtcggagctgactctctggagaaatggccgaagacgccccttcccatccccaacccactctcccttggagaagagaaggggcgtgtttccacctcg

SEQ ID NO: 302296 - DNA, 122 bp, Homo sapiens
ctcaggtgatccacctgcttcagcctcccaaagtgttgggattacaggtgtgagccactgcgctcagccaatgaaagccagtcttgataaggacattaagtgtgaatctagagcgagctaac

SEQ ID NO: 302297 - DNA, 122 bp, Homo sapiens
gtcgtcgggaacctccggccgcacaggagcccatggagcgggtgggaggctcaggcttggcgggctgcaggtccccagccctgccccgcgggaaggcagctaaggcccggtgagaaatcgag

SEQ ID NO: 302298 - DNA, 122 bp, Homo sapiens
gtgccccgtggttctctgtctctctcctgctcacaggaagtgccccggcctcacgtgccccgtggttctctgtctcgctcctgctcatgggcagtgccccggcctcacgtgccccgtggttc

SEQ ID NO: 302299 - DNA, 122 bp, Homo sapiens
ctgaagtcaaagtcatctctttgagtctactcttggggtttactaatttctctgggtcatcgtgcatgcatacctgagttatacatcttagtaaacttttgtttgttttttctcctgttaat

SEQ ID NO: 302300 - DNA, 122 bp, Homo sapiens
gtcagcgttcacattttgggcggtggtctacttcctggagacaccagaccgggtctcccgcgtcccccaggtcccagcacgtcccagctcgggactaaggcagaaacaggagctgtgtgagg

SEQ ID NO: 302301 - DNA, 122 bp, Homo sapiens
ggcgaggggacgatgcattatttttaatatttgatttatttttccaactggacttcttcccggggctctttctgggcccagctgcctttgtgatcccgcgccccggtcctcggcctctcacc

SEQ ID NO: 302302 - DNA, 122 bp, Homo sapiens
gcccgggcctccaccttgtctcccatcttgcggaccacttctgggcttggcccaataaaccggacccctgcatcctggcaggcctgggcgaagtccgctcgctcagagaggaacccgtagcc

SEQ ID NO: 302303 - DNA, 122 bp, Homo sapiens
tgactgctaacacgccaaagtttcttttctacatgttgaagaatttgctgatgggaaggacgaaaccctgttcttctgagaaatgagatatatatcaggaaaattggcttgagtcattatat

SEQ ID NO: 302304 - DNA, 122 bp, Homo sapiens
acgggttggtgggcactcagtgtccgcttgctcccaggggtcagccgtatcagacgacaccggtccccacgcagcagggctgagacgcagactcacacacacacaacatggtgagttttcag

SEQ ID NO: 302305 - DNA, 122 bp, Homo sapiens
gaggcggacccgacaggccagggtggtcgtggcatcgagtccatcgttggtgcaaatggccgggggccggtggcggtggtggggcggggggcacggcccgcatcaggcaaatcccggaggcg

SEQ ID NO: 302306 - DNA, 122 bp, Homo sapiens
agtgatctgccagtctcagcctcccaaagtgctgggattacaggcatgagccactgtgcccggccaagcctgtacttcttttgagcttatggattgaactcaattttgagataatccaaccc

SEQ ID NO: 302307 - DNA, 122 bp, Homo sapiens
atttcagggcggatgaaactctcctacaaagaagggccaaaccggccgcagccatgttttcgcataactggcaaaacgcgtttccgccaacgatagcgtcacttccggcgtctcaagccggc

SEQ ID NO: 302308 - DNA, 122 bp, Homo sapiens
ggccgggcccagaggtcctgtggctgcgcgtgcacacacacacgtgcacacagtcacacgcgcacaaccagccagagctgcggcctggcgtgatcggcccaagacatactcccctggtgctt

SEQ ID NO: 302309 - DNA, 122 bp, Homo sapiens
ttcccacgcagaaggaggcttcgatgaagaaagtggtgcggccccggacccccctatctgcgccctgcgtggccacccgcaacagctgcaagccgccggcacccgcctgctgcgacccgtgc

SEQ ID NO: 302310 - DNA, 122 bp, Homo sapiens
ccaaagatactttgtgacctccgatgggctgattgctccctccctctgttcctaccattccggattctaccatatgagataaagtttgtgtctcatagactccacgacatcagtgaagcttg

SEQ ID NO: 302311 - DNA, 122 bp, Homo sapiens
aacagatagggagtcagccttgagtgtttctgggggaggagcattccagtagaggaaacacggagtgcaaaggctgtaaggcaggaatgtgcctgatctgttggggaccagcaaagaggccc

SEQ ID NO: 302312 - DNA, 122 bp, Homo sapiens
cttcacagcaaacttcagccctatgttaactgacttcacagcaacgctataaggttgggtcggttactcttctctgggtgaggctgtggctggatgagagatgtttgttagctgcctgtgga

SEQ ID NO: 302313 - DNA, 122 bp, Homo sapiens
ctcctcccatcccgctcagcctgctccagacagagcgcgagtgaggagcaggcgggcaggcggcgggcagccgggcagccgtggacagaggcccgggcacagccagttgctgtgccagaggg

SEQ ID NO: 302314 - DNA, 122 bp, Homo sapiens
aatccgcgctgctccccccaccgtcccctcgggtcgggaagcggtccccgccgggacccccggcccagcccgcggccacccccacgtcgccccaccgtcgcactcaggagcctgtgctgccc

SEQ ID NO: 302315 - DNA, 122 bp, Homo sapiens
ccacccgcagccgcccccctcccgagcccagcgcggagcagccgggtttgaggatgtcagcgagcagccaatcagcgcccgcggcctaaggtaagagatgagtctgtagttcagcctgtcaa

SEQ ID NO: 302316 - DNA, 122 bp, Homo sapiens
aggcccggtgtgggcccggcttggctgatctcgagcggcgtaggggccactgggggctgccgcgcagtcccagaaccgcggggactagctccagccggccagcgcgggtgcgtcctggctct

SEQ ID NO: 302317 - DNA, 122 bp, Homo sapiens
tatctgaaagacagtgtactttttgtctccctaagccctgtgtctaggtcgtttgggaaacgccttggagagtcaagaataaatttgcaggtcaaacaatggatgactggaaaagtcggctt

SEQ ID NO: 302318 - DNA, 122 bp, Homo sapiens
ggtccagcccactgcattctgctacatcctgcccactccctgtggcttccactggctgcacgatgaggtctaactcagattcgaaaaaccacttcctctaggcaaggtggagaggaggatgt

SEQ ID NO: 302319 - DNA, 122 bp, Homo sapiens
acatgacatgtgagcccgggcggaacgcccaagaggcttccgtagtcgggtggcaggtcacgtgtcgaaggcttgcccgcggggaccccttccaccctggctcccgcgtcacatgaccggct

SEQ ID NO: 302320 - DNA, 122 bp, Homo sapiens
acccattacagaaagaccaaagctaggacatatcatatcatgtcataacatgataaaacccgggaataatcagacctgtattttgctgttaccctgaccaataagtcactatattttgtaca

SEQ ID NO: 302321 - DNA, 122 bp, Homo sapiens
tgttccttagtcttgctgcctgaaaaatgacccccaaaagttagtgacttaaaataattccgtgatttctgtaggtcaggaatttaggaagagcttgattgggcaattgtggctcaggttct

SEQ ID NO: 302322 - DNA, 122 bp, Homo sapiens
tgtcggtcaccgattccggtcctcaggtctcctccctggcaagatcagccagagggaatgcgcctctgccacatctcctcgtccaccccctacccccggctccgttgtcctttccctcccgg

SEQ ID NO: 302323 - DNA, 122 bp, Homo sapiens
tgcggggtgcccgtactccccagcccctgggcagtcgatgggtcggggaggctcgggctgcgcgggagcccactgcagcagtggggcggggtggggggtggtgcggtgcttgggcatggcag

SEQ ID NO: 302324 - DNA, 122 bp, Homo sapiens
cactccagaggagcagaagagggcagcctgtaccttcccagaggcctccctctggaggagcgggtctttctccgcaggcctgggcccaggcagagctgagatgcacctttagaggcagcaga

SEQ ID NO: 302325 - DNA, 122 bp, Homo sapiens
gagtggtcggaagagcaagccgcggcggcggagagaaaagtccaggagaacagtatccagcgggtgtgccaggagaaacaaggtgcgcttaaatgggctctcattggtatcaacagccagcg

SEQ ID NO: 302326 - DNA, 122 bp, Homo sapiens
ctcctctcgtctgtaaccggctgcagagcacggttccgggcgaacagggcggaggctctacgtccactccgtatccccaagaaagagtgtccgaggcacggaccatagcaagtgaaggaagg

SEQ ID NO: 302327 - DNA, 122 bp, Homo sapiens
cataccactagagacagatagagggcaagacaactggtgtgtttgaatatttgcttgcaacgcttctgaatgtcacaatttgtaatacaaaagctgaaagtatcactaaatttgccccacat

SEQ ID NO: 302328 - DNA, 122 bp, Homo sapiens
gcatgataagatatgaggtcagtgaggtggctgtgacagactggcaggaccttaggatcacgggaaaaactctggcaattttactctaagatggggatgcaataggagtttcatgaacagaa

SEQ ID NO: 302329 - DNA, 122 bp, Homo sapiens
cggagcaaggcgcggggcaaagacaagctccaatcagaacaagctccaatcggagcactgcggccccgctggtcacctcccttctccacttcctttcggagcactgggccccgctggtcacc

SEQ ID NO: 302330 - DNA, 122 bp, Homo sapiens
ccacttaggagggcttactggttctcatctaaatggaaggacaatacggttctaacaatacgtgagcctcatacatttattaaaataagaatgtgttatgttacccttcttcctgatagact

SEQ ID NO: 302331 - DNA, 122 bp, Homo sapiens
gctctgcaaacagcctcagccccactgccacggaccagccacgtccacagcaaaaggaatcgtgtccgacactaagaaactgtgaccacccagtaccaaagatgcctttatatagaaacgga

SEQ ID NO: 302332 - DNA, 122 bp, Homo sapiens
agggaggtaaacagtagctcttccctgggaagaaagcagtttctaggtgggtgcccgtcccgtctgctctcgccgtctgctgggattccgagaaagaagatgctggttgctcacggtatgct

SEQ ID NO: 302333 - DNA, 122 bp, Homo sapiens
cggatgcccacagtgtctgggtgctcccagggcagggccgcagggcctcagggccatacccgcctcgcaggtggggcgggcgccctggatgcgctccccgcgccgggcaccaggcgtcgccc

SEQ ID NO: 302334 - DNA, 122 bp, Homo sapiens
gctctctctctactctgtgcagacaaaggggcccagttctggactgtatcatgcttggcccgacactttctgattgtaagtttcgaaccctgctagccctggcgcggcctcgccactcagct

SEQ ID NO: 302335 - DNA, 122 bp, Homo sapiens
ggttgggcgcctgggccggtcgcagttgtctgggggccctggggctctctgcgtcgagagcgctcgaagacccgggattcctggcccgatcgcgggcggggggagaccccagctccacccca

SEQ ID NO: 302336 - DNA, 122 bp, Homo sapiens
cagggactcactgaaagttacttcctacagctcctgcaccacccgttcatcagtggtccccgtttacggaccccggaagctcccgggtgacccagtccacctcagagagtatcacccacaga

SEQ ID NO: 302337 - DNA, 122 bp, Homo sapiens
cgataccccatcaggatgatggaaggttagggcctttggtggtcctgtggcccaccctcccgtcatgcagacaggatgacctgatggccaggacaggaagaacagccacctctgagcttccc

SEQ ID NO: 302338 - DNA, 122 bp, Homo sapiens
taatggcaaatggcaaagttataacaaaagcctaagctttcttacatcatctgcagagtacgaacattcattcattcattcattcatgtctttctttctttttcctttcttccttcctccct

SEQ ID NO: 302339 - DNA, 122 bp, Homo sapiens
tggaagaaggaggagaacatgcatcctagaagccaagggaaggggctgtcccctggcagacgtcactgcagaagccttgctgcggagaggcctgagccatgcaggtcggaggaggttctttc

SEQ ID NO: 302340 - DNA, 122 bp, Homo sapiens
gaagcgaggcctgccttcgccgggattcgggtttaacgggctagaggggcgacaggccagcgcacggtgctgcccaaactcccaactccatggagctcgggccaccgagactgggggcgtcc

SEQ ID NO: 302341 - DNA, 122 bp, Homo sapiens
ctggccaaagtcatttggatgggagactgcaaagatggcggtgggtcggcagctcagtgtcgtttccctgcaacatccgcctcctcgaacacagactatgccaaacagccaagagtgagaag

SEQ ID NO: 302342 - DNA, 122 bp, Homo sapiens
cagcccagagatgctggggtcccgcgagcctaggttgggtttccagggctgggggctcggcggcggctcctgggcgccccctggcggccccgactcaaccgccacggctcccacaatgctcg

SEQ ID NO: 302343 - DNA, 122 bp, Homo sapiens
ctcccgaagtggattagtttcaaccttcacatactgagatgacttgcatcgcaaggaaggcggacctgaaatcagcccgcaaaaggcaggggcctacaccgcaaggcccatttagttaattt

SEQ ID NO: 302344 - DNA, 122 bp, Homo sapiens
ccacgcattttgcacaatgactcccaaacacacagaatgcacattggcaacaattttacgcgtgtttccaaaagtgctgactggaattgaagggacacatttggcactttttttttttgaaa

SEQ ID NO: 302345 - DNA, 122 bp, Homo sapiens
gagcccactgcgacaccgagcagacgtgcaatgataataacagcagcatccacagtgtaccgcttactgcatccccggcgttgtgttaattgctttacatttgtcagtttcattttcgtagc

SEQ ID NO: 302346 - DNA, 122 bp, Homo sapiens
acctctcccacaacctcattcaccgcctcgtgccccaccccacgagggccggcctgcctgcgcccaccattcagagcctgaacctggcctggaaccggctccatgccgtgcccaacctccga

SEQ ID NO: 302347 - DNA, 122 bp, Homo sapiens
gtattttctcacacagcgtcctgttgttattctgtagccaaatggctgtttctggggcatcgatatccatacccatgtggtctggtcgagatagcagcattcagtcgaggccttggcatctg

SEQ ID NO: 302348 - DNA, 122 bp, Homo sapiens
ttgcctccttccccagtttcttctagcttaactcccagcctggttcgagttaccgatattcgtctgcaccctctggccccgtcttttgcccagcgtggttgactatgccgggactgagacac

SEQ ID NO: 302349 - DNA, 122 bp, Homo sapiens
ttgtgccctaacagatcttatggtctgacaggcaagagacattgaacaagtaattacagtcgcatgtgatgaatgtcaagctgggctgatacacagttcttttggaacaagcagctagggga

SEQ ID NO: 302350 - DNA, 122 bp, Homo sapiens
ctggcccaagcattcgtgcaagccagagaggatggtcctcggtagttcctggaggtgacacgattcccagccaatggctcttagaggccatccagtctggcctgcatccacccaccttacag

SEQ ID NO: 302351 - DNA, 122 bp, Homo sapiens
ccctgctttgcttgcatttctaagagtagctgcgtcccttcaatcacagctgctgtgaagcggacctgctccaagaattcagctctcacttgactctataatattttctctccttgcccctc

SEQ ID NO: 302352 - DNA, 122 bp, Homo sapiens
ctttccctccccctttaccttattcagagtgtccagagcctcctgggctgccagcagggccggttctgctttggccaggtctgtttcacaggccttttgcttctcagtgacgttctggaagg

SEQ ID NO: 302353 - DNA, 122 bp, Homo sapiens
cccgctctcaaattcagttgaaagtgggtttgtaagaattgtatacctagaaaaccccatcgtctcagcccaaaatctccttaagctgataaacaacttcagcaaagtctcaggatacaaaa

SEQ ID NO: 302354 - DNA, 122 bp, Homo sapiens
gcacataccctgtgcagatggaaccaggtgcgtgaaagcgcccagcctgggcgcagcggacgagcacgcggaacggagcggcagcccgcccgcaggatgccctgagctacactcgctggaca

SEQ ID NO: 302355 - DNA, 122 bp, Homo sapiens
ccagtgccgcagccggaaaaccgcagcggcggcggcggcggctgagggggaacgatccagcgagctgcagaaaggggggcaggaaaaaattacaaggacattactgataagacaggaactga

SEQ ID NO: 302356 - DNA, 122 bp, Homo sapiens
cctgcggtgtccggctggcgcgagggccctgaggttcaagttgtctcgtcgggacgttcacgtccgattgacagacttgctggactcggcttggggctgcgccctcgcctcttccctctccc

SEQ ID NO: 302357 - DNA, 122 bp, Homo sapiens
cagcctaccctgcctccggctgggtttctgggcagaggccgaggcttagctcgttatcctcgcctcgcgttgctgcaaaagccgcagcaagtgcagctgcaggctggcggctgggaaccggc

SEQ ID NO: 302358 - DNA, 122 bp, Homo sapiens
gactcgcgataaccctctggggccgggagcagggagcgagacgctgagcttctgcgcctgcgccctagcgccggctgcagcctcctcacttcgagagcctgctgtttccgcggatgctttac

SEQ ID NO: 302359 - DNA, 122 bp, Homo sapiens
tgttttatttctcattctctattcaattttgtttttcatgcaagagaaaaatataaaacacgaaacaaaaaccccaagtctctgggtgttgtgaattcttgcagggaaaattggttttacca

SEQ ID NO: 302360 - DNA, 122 bp, Homo sapiens
agctgctcagcctttctggcctcagtttccacagctgtaaagtggggtctgtccacaacacgtgtggtctagcgacggccctgcggagtgggtctgtaactgcggactcacttgtcccgggc

SEQ ID NO: 302361 - DNA, 122 bp, Homo sapiens
cctgcggcggcggctggacctgggcagttgcctggacgtgctggcctttgcccagcagcacggagagcccggcctggcgcaggagacctacgcgctgatgagcgacaacctgctgcgagtgc

SEQ ID NO: 302362 - DNA, 122 bp, Homo sapiens
aaggagaaagttgggcgccgcttggagcgcctcttcccctgctgtgtgtgtacgtgtgcacgctcacgtctcccccgcgccggggccggggacaggaactgctctcggtcccgtcaccccac

SEQ ID NO: 302363 - DNA, 122 bp, Homo sapiens
ttccccttttagagatgggaacgagaggcgcatcaacgcgtccagcatccttgaggggtccgtgaggggcccgggctgaggcccatccttccctgggacaccctgcctgcttttcccaactc

SEQ ID NO: 302364 - DNA, 122 bp, Homo sapiens
cttaatctctgcaacaaaacgaacatagcactaaaactgtccaacatctggagggtgctccgcaaaagcccgcttcgacccccgtgctctccctagagatgggacatgcgcccccgaacgtt

SEQ ID NO: 302365 - DNA, 122 bp, Homo sapiens
ttcgctcttgccctgctcagccgcttccctcctccttcccataaaacatggggctcagcccggcaggaactccctaagtagctgggtggagttccagccctggatgaaggggagggcacagg

SEQ ID NO: 302366 - DNA, 122 bp, Homo sapiens
cgcggggcgcccggagctgcagacgggggctggaggaatctcggattcgggctgcaagagcgctgcgcaagcttcgccgagccgccctttcgcagacccagggaagcggggggagggagcga

SEQ ID NO: 302367 - DNA, 122 bp, Homo sapiens
gagtcagagaggtgagcattcataatggaataagttcccccattccataccctcccatagcgtatggagagctcggcactagaacagaagcactgaagcctggagaggagagattagaagca

SEQ ID NO: 302368 - DNA, 122 bp, Homo sapiens
ctcagggctgtggtcaggggcacgggctgggactgccccactgcggaggcttctggcggacggggcgcggggagtggacgggacagggacggctccccccagcccagccggtcagcgcgggc

SEQ ID NO: 302369 - DNA, 122 bp, Homo sapiens
ccatgaagtggagttttatgctggagatgagcacaggcccggctatgcggcccaacccgtcggcccggcctgcccagctcctctcctcaggaaggaagcgcccagagccgactcctccgtga

SEQ ID NO: 302370 - DNA, 122 bp, Homo sapiens
cataggtgcattttatatgtataatggttcacaaatcacaaccacccatcaggtaaccatcgctatcccatttacagaagagaaaactggggcccagagaagttgaatcatttgcctcaggt

SEQ ID NO: 302371 - DNA, 122 bp, Homo sapiens
aaaggggcgtggcccctccttactatgcggtgagaggacctaacaacattccaggcgccacggccacgcccccgggccactccccccgcgccagactgcggcctcccagtctcctcggccac

SEQ ID NO: 302372 - DNA, 122 bp, Homo sapiens
cccgaatccatgcacacccaccctgtattccgcataagacacggcctctgtgcaaaatgccggctgaaaaaaaaatagaaatattaaaagcaaaaaacggcatgggggtggggtgagttcaa

SEQ ID NO: 302373 - DNA, 122 bp, Homo sapiens
gcagaacacctattctggtatccaaaccacgccaccgtgggaaattggccccaagccacccgtacccgccttccgtcgccggtttaagcataaccccaaacccattaggtgtaactgtttcg

SEQ ID NO: 302374 - DNA, 122 bp, Homo sapiens
cgccaagggagaaggaggagatggaggcgctgtcatcgcagttgtgagcgaaggcctcagcggctggacccccatctccgctcagctcctccagaggctccagcgggggcgatggatcccgg

SEQ ID NO: 302375 - DNA, 122 bp, Homo sapiens
gtttctagacctctggggctggcattttttgtgaattatttcaagttcattcctgttcctcgggctcacctctgtgcaagtgcttgcttgccctgcatgcctaaaatggcagaaggacctca

SEQ ID NO: 302376 - DNA, 122 bp, Homo sapiens
cttggatttttggattcatatctgctgtgctggaatcctgtttccactatgttctaatcacgtgagcttgggcatattaccaaagtgcctggagcctgaatttccatgtgtgtgaacggggg

SEQ ID NO: 302377 - DNA, 122 bp, Homo sapiens
tgtggtatttatgctctctttgtctgcctgtttctaaggaaatgcatgtgtgccctgagccgtgatgatcctcccatccgtgttgtgagcacaggcatttgtgtctggtctgtcctccctgt

SEQ ID NO: 302378 - DNA, 122 bp, Homo sapiens
gtctagcatgttctgcccgaaacacacgcctcagaagaaagcgccaggcaaactgaaggacgcgaagccgtgggccggcctgccgagatcctgaaacgcaggcagagccgagacgctcttca

SEQ ID NO: 302379 - DNA, 122 bp, Homo sapiens
ctgattcagcaggttgggatggctgagaaaattgcctttctaacaagcggctggtgatgccgagggtgctggtctgtggaccactctctgaatttgcaaagtcttaatgctcagatgactgt

SEQ ID NO: 302380 - DNA, 122 bp, Homo sapiens
aggccctacggtggccctaggcagaaatccggtagttggggtggacctggggcctgacgtcgcagaccatgccaagaagctgggccaggacacgctctcggtttctctgctgggagctctgc

SEQ ID NO: 302381 - DNA, 122 bp, Homo sapiens
agtgctgggattacaggcgtgagccaccgcgcccggcctcgaagctatcttgagagatctcgggtgctcctactgcgcagcttccatctctggcccagaacacccacatttgtgtctccaga

SEQ ID NO: 302382 - DNA, 122 bp, Homo sapiens
gagcctggccctcttcgggcttcggtggggcccagtaggcagccaaaactcacactgagacggcggctgctctccaggcgggtttgctcaggctgcccccgtgctccctgccctgggcttca

SEQ ID NO: 302383 - DNA, 122 bp, Homo sapiens
cagaccgcgattcagccctcggccccccgggacggtccttccagccccagacgagcgcggcgcctgcacacaacaggcgcccactaaatgcttgttgatggaggtggcgagtacccgaaacc

SEQ ID NO: 302384 - DNA, 122 bp, Homo sapiens
agaatttgtttagaatgctgcgcagcgtgcgccggtcccagtcatcggtcactctgcctccgtaattgcattcgccagtcatgtaccgcagagcctcatacggcagttcctaaaatagtgcg

SEQ ID NO: 302385 - DNA, 122 bp, Homo sapiens
ttttcacggttattaaaaccgagggtggggggcggaggacgcacgtgggaacccaccaggcgcctcagcttctgcactacaactcccagaaggcgccgcggccaggaagccgcttctggacg

SEQ ID NO: 302386 - DNA, 122 bp, Homo sapiens
agggcgccctccagcccacccctgggagcgtctccctctcgagctgcccctcaaccccctcgcatccttgcctccgggccagcctcacccactcggggtccgaccctgaccccggccccggc

SEQ ID NO: 302387 - DNA, 122 bp, Homo sapiens
ctccgcggccgccgctcccttggcgctttgggttcctcctccctttgctgcgggagtcttcgcttcgcagggccccggagcacctcacagttttctttgtgtctgacattcttttttgagac

SEQ ID NO: 302388 - DNA, 122 bp, Homo sapiens
ggtctcactctattcttaggcactaaagcaatcttcaaccgaactcctctttggaggacacgaaaccacggccagtgcagccacatctctgatcacttacctggggctctacccacatgttc

SEQ ID NO: 302389 - DNA, 122 bp, Homo sapiens
tgggaattagttgccattgtgctgttgggactggtgacagaactcttggattgagaatgccgagatggtgcacggaagattctgtgtgctctttcagaccaggaggaggatgaggaggagga

SEQ ID NO: 302390 - DNA, 122 bp, Homo sapiens
cggctcggaggccgcctcggcccccgtgcaccccggcccggctcaccggggccccgcggccgccacccgctcccccgtggccacagccccgccgccgccggcccgtccctcctctctcccct

SEQ ID NO: 302391 - DNA, 122 bp, Homo sapiens
ttttaggacaaatactgtatttgtgcctcatcagatgccagactcacagtgtcacaatcacgtaagaaaataaattgcttttcccctacttactcagaaacaatactggaatatgatcagtt

SEQ ID NO: 302392 - DNA, 122 bp, Homo sapiens
gcaaactaatttattggtgtagctctgtatttcaatggcttaatagatactttaacagcccgttatactacagagtggtatcaacatgcagggcatatgtgcttgtttaccttacactgata

SEQ ID NO: 302393 - DNA, 122 bp, Homo sapiens
ggagaaggcggcgggaagtactggactagctgcgggcaggggccggctgaggcgcgcgcccgcgtgctaggggccccgggggagggcggcggggacgcggcgctactcccctctgccacccg

SEQ ID NO: 302394 - DNA, 122 bp, Homo sapiens
tcagcccaccaggcacacctcccagcccagccctgatgccggcctcacctgctggggactcggtgttgaggttctcgtcgtccgagtcagcaaagacctcggccagctcctggtccgacatg

SEQ ID NO: 302395 - DNA, 122 bp, Homo sapiens
gttttgcagggtaatcccagggttccatgcgtatcctctgcacattcagcatgggctcctcggtgcttgtgtctccatttttctgtcgttctgcgataatcatggcccggaggagaggcggg

SEQ ID NO: 302396 - DNA, 122 bp, Homo sapiens
atgaccatgtatgtgggcatttatctccatcaaccagcaagcaatcaattctgcatccaacgccagctaagcatcttctaatccaattcaattctgacgctatctccaggtaggtagagtca

SEQ ID NO: 302397 - DNA, 122 bp, Homo sapiens
accgcttcacgcctccccaggagagagacaggggagaggggacgatgaaggagccggggacggaggcaggaatcctcttctgattaaactccgaacagcaaatgcattttccgaaaagctgc

SEQ ID NO: 302398 - DNA, 122 bp, Homo sapiens
cagctgggtgtcctctaatttaattttgacactctacctggagatagtatagtgtcagatcgcacaggctgagagctcagtcccccaaaactgccctctctttagacacccgttgccagtct

SEQ ID NO: 302399 - DNA, 122 bp, Homo sapiens
aagggctgacacctctgctcagggtggagggcccagtgctggaggtgtgcaaggctggctcgttcacctcgctacccccgttcaggaattctacaggatctggagtgggaggagctacagag

SEQ ID NO: 302400 - DNA, 122 bp, Homo sapiens
tgctctagaaatttcaaagtgttactttaaacaaatttcccctctctccttctatcctcccgtcatttctaagatctagcagttctactccacactgattccctagtgtggttctttctact

SEQ ID NO: 302401 - DNA, 122 bp, Homo sapiens
agaaatcctcgaacggcaaagggatttctaggacaacacacctctaggaacagaggatgtcggtggtgagagctggaggcggaggcaggcctgccgccccaggtgtctgcgtgtctgcggtc

SEQ ID NO: 302402 - DNA, 122 bp, Homo sapiens
taaccaaaaggcgtaaatcaagcttcgttcaccatggaggaacctcagaaccaccggcaccgatagccaagctgccagagaatggaacggacgccctccattggcacaaactccagcagccg

SEQ ID NO: 302403 - DNA, 122 bp, Homo sapiens
ggacgcgcggcccggagggaggaggaaccgcgcacacttcaatctttatgctccggcacacggattgtaggggttgtgcttcaaaagaattcgccagggacttcctggcttctggtcgctgt

SEQ ID NO: 302404 - DNA, 122 bp, Homo sapiens
agctgagattacaggcatgcgccaccacaccaaggctaatttttgtatttttagtggagacgcgatttcaccctgttaaccaggctaatcttgaactcctgacctcaggtgatccggccgcc

SEQ ID NO: 302405 - DNA, 122 bp, Homo sapiens
ctcggagcgggagagcaaagcccttggcagcagagcctggcccacggcaggcagcggtcccggcactgtggtctgaatataggacccccacagcgtgtcctcccttaaccccagacaggccc

SEQ ID NO: 302406 - DNA, 122 bp, Homo sapiens
ttatcaacagagtaagctctcactaatgagtgggctgagtgaaaactggagggatttgttcgtctttctcaagagtagtagcttccagaaggaaggggctgctcttcatttacatttccctt

SEQ ID NO: 302407 - DNA, 122 bp, Homo sapiens
aggtggcgcaccaccgcacctccatgccaccgagcactgcgggcaggggaccgtgaggcccggctcccccgccctgcccagccccggcccaccatggagggtggctccagcagttctgtgtg

SEQ ID NO: 302408 - DNA, 122 bp, Homo sapiens
ctgacccggcccctcgagcgctctgccgtttacagcggcggtcccagattgattcccggtcgtgccttcggttgaaaactagcaaacaatgtgcagatccgggacctcgccgggactgcggc

SEQ ID NO: 302409 - DNA, 122 bp, Homo sapiens
ggaggaaggatgctgggtagggtcacaaccaaggtctgctgctggtgggagaatggaatacgccctcagagaagtatgaaccaagggctgtgggaattcagaagagggagatgtcatgtcca

SEQ ID NO: 302410 - DNA, 122 bp, Homo sapiens
tatgttttcttcatgtataaataaagattatgaaagggcatttgatgggcataaaattcccgattagattaaacagtcttgcctttcttagggtagggaaaattgggcaaacaagttcccag

SEQ ID NO: 302411 - DNA, 122 bp, Homo sapiens
atgatctacgtagtttttgaagttttgattctcgttagtatattagtacagggctgggcgcggtggagtatagcctcaggcttcaacagtactatcacttctttggaatgttatttagtttc

SEQ ID NO: 302412 - DNA, 122 bp, Homo sapiens
gccaacttggatttaacttgagaatcactcctctgctttactccctgtaacatatataatcgacacagggtggtgctgggtataaagggctgctccaagactggattgtgagtcagacctgc

SEQ ID NO: 302413 - DNA, 122 bp, Homo sapiens
atagctgttttatatgtctttctatcattatatcatcaggtagttaacatgtacatcatacgggtgaaagtgctctggaagtattggttaatcttggtcagtccacatgaacactttaaaat

SEQ ID NO: 302414 - DNA, 122 bp, Homo sapiens
cgccgtcaccggcagaatcaccagaatcctccgtggggaacggaaggagggatgagacagcgctgccgcgggccaggcccaccacgcgggccccaccgcagagtcccactttcctccatgga

SEQ ID NO: 302415 - DNA, 122 bp, Homo sapiens
cgcgcgcagaggtacctggagacgatttcaactgaagtaatgaaggcagtgtcgtgctgtcgagagaaaggtggatcccaacaacaggaaactacctaaatcaccgaccagttctggtgctg

SEQ ID NO: 302416 - DNA, 122 bp, Homo sapiens
gtttctgttatctgtttttttccccagcatatgggtcatactttctgttttttcatgcctcgtaattttctattcaaagctggatattttatgtagtaaattgagaaattcttggaactggt

SEQ ID NO: 302417 - DNA, 122 bp, Homo sapiens
tttgatgccagattcttagctgaaagacaaacaggcctacaactcaccaacaaattccggcgtcccaaaaatattcttaaattcaactccatcttctatttcgtgagccagaccaaagtcaa

SEQ ID NO: 302418 - DNA, 122 bp, Homo sapiens
gacttctgaccttggctgtatgactttgacacagcctgccctacatggaaccctctgtggcggtcctctgagcactggacttccaaggggagatgtgatggctccagtttacctttcagtcc

SEQ ID NO: 302419 - DNA, 122 bp, Homo sapiens
atacgggcgagcctctctgtgggcaaagccataggtgtgcatggtccttgttcccataggcgacatcggggtgtgtgattgcacgtgggggtgtgaggcctcgccagcaccgccactcactg

SEQ ID NO: 302420 - DNA, 122 bp, Homo sapiens
gcggtcccccagtccgcgccccgcccagccgtcccccgtcggctccagccaatccgcgcgcgctcccctggccgtctcccaccggatcaggtgtctcctctgcgcagactcctccacgacgc

SEQ ID NO: 302421 - DNA, 122 bp, Homo sapiens
caagagtggtcagtccaaataatttgtagccctctcctgttatgggaaggattcgctgcccggaagcatcaccccatcacagctaagtccctgctctccattatggctttctctcaggtggc

SEQ ID NO: 302422 - DNA, 122 bp, Homo sapiens
gattctagcttatctctgcaatctaaacacttttcagtaaagttcgggggcgcaattgcgcgctgaggtcgctgtaactcctgtcggccttctctggcactcgagtttcttcagttttgtct

SEQ ID NO: 302423 - DNA, 122 bp, Homo sapiens
cgcagcctcgatggctcctcatttcaatagcctggccccggagccgagccccctccccggcgctgcctccgtcagccgtgggacagacgttagggtattcattaactgagagccgaggaata

SEQ ID NO: 302424 - DNA, 122 bp, Homo sapiens
gttttatgttcaaaccacttcaaagtttttgtttttgtagtaaatgactgctttccccaacgttttcaaagctgaacttttaaaatcggttacaccctgaagatgtcttcagtttattggtt

SEQ ID NO: 302425 - DNA, 122 bp, Homo sapiens
ccggggcgccatgggaggcggcgcagagcctgagcccagggatttggagacagccgcccccggcacccgagcaccatggggaggaactcctagactgtgggaaagtgttcagagaccccagt

SEQ ID NO: 302426 - DNA, 122 bp, Homo sapiens
ttagttccatttagtttcttttccagagcagacaagtacccaggacctgcttgactttagcgatattttagttgaggcccaggatttcattctgcttgaagttcagaggatcttctggtcag

SEQ ID NO: 302427 - DNA, 122 bp, Homo sapiens
gctggcgtgacgcggccgctgggtggggcccgcgcaggtgctgggccagggctggggacccgcatctccgtgtctccgactgtgcctcccgcggaaaggggcgccgtgcgattatttttatg

SEQ ID NO: 302428 - DNA, 122 bp, Homo sapiens
cgcagctgacgggagggcgacaacacaggcccccgcagaggggctcagctcaggggacggcgacgacacaggcccccgcagaggggcgcagctgacgggacggcgccgacacaggcccccgc

SEQ ID NO: 302429 - DNA, 122 bp, Homo sapiens
cttaatgcatggattatttatcatttaaactaaggtacttggtattgaaagaggccgttacgcttgaatgaccttgtttctatactagccatcttggcaagcataactttgggctttattca

SEQ ID NO: 302430 - DNA, 122 bp, Homo sapiens
tcagttggtacaacagggcaaagggcagccagcgactggggcaaggtactaccgatgaaacgaaagtaagtgcagcgccttgaatggagggggaagggatttggatccccaccgccaaggca

SEQ ID NO: 302431 - DNA, 122 bp, Homo sapiens
aggaaggaagttttctttgccgagaagcctgggggaaaaccattggattgcttttaagagcgcttccctgtaatccggagagctttgaaaaacctgttcgggtccccagaaacccatcctgg

SEQ ID NO: 302432 - DNA, 122 bp, Homo sapiens
gtaaaaagaacgcaactttttcctttccaccctcgtgctttccagccgtagaatttgcatcgtaggtgatggaagatccgggtgtctctttgagggtgttttctggagcctgcggccaaaca

SEQ ID NO: 302433 - DNA, 122 bp, Homo sapiens
ggcggagggaggaaggatgggtgcgggtaactttttgaccgccttggaagtaccagtagccgcgctcgcaggggctgcctccgaccgccgggcgagctgcgagcgagtgagcccgccaccgc

SEQ ID NO: 302434 - DNA, 122 bp, Homo sapiens
cgcgcgaagcccgagggcgggtgcagctgatgcacctggctcactgcatgcacgtgtgcgcgggggtaggcgcgcgccgcggcggcccgtgctccgccagcgctcggacacggcccatccct

SEQ ID NO: 302435 - DNA, 122 bp, Homo sapiens
attcactatcaccacaacagcaggagaaagacccgcccccatgattcaattaccttccaccggatccctcccatgacaggtgggaattatggggtacaattcaagatgaaatttgggtgagg

SEQ ID NO: 302436 - DNA, 122 bp, Homo sapiens
gagtcgcaggtgaccccgtggtgatggctgcggctgcctgatagccctttcatggcggaccggaagcagccgccagggtcatggacacccggaagtcaggctccagacccgtcttgggcagg

SEQ ID NO: 302437 - DNA, 122 bp, Homo sapiens
tgtgttatgctaacttttatttcacagaacccatcttgagaaccgcacactgctctgaatcgcagggctaggggaagctcggattctggctctggccgggccttgctgcggcagattactac

SEQ ID NO: 302438 - DNA, 122 bp, Homo sapiens
catacttggccaggatataaagatcctcctggaccagcagcccctatcaatgtactttgccgttttgtctatgaaggagccagcatttctgaccagtagcttctttatgggcagtggctagc

SEQ ID NO: 302439 - DNA, 122 bp, Homo sapiens
tgattggaaagtttatttttaaaatcatctttgggataaataggaacccttgattccgatcgaatttgtggcaatagctgcaaattccaggagtgtgctttgtcatcattaaaccttttaaa

SEQ ID NO: 302440 - DNA, 122 bp, Homo sapiens
gcctgccgcacctcctacccatgcctgagcgcactttaccaccaccttttaaagtccagacgtctgcgccattaacttcggagtggtgttcgcaggagcatttgtcgcagtggtctttaatt

SEQ ID NO: 302441 - DNA, 122 bp, Homo sapiens
ggggttaacaacccggagaaaagaatcccggagccccggcctggctcggctacctgaaggcgcttttgtttgactcaggcgcgccaggagcacattctttcacattaggaaccgcaggggaa

SEQ ID NO: 302442 - DNA, 122 bp, Homo sapiens
gggccgagtattgcaacgttgtcctcccaccaggtcgccatccacacgctctggaacatccgcatcgtggtgctggccaagcctgagcacgagaaccggatcagccacatctgtactgacaa

SEQ ID NO: 302443 - DNA, 122 bp, Homo sapiens
atcctgaagagcactgaagccaaggaagatgccaagtgcgtgcaggtcagctaaggtcagcgagttcaggaggagctgggagccaatggcaaaaaccaaaggatcctaatcaaaaggacaga

SEQ ID NO: 302444 - DNA, 122 bp, Homo sapiens
gtgaagaagctggtctcatagtactaaatggtggtctaggagcagctgggcggatagcaccgggcatattttggaatgctgcattttaaagatgtgaatatacattaactgggaaaacttac

SEQ ID NO: 302445 - DNA, 122 bp, Homo sapiens
gtaaatctagaagcaggcccatttctagggctgcttatttccataatccttctctacctgcgactccctcagcccccacttttttttagctgcattttagaaactttaagcttaggtcacct

SEQ ID NO: 302446 - DNA, 122 bp, Homo sapiens
tcaattaatcaactgggtctcttgctgttccaaaaataaatatgccacagaaggggacaccgacagaatgtgcaccatcgttcccccttcctcaccctccagcccctctctccaactgcaca

SEQ ID NO: 302447 - DNA, 122 bp, Homo sapiens
tttataatgtgacagtggtacggggtgccacgcagtgtttccaggagcgccgggggggagcgccaaaatgctaaacccattcttagccaattgtgcgccgctcacgagtcagagctgagcag

SEQ ID NO: 302448 - DNA, 122 bp, Homo sapiens
attctttgtaacaaatttaacttgtgtaaggagttaaatatgttacaaaggggatttggacgaccaccagatggcactagcacacagtttatttgggcagagattgacagatttgcctgggg

SEQ ID NO: 302449 - DNA, 122 bp, Homo sapiens
ccacaaaaaaatgtgtgggaagtgagagggagatggtgaggaaagagagcatgttccagacgctacaggacagacctggacctgacctctccctggcgggcatggcaccaggagtttattat

SEQ ID NO: 302450 - DNA, 122 bp, Homo sapiens
gcttcgggcaggagaaggttctccgggtggtccgcagccgggctggaggggtggggcctacgctgggaaaaggttccgggcgggtcgtaccaacgcgcgcagggggaagaggtttccgaggc

SEQ ID NO: 302451 - DNA, 122 bp, Homo sapiens
aggtccgttttaacttcccttgaaaagcgcatcatgtgggcgggggcaagcgcctggctgcgccggggggcaccacggtgctgcccatcacgggaaccgtccggggtcggtccgtgagcccc

SEQ ID NO: 302452 - DNA, 122 bp, Homo sapiens
aggaggaggacttacagcggatcctgcagctgtcactcactgagcactgagccatagccccgggagggctggccaggccactccctgcccgcttttgtaatttatttatttataaactctct

SEQ ID NO: 302453 - DNA, 122 bp, Homo sapiens
ggctcggccgagcctaggaggagccggagctggctcggggctgctcccacccgccagcgccggctgcccagcctggcagtggaccgggtgtgcaagccacttagcacctgacaggttaattc

SEQ ID NO: 302454 - DNA, 122 bp, Homo sapiens
tacagaactctctaacttagaggtgatcgtccatacggcagatcattacaacatgaaaaacgtaagctaagatgttgaacacagccagaactgaaaataaaagagctttctaaaacaaatca

SEQ ID NO: 302455 - DNA, 122 bp, Homo sapiens
tgctctgaatccggtagatgtttccatggagaagagcctcccttccaagacctggtgctccggctggagctggagaggaacatttcctttttgtggatgcaaatgagaaacatccactcact

SEQ ID NO: 302456 - DNA, 122 bp, Homo sapiens
cctccccttctgatagggaccaaaccttctgctgagccttgtgtcacagtcagtccgcggcgccacaagcctcagtgtttacttctgccgcctgccagccgggcggggaaggggagtacccg

SEQ ID NO: 302457 - DNA, 122 bp, Homo sapiens
aaagatctccctaggctctgggctgtggccacacaaccagaaaacctctgcttagaatcacgaggctctccttcctgatatcagcagcgttgtgtttccttgccacctcctaaagtgcaggc

SEQ ID NO: 302458 - DNA, 122 bp, Homo sapiens
gagagcagccctggcggaaaggtgctgatcccgggagtagagcgactgctgcggctcgagcggggtgtctgcgtgccgagcctcactgacaatcggggaaaatgcagacgcccagcaaaacg

SEQ ID NO: 302459 - DNA, 122 bp, Homo sapiens
gggagcggggagggagggcccctgcggaccagcatggagctgagcatgcctagattgtcgcgttcgtgtttgtacccttagggcctggcacttggtagtcactcagttgatgtgtgagtggg

SEQ ID NO: 302460 - DNA, 122 bp, Homo sapiens
cttggagaaagagaagtctcctgaacatacccactggggtacctagaatagattttgcagcgacacacagatcctgtgttgtctggagtctctgctgagtaatgtagattctgggacagcaa

SEQ ID NO: 302461 - DNA, 122 bp, Homo sapiens
gcgagcctgcggccccgccggccgctggcgtgcgtgcgtgcgtgcatgcgtgcgcgccaccgccatcgccatcgccttcctggtttggacagctctaccggctcctcccgcacggcggcgac

SEQ ID NO: 302462 - DNA, 122 bp, Homo sapiens
taatagaatcctgtggttataaaatatattgttgcccaaatgacacttctttgtagatgtcgtagaaagagccatggataagcataaaaggagacctactcagtttctagcagtggtagatc

SEQ ID NO: 302463 - DNA, 122 bp, Homo sapiens
tccatgtccacgtcgagaaggctgccttcaggtggctctcgggtaacatactgcggaggccgaaggtgtcggctcacatgttccagctcttcagggcacaggaagtctggtgccccctcggt

SEQ ID NO: 302464 - DNA, 122 bp, Homo sapiens
gcagatgtgctgctgcggtgagaagacggccagggtggatttgcacatcatgggaaggaccgtcaccctgtgctctgtggcggacaccctccttgtcacaccgggagttcttcctcagagcc

SEQ ID NO: 302465 - DNA, 122 bp, Homo sapiens
ttggtaaggaggcaggactgttgtggctttggtgacctgttcagtctgccagtgtctgctcgatggaaatttgggggcatttttttgaagttgtataaaattaaacatcagcaatttagctg

SEQ ID NO: 302466 - DNA, 122 bp, Homo sapiens
atgagatggaaagaaggcccttcctcacactcccggggtgcctgctgctttccatttggccggactttgggtgcccgtcatggcttcctgtgtgcagagttggcctttgcagcttcaagggc

SEQ ID NO: 302467 - DNA, 122 bp, Homo sapiens
gcctttggtttcttctgtccttcattccttctgtccctctgagtgtgcccccgaaacagtcgagtgaaggtgtaggaccggcccttgcagggaggcactctcttggctttgcatacattggg

SEQ ID NO: 302468 - DNA, 122 bp, Homo sapiens
gggcctcccaaagtgctgggattacaggcatgagctaccgcgcccggcccccaccctccccgttacatttttaacaggagaaaagagggaccggggaccccacaaatacacctctttgcatc

SEQ ID NO: 302469 - DNA, 122 bp, Homo sapiens
agtttaccccgggggtgagttgagttccccaccctcaggcgggagattatcgggtttggccggagggccgaggggccctgtggcgtcgggggtctttccctgcagggtgggtgggggctgtc

SEQ ID NO: 302470 - DNA, 122 bp, Homo sapiens
aggcgggccgtaggaggaagatggcggtggggtcgcgcgttacccgggaggagattaagacggagccagagaacccgatcaaccgtgagaaaacatgcctgctgctgctgcgcatcttcacc

SEQ ID NO: 302471 - DNA, 122 bp, Homo sapiens
cgctgggctttcaccgcagcccctgcgggagagcggcgcaggcagaagcaagtgataggccgaacgggcgcgctccgaggttacttgccaggttcaggcaggagcactcgatagccgagcca

SEQ ID NO: 302472 - DNA, 122 bp, Homo sapiens
gcgccagtgttaaaggctaaggagacacagcgccccctaaagagggtgcggtttaaaaatcgctaaatcagtccgacaatatcacgtgtcctcggccctaccaattgaaaattaacaatcgc

SEQ ID NO: 302473 - DNA, 122 bp, Homo sapiens
ggggtttggatgtttctcactgcagcagcaagaaccctacctagtctgggacacgacagacgctcagtaatacttgattggatggaagaatgaatgaatgaacagctaactttttttttttt

SEQ ID NO: 302474 - DNA, 122 bp, Homo sapiens
gacaggcagtgccaatgagagaagagggcgcggcgaaggtgatcccgcacgtaaagattccggactgccaagctcatgccacgcccagagacttcggaattctcaacaatgcaaaggcgtcc

SEQ ID NO: 302475 - DNA, 122 bp, Homo sapiens
cttaaagggccagggccatagtggcgcaagctgggagagcacgaaaaggggcaccaggaacgtctgtgctcttgggatcaagccgactgtgatttatttattcatagtaaaccttattcaaa

SEQ ID NO: 302476 - DNA, 122 bp, Homo sapiens
ctcctggggtcaagtgatcctccggcttcaacgtcccaagtagctgggactacacacacacgccactatgcccagataatttttaatttttttggtggggaggacagggagtggagtgtttt

SEQ ID NO: 302477 - DNA, 122 bp, Homo sapiens
agcatttttattggtggagctgattctgagtcagtacctcatgctgtttaagagcagccacggccaggccagcagcagctgaaaggcatgggggctggctgtgatggcccagtcatcaggga

SEQ ID NO: 302478 - DNA, 122 bp, Homo sapiens
acccaatggcccctgccatcaggtgcgtggcagttatcacatgacgatcgtcagaactcgcgaggcgcgcagattcagcgagtgccagtgtggctggctgtgaagcgaactttgggttcgag

SEQ ID NO: 302479 - DNA, 122 bp, Homo sapiens
gtgctttctcaggcttgctgtaaatcccaaggctttggagcagggtgcccgtgactttcacggaaagcccccacaagcgaaaacaaggccgtactgtggcataagcaagcagcaggaagtca

SEQ ID NO: 302480 - DNA, 122 bp, Homo sapiens
tcagatcagctgatgtcagttgtttcactggtacacaggaccaagaataaatatctcaaacggaaaacttaacgtttcctaatgttcaagttgttatctccagagcattgaggggaactatg

SEQ ID NO: 302481 - DNA, 122 bp, Homo sapiens
cccacagttttcttcagctcctctcctccctgaaccccgacagcgaggtgtcttacgcttcggcattctcactcgcctgactcagacttgttagttttccagagcaactcatgtggccgccg

SEQ ID NO: 302482 - DNA, 122 bp, Homo sapiens
ggccggagggtgcgtttcttttcattccaggcagctctccgcgttcgtcccgcacatcttcgtcattactgctacattctgggcattctgggggtgataagtgtggcgtgaagggaggagaa

SEQ ID NO: 302483 - DNA, 122 bp, Homo sapiens
agtcagggcgggggggaccacccctgcacggcccacccctgcatgccccatcccacctcacggaagcttcctagagggcagggcctttccacacccagctgtcaggacacgtttgctgaaca

SEQ ID NO: 302484 - DNA, 122 bp, Homo sapiens
ggctgaatcacttccccctccctatcctcaccagacactgcataagacagcatttcagcccgcccgcccgttacaggtgtagctcttatcaggaaaagctgggagctgcctgatacaaaaag

SEQ ID NO: 302485 - DNA, 122 bp, Homo sapiens
gaaaggttttctcaaggaggtattgggtctttgaacttgatctattagatcactgtaaatcgctataggtgaatcactgaggttgaaagagtggcattggcatggccaattggtgaaacttg

SEQ ID NO: 302486 - DNA, 122 bp, Homo sapiens
tgtttatccacgggcagtttacttctgtctccctgacccatctccacaggctctggtgctcgccgccactttccgagcagatcattactcagcaccggagccggcgcgcctcctcccgcagg

SEQ ID NO: 302487 - DNA, 122 bp, Homo sapiens
ctgttatggtataaattccactagggaagggaatagatctgttttgctcagcaatgtattcgatgtacatggcatacagtaggtatttattaaatgtttcatgaattaatgaatagacctag

SEQ ID NO: 302488 - DNA, 122 bp, Homo sapiens
gcttatgcaaatcacttaggtacatgcaaaagtatcccttctcccggagcgccattggcccggggaggtctcgagctcattactatgcagagaggagagccgccattggccaagaggaggac

SEQ ID NO: 302489 - DNA, 122 bp, Homo sapiens
aggtggtagggaagcagaggtcgcagctacaaaataataacttgctcatctccgtttctccgctatcttatgagcccttgtggggctgggacagaattttattcatctttctatcatcagcg

SEQ ID NO: 302490 - DNA, 122 bp, Homo sapiens
gtttgtgtccctggtgaaggacctggcccggcctggagagatcacccagtcgcaggccttcgactttgagtttacccacgtggagaagccgtatgagtcctacacagggcagaatgtgaagc

SEQ ID NO: 302491 - DNA, 122 bp, Homo sapiens
cctataaactaggaatttaaaaggcaccaaaatcctagaagtcctaggagggcgtggtgacgcaagcaggtgaacgctggccgatgctgacaacccactcctgacgcgcttccggtgcgacg

SEQ ID NO: 302492 - DNA, 122 bp, Homo sapiens
cctggcccgtttcccagtgtgaaacattccccaaatatgcaactttgtgagcatcccagccgcctgcgctgagaacccgcccgcctgccgcaggaaagctggcacccacgggtatgccaggg

SEQ ID NO: 302493 - DNA, 122 bp, Homo sapiens
taggaactccctaagttattgcagccatgagagctctccttccacatgctggtcaagctccgaaaggctaagtccctccctgtctttaaaacagactgttctgaggctcaactttttttctt

SEQ ID NO: 302494 - DNA, 122 bp, Homo sapiens
gacgtcgccgcgcgagtcgggccgcgtgggggggcggtgcgttcgctggatccatgggagcggagtgcgcgcgcattatttttgctcgtcggctgggagccgggcgtcgggtcgctgggagt

SEQ ID NO: 302495 - DNA, 122 bp, Homo sapiens
gctgaatttctccagagctgatgcctccaataacaccttgtccccagctagagtgttaggcgatcagtcagaagagtgacagttaattccctgtccctggatctggtttcctaccaagagag

SEQ ID NO: 302496 - DNA, 122 bp, Homo sapiens
atctgcccgctctccacgtacaaggagacatctttgaggatctgcctggtccactgctgccggcaagatgtgatgtcccaccagggcctcacgcggtggctttaaaggaaaccccaggaagg

SEQ ID NO: 302497 - DNA, 122 bp, Homo sapiens
tcagaccttcccatacgtggaaacttggctgctgctttgaggatgtttcatacttcaggtcggtggaaatcaaaaggaaaccctggaaaggatgtgacaatgaagataacgtcaaaacttgg

SEQ ID NO: 302498 - DNA, 122 bp, Homo sapiens
tggcaggtccctggagccaggcgctaatcattgacctgattagcaagaacgctccgggtgcgcaggcaacacacgccgagggttggtgggtctcccgggaactggaaaaggcaccaaggcca

SEQ ID NO: 302499 - DNA, 122 bp, Homo sapiens
cgcgtgacggtccccgaactcgctcgtctcctctgcgctctcctggccgcctcctctccccgagcctccgcgtcttgctctggtctgggaaaaagcgcttgtgaaagtatttgctggaggct

SEQ ID NO: 302500 - DNA, 122 bp, Homo sapiens
tgacatgcatgtatgtcacccccatcggaacacagcaagaccacacttgttctatgactacggatacaccccctttagaaagagcttgacacttgggcagaggatgacaggggctcacacag

SEQ ID NO: 302501 - DNA, 122 bp, Homo sapiens
ccatatgatgagcacttatgcaggccatgtctgttagtaactttatatctgtaatccctacgatatactgcaagcaagtattattattgctattttatagccaaaaaaaggaaactcaaagg

SEQ ID NO: 302502 - DNA, 122 bp, Homo sapiens
gggggactcatatttgcataagccgggggagggcttggctgcaaaagagccacgaacgaacgaaggatcacaaaagcaacacaaatgctccgaagcacttaaaataaaacccagcaaagaag

SEQ ID NO: 302503 - DNA, 122 bp, Homo sapiens
ccggtgttcacccgtgccctggcctttggggacagaatcgccctggttgaccagcacggccgccacacgtacagggagctttattcccgcagccttcgcctgtcccaggagatctgcaggct

SEQ ID NO: 302504 - DNA, 122 bp, Homo sapiens
gcctgtcttccctccttctccactctcctaccccctgtaaatgactgctacatacaactacgacactaaagtggaaggaaaaactgtcatgctgaaccacagctctcccaaatttgtgacat

SEQ ID NO: 302505 - DNA, 122 bp, Homo sapiens
ttccactgtctaaaaccctcaacggctctccagtgccttcggaagcagggcccagcccctcgcctggcattcggagccctctccacgctggccctggctggcttctccatgcgtcacttcag

SEQ ID NO: 302506 - DNA, 122 bp, Homo sapiens
gccgggcatggcgcccggctccacaatgcatcgccttacccggccggaattcctgcaggacgctttgttctcagatggcagcgctgctagagccatcggacctgtgaggggggggcgcccgg

SEQ ID NO: 302507 - DNA, 122 bp, Homo sapiens
tttacagccaaaaaattgccttttggcccgccacgccccctatcccgcactaatataaaccgcgaatcccaggctccagaagcccaccagcaagccagcagatcagcagatgtaccgcagaa

SEQ ID NO: 302508 - DNA, 122 bp, Homo sapiens
gtctgttgaaatcaccacaccaaattcaacattaagggccaaccctgaccacagctgagccgtgtgaagaggctgacagcggcgtggccaccacccaggatggagagaaaggcactgtgagg

SEQ ID NO: 302509 - DNA, 122 bp, Homo sapiens
ttaggcctcttgccaacacaggatgtgtcaactagtttaccagagacgaaggtaaagtcccgtctcctgcagttgttgacgttcagtaggtcgtcggttaagaaaagtggctccctggttga

SEQ ID NO: 302510 - DNA, 122 bp, Homo sapiens
tagctgctgaagagtctgcttaggaattggggttgtaccctggacataaagcatttggggcgggggagtgtcctgatgtgactgagaaaggactgtggagtgctgtgtgcagaagggcttag

SEQ ID NO: 302511 - DNA, 122 bp, Homo sapiens
agtctcgggatgtggtcctttatcacgttggggacaccttgtgtctgaagtctcagaatacggtcctttatcatgtcggggacgccgtgtgtctgaagtctcaggatatggtcctttatcac

SEQ ID NO: 302512 - DNA, 122 bp, Homo sapiens
gtagaagcatctaggggtccctcaagaggccccgaaatgctgccccatggtgagaaaaggcgcggagaggcgcatggcaccggcgcaggtgcggagagtcgcacaggagacctcaggcccag

SEQ ID NO: 302513 - DNA, 122 bp, Homo sapiens
ctgaggcctgctggacagatggctggccaagtgggagcagaccctagggagtttgcacctcggctgggccggattcggaccggctctgtgttcactacactcagaatagcctggctgcttct

SEQ ID NO: 302514 - DNA, 122 bp, Homo sapiens
actcgcttcttgcagtcaacaatgagggtgacagactggcccttcacagccacagccacacggtgccacctggaaatggtggaagaggttcaagtgaactcttggctgactgaagtagggga

SEQ ID NO: 302515 - DNA, 122 bp, Homo sapiens
aaaaaaaaaacttaaaaaaaaaattccgtcgccctgggcgcagccttaggtacctggtgccgctcgtggggtcccgacgcccctacccccgggtccggaggagcctgcgccgggccgggacc

SEQ ID NO: 302516 - DNA, 122 bp, Homo sapiens
gagttgggagtcggggtgaggttccccgctggctccaggctgctccaatggggcgggggccgcccgcagggccgggcggggctgtgctgccatctggagccgctgccgccggcggccactgt

SEQ ID NO: 302517 - DNA, 122 bp, Homo sapiens
tacagcctctgcaaggactccctgtccctgctgctagactccccagactgggcgtgccgccgtggctccaccacgcctaggccccacgcacccaccccagaccgccctggggagtccgaccc

SEQ ID NO: 302518 - DNA, 122 bp, Homo sapiens
ttttttaagcccctcggaacagcgcagtattcgggtgggagtgacccgattttccaggtgcgtctgtcacccctttctttgactcggaaagggaactccctgaccccttgcgcttcccaagt

SEQ ID NO: 302519 - DNA, 122 bp, Homo sapiens
ggccgcggcgcgcacgcgccgctggggcccgccttcgattggccggcggacttcgaggctcgtctttgccgctctcggattggacactcacaccaggcctggccccggattcggaaacgctc

SEQ ID NO: 302520 - DNA, 122 bp, Homo sapiens
gggctggcgaggtgcatttgcgcggcattggtaagtaggtgacctcttaggcagggcgcccgggcgtggtatttctctgtccgccctcccgactcgctccgtttagaagcggtgcgaggcgt

SEQ ID NO: 302521 - DNA, 122 bp, Homo sapiens
ggcgacgtaagggcgctccgcgagcccgtctctcctcgaatgaaaggaaacaacctccggcgacagagccccgctctcaggcactgctggagaaccgagaccgacttctttctctttaccct

SEQ ID NO: 302522 - DNA, 122 bp, Homo sapiens
cttaactcttgtttatatcaaattaccctatgggaaacttggttgcattgtatgtcgtttcgtttaaagttgctgtttccaggaacctattggtgatgtgaagtgaggacttactggatgac

SEQ ID NO: 302523 - DNA, 122 bp, Homo sapiens
tattattctgcctgagtaagagaggaaatgaacaaatttttaatgtactttggaaccctgcggattgcacagatactaagcattgtgaaatagggcataaaatgagtggtagcaagttagtt

SEQ ID NO: 302524 - DNA, 122 bp, Homo sapiens
tgcggttgccccggcagccgcgccctgcgtggcggaagctcacaatcagcccggtccctccggcttccaccccgccccctgcgctcacctgcccgcgcgctcgccttccggggacccggggc

SEQ ID NO: 302525 - DNA, 122 bp, Homo sapiens
gagaatcttcagccattattgctttgagtactttttcagccctgtcctccgtgtcctcagcgtccaaggctctgatgacatgaatgttagatcttttgttatagtcccacaagccccagaga

SEQ ID NO: 302526 - DNA, 122 bp, Homo sapiens
ccggcgggcccccgcctccctcctcctcctcgccgcggcccacgtgaggggggcgagtcacgcgatttccgggaacccgtcaggaaggacataaacaaaacaaacccgaggcagcatggaga

SEQ ID NO: 302527 - DNA, 122 bp, Homo sapiens
cgccgcaaaaccgggggcaagagaaagccctaccacaagaagcggaagtatgagttggagcgcccagctgccaacaccaagattggcccccgccgcatccacacagtccgtgtgcagggaag

SEQ ID NO: 302528 - DNA, 122 bp, Homo sapiens
gccgccgcctggagatacaagaccggaaccgcctacgagagccgccgtcgccgcccggagcgccccacacggctaccgcatcagccaccgccgcgcagcgtccccgccccgcccggccagcc

SEQ ID NO: 302529 - DNA, 122 bp, Homo sapiens
ggagtggagcccaacagccagcggctgtttttatagtcaggagacggggccgggcgcagacgccccgccccgcccttgcacccagcccgctgagtccgcaccgcccgcggtcccggcctggg

SEQ ID NO: 302530 - DNA, 122 bp, Homo sapiens
atggcttctccatgctaatcgccctatagaacaaggagaaaaggaaaggtgggcccttcacggtatatattttgctctttgattggaacgaaatgaactcagtgtaacgtccaggctgttgt

SEQ ID NO: 302531 - DNA, 122 bp, Homo sapiens
cacagcctgacaccaccgaagtttccgggtgcccggatgcacagccgagctgcctggtgccgctagaacatcagaggactctaagatgcaccgaacgccaccatgggcggttatggaagaga

SEQ ID NO: 302532 - DNA, 122 bp, Homo sapiens
gcgggggcggggcctggccgaaggcggggctgcgaggaggtccgaatcaggctgtgggggcggagctcgggaagcggagccaggtccagaggcggggctcaggcgggactgagttgatctat

SEQ ID NO: 302533 - DNA, 122 bp, Homo sapiens
gagggatgagcaatcacgcctgagagcccactgcgtgccatgcagtccgcacagccgcagcggttttctagatggagaaactgaggctcagtgacttgcccgctgcactctgtccacggccg

SEQ ID NO: 302534 - DNA, 122 bp, Homo sapiens
ctacatgttccccgcactgaggagacggaagaggagccgtagccaccccccctcccggcccggattatagtctctcgccacagcggcctcggcctccccttggattcagacgccgattcgcc

SEQ ID NO: 302535 - DNA, 122 bp, Homo sapiens
agtcagtgtcttttgaatggcagaattctaggaaagaccctcagattttccataccctgacgaggtaaattccctaagtcttgccagagatagggcataattgatttcccctggcatgcagg

SEQ ID NO: 302536 - DNA, 122 bp, Homo sapiens
cacagcgccagtgggctggcactgctgggggacccagtacaccctctgcagccactggcccgggtgctaagccactcactgcccaggccggcagggccagccggttgctccgagtgtggggc

SEQ ID NO: 302537 - DNA, 122 bp, Homo sapiens
atgccccacccaggcagggctctgggagaagacacagacaacaggtctcgccccagagctcgtcaaggccaagaccaaccaatgaggctggggtctagggtcctcatgtgaaggggtagggg

SEQ ID NO: 302538 - DNA, 122 bp, Homo sapiens
gattgacacagcccatgggccagaacacactctacaaaatgactaggataacagaaagaacgtgatctcctgattagagagggtggttttcctcaatggaaccaaatataaagaggacttga

SEQ ID NO: 302539 - DNA, 122 bp, Homo sapiens
cacccgcccccctgaagtgtcaactacaacttctttcctttccctctacgcgtggacccacgttaacccctaccatgctggactgaccctttagaaagagtccctgggagaccccaaccgct

SEQ ID NO: 302540 - DNA, 122 bp, Homo sapiens
gtgttgcctcgcccaaagaagactacaatctccagggaaacctggggcgtctcgcgcaaacgtccataactgaaagtagctaaggcaccccagccggaggaagtgagctctcctggtgagtt

SEQ ID NO: 302541 - DNA, 122 bp, Homo sapiens
ggaaagaggacctatctgaggaccgactggccgaagcctgcaagtttccacaaatgcagtcgctgccgcggcgtctgtctacacacacactggaaggcaagagtaacggagggaggagactg

SEQ ID NO: 302542 - DNA, 122 bp, Homo sapiens
gaggacttccacaagctcagagaactccagaccacaggtgcgtgtggtcggtgggtggtccgggttctggcgggtggagtacgctgggctggccgggcagggcccccataaggcaatcccta

SEQ ID NO: 302543 - DNA, 122 bp, Homo sapiens
gcacccgtcggtgacatagttggtaatttccagaggcggagaagatattactgacaataacgtgaacacgctgtgtgaccaccgaggatcctcatattcacggggggagagggggttgatag

SEQ ID NO: 302544 - DNA, 122 bp, Homo sapiens
ggactctccgaaccggaagtgccccgcgtcgccatggctacaggcgctcccagcagaacccgtagcgttccgttcccatggcaacggtattgtctccttggccggacctgggctgcggaagg

SEQ ID NO: 302545 - DNA, 122 bp, Homo sapiens
ctttttacacggaaggcaagggtttctgaagttccttctttagaagttaataagactggccgggcgtggtggttcacgcctgtaatcccagcactttgggaggccgagatgggtggatcacg

SEQ ID NO: 302546 - DNA, 122 bp, Homo sapiens
atattctagaaacagcaggaaagcagacgacaagccctttggttttgtctggacaccttccggagaggtgcctctagcaggtgggggtgtggattccagtgaactgaaattactgtatattt

SEQ ID NO: 302547 - DNA, 122 bp, Homo sapiens
gtgagcagggtgggcaggatccgcacgtgcgtgtgctattgaggacctgcgtccagtgtgcgggaggcggagatgaacccacagagcagggcgcctgcccttgaggacctgcgtccagtgtg

SEQ ID NO: 302548 - DNA, 122 bp, Homo sapiens
aaagctttcgctagtctccgcatggccggtgccaatgcttggcggcaatgctcggctcttcggcatatgggcaaaaagagccaaggaagctgaaaaacaggatgtgtgaaagcaaaaataaa

SEQ ID NO: 302549 - DNA, 122 bp, Homo sapiens
ggtttgtagagatatttcatacaaaacttatgaggaaacccctgtcactttcgttctccccgtcagcatgagaacgactctccactgaggaatatttccccaacatgtttttctgttgcaca

SEQ ID NO: 302550 - DNA, 122 bp, Homo sapiens
aaatttgaggatttctgccccagaccagggtcagtacacaaagagcctgtgccatccctccgcatccctgcacccatgtcagacatcactaattgattgccatactctttcctgttgggctc

SEQ ID NO: 302551 - DNA, 122 bp, Homo sapiens
ttcattttcctccatgcctttgtgtataaaacttgctgcaatgaccctttctaagtatttcgtacctgaacatttcaggacaaagcttgagacttttgatcaaaagtatctggttgaaatgc

SEQ ID NO: 302552 - DNA, 122 bp, Homo sapiens
gcttgcgcatcaggactggctttatctcctgactcacggtgcaaaggtgcactctgcgaacgttaagtccgtccccagcgcttggaatcctacggcccccacagccggatcccctcagcctt

SEQ ID NO: 302553 - DNA, 122 bp, Homo sapiens
cgacgccagactcaagcggggaaaagcgggcctagagctccagggcgggagcgacgccgacgcctaaaacattcttgaaaaagaagaataaagtgagttgaaaatcagtctgccctatttca

SEQ ID NO: 302554 - DNA, 122 bp, Homo sapiens
caagggtgcctgtggggagctgtttctgcagggtgcctcaacacccatccagagaggctccgctgcccaagggtctgccctgtccccacctacagcccaggcaggggcctctcaggtcgctt

SEQ ID NO: 302555 - DNA, 122 bp, Homo sapiens
actgtgggcaggtatgttcagtctccccagccagatagcaggctgcttgtacatcccacacgtgcccagcgtggtgctgcaggtggagtgtgtgattgtatctaaggctgaggagacacttg

SEQ ID NO: 302556 - DNA, 122 bp, Homo sapiens
ccgtctcgtctcactggaccgtctgccgtttatgtcctttctcggtggaggccctcacgtcgcgttgaggtggtccccgctccggctgcgtgaacgcggcctcagctgcctcatcttccggc

SEQ ID NO: 302557 - DNA, 122 bp, Homo sapiens
ctctgcgttgtggccgcagcaacctcggttcgaatccgagtcacggcagtaccttgatgtcgcctcaatttctcaacgtactgagcagtaccttgacgtcgcctcaatttttcaacatactg

SEQ ID NO: 302558 - DNA, 122 bp, Homo sapiens
aaattggcttaaaatgttttctgtttaagtcctggctctgccctttgcaagctaattatgcgtgtgaactgaggagagtattcagtcttcctgaagtgaatgagccttgcctatcaaccaag

SEQ ID NO: 302559 - DNA, 122 bp, Homo sapiens
ctcggaagagacgcggggtggcgctgcagccttagaagtagcagaaacaaagcacccagccgacgctccttacccagatactcagctaaagaagcagcaagcaggaagaggaggctttctaa

SEQ ID NO: 302560 - DNA, 122 bp, Homo sapiens
cctgcatgcccgcgcctctccagactgagaccaaagacttccgcgccaccgtcggcagctcgcgaacttagacttcagaccgtctgccgcactgcaataaagagaccatggtggggatacct

SEQ ID NO: 302561 - DNA, 122 bp, Homo sapiens
atgtctgtgcccccgggcgtcctgagcagagcggggtgtcagggcggggcgcgggcatttcgctcctctctccctgaaccctttcacatccttcccgatcctgttttgcgttatcccaggat

SEQ ID NO: 302562 - DNA, 122 bp, Homo sapiens
ggctggggaaggaaagccagtttcaagccaaacataacatgtcaatcacccgattctgggcggctgagtcgggaggtgacgggcatgggtgtagagcctgatgggacccattctgtgtcagt

SEQ ID NO: 302563 - DNA, 122 bp, Homo sapiens
gccagaagttcaggaagaacacagctccatctctctccagccggaagaacatggacctagcgaagtcaggtatcaagatcctcgtgcctaaaagccccgttaagagcaggaccgcagtggac

SEQ ID NO: 302564 - DNA, 122 bp, Homo sapiens
ggtttctatttcatgaactgtctctttaaagaggatctgctcggccatccagaaagaacccggggcgagggagaaagggagctatctcccgccgcccagagtgatctgatcggaagccagac

SEQ ID NO: 302565 - DNA, 122 bp, Homo sapiens
ccacaggaccgaaattgtacccaattttagatcatggtgtgcacatctttctacttggttcgtgattgagataccatttacatttttcagtgcacaggtttgtatttgttgctgtctgtatg

SEQ ID NO: 302566 - DNA, 122 bp, Homo sapiens
gtgggaagggccactgtgaccgcaggcccttgctgtcacgcagtggttttcagggctccccgctgtgaagactccgaatgctgtcaacagatggcatccacaccccacagagggagaggaca

SEQ ID NO: 302567 - DNA, 122 bp, Homo sapiens
acctgcttctgcgtgggctaaatatagccgacccagtttccctctcccggtccgagtgcccgggacacgtccccttggcagagtgagttctgggctcaggacaagggcactgtctgtgccag

SEQ ID NO: 302568 - DNA, 122 bp, Homo sapiens
aagtggaacaagctcttatacaggaagcgtgaagtcagtcaaggaaacgagaagaaattgcgaaataacacatcggggcctgacactctgtgccaagtccctgaatgctctggagaacgctg

SEQ ID NO: 302569 - DNA, 122 bp, Homo sapiens
gttttcctagaaagtcctcgaccttcgtcggggagaggaggggagtgataaattggaaggcggacaagcgacaagtgcggtactggaaagacccaaacatacttggttgtgacctcaggcaa

SEQ ID NO: 302570 - DNA, 122 bp, Homo sapiens
attggggcaggtaaggagaaaggtcttggcaatgtcagtttgatgagaaatgaattaattcgattattttcatggtgtggatcaatagcagtcggcctccacagaggtccctggcctgaagg

SEQ ID NO: 302571 - DNA, 122 bp, Homo sapiens
ggagacggagtaagccgagtcccagctctgagcgcagaagctagtggggtttcttcggagcgattgtttagtattcatggggcgacgcaatctctcccacatctgcttagcacagcaagtcc

SEQ ID NO: 302572 - DNA, 122 bp, Homo sapiens
tcccggagtcagccgctgtgtccttttgtgaaagaagtacagcccgtcacccagggagggcgcgccttatggcgggttctaacacgcagttgcaatggaaccaactcagtcaatggtgatcg

SEQ ID NO: 302573 - DNA, 122 bp, Homo sapiens
gcacactggagtttctggtgtctttgcttggaactgacctagctcgtggcagggggaactcggctagcggccccacagcccctgctgactcaaaacaactgtgagtggggttgggcgagtga

SEQ ID NO: 302574 - DNA, 122 bp, Homo sapiens
agggccttctgggtggcaggatgtgatggggtgagaagagtgagacccacctgtctgcatcgactgtttgaggcctgccctctttggtgccggattgcgcaatatgtctgactacctttctc

SEQ ID NO: 302575 - DNA, 122 bp, Homo sapiens
caaaaggtgctgtctgcaggagggtttttgttaacaggttagaaaataggagagatggagcgagaaaccgctctgcattataaatggcaggttgtgacatctttaaaagggaggcagagtgg

SEQ ID NO: 302576 - DNA, 122 bp, Homo sapiens
ggcgcgggcagagcctgggcagcctgtacacgcactgcagggctgcacgtggcagctgagcgccctggcggagcagcagcgccgcatcctgcagcaggactggagcgacctcatggccgacc

SEQ ID NO: 302577 - DNA, 122 bp, Homo sapiens
cacttgactgtgaagtggctgtgagagtgggtggagagttcttctttgaccctcagcctgcggatgcctctagaaacctcgtgttgattgcaggaggagtcggaattaaccctctgctttcc

SEQ ID NO: 302578 - DNA, 122 bp, Homo sapiens
gtccgactgccctgtctcctgtggaggtggaaaccaggtccgaacccgggcctgcagggccgcagcccctcaccacaggagcccaccctgcctgggccctgacacccagaccaggcagcagc

SEQ ID NO: 302579 - DNA, 122 bp, Homo sapiens
aggaaaaacaggacaagacaggaggcctggaactgctggaacatggctaggagttttagacgactctgaggtccccaggatttcagccccttttgagcccctggcagggaccaatttgaaga

SEQ ID NO: 302580 - DNA, 122 bp, Homo sapiens
aggaaagagctcagtcaccgcgaggtcctgcacaacatgccaaagtcccggatatgtgtccggggtctacacctaagccccgacccctctgaacttcccagaagcgcgcaggaggcatggtg

SEQ ID NO: 302581 - DNA, 122 bp, Homo sapiens
tgagccactacacctggcctcaagcctgacttttgatttttgttctgattcttcaaagagcggaacaggtttcccacaatttattttattttattttattttattttttattttattttatt

SEQ ID NO: 302582 - DNA, 122 bp, Homo sapiens
taagataattcctatttcaaataaattatgataaattgctcagcttcaagaatttggagacgtgtctatagcatgtaaaacttttaaactgcctaatgtcaggctcttattttccactattt

SEQ ID NO: 302583 - DNA, 122 bp, Homo sapiens
cgtgtagagcaccgggcaacccggcagccgtatgccatcaagatgattgagaccaagtaccgggaggggcgggaggtgtgtgagtcggagctgcgtgtgctgcgtcgggtgcgtcatgccaa

SEQ ID NO: 302584 - DNA, 122 bp, Homo sapiens
ctgctgcacaatatttcactacatctaaacaccagcacatctttgtttctaacagctgtccggtatcctcacatgcgggagtaaagtgctgtatttaactggtcctctttgaatggactttg

SEQ ID NO: 302585 - DNA, 122 bp, Homo sapiens
tgactcatgcagctgtgcctcctttcccaggactctgccctgcctggtgatgacacagcacgttcagcacatttgtttccagggagagcactctccagaaggaaccagggccagctcctgtg

SEQ ID NO: 302586 - DNA, 122 bp, Homo sapiens
tgattacaggcgtgagccaccaagcccagcctatttattgattatatgctaaacacggagcggattacttacgcctctcctttttagaccatatagagtaatttcctgatgttgccatggca

SEQ ID NO: 302587 - DNA, 122 bp, Homo sapiens
gtggagcccagtctggtatccgaccccggacttagaaggctataaaggcctgagtctgtccgccctgaaagtaggtggaggagagacgaatcagggccgggtagagctctgcttgcagctgt

SEQ ID NO: 302588 - DNA, 122 bp, Homo sapiens
aagtcgcgcgtctgctgcagcagctgcgcccgctcctccgccaggcgctcgggctcgcgccgcagccgctccagccccgagccgctcaactcccggaggtagcggcccacatcgggccgctc

SEQ ID NO: 302589 - DNA, 122 bp, Homo sapiens
taaagaatggagtggaagacccctttagttgtcatgcttttccagcattgcatcctgagccgtgcagctctagcattctggaagattccgtcctggctctcaatgaaggaggtcaatttcag

SEQ ID NO: 302590 - DNA, 122 bp, Homo sapiens
ctaaattgatcagtgtcaattctgggcaaataattgggtggaattaccagcgggtccacccgtgctgattatgcaaataatgtacgccgtcaccaagggcccggcgctggcagtaagtgtct

SEQ ID NO: 302591 - DNA, 122 bp, Homo sapiens
cccgccgagcgccaggagctgcgggtaggaggggcgagagaaaggatgggggtacagaaccggaagaaacgaagggctcgtccgcttcggcttgtcctaatttggtgcccaatctgaagctg

SEQ ID NO: 302592 - DNA, 122 bp, Homo sapiens
tcgcgtgggccctgcgctttcatccctgccggggacgccggggttgcgggataaaccgctcgacacaccctgcctccctgactgcgcctgtgtgacacatacgttcactggtggggcacgca

SEQ ID NO: 302593 - DNA, 122 bp, Homo sapiens
agtgatccacccccgttggcctcccaaagtgttaggattataggcgtgagccactgtgcccggcccgaaagtcatttttgtaaaactcttaggaaatggaaacgtcaaaggatcaatttctt

SEQ ID NO: 302594 - DNA, 122 bp, Homo sapiens
cacagactggccgagctgggggcgtccccagagaccagagaccctgggaatggcgagcatcgaggcgcggagttgcatggaagacccagggcccgctgtgctgctgactgctccaggactca

SEQ ID NO: 302595 - DNA, 122 bp, Homo sapiens
atccaggctgccttgcactgcctggtctggttgcccagaggggccacactggcagactgccggggtgggctcccaggctgaccgcaccgtctcctctctgcttgtctctcatctagtggacg

SEQ ID NO: 302596 - DNA, 122 bp, Homo sapiens
agcaaatgacaaacgacgcgaggtctccacatctcacatccagcggccccggccaccaggcggtgacacgctgtctgcagaaacaacccggggccacacctagccccttccctttgcttccg

SEQ ID NO: 302597 - DNA, 122 bp, Homo sapiens
gctcaaacacaaatggacacgcatgtttagatacacaaacacacacagagatatagtccccggcttgctaacacgcacacaggcaggcaagtgcagagcttggctgagacgtgtgtgcaggc

SEQ ID NO: 302598 - DNA, 122 bp, Homo sapiens
agttctatacatttccatagagtttacatcctgcagttaaaaggcagggagggctcagcccgggccccacagctccaggccatcccctacgggctgcccacagtgcccccttttctctagcc

SEQ ID NO: 302599 - DNA, 122 bp, Homo sapiens
atgataaggaagataagttctaaatccaggctaaatatcgtagttccctcaaggcttgtgcgcgtgatatggcttttagacctcaaagtcccggttccctcccctggattcttctccctgta

SEQ ID NO: 302600 - DNA, 122 bp, Homo sapiens
aggattatttgtgtctcatttatagtaccctttccacttggccttttcaaaaatgagaaacggctcttataaatgacatttttatttgtgctacttctttacatacaggtttataagcacct

SEQ ID NO: 302601 - DNA, 122 bp, Homo sapiens
agagcgaggcgtgagtgcccaggaccggctcccagctccgcccgcggaccctgccctacgcggcttcaccagagagcgaggaaagtcgctttaactggaaagaggaaccttgcggggtccgg

SEQ ID NO: 302602 - DNA, 122 bp, Homo sapiens
gtgggaaggagagcttagtgacgatggaaactatgtgaagcatttcttgccaagatgtggcgcctttgccctgatggtgttctttttataaatcatgacagctccagtttcatcacggcaga

SEQ ID NO: 302603 - DNA, 122 bp, Homo sapiens
tttcttctgcctctctctctgcgcccccttctctccgtgtcacgctccctcctggttctgcgcgtctacaaacttttgagcagaacacgagcctcggcaaacgagtcccgcagctcctcctg

SEQ ID NO: 302604 - DNA, 122 bp, Homo sapiens
gaccttgttctctgagagctgtggagaagctgtgaatcgcttttctgtcttggcatttcccggcgggacccatgaagaaaagagctttccttctcagcattttcaaagcactttattgagtt

SEQ ID NO: 302605 - DNA, 122 bp, Homo sapiens
tttcagctcaggggcaacctggctgggagtatcagaggccacagcattatggaccaagagcgcaggccgcaccaccagcatcccaggcgcctctgccgtgcgcatgtccctcttatataaag

SEQ ID NO: 302606 - DNA, 122 bp, Homo sapiens
catgcacatccatattttcgcatgctcctgcacatgtgcggatatacatacacacgtatacgtgtgaactctctgggcagactcggccccactcgcttggggtctgaaacagcctttgtcag

SEQ ID NO: 302607 - DNA, 122 bp, Homo sapiens
ctcctctgcctgtgaacgccgtctgacgggtcttggcatttgcccccccagagttagccccgtgccggatgaacaagtaacaggtgtcccgcgccaattctctggccagaaagaagccagct

SEQ ID NO: 302608 - DNA, 122 bp, Homo sapiens
atttcaaaggagttcacctaggaccccaggttaaaaatttctgttctcccaactattttacgattgtagtgaggttgtggctacagataggtgatactcttttcattgtagtgttgacctag

SEQ ID NO: 302609 - DNA, 122 bp, Homo sapiens
ccatccatcttgaatttgacgtcatcccacaccagggatgaggtcatcgcaggcatcgctcgtcacgtgcgcggcactctgattgggcgccgggcgccggagggcggggcggggggggggcc

SEQ ID NO: 302610 - DNA, 122 bp, Homo sapiens
ctactgtgaggtcacaaatagccctacagttgctctttggaaccctcgctcttagatccccgagccaccgtataagaagtccagctaccctgaggccgtggactgcagctgcactccagtct

SEQ ID NO: 302611 - DNA, 122 bp, Homo sapiens
agggaggtcagaggctgcgggcagcgacagctgtcagcggcccagctccatgcagcaaggcgccgtcggggctcccggcactgctccctcctcggtggctgccgcttctgtgtgtccccggc

SEQ ID NO: 302612 - DNA, 122 bp, Homo sapiens
cgcggcggctggatgactaaaccccgagactctagaaccaaaggactagggggaccagggcggaggatggtttactcggggaggaaattggcttgacttgtctacttaccaagtcagggaaa

SEQ ID NO: 302613 - DNA, 122 bp, Homo sapiens
cgcccctgatgcaccagtgctaggatggccatggagaaccccgggccggcgggacccactcgggggcaccagaacttccctaaagcttctcagggtggatcccagcgcccgggttagatagg

SEQ ID NO: 302614 - DNA, 122 bp, Homo sapiens
actcagtgccctcttgcagacttgcatagaaataattactgggttgtcgtggaggggacacgagacagagggagttctccgtaatgtgccttgcggagagaaaggtccaagaatgcaattcg

SEQ ID NO: 302615 - DNA, 122 bp, Homo sapiens
gcgctccgcgggaggagggcggatgatggatggcctgtctgccggcccgggtccgagccgcgggggccgccgagggaaagacgggcgcgcgcgcgccgctccgtgcccagcgcagacagcga

SEQ ID NO: 302616 - DNA, 122 bp, Homo sapiens
tggccagctgggcgtggttcggagagccgggcgggaaaacgaaaccagaaatccgaaggccgcgccagagccctgcttccccttgcacctgcgccgggcggccatggacttgtacagcaccc

SEQ ID NO: 302617 - DNA, 122 bp, Homo sapiens
cgcggccgccggaaggggcgggtcagcgggcgggcatttcctgccggtgcctagggccgacggggacgctggcactggtggggagctgttggggggtcccgcatctagggctctcctttcct

SEQ ID NO: 302618 - DNA, 122 bp, Homo sapiens
ggcttttgttgttttttgttttttgtttttaacaaattcaaatgtggcttcctcacttcgcgaagcaggctcaatggccccacagagtcgctggagggaaagaaggattgccgcgttgtggg

SEQ ID NO: 302619 - DNA, 122 bp, Homo sapiens
ttgcttcccggtgacccagactttggtcagaagagtaccacagcccaacggggctgcggacggcaggcgtggagcacgccttggcgtttcccctcaaccctactcctctaccatcggagctg

SEQ ID NO: 302620 - DNA, 122 bp, Homo sapiens
cggtcacagcggcggatacagtggagctcaatgccctgattgtcatagatgtggagccagcggttctgagcaacagcaagcagtgcctcagaatggagaaacctgggggagaggaagagtgg

SEQ ID NO: 302621 - DNA, 122 bp, Homo sapiens
tagtactcaagttgaactttttgcaggagtttttacctgctctcaggttctctgccctgccgactctatgagatccgtagtcacgttctgatctcagtgagtctgtcagtctcccatcttct

SEQ ID NO: 302622 - DNA, 122 bp, Homo sapiens
gatctttcagctactctactcctatgatcgactgcatgtaacagagattctaacgttcaacgacaagaggattctcaacgtccactccaggctcacagatgccaaactggcattaactggcg

SEQ ID NO: 302623 - DNA, 122 bp, Homo sapiens
gccagagcttgctgcctctgtgtttgaaagccccttgcccgtcgtggggatacataagggcgggcacctgactagtcttgttcccactgtctccccagggccgggaacagtgtctagcacag

SEQ ID NO: 302624 - DNA, 122 bp, Homo sapiens
ccagagccaggcttctttcccagggggcactgggggccgggtagcccccggggccatcagcggataagcggcttttgaggtgcttccgcagctgttcatgcaccttgatgcagccataccct

SEQ ID NO: 302625 - DNA, 122 bp, Homo sapiens
tcccctccgttcagcatccaggttccttacggctacagtgccccagccccgcctcaccagcgcgacattctgccctgcctacccactcagacacagtgcccttttcggttcttcaaacttgc

SEQ ID NO: 302626 - DNA, 122 bp, Homo sapiens
gatgggtgttagcccaggccagaaccacagtggatgtgtaggcagccaaccacttggctccggatgctccaatccctcccctgtcactcaccccggagttacaccccacgtcgagccccaga

SEQ ID NO: 302627 - DNA, 122 bp, Homo sapiens
caaggcctcaaaccgtttcaaaactgttctagcaagcactgaaggaatgcatagggtcaccgcagacccaagcacgctggaggcttgctaccctcattcacccaaatcccccacactcaagg

SEQ ID NO: 302628 - DNA, 122 bp, Homo sapiens
aaatccctacttcacaggactctggatacttggacacttgcttcctcctgtgcttctgtacgaatctcaggactgtgggacactctctgcactcttattcttgtaattctcttctctccgga

SEQ ID NO: 302629 - DNA, 122 bp, Homo sapiens
gaggctggtgctcttctcattaccctttgagtactgagacttggccactgttgcactctccgggagccaagctgagcagggacgcagggtctcagactctttggtttcagtcaacatcaact

SEQ ID NO: 302630 - DNA, 122 bp, Homo sapiens
cccgccggcgcctcgggcacaggcccccgctccaacgcactctccctcatgatccctgaccgctctgctccgtctgcctgcaactgctggccgcactacggtcaggggcctcctttccctgg

SEQ ID NO: 302631 - DNA, 122 bp, Homo sapiens
ggctgggcccagggcagaaaagtccaggttcccatgcggcctgggcccacgtggagcgggcgctgaatcaccgttcagccgcccccctcccctcctccccgaccggtgcccgcagtccccgc

SEQ ID NO: 302632 - DNA, 122 bp, Homo sapiens
gacctgacagaaagagcactggaggccaaggcggtgggtgaggaggggatccaggtctggcgcccttggcgtgggcagggaatgttaaagaatccaaagatttgaggaagcagtaggagtgg

SEQ ID NO: 302633 - DNA, 122 bp, Homo sapiens
tgccacaaacattcaaatagtaaaatcaaccagggcagtcgagactggacatttctatgtcgatgtctgtttatacctgagcaaagaaatactaagtggccgtgtccctagccagatcagga

SEQ ID NO: 302634 - DNA, 122 bp, Homo sapiens
tcaccacaagaagggctgccaggtgaggaaagggcccgcccccgcccccagccgttcgggcgttcgccccttccggggcccccctgccctgcttctgtgtgctcagctcgcgtcgtgcagtc

SEQ ID NO: 302635 - DNA, 122 bp, Homo sapiens
gcggggcgccgtcgggcgagcacaggggcggtccgtggtgctgctggtgcccagctgcggcgcggggagccgcgcagtgcacggcaggggcagggacccagcgccccgaggccgcagtcccg

SEQ ID NO: 302636 - DNA, 122 bp, Homo sapiens
acaaagagtgattggccccaaaagatcagtagttctgagcttcagacactgtgcccaaaacgctaaagctgataggaagaatagcataataattgttaagagcgcggtctgtggcatcagag

SEQ ID NO: 302637 - DNA, 122 bp, Homo sapiens
gaggctcggggctgcgcaggagcccacagcggggggccaggcggggaggctcaggcatggcgggctgcaggtcctgagccctgccctgccgggaggcagctaaagcccggtgagaaatcgag

SEQ ID NO: 302638 - DNA, 122 bp, Homo sapiens
cagagacgccctcaggagaagccgcctgcggaaggtgcagacgttccctaggctgctgtccgacagccccgaggccaccctctgcctgccgctgacccgcgggaaaagccagctgcccatat

SEQ ID NO: 302639 - DNA, 122 bp, Homo sapiens
ccaggattgagaaagtatgtgtacagttaaattcacacagtgaagagtttcccattcattcgaaaacttgaccgaaaaaattaacacaacctttggagaatgtgaaccactgttcccttgac

SEQ ID NO: 302640 - DNA, 122 bp, Homo sapiens
aagagagcttcttattagctgctcctctctgttgtagcaacatttattatgataataactcgggcataaatcaaaccacaggaaccttcagtgcctgcgaggtgacaggagcgattctgatg

SEQ ID NO: 302641 - DNA, 122 bp, Homo sapiens
atgtactacacacagaggttactgcagacactcaggactgcagggacagccatagcagtgcgcacaaggactaaagggaaaagggcccctaaccctgagggagcgacactggggaggtcgtg

SEQ ID NO: 302642 - DNA, 122 bp, Homo sapiens
tctctcaagcacgaggttttgaagattatgccggtgcagaagctgacccgcgccggccagcgcaccaggttcaaggcgtttgttgccatcggggactacagtagccacgtcgatctgggtgt

SEQ ID NO: 302643 - DNA, 122 bp, Homo sapiens
tcatggggtggagtccgggcagcgctctgagaagtgcgtgcagcctagggcctttctcaccgagagctcagaccgaggtctccatgagccccggggagcaggaagccactgaacctcatcct

SEQ ID NO: 302644 - DNA, 122 bp, Homo sapiens
ctgtcggatctctaggctggatccgggcctctccaatcaacagcggttaggagggcggggcgcgtgcgcgcgcacctcgctcacgcgccggcgcgctccttttgcaggctcgtggcggtcgg

SEQ ID NO: 302645 - DNA, 122 bp, Homo sapiens
caaatgatttgcataatgaggaagcagccgccaatcagagtgggagttgactgggctcgccgggggcggggggggcggctgggctcacgcgctcctgctcgccatggcaaccggaccctcga

SEQ ID NO: 302646 - DNA, 122 bp, Homo sapiens
gaaattatttctaagaaaggagtaaaagtgagaatgaatgagtacatagtgtaacgcttccgagctttggtgcaggaggaaagtaaataacaaggataccccagggctggaaacttggcaat

SEQ ID NO: 302647 - DNA, 122 bp, Homo sapiens
tccccgggcgcgtcaggaagtggcgcgggcggcaggcggggaccggaacggggcgcggggcgtgggtgcacgtggcgctcacgccggagccccacggtagaaggattgggggtgccggaagc

SEQ ID NO: 302648 - DNA, 122 bp, Homo sapiens
gtatacataagtcagtaaaagcaagatgcttccacttttggatgacttaccgcgcggtcgcgacccttcccacgaagaggcttttcactttgctgtcatattaggtcagcttggaagaagtg

SEQ ID NO: 302649 - DNA, 122 bp, Homo sapiens
cagccacggcctcgtggggcttccagcccagagcaggagacaacaggaagtcccggcctgcgatggtttctggtgttgtcaggtcatagctggagccctgtggctcagggagacatggcccc

SEQ ID NO: 302650 - DNA, 122 bp, Homo sapiens
tcctttaataggcaattttcattgtcattttttgaaggcgacttcgtattactgtattctcgatgcgttgggattctagcttatctctgcaatctaaacacttttcagtaaagttcgggggc

SEQ ID NO: 302651 - DNA, 122 bp, Homo sapiens
ctcctccggagcctcggttacctccatgaccccctgctggcccccctccatagcccccaccggagctgcggggacccccatcacggccccagttctgatggtagtcataactcattgtcctg

SEQ ID NO: 302652 - DNA, 122 bp, Homo sapiens
ggttcaccaatggcctctgactggtgggggggtctcctgctttaaggcctctgctgtgatcgtgtgtgaagggataagttctccctcactggaacaaaatcacatttctgcagctcttgttg

SEQ ID NO: 302653 - DNA, 122 bp, Homo sapiens
ttgccctgtgttgccttagagttttcttcccgaggttttcctagaaagccactgtaaatccgagctgtgcactcagaagcctcccgggtgtgtccctggtgatgtccccggggcctctccct

SEQ ID NO: 302654 - DNA, 122 bp, Homo sapiens
tccatctgtatataatggggtcagatgactgttgacatgggtgattctggtcctagatgacgctcgtggtctcattccagcttgggctctgtggtgagctgggcgagttctttccagccctc

SEQ ID NO: 302655 - DNA, 122 bp, Homo sapiens
ggccacgaggcctggccttgtgagctcccggctgtgtggcaccgaggattgtgagcccgtcgagcctccccatgagtcccccgaccccaagctctctgctgaagtgaggtggggcgggaagg

SEQ ID NO: 302656 - DNA, 122 bp, Homo sapiens
ttgcaggtcgtctacttcacagccacttttccattcgccatgctcctggtgctgctggtccgagggctgacgctgccgggcgcgggcgcaggcatcaagttctatctgtatcctgacatcac

SEQ ID NO: 302657 - DNA, 122 bp, Homo sapiens
ggaagatattactcctcattactcatccttctctgtctcagggctcagcttgccagggggcgggaaagcaactggcggctcagtattaaagatcagcaagctgaatggtggtgcttgcacaa

SEQ ID NO: 302658 - DNA, 122 bp, Homo sapiens
gcggtgacgggtctcgggcgcccagccagcgaggggccggctccaggtggtgggagcccacgcccccggccagcactctggccacagcgcagcacctgccccatgagagcctcctgttgcag

SEQ ID NO: 302659 - DNA, 122 bp, Homo sapiens
ctggaagctttgagtcccctagggcagcgactgccctggcagcctgaggcagagcttggccggacctggcgacccctgagcttctgggaaatggacatggccagcaccgccttcaggttcct

SEQ ID NO: 302660 - DNA, 122 bp, Homo sapiens
cggcagggcagtgctgtacagggacccccccccacccccgcctccctgcccgggcacatccggcccacaggccagcctcgctcagcacacggctgtacctggatcacgcccatgcccaccgg

SEQ ID NO: 302661 - DNA, 122 bp, Homo sapiens
gtctgcacccacgcctccacccccgtctatccaggtttctgctgctgggagagtggccatcgccaccggtctgcagtcccggaccctcccactcacccacgggcagcccaagacgagactcc

SEQ ID NO: 302662 - DNA, 122 bp, Homo sapiens
caagactccctgctgagagagcaagcatggctttcagtcctcacccttcccttcctgttgcggcttctgtgctcctatctgtacttcccgttccccacaccccaaccccctggactctgccc

SEQ ID NO: 302663 - DNA, 122 bp, Homo sapiens
cccccccccccactgggttccggaaaggctcagggttgctcccgcgtttcggttcagtgacgtcgtaaattggaatgaggcatccagtttagcaacagcagagatgacgactctgcgattct

SEQ ID NO: 302664 - DNA, 122 bp, Homo sapiens
tcctccgcccatcaacacgcgggaatgcggcgctgaggagctggtctgcgccgtggaagccgtgatcaggtaacacgcagtttcttagtagctgcctctgacaactccaccttgctttgagc

SEQ ID NO: 302665 - DNA, 122 bp, Homo sapiens
tggttttcttgtggaaaagacattccaggagacaaagaattgatgggaaaccatttagggcggcttttggagttgtccaggcaagagataatggaacttggaaaagtaaggaggtggtagaa

SEQ ID NO: 302666 - DNA, 122 bp, Homo sapiens
ggtcagcattccgacgctcccagctttggctgcagatgcttccctgtcgtttagtgtctacggggcttggattgtcctcctgacgtcgggactggacacaaaccgtcacttctcgagccacc

SEQ ID NO: 302667 - DNA, 122 bp, Homo sapiens
cattgagagcattcggtggccagtcctgttgaatgaaatctgagcactgagctggatttgcgtgccttgtaggtgactggtgcagttgcagcaccaggatagatagtgccccatattccgat

SEQ ID NO: 302668 - DNA, 122 bp, Homo sapiens
tatacagcctgcagaacaataagccatataaacctcttttcttcataagttaaggaagaccgttgcttgtgactcctcgtgtccaattcttagctttcagtgtcactgtggaaggaaggagt

SEQ ID NO: 302669 - DNA, 122 bp, Homo sapiens
cagtgatctatcagggctggcctagtgagaacacggccaatcagatgctttcctggaacccggggccaaagctgccccaggggagtgtggtagccgcaggcagaagggctagcccggagaca

SEQ ID NO: 302670 - DNA, 122 bp, Homo sapiens
ttgtagaaatagtctgtctgtgttcccatgctgattgaaatctcttgggctcaagcgcctcgccctcccaaagtgctgagatgacaggcaggggccctgtggccagccgagtatgactctta

SEQ ID NO: 302671 - DNA, 122 bp, Homo sapiens
ggaaggctcaactcgggcttgcccggggggctcttccccttcggcgtggaagtttcaatgcgaggaagcaaagagcctaaaatacgaacacccaggaaattaagcaggggaaggggcccttc

SEQ ID NO: 302672 - DNA, 122 bp, Homo sapiens
ggtccaggagggggatccctctccacaggggcagccccaagggctcggtgctatttgtaacggaataaaatttgtagccagaccccaggtgcctgctctcgtctttctctgggtggcctctg

SEQ ID NO: 302673 - DNA, 122 bp, Homo sapiens
gatccatctccccaggagcctggtgatctttacttacaacaggaatccattttccatttacgtctgtgtctccagaacagtgatgggaattttatggtgtttgatacttaaaaaaaaaaaaa

SEQ ID NO: 302674 - DNA, 122 bp, Homo sapiens
caagggctcaaggacgtctgtgaaggagggataaagaaggttgcacaccctccttcaggacgggaattgttctgaccctggcatatcacttgaggtgtagctttgtctcagagcctctgtag

SEQ ID NO: 302675 - DNA, 122 bp, Homo sapiens
agccccgggcccgggcggactctcatgccgagagaccggagcggaaactggggaagctgccgcgcggagccagggtcagcgaggcccggcccggcccctgccgctcatggcccggcctgccg

SEQ ID NO: 302676 - DNA, 122 bp, Homo sapiens
caagtctgaggctgattaaggctgcatggtaactttgtcttttttcctaatttggaagcgcgtaaatggttaaactcctggcctgggctgggctggtgcacagcctgggcccggcgcggcgg

SEQ ID NO: 302677 - DNA, 122 bp, Homo sapiens
gaggcactggcctcctctctcacctttgcaatccccaggtgaagagatagcacctgtcggcgtgattctcaagggggtttgtgtttattcagcaattgttggtcttgctcggggatgttctc

SEQ ID NO: 302678 - DNA, 122 bp, Homo sapiens
agtatccatattgttgcctgtttactttaaacttctggccatattggcatccacacacagcgccaccttgaaccagctcatcacgcagcattgctttattgaagattttgaacctgatataa

SEQ ID NO: 302679 - DNA, 122 bp, Homo sapiens
gcggccgagccgggatctttttctctttccccggaaggaaagcgcagcccgggctgggctcgcaaggtggggaggtgcgggactgggcgtggggaggcggggcgcgcgccgggggacccctc

SEQ ID NO: 302680 - DNA, 122 bp, Homo sapiens
tgaagcggctacaagtgttccttctcaatctcacagtttcaaatgtgaattactaactagcgaggatggagtccaatgattttcaaccttgtctgctcattgggctcacctgcagagctttt

SEQ ID NO: 302681 - DNA, 122 bp, Homo sapiens
acgggcgttgaggccaccctggccaggctgcgggcggagctggtgagagagcgggctaggcggacggctcccagggctccctctcccgggtcctctcctccagctgcagagccgctggccgc

SEQ ID NO: 302682 - DNA, 122 bp, Homo sapiens
tgaactcctgacctcaagtgatcctcctgccttggcctcccaaagtgctgggattacagacgtgagccaccacgcctggcctgcagcccaccttttatgtgcactgcaccatctgcatgggg

SEQ ID NO: 302683 - DNA, 122 bp, Homo sapiens
agaagatggctgcaacacagagatctctgcttcagtcctggggatccccactgacagtttcgggttgactccactaagagacacactgtagaccagctctgggctaacatgcctcctcagcc

SEQ ID NO: 302684 - DNA, 122 bp, Homo sapiens
acaacgccaaggctgtggtgaagaccttccacgagacggtgcggccccggggggcgagggcggggagcagggccccgggaacccggcggggtgtgtctcgtcctggatgaatcctgcctacg

SEQ ID NO: 302685 - DNA, 122 bp, Homo sapiens
gccagtcaggtgtgcactactgtgcatctgttttacctcagcacctagaagtcaagtgtacgaggatttttgaagcttgcttgtgtatgtgtgcgtgtgtattttgctacatgtaaacactg

SEQ ID NO: 302686 - DNA, 122 bp, Homo sapiens
gtaggatgggtttggcagagcgcagcggctcactcctgtaatcccagcgctttgggaggccgaggcgggcggatcgcttgaactcagtagcgagattatagtaaactattataggatcgtgt

SEQ ID NO: 302687 - DNA, 122 bp, Homo sapiens
cagcgccctgaaccatccagacatggtgtgacctgaacccagcaccatgaaccatccggacgtggtgtgacctgaacccagcactctgaaccatccggacatggtgtgacctgaacccagcg

SEQ ID NO: 302688 - DNA, 122 bp, Homo sapiens
caggggctccttgctgtggttgaaggggtgctcgaagaccacggcggccagcacgctggacgagcagttgtcgtacctaatgtagtcctcaaagtccttctcggagggaaagccgcgcactg

SEQ ID NO: 302689 - DNA, 122 bp, Homo sapiens
gccttgggctctgctaccctctccccgcccagggaccacccccagacactccagggaagccggcactgccccacctggtggtcactgctggcctgggctgccctggcagacagaggcccctc

SEQ ID NO: 302690 - DNA, 122 bp, Homo sapiens
ggggctctgcaggctccttcctgtctcacccccacactttctttccctcatagtcactttcgaagtatagatcctggcctcaaagaagatactctgcaattcctgataaaaggtgtttatgg

SEQ ID NO: 302691 - DNA, 122 bp, Homo sapiens
agcatccgcagaagcaggggccgcacaggcgcgcagatgtgtgactttctaaggtccggccgcccaaagctacgccgaccaatccaagtagcgaaagtcgctttggccctggcccgttacct

SEQ ID NO: 302692 - DNA, 122 bp, Homo sapiens
catggtgagaccctgtcttggaaacaaccacaacaacaaaagaaatgctggttcacttctcgtgcagccctattacaaatcctttgggtgtagcagctcagggtattactgttaaccatttt

SEQ ID NO: 302693 - DNA, 122 bp, Homo sapiens
cggggacactgagacctagaaactccccaaaagtaacaccagcctgctaaacaaaggtggcgcgatctgatcaaagaacacaagcctcagcgaccagtaagttgtcccaacgccccttgagt

SEQ ID NO: 302694 - DNA, 122 bp, Homo sapiens
actctccagtggcgcacaccttagagggtctcacatgggaagccccatggtgggcccagccgggttcagcacgtgggcctcctgggagccgccccacacctgcgcttctcaggggcgcccgc

SEQ ID NO: 302695 - DNA, 122 bp, Homo sapiens
tccctgggtctctgcggatttttaaacttccccccaagttggcatagattcttgtgaacacgctattccttactgacgtcgttttcttggcgtttgggagtaataaaaggtgcaaatgattt

SEQ ID NO: 302696 - DNA, 122 bp, Homo sapiens
cactctcatctcaggatccccctcaagcacatccctgccggcagcatctgttactactgacgctcctctacttccctcttgcgctttctcaatagcacaaatggatccagttcttaagttct

SEQ ID NO: 302697 - DNA, 122 bp, Homo sapiens
aagcccgcgcggacccgccccctcccaggcctgcccgccgcgcgcctgcctcggcgccctcgcaaccgcggccaggccaacctcagccggaaactacatttcccagcaggtcgcgcgctcct

SEQ ID NO: 302698 - DNA, 122 bp, Homo sapiens
gaggatcctgattccatttagtcccaatcccttttgccagacagaacatgctggaaacagcgtgacaaagaaggttataatacacattttcagagtttctagactgaacagtgggagcttca

SEQ ID NO: 302699 - DNA, 122 bp, Homo sapiens
tgagatgacatagaaagtcaaagaaggcttctccagaaagggggcatcaaagctgggacacgaagaaagagaatcagacagccagacacacaagagccgacaagatctccagaaggagtgct

SEQ ID NO: 302700 - DNA, 122 bp, Homo sapiens
accctgggcctgtgccctcctactagcaccgccctcctcgtctgcagtagccaatcaacacgaggcttgtaggctgccgttcctcgattggctacggctctagctccgcccgccgcacttgg

SEQ ID NO: 302701 - DNA, 122 bp, Homo sapiens
tttgcaaatagacccaggcttgactggcaattaaacatgaaacttctcattgggtattttcgagactactacggggaatcagctaccagcttactgccatgtggagaactgcacgagattcc

SEQ ID NO: 302702 - DNA, 122 bp, Homo sapiens
gccctttttccacgcagcccaggggccccagcctcctggcctccacgcctgcgcggctagcggatgaggacgttaatctcggccacactggcctccagcacgttctcggccgtggtcttgcc

SEQ ID NO: 302703 - DNA, 122 bp, Homo sapiens
ctttcccagaaattattcctcgaagtatgactcgaatcattcctctgttgggagatgtatcggttcagagctgactttctgctctggttgtttactgaaaaatggtagcactggcaattcag

SEQ ID NO: 302704 - DNA, 122 bp, Homo sapiens
cagagcctttagagcatttaagactctgggctatttgcttatggttctgaggtgtcttttcgaaaatgggttttctagtcaaaatgaaacaaaaaggcagacagctgtgtggattttccctt

SEQ ID NO: 302705 - DNA, 122 bp, Homo sapiens
gggctggagaacggcttgcccaccgtcagggagaaaacgcgggccgggagcaagaagtgtcgcttcccagatgacttggatacaaataagaaactcaagaaagcctcctccaaggggaggaa

SEQ ID NO: 302706 - DNA, 122 bp, Homo sapiens
caacgtggaagctgcatttactgtctctggccttaggaaagtaacttagccttcctcatccgttagggggatggcagtaggagcttcgtctgggtcgtcatgaggaatgcagagaatggaaa

SEQ ID NO: 302707 - DNA, 122 bp, Homo sapiens
aaaagaatgcccaacggaccagcacctgccccgtgcagtgcaccatgcctggacttcacacgctctagcttgccaagctctctaagcccatctgaggacaacactgtttacgatgtttattc

SEQ ID NO: 302708 - DNA, 122 bp, Homo sapiens
agggtgttaaaattagtaacagacaaaataattcaggttggacaatagagacagcaacaccgattttgatccaggtataacaatgggccatgcattgacaatgacctaaaagacatgtgttc

SEQ ID NO: 302709 - DNA, 122 bp, Homo sapiens
ctgcagccggtgagtgtgtgctggcgctgggggctggaacctcctaggccagtctctgggcggtgccgcaggaccctgctcgctgcggctctgaggcggaaacaggggctggggccgagcgc

SEQ ID NO: 302710 - DNA, 122 bp, Homo sapiens
tagataagtatttttatgaaaaataatttatttatatcagaaatgacagtaacagataggcgaggaatttgtgcatgtaaatagcatacccatgtttgaacttacagattaagcataaaatg

SEQ ID NO: 302711 - DNA, 122 bp, Homo sapiens
ccgcgcccacccaggtcgctgggaggtgcccgcccgggaggcgccgcggccagtgcctgccgttagcttcaggaagaactaggattgagtaagaaacgactagggatggaagcacttggcac

SEQ ID NO: 302712 - DNA, 122 bp, Homo sapiens
gaccaaaaaaaaagaaaaatcttcaaggctatcttaccacaatatattatactactactacgaatactacacaaatttcaagcatgttctctgatgatacttattgattagcactttcttct

SEQ ID NO: 302713 - DNA, 122 bp, Homo sapiens
cgggcaccgtccccactctacagcgtggagttctccgaggagcccttcggggtgatcgtgcgccggcagctggacggccgcgtgctgtgagttctgggctctgtgccagcatgatggggagg

SEQ ID NO: 302714 - DNA, 122 bp, Homo sapiens
gaccgctgggcacactgctttttggttgcaaagacaggatttaggccaagagtgtccccacgtcagaaagactgggccagaatgccaggcggccgaggcaagcagcagaatgaaacccaccg

SEQ ID NO: 302715 - DNA, 122 bp, Homo sapiens
tgtaacacttctttcactttcaaaagtgtcccaatttgaccataaataatgtggttaacccgtacataaaggaagaaatgtaatgtgctgtgggaggagaagggctcatgcaggaagacctc

SEQ ID NO: 302716 - DNA, 122 bp, Homo sapiens
ggccccacaatctacgcccgccgcctttttccgcaaggaaggagaaggctcgcgtggccgcgggaagctcagtttttattgaagacagagtctgggagaagaagggggactccggaagacag

SEQ ID NO: 302717 - DNA, 122 bp, Homo sapiens
aagccatgaactccacctgctctctgaaggctcgccaacctgagtccagcagaatgttctcgcttgtgtccaaccccactggtttaggctgaatcagcctctagggcccagaggcactgcac

SEQ ID NO: 302718 - DNA, 122 bp, Homo sapiens
ctggctgcgaaaaccgccggccttaaagagcccgcgacgcgggggcgggcggccccggcccggagccacgcatttccggtctcccggcacccagcctccggcaggtgcccccggagctcacg

SEQ ID NO: 302719 - DNA, 122 bp, Homo sapiens
tttcttcccccgttaatcaacattagggtaattggcacgctacatccatttacagtgtggcgtgtgtgcttgcggctctctataaataatgaaaaaatcacagtaatgaccagaaatgtgtg

SEQ ID NO: 302720 - DNA, 122 bp, Homo sapiens
atccaccttctgtgtctatggagtcacttattctggacatttcatataagtggaatcacacgacatgtggtcttttgagtctagcttctttctttcttttctgagacaggctcccactctgc

SEQ ID NO: 302721 - DNA, 122 bp, Homo sapiens
ctgatgtattgtgaagccagaatacaaatggcagagtaacatagagtgtggcagcagccacggaaaagtgtagtggagactcaacaatttagaatgaggagttataggaaattgaaggaaat

SEQ ID NO: 302722 - DNA, 122 bp, Homo sapiens
ccaggggacgggctggagctgggactgcctggtcagacccagaggacctcagtgcctgcccgcctccaggcaccttctctactacactggcaccaaatacctgagtctcagctccttctcct

SEQ ID NO: 302723 - DNA, 122 bp, Homo sapiens
gccgagctccaagccggcgctcctacggcttggcgggaaggaggcccagaagatggggtgcgatttgcacccggattttcctgggctgcagcatctcgctcctgtgtacccaatgacctgtt

SEQ ID NO: 302724 - DNA, 122 bp, Homo sapiens
actaagctcatctgagaccttgatataattttagtgcaaatccctagggtccaatgcaagcgcaaccctgtattagggaaagacattaccaggtggaacttatcttgtacaatttttgtaca

SEQ ID NO: 302725 - DNA, 122 bp, Homo sapiens
actgccgcagcagaaccggtgtccttcacctgcctgcgtcttctgcagttcgttaagcagcgcccttagctcctgtgacactttagggagaaagccgcagcaccggcgatgttggccgccat

SEQ ID NO: 302726 - DNA, 122 bp, Homo sapiens
acagggtctttaaataggtgatgaagtcagtatgaggtgattagggtgggccctaatccacgatgatgggagtccttgtaagaagggagtaggacacagacatgtatggagggaagacgcgg

SEQ ID NO: 302727 - DNA, 122 bp, Homo sapiens
ctcctgccaggtctccagacggtgctgatcacggaggctgatgccacctacctgcgctcccggcaggagcaccccgcactgtcctccctgctgttctagagtccaagtcagcactcatgcac

SEQ ID NO: 302728 - DNA, 122 bp, Homo sapiens
tctacaaatttagccgtgcaatctaatagcgagcaggccgagacgcccgcgattgaaggccggggtggagaaagtaataagggccctggaaattacccccatcccatgtcacccactctttc

SEQ ID NO: 302729 - DNA, 122 bp, Homo sapiens
agcagcatgggctttgaggagctgctggagcaggtgggcggctttgggcccttccaactgcggaatgtggcactgctggccctgccccgagtgctgctaccactgcacttcctcctgcccat

SEQ ID NO: 302730 - DNA, 122 bp, Homo sapiens
aaatactttttaatttattaaataaaaacatgaaagccgtgaatttagtgctctccatctcgggccttcctggcctggtctctgggaagataagggtcaggagcgggctgggtggagagctc

SEQ ID NO: 302731 - DNA, 122 bp, Homo sapiens
aattagaaaggtgatattattatatcacaattttaccactcatatttgaacctccacctccgggttcaagctaggaatctccaatggaagtaattaacagagcacatcataggttaaaaaaa

SEQ ID NO: 302732 - DNA, 122 bp, Homo sapiens
aaaaaatggatcaaagcgatgtgttcccagggagcccctgttttctcgtttcttttcgtacgcccagctttgcagtgccagaaagctgttatctcagcactgctaaggaaaccccagcgcgg

SEQ ID NO: 302733 - DNA, 122 bp, Homo sapiens
gtaagaaccagaggggcagaaacccgcacgaaggaaaacctgtggtttcaggtggagaagcggcggcgtgaggccttcttcactgtcgttattggggtatcaggaaacaaatgcacagtgaa

SEQ ID NO: 302734 - DNA, 122 bp, Homo sapiens
gccgccgcgggcgccatcttggctgcagcatcacctaagagactcggtggagggcgggggcggggcggctccaggcggggccggcacgaggcggggcggggccaacgccggctctgggcggg

SEQ ID NO: 302735 - DNA, 122 bp, Homo sapiens
attgattgacttttgaatattgaatcagctttgaatatttgaaataaaccccatcttagtcgtggtgtgtaattctttatatatattgttaaattctattagttaggattttaaagaatttt

SEQ ID NO: 302736 - DNA, 122 bp, Homo sapiens
ccacagatgtgcaccgggctgtactttggcttaagactgcaggtggacatctccactgcccgggaatcatggagtgtgtagacaggacagcctccatggaaggctggtcataccagagtccc

SEQ ID NO: 302737 - DNA, 122 bp, Homo sapiens
ctttcaagcccccatttcatgcctggatgctgcagcccgcatgagggcacccaggggagccgccccatgaaggcctccacatgcgcagatgctgctccctcggcccctgcgccttccctcct

SEQ ID NO: 302738 - DNA, 122 bp, Homo sapiens
cgcagccccgccccaagcgggagcgggccgagctcctataagacaacctgtgattggctccgcggtgccccgccctcaccgggctctgagtgctcttgcccgtccggccccagccgcggccc

SEQ ID NO: 302739 - DNA, 122 bp, Homo sapiens
tctatgttgtctctatgccttgctgtcttgcctgcctccttgtaggtccaacctcgggagcgcagcttttaaagagtgacagtgtttgtttggatcacccgcagcttgactcatccttgctt

SEQ ID NO: 302740 - DNA, 122 bp, Homo sapiens
cgacggcgccatgagtctgacttccagttccagcgtacgaggtgaagtggggcctgggagcgggtgaggctggtgaggctcagcggttgccgcgcccgcagttcgactgggttgttttacca

SEQ ID NO: 302741 - DNA, 122 bp, Homo sapiens
gccgctggcgctgcctgctcttcgactgggcgagcttcctgccaatcagggcggaaccagcgcggcgtcggccagtagcgggaggcggtcgggtcaggccccagctgggcgcgagcgggtcg

SEQ ID NO: 302742 - DNA, 122 bp, Homo sapiens
ctggccaggtgtgtcccagtggctgcaatccctccagtacctgtctcttctttggcatttcgaggccccgttcagaccccgccacctggctgagtgccccggcgcctggccggcttccctcc

SEQ ID NO: 302743 - DNA, 122 bp, Homo sapiens
gccgttccgtttcacaaactgcgaacctgaaacttcggatatccctttctcgatgacagccgaaacgcaaagtggcttagagtacttttgattcttgaaaccttttgtatataaacaagatc

SEQ ID NO: 302744 - DNA, 122 bp, Homo sapiens
acctcctggaactcagcgtacccatctgtcaacaagggcgttggaagaagaggtctcaggcgcttgcagggctgaacccttttgacctggcctaggagacccggcactggctttccagcttg

SEQ ID NO: 302745 - DNA, 122 bp, Homo sapiens
ctggttattaggaataacctttgaaccgaacaggaaatggggaaaatacctgtttgttgacgcttgcacgcccaggaggagaattgaggtgcagttagtttcactgtgtgagggagagatgc

SEQ ID NO: 302746 - DNA, 122 bp, Homo sapiens
attggagaaagtttttaagaaacgtgtattcatttccaagaagtaagtcttgaaagtactcgtgtcaagtatgctggctcttatgtgtgccgttttgattttaactgtaggagaatatgatt

SEQ ID NO: 302747 - DNA, 122 bp, Homo sapiens
tcacaatcccgaactcgcctggtggctttaatggcattagaagtgtaaccccagcaaagccgcaggcacgtttctaaggctggcatggacggaaatgctgcgaggaggggtgggggagtggg

SEQ ID NO: 302748 - DNA, 122 bp, Homo sapiens
aaaacttctctcctgtgaccttgtcacccggcagtggaaagttacccttggctgcagccacgacttccgcatactcttcagaacttgctctgcccttgagttttccagctttcctttaatgc

SEQ ID NO: 302749 - DNA, 122 bp, Homo sapiens
tttcatgcctctttcattgacagttctatctctctatctccacctctgaacaacattgctcgagtttctgttccgacaattctatagactcgactcaatgaaggcactcagaatttctacca

SEQ ID NO: 302750 - DNA, 122 bp, Homo sapiens
gaaggacgcagccggccgagagcagcgtggggtccagatcctgccttccggctccccgtgcgccccccgcttaccttcctgagggcccgtgcgcgagacaccccgggcagtcccacgtcgtg

SEQ ID NO: 302751 - DNA, 122 bp, Homo sapiens
cttttattcctgagcatctttggaagcaggaagcagggagcaacggtagcgagaggtattcggatctgagtatcagcaggaagaagaaacagaggaagaagtcccccataaggaaggcgtga

SEQ ID NO: 302752 - DNA, 122 bp, Homo sapiens
gtgaggagggagaagctgctgtctgccagccggttccggtaccgcttcaggtactggggccggggccggttctggagcccctcaaagtcctggatctggaggaagttttctgcagagacgca

SEQ ID NO: 302753 - DNA, 122 bp, Homo sapiens
attgtacttccgggctcacatttctgcatccggagtatgagaaccctcaaccaggctgaccggatccggaagtggattgcgagccaggaggaggaagccggcggtggccccgtcagcagccg

SEQ ID NO: 302754 - DNA, 122 bp, Homo sapiens
tttatttacaactgttctactctgtatccctccaatcccccatttccccaggatgactcacgtcctgggtgagcagggtctgggcgacctcagacatgacactgatggcatcccccgtgcgc

SEQ ID NO: 302755 - DNA, 122 bp, Homo sapiens
tttacctatctgaaaatgttttataaaagccagtcttattatttcaaaagagaaaagcagcgaggctagggataggaagagagcttagtctcctctagggcccgttctccgcagcccggttt

SEQ ID NO: 302756 - DNA, 122 bp, Homo sapiens
tgatacccccgcttcggcctcccaaaatgcgacagtcctattaattggatttaatctcttcgaatctccctctcttgtaggacatttttctccaagaccagccctcgataccctcagccgtc

SEQ ID NO: 302757 - DNA, 122 bp, Homo sapiens
cagggctcagggtggcggcaagggctgggtggaaaggaagagcaaggccaggcgccggcgcgagactccccttgtcgtccaataacctgccagcgcctggcctggtcgccatcccacttttc

SEQ ID NO: 302758 - DNA, 122 bp, Homo sapiens
caccttttgtccctagccccctctcactgcccctgggtcctcttcaccagaacagttcttcgttcctgcgcattgtctcatctcccaattgcggtgtttagaaaggtgacataatagtggga

SEQ ID NO: 302759 - DNA, 122 bp, Homo sapiens
tttcttcccgttaccgactccaaggtcctgcagtagggcctccaccatcagggcagggagcgctccacgcgcacctaccctccccgatgagcgtgcgcctgggccactcccggaccagccac

SEQ ID NO: 302760 - DNA, 122 bp, Homo sapiens
agaacctacagaagctgtcaggaaagtataaagccccaggttgtcatcaggataatgagccggcgccctagctggactggttatctcaggcctgcatcacaggcagaggaagtttacaaaag

SEQ ID NO: 302761 - DNA, 122 bp, Homo sapiens
gaccacctgctgagccggtgaccgacgccgcctgaccctccctcgcccgccagggtccaacgcccgctggacgaatccctgctacacagcgggctctggtacctgccgtgcctcatttaacg

SEQ ID NO: 302762 - DNA, 122 bp, Homo sapiens
ctgggattacaggcgtgtgccaccctgaccggctaatttttgtatttttggtagagacagcgtttcaccagccaggcggtctcaaactcccgactttctgtgatccgcccgtcttggcctcc

SEQ ID NO: 302763 - DNA, 122 bp, Homo sapiens
ctgccaccacctgatctgagcgatcatctctccccgagattattgccataacaggctcaccgttctccttgacccctcctccccaccagcccctctttagagtggaagccataatcctccca

SEQ ID NO: 302764 - DNA, 122 bp, Homo sapiens
tcttgttccttccagcaacagatcactaactggctatatgaggtcaattattttgcctttcgtggttatggcagaaagcaccatatctgctgagttgcttgtttctgtgatcccacaggttc

SEQ ID NO: 302765 - DNA, 122 bp, Homo sapiens
aggctggcgtggggcacggcggggctgtgcctgggtacaggtcgtggctgcaggaggggccggggcttgttctgcagctccgtggtttgagtgcctcacaacagaggagctggacctggcct

SEQ ID NO: 302766 - DNA, 122 bp, Homo sapiens
cagcgcggccagcaggcgggggcgcggcatgctgcggggacgcgggcgctggaatgggcacgctgggctgctcagaccccgcggggttctggcgccttctcctctgggaccggaataaatca

SEQ ID NO: 302767 - DNA, 122 bp, Homo sapiens
tatgttgcccaggctggtcttgaacttctggcctcaagtgatcctcccacctcagcatcccgggtagctagaactagaggcacacaccactgtacccagctatgacttggttttaattgtca

SEQ ID NO: 302768 - DNA, 122 bp, Homo sapiens
tttcatctgggtccaaacatatatccccactttgaatttcaggatcaccttctgttttttcgttttgttttgtttttttgatagagtctcgctctgtcgcccagtctggaagtgcagtggcg

SEQ ID NO: 302769 - DNA, 122 bp, Homo sapiens
cattagagctgcccttccttgggggctggtttcaccggttcttagtcctccaccctgactcgtttgaggtgctttgcacctgggtcctggaggccacttatcccaagcttctttcaactcac

SEQ ID NO: 302770 - DNA, 122 bp, Homo sapiens
agtcaaagaaaggggtgacggacgcacctggaaaatcgggtcactcccacccgaatattgcgcttttcagaccggcttaagaaacggctcaccacgagactatatcccacacctggctcaga

SEQ ID NO: 302771 - DNA, 122 bp, Homo sapiens
gctggcgcccagacccttcccccggggaggagggctcccgcgcgaagccgtctccgaatgcgtccagtcgactcaccgtccccgcagccctggggcagcggccgcaacagcaggaccgaacg

SEQ ID NO: 302772 - DNA, 122 bp, Homo sapiens
ctccccgcctgcggtcacctgtctgaagagcagctcctgctcactgggctggcgctggcccggctccacctcccgtgggggctctgcctcttcctcatcgctctcaatgggctcctgcttca

SEQ ID NO: 302773 - DNA, 122 bp, Homo sapiens
gaaaacatccacacttgtctttataaaaacggaaaactgcatctggaacaaggtctgtggcgtttcttccagcgtgtcccatggacatgaagttggtcttcctatgggtcctccaaggcaca

SEQ ID NO: 302774 - DNA, 122 bp, Homo sapiens
gaagttcgtgtggtcccgtggccaagtgtggcatagcatgcgtgcatgtgcaagcccacacgtgtgtgcgtgtgtgcctgcaggtggcatcatctgggctgggggtcccgttttcatgctca

SEQ ID NO: 302775 - DNA, 122 bp, Homo sapiens
tcttgtctctgcagtagctatgacctgcacataaacctgtttcctacactgtaaaattggcgtaaccaccattccctcccagtctttctctggagtcctaatgggaacagtgacggaatgaa

SEQ ID NO: 302776 - DNA, 122 bp, Homo sapiens
ctcaacactcaaatgattgctgctggtattctgtaaaaaataaacaaagactaatatacacgttagctggttaatggtgcatatttctgtcatgtctgctaggtatgcctttatagcttagc

SEQ ID NO: 302777 - DNA, 122 bp, Homo sapiens
cctacccaggtgcttgcccccgccccctctctcagccccttccttttttcggtaactagacgtggatgaatgtaggaccagcatcaccctctgctcgcaccattgttttaatacggcaggca

SEQ ID NO: 302778 - DNA, 122 bp, Homo sapiens
ggcagccttcctgatttctgcagctctgtgtgaaggtaagcacatctttctgacctacagcgttttcctatgtctaaatgtgatccttagatagcaaagctattcttgatgctttggtaaca

SEQ ID NO: 302779 - DNA, 122 bp, Homo sapiens
tggcgccggccagccgacgtcccagcggtggcctccccgcccagccgctgtgcagcggggcggggccgaactggcagccaggaaatgccctggagtgtgtgtcacctgtccaggacgacttg

SEQ ID NO: 302780 - DNA, 122 bp, Homo sapiens
catgaatggaggagctcagggtcctagaccctaaaacctgctgaatcttcacccctcctccgctgggggtagggaaatttgcactgcatttaagcaatgtatagtggagtgggtgggacatt

SEQ ID NO: 302781 - DNA, 122 bp, Homo sapiens
gtcggtcgtcaggttgatcccactgtcgatggcgctgttgttcttgttgagggatgacggcgggctcgagttctgcttgagcgcggcatcttcttccaggtcggtgtcatcaatgaggggga

SEQ ID NO: 302782 - DNA, 122 bp, Homo sapiens
aagcagaaagacctggagctgctgcaggtgggaggcctgcaggcccactcaggacagctgcggaggccaggaggggtgccccctgcagttgtgtaaggcacaatcagcccagccacacaggc

SEQ ID NO: 302783 - DNA, 122 bp, Homo sapiens
cctttccacctcgctccccctcactgctgggcctcctcggccgagcccactggcccggcccggcccagcccagcccagcccagcccagcccggcccgctaggccaccacacaggccatgagg

SEQ ID NO: 302784 - DNA, 122 bp, Homo sapiens
cttcatcccgcgtcgctgttgtcgctgttgcagccgagttcagccgggagcagagcgaaccgcaccggcccgagcggagcgccgcacgttcccaaccgcgaggccaggtaccgcttcgggag

SEQ ID NO: 302785 - DNA, 122 bp, Homo sapiens
acgcccctccttttctcccgtcttgcatcgcgcaggcctaaggagagtggataaatgtctcgcggccaatccaaggacgagaatgagagactgggaggtcctgaaagccaatcaatgcgggg

SEQ ID NO: 302786 - DNA, 122 bp, Homo sapiens
ggtggcgttgcatgtgaacgggcctctcggtgcctcattccctgtgatgtctagtaaacacgcctgtgaagccagagctgcttggtagagtttggcttgaagaaaaggcttaaagaaatgga

SEQ ID NO: 302787 - DNA, 122 bp, Homo sapiens
tagggccagagagcggcagaggcccagaacccaaagcccggcagcgcaggcccagtagcccgcagctcccagaatactacacccggctctaggccccgctcgcgggacggcagccaatgagc

SEQ ID NO: 302788 - DNA, 122 bp, Homo sapiens
ctgcccaggaacgggcacctgctgggtgatgcccaccttaggggcttaccttgtcttaggcgcccactaacatatctgtctcatagctcacacctgcctccctgcccccttggcagaacccc

SEQ ID NO: 302789 - DNA, 122 bp, Homo sapiens
agaaagactctctcacctggtcttgcggctgtggccaccgccggccaggggtgtggagggcgtgctgccggagacgtccgccgggctctgcagttccgccgggggtcgggcagctatggagc

SEQ ID NO: 302790 - DNA, 122 bp, Homo sapiens
tcctgggataatcctgaggcctgagtgagagagcacacttccaggacccagtgaggcaagcgtcacatcacactgtggcttttagctctggcctgcgggactaggaccgtgctcctcatcca

SEQ ID NO: 302791 - DNA, 122 bp, Homo sapiens
agtcattctcctactgggggacgcgtggcccttccgcaaccatggcttgtgatggtttaacgcggacaggccattcctccccgtcccgcgcgcggtctcctcccctcctgtgcgcccgctct

SEQ ID NO: 302792 - DNA, 122 bp, Homo sapiens
gtatcctttgtggccacaaacaccacaggattgggggcatcagctgggtttagtttctgacgcttggctgctggctgtgagcttgaacgaatccctgaagccagaggccttccattggcaga

SEQ ID NO: 302793 - DNA, 122 bp, Homo sapiens
cgcccctaggaatttcccctcttttcgctgcattacgcagccctgaccagcagggggaaccgcgttttcgcgcttcgagaacgggagcttagagcctcggaaatgcattgagcacgcaggaa

SEQ ID NO: 302794 - DNA, 122 bp, Homo sapiens
cggccctggggcggggagacagggggcggctccactccggcgctctgcggaggacagcagcgatcgccaaggctcagtgagtccccgcactagcgcggcacctggcacttggcggggccgaa

SEQ ID NO: 302795 - DNA, 122 bp, Homo sapiens
atgatgacaaccaacagtttttgaaacactgtgggccaaaagcttgtgacttcctgcctacgtggtccagactgccaggctgaagatgaagaaactgaggctaagaggagaggagaggcgag

SEQ ID NO: 302796 - DNA, 122 bp, Homo sapiens
ttttttgttcgtttttcttggatgggggaggggatgacaacacagtgcagatagtcatttcgtttttataactacattgatgggccttgaagaataaattactaggaaaaggctgatatgtg

SEQ ID NO: 302797 - DNA, 122 bp, Homo sapiens
aacatggtgggaggtgactgcatcatggaggtggacttctcatgaatagtgtagcaccatcgtcttggtgctgccctcacaagatctggttgtttaaaagcgtgcggcacctcctcccactt

SEQ ID NO: 302798 - DNA, 122 bp, Homo sapiens
tctgtccttctgggtttcgaactgaaaagaaaaaagtttggaaaagcagaatataatcaacgtcatacatcaaaattagattctcccagagctccagcctggcaatttggaaatgggcataa

SEQ ID NO: 302799 - DNA, 122 bp, Homo sapiens
gtctcgccggcttcaattcagacctcagtggtgagtgttacttacgcctctcagagacagcgcgtctggagctgttcgctccctccggtgggctcgtggtctggctggcctcaagagcaaag

SEQ ID NO: 302800 - DNA, 122 bp, Homo sapiens
tcgggctttttcttcctcatagtacagcagatttatggctttgctattctgggaagcagccgtttttccgtgggatctaagggggccacggccggagagccaggacccccaggcctcatccc

SEQ ID NO: 302801 - DNA, 122 bp, Homo sapiens
cggtctacagctcccagcgtgagcgatgcagcgtgatttctgcatttccatctgaggtaccgggttcatctcactagggagtgccagacagtgggcgcaggtcagtgggtgcacgcaccgtg

SEQ ID NO: 302802 - DNA, 122 bp, Homo sapiens
ctgatgagggcggaaggccgggccgcccggcaggattggccgcgactaacccgcgcccgtcggccctcaccacggtctaacctccgcccctgcccgcggatcccgtgggctgccgagttcct

SEQ ID NO: 302803 - DNA, 122 bp, Homo sapiens
tggactgacgggcctgggcgtagctcctacccccgtgacattggccataaaactgacacccgtttgtgctgtgctttcacgtacatcgcacctgtgatcctccgatcaccctgcgagttacg

SEQ ID NO: 302804 - DNA, 122 bp, Homo sapiens
ttccatatgtgctaactcggtgttcacagtgactttgtggagcattgctgcctcagataacgagaagggactgtgcatattggctgccccgtagaccgtgtccttgggatgaaaccaagcac

SEQ ID NO: 302805 - DNA, 122 bp, Homo sapiens
gacgcgaggagaggcgtgggtggctcctggagggagtgtcgggaggccttgggactgccccgggccgctgaagggctgggccgaggcctctggggtagcgcggcgagtggtgtggtagtgcg

SEQ ID NO: 302806 - DNA, 122 bp, Homo sapiens
acctgttacacccaagcatggattcaaaagagatacaactaaaagaagcttgcaatggaacggatcattaaggaccttctcagaaatagatgaaatggatgtgggcttagcagttgttgttg

SEQ ID NO: 302807 - DNA, 122 bp, Homo sapiens
ttcggttgacactgtaaccaaacttctgcctccgggttttgcccttggccttgggcatcgcgctgaccaccgcaccagcagctcaaacacgctgcctctgtctctcagacctcgtgtaacaa

SEQ ID NO: 302808 - DNA, 122 bp, Homo sapiens
aggccccacaggcttggggcttacggaggggacgctggagccgcagtggcagcagcgacccgctgagcccaccagggccagggctcgccccacgccgctgagttcctcggcgccagctggca

SEQ ID NO: 302809 - DNA, 122 bp, Homo sapiens
acgccccggggtggggggggggggcgacattccctaatgggaaaaaagacacaccttaaacgcagtagagggcgacattctctactagggaaaatgcggaagaacacagttgtaatcaacgg

SEQ ID NO: 302810 - DNA, 122 bp, Homo sapiens
cacatagagagttcatggtagattcgggctagaggaaagcacctgaggcctggccagagacgcctagaggaacagagcctggttaacagtcactcctggtgtctcagatattctctgctcag

SEQ ID NO: 302811 - DNA, 122 bp, Homo sapiens
cccttcaaagtatattttcagaagataatctactaagaggagtgtgcgggggagaagggccggctccgggtaggacattctgaacaaggacccctgagaacctagagctttaatggagacaa

SEQ ID NO: 302812 - DNA, 122 bp, Homo sapiens
gatgcgcacagcgtccgcggcaccaaccctcaatatctggtggggaagatcattcgaatgcgaatctgtgagtccaagcactggaaagaggagtgctttggacttatggctgaacttgtagt

SEQ ID NO: 302813 - DNA, 122 bp, Homo sapiens
gggaggaggagcagaggggaggcccgctccccagcaatcaaagcctcctcaacgctctagcgggacgtgctggcggacccaggatgaataggtcattacccaggtgtagacaccagggtagt

SEQ ID NO: 302814 - DNA, 122 bp, Homo sapiens
atgtgtttcacttaggacccagagaatggggatatatggggtacttccctaacatttagacgccctgctgtctcctagtctggtcatgaatgcttctgaggaggtctcaggacgcttgacgt

SEQ ID NO: 302815 - DNA, 122 bp, Homo sapiens
attttcatattgaaatatagctttaatgatacattacttctctcttccttctttacatagcggttaatcatattgagcttctgaaattgtgcgcgtgggcagattagccatttttgggttcc

SEQ ID NO: 302816 - DNA, 122 bp, Homo sapiens
gacctgaacatggactgcatcattgccgagatcaaggcacagtacgatgacattgtcacccgtagccgggctgaggccgagtcctggtaccgcagcaaggtgagtggcacaggacacctgcc

SEQ ID NO: 302817 - DNA, 122 bp, Homo sapiens
gggaactacaatttccatagtgctccgcgccctcccagctggctctactgccggcgacggcgtggtacacgctgggatttgtagtcttacatggctttgcgcctcctacctggaaggcgggc

SEQ ID NO: 302818 - DNA, 122 bp, Homo sapiens
caggacagtgggtgcagcgcaccatgcgccagatgaagcagggcgaggcattgcctcactcgggaagcgcaaggggtcagggagtcccctttcctggtcaaggaaaggggtgacaggcggca

SEQ ID NO: 302819 - DNA, 122 bp, Homo sapiens
agagcgagaaggagggctttggggccgaccggctgttggagggcggcgggtcgcggggagcgggggagtgagcatgcgcagcggctccggggagcgcaggggaggaggggccggcgctgaga

SEQ ID NO: 302820 - DNA, 122 bp, Homo sapiens
ggaagacagacatgagctgctgcgcctggcctatcccctatttttaagggtcttgagtgacgttgctggttcaaggctgtttcctctagctggcttacaccctgctcgtgtgcatggaaaaa

SEQ ID NO: 302821 - DNA, 122 bp, Homo sapiens
gcccaggtggtgagtaggcgggctgtggtctgcagacagaagctttaccctgtgcacatacgaggagtaactcatttgagtgacgtcactggactgcggcccttagagcctcctgacgcgga

SEQ ID NO: 302822 - DNA, 122 bp, Homo sapiens
aacggatggatattgtgcatcaaaagagccaaagatggaggaagaggaggtagatgcaagcgttctgttctgggaagggctaagatcttggaatgctgagagtgaaactggaagccagtctg

SEQ ID NO: 302823 - DNA, 122 bp, Homo sapiens
cacggcaagaaccaggtccaaatttctcataccaccccttgatcttctgctccaagtcagcgttggcctcctctagggctcgaacattctccaggtaggaggccaagcggtcgttgaggttc

SEQ ID NO: 302824 - DNA, 122 bp, Homo sapiens
ccggggcgatgggggcagggaacggtggcccgactccagtggcgggggcgggcacaagcccgggtaggcgtccacggtaagcctgtccacgtgggtgtacacaggggccccgggagtggggc

SEQ ID NO: 302825 - DNA, 122 bp, Homo sapiens
tagggaaagggaggcagggtcggccaggggccccggggagcaggtgagaaggagcgggctcgcggcctcaggcagcactgctgtctgtgtgagactccgccagcttctgcacccgcgctgtg

SEQ ID NO: 302826 - DNA, 122 bp, Homo sapiens
aaaagagaaagccagactcatccacttcctgaagaaaggccaggtggaatgatagcaagccgtacttaggaagcttccaaagtcctgtggatgagggaaactgatgactactgaaaggcagg

SEQ ID NO: 302827 - DNA, 122 bp, Homo sapiens
tctcctcccttctcagacggggaggctgggcagagaccctcctcacctcccagacggggtcgcggccgggcagaggcgctcctcacatcccagacggggcggcggggcaaaggcgctcccca

SEQ ID NO: 302828 - DNA, 122 bp, Homo sapiens
tgaaggggaggcagccaggcctccctcgccagcggggtgtggctcccctccaaagacggtcggctgacaggctccacagagctccactcacgctcagccctggacggacaggcagtccaacg

SEQ ID NO: 302829 - DNA, 122 bp, Homo sapiens
gaaggcggcagccaaagtgccattaaagctcggggcggagaggatgcgttacctgggtcccgtctgctgcgagaggcagggcaagctggaggattccctctgaatgattaagaactccgcaa

SEQ ID NO: 302830 - DNA, 122 bp, Homo sapiens
ttggggggggcgcctgcgggcttgggaaagtgtggcggctacacttagccggggtgggggcggagagcaagcaaggaggagggggtcacgggttcgcggtgaaaagtgaggggttgaggcga

SEQ ID NO: 302831 - DNA, 122 bp, Homo sapiens
tgcactaatcacaatttactgcagaacttcagtaagtcgcaattaggacacatactccaacgcagtctgcctggattcaaatcccagcttgggtacctattacatggtgaccatgggcaagc

SEQ ID NO: 302832 - DNA, 122 bp, Homo sapiens
tctccccgcctcccactgtgcgacaccctcccgccctctcggccgcagggcgctgatggacgagaccatgaaggagttgaaggcctacaaatcggaactggaggaacaactgaccccggtgg

SEQ ID NO: 302833 - DNA, 122 bp, Homo sapiens
aacaccttcttaagagaccctggcagctccgagccagacctcatgttactatgcgtttaccggtcaacgggggtgcccctgaaatacctgctcgtctacatgatggaaacagcccaggaggc

SEQ ID NO: 302834 - DNA, 122 bp, Homo sapiens
aaggatgctcgcagaagccagcccccaaccccagcccttccgtatctttcccctccatcgcggctttgcgatgaaagattagcccgcgaacagaggcattgattacaaacatgtccttggca

SEQ ID NO: 302835 - DNA, 122 bp, Homo sapiens
ggcccgcagggaccgcgccctggaacgctcccgagccgcgccacgcgggagcggccccagcgcccctggccctgccctccgagaaagcccggccgaggctgccccgaggcccacagggaccc

SEQ ID NO: 302836 - DNA, 122 bp, Homo sapiens
cgggtcgatctccaggagtctggccagttcgggcacgtcagccagggcggcattgagcgccgcctcgtagtcctcgggccgagccgcgggagtcatcggagccgccatattccgccgcagtc

SEQ ID NO: 302837 - DNA, 122 bp, Homo sapiens
cactcatgcgcttgccaccccatccccccacccagacacagacacacaacacaacacacacgcacacactgcacacacctggcaccgtgtgcaccacctcatgccacaagcagccacacacc

SEQ ID NO: 302838 - DNA, 122 bp, Homo sapiens
cagcaagctacccaagagctgttggttacagaattttctagggtttaaataccctctagacgtttcccattgacctgtgccagtctgattggttgagggagggggatcaatcagaaagagga

SEQ ID NO: 302839 - DNA, 122 bp, Homo sapiens
gctgagtctgagggaggcagtggggtttccctttctgttttgttagggtcttcaagaagtcgagccctaactgcaaggtgagtctccacagcacttacccttttgaccctccctgggcccca

SEQ ID NO: 302840 - DNA, 122 bp, Homo sapiens
ggggctgggctggagcagagccggagggaggagtgcggccaacaaaagaccatccgcgagcgcctgaacttgggtgtggagttgtattttaggatatgttaaaaagttaggaatattaagta

SEQ ID NO: 302841 - DNA, 122 bp, Homo sapiens
aacctgcagggcttggcttagggagcacacaggggcccaggcaaaggcaaggtcacaggtcgggggaggtgaagctggcagggggagggggagacctgctggctagagctgggttgggggcc

SEQ ID NO: 302842 - DNA, 122 bp, Homo sapiens
gcatacctacatatgcagctgtttagtgcccacttccatctgggaagtagaagcctcgctcgttgcaacctctttcgccttcttcaccttctctagctgctctctcttctttgctcccagtg

SEQ ID NO: 302843 - DNA, 122 bp, Homo sapiens
ccctccctgggcctagggttctttcgctgtgacccaggccttaaccaggaaaaggatcctcgcgacccggtgggcgcttagaccgggtaccgtctcttctcatcgaagtctcacatgtttgt

SEQ ID NO: 302844 - DNA, 122 bp, Homo sapiens
ccaccaggctggccatctctttcccaccttccccaccaccatgcacgtggtgccatgcaccgctgctcctcacccactcagaccagctccagcacctttggaggtgagattagcttctcaca

SEQ ID NO: 302845 - DNA, 122 bp, Homo sapiens
actttggtctgtttgccaaacctccacacgcaatttggccacttaattgcttagagggtccgctatttcccttttctggtgcactaaaaaaaaaaatcacttgccattttagcagctaggtt

SEQ ID NO: 302846 - DNA, 122 bp, Homo sapiens
ccaggccctcgatttccctgaggttagacgcgcaagtgccctcagatctgctcttcaatgcggaagccactgcccacgtggggctgctgagctctttggatagagctggttggaactgagat

SEQ ID NO: 302847 - DNA, 122 bp, Homo sapiens
gggcatgcggcatgaggggcatgaaggactgctcttcagactgggagttccaggaaaccccggaggtgacccccaagggaactgggaaggcccaggcagtcacaagctgtgcatctgcaagt

SEQ ID NO: 302848 - DNA, 122 bp, Homo sapiens
ttctttgactcggaaagggaactccctgaccccttgcgcttcccaggtgaggcaatgcctcgccctgcttcggctcacgcacagtgcgcacacacactggcctgcgcccactgtctggcact

SEQ ID NO: 302849 - DNA, 122 bp, Homo sapiens
tgagtttttggagtggccggagcaaactcgccactcgaggtccctgagtggcagccccagcgcacttccgaggcagaactcccaccttcacctgggtctagctccgcctctgcctgggttag

SEQ ID NO: 302850 - DNA, 122 bp, Homo sapiens
tttcatggaaaggcttccctatgaaactgaaaacgcgctggtaagaaggagaaatgcgaccggactgcaattcccagaagccgtcgcaggccctcagcatccgggacactagcagcaaggat

SEQ ID NO: 302851 - DNA, 122 bp, Homo sapiens
tcaaaccaatctagatacaaacctgcagcctgaggtgggggctgaacagtggccctcttccggggtgtcagcgctggctggatgggaaggattcctgggttcggctgagtctgcccagcttt

SEQ ID NO: 302852 - DNA, 122 bp, Homo sapiens
ccagattaatcccatcttttcccgcgccccaagcgccgaagccccagaactgccgccggccgggcccatccccagcccaggctcgtaatcaaaaggcagatttccgcgccgggcacctgttt

SEQ ID NO: 302853 - DNA, 122 bp, Homo sapiens
acgtccccttggagctctgcatctccaacctggaacccaacccagaagtctcaagtttgacgcatcacgtggcgtgcggatccactgagggtccacagagaggggcgcccatctcctgcgtc

SEQ ID NO: 302854 - DNA, 122 bp, Homo sapiens
catgtacctgggcgaggtgtgcacggcgaccggcgagcgctgggagctgcagctcaagggcgccgggcccacgcccttctccaggtgggccggggcgggcgaggggcgcgggtgggtcctcc

SEQ ID NO: 302855 - DNA, 122 bp, Homo sapiens
cctgcatttctccctgcatttgagtttttgtcattggcatcatcatcatcctgtagctaacgcatattacatgttagccacatatatgacaggtactctactaagtactttatgaagattgt

SEQ ID NO: 302856 - DNA, 122 bp, Homo sapiens
gaatggactgagtgcttgtgagaaacttcctaattgaggcttacctactaaagttctttacgttttaaagggttccattgcatcagccctcaaaatgtttccttccccagccctctttcttc

SEQ ID NO: 302857 - DNA, 122 bp, Homo sapiens
ggcagtgctcaagtccaaagtcagaagcgcccctcacagtccctaggagaaagccgctgacgccatcatcagtaggggatttgcatttctcctcccacttgaggctttcctgtgcgtcagtg

SEQ ID NO: 302858 - DNA, 122 bp, Homo sapiens
cgggcgggtggcgcatgcgcggcgtgggccgcggagttgtgaatggtgcgtcttgtttgccggagttggaggcgggcgggcgcgcgaggaggaggggtggggccggcgggggcggggtgggc

SEQ ID NO: 302859 - DNA, 122 bp, Homo sapiens
tgtcacaaacaacctgcagtttatttccacaaagtgtcacgagaaagtgacagatgaatccgtgtcccttctccacagggtcagggcctcaagagacttcaccacggggccgacgtgtccct

SEQ ID NO: 302860 - DNA, 122 bp, Homo sapiens
tgttggttccaagagctgccgcagctccccaaggttgatgttgccagggctgaatgaatacggcctttgcgtttccctggctactgaactcaaagtacagtacaaggcgggttctccccact

SEQ ID NO: 302861 - DNA, 122 bp, Homo sapiens
aaccccactcgccccacgggctgggctgagctgggctgggggtcgagctcagcgaagcctcgggaaggctgcagggtgcccgggcgggcggcggggtgggtgcggacccctggctgggcgct

SEQ ID NO: 302862 - DNA, 122 bp, Homo sapiens
ctcttcctgtgtctggctttatttgcagcaaaccaagatggagtatgagtggaaacctgacgagcaagggcttcagcaaatcctgcagctgttgaaggagtcccagtccccagacaccacca

SEQ ID NO: 302863 - DNA, 122 bp, Homo sapiens
acaccgaggcagagaaaactgaagcgtggaccactgtggcccgaggccagaccccaacctcgccgggcttggaattaaccccgggtagatggcggcacgggcttagctgaccttttccaacg

SEQ ID NO: 302864 - DNA, 122 bp, Homo sapiens
cagaggtatgccaggctctgccccttaaagtttgggggccggcggaggcggcgccgtggccgggagaaagtgtctctcatttaggagggtttgcaggtccagagtaaagtcactgaagagtg

SEQ ID NO: 302865 - DNA, 122 bp, Homo sapiens
atttacggctctaaagccttccatataacgctttaacggtgggcagagcggtttctgttgcgtcccgtcctgtacttttcgcacccacctgtgagataggcgttaagcgttatgcacgcttt

SEQ ID NO: 302866 - DNA, 122 bp, Homo sapiens
aaaatacaatctctcaacttgagactttgtggagaagatgccaaaccacggtgatctcatcgcatttctgtccatttgtaaggctctgtctggcagccagcctggttcccatggggcatggc

SEQ ID NO: 302867 - DNA, 122 bp, Homo sapiens
gggctcggcgctcccggctcccgcgccatctcccggcgcccgccaacttcgctccgcccgcggcgtagagaagctcgcagccctccggagcctcagcgatctcctggctcgcttttcccgca

SEQ ID NO: 302868 - DNA, 122 bp, Homo sapiens
agaggggtggtgtgtcccgggctgacctctagaggtcgctctgaacgccccacaggctgtcgctccctagcctggctgtcttcactctgcccagtaaagatctccagggaaggaaaacaaac

SEQ ID NO: 302869 - DNA, 122 bp, Homo sapiens
gctacagctgtgcgcagtggcgcggctgctaagtagcagcaggtgggagactagggtctgcgctcgcggcgaccgcggaggagggtgggcgcctgcggaggtgtcctcgctcacttcggggg

SEQ ID NO: 302870 - DNA, 122 bp, Homo sapiens
ctataagcagtgaaaaactccggagaccaaaacctacaggcaattcaaataaactaaatccgatcaaggtaatatcaatgccagaattagaagaaaacccagagagaatatcaataacaaca

SEQ ID NO: 302871 - DNA, 122 bp, Homo sapiens
aatgcatttaaatggggcataggacgtctggggtttggagaggaataaagtgggttgggtcggctggtgggtggccttcacaggcacgcaaagtagttacatacagtctgcaacagaacagg

SEQ ID NO: 302872 - DNA, 122 bp, Homo sapiens
ctcaggtgatctgcctgcctcagcctcccaaaatgctgggattacaggtgtgagccactgcgcctggcctaagaataggtacttctaattcccttaagaattgggtggcagcctgaatgatt

SEQ ID NO: 302873 - DNA, 122 bp, Homo sapiens
agtgaggagtagccactggagtgagtagccgctggagtgaggagtagccactggagtagccgctggagtgaggagtagccgctggagtgaggagtagccactggggtgagtagccgctggag

SEQ ID NO: 302874 - DNA, 122 bp, Homo sapiens
ctcccttgagtttggttctgcatctctgttctcatacttctcccacctgccttgacaggccgccctgacatgaagactgagctcttttccagctcatgcccaggtggaatcatgctgaatga

SEQ ID NO: 302875 - DNA, 122 bp, Homo sapiens
ggtctgggtattctcaggcagcagggacaaggtgggcttttttcctggttgctaaacccacgtcaaagtcgagctcagggactggagctcaagaaacccaccgcccattctccagtccgacc

SEQ ID NO: 302876 - DNA, 122 bp, Homo sapiens
gggatacatccctaactctagacagcaggttgttaaacacggggcctggtatccactaggcgtcccataaatgctgccacttttgtggttccgaggaggcggctcactccgttcgggcttgg

SEQ ID NO: 302877 - DNA, 122 bp, Homo sapiens
aaccaagtcagacccggccacactggcggggtttatttatgcaagtgtgtaagtctcccccggcatgcacatttatagccactgagctgtcttgtcaattactacctttttaaatacaaaag

SEQ ID NO: 302878 - DNA, 122 bp, Homo sapiens
tcaccttacaagattaaatgtgcaaccaccactccactctgccagatagagtaagggcaccggtaagtatcacacaggcagatgagcaaaggtaggcgtggaggccgccgcacagatgtgaa

SEQ ID NO: 302879 - DNA, 122 bp, Homo sapiens
aggctgagaaccactggtttctgttgaaacctcagttcctggctgaagagacacttgcggcgagcttgtctgtatcattagtcacttctggggtccaggggtgagactgggagtggaggaag

SEQ ID NO: 302880 - DNA, 122 bp, Homo sapiens
caccgcccacagcaccctagcctgagaggccacagcttaagaaaagagctctttattccacgtcgtccgatatttttacacaagtaaaataaaatgcatatctctatataccgcgatctggg

SEQ ID NO: 302881 - DNA, 122 bp, Homo sapiens
cagtgtaaggcggggcaggcctgcaggggtgagcagcaccccattcaaacacctggggcccgcagcccccgcacagcatctcaatctgggatctagtccgctagcagtggagtcggctccgc

SEQ ID NO: 302882 - DNA, 122 bp, Homo sapiens
cctggttccaggctcccagggatggcagctaccatcttggctttgaagagtggggacatccggaggtagccccggccatggtggtggatgaagaggaggtagatgggaccaaggacccagag

SEQ ID NO: 302883 - DNA, 122 bp, Homo sapiens
caaccttttttggagacagacccagggggccgatcttgggggccagggcagaagtggcaccgacttcacctccagtgcacctcaggtatacaactttgatctcgttggggtcaaactttggc

SEQ ID NO: 302884 - DNA, 122 bp, Homo sapiens
ctaatttcaccgtatgacccaaaatgtaaagtcccagaccaaggaaaaaaaaaaaaaggacggaggatgagaatgaactctgaagactggcatttgagcatctaagtaatagttggagttaa

SEQ ID NO: 302885 - DNA, 122 bp, Homo sapiens
gagggacacatttggtactttgccctgtgttttaattagtaagcttcagagaaagaaagtcgtcagagccagggcccccagttgtggaagtttctatatccggtaaattggatccattccag

SEQ ID NO: 302886 - DNA, 122 bp, Homo sapiens
acgaataacatccaggtggtgttcgacgccgtcaccgacatcatcattgccaacaacctccggggctgcggcttgtactgacctcttgtcctgtatagcaacctatttggtaatgattccag

SEQ ID NO: 302887 - DNA, 122 bp, Homo sapiens
gtcacacagccacccgcaccgagagtctttccaaacctccgtgtgtgcaatatgcaacaacgtgcgcgtgcggagctgaaagggcacaagacactccaggctcccacacgtatggagacgga

SEQ ID NO: 302888 - DNA, 122 bp, Homo sapiens
tcactccctgggaatgcctgagagacacggctcaaccctggcaatgcatgagacacagctcgcccccggggcaatgcgcgagacacgcggctcgtccccccggcaaggcgtgaggcacgcgg

SEQ ID NO: 302889 - DNA, 122 bp, Homo sapiens
ctccacgcagattttcttggccggctccagctggaagccttcggtgtctccttttgtgtgcgcgggagcctggctgcggattgccgcgctgcccctagaggtcagtctgatccagggattgt

SEQ ID NO: 302890 - DNA, 122 bp, Homo sapiens
acggggccgcgcggggcgggggcgcgcagctcgcacagcctctctggccccggctcctcgcgtgggcgcccgcacagctctagggtccgcgcacctggacgtcccccaccctcctccgaggg

SEQ ID NO: 302891 - DNA, 122 bp, Homo sapiens
atccgctttgtgaagggcacctgggttgcttccaagtttgggcagttatgaagaaagcgacgaaaacatgccgaaaacctggctcacgcactgtgttcatggcgtgtggagggggcgcttcg

SEQ ID NO: 302892 - DNA, 122 bp, Homo sapiens
ggcaactgacagaaacaaatgcaaacctattctagaagtacccatcttcaacacaggcctcgatggcttctcatcaataaattctaaaaaaaatacaagctcatggtcaaaatcacaaaatg

SEQ ID NO: 302893 - DNA, 122 bp, Homo sapiens
cggttattcacccgccaggccctgggaatacaaggccggcttcaaaaaaaccagggcacccgcgacctcctcgcagacgcgcgcccccatacccgggcctcaggcagccacgaggtagacgg

SEQ ID NO: 302894 - DNA, 122 bp, Homo sapiens
cgcgggggtcctttaaggccggccacctccctttaagaggcggccctggctgctgggtggcggcgtgcggcccgggaagggggcgggggcgccgtgcagccccgagcgcggcaatgattggt

SEQ ID NO: 302895 - DNA, 122 bp, Homo sapiens
attattatatgccaagtgctgtgctaaactaaacattcacctgtttttattttttctccacgacaaccttcaacatttacaaataggaaacaagggacatacagcaatggatgggatgccac

SEQ ID NO: 302896 - DNA, 122 bp, Homo sapiens
attcaaggtcaccaaaccagaacccaggtctctcaacgcttaacagctgaatgacacacacggcactgcacagagagacacataagacagctcatgtgggcctaaccagataccagtttcac

SEQ ID NO: 302897 - DNA, 122 bp, Homo sapiens
aggtttccgtgctgccagagggggcggggtcagaggcaaggcccagagtgtgcagccagccggagctcccacgtgagcaggcgcaggaggttgaagaccacgctggctttgcggcaccgagg

SEQ ID NO: 302898 - DNA, 122 bp, Homo sapiens
agtgggaaacgtgagcgaaacccaaggtgagtggccgcagcctttcgtcacgtgctctcccgcatgtcctaagtgagggctcaggctgagctgccgttgccgagagccttgtgtctgcttcg

SEQ ID NO: 302899 - DNA, 122 bp, Homo sapiens
cttgttggaagtccgggcctctgtaacttctgacccactgacttcaagctggagttcccacgatcccctctttggatgtgattaattcgctgaagcagcttacagaactcaaggaaacactt

SEQ ID NO: 302900 - DNA, 122 bp, Homo sapiens
tccgtggaagctggcaatcactgtgatgtcactgatgaaacatctcaaaggaacaccctccgaaggttcgaggctatttgtgttcgggggacatggaaatatgttgactaagactttgttcc

SEQ ID NO: 302901 - DNA, 122 bp, Homo sapiens
cagatcctggggcagtgtctcagggtctcccacactcctgttctgatgagcagaggatcccgtgagtctggaagcagaggaaagggagcaggcagcttggcgtggctcaggagcaggcccct

SEQ ID NO: 302902 - DNA, 122 bp, Homo sapiens
tgaacacctgatcagtagcgtgctgcagcccagaactccagggctcaagtgatcctcctgcgtagctgtgactataggcaggcacaggagtgttgctctttaatcattgaaaatggtaaaac

SEQ ID NO: 302903 - DNA, 122 bp, Homo sapiens
gccccagaaacgcggaacccagagctgtgtacaggtgcatgtccgctacgccccgccccgcgctccacggaaggtccacacacagcctgaggaggttcccccagcccacagtgacgcccggg

SEQ ID NO: 302904 - DNA, 122 bp, Homo sapiens
cacagttgcaaaaaattaagtggggccatagcagataatattgtaactttatgctccaagcgatgatgagctcttaaacaaagattaagcggagtgaagtaaaactttttctttaatcttta

SEQ ID NO: 302905 - DNA, 122 bp, Homo sapiens
ttctcgtccgccttctttttaatgtaaaaccaaaataaggagtgtccagcgactccccaccgcgccgcttaaagcaacagagcgttttaggcttaactcccaggctctgggaattccagtgg

SEQ ID NO: 302906 - DNA, 122 bp, Homo sapiens
ggggctgcaaagcccgtgcccatcaatccccctgagcaccagcctcgcatgggaaccccccgagacacaggttctgggccacctcacctccagcccagcctcagatagaggagcgcattctc

SEQ ID NO: 302907 - DNA, 122 bp, Homo sapiens
ccgagagtttagggcaggagcgccggcggggagctccccgggtgctggagaatgcgtgtccggaaagaagtagggcgcgcttcgtggatgcaaccagggccgtctcgcgcactttcttccta

SEQ ID NO: 302908 - DNA, 122 bp, Homo sapiens
gttggcaaatagagctgtgagtcttcaaacggaacccaaagactcagtgaggaaagcaggcgggctgggctgagactcacagctgcagcggccgtggtgagccacctcacctccccgagcct

SEQ ID NO: 302909 - DNA, 122 bp, Homo sapiens
aaagacattcagagttggagagcgggcgagtggagtgtcctttagactccgcggactcgacgggagggaccctgcaatgcttaattagaaccggttgccatggcgacagtctctaggcagcg

SEQ ID NO: 302910 - DNA, 122 bp, Homo sapiens
ctctgcagccggtcccggtgtgattgctgccgccttgggagcagcctccgccgcggccgccgagttccaatggcccattggaaccttttgctaggttttggacgcttagcagaactttgaca

SEQ ID NO: 302911 - DNA, 122 bp, Homo sapiens
gccggagtcggggctaatccccaccgcacacacaggcacacacaggcaaacgcaggcacacgcaggcacacacacctccaaacgctggtgcgtttcctgcgggggtggatggggattcctct

SEQ ID NO: 302912 - DNA, 122 bp, Homo sapiens
tgcacctcgaaaggtttctcgctgcagcatgtgctacctggcgctgatggtgtctcggcccgtgctcaggctccgggagatcaaccttctgctgttcaactacgtggaggagctggtggaga

SEQ ID NO: 302913 - DNA, 122 bp, Homo sapiens
attggcatcagtgaggtgaccggagtcaccggtaaacacaagaggcctggctggcgaccccggattaacatcctgcaggctcccaggaaaaacccagagaccttgagagtatgtgcaagctg

SEQ ID NO: 302914 - DNA, 122 bp, Homo sapiens
cagtggcggacaaacagggcttggggctggcccgcacgctgcctgatcgtttccgcccgccgctccacctccccgcgggccccgcaccccgagacctcagcgcaccccatcgccttgcttgc

SEQ ID NO: 302915 - DNA, 122 bp, Homo sapiens
gcctgcgccggggacagagagtccgcaggcagaattctggacagacggacagactgagcccgcggcagctggccttggagtagagaccgagaggcccaagcaaaagacggagccagacaggt

SEQ ID NO: 302916 - DNA, 122 bp, Homo sapiens
tgtgagatgaactgcaaggaggtgcaggtgggtggggcagtgcggtagagaggagagagtcgaggtatttctggaggtagaatcaaaaggacttggtgatgagatgctgctcagtggtcttc

SEQ ID NO: 302917 - DNA, 122 bp, Homo sapiens
cggacttcagctggcggagctcttcctccagtctccggatctcctccgggaggcgggagacggactcctcagacctgagaagcttctccgtgagggcctgcagggcgagccgctccgtgtcg

SEQ ID NO: 302918 - DNA, 122 bp, Homo sapiens
gagaatcccaattagggaagggcagccagcagcccccaagccgggagccgtgcctgccagcgtgcaaggctgcagggaactgggcccccagccagggccagagccagagcccgcacggcccc

SEQ ID NO: 302919 - DNA, 122 bp, Homo sapiens
ggtcttttgtggggtttgttgcttctgctgggcccttctgagtcactgcatatttttatgcgttcagtaatatagtgtgagtcattctccagcttgggggtattttgggacttgtggtgttt

SEQ ID NO: 302920 - DNA, 122 bp, Homo sapiens
acaggaagtggaactgaaaagaagctgggcaggggcctggtgcccacttcttttgacaggcgatttgtgtgtatggggcttctgtcttgacacagctggactttcctgatcatttagtctca

SEQ ID NO: 302921 - DNA, 122 bp, Homo sapiens
ctgagtgaacgagctgctggaggcgacgggagttgatgaggccaccaaacaccgtagacacggagatgggaagggaaaactaggttactgggaggctgctggggtcagctgttctcacccgc

SEQ ID NO: 302922 - DNA, 122 bp, Homo sapiens
tgcaacatcacaaaaatgacactggccaccgctaattagctggcaaggtaagggtttgtccgttttaccgtgagcagcgttagtgagcaccattgcacacagcaagaagggagagagtaata

SEQ ID NO: 302923 - DNA, 122 bp, Homo sapiens
cgacactggcccttgagacaggtccgcttgcagatcaccggcgcaaagaccaccttgaagcgctcgcgggccagcgccccgcccccgcctgcgccccgctcgccggccggccccccctcgac

SEQ ID NO: 302924 - DNA, 122 bp, Homo sapiens
taactctggtcatgaaaattaggacatagaatgcttgtagccataaacacttatctccctcgtcgctcaagttattaactatccctaataacgtaaatactgaagaagaaggcagagcgagg

SEQ ID NO: 302925 - DNA, 122 bp, Homo sapiens
ttggcgagcgctgtgattgcggcatggaaggtgacgcagttctgtcctccctgcaccctgcgtgttctggtcccgtcatcgctgctccccacatattgtcctttcctattacaaatgaaata

SEQ ID NO: 302926 - DNA, 122 bp, Homo sapiens
gccagaccttcgcatcgagggacgtgagggacatttgtcctagagggcccaagataagaacgagaggaagaaccgggaggcaactctccgtcatcctctagccccccgcatcctaggaaacg

SEQ ID NO: 302927 - DNA, 122 bp, Homo sapiens
ccccgtgtgcacactgctgcgtgcagaggccagggaagcatctgggtttgggtcaagagccggtcccttggagtgaggggcctgagtccagctgcagaggggcaggcagggcccctgcaatg

SEQ ID NO: 302928 - DNA, 122 bp, Homo sapiens
ggcggggctggggcacgaccgggagcatgcgcagagcgcgcgtttcgcccatcgcgcacgcgcacacacctgctccgcccccacgctgcgtgccgctgctgggttccgccacgcccgtcatg

SEQ ID NO: 302929 - DNA, 122 bp, Homo sapiens
aagtacttaaggcaggacccagcatgtagcaaacctccaataattgttggctatcattatcgctgttttctgtatttctattattattattctacaaaatatgtaaatatttacagatgtca

SEQ ID NO: 302930 - DNA, 122 bp, Homo sapiens
cgcggcgtgcccgagagatgcgagcgttgaggaaacggaaatccagcgcacacgtgaaaacgccccggactgcggctgcgccgcttacccgcacacagacggttggcagaggaagaaagcct

SEQ ID NO: 302931 - DNA, 122 bp, Homo sapiens
atccgcccgcctcggcttcccaaagtgctaggattacaggcttgagtcactgcacccagccgcaagatttcttaagtaaaacacacacaaaacctaaccataggccgggtgcagtggctcgt

SEQ ID NO: 302932 - DNA, 122 bp, Homo sapiens
gagtgggcagtgggtgtgtacgtggtgggtggtgtaggttgagagcgtcttcccccttcacggctgcagcaggagctcagcgggcgccccagccccttggctcgcggccctgccccgaccat

SEQ ID NO: 302933 - DNA, 122 bp, Homo sapiens
tgttcccttcctctgtgccacgctcctctgtttgtttggctgtccagcgatcagccatggcgacactaaaggaggaggagccggggactcccaggctggagagcactgccaggacccaccac

SEQ ID NO: 302934 - DNA, 122 bp, Homo sapiens
ggcccgaagccactagagcggctctccaaggctctcgagaaagtcctagtgtttacatggcgaagtgggggtggggagaggaggaaggggggtgcagtgtgcaaaatctcccccactcctct

SEQ ID NO: 302935 - DNA, 122 bp, Homo sapiens
cctgctgcggagccccaggggacccgagccgcccgcgctgtctcgaacgggtccgccggccgcgccgcctgcgagccagtctgacagcgcgctgcacacctccgcaccccacttccggcgca

SEQ ID NO: 302936 - DNA, 122 bp, Homo sapiens
cgcccggccctgagttccatttcttacatttgaacgtggctctctgaccttgggttggtccgtgtgaaggcagggtgccagctctgcactccctgaaccaaccatggcatcaaaccccaaac

SEQ ID NO: 302937 - DNA, 122 bp, Homo sapiens
acgggaccgggctcggccgggcgggctccgggaggagacgcgcttacctggaggtagggccgcccgtgggccaccccgcccacgacgatgtcggcggacgccatggccccggtgggcgagaa

SEQ ID NO: 302938 - DNA, 122 bp, Homo sapiens
cagtctctagagttaagccaggctttggctgacatgaaggaaatggactataggcagtggcgaaagatagctactgaggacctgaagcaaggaggctctctccaggtagagctgacatctcc

SEQ ID NO: 302939 - DNA, 122 bp, Homo sapiens
tcggccagttacaggataggaggtgccaggcaaggcactgaagccatgcagtgagaacagcgtgagcgcctgatccattgggtcctgcggctgccaggccagaggccccgcgccaggagctc

SEQ ID NO: 302940 - DNA, 122 bp, Homo sapiens
gcaccccacatccaatccagcctgccatgtacttagcatctgatgcatatttgtcagttgcgctaagtaagcggagccaaattccttccattgtcatccctcgagaggcggggtccttcact

SEQ ID NO: 302941 - DNA, 122 bp, Homo sapiens
tggcatctgtagacacatctggatcttccgtttgatctcagtgttctagtaacggaccctcggtaatcccttcctggtcatcacagcacgatgctgcttcccccctagagagtgtgaggggg

SEQ ID NO: 302942 - DNA, 122 bp, Homo sapiens
gggcccctcgccaagcctgtgcagacccctgaccatccttacaggaaacgtggtcaccaccgaggaagaactcactgctgtcaggaagtgcgtgtccctccaggtaggcgttctgagaccgt

SEQ ID NO: 302943 - DNA, 122 bp, Homo sapiens
aacagaaaatatgctcacatcctatggtgtgaggcatggtgggccactctccacatagagcgcattctttgccactggtggctaatgtattgtcactattaggtgcaccagtaagaggaata

SEQ ID NO: 302944 - DNA, 122 bp, Homo sapiens
gggcctcttcttactaacccccactgcgccatatgggtaaatggaatgctgaggcttaggcgcccccttcccctgctgggatccgggtaggatccggttgcctttctgcggtggaggaggaa

SEQ ID NO: 302945 - DNA, 122 bp, Homo sapiens
actaagcaccctctactgcactctcttgtggcacagtaattaaaacgctgcagcacattgcgacaagccttgaagtgatgagtgctgctattttcctgactgtttaaatccctgcaaatggt

SEQ ID NO: 302946 - DNA, 122 bp, Homo sapiens
ctcaaagtgggcatcctgcagcccagctgagccaggccgaaggacctccatgcactggctcgggggcctctctcgggacactcagcactttctctagcgtcctccatctcactgggcagagg

SEQ ID NO: 302947 - DNA, 122 bp, Homo sapiens
gtcgccacaccccttatgcgcatgcgcgcgtgagcaaaagtaacggtatgcccacccttgcgcagacggcaccgcgccagacacccgctcacagagcgggcttctagaaacttccgggcctc

SEQ ID NO: 302948 - DNA, 122 bp, Homo sapiens
cagacacgccccgaggacggagacggaacggagtgaggcgtctacctgccaaggagcccccggcattgccaggagccacagagagtcgcccgagagcttcctgagcacgtggccctgacaac

SEQ ID NO: 302949 - DNA, 122 bp, Homo sapiens
ttaagcgctgcctgaaagatcgaaggacggtaaaccacagacgtgagaaacggaactttgcgaaaacgcagtcgttttatgtaccggctactcattggagttacaccagagactcactactg

SEQ ID NO: 302950 - DNA, 122 bp, Homo sapiens
tatttctgtatgatgtttgccaatatggacaattttcttctcacagtgatggcatatgaccgttacgtggccatctgtcaccctttacattactccaccattatggccctgcgcctctgtgc

SEQ ID NO: 302951 - DNA, 122 bp, Homo sapiens
ggtcagaactgctgggcctgggaggacagagttggcttattcttatttctttctctaccccgtctccatccccaaggcatttgagctagtggaatgaagaaagacagaaaagaaaacaaacc

SEQ ID NO: 302952 - DNA, 122 bp, Homo sapiens
cactcccgaccacgggtcggcgggggagccaaaacgcagtcactcacagccgattccccgcggtctaagccgccagcagccacgttgcctctcccaccagaatcagcgtagattttataatt

SEQ ID NO: 302953 - DNA, 122 bp, Homo sapiens
aaatcacttccagtcactaatgggtcacagagctttgtatcctgagctagtggcaaaactcgtccagaaaacttagtaagtgtttttcagacacgtgtgaaggctaggaattgtgggaccct

SEQ ID NO: 302954 - DNA, 122 bp, Homo sapiens
ggaagctcatggagaggcagctggcaagccgaccaggagtaacccctatccctggcattgcgactttgggcgtatcattaacttgtggggtccttacctaaaatacaggataaatgctcata

SEQ ID NO: 302955 - DNA, 122 bp, Homo sapiens
ctaatattaactttatctcttttttgtaggtaatgtcactcattctcatgacttttatgtcggcaacgaaatgcttattcccaaatttgtgtctctatgcttgatttttctctcaagcttag

SEQ ID NO: 302956 - DNA, 122 bp, Homo sapiens
gactcctgttgcgcatgctcagcgcgctgcccggctggggacccgcgcacctgcagcgcccgctgctcggccctgcatcctgcctgggcatcctgcgcccggccatgacggcgcactcattc

SEQ ID NO: 302957 - DNA, 122 bp, Homo sapiens
ttctgttgtttggttagtttccacactaggttctactgggaagccagcgttgagaaccgccgcctcaggcgaagctgggactcacacccaccggccctggaggcccgcggaaggtttccctg

SEQ ID NO: 302958 - DNA, 122 bp, Homo sapiens
acttctttttggggaagaagctgaatctcttctccttgtctttcttgccgaggctggcgtcggggccggagagggaaggcaggggcaggctctgcgccttgacgcggatgctctgggactcg

SEQ ID NO: 302959 - DNA, 122 bp, Homo sapiens
tccagctgccccacatgtattcccaggtagtcgtggcatttgccgagtgttggcctcttccgcgggccaggcctgtagacccttcccagcaggcagcaattctcgcttgcatttctaaacct

SEQ ID NO: 302960 - DNA, 122 bp, Homo sapiens
tgcagtcttgtttccgtggcctgggccctccccagcctccccggtcaggcgacagacgcgcgtggcacttctcccgagcgtgcagtcccgctacgtcgcagcccttggaccaaacccggcag

SEQ ID NO: 302961 - DNA, 122 bp, Homo sapiens
cgccccccgccgccaccattgggtgagttgcatgagtgacgagccgggggcggggcaagccgctcggggcggggttttgccgctcaacgccgggggtctagcagctgggttgcgcacggtct

SEQ ID NO: 302962 - DNA, 122 bp, Homo sapiens
ggtggttcgggatgggtgggcagctgctgaaccctttagggcatttcctctgtaatgtggcgctttcaactgtactgctgcagctttaagtaccttaaagcttctcctgtgaacttcttagg

SEQ ID NO: 302963 - DNA, 122 bp, Homo sapiens
gagtagagccgcgggcggggccagcatagaggaagtagcgctctcggccaatacacagatcgcttggcaaacgagcattttcccgcgcctatcgtgaaagcgcgagaacacaggggattatc

SEQ ID NO: 302964 - DNA, 122 bp, Homo sapiens
gtggtcatcagccggcagcgccgacgcgtgcaactgatgcggattcggcagcaggaagatcgcaaggagaaaaggcggaaaaagagacctcctcgggctcccctcagaggtccccgggctcc

SEQ ID NO: 302965 - DNA, 122 bp, Homo sapiens
cgccgcccgacagccacgcagaacagacgcggcagtgcgacgcctcccccactggggacacgagacagcgacagccacgcggtgagccggtacaaggccctctaggcttcagcgggtctgga

SEQ ID NO: 302966 - DNA, 122 bp, Homo sapiens
ggtactgcaggttctgtgccattggtgggtggtgctgggggatgcctgccttgctgtagccgttgccatacacgtgcttcttggtgctgtagtcacccttgaaggtgtgccggcgccgacgc

SEQ ID NO: 302967 - DNA, 122 bp, Homo sapiens
gagaagattaatagctgtgagcaactatgttcagaaagctgttgttttgcattttgatatcgctaccattcctagcaagtttgtcctctgaaacgttcaaaagctctttttagacgatacct

SEQ ID NO: 302968 - DNA, 122 bp, Homo sapiens
ggggcggggcgctcgcggctattccgggcgccgctatttttagccccattgatgaggctgcgtcggccgccgccgccgggattccggagacgtcaatgggcacgcgtcacggtccccgcccc

SEQ ID NO: 302969 - DNA, 122 bp, Homo sapiens
tcagcagccccgcgggggcgagcgcccgccccaggctcgcagtccccgccggcgctgtggcgggagccatttccaagagtttccaagaagtgtcaggtcctccgcatcccgcatcccgcatc

SEQ ID NO: 302970 - DNA, 122 bp, Homo sapiens
cgctcagcagaataaagagaccaaagagaggatgacgagaagtgttgggaactgcgtgcacgacggggctggaccaaacggaaagagtcccactccgcgcgcccctccccccggcgggggcg

SEQ ID NO: 302971 - DNA, 122 bp, Homo sapiens
gctggcggagggcacggtggcgtcagagcaggctctgccccgactgagggccctgactcccgccagttcccacccagggacccacccggcatcccgctgccttcaggcagaaggaagtcgtg

SEQ ID NO: 302972 - DNA, 122 bp, Homo sapiens
gctgcctaggcagcaatggctcacgggacagaacagcgaagcagtgcccggcaagcggagcgcagcacccattgcgcctgcgcataacaggctctagtctccgggctgtgggaagccagcaa

SEQ ID NO: 302973 - DNA, 122 bp, Homo sapiens
cgcgggcgggggtgggggcggagcctgaggccggccaatcaacggcaaaggtgtgtgaggcgccggccaatgggctcgcggggccacgcgtgatcggcgactgcccggcagcgtgaagctgg

SEQ ID NO: 302974 - DNA, 122 bp, Homo sapiens
caggaggcgcggcagcgggagcggcaggagcagtctcggacatgttgagaatcaaaaactcgggtacaagtggcaaagcgccgatgaagcagcgcctgggcagggccgctgtatatatagag

SEQ ID NO: 302975 - DNA, 122 bp, Homo sapiens
caggagcagaggcctcccggccccgggcggaaccccgcaggagggcctccctgaggccaacgtctctggcgccacctcccgcagtgttcgctggagcccgcggccatgcagggccacacgga

SEQ ID NO: 302976 - DNA, 122 bp, Homo sapiens
gcggctgctgctgctgctgctgatgctactggttttccttcccaggttcttcccctgcctcgtcccccctcctcccccttcctcctcctcctcctactcctcctcctccttctcttcctcct

SEQ ID NO: 302977 - DNA, 122 bp, Homo sapiens
agccctatgtaaatggaacacctggttcgacggatcttttgggccccgtaaatcaggcaccgcctcctcaagctcttctataaaaccccctgcaattcaccagggaactggaagacccacta

SEQ ID NO: 302978 - DNA, 122 bp, Homo sapiens
cgttcgcgtgagcgctcaaccccttaccgccacctcatcgtcactctacaccattctgagcgcaaaaatgttttgattgagacaaatttagaccaagcaatgaccttgtaaacagagagagg

SEQ ID NO: 302979 - DNA, 122 bp, Homo sapiens
agcccgagctggctgggagcaggggaaggagccagaagccaggacggagcccgggagacacggacctctcccacgggagaccccttagacgccctcccaggagccccgccgggtgggcggca

SEQ ID NO: 302980 - DNA, 122 bp, Homo sapiens
ggagttgacacacaaaccccgccatgggtccgagccagctatttctcaaggctcccacctcgccaagctcccaagggcctgctggcagtgcctacgctgtgccaactaccctgtctggtaca

SEQ ID NO: 302981 - DNA, 122 bp, Homo sapiens
agacacaactggaattcgtatccaggttccagacaccgcccgtcctcgggcagaggtttgcgcagaaacaagcatcattcctgaccttagggacctcaccgagcctgcctgcgggcagggca

SEQ ID NO: 302982 - DNA, 122 bp, Homo sapiens
tgccatgaaacctggtgggatgaacaagtcacactgccaaacacagcagccattgtgctgcgatgggctgccatgggaatctcagagggcaccaaacccacagcccccacccaggggccaga

SEQ ID NO: 302983 - DNA, 122 bp, Homo sapiens
cctggggaacctgcagaaggttggcacgctgctctggcctcgtgaatcgggagctgccatcggctgaatcaggtgctttaggaaaaggtccggtctgcgaggcctgtgaaaaccgtgatgaa

SEQ ID NO: 302984 - DNA, 122 bp, Homo sapiens
gtggttggggtcacttggaggttgaaagtgcatggctgagacatgtcagtggacacgaatcgagtgtggagtccagacttggttccatggtcacctcataaggcttagggcggttttccagt

SEQ ID NO: 302985 - DNA, 122 bp, Homo sapiens
tactttccacttatgtggctctgttatgaaatctttgggagatggtttctgtcttcataacgtttttgttaatggcacaaaacagttcattattgcttttgacagaaacttgttgtttccgg

SEQ ID NO: 302986 - DNA, 122 bp, Homo sapiens
aaggcggccataatggaggtcggaggtcgccgggaggcctcagcacagacagcagagctgcggtgcacagcccagcctgcagggggcgcccccgggcaccacagccagctgttgccaaggag

SEQ ID NO: 302987 - DNA, 122 bp, Homo sapiens
ctgcttctcttgtctggcggctcacgtctttgccctcaacttcctggcccggaagaaccacgggccccggggctgggtgatcttcactgtggctctgctgctgaccctggtagaggtcatca

SEQ ID NO: 302988 - DNA, 122 bp, Homo sapiens
atagcaggtggatccgtcgccacagtcgggaaagcgagcacggcctctccgaagcctgcccggctcctcgggaacctgcctcccgcatggcagctgctgcccttcggaggccgacccgaccc

SEQ ID NO: 302989 - DNA, 122 bp, Homo sapiens
ccatctttctgttattatctttgcttgctatgcaccaggcagggcgctaagcactttgcacgctgctcacttaatccccactacagccctaggaggtggtgctgttattagctgcatccgtc

SEQ ID NO: 302990 - DNA, 122 bp, Homo sapiens
agtggcaaagcgccgatgaagcagcgcctgggcagggccgctgtatatatagagcgcaggcgcgctctgattggtgctctggtcgcccgcctggctggcaggctctgagccgctgcgctgct

SEQ ID NO: 302991 - DNA, 122 bp, Homo sapiens
ggctctgccgccttcccggcagctggtgctgtctgtggcttcttaccttctctcaatacacgtatatcatctgccagttatgtgtatttctgttagtgtgtttgcaagtgtcagatgggaga

SEQ ID NO: 302992 - DNA, 122 bp, Homo sapiens
ctcatatgtagtattatatttttagttgggtggatggatggaagagtgagagagaggctgcggctgccgctgccttttcgggtgttgcttagattaaggctgagacttggctgcgattggga

SEQ ID NO: 302993 - DNA, 122 bp, Homo sapiens
cgggttccctttatgcacgaccccactcggctgcgcccggctctcctgcctccctcgccgcgctccgggctgtctgtctgtctgtctgtctgtctgtctgtctaggctgaggtcttattgtt

SEQ ID NO: 302994 - DNA, 122 bp, Homo sapiens
catgccttacaggatatctagttaaataagtcattataaatagttgctccgtgggctttccgcatttcaccctgctccaggcagcgtggtctgtatggctccgccctgggcaggaggagaaa

SEQ ID NO: 302995 - DNA, 122 bp, Homo sapiens
tgggaaatcacgcgcacacccaggattctactttggtctggccggagtggggatgaggtgcgagccgctgcggggtcggtggagccgggatgtcaagttcaccttccagccgccgcgggctc

SEQ ID NO: 302996 - DNA, 122 bp, Homo sapiens
ccttttatatcactgtgtttgaatcgagggggaggggtggtaaccggaaataaagacctccgatcttccgccccacatgcagtctttgtctttttggggggaatggggccccttgtcttctc

SEQ ID NO: 302997 - DNA, 122 bp, Homo sapiens
acgccgcctctaacactacagggtggtagcggcctcttcgtactgcgtccggggcaggaccgtgcgcggcggccgcggcgggtgctgggagccagcgcctgcctcgccgccgccctcgctgc

SEQ ID NO: 302998 - DNA, 122 bp, Homo sapiens
aatgtctgcactcatgaggagcccccaagggcggttttaagagggtgaagcaggaccgggcgcagtgacttacgcctgtaatctaagtgctttggaaggcctaggcaggaggatctcgagcc

SEQ ID NO: 302999 - DNA, 122 bp, Homo sapiens
agtccgcccaccttccatcctttctctttcctttccttccagtatttactgaatgtctgccgagaccctggcacgttactaggtgcctgccttgaagccatttaggagaaatggcgttctcc

SEQ ID NO: 303000 - DNA, 122 bp, Homo sapiens
cagggggtgtgtgtgaggctggagcggactggggaacccagacctgccgagcgacgtgggcgagcggtgacctggaccacggcgcagacgcgggcgagctgcggctcggacgccagcggaca

SEQ ID NO: 303001 - DNA, 122 bp, Homo sapiens
atctctcaccctctccttaaaaaacaaaacaaaacactttcactctgtgtgatacgtggccggctatggtagggtaagtgtttgtaatcgtctgcctctgcccggcatccctttgctgacgg

SEQ ID NO: 303002 - DNA, 122 bp, Homo sapiens
gccctgtccccatcaggcccaggagtggctgcaggagccgagggcaggctgtcaaggagacgggctccgagaggcagcggctcaccattcagcaaggcgagggcaaaggaacctcagagcct

SEQ ID NO: 303003 - DNA, 122 bp, Homo sapiens
ccaggctggaatgcaatggcacaatctcggctcaccttgacctctacttcccaggtcaagcgattctcctgcctcagccttacaagtagctgggattaccggcacacgtcaccacgcctggc

SEQ ID NO: 303004 - DNA, 122 bp, Homo sapiens
ggatggtagagaaaaagcctgattggcatgggttcaacagaagatgggaggaaaagaactcggagcagtgaatagagacaacattttcagaattttttttgaaagaggggcagaggattgga

SEQ ID NO: 303005 - DNA, 122 bp, Homo sapiens
acagttccccttctccaattctccgggctgagcgccacctgccgtctgactcaggaacagcgggcccgccgcagcttaggggagaaacgtccaaaaacctcgctggccctcagaggtcaggg

SEQ ID NO: 303006 - DNA, 122 bp, Homo sapiens
ctcgcgcctgtcagtcgggccagagcggagcagcgggcaggactgcctggccggctgctccgcggagaggctgcgcgcgccggccgggggaggcggacagccgggcccggcgcctgtggggc

SEQ ID NO: 303007 - DNA, 122 bp, Homo sapiens
tgttggtgatattccctacaatgacttccatgtccgaggaccccccccagtatataccaacggcaaaaaacttgatggtatttaccagtatggtcacattgagaccaacgacaacactgctc

SEQ ID NO: 303008 - DNA, 122 bp, Homo sapiens
tagcacccgggccagcagctgcggaaggggcaccgggtaccccagcactgccggccctcccgcgctgagctcgaattcttgccaggcctcagccacctccccacagggcagggctcaggacc

SEQ ID NO: 303009 - DNA, 122 bp, Homo sapiens
gtcgcggacgtgcgcgtccgcggccaggggtggctcttcggctttgactcgtgtctgcggcgcaccaggagagagaggaagttgttggaggagaatagttgccacagccagggcggtgacgg

SEQ ID NO: 303010 - DNA, 122 bp, Homo sapiens
gatggtgtcaccagaaccctttgcacagtgtcctgtctccccgtggctgacgcctctgcccgcatcgcaccggctgcctgctcagaggacttccgccagtggcctgggccctttccaaatcc

SEQ ID NO: 303011 - DNA, 122 bp, Homo sapiens
ggtgcgcgtggtcagttccagctcctaaaatgatgtgcagtctgcaagctggaaaggtctcggcgcggggtgtgggcagttgtgtggagctagaacctagccgctgcagcgggatcccaggg

SEQ ID NO: 303012 - DNA, 122 bp, Homo sapiens
tgaggatgataaaagaggagacatccgcagctgaaaagtgcgctgcaaaaggcagtgggccgtttggtgtgccggaaacataagaaaccacagtacaaaacaccaattttattataaatatc

SEQ ID NO: 303013 - DNA, 122 bp, Homo sapiens
gctacatgtctcctaaatagatcagcataatcttaactaggacttaaaatgcatcatcttcgttccggaactcagaacctgcagccgacgggagcctttggaggcttaatgactttaattat

SEQ ID NO: 303014 - DNA, 122 bp, Homo sapiens
gcaccgagccgtcctgcaggcgcgcgtcgcgcaccgtctggtggtcgtccagccgccgcgcgttgtagtagaaggcgcgcttccaggagctcacgccctggcccaccagctgggcgcgcagg

SEQ ID NO: 303015 - DNA, 122 bp, Homo sapiens
gtgcgggataaggaaggggcgggccagcatgtactaagggtggcgggtgtgcggagtgggcgggaaaacgcgaaggaggacaggaggtcaggccggaaggtatacttcggcatttgacagtt

SEQ ID NO: 303016 - DNA, 122 bp, Homo sapiens
aacagaaatgcaggatgaatgtagctgagcctgggaaaccagcctgcttaccgcccaccccgctgtgatgggccctaaaacagggtgcagacagaacagaatttgcaaacctctaagctgtg

SEQ ID NO: 303017 - DNA, 122 bp, Homo sapiens
ggtagatgccttcttgtgctcaaaaccggttatcactgtgaaaaattgaaagacgccatgcgcagacactggttgctaaacgtgcttttgccctccaggggcagacgctgagatccggcctg

SEQ ID NO: 303018 - DNA, 122 bp, Homo sapiens
aaatagagagcactttagcaaggcatgcccaagatcccgaaaggacaagcactgcattttcggaagacagaattcctgttgttggcttcttcatcttcacaaaatggaacaaaagaaaacaa

SEQ ID NO: 303019 - DNA, 122 bp, Homo sapiens
aaagcaggaactcacttagaagtcagctcaatcaatgcagtgtgaggtaagaagtggtatcgtagacaagtagctgtggcaataaagagggcaggacaagagaggaaaaacaattgcattaa

SEQ ID NO: 303020 - DNA, 122 bp, Homo sapiens
tcccttgaaaaatcagatttttcttgtaatctgctttttcactcaacaatattgtagatccgtgtcataacttactcctctgcagtggcttcagttattgtacactttctgttagatgatta

SEQ ID NO: 303021 - DNA, 122 bp, Homo sapiens
agccgccggcgtctccgcaggtggggtgctgtatttcctgtctgtgggtggcagcgggtgcggacgggagcagagagttcgcagccagggagctcgggtgggcccaacgctgtccgcccgca

SEQ ID NO: 303022 - DNA, 122 bp, Homo sapiens
ttttacccttttttttactaatttaaaagtatataatatagttaatatacataactgttacggtgaaaatggttttcctaggttgatgttagctttttacttttgttgatgttatttaatga

SEQ ID NO: 303023 - DNA, 122 bp, Homo sapiens
aggtggtgagttttccccaacgaaataattaaattttggctgatgctggcctttagtcatcgaaggccgagaaagtaccgccctaaccagggaaaagcaatatcagatgtaggctgttctgt

SEQ ID NO: 303024 - DNA, 122 bp, Homo sapiens
atgagcaaggccaaaggccacaggagaggtggggctttggtgcagtgtgtgtatgtgtgacgtactcacaggtgagtcaaggacttgagtcctcggaaggtgaacttggatagtgcccagat

SEQ ID NO: 303025 - DNA, 122 bp, Homo sapiens
agaacggcgatggggggcggccccgccgcaggaggacccgggcgcgtaaccccgggggcccggcccgctccagacccagacccgcggggtgcggcaccctgagcccccctccccgccccctg

SEQ ID NO: 303026 - DNA, 122 bp, Homo sapiens
agctgccagatgaggaaactggggctcgcagagccggcgccgcaggggaggggctgtgcacgaatccagtgggaaacctctctccggagctaagcccctggtccacccgggcatcgctccgg

SEQ ID NO: 303027 - DNA, 122 bp, Homo sapiens
agaagcctccctctggggaggtaagataaaccacatgaatggtggtgtgggggaaccgggcgcccacccactgcacagttgcattagacgtggtcagtggagggtcacgagtcctgcctccc

SEQ ID NO: 303028 - DNA, 122 bp, Homo sapiens
cggcgactgcaggacgcccgcgcccccggcaccgcctcttcccgcctcacccatgccctgcgcgcccagcatccaggagtcgcacacactcgacctctgcacacacatcacactgcagggcc

SEQ ID NO: 303029 - DNA, 122 bp, Homo sapiens
attcaaaaatatatgcttacgtgtaaacataagctagaaaaagacttgaggccatataggcgttatctctaggtggtgagattttaggctactttaaatttcttgttatgcttttctgtatt

SEQ ID NO: 303030 - DNA, 122 bp, Homo sapiens
gtttaaaactcaggaggggctggctcctgggccatcttcccctctctgctggttaactttcgacagctggcagtttccttatcaaaacagagaccgtagtctgtgcctcctccgcctcttgc

SEQ ID NO: 303031 - DNA, 122 bp, Homo sapiens
tgggctggaaggggctttggggggtggggcacgtagatttcagactttgtggggccctcccgaagcctgggtggcagaactagggctggaagctccagaaagtctggcttcccctcacttgc

SEQ ID NO: 303032 - DNA, 122 bp, Homo sapiens
ccacccccaggggtcttagatcttggggtgatgatgtgagaggatggagtttaatgtagtcgccctcgagagggaatgaatgtgctccacgtgtgaaaatgaagctacacacagtttataag

SEQ ID NO: 303033 - DNA, 122 bp, Homo sapiens
aggtggagcccacgggttcctcctgcaggtacatacccagcgagcagcggtggtgaggtgcggtggacactaggagggagctaggggtgccacgtccatctggccgggcttcaaggcgccat

SEQ ID NO: 303034 - DNA, 122 bp, Homo sapiens
cccacgcgcggctcgggtgggaacccgcagacgtggggcgagcagggccgctggctgtggcgggcgagcgccggggcgccacgtccgaggccgcggggtcggggctgcaggcacagctcgag

SEQ ID NO: 303035 - DNA, 122 bp, Homo sapiens
gttttccggcagagcagtaagaggcgcctcctctctcctttttattcaccagcagcgcggcgcagaccccggactcgcgctcgcccgctggcgccctcggcttctctccgcgcctgggagca

SEQ ID NO: 303036 - DNA, 122 bp, Homo sapiens
tctcgctagtgtcattcagctctgagaatagcaattttaaataaacatttgtgacatgttcgaaatgaaacacaagcaaaatgaatatcaaacctacttactatagaacatcactcttcaca

SEQ ID NO: 303037 - DNA, 122 bp, Homo sapiens
tcaaatgaaccctagggacatttcctgggttttcccttcttctcccctctccaaccgtgccgtgaagggcaagcccctcagccctaaaatctgaggaggcccagagtggtggctggggcaga

SEQ ID NO: 303038 - DNA, 122 bp, Homo sapiens
tctcaaagccaacagctctttcttagacaagcagagaggcagagaaagcgagcaagcaatcgagagaaacacacacgagcgagaacaggcaggaaggagaacattaaatctatttgattttt

SEQ ID NO: 303039 - DNA, 122 bp, Homo sapiens
aatgtgtccccagattgtaggaagtggcagaagcaccccatcccaggactttttgggtggcggtatgggtctttggtcatggaaatggtggtgctgttgttattcacagcccttggagcact

SEQ ID NO: 303040 - DNA, 122 bp, Homo sapiens
ccaggccagagagggtgatgtcattccggtcacctcctatgcggaccatttggagttgcccgtctctatctgtgtactggatttcgaaggagtcaaattctccctcagtcaccatccaggag

SEQ ID NO: 303041 - DNA, 122 bp, Homo sapiens
taggggaagcctccgcgtcctggcggccaaaagaatgggctccttccagcttccccctaccggataccacctgcaaatctattgccagaggcgcagctcccgcgaacgttcccgccccgggc

SEQ ID NO: 303042 - DNA, 122 bp, Homo sapiens
gtttgaaagaggaatccatgggggtgctcttttctggattgaggaggcactgccattagacgatgatggcattcttgcattataatttacacctgcatttcatgcactttattcactgccaa

SEQ ID NO: 303043 - DNA, 122 bp, Homo sapiens
tgaaaatttcttacagtatttcccgggcttaggaatttgttcgtgtcatcgctgaatcttcgcgatcacccccagaaggaagtggctgagccgagatcaggcccgtcgactccagaccaggg

SEQ ID NO: 303044 - DNA, 122 bp, Homo sapiens
cgtccagcgcccctgggctgggctctgtgtggagaccaagctgtgagtgacgggggtgggcggggacaggctgtgagtgacgggggtgggcggggacaggatgtgagtgacgggggtgggcg

SEQ ID NO: 303045 - DNA, 122 bp, Homo sapiens
cagattctgatcctgccacgccagggagctgtatttttcaacaagtacaccaggtgatcacgcaagtttaagaaattagcacaagttggccgggcgcagtggctcacgcctgtaatcccagc

SEQ ID NO: 303046 - DNA, 122 bp, Homo sapiens
tattgagtccccccttgatcgcggcagtggctgtgtatcgagcgcctgctgtgcccctggcgggctcgctgtgcttctcacacacccttcgcctctggtggatgagaactgagcctccggct

SEQ ID NO: 303047 - DNA, 122 bp, Homo sapiens
tagcattctgcccctctcatccctgacatcccaccataggctgatgttgccatggcaacccggatagatgctgcagctttttggacagctgtacctagtgtgggaagtgccaggcaaaagca

SEQ ID NO: 303048 - DNA, 122 bp, Homo sapiens
cgtgtcatggatcatcatccctgtgctgcaggtgtgtctgatgtttacagagacctctctcgctccatcatgcgtgcccgatgtctacagagccctctctcactccatcatgcgtgcccgat

SEQ ID NO: 303049 - DNA, 122 bp, Homo sapiens
aattacagtgacacccttttatatggttgaattgtataaaatatgaccagggaactacaccgtattaggtgttacttcatgaaattatgtgttatagcagtttcctaaatggtagtacacat

SEQ ID NO: 303050 - DNA, 122 bp, Homo sapiens
aatcctgctgtccatctgcagcatgtcaaagcaggtctccttgtcttccgtctggaacaccgggtagtgaacgatcccgacgaggatgaagatgcaggcggagatgaggatggcggtcctcc

SEQ ID NO: 303051 - DNA, 122 bp, Homo sapiens
ggatgtgaagtgatatctcactgtagttttgacttgcatttcccagatggctaatgatgtcgaacatcttctcatgtctttattggccgcttgtatatatactttggagtaatatctattca

SEQ ID NO: 303052 - DNA, 122 bp, Homo sapiens
ataggttcacttagactcccaaccctcttggtctttcctgtctccagtgggcttccctgacgcccacttaagagagccttggagagggttaccataaccgtcctcaacttggattgaaggca

SEQ ID NO: 303053 - DNA, 122 bp, Homo sapiens
ccctcccgggttcttccactcccatctcagccaagtgctgatctaataactcagtggaagcgcccagagaagaacagggtcgccgtggttagagacgctgttcccctccgcgcctgactccg

SEQ ID NO: 303054 - DNA, 122 bp, Homo sapiens
tagtctccttgctgctcaggattatgggagggaagggaagtccaggagggaaaaatgacccggaaagacctttgccggcctgggccagccctcttccggagctgatgtctcctcccaccaac

SEQ ID NO: 303055 - DNA, 122 bp, Homo sapiens
ctgttgcgcttgaggccgcagcaggttccaaaaacaaaagcatttctgcgtgatcttagacgactgaggggacgaatgtggtaaccctagcaggcttctgtcactggcaggtgcttttgtga

SEQ ID NO: 303056 - DNA, 122 bp, Homo sapiens
ctcagggggctgcggcctcactcagaggtggctgagacctctttccagcctgcaaagagccgggggcccagttcgggtcctgagacctaaagtcaaagacttggctcgggcggtttttggcc

SEQ ID NO: 303057 - DNA, 122 bp, Homo sapiens
atgctcgcgcctcgctccccttcctcggtcttcgctatgtgggatactcctgggccgccccggactgacacgtgagccaggcctcggtcacatcccggcccgctccacaactccgaagtagc

SEQ ID NO: 303058 - DNA, 122 bp, Homo sapiens
aaacctgaaggaacataaggaatcaccaacctgagagagaaaaagttgcgattttctcctcgcccaaaaaggggatgctgatggaacaagtgacgtccacagcggagatgtttgtgaccctt

SEQ ID NO: 303059 - DNA, 122 bp, Homo sapiens
gctctcagctcattcctttcccatggcgttgaggagtcttgggagctgtgttctggcagacgtggcaggcctagcagtctcttaacactagagtaaagaaaacctggcccaagtagcctgaa

SEQ ID NO: 303060 - DNA, 122 bp, Homo sapiens
caaaactgagcccccaagtcttctaaggtcctgcaagtgaatggcagggctgggacccaccgtcctggtccctggcgccctgcccagggacggcctctcacctgcatgagctctgcagctgg

SEQ ID NO: 303061 - DNA, 122 bp, Homo sapiens
atgcgctcctgcagctcgcgctgcttgcggatctcagggaactgcttctcgtagtactcgcgcaccttgctctccttggcccgccgccgggggttgttctcgatgcgctccaccttcttctc

SEQ ID NO: 303062 - DNA, 122 bp, Homo sapiens
tcaggaaatgacctgccacaactagcaggtgggcacccagccggggctggggtttgcacccggtttctctccaaccaggccggggctggcggcctggggagttcggctgtggcgcctggcgc

SEQ ID NO: 303063 - DNA, 122 bp, Homo sapiens
tgtcattccttcctcaactctcatccttccctgccttccttaattgtgcatattctttaacgctcagaagagtttatccaaactcataattttagtctttcaaagacctttaccccattaat

SEQ ID NO: 303064 - DNA, 122 bp, Homo sapiens
cccatacctgtgccagggaagaagtaatttccgtatttgtggaaggacaccgtcatgacccggtcagtgaggtagaaagcttcttgaaccccgtcaccatggtggatgtcaatgtcaatgta

SEQ ID NO: 303065 - DNA, 122 bp, Homo sapiens
tctcaaaccgcaagaaaccttcatgaatatggccagaaattgaaagtaaatttgttattacgttgcttaagtgatttgagccttttcagagtcacctgaggaccctccagacagggaaaatc

SEQ ID NO: 303066 - DNA, 122 bp, Homo sapiens
gccgaggagctgggggtcgtcaccatgcaggtaagtggcccccgagctggccagacatcccgcctttctcctttgctcaaactcccatcccactcccggtacaagtcccctggactgtgtgc

SEQ ID NO: 303067 - DNA, 122 bp, Homo sapiens
gtcttgtgaaacagatcaggggaggggagggacagaaggggtttctcccccacttctctgcgcctctgggaaagaggagaaaacttaatcccggggaaaaaagtgggcaagtgactcggaaa

SEQ ID NO: 303068 - DNA, 122 bp, Homo sapiens
aggggctatgcgaaagaaggcggggagagtggggtggggccgctccttggaacggaagcgcgcggcctcgaggcccttccggtgcgggagaaactactactcccataatgccccgcggtccc

SEQ ID NO: 303069 - DNA, 122 bp, Homo sapiens
gctataaattacagtgatcctattttccaaaccaaattcaaagcatgttgtctgaatacacgttacttatgggaacaaaaggactgactccttgaaactgtcctgaaaaatctagaatctat

SEQ ID NO: 303070 - DNA, 122 bp, Homo sapiens
ggcagatacctaggagagagattgctgtgttgtctgaagctttcaagctgttctccagagcggctacaccatccccttccccctgcaatgggtgggaggtcacgagcacctgctgctccagc

SEQ ID NO: 303071 - DNA, 122 bp, Homo sapiens
tagagacggggtttcactatgctggccaggctggtcttgaactcctgttgtgatccaccacgcccagccaaagagctgtttttgttaaagtttgcttgtcccaggctgggcgcagtggctca

SEQ ID NO: 303072 - DNA, 122 bp, Homo sapiens
ggcgctcgccgcctgcccggcctcctttccccggactccgtggctcgggcagcactgtcccgagttgctctccaagtctttgttactcttggtgtggtgctagcatttcttcagtcccttga

SEQ ID NO: 303073 - DNA, 122 bp, Homo sapiens
tgattgaaaggggtcaaaacttgactccaagcttttagcctgagcatttgagtcccttgtcgagtcactggagccacctttccagtctaagggccaatgtcaatgtagacaggatgatggtg

SEQ ID NO: 303074 - DNA, 122 bp, Homo sapiens
gacacggaggtaggacccccactcagccaggtgactctgggactgtggaaggtccacttacgactctgtacctgccccagcacgggctcaaggagttgagcctgcacacattacttagaaaa

SEQ ID NO: 303075 - DNA, 122 bp, Homo sapiens
ccacccctatttagtcctagtggacagcttcgctcaccttccctgggatgacacttctggcggctgagatgagcgagcctctctgggctctgccgccgggcgtgggctgacctgcctacagc

SEQ ID NO: 303076 - DNA, 122 bp, Homo sapiens
ggtccccccaagaagggagacacgctcttcctctcgggtgctacaactggcgctggggaacggtgatgctggaccgaaaagacaagcgcagccaggcaggccaccgcggccagcttcaagct

SEQ ID NO: 303077 - DNA, 122 bp, Homo sapiens
cagccgggcccacctcctgcccgcctttgggtcgccgcgactaatcccgccctcggagggcggctagacaccgccttctcgtcacctctccgccaatagtgctgcccggggaggggcgccag

SEQ ID NO: 303078 - DNA, 122 bp, Homo sapiens
aggaaaagcagcatcctacaagccaggagggccaaggcgctgacgactgctgctgtgacccgggacaggtcccatcccatctcgtgcctcagtaaatgtgggaagaggggagatgggggcca

SEQ ID NO: 303079 - DNA, 122 bp, Homo sapiens
gggattataggcaggagccacctcactgtcttaatgtaaattttcccgcactgacttgtccgttctgttttactacttccctctttcccatctctttgcctttgttcatgttattctttcca

SEQ ID NO: 303080 - DNA, 122 bp, Homo sapiens
ctgctcactgtgcattctcttttatcatacccaaaaagatattaatgttgaatacatatacggtaattaatctatcagaatcctccaaactaatttattccaaaggaataatttactattat

SEQ ID NO: 303081 - DNA, 122 bp, Homo sapiens
cagccctgtcctctcctgagttccatccacctgtgcatggctttttcatgagtgttttcacggatggttctgctgtcatctccaacctgataaacaaagcaccacgattcagcccttatgac

SEQ ID NO: 303082 - DNA, 122 bp, Homo sapiens
gagcccaattaaaaaaacatgaacccatctgaccctcatgtgaaaacccagggctgtcaccgtccactccttgatttgagagaccagcacaattattctggagatcattaagattctggggg

SEQ ID NO: 303083 - DNA, 122 bp, Homo sapiens
gctggcttcttttatgtactctggtgctaggctcagggagaccccaggtaccttagatcccgctctgatagtgtacaaaagcatcttggggcctagcttgggttttccccagaatttcagag

SEQ ID NO: 303084 - DNA, 122 bp, Homo sapiens
gcacagcttctgttctcacttgtggagctttgtctcccctcgctgggcagcccctggtaccgcaacccgcctggccgccttcccggctgaggcccccgggcagagctcctccgcagggagca

SEQ ID NO: 303085 - DNA, 122 bp, Homo sapiens
aatggcggcggccgcctgaggcgggcgggcggtatagagcgggcggcaggaggcaagcagcgaaaccttcccggccgccgctcccgtcccgacggcggcttccccaaggcggcaggactcgg

SEQ ID NO: 303086 - DNA, 122 bp, Homo sapiens
gagggcgcctgatgccacgtggcagtgtgcggagggcgcctgatgccacgtggcagtgtgcggagggcgcctgatgcccacgtggcagtgtgcggagggcgcctgatgccacgtggcagtgt

SEQ ID NO: 303087 - DNA, 122 bp, Homo sapiens
acaccgtacctggcccgctcgcgctcgcttttcccctctgctaaataaacccaacagggacggtggaagctgctgcttgtcttgccccgctgcctgactttgcccgcccagccacatgcttg

SEQ ID NO: 303088 - DNA, 122 bp, Homo sapiens
cgcttctgacctgaagacggcttcctcttaacctttttggaggatctctcctgctgtgggcggactgagcctgccgccaggtgtcttaacagtgcttgacttggcccgcgaccacttaagcc

SEQ ID NO: 303089 - DNA, 122 bp, Homo sapiens
actttctgtatggagccttggatcgcgtccctggaaagggacaccaaagatttccaattccggagagcgggcccgaggaagggtcactgctcgggcgcacgaaagctgtctaaggcttgggc

SEQ ID NO: 303090 - DNA, 122 bp, Homo sapiens
agcctcccagggtgggatcacattgcccaattgtgacgtcactcaagccattcccatgcccgtggcccattttttaaattacttcacaatgggcgcagaagccaaatttgaaataaatgact

SEQ ID NO: 303091 - DNA, 122 bp, Homo sapiens
tataattttagcttccctagggcatttatggactcacatgtgtaaactgattaagtagggcggctcaccgtaggatagagtggcgtgataaagtggccagacaccatcagtgacaaagcatt

SEQ ID NO: 303092 - DNA, 122 bp, Homo sapiens
gacgttcactgaaatgatacaagaccagcaggggcgcagggcgctgcggccctcagaatgcggtgacagcgccgcctcgcgtcccttccccgacctgccccaggcggacgcggtgacgtgtg

SEQ ID NO: 303093 - DNA, 122 bp, Homo sapiens
cgggagcggggccgccggggacggggccagagagagcccctttcctaggacccggtggagcgcccccaccgcagctcctccggaagaagggggcggggcggggcagggccgacggcggccgc

SEQ ID NO: 303094 - DNA, 122 bp, Homo sapiens
caggggaccagttgcgaattgtaatccctcctctggccactcttctgaggcttaaactcacgttgccttgctcactttatttttaggtgtctggcagtttaaaagagggctacagctatctt

SEQ ID NO: 303095 - DNA, 122 bp, Homo sapiens
cataactaatttctgcactgaagatgaagcgaaaaatccattcaaggtcctttttttcctcgatatatatgaaagattatattgctttgaaaagtgccttgcagtgtttactatctctagga

SEQ ID NO: 303096 - DNA, 122 bp, Homo sapiens
gcagatgcggatgtccagggcttcgaggtgagtaaaggtgaagcgcaaagccttaggcggcgtgcactgagtgggtaagggactgcagatcccagctttgagctctgagtactcctggcagt

SEQ ID NO: 303097 - DNA, 122 bp, Homo sapiens
ggcgctggaaccggaccaatccggaatcgagcggggcgagcggggggagcgggcggagggcggagggcggggctgcacctgacggctcccactggccccgccttcttaccacgccctctctt

SEQ ID NO: 303098 - DNA, 122 bp, Homo sapiens
ggccccgcccgccttgctgctccagacctagttctggacggttagtgtgggcaggctgggcgtctttttgtcgtaggttcccgatttcttgcagtcacagtgctaaactcaccagcatctta

SEQ ID NO: 303099 - DNA, 122 bp, Homo sapiens
ccacacatgaaccgcgcacgcgcgcgttagccgcaccccctccccgtgcgccccgcctcacgccctctagagctggcggctgttcccaatgccttgcccacccctgccgggcccgtcggact

SEQ ID NO: 303100 - DNA, 122 bp, Homo sapiens
aatgctcacgtcctgagagatgagctcctggggaaccggggcaaatgcgccaataggagccgaggaagggggaggtgcgggccgggggaggttgggggctgggggctgtaattcaagctggg

SEQ ID NO: 303101 - DNA, 122 bp, Homo sapiens
caactctgggtccagtgtgacctccagtggggtcagcacagccaccatctcagggtccagcgtgacctccaatggggtcagcatagtcaccaactctgagttccatacaacctccagtggga

SEQ ID NO: 303102 - DNA, 122 bp, Homo sapiens
ataaatgctttagaacttctgaggatgggcttacttccaaaagatgagcaagaaaacactcgtggaaaatataggtatttcaaaatgcaaagagaaaaaggaactatagagtcagaaagaaa

SEQ ID NO: 303103 - DNA, 122 bp, Homo sapiens
tgtggggtgtgtgcctttgaccccggacttaagcaacaagcgtggtcttgggcgtagctacgaggtggttggtgggctccagggcctgcgtgcccctcgacgtgagcgatgattggcgatga

SEQ ID NO: 303104 - DNA, 122 bp, Homo sapiens
ggatggggactttggcagtggggggtgggaaagacatactcgcaggggatcggaaggccccgtggcaactttgtgtaagtcctggttcagtcaaggagaggaatccgagggaaatgcctgat

SEQ ID NO: 303105 - DNA, 122 bp, Homo sapiens
gcccttctctcttagcacaggctcggccagccctggccctctgggacccatcagctcctgcgatctctggccggcctcgccctgcctgctccgccgggcctggcccgcccctcgggttctgg

SEQ ID NO: 303106 - DNA, 122 bp, Homo sapiens
tttttgcttcacagtcttctcagcaaactctcgatgtgccccattgcccagagttacagacgcttgtgcttttagtaccacaacactgtcagtatgtcactgcttactcaatgctattttgg

SEQ ID NO: 303107 - DNA, 122 bp, Homo sapiens
tctgtgttttctcctcgcctgtctcttagaaggacccctcccactggatttagggcccaccgtactccaggacgatctcgtctcaaagccctcaacctactgatgtctgtagagaccctttt

SEQ ID NO: 303108 - DNA, 122 bp, Homo sapiens
tccaccaaggccactggccgacgggtcggaagagagcccttcaagacggaacttgcattgcgcttgttagagaaaattatgtgtaaaaactgagccattcagctttactttccaccccgcgt

SEQ ID NO: 303109 - DNA, 122 bp, Homo sapiens
tgtcgtcaggctttgcctcctgacttaccttggccaatggaacgtaagcagaagcagaagcgcctcttcaagagagtgaaacggtcctggagggagcggctcctccagcctggatgctcaac

SEQ ID NO: 303110 - DNA, 122 bp, Homo sapiens
cgtgcttcaatgcggacgaaccgtggaaacaggcgtggtcaatacgtgcttcaacgcggacgaaccgtggaaacaggcttagtcaaaggagccaggcaaaaagactctattaaaaaagaaga

SEQ ID NO: 303111 - DNA, 122 bp, Homo sapiens
ccccccgcgcgcgcgccctccctcgctcgcgcacggcggcccggacgctctcgggatcggcgcgggagcgcgagctgcaggcgcattgtttcctgactgccttatatctcgtcgcgcgcccg

SEQ ID NO: 303112 - DNA, 122 bp, Homo sapiens
aatttgcacgtgaccacggactttttttcatatccgccgaccatgctgtaacgaggcgtacgcgttactggcgtgcacgtactcagaagactagctgacagccttgtttgtggcagacagag

SEQ ID NO: 303113 - DNA, 122 bp, Homo sapiens
gcggaaacaccttcctggatcgaggaggtccttctggtatcccatcatgcatagcgacttcgcctcgctaggaggcacgttttggcctctttggtcacgatcagccttttggctgcaaccaa

SEQ ID NO: 303114 - DNA, 122 bp, Homo sapiens
agtccagacgctgttgggtcccctccgctggagatcgcgcttcccccaaatctttgtgagcgttgcggaagcacgcggggtccgggtcgctgagcgctgcaagacaggggagggagccgggc

SEQ ID NO: 303115 - DNA, 122 bp, Homo sapiens
ggggctaagctgccttcaatgctcacccgacaaactacggctcgcactcaactcagagggcgtcagccaccacctacctcagccaagtcacctgtgctgaagcccgggaagctgcctggaga

SEQ ID NO: 303116 - DNA, 122 bp, Homo sapiens
gtgctgggattacaggggtgagtcaccatgccaggcctgtcaacaccttttgctcaccatcgtatagcacatttgctcttctcttcattggccacatttttcaaaaatcaagtctgtattac

SEQ ID NO: 303117 - DNA, 122 bp, Homo sapiens
tggcgcggtgcgcagtgggtggctccacctcgactgcgaattactgtttatgaggtgactcgctggttctatcggtggacagtgggacattctgaagggaggcaaggaggcggactgagcgc

SEQ ID NO: 303118 - DNA, 122 bp, Homo sapiens
tagtcccaactgctcaggagacttaggtgggaggatcggctgagacgatcctcccacgctcgttcactcctctcaggctagactctctctccttttcattggcttgtcttagctattaataa

SEQ ID NO: 303119 - DNA, 122 bp, Homo sapiens
aagcagcctgcaggaggcggtattccaccccggcccgggtgcagccgaagggcagggacacgtatgagtggaacttggggtcatccttgcagagccgcacgatgcgtgaggtgtagaagagg

SEQ ID NO: 303120 - DNA, 122 bp, Homo sapiens
tggggacgccacacctccgctaccaccagcaccgttcacaccatgaggacaccgcacctccgctaacaccagcaccgttcgccccgtggggacagcacaccccaagctaccaccagcactgc

SEQ ID NO: 303121 - DNA, 122 bp, Homo sapiens
tctaaagtcagttaagatttactaatttcttgctcagcatttccttttgggacgctgttgcgcattagaatgagatatactgaaagtagcataaagacgcctggttccttttaacagaacaa

SEQ ID NO: 303122 - DNA, 122 bp, Homo sapiens
ccaaggcagggcagggacggggtcagcgggcctcaccggtgtcggggtctcccagaaaggcgtcctcgtccttgcggcccctcagcggggccgcgggcgccggctcgtcctcgggcagccgc

SEQ ID NO: 303123 - DNA, 122 bp, Homo sapiens
cagcacccgctacacggccccaccaccacgaagctcagacacagaacagcacccgctacacggccccatcaccacgaagctcacacacagaacagcacccgctacacgaccccaccaccacg

SEQ ID NO: 303124 - DNA, 122 bp, Homo sapiens
aaatgctgaaggaaaggtgtgaatagagggggaaaagctgacataggagagagggaaaaacggaaagaggaccctgacatagcaggagaggatgctactgagagactaggtcaaagggtttg

SEQ ID NO: 303125 - DNA, 122 bp, Homo sapiens
gttctgttggaggacagggaacttcagggggcctccctgagaacttccggtgacactttacgaggatggatgaaccatcatttgttctgaatccaagcccactgaggagccaggagacctag

SEQ ID NO: 303126 - DNA, 122 bp, Homo sapiens
gaaccgacaaagacttctctaagtgaaagaacaaggagcagctcttccacatacctgggccggccacaccgctgcaccccaagaggaagcacattgggtgccccttctcacactcaccatag

SEQ ID NO: 303127 - DNA, 122 bp, Homo sapiens
gagtccaggggtctgacacctgtggccaaaccaggcgtgtctccacctagtcatgatttacgagttatagccaagtgcacgacctcagcatttcctgtgggtcccgctagttgctgctggat

SEQ ID NO: 303128 - DNA, 122 bp, Homo sapiens
gccctgcaacggggcggagtcgggagggggccggggctgcgggtcgcctccttagggaagcgctgcctcgcccagtccctcgcaccgcccgctggcggagggagaggaaagcggaccttcaa

SEQ ID NO: 303129 - DNA, 122 bp, Homo sapiens
gcagccgcgttgtccgcgctcccggtcggccgcctgcgccgccgctcccggcggacgcagcggcccccaccccacccactcaggcggcccggccctcgctgggcctaacgcccccgcccgcc

SEQ ID NO: 303130 - DNA, 122 bp, Homo sapiens
ggtgtgtactcacaaaatcagcttctcctttttcttaaacccacttctccataaccaggccgcctgctgctgcaccaggaatttactgctgtgagcaactataaacattgtgttaatggtag

SEQ ID NO: 303131 - DNA, 122 bp, Homo sapiens
ggactcccaaggtcggaaactccacccgggcacagagtcgcccacaaaggacagctgcctcggatcgttgcagactcacagtggactttggaaaggaaagaaagagaccttggaggtgtcca

SEQ ID NO: 303132 - DNA, 122 bp, Homo sapiens
gctcggctcgggggcaaatggaggcgcctgaaaaacaatggtgttgctttctcccccgcccgcaccttcctgagcgctgggctctgggctgggaggcggcgccgcggaggccgggcgcgggc

SEQ ID NO: 303133 - DNA, 122 bp, Homo sapiens
gagcccaccgtgaggaacgaacaactccagacgcactgcgttaagagctgtaacactcaccgtgaaggtctgtagcttcacttctgagccaacgagaccacgaacccacgggaaggaagaaa

SEQ ID NO: 303134 - DNA, 122 bp, Homo sapiens
gagacctgagaggcgcgggccacagcgtggaaggaagctcttcagccttgaagaaagcgccggggccaggtccgccagcccaaagtctatgctcctcagccgagaaggcttcctgggggagg

SEQ ID NO: 303135 - DNA, 122 bp, Homo sapiens
gtacccactgaggcggccaaagcttaactggatcagggcaggtgagcttacagctaggagcgtgactgctttgtcctacaatggtcatttggtccatccttctgcccctttcccgcctcccc

SEQ ID NO: 303136 - DNA, 122 bp, Homo sapiens
cccgacagcccccgcgcatctctgtggcagctgccccggtgcttcccgccccgccgcgcccgcccacccaacggcgctgtgtccccccggtagctcagcggggacttcctttatgtggtaca

SEQ ID NO: 303137 - DNA, 122 bp, Homo sapiens
gagatgttgggcttgtgactgtaaatatcacttatctggttgatgtctattctactgcaccgtttttgggatatgaggcgtttgctgcagacaaacccctatgattaatgtagcactgtcag

SEQ ID NO: 303138 - DNA, 122 bp, Homo sapiens
ctcgggttcgctccgctggcgacggtaatgagggagccagggacagggccagagcagaggcgctctgcctcaggccgcgacagccgtgctcggggctcctcacagctggcgggaccccgagc

SEQ ID NO: 303139 - DNA, 122 bp, Homo sapiens
acctaacccaggatcagtgcagggatgtgcagatgagtgggctgtggggtgtcctgctcacggtttcatggatggtgagtggcagagcagagacagaggtctctggtcctgtgcccttttca

SEQ ID NO: 303140 - DNA, 122 bp, Homo sapiens
ggttgtgaatgtggcaggatttattcatcctcaggggacttttccaagtctgtgtttatgcggtgggttatgggaggctgagggtgagacttagatggaaaattgcttgacgagacgtggac

SEQ ID NO: 303141 - DNA, 122 bp, Homo sapiens
gcggcgggaggtgcgtgctgcggcgccagaacagtgtttgctggtgcttctgccctccaacggcagagggcggaaagggacagggactctgcacctcatcacatacctggtgttttcagggc

SEQ ID NO: 303142 - DNA, 122 bp, Homo sapiens
aggaggaaagttggcgctcaccttttggactgggtctcggaggggttcctgtcgcgctgccggcggttcttgaaccagttgctgacctgggtgagggagaggccggtgatcttggccaggtg

SEQ ID NO: 303143 - DNA, 122 bp, Homo sapiens
ggcctctgttagcttcacttgctcccccttgaggccctcctcagagaagaggctgatttccggggtgctgtagtcctgtggaaggagggggaaaattaaatatagataaacagccaggcgtg

SEQ ID NO: 303144 - DNA, 122 bp, Homo sapiens
ctaaggcagacaagacagtaccatcccattagcttggtacatgaggcttaaacagttcctcgaagtcatggggtgaaggagggcacagttaactcagcccccgcttattcaaatatcagatt

SEQ ID NO: 303145 - DNA, 122 bp, Homo sapiens
cgcccgcccggagtcagcccccagctccccagcctcccagccccgcgtcccctccagccccgcaggctcgcccggcccactaactgcccgagcggcacaccgcctggtccccggccatgcag

SEQ ID NO: 303146 - DNA, 122 bp, Homo sapiens
tatctctcaggttagtcatggctcccactggtcaaaaggttctagaaaaacagcagcaaccgggcttattgattgaaatttcatgatcaagtcagacaagcaaactggcagaaaagtgagct

SEQ ID NO: 303147 - DNA, 122 bp, Homo sapiens
cgctggtctggacatgacgtaaaccaatgggcaggcccggaagacagaggcgtttgcttccgtggccaaaggcgcttcatttccgggtgaaactggcattgagggtactggggcgtgcgtga

SEQ ID NO: 303148 - DNA, 122 bp, Homo sapiens
aacgtctcagcacccagcactgcctccgcagcttcgtggggctggcgggagggacatttacgagccatttcacgccccgcggctgcccatcaaccatggggcttttgtcacccaccatagcg

SEQ ID NO: 303149 - DNA, 122 bp, Homo sapiens
gtattggcaagacctgataaaattgccttagcataatactaacatattgcattaatgtaacgtacaaggctgctgcagatggggttctctaaaagctacaagataggtttacggtttaaggt

SEQ ID NO: 303150 - DNA, 122 bp, Homo sapiens
ccccacctcgagtcggcccccggaggttttgtttatggttgggttcgcggcctagtgggccgcgccagagccggggcctcgatttgggagcgtggccggggcggggcttggagcagccgtag

SEQ ID NO: 303151 - DNA, 122 bp, Homo sapiens
tgtcggcggccagctgccctcgccaccactgcccctccaactccatgggacccggcggcgcgcccagcccgacgctgtaacttgagtccggaaccgcggccctcacagccccagcccctccg

SEQ ID NO: 303152 - DNA, 122 bp, Homo sapiens
tctccgggcctctgtctccggccccctgtctccggccccctgtctccgggcctctgtctccgggcctctgtctccggccccctgtctctgggcctctgtctccggccccatctccggccccc

SEQ ID NO: 303153 - DNA, 122 bp, Homo sapiens
agccagagcccacatgttcaaccactgtctttcatcaatggcaggggctctcaggaggatcgagggtaaaggggaacagcctaggctttggagccagatagaccaggaattcattccccact

SEQ ID NO: 303154 - DNA, 122 bp, Homo sapiens
ccaccacagaccctcccattcagtgtaaataaagagatgcattattaatttataccacctcgtcctctctactcctaataattgtttaaccagctgtttcctctaatcctccttaaacacta

SEQ ID NO: 303155 - DNA, 122 bp, Homo sapiens
cgggggcttgcccgccccacccgacgacttcctgccgccgccgccaccgccgccgcccctcgatgaccctgagctcccgccgccgcccccggacttcatggagccgcccccagacttcgtgc

SEQ ID NO: 303156 - DNA, 122 bp, Homo sapiens
ctctcaggcttgcctgcccgggagcaacttcacttctgaaaccggattggacccagaggacgcggagaggccactccttgttatttctcaagttttatcatcgccggcgcggctgaggagct

SEQ ID NO: 303157 - DNA, 122 bp, Homo sapiens
tttgaaatccttaataaaaacttgctggttttgaggcttgggtaggcatcacagtcctaccgatatgtgatgtcagccccggtggcccagctgtaaaattcctctctttgtactctttctct

SEQ ID NO: 303158 - DNA, 122 bp, Homo sapiens
caacacaggctgataagaccagagacagcagggagattattttaccatacgccctcaggacgttccctctagctggagttctggacttcaacagaaccccatccagtcattttgattttgct

SEQ ID NO: 303159 - DNA, 122 bp, Homo sapiens
atttcctcacattgtcccctcatttgtcaacacataattactgtcaccgctgtgtgctgacgctggcatcaggttgcacgtgccagtcagcataaaaatatggccgtaatgttggcataatt

SEQ ID NO: 303160 - DNA, 122 bp, Homo sapiens
gagcaataaagctttttaatcacctgggtggaggcgggctgagtccgaaaagacagtcagcgaagggagataggggtggggccgttttataggatttgggtaggtaatggaaaattacagtc

SEQ ID NO: 303161 - DNA, 122 bp, Homo sapiens
gggagccagcagtgcaatttgctcctgacgggggtgttccaggacctgcaggggttcttccgatagcctctctccagctcccttcctgagggtggccctagatatctgcaggtggtgactat

SEQ ID NO: 303162 - DNA, 122 bp, Homo sapiens
tttccttggctgaccttgaacaaattatgcaagccccattccagctgaggaatgaaaatccggcccatactggaagcacagaggggaaggatagtgtatctatcacccagcacagtctgcat

SEQ ID NO: 303163 - DNA, 122 bp, Homo sapiens
ggtgcctgcctaggccaagcctggggccagaagggtcagcccagcctaagtgggtgtggacggagaagccaaggatgccctaggagcactgaggctgcctagaaggggctgccctggcaggg

SEQ ID NO: 303164 - DNA, 122 bp, Homo sapiens
ttgggaatttagaggcccgagttcgggaagagattctgtacgagctgttccttcaggtaccgtctctgggaaggggcggcggaggggcggagcacgtcgggccggaaacatagcgcgcacct

SEQ ID NO: 303165 - DNA, 122 bp, Homo sapiens
tcgatttgcaatttgctcttcaaatgcgctaccaagtgccatgctttacaaacagataagcgcttcaaatgcgctacaaactggcgcttcagatgcgctacaagcacgcttcacgcgggcga

SEQ ID NO: 303166 - DNA, 122 bp, Homo sapiens
gtcaggcagcagcgtgtccagagggacctgtggcctcacaaggaaagctgctcatgcaaccgctgtctccgctcactctgggagagaggcagggccagctttcattttagaaactttaaaac

SEQ ID NO: 303167 - DNA, 122 bp, Homo sapiens
agacagctttgcgtctctttttcaatgactgcacaagcttgagactaaaaaaccctcccccgaggcctccgctgttttgcataaaccaatatatttgcatgtaaatacaggttactggatga

SEQ ID NO: 303168 - DNA, 122 bp, Homo sapiens
gcacacgtgagctcctggaggacagggagagcggccgccccgcccctgcggagcacaggacgcttcctgccacccctgcagagcatgggacgcttcctgccatggtgccgtggcaatgggtg

SEQ ID NO: 303169 - DNA, 122 bp, Homo sapiens
tttctatacaatttccttactgtcagagggaccagatctttccctcactgtggcaggggccgtgcaggtggataaaggaagagctggtttccggagagtgactgtaacagcgttgactcgaa

SEQ ID NO: 303170 - DNA, 122 bp, Homo sapiens
ctctattgtgaatcctctcttcctccccagccagatctataaattagaaataatattatgcgtcctggctagtctcactacagcttaatgaggttatttctaagaaatcctttcatttcaaa

SEQ ID NO: 303171 - DNA, 122 bp, Homo sapiens
cgcacaggtcaacttccacaggcccgcgtgatgtgaggccccactgcgcgcgcaggccaacgcccactgccccacgtaatgccctactgtgcgcgcgggccaacgcccactgccccacgtga

SEQ ID NO: 303172 - DNA, 122 bp, Homo sapiens
ccgcccgccgcgattatagccgatgactcagggcggagctccgcatccaaccccgggccgcggccaacttctctggactggaccagaagtttctagccggccagttgctacctccctttatc

SEQ ID NO: 303173 - DNA, 122 bp, Homo sapiens
caaccacccatcttcgatttctgatcaccctcgatatctgattagtttcctcatcctccgcggtcccccaggtgatgtctgagcaccctggcctgtcttcagcaagaatcctcttaggttag

SEQ ID NO: 303174 - DNA, 122 bp, Homo sapiens
gccgggagtgcagggaggcagctctcctgggggtgcaggtaggcagctctgctgggggtgcggggaggcagccaggcttttgttgcacttccatctactggcagcacacacagaaaggaaat

SEQ ID NO: 303175 - DNA, 122 bp, Homo sapiens
tgctccgggaggatgctggaagaagattccagacgcagcttttttgcctgctatggttaccgttgctatgaaggagggcggccctgctgacccagagccagccctgtctcccgctccactct

SEQ ID NO: 303176 - DNA, 122 bp, Homo sapiens
aagtgctgaggtccagagcgtagtccgagggctccgaagtcagattaaagggctcgaggacggcggacacaggggtgggcgccagggatgcggcgttaggggcgtcctctggaggcaggggc

SEQ ID NO: 303177 - DNA, 122 bp, Homo sapiens
tctcttaaaaggcgccagctggtacttttaaaatctttgaatttggtgcctaaatccgcgcggtccaatgagacgcgtcgcttgcatgcgcgcaccaataggagggcagtgggtgggggcgc

SEQ ID NO: 303178 - DNA, 122 bp, Homo sapiens
tggatcttcttaatgcagtgtgactcaaagtgaaacttggaaacacccttgcagggcgtgcgatgggtgtgactcgcttcttcagtaccctgcagctcaaacccctagagggagcatgcaga

SEQ ID NO: 303179 - DNA, 122 bp, Homo sapiens
agcagcggggtagggaggaagcactgggcaggccgtccttgaggaatgtcaccatcaggccggctgctgagctgcctgttgtaacctgaaaccaggttttttaatttgtctttttataaaga

SEQ ID NO: 303180 - DNA, 122 bp, Homo sapiens
ctttggcgggtgaacctgctgcatgagctgcgggcgcttcaccctgggcttcctccgcttcggcctgctcttggccttgttgatttgtaccacaaagaaggccaggaccaccatggctccca

SEQ ID NO: 303181 - DNA, 122 bp, Homo sapiens
cattcccaaactgcacacatactcctttcccagacgctctggccagcctgctgtgggtggcgactctcccccaccccaccccgaaatccccctctctgcaccatctaggatggagaagagca

SEQ ID NO: 303182 - DNA, 122 bp, Homo sapiens
tcctatatattacctaagcagagctcaccaacaatatttttcattaacagcttagagcagcgctgccaaataaaaataccatgtcaatcatgtaagtaatttaaaattttcttagtagccac

SEQ ID NO: 303183 - DNA, 122 bp, Homo sapiens
gggagtatagggcctcagtacatgctggaagccaggtgcccaggttggtggtgcagagcccgggtgcgctctgggagccaggtgcccaggtgggaggagatagacgcctaggcccttgcgct

SEQ ID NO: 303184 - DNA, 122 bp, Homo sapiens
ctcgatctcctgacctcgcgatctgcccgattgggcctcccaaagtgctgggattacaggcgtgagccactgcacctggcctcaatttggatttatattgtctttgggaaatgggaattatt

SEQ ID NO: 303185 - DNA, 122 bp, Homo sapiens
ctgcaacgcctcgccggacggagtcctttcctttcccgggacgctgggccatgagctccgcggccacctgaggcacaggggagtctgctcggccaggacagcctccccgaagtcccgtgccc

SEQ ID NO: 303186 - DNA, 122 bp, Homo sapiens
gaggtccagaggaggaaagaaaactgctcgcccgcgcccgccctgcagctgcacgtgggtcgccctaagcctgggttcggagctgatggcgcaggtcccaggtgccctctagcggctgacgt

SEQ ID NO: 303187 - DNA, 122 bp, Homo sapiens
gagaagctcagccatttaggggaaagcgaaatcgaaagcggccgcctgctcactagataacgcctacttccaaaagtggcctgcccagactattttggtagcaagcgtggaaatcagatctg

SEQ ID NO: 303188 - DNA, 122 bp, Homo sapiens
ctcccgcccagcgatgtattcagcgccctccgcctgcacttgcctgtaagcgcccgcgcgcggggctgcccaccttgcctggctgtctgtccgtatgcctgtgccctgtacctctgtctgcc

SEQ ID NO: 303189 - DNA, 122 bp, Homo sapiens
cggcaaaaaacaggcttgggaaaggcgaagccagcaaagtcgaagacaccagagtggcaccggttttgtgagagcgcccaagcttgacctcgggctacgctcagcgagcgacagagcaacgt

SEQ ID NO: 303190 - DNA, 122 bp, Homo sapiens
gagcctgcggcccgcggtggtgggagaggtgggcgtcccgagaaacccgccttttcctgccgagtcagttacatttgagccaagcctggctgtggctgcattcatagcatgtttgcatgtta

SEQ ID NO: 303191 - DNA, 122 bp, Homo sapiens
tttgggacagtttgtgactagtagtgcctgtgcccctggaaaggttggagacttgggggacgactggagaattgccatttgaggaccaaaggagaaaagaaactacacgctaattctagaag

SEQ ID NO: 303192 - DNA, 122 bp, Homo sapiens
ggatctcggagacggagagggcgcacaggaagaggtacatgggcgtgtggaggctgcgctcgctccagacggtggccatgatgagcaggttgcccagcagcgtgaacaggtacatcagcagg

SEQ ID NO: 303193 - DNA, 122 bp, Homo sapiens
ttgaggtgaagtgtagtctttattccagcatcctctcctcttcagaagaattgtatgtatcgtcataacagcatcgtcctgatccatcaggtaaaagagaggatgctacctagtggagttat

SEQ ID NO: 303194 - DNA, 122 bp, Homo sapiens
ccacagtggggggaaaaaaggaaaaaagaaaaaaaaaatccactgccaagccttgccaggcgtagaaagggctggaactgctggggccattttatctgatttattggaaatagagtggatct

SEQ ID NO: 303195 - DNA, 122 bp, Homo sapiens
tctgagccaggtgtgggatatcgtctcgtggtgcgccgtttcttaagccggcctgaaaagcgcaatattcgggtgggagtgacccgattttccaggtgcgtccgtcacccctttctttgact

SEQ ID NO: 303196 - DNA, 122 bp, Homo sapiens
atggtccccaactctccccaacacgtgtctcaaggaaagacatggccttggcggcaccgccgtgggttgggcaaatgactctgctagcggcagcctcttgcctactctgatcctgctaccaa

SEQ ID NO: 303197 - DNA, 122 bp, Homo sapiens
ccaccacgcctgactggttttcgtacttttttggtggagacggggtttcgctgtgttggccgggctggtctccagctcctagccgtgggtggtccgccagccttggcctcccagggtgccgg

SEQ ID NO: 303198 - DNA, 122 bp, Homo sapiens
gaaagttccaaagacatcactggtcctctttggaccggagttctccggagaaaccgcttccggcgctcctgacacactgagatagaaagtttcacagaaatagggcaagggatagggcgagg

SEQ ID NO: 303199 - DNA, 122 bp, Homo sapiens
ccgctcagagagctgccactgccataatttagcaactgatagtccgggccatttggataacgccccgagaaggagtttacaaagtacgagctcatttgggtgattttggagggcttgatttg

SEQ ID NO: 303200 - DNA, 122 bp, Homo sapiens
ttttgcattttaaaggaggtctctgaggaccagctgatgctttcaaaccacttaagtcagcgaagccccaaaaaggctgtagtctcttgcaagcaaaagttaccaaggggctgccgagggtc

SEQ ID NO: 303201 - DNA, 122 bp, Homo sapiens
tggagccttgagtctgaacccagagcggggctttgtgttgtggctgggtgtgttcactgccggagcttggccgtgtgaacccggagccgggctctgtgtcgtggctgggtgtgttcactgct

SEQ ID NO: 303202 - DNA, 122 bp, Homo sapiens
gccgcagccacggccaccgggagctaggagtgaacccctgcgggggagcagcttccccctcgcgatcgtggggacagccagtcctgtgaaacgaggaggcggttccggacgcccagaaacgc

SEQ ID NO: 303203 - DNA, 122 bp, Homo sapiens
ttctctggccacgcgccctgataacctccgtgttccccgcaggacaggctgtggtggaggcgcacacacagcacccagaggcgggctctgtggagttcgcatctatatgtcagcaacttagg

SEQ ID NO: 303204 - DNA, 122 bp, Homo sapiens
tattataatacagaaagcttcctcattacaaaacactttcaattcaaaggataagtccaacgttccatcattctgcccattttggagctaaaaaaaaaagattctaaatggtatttttatat

SEQ ID NO: 303205 - DNA, 122 bp, Homo sapiens
ggatgtctaggcatgcctgtgatagctatctacattattttgctacatttatacaaagtccgtctgtgatagataggcacgccggttttaagtttttccccttacctttttagatagtcacg

SEQ ID NO: 303206 - DNA, 122 bp, Homo sapiens
tcttctgtctccctttttttggtctctcttgaccctccctggcaaggaataagtgagccacgatttctattctagtttctctcttgtaccactgctcctcgtcaggatggctcccttccatt

SEQ ID NO: 303207 - DNA, 122 bp, Homo sapiens
gtacaactctacactttaattaagtgaattaaattgaattgctgggttatcatatgagaccgtgtgctatatctggtggggtaaaaactaacatacagcacttactcttgtgaagttcgtag

SEQ ID NO: 303208 - DNA, 122 bp, Homo sapiens
tccgtctcaggctgagctcgcgggctgctgccaggaaggctgccccggtgagcagctcggcgatgaagctgatccagcccagggccagggaccagccgaagctgatgtccacctggtccagg

SEQ ID NO: 303209 - DNA, 122 bp, Homo sapiens
cgcattcattcaacaagtgaaattaatttaatggatgcctaatgtgtgctcattgctttccgtccctgggatatagcagaggacaaatcaaaagttccttaccaaatttacattttgcggtg

SEQ ID NO: 303210 - DNA, 122 bp, Homo sapiens
cttcccattgacatttgaaaggtattttacatgcatgtaaatcttgcactcattgaaaaacgcacaatggcatccctgtgatgatctttgaaactttagcttttactttttacttttttttt

SEQ ID NO: 303211 - DNA, 122 bp, Homo sapiens
tgcagtgggcacacctgtgtggccaggcaaagagatgggacattgccggccactggccctcgtccccacaaggggaccacaacagattctagcagctcaggtgggcttttctgccgggcctc

SEQ ID NO: 303212 - DNA, 122 bp, Homo sapiens
ctgatgccacctcccactcaaccctccacttccttcaaacgatccctcaaacttccacagcgagatgcccactagaaatccccagacaaggcctttagcccttgtcttcaagtggccttcct

SEQ ID NO: 303213 - DNA, 122 bp, Homo sapiens
gcagcactcggtgaggcgggcaacgatccatctgtgccgccagcatggagccggaagccacggctgacttgtgcagtagaggaagtcgagttcattttattgaatttattctcattttcagt

SEQ ID NO: 303214 - DNA, 122 bp, Homo sapiens
gggcgggggcctgggcctagtcgcacagggcgggacaaaccaggtgtcctgactcccagccgaggactcctgcacccgggggctgtgtgctggacactgggcaaggggtggacgtacgccag

SEQ ID NO: 303215 - DNA, 122 bp, Homo sapiens
acaagactggttatgtgaaaggaggaggcgtcattcctgcggaagccctatcccacatgacgaacgacaaggccaggggcaagcaaaaagaggaaggactctcttgctctgctccgacttgg

SEQ ID NO: 303216 - DNA, 122 bp, Homo sapiens
ccgcaaaggtctgcagcttcatttttgagcccagcgagactacgaggccaccggaaggaacgaacgactcctgacgcgctgccttaagagctgcgacactcacggcggaagtctgcagcttc

SEQ ID NO: 303217 - DNA, 122 bp, Homo sapiens
aggcaggtattgcaccctggggcaaggcaaggtggacaaccagcggatgcggcgcggccgcggcctgggcctgggccctccgcgtcgcccactgccccactgggccccttctcccgcgctca

SEQ ID NO: 303218 - DNA, 122 bp, Homo sapiens
agcggaggcggggccggggccggaagtcacgtgctgtgacagtagctggggtgaggccgtcgtcgccgcacgggctggttggggctgtgtctgtgggaggcgccggggtgatggcggtggag

SEQ ID NO: 303219 - DNA, 122 bp, Homo sapiens
tcacagttcctgtggagcaaagatctaagtctcagctgatacaactcagtctggggcaaacgacagcagagggacaagacttagatgtggggttgcatccccagattcattcctacccagga

SEQ ID NO: 303220 - DNA, 122 bp, Homo sapiens
tggccagagctgttctccactctacctcccagggcctctatcagcagctgacggttcctgcggcttgtaatgttcctgctgatctgcctcactcactacccgtcaccgctgatgaactttcc

SEQ ID NO: 303221 - DNA, 122 bp, Homo sapiens
tggcacgcccgtttccgtgtgaacccgaaactgccacttgctggctgaggagagccgctgcggcgttccactgtcacgtgagggggccggtcctcttcggcggcggcactcagtgagtgacg

SEQ ID NO: 303222 - DNA, 122 bp, Homo sapiens
tttcgcgagatcgaggctgagctccgccgcgccgccgtgggggcgaccccagaacacttccgggtgtaactggttgtgctgtctgtgtacttccggcagcctccagacagtttcttccgctt

SEQ ID NO: 303223 - DNA, 122 bp, Homo sapiens
cctgttgagtggtagcctttcccctcaaccagcaatggaggagcagccccagatgcaagacgccgacgagcccgcggactccggaggggaaggccgggcaggcgggccaccgcaggtcgccg

SEQ ID NO: 303224 - DNA, 122 bp, Homo sapiens
aaccaggtagcttcccaacagagccccctccctctcttcaccggagcaggccaggactcccgccaacttccttgaccagtccaggaaaggatcagggtttggcaagaggactggcttcctgc

SEQ ID NO: 303225 - DNA, 122 bp, Homo sapiens
tcagccctgcgggtgagtgtttaactttcagcccagcttaagatctccgaagacacccatcgcctcgtcctgcccagtcccctccgctaaagggccggcctgcccgggcctggctggcagct

SEQ ID NO: 303226 - DNA, 122 bp, Homo sapiens
tagtagccttttcagataggcgtgggacttcttcaataccacgccaacagcgacacaggccgtcccttgaaggtcactcacagcacagggcctgaggccacacaccacagagccttccacgc

SEQ ID NO: 303227 - DNA, 122 bp, Homo sapiens
agagcgtgccaggcacgaagtgtgtgggaggcggccgtggtccccaggtggagggcaggccggggtggcggggcgcggccggcgggcactcacagggcagggtctcggcgctgttcttctgg

SEQ ID NO: 303228 - DNA, 122 bp, Homo sapiens
tgcccgaggtcggacgctaaattctgtcaggcccagtgtccaagtgtccgtttatctgtccgtttgcatatgaccgtagatcggcacgccctgctccagctgcggcatgtgcagggttaagg

SEQ ID NO: 303229 - DNA, 122 bp, Homo sapiens
tcctcctgaattacttttgtgtcctttgacacgtcagatgtggctggggaaacagaaactcgcagaagttaaaaaaatgtgcttgaggtgccactggagaataacaatcatagccaggatgt

SEQ ID NO: 303230 - DNA, 122 bp, Homo sapiens
tccagcctaggcaacagagcgagaccttgtctttcaaaataataaaatgataaggtaatgcgcagaagcattcagcacagtgattggcacatggagggcccattggggtgtttttgtttttg

SEQ ID NO: 303231 - DNA, 122 bp, Homo sapiens
accttcctccgggggttcacctgcatcttttccttccttataaaacatccccagggttcccgggccaacaaggcgttggggcgaatccacagggcatcgcagaaccaccgccttccagcagg

SEQ ID NO: 303232 - DNA, 122 bp, Homo sapiens
agaagaggagcctgggagagagggaagaccaggcacaaggagtgaggggccgggctagtgcgggggctgggtgaccagcctgagtcaaggtcaggaaagatttcagcacgctctcaactctg

SEQ ID NO: 303233 - DNA, 122 bp, Homo sapiens
ttctcagagaagtgtttgctggtgaaccgggagacagatacagaggcgggggtctgagaacgcgactgttaacatccaggctgtgacacccggtcctggaaggacaggacttggcaacaggt

SEQ ID NO: 303234 - DNA, 122 bp, Homo sapiens
tggggagtggaatccagcgacaccaggtcacccttccgggagccttttctccagctgggacgagagggaatcaaaggaaagtaagacacggctcaggaggcccacgccgagagcgaagagtg

SEQ ID NO: 303235 - DNA, 122 bp, Homo sapiens
ttacaaaccatccatttgtcaatgctctagtcccagaactctttctggtaactcccttatcgatcaccctagccctccttctagccctactggtcaacgcttgggtcccagaactcttccct

SEQ ID NO: 303236 - DNA, 122 bp, Homo sapiens
caccaggcgccctagctcgggactcactcggctcgaccacgggaagggaaggagcgcgaacgctaaatcccgtgccgcggggagccaagccccctgggccggaaatgcctaatctgaacttc

SEQ ID NO: 303237 - DNA, 122 bp, Homo sapiens
gctaatatctaggtttttgactctgagcccctgttggggctctcacttcatggcttctcacgcttgtgctgcatatcccacaccaattagacccaaggatcagttggaagtttccaggacat

SEQ ID NO: 303238 - DNA, 122 bp, Homo sapiens
gcttcactccgtccaccaccatctgcaccagctccacctctgagaagcccaggcggtcagcgttggagacgtcgaagaccccgcccaccgcagccgtgtccacaccgcctggggagacagca

SEQ ID NO: 303239 - DNA, 122 bp, Homo sapiens
attccaatggccccacaataaccacagaaaggaagtggtgagagaaaagatgaggtttaccggaactgagaagtattttctagtattccactagcccaaagcatctcagttcagtgctgatt

SEQ ID NO: 303240 - DNA, 122 bp, Homo sapiens
ggcaccgcttgcagctgtacttgtgaggctccgagtctgcgctctcgtcagaattgtcatcgttttcttccgaggagatcccgatcttgccgataaactcttccctctggtggtcatccatc

SEQ ID NO: 303241 - DNA, 122 bp, Homo sapiens
tgtgcctctcactcacttcaggcccaggccaggttaccgcaaccacttcactttaatgtccgcctcccagcgcttcagactcaaccacaatattcaaacccaagccactttcctcagcgctt

SEQ ID NO: 303242 - DNA, 122 bp, Homo sapiens
gcaggcaggtaatgagagtaaccatggcaacccaccagaggaagtgtattctgcaggagacgttaatcccctctccccggagctgggacagcctgactttccattctcacacagtaattaga

SEQ ID NO: 303243 - DNA, 122 bp, Homo sapiens
ctcactacattccaaccttgtttctcccctaccaggtttgaatgtaatgagcaggaagcccgtctaaggaaaattcttcctgatctttctgatccacaaacgtaatttggttttatcaaaaa

SEQ ID NO: 303244 - DNA, 122 bp, Homo sapiens
gtgcgagcaggcccggctcaagtgctccccgattatggagcagttcaacttcaagtggcccgactccctggactgccggaaactccccaacaagaacgaccccaactacctgtgcatggagg

SEQ ID NO: 303245 - DNA, 122 bp, Homo sapiens
agagggaacctaagaattcctggactctgactgggcgtgagaaatggccggaagtagcttcgagtccgtcattcaagcagtagaggctctggagaaaaactggagcgcatctgcttaaaggg

SEQ ID NO: 303246 - DNA, 122 bp, Homo sapiens
ccgtcaccccgcctggccctgcatcttctcactgctcatgggcatcagcaacggctacttcggcagcgtgcccatgatcctggcggcaggcaaagtgagccccaagcagcgggagctggcag

SEQ ID NO: 303247 - DNA, 122 bp, Homo sapiens
cagccccccgtggcctcttcctcagagccagggaggtcgctggaaatgcaaatctgagcacggctcaccccaacccggcccctggatctcgcctccacctgcagtccacaccctggcctggc

SEQ ID NO: 303248 - DNA, 122 bp, Homo sapiens
caaccagaggaagtttctcaaacccacagggcccagcaaagcttcctccagcgatgggagcgttctgggtcttcccagtccagccaggagacccagccgcacgcggctccagaggccctgga

SEQ ID NO: 303249 - DNA, 122 bp, Homo sapiens
gtgagccagggttgtctgtaagtcccatggccatcacagtcccgtcaggggtggccttcccgagcccgaccagcaccacacctggtggaggcccacctccgccttgtgtggggaaccccaca

SEQ ID NO: 303250 - DNA, 122 bp, Homo sapiens
gccgcgctcgcaggccccgcctcgccgaacatgtgcgctgggacgcacgggccccgtcgccgcccgcggccccaaaaaccgaaataccagtgtgcagatcttggcccgcatttacaagacta

SEQ ID NO: 303251 - DNA, 122 bp, Homo sapiens
gagcatctccaagtgaacaaagcacctacgatgtgccaacggacctacagagctcatggtcggattaactcacacgtgatctctccctgccacatcgaaatgatctttagtgaaaaggaaca

SEQ ID NO: 303252 - DNA, 122 bp, Homo sapiens
cttcgggtggggggaggcggagcgactttcaaggtctggatacttgcaggtacggcaggacgccggtagatggcattgcgctccgaaataaagcgcagcgccggcggctccagccacccagg

SEQ ID NO: 303253 - DNA, 122 bp, Homo sapiens
tgaaaaagagtcctgtgggtcatgcctctggcttcctgcccagtgcaggcctccaggtatcgcagctaagaggctgccaggtctctgaataacgtctacagtgggaccctaccacggaacaa

SEQ ID NO: 303254 - DNA, 122 bp, Homo sapiens
ctggtgcggaaggatttacagggaaggaatgtcgggctcctccggctgggagcgcacctgcgcagggagggtcctgtcccaccacacctggccccctggggaacagcgggtgagtgctgctg

SEQ ID NO: 303255 - DNA, 122 bp, Homo sapiens
ttcaatcatctcattttataaatgaagaaaccaggggccctgaagagaagtgcttccttccggttaacacagctcatctctggcagaggtggaggtagaactgggtccttccctctagacca

SEQ ID NO: 303256 - DNA, 122 bp, Homo sapiens
ccagagcccagaggcctgagatgcaaacccgccatggactcaggaccccatcaggcaggccggccagccccactccccacgcctcccgagggtcactcttgtcacaaggagccgggcatcct

SEQ ID NO: 303257 - DNA, 122 bp, Homo sapiens
ctttcctaggcagagaatcagcacaggggacgtgcacagccttgggctccagaaggcttccggtctccaccgcggctgggcgctctgccagcctcggggcagcttctccctctagagtggcc

SEQ ID NO: 303258 - DNA, 122 bp, Homo sapiens
tacaccaggtttcactcttggtgtacatcctatgggttttgacaaatgcacaatgtcatgcgtccaccatgacagtatcatacagaatagtttcaccaccctaagactccctgcgctccacc

SEQ ID NO: 303259 - DNA, 122 bp, Homo sapiens
cccgccctgcttgggggtgagcgggggttagtgggcgggttagtctagggccggggccgccgcacggggcgaggccctgcttaccagtcccggtcagggtgggctgcgggagcctcaggctg

SEQ ID NO: 303260 - DNA, 122 bp, Homo sapiens
gtggaagtgaattgtgaaggtgccactcttctctgctggaagtatatgcattgaggccagcgtgtctaggtaattagagacttttctgtttgagacctgagcagtacacatcccttctactg

SEQ ID NO: 303261 - DNA, 122 bp, Homo sapiens
aatattaggactttaaacctgttgaaggtaagacacaagctcttagtacaaaaagaaggccgacagagggcctgaccagaagcctgatttccaggctgccatgaggccagcgaactcaggga

SEQ ID NO: 303262 - DNA, 122 bp, Homo sapiens
gggcggggccgctcctctcccagcaggcgggtgcagccccaggggtgctgcaggccactgcgggaccttcagcgtccggctcccggcactggcctctgtgccctggccgttcctggggtggg

SEQ ID NO: 303263 - DNA, 122 bp, Homo sapiens
cgccgccctgggaggagtctccctcccttggctctcctttctgggaactgccggctgtcccgtagcgttggcggttccagagtgcgggctgcacggagaccgcggcagcggccggagagccc

SEQ ID NO: 303264 - DNA, 122 bp, Homo sapiens
gaacaaactcgctttcgctgagggccccagggctgtagcgaggggcagtgggcagagctccggagaggccccatgactctccaggaaggggtgggatcatctgcacagccagcggtcagaca

SEQ ID NO: 303265 - DNA, 122 bp, Homo sapiens
ccgcggcgaggcgggcaagcctggcagggcagagggagccccggctccgaggttgctcttcgcacccgaggatcagtcttggccccaaagcgcgacgcacaaatccacgtgagtgttttcaa

SEQ ID NO: 303266 - DNA, 122 bp, Homo sapiens
cctcttcaaacaggacagagctcacacccctttccaggtaaaggtgtgtgtgtgtgtgtacgtgcacgcacgcgcgcgctgatggcaatgtcggctgcctcactcattctattcctagtcca

SEQ ID NO: 303267 - DNA, 122 bp, Homo sapiens
gagacatagttagattctgtctctcaaaaaaatttttaaaaaattacccctgatgtggtgcgcgcctgtagtcccagctactcgggaggctgaggcgggaggatcgcccgagcctgagagtt

SEQ ID NO: 303268 - DNA, 122 bp, Homo sapiens
atgtaagagatgaggaaatttcctcctgagcctgtgacagcgccgacttccttcctgtggcggtcgtcttttagttgctgccgtgacgactcagtcgtcctggactcaactgtggccatgat

SEQ ID NO: 303269 - DNA, 122 bp, Homo sapiens
ctccagatacaaagtgattttacaggagtcccatctcaatggacagttaagatgacttgacgtactaaaactgcttttgatcccagtaaaaccagatcaaaactgtcatctagatatccaag

SEQ ID NO: 303270 - DNA, 122 bp, Homo sapiens
ttgaactgaggtttattagactccagagcaggaggtcttaaccacaggccccttccacagcgggcagtcaataacaaatagtcttcattgcattatagctatgaccactgggagaatcagag

SEQ ID NO: 303271 - DNA, 122 bp, Homo sapiens
ggggtcggggacgcacgggctctgggatcctgggtttcatggcggctgggagttgggggccgggctgggcgtccgagcacctgaccctcgagggggcgggcggggacgggttcccagctgga

SEQ ID NO: 303272 - DNA, 122 bp, Homo sapiens
tgccagtgacttacattatacagtcaccgggtccctgccccgcgaggccgcgcagtgtcacggcctgtgtcacacgccctcgcagtgccacacgctccctatcacactcacaccaaatcaca

SEQ ID NO: 303273 - DNA, 122 bp, Homo sapiens
tgcccaggctggagtgcagtggctattcgcaggtgcaatcatcatggcacattacagcctcgagctcctggtctcaagcctcttgcctcagcctccctagtagctgagactataaatagtat

SEQ ID NO: 303274 - DNA, 122 bp, Homo sapiens
gctggattctggctcaggagaagagcgccgccaggaccccaggaagctgcagacaggagccgctgacacctccacctcacgcggacgccacctagtgtgaccattaccagccactgcgcctg

SEQ ID NO: 303275 - DNA, 122 bp, Homo sapiens
atcccagaagcccagccagcttcacctctcactggcacgctggcactcgccgggactttgcgtcacccagcctgggcactccggtagcccagaaggagctcatcccgagatcaagcccagca

SEQ ID NO: 303276 - DNA, 122 bp, Homo sapiens
ggcgcgatccaggcccctcccctgtggcgcgcagcgggcccggttttatgaatgggagagcgagccgcggccgccacatcaggtagaggctgtaactggatctctagcgctgggccccattc

SEQ ID NO: 303277 - DNA, 122 bp, Homo sapiens
aggatgtgaatgatgtgaatcatccctttgtacagcgtatccacagtgtctaagccaccccgcccattagtcacttagtagctatctcagttgtcacattaactgttggtattacagtgctg

SEQ ID NO: 303278 - DNA, 122 bp, Homo sapiens
gccttaaaaatgccgggagaagactgacaatcaggccaccactggtgcccactacggaaacggcaaagcccatcttgatgcagagaaaatcgcccgctgacccggggccagcgccattgaaa

SEQ ID NO: 303279 - DNA, 122 bp, Homo sapiens
tactgccgtaaatggcctactagagttgtcgtgaaatgctcctccccgccctccatgtggcgaaaatgcaatcacgcttgacggcgcgaggtggctcagccgcaagatggcggcgctggcgg

SEQ ID NO: 303280 - DNA, 122 bp, Homo sapiens
ggtcatcttgtccacaggtaacaactccgtgggtgccatccagtgccctgatagtcagttcgaatgcccggacttctccacgtgctgtgttatggtcgatggctcctgggggtgctgcccca

SEQ ID NO: 303281 - DNA, 122 bp, Homo sapiens
cactggtcaattttgttctcggttgcttggttgggctagatttcggttctgccgggtgggcgttttaagggctgtgggcgtcacattcgtcggtgtgtggccaaggggacatgacacgtttt

SEQ ID NO: 303282 - DNA, 122 bp, Homo sapiens
gctaggcatgttggtggttgcctatagtcccagctactcagaagactgaggtgagagaatcgcttgagccgaggaggtcgagactgcagagagccatgatcacaccactgcaccccagcctg

SEQ ID NO: 303283 - DNA, 122 bp, Homo sapiens
gctccagctgttttcctgccagcgctgggagacccggcagccgcagcgcccccagcggcgcgcagcggcccaggaagagagtgcctaccgccggcgcctcttcagcctcctcctggaacgcg

SEQ ID NO: 303284 - DNA, 122 bp, Homo sapiens
ccgggaagatgggccgagtgacgctgcttgtctctgtgtcagtgcaatgggatgtccaaccgcttctggggctggggccgcgaggacgacgagttctaccggcgcattaagggagctgggct

SEQ ID NO: 303285 - DNA, 122 bp, Homo sapiens
gtgtcgcataacttcacatcagctcctcctgcttccatcagctctctgtgcatggcctgacgccagcagcaaggcccgagctccggagcagactgttagagctcaaattccagctccattac

SEQ ID NO: 303286 - DNA, 122 bp, Homo sapiens
tcccagtcttctgggtgctgctgggcactgctggaggaataggaagaggacttgggcaggcgccagccccatgcagtatgcgcgaatgtgactctaaggcacacagcatgtgcccccgacag

SEQ ID NO: 303287 - DNA, 122 bp, Homo sapiens
aagagtgctgccaggacttgacctcaggagttccttggattctttccttctctgttttcacggcccgcatgccaggttaggccctcctcatcttatgactcactcatgctataacaaccttc

SEQ ID NO: 303288 - DNA, 122 bp, Homo sapiens
atgtcctcctttgcctaatttgctgtgggttaggaattcctgggggagaggaggatagcacggaagaaggggagaaggactccacttggttccgctcgcttacccagcgagccctgctggcc

SEQ ID NO: 303289 - DNA, 122 bp, Homo sapiens
gggaagggagaagtagagctataacttctcactttgattgtgctgtcactgccctcagtccggtgttcatgattgagaatgagatgttagcaacgtgattataagtgtggtctaaggagctg

SEQ ID NO: 303290 - DNA, 122 bp, Homo sapiens
ctactcgcctgaaagtgacacctgtgatctaaccctggctgctagatcccagaaggaagccggcagcccttcagaacaaaagctcctattctctagaaaatgatattcagatggaataataa

SEQ ID NO: 303291 - DNA, 122 bp, Homo sapiens
aagggaagaaaaactaacagagatgggtcattttagtccagctgactcattttaagaaagcggatgttaagtggattgttcagggttattctgttagcagtgaaggtggaactaaagctcaa

SEQ ID NO: 303292 - DNA, 122 bp, Homo sapiens
tgggaaagcgcggacgtgctgggcggctgtgcttcggtaggcgaccaccgcccctggccgcgctccgggctttcacggaaactcccgagaccgggccctgggttcctcctctcctactcggc

SEQ ID NO: 303293 - DNA, 122 bp, Homo sapiens
acgagcagccctgcagcaccaggttgttgatggcccgggggctggtcagcagcttgtcgtcgggggaggaagaaggagtcccgggctcctcctgcggcggcggctgctgctgctgtgacggc

SEQ ID NO: 303294 - DNA, 122 bp, Homo sapiens
agcccccaaggcagctgccctggtgggtgagtcaggccaggcccggagacttcccgagagcgagggagggacagcagcgcctccatcacagggaagtgtccctgcgggaggccctggccctg

SEQ ID NO: 303295 - DNA, 122 bp, Homo sapiens
tgcataactgacaacgaaggcggtagggtgacttccccagtgcagtagcctggtgctatccgcggacccgggggctccccatgagatcagctctcggaacaaggcaagtcccggcagggcca

SEQ ID NO: 303296 - DNA, 122 bp, Homo sapiens
ctttctcgttgcatcttccccggcgtgggggcaggggctgggggtggcagttgggagcaccgtctctgacacctaggccccgggggtggctctgccaccaagtcgtaggcgagcgtaatgaa

SEQ ID NO: 303297 - DNA, 122 bp, Homo sapiens
cagcccctgccaggcatcctgctatgtgcccgtgagctgccagtcctccgtgtgcatgcccgtgagctgcacgcgcattgtgtgcgtggctccctcctgccagccctccgtgtgcgtgcccg

SEQ ID NO: 303298 - DNA, 122 bp, Homo sapiens
aaatccctctggaggcaaaggactaattgaagcgtcccttagcttgtttataagcagcttcggtttgaggcttctctctgaataacctccagtgagcaccaaatagaaggagcttgctgttt

SEQ ID NO: 303299 - DNA, 122 bp, Homo sapiens
gcgctttacagtttacacagctgtcaccttcgtttctccttaattaataataaaaatagccgccgttcgggagcgcgggctgggcgccaggcccggtgccgagcgcggtacgagctcggccc

SEQ ID NO: 303300 - DNA, 122 bp, Homo sapiens
gagttaatcgaataaactaatcttcgctgtggagattaactctcagtagctgcaggaaaccgggcaagggagaatgcaaatagcagagacctcaaggtgctggaggagttaggaatctcccc

SEQ ID NO: 303301 - DNA, 122 bp, Homo sapiens
taagtatatgggctgtggagtcatattatctaggttaaaatcctagctgtgtgggccgggcgcggtggctcatgcctgtaatctcagcattttgggaggctgaggcaggcggatcacctgag

SEQ ID NO: 303302 - DNA, 122 bp, Homo sapiens
gcccagcggggtcccggccggaagactgaaggctgagtgggactgggcacggcgcgaaaccggcatcctgataactaggatttacagaataaggctgactcctgtcagctcgtgacccagcc

SEQ ID NO: 303303 - DNA, 122 bp, Homo sapiens
cctcctcccccgcaccccgtgctgcacagcctgcgccttacagcgggttcatggcgccagcgccagccgcgtccacgctgctgctcccgctactgctgccgtccccgctgccgtcgccgtcg

SEQ ID NO: 303304 - DNA, 122 bp, Homo sapiens
caaagggcagggcagcggctgtcgtggccccagcgtcctccccaacgcccccaacacccccgcccaacaaagagccaggcacaaggcctgtttgctaagctgcaggatggagagggctgggg

SEQ ID NO: 303305 - DNA, 122 bp, Homo sapiens
gcgcgaggcctttcgggagctgtagtccgggtcctgtcatggcggcggggattcgcgagccgcctactacagttcccaggaggccccggggcggggtgtgtgtgagccgagcttgcgcaccg

SEQ ID NO: 303306 - DNA, 122 bp, Homo sapiens
tttaaggatctgtattagtcgtgacaggtaaagatctgtccctccacctacctccaccagcggtgtgtgctaggatttctaaaccccttgatgatgtgtttgcaacctggccacaagcacac

SEQ ID NO: 303307 - DNA, 122 bp, Homo sapiens
gctgccctagacgctacacacagggaatgacttttccccggtatcattcacctgtttctccgacgcttactgctcagtgtctgattcacaataggcgctcaataaaacattattgtcctgaa

SEQ ID NO: 303308 - DNA, 122 bp, Homo sapiens
ggctggggggcttcctgccccgtgggggagatgataaaggcgcccttgccctccgatgcacgtgcgtctgcaagttctgctgtcaatgccgagagttgacatagctccaccgcgacctcatg

SEQ ID NO: 303309 - DNA, 122 bp, Homo sapiens
tgccccaccgagcttcaccccagcaacccctttaactttcttaaccctgtattccccaaccgaacacttcccagagttcacgctggcagagcccacttcaaaaaatgctgcaggaagccatt

SEQ ID NO: 303310 - DNA, 122 bp, Homo sapiens
tcacagccggggtccacagacccgggtcctacgggcagtactgtgctcacctagaggccacggtccatgccctgtctccagcaggcccaagtcacttgtccatggcgaaggcccggccttgc

SEQ ID NO: 303311 - DNA, 122 bp, Homo sapiens
cacactggtcacaaaaggaaatatatgccatgacctatagaatcagcttcttcccctcaccgttacaaagcaatgagatttgatcttgtcaatccagaaggcctcttccaccaaggttcctg

SEQ ID NO: 303312 - DNA, 122 bp, Homo sapiens
tcccggcagcttcccggggatgggatgggtcactctgcggacccctcggtccctggaggccgtccttgggctctcagtgggcctggccctcacccaaagctgcagaaacactttctgcggga

SEQ ID NO: 303313 - DNA, 122 bp, Homo sapiens
ggcgtcccaggaaggagctggggctgagtgggacgcggtgcccaagggcggggctgtggtcgagggcggaggtggcctcctcttggggtgtgcctgccacctagtggtgaacttggagcagt

SEQ ID NO: 303314 - DNA, 122 bp, Homo sapiens
gaccagttccgggcacatctttacccaaagggaggactccgggacccccagccccgccgccgcagaccccctgtagcaaagcagggaactggacctcaaagggctgctggggaagacgggat

SEQ ID NO: 303315 - DNA, 122 bp, Homo sapiens
tgtgcttctggagaccatgtgtacttttgtcattgtcaaaaaccagtgattgcccgagctcggtggctcacacctgtaatcccagcactttgggaggccaaggcaggcggatcacgaggtca

SEQ ID NO: 303316 - DNA, 122 bp, Homo sapiens
cacagcttcctccatttccatatttgcaactcccttctctgacagtgagaaatctattctcgttctcctcaaatatttacttttttgcattcatccttctgtatgtaactaatctggctgcc

SEQ ID NO: 303317 - DNA, 122 bp, Homo sapiens
tttcacgttgcggctcacaaatgaactgctttttattcaaagaaccatgctgtctgttttcgcgtgggtgggtgtgtaaccggggcgggcgctatgttggttttgttccctgcaaggttgac

SEQ ID NO: 303318 - DNA, 122 bp, Homo sapiens
cctgtgtctgatccttgatctgccgttactgcgaacctccgggacgtagggggacccccacgccatggggcagctctccttggagtcctcctcacataacagggagcccatgctttccgact

SEQ ID NO: 303319 - DNA, 122 bp, Homo sapiens
atggagcttacgttctaggaagggaagagagaaaattcacatctatctacatgactaaatcgcattgctatgttagaaggttatttatgtgctaagataaaaagaaaatgtagaacagagga

SEQ ID NO: 303320 - DNA, 122 bp, Homo sapiens
ggagatccacgctgcggccggctccgccccgcccaaccctcaccctcacgctcacgctcacgctcacgctcacgctcacgctcacaggctcccggctccacattcctcgcagggctccaatc

SEQ ID NO: 303321 - DNA, 122 bp, Homo sapiens
cctaggttgtatgactttatgaaattaaaaaaaaaaaccacctaagcagccctgagcctccgcaaaaaaagaccccacggggacatcccgtacctggtcagagccaggacataccccatgtg

SEQ ID NO: 303322 - DNA, 122 bp, Homo sapiens
atgactccaggtggcaatgatgcaatgggctttgcttaattagcccattagcagccagcacggctgtgggtggaagagaaaacaactctcagtttggggtgaaatgaaaatgcatactgtac

SEQ ID NO: 303323 - DNA, 122 bp, Homo sapiens
atttaccttggagggcagcacctctttggcacgagactcaaagaggtgttccagtcgggccgtgtccactgagacagggtccagtgaagcccagagggtggcgcagggcccaaagcggcttg

SEQ ID NO: 303324 - DNA, 122 bp, Homo sapiens
ttttgcataaacccgcccctttcgcttttttaggatcctgggattggtccacacaccagtcgtgatttcaatgcccgcgtggcctccttttccccgattgtggcgttagtctcccatcctag

SEQ ID NO: 303325 - DNA, 122 bp, Homo sapiens
ccactgtgtgctgggcccttgctgggagcggaggtgtgagcagacaatggcagcgcccctcggggagcagtggggacaccacggtgacaggtactccagaaggcagggctcggggctcattc

SEQ ID NO: 303326 - DNA, 122 bp, Homo sapiens
taaagacagttgattcatcagaaaattccaaattactcttcaataagttctatgtcagaacgcattccgtatgttctaaggaatataaagatgaacaacaagagaaggattggtgccattgc

SEQ ID NO: 303327 - DNA, 122 bp, Homo sapiens
gaaaggcggcagcagatcttagggagcaactcccggcgtcagagaggcggtactggcagccggttatggaagaatccggaaccaaggcactgggcgcggtgaggccgtgggcgcagagtccg

SEQ ID NO: 303328 - DNA, 122 bp, Homo sapiens
aattcccatggaaatacctcagacacgtgcccacaataattggaatgcctaacatttcagcgtaagtacttttgcatgagttctactaaataaaaagaatgcagtgagagccctccaagttt

SEQ ID NO: 303329 - DNA, 122 bp, Homo sapiens
agcaatcgctgccctgccctagctgcctcaacacgcctcggggacaactctgcttcgcctcgcgcctctcctggcctggtcaagggcattgctgggctttgcagaggcaccagttccccgca

SEQ ID NO: 303330 - DNA, 122 bp, Homo sapiens
gtgggtttgtctgcaacgatcttgccagctgtggatgtggctgaagtgccgagccgcccccgcggggtgtgcattccagattgtcttttgctcagaggtccagtctctggaataccacagtc

SEQ ID NO: 303331 - DNA, 122 bp, Homo sapiens
caatttgtgtttgcaaccttgagacagcaagctgaggaactggtttgtctgcttgctgcccgtgtccttcctgctcagtggactgattcaaggatttgagtcttcaggatgttaagtgagtg

SEQ ID NO: 303332 - DNA, 122 bp, Homo sapiens
cagaccagcaattggctcgacgcttgagcccggatgtacggcacgcgtcgcgacctaacccggaaacactgcctcccgaaaaaaaggtaaactctagactgcggaaagtaaactacctttcc

SEQ ID NO: 303333 - DNA, 122 bp, Homo sapiens
ggaactccctgaccccttgcacttcctgagtgaggcaatgcctcgccctgcttcggctcgcgcacagtgcacgcacccactgacttgtgcccactgtgcggcactccctagtgagatgaacc

SEQ ID NO: 303334 - DNA, 122 bp, Homo sapiens
agaggaggggtgggtgtgacttcctggtggtgctggtgcagtgctgtgccttggttgccacggtggttacgtgaacccacacatgtgatgaagtcacacagaagcataggcacactttgtac

SEQ ID NO: 303335 - DNA, 122 bp, Homo sapiens
atctgcattaacaaacgcctccccttctctccaggtgaccccaagatccggaccacactacgaaatacggatccagattttaaaggccttcgaatccaaagtcctcgttttacaaagagccc

SEQ ID NO: 303336 - DNA, 122 bp, Homo sapiens
cagtctctccagtttagttgtgtctgttatccttcagccccatctcccctcccctggggacgaaggcgaaaagagtgaggaggcattgcccaggcccctggtacctgccgcggagggagcga

SEQ ID NO: 303337 - DNA, 122 bp, Homo sapiens
tcaggctccgcgcacctcgagccctgggctccgaggctgggtctctgcagctcccgagcgcgcctctgattggctggcggcgcctgtctgcctgatgctgcgctctcccggtctctcctcct

SEQ ID NO: 303338 - DNA, 122 bp, Homo sapiens
agggatcatgaaaagtgcaatccctgtgtcctgagatactccagcagtataggaaattgacgttagtgtctatggtttcctgtcaacggggaatctaagagaaaagtgttaaaaaagccact

SEQ ID NO: 303339 - DNA, 122 bp, Homo sapiens
cttgacagattcagtgtgtggcctgcctgagacctccaaccagtctgcagggcactgtcacgtccagtcgtttcccaaggcctaaaataggcaggcactggctcaaggccacacagtcaagg

SEQ ID NO: 303340 - DNA, 122 bp, Homo sapiens
caccgtccccagggacacctgttgtcgcctccccactcgggccgatgaagacatcctgggcgtcccaatctcgaagacacccgtcggccagaagtgtctgtgtatggggccaggtgtcgcag

SEQ ID NO: 303341 - DNA, 122 bp, Homo sapiens
gtaaccaaagcactgaacagtacaaggcactataagctagtaaaatcactggtcattcctcgaaagaaacatgatacataggtagataaccactcgagagcagatgcagttagtggcaggga

SEQ ID NO: 303342 - DNA, 122 bp, Homo sapiens
tgctccgcccctgagcggggcgccccggcccaaccccctgagggaggagggtccaggtgccgcagactcttagcccctggcccggcgtccgcccggcaggttctggcactcctcgttggtaa

SEQ ID NO: 303343 - DNA, 122 bp, Homo sapiens
cctttcctgtgcggaccaatcagaatctcaaacacagggcacggggcccacacttccgtccggtctgcctggtctctctaaccgcgccagtgtgcctccgactcggaacggcttccgcggcc

SEQ ID NO: 303344 - DNA, 122 bp, Homo sapiens
tggaatcttcacaactttgtgaggtagtgctattattatccacattctacaaaaagaaaacggaggcacagcatggcaactcgcccaagataaccgcagccagtaaacagcagagatggggc

SEQ ID NO: 303345 - DNA, 122 bp, Homo sapiens
gaccaagccccagaggcagccaaaaccacacctttctgcagggagggtaaactgagcccgcgagctcagggcaagcgcaccaggcgcatatgctggccttcatctgtcctcagctcctccct

SEQ ID NO: 303346 - DNA, 122 bp, Homo sapiens
atcataggtttctgtaagttttatctgttaaaagttttaaggttgttctttcctttgcagcgatgaatcaagtttcttctggagtccattggggaatactcgtttttcagctagaaggctag

SEQ ID NO: 303347 - DNA, 122 bp, Homo sapiens
ctcccttttctcattgtaaaatgggaacgtgggtccccccagcagagcctggcccaggtacgtgtcagcctatgagctggtctttgggacaccagccaaccacctgaggctcctcttgacat

SEQ ID NO: 303348 - DNA, 122 bp, Homo sapiens
acccgcagcagctgcagctctcgccgctgaaggggctcagcttggtcgacaaggagaacacggtgagcccgcggggagggcgctgcgggcaggggagggaggcagggaaagcgaagccgctc

SEQ ID NO: 303349 - DNA, 122 bp, Homo sapiens
gaaaaaggcgggaactagtcaaaagccggggactgatgggacgctaggatctgcgcgtcccgcccatttcggcctctgactggtgaatgtcttcggcttatggcagaggagcccgcctcatt

SEQ ID NO: 303350 - DNA, 122 bp, Homo sapiens
aaaaattaaataaataaaacatttacaagggttgtggtgaagattaaatgagatcactcacgaaaaagctcagcagaccctgatgtgcagtaggtgctcaataaatgttagccagcaaaaaa

SEQ ID NO: 303351 - DNA, 122 bp, Homo sapiens
ttgctggtaaacatctgtaaggaaacagactcatctctgtggttttcattgtagaatatccggcctttagtgcttcaggcttatttttcaggtgttacttctgttgaagttttccttttctt

SEQ ID NO: 303352 - DNA, 122 bp, Homo sapiens
ccgcggccgacctgaggcggggcctggagaggctgacggggcgcagggcaccctgggagtcgtagtcgccgcgggcgcgccggcgcagagcaccctgggagtcgtagtcgccgcggccgcac

SEQ ID NO: 303353 - DNA, 122 bp, Homo sapiens
cacactccttctgttctctaggaagtcattcttaccctggataatgtggagtgcctgcttcggacccggggaaaattctccattttctcctttttcttcaggctatcagttcatcatgaaca

SEQ ID NO: 303354 - DNA, 122 bp, Homo sapiens
tttatgatcctttgacgaatttatttttctttttaaaaatgtgattgaaggccgagagcgcgctgccggtgttgcttgaatagccttgtgtgctctccgtacattccagcaataacttgagt

SEQ ID NO: 303355 - DNA, 122 bp, Homo sapiens
tttcacctgacacagcccccagaccctgtctacgaatcccccagctggccgaaggggccgcggccgcacatgcgcagtcagtcccgttggttgtgcgctcagccccgcccccagaggcgccg

SEQ ID NO: 303356 - DNA, 122 bp, Homo sapiens
agatgcctggcgtcctttacccagttccgccacttgaaaaatgacagtaaaatctcagcacgaggacagacacagacgcatccctcacacgagggtccctcctgcgggccttttgtagccgc

SEQ ID NO: 303357 - DNA, 122 bp, Homo sapiens
ggccagtagtccgccgggtggacgcagggcagccagctacgaattttgagctctggggcgcgctcacctggcggcccgcccaggccctggaggctgaagctggcgggtcccgtgcctggctc

SEQ ID NO: 303358 - DNA, 122 bp, Homo sapiens
tttttaaggaaaacaagttgtttgtttgtttaagatcttaacatccaacaccgggtactacgctagattttgagaatactaaaatgaaaaagactgcacgactgtggaaccacatctcctgg

SEQ ID NO: 303359 - DNA, 122 bp, Homo sapiens
gtatgttgtacatccaaagaaatatagtcatcttgggccctggccaattcacgttttctgcgggctgcctgaataaaagctgcatctgggatcttaactgaaggaaacaaagacgaggacac

SEQ ID NO: 303360 - DNA, 122 bp, Homo sapiens
ctcaaaaatacgaaccctgtctttggcatgtctgcatttagaaataaacatcattccagacgccggccagttcatagccacagagtcgtaaagttttatttttaaagggggggacggaaagg

SEQ ID NO: 303361 - DNA, 122 bp, Homo sapiens
acacacacagacttcacctatggctgaacttctgcccttgggtgaccaacaccattaggacgcgggtcaaaaggttgtagtgtgacagaaaatgcagccttattgaatgaaagagaaaatga

SEQ ID NO: 303362 - DNA, 122 bp, Homo sapiens
gagaaaatgaaggctcagggaggcaaagtgatcattccagctggaagtggggtgggaactcgcagtttattagcttggtgtagctttttggggggaccacaaaccactcccggtctatgatg

SEQ ID NO: 303363 - DNA, 122 bp, Homo sapiens
ctctgcctcagtaccaagtaactgtccccgagaatgtgccagtgggtacaagactgctcacggtacatgctatcgacctggacgagggagtcaatggggaagtgacatattcttttcggaaa

SEQ ID NO: 303364 - DNA, 122 bp, Homo sapiens
aggccttaactggcctagaaggagaacggagttccgaacgacgaccggtagaacagttagcggccatcgggcggttggtcttagtgctactagaccttgctgctggaagagagaaatagtag

SEQ ID NO: 303365 - DNA, 122 bp, Homo sapiens
cccatgagccgagcccaggcccggaggtgctgacccgcatccagcccggctttcagtgctcggtgtaaatgtttacacctggccggccgccaggctccacgccgccccacactaggcagccg

SEQ ID NO: 303366 - DNA, 122 bp, Homo sapiens
gaattctacctcccgaaggaagaaacaagggcaaggtaggagaaggggtacagacagaagcgccctcccagacggcccacacctcagccccgatctggcttcctctgaaggtctggactacc

SEQ ID NO: 303367 - DNA, 122 bp, Homo sapiens
agtggccgccacctcggcgcgatggcatcttcgctgcctgcctggccgcccttggccgggcgcgatgacgttaacgctcttccttggcgttctcacactgtggacccagggatggctccagc

SEQ ID NO: 303368 - DNA, 122 bp, Homo sapiens
cggtccagctgtgccgagcgctgccctgggtgcatccgtggcacctctcagggccccatccgccccgtggctaacagagctgttggtagctattacccacgcctgcctcctctgctgagtgt

SEQ ID NO: 303369 - DNA, 122 bp, Homo sapiens
tgcccgggagaagtggcagggacgaggcggcagtgagtgtcggcacagaccccaggaggccgacagcggcttccggtcagggggcctggggaggggtcccagagcagcccgctggccacact

SEQ ID NO: 303370 - DNA, 122 bp, Homo sapiens
gtccccacccgactcaggagcccagctggcttagcctagcggatcccacgccggggctgccggcggagcctcccgttagtcccgcactgcgtgcctgcactcctcatcccttgggcggtcaa

SEQ ID NO: 303371 - DNA, 122 bp, Homo sapiens
gcaggaagcaccgaatgggcctcggagccaggtgacattgaggccggcccgtggggactccgggctcggtggctccaggctcggggggccgccccgaagtgcccggtccatcttacccggtc

SEQ ID NO: 303372 - DNA, 122 bp, Homo sapiens
ccgccgccggctccacccacccgggtccgggaggccgaggccatggccgcgacagaggagcggagcctgcacaacttctttgccaatcgggacaagaagaagaaggagcagagcaaccgggc

SEQ ID NO: 303373 - DNA, 122 bp, Homo sapiens
tcccagacgcgaacccgcacgccccaggggagccaccggcgaaaagcccgcgggcccgtccgcaggcaccaaccaaataacgcagcgctggcaccatcccctacgcacgctcccctccctca

SEQ ID NO: 303374 - DNA, 122 bp, Homo sapiens
aaaaatagcccaagtctcacatggggttgccagtgccctttctccccatcttcttgggaacgggactgggagttgggggtgggaggttttaggaccatggagaatctggccctccacccaca

SEQ ID NO: 303375 - DNA, 122 bp, Homo sapiens
ggggaccagtatttaaatgactggacatagaattacttggggaagttttaaaaaacagtgcggttcaagctctgcaaccagaaattctgatttaattagtccacataaagtctgggcatcag

SEQ ID NO: 303376 - DNA, 122 bp, Homo sapiens
gaactgaggtacagaaatcggaagtgaggtacagaaatagctttattggttacaggttggcgtttgccccattcaaacactccgcggtgtatgagtggttgatggatggctgctgggattgg

SEQ ID NO: 303377 - DNA, 122 bp, Homo sapiens
agaggcaaagcatggacttggaaaataagcagggagaggcgactggcctgcgcctttacccggaggagtccttttgagctatgctgagtttgacaagctagcaggcctcaagagcactacta

SEQ ID NO: 303378 - DNA, 122 bp, Homo sapiens
tagctccttatatcccatgatttattatttataatctaccttggcatatggtatcagttccgtgtcagttagtcctgtcctccaaactagattacaagctgggcacataacaagtagaccca

SEQ ID NO: 303379 - DNA, 122 bp, Homo sapiens
gatcatctatttccaaagcctgggcctcacatgaccactacacctaacttctttgaggtacgcccagatgaatttctctaattatgggcacacaaaaaaaatgagttttaactggaattttt

SEQ ID NO: 303380 - DNA, 122 bp, Homo sapiens
cagatactatctgccttttaatgttacgcagcatgagccctggaaaaggccagagcatcccgtggcatcaaggagccatcttggcactgttagccaggccttagtgttctcctgttggacat

SEQ ID NO: 303381 - DNA, 122 bp, Homo sapiens
cgcacacaatgaggcgctttcagacgtggctgcggtcccgaggtggccagcgggagctagcgccgtgggggaaggaaggagccggttggcccacccccgaccgaggggccacgcctcggggg

SEQ ID NO: 303382 - DNA, 122 bp, Homo sapiens
acaaacatccaagctataacacaatccactttcacatcttcagtagtagtagagtggatacgcagaagcctactttacttcatttagagacagctcacaggaccataagaattacatgtaaa

SEQ ID NO: 303383 - DNA, 122 bp, Homo sapiens
cgttctccttccgcaaggaacgtcttggggcttctcgaacatctctcagcatttactgtacgcccccctcccctcgcttttgctgataaaatggttggtgttgtgtttaaagtgtttataaa

SEQ ID NO: 303384 - DNA, 122 bp, Homo sapiens
gaccgctatgtggccatctgcagtcccttgcactacccagtcatcatgaaccaaaggacacgggccaaactggctgctgcttcctggttcccaggctttcctgtagctactgtgcagaccac

SEQ ID NO: 303385 - DNA, 122 bp, Homo sapiens
gctatggctaccaaccttgtgaacttctcaccaagatacccacttcttttaagttagccacgactagacaggcagagtactctttaattaaaatagataaataccaaggcttacaccctggg

SEQ ID NO: 303386 - DNA, 122 bp, Homo sapiens
tggaagtgaggcagtcttgtgggactcagcccttaaacctgtggaacctgacactaactccgggtagttagtgtcacaattgaattgtagatactcaattggtgtccggaagaatcagagaa

SEQ ID NO: 303387 - DNA, 122 bp, Homo sapiens
aatcctgtttatgaaaatattaataattcattttaattgtcactggagcatatatacttacgtgtttatttctgatgactagtaagcatggaatttctcaatctttatgcagtttttcctct

SEQ ID NO: 303388 - DNA, 122 bp, Homo sapiens
gccctgggtgtgctctacccctcccctcccccatccccacctcctacgtatcccaggacccgttgccaccccaagttctggaaagcctcccataggtgtggcttaacccatcagctcccagg

SEQ ID NO: 303389 - DNA, 122 bp, Homo sapiens
ttgtttgtttttcctcatactggtcaccctacactggacatgtttgtgttggttaatgtccggatgtgatctgattattgctgggaactacatactattgagaactattgggtccctttgtt

SEQ ID NO: 303390 - DNA, 122 bp, Homo sapiens
ggcagctgcggaactaggccgagggacaaaggctaaggtcagccgcggttcaagccctttcgtctgccgacgaccagcggccagacgctgcgggagcactgctgggctggaggagggctcga

SEQ ID NO: 303391 - DNA, 122 bp, Homo sapiens
actgccggccaacaccgcacagagacctcagcagcgtggggcacaccacacagggactgccggccaacaccgcagagacctcagcagcgtggagcacaccacacagggactgccggcctaca

SEQ ID NO: 303392 - DNA, 122 bp, Homo sapiens
taattttggcgctcggtcgatggaggtggcggtactctggtttagtgcgaaaggtcgtcacgcttctttgtaaaacgtttctcagtttgggctgaggaccctgagccaaagtggcggcatgc

SEQ ID NO: 303393 - DNA, 122 bp, Homo sapiens
tggggtttcgccatgttggccaagctggtcatggactcctgacctcaggtggtctgcccacgtcagcctcccaagatgctgggattaccagcatgagccactagtcccgcccaggatttttt

SEQ ID NO: 303394 - DNA, 122 bp, Homo sapiens
gagatgagttggggaggggtggaggaatggggggcaggggctgaagctgccacgaggagccggaacaggtccagggccctgagccacacatctgtggatcccatcagagtgcttgcccagaa

SEQ ID NO: 303395 - DNA, 122 bp, Homo sapiens
aggtatacgtaaatattcctttcggtcagttcagcacgtaggactgagtggcattaggtacgctcactgtacagccaatgcctccataggccactttttaaatacgcggggctaagggccaa

SEQ ID NO: 303396 - DNA, 122 bp, Homo sapiens
gccgcgacagggtctccctgtcctcgcctgtacctgcgacacccgccttccctctccctgcgttgcagagtgctcccaacccaccgtcctgtgcgcagatccaagcccagtcccatccccgc

SEQ ID NO: 303397 - DNA, 122 bp, Homo sapiens
ctgatcacccttcctgggctcgagaggtgacggttccaccccaggagaagcaagctgatacgactccccactacggcaaatgctcagttcccagagcaggactgtcactcggagagcagctt

SEQ ID NO: 303398 - DNA, 122 bp, Homo sapiens
tttcatgggcagcttctctcacgctgtccgctcttatctcagccgtttgctccggctctgcggctcctgtcaccccgacatctgcagctgcatggcagactctgccttgccttcagggtcag

SEQ ID NO: 303399 - DNA, 122 bp, Homo sapiens
ttgtcgcgaacaggaggcccgcgcgcccggaggcgaaggcggcggcccgcggggcccagccgggccaggcctggcgcctcagtagggcctccacacggcctcctccaggcgcgcggagggcg

SEQ ID NO: 303400 - DNA, 122 bp, Homo sapiens
atgatggcatggggggccgagggtggttctgacccctgagccatgaggacagatgaaagccgaggccactgtgggagctgggaggttcataggaaccccagatggctagggttccccatgtc

SEQ ID NO: 303401 - DNA, 122 bp, Homo sapiens
tcacgaagacctcagtacacctggaaaaggcagcacacccagttacgacactactagagacgtcacacgcctcagcacccatccgctcccagcccagaacgagcgcacgcgcagaacgagag

SEQ ID NO: 303402 - DNA, 122 bp, Homo sapiens
acttctccaaactggtaataccgctttccttttggtccttttaggacttcttctactcatcgtcatggagatcgtcaactgtcatggcatggatgggagcgcaatttagcctggaaacggga

SEQ ID NO: 303403 - DNA, 122 bp, Homo sapiens
ggcgctgagctctggagtctctctcctccacgtgctgagaggcgccctctgattggctctcgccagaggccgggctgcgtcggcctgtgggcgcggcgcaaagcccggactggattccagag

SEQ ID NO: 303404 - DNA, 122 bp, Homo sapiens
cagagtgtagtttgcgggcttcaatccacttccttctgccgattgttttcccgtagcagacggtgccaggtattgagagcgaccctcacattcctacagtgctctgtgtggcatcttaatga

SEQ ID NO: 303405 - DNA, 122 bp, Homo sapiens
ctccacggccaggttccggcagcagaggctcttactgatctcacaacgacaattggggcacgtggcctgctcctccttcagccgggcatctgctagtaggtggataaaacagccagcgcaca

SEQ ID NO: 303406 - DNA, 122 bp, Homo sapiens
ccttgtcggtgcagcagccccgctcctccccaacacgcacacacccggtgttcgcaagtgcggctcaccaagggagatccaagggggcaaaaagttatgtataaatccgagagccactgggg

SEQ ID NO: 303407 - DNA, 122 bp, Homo sapiens
agaaggaggccagggttacaggcagtgggcaaggggtctggaagcccaggtttaggtggacgtgcaggctagctggctcccaggtgccatggccagtcctgtggtccctgtctgtgcctggg

SEQ ID NO: 303408 - DNA, 122 bp, Homo sapiens
ccataaactagctgctgcctccagcattgccctgacacctagtggctggtgtcaccaagacgctagacccaatggttatttatttatttatttacttattttgagacggagtctcactctgt

SEQ ID NO: 303409 - DNA, 122 bp, Homo sapiens
accctgcggcctcctccaggtctggacgcagggaggggtgaggtaagctctgatgccccacgagccagccaggtacgagtagagggggaagaggaggctccagaactatcctgagccgtaac

SEQ ID NO: 303410 - DNA, 122 bp, Homo sapiens
ggaaacatccagcatggagaaagatgtaggctgggaggctaggcctgtctctccttttcacgtttttctgccactttatattcactggcagctgattagattgtgcccaccagatgaagggt

SEQ ID NO: 303411 - DNA, 122 bp, Homo sapiens
ctactcaaactgcagatagaaatcctctgatcatgccgtcaccctgattgacaccagagccgcacagttatttactgaagggagccagatgggcagtgatgggggccttgcaccactggaat

SEQ ID NO: 303412 - DNA, 122 bp, Homo sapiens
caaactccagagcgaggcacgcgcctttaaaggcaggtccgcggctctcccacgtcctggcgcccggttttccgcacccagtgtccccacagctgtgcccgggcacagaggcgcggccagac

SEQ ID NO: 303413 - DNA, 122 bp, Homo sapiens
cgtagtgctctgcctgcttggccagcttggccttcaggatcagctccctcttctccttgacgggtgcagggcagagggcaaagagagcaagggcaagcgccgacccggagcaggaggagtcc

SEQ ID NO: 303414 - DNA, 122 bp, Homo sapiens
cctggatggcagcaggctgattgccagagagcagcggagcctgcttgagacggagagagccgggcggcaggcgagatccgtcagccttcatgaggccggctttatccagtacttggattctg

SEQ ID NO: 303415 - DNA, 122 bp, Homo sapiens
gtcaggtccaggtctgccccgccagggctgaagccagctcctggtggggctgcagtgaggcggaagaggtgggatgctgctgcctggcggtgctgcggcggcagacctccacgaggaggtcc

SEQ ID NO: 303416 - DNA, 122 bp, Homo sapiens
ggcggcgaacagagccgcttccgcttccgctcgcgccgcgcacaccccggggtgacgtcacgcgcccacgactcgccccgcctgtctctgttagtgctctccagcccgctccccgcctcctc

SEQ ID NO: 303417 - DNA, 122 bp, Homo sapiens
gctgcacctggagagctggctgcagtacttcccgctagctcagattcacttcgtcagtggcgagcgactcatcactgacccggccggcgagatggggcgagtccaggacttcctgggcatta

SEQ ID NO: 303418 - DNA, 122 bp, Homo sapiens
ctcagaagatccctccaggattgaagaggctttttgctgagaagcagggaatttttcctacgtgtgtcccaagagccatgttctcccgaggccaaggctgggccttggctgcatgttgaaga

SEQ ID NO: 303419 - DNA, 122 bp, Homo sapiens
ggcaggaaaagtctgtctcttcagagaacttgagtgctttctcttatcagataaaaggaacgagcgaacattggtatatttcacctttggcccttgctcggtgacaaatttggttcttagcc

SEQ ID NO: 303420 - DNA, 122 bp, Homo sapiens
tgcaaaacaaaggttgtgaatcagcacgaatgctggcaagccctggaaggtttgtgatcacggactttcacgagaccccaaggcaaggagagacagaagcccaggacaacagcatgggcgcc

SEQ ID NO: 303421 - DNA, 122 bp, Homo sapiens
ttacaggcgtgagccactgcgcccggccaaagtcgtaattattttaaacagaggctttcacgggacttccaaagcgcaccttgttctttccggctcattcccccttcccctctaacccttca

SEQ ID NO: 303422 - DNA, 122 bp, Homo sapiens
cgaattcaggggtcctttattagctggtgactgagagacggctaatgcacgaaattctctcggccccgaggaagggactagattttcttttataatttggtttagagaggggaggggggatt

SEQ ID NO: 303423 - DNA, 122 bp, Homo sapiens
ttcatttcatgaacctcttctatggtccaaagaataataagaacacaaaatatagaaatccgaaaggaaagagagaggcagggggagaaaggaagcctttctactaattcactaagagtggc

SEQ ID NO: 303424 - DNA, 122 bp, Homo sapiens
tccttcttgtcattgtcttcactcaattgtcacttcttcagagaggactttgccaaaccacgcagtatgaaatagcccacacaactcttggccccactgctttctgtcatataaactccttt

SEQ ID NO: 303425 - DNA, 122 bp, Homo sapiens
gttacctaactgcctagaaaagaaggtgactctcagtttccttcgataaaagaagaataacgaggatcaaatgggatggccactgtcatcacagacatcctttgtagtaatgtattgttact

SEQ ID NO: 303426 - DNA, 122 bp, Homo sapiens
acagtgagagcagaatagccccgtggaacctaaaggtgcacacagaaggcatggctgccacgcgaccctcagccatccccagagcccacaggacgccactcctgttgctaagagacgcttgc

SEQ ID NO: 303427 - DNA, 122 bp, Homo sapiens
ccggccacgcaaagggatctcgcccagcctttccaaaagagccccaggcttcggactacacgattcccctcacagccacagctgacgaagagctcccaaggtcccagcaatctatgacacag

SEQ ID NO: 303428 - DNA, 122 bp, Homo sapiens
gggctgtcggccgaggtcaagaaccgggtgagtgaggggcgccccttgtccccccgacagcgcggccgtcgcacgctccgaccggtgcaggagcccccaggcgcccccggcacctcccgggc

SEQ ID NO: 303429 - DNA, 122 bp, Homo sapiens
gtagccctgtgcttgctacacagtatgtcctcttgcagtatctattattgattataagtgcgcacttgggtgagagcacacagtgtggtttgaaccagagtccccgccctctgcgagtgacc

SEQ ID NO: 303430 - DNA, 122 bp, Homo sapiens
aggaaacgtaaacattgcccagcactctgctttatagccgaggtaagaagtcaagatgcccgaaaataggaaacctctcaaccacatgagagaatttctgctacatctatgttccactactc

SEQ ID NO: 303431 - DNA, 122 bp, Homo sapiens
aattgctgctacctatgaagatattacagtaactgatgtgtgaggtgatgatggaaataacgaatatatttaggaagtgtcttgaagaaaggatgagtttggagatactgagtaaggaagga

SEQ ID NO: 303432 - DNA, 122 bp, Homo sapiens
ccaaggggcaggaccgatctgatggaagcagctttgctgggaccaaacgactctgttcctcgcccattaccaacactacctcctccaacaacacaggagacgtgcatggagccctccttcgg

SEQ ID NO: 303433 - DNA, 122 bp, Homo sapiens
gtttttctttcttttctaattttcatgactcagaatcgaatcaggttgctgactaaaggccggagttcttgacctagtctaatatgtgcaggggggaattgaggagatggaaggaagcccct

SEQ ID NO: 303434 - DNA, 122 bp, Homo sapiens
ctgcagcacctccacagagcttttgctgctgccacgttagacagcttcaccatgtaatgacgaccttttaagattctaaatccccccacctctgagcctgttcttcattggaaatgcaagac

SEQ ID NO: 303435 - DNA, 122 bp, Homo sapiens
acgcgcaggcgcactgctggcaagggtgcttgcctgtgctggggtgggcggagctaaacccggagcgggatgacgtcatgaggacgcagccgcagagcgattcgcgtcccggaagcggcggt

SEQ ID NO: 303436 - DNA, 122 bp, Homo sapiens
ggtgtcaactggcaacctcattgtcatgtggctctcccctggctccccttcacttgcaaacgcagggaaagggtgagacctttcaaagctgccaagtgggcaagcttccagcagcagtctgg

SEQ ID NO: 303437 - DNA, 122 bp, Homo sapiens
cccaagggaagcctgagccctatagcgacagggcggtcagaaatgcagacccaggccaggcgcggtggctcacacctgtaatcccagcactttgggaggccgaggtgggcagattacctgag

SEQ ID NO: 303438 - DNA, 122 bp, Homo sapiens
gacatcatgttctgttgccaacagccctgcctcactccagctgttctgcctacttctttccgagcagtgtgacacccacagagaagggtggggtagagctcagcctgacagagcatctctat

SEQ ID NO: 303439 - DNA, 122 bp, Homo sapiens
atgtctttgacatctgcttaccagcataaattagcagagaagctcactatcctgaatgatcgcggtcagggggttctcatccgtatgtataacatcaagaaggtaagcatgaacaatgggac

SEQ ID NO: 303440 - DNA, 122 bp, Homo sapiens
cctcatcccaggacacagtgcgtggtctggcacatagtaggtgctcagtcaaggtgtgaacgaatagcaaatatccctttggaaggctgagtggccggctccgcatcgcagaaggcggctca

SEQ ID NO: 303441 - DNA, 122 bp, Homo sapiens
ggctggtcagcatcagccccagaggatggcagctctagacaatgcccctcccatggtggtcgtccattgacatcatcatcatacatacaacagagcaaatttgggtgcaccaccagcatgag

SEQ ID NO: 303442 - DNA, 122 bp, Homo sapiens
tccagggaaagagaggagccacgggcggcgtgaggtgctacgagtctggggacacaaggccgtccgaaggaaccggagtccacaccagcggctctccgggtactcctgagtttatcttggaa

SEQ ID NO: 303443 - DNA, 122 bp, Homo sapiens
ggtgtggttgaccatggctgatagtactgggactcctggcggcagtagcctctgcaaagccggtcatagaaatttgagagtttctgctagatgtatgttttagctacttatttttatattaa

SEQ ID NO: 303444 - DNA, 122 bp, Homo sapiens
cagaaaacataaaagaggtgacaattgtatactttctaggacaagcacggcttctcctttcggttcccatggacccggcaccccacctgcatgacgatttatttgtatctgggaaaatattc

SEQ ID NO: 303445 - DNA, 122 bp, Homo sapiens
agccgtgaggaggtaggagacgtcgggaggagccgggagccagcgagctagccggaggggcggggcgcagggaggcggccgcttcctcgtcgcctcttgagggccggcgcaagggagggacg

SEQ ID NO: 303446 - DNA, 122 bp, Homo sapiens
ccgggagcacgacggatagaatgcgcggggtcgagacggtgtcggtagcgggggccgcagcgctttgcaaagccggcctctgcccccggcctccttggagggcggtagcgggacctgcgctc

SEQ ID NO: 303447 - DNA, 122 bp, Homo sapiens
tcctttctcacagtctgtgcccaaagatgctgcccactcttagtccgagtaagtgtttgccgttttgactctcctggggtcccaagtcgtgtccggcccgccccaccagtcaggaagattcc

SEQ ID NO: 303448 - DNA, 122 bp, Homo sapiens
aaagcggtttcttaactgcgcgtgcgcccctggcaaagctgactaaggcgcctgaagtgacgtcattgcctgcatcacaacaggcgtcgtccggctgatagcttatcgcaggctctgagggg

SEQ ID NO: 303449 - DNA, 122 bp, Homo sapiens
cctgggggtttcggggggatattttgcggggaatttgttaaccaaacaaggattgactctcgtgctccagttcagcatttgccggcaacttgagctgcagagaagtaaagagtcagctaaat

SEQ ID NO: 303450 - DNA, 122 bp, Homo sapiens
ccctcttcttgtcaaagaccagcctctacatgtgttctggatctgactccctactgttttcgcaaggacttttctgcatgtctaactctccctctcagtggggattcttctcttagcattcc

SEQ ID NO: 303451 - DNA, 122 bp, Homo sapiens
ttttcagattttttttatctttttctctttttttcctcaggctgcgaagcccgaaagcggcggaggcggcagcgacccggggcggagagaggcggccgagggagccaccgctccatttatac

SEQ ID NO: 303452 - DNA, 122 bp, Homo sapiens
tcagcctcaggcaaaccactagaggcagctcagatagaggagctctttgggaagagacgccgggcaggcagaagcagcaggtaccccctccacatccctagggctctgtgatgtaggcagag

SEQ ID NO: 303453 - DNA, 122 bp, Homo sapiens
cagtgagatgccaacgccgggtcagagctaggacctggttatcaaaataggaatgggactcgccagactggctccaggtcttctgctagtgtgtggaatgggggttcggtgactcctgaagg

SEQ ID NO: 303454 - DNA, 122 bp, Homo sapiens
gacttgttgcgggaggcacggatcatggagaagtgctccgctgctgagatgatttcccgccgggctgtggccacgtcctcccgtcgccctgtcaccatgaacactggttcctcgcccctcac

SEQ ID NO: 303455 - DNA, 122 bp, Homo sapiens
gaagatacctagaaatgaattgcctggctctgccattatggcaaaagggatatcatgcaacgatagcaaatggaatattagtgatggttttacaaggaaataacagggtcttctttggggga

SEQ ID NO: 303456 - DNA, 122 bp, Homo sapiens
gcgggcccagaaagcggcccccgcagcagttacaggccggggcgaggaggggacggaacccgctctccgtgattgacggaaaatattactcttcagcccgcctcccgcgtgcccggaagtcc

SEQ ID NO: 303457 - DNA, 122 bp, Homo sapiens
gcgacacccagtggccatgtggaaaatgacctgctcgagcccaaaggcgggtggcagcagcgtctgatccgccagcctcaggccaggaggcggtggccgagtccgatttgagtcccatgtcc

SEQ ID NO: 303458 - DNA, 122 bp, Homo sapiens
gttcttacccatctaccttcaagttgaaacccacagacaagacaaagtgttccacagaaccggtttctatgcatagaaaatgaaagtagaaagtttcattttttatattcaaaactatcaac

SEQ ID NO: 303459 - DNA, 122 bp, Homo sapiens
cagagagggctccaggccagggtagtcaccgcgcagtgaagagacaagacgcccgggtgccggctgtcagcgcagctgccattttatggctgaacaggactgaggccgagctgagcaaggag

SEQ ID NO: 303460 - DNA, 122 bp, Homo sapiens
agtggacaagagggcacattctgcagacaacagtcagtctttcccacagctgtgccattgcgtgctcaatgagcttatttatgcagtggccatggtggcaggtgtggaggctctgtatgggc

SEQ ID NO: 303461 - DNA, 122 bp, Homo sapiens
gagagttggcgagaaggcatttgccacctggacacaatgaggcccagtgcaaggggcgggcgagagcctggccaggagccagggccctggtctgaatggctgttgccaaggggctgccaaca

SEQ ID NO: 303462 - DNA, 122 bp, Homo sapiens
tgaaaggcactcactctattttagtgtatggaatctcttttaattgttcttcggacaatccggatggatccacaagttcttttctgtaaaggaatatgcaagaaaatgatagttgtggtgct

SEQ ID NO: 303463 - DNA, 122 bp, Homo sapiens
tctctcaaactctctttccccaagcttgtcttcctagctccagtttaatcatatgagcaacgtcgaggacttacactgacaacagataaccagaaaatgcaaaggagaagtgagaagagagg

SEQ ID NO: 303464 - DNA, 122 bp, Homo sapiens
ctctacctgcacccgcatgtcctacattgttctctgaggtttcagcagtgataatgcaggcgctaagttattcgctcactgtacggtccccctggccttcaaagtcgccaaagtggggaaag

SEQ ID NO: 303465 - DNA, 122 bp, Homo sapiens
ggaggcctgcctcccattgagccaacaataatcctgttgacataaccctgttgatcaaagcgatcccctgactgctctgggccagttcctttggctcctggtggaatgcactcagagaatcc

SEQ ID NO: 303466 - DNA, 122 bp, Homo sapiens
tccgcagcgtccccccagctctccctgtgctaactgcctgcaccttggacagagcgggtgcgcaaatcagaaggattagttgggacctgccttggcgaccccatggcatcccccagaaccgt

SEQ ID NO: 303467 - DNA, 122 bp, Homo sapiens
cctgaggaccagctgggggtgggggtcaggggagggagcgggcgatctcaccctgcagcccgcacactcaggcctacactccccggtttggagcccagataaccccttcccgtcctcccctc

SEQ ID NO: 303468 - DNA, 122 bp, Homo sapiens
agacttcagaaattcctgtctattcagtattttctgtcctggaccagggagagagaaggacgactctcaggataacagttcacattccccactaggcaggcgctcgtggctttgggattcgt

SEQ ID NO: 303469 - DNA, 122 bp, Homo sapiens
tttattttaaagtacacttgaaattttaaatgtgtacaaattcagaggtttaaaaaacttcgaaagtcacagacacagaatttaggaagctgaaggctgagagtctcccttctcacttaatc

SEQ ID NO: 303470 - DNA, 122 bp, Homo sapiens
tctagttgcatccacgcagtaggttttgctcagatactgaaaatagtacatgtagcagcccgtggaagggtcctgtgcatacagagcctcccgtttcttggcgtcggtgatctcgatgaggt

SEQ ID NO: 303471 - DNA, 122 bp, Homo sapiens
cctgttctctggtcgtgctgtgagtggctcagggctcttggcagaaggggaagccgaaggcggaagctgagccctggggcctgatgcatgaaatgagcttcagacgctgagctcacagaact

SEQ ID NO: 303472 - DNA, 122 bp, Homo sapiens
acgctctagccccgagccgcgtattcgtggccgggtcctccctgggaacagggtgaaggccgagaacctctggcctcaggaagcgcatgcgcaaccggttctccgaaacatggagtcctgta

SEQ ID NO: 303473 - DNA, 122 bp, Homo sapiens
aaataggctgacacagtgtcttatgcctgtaaacctagcactttgggaggcccaggcgggcggatcacctgagctcaagagttcaagaccagcctggtcaacatggtgaaaccccatctcta

SEQ ID NO: 303474 - DNA, 122 bp, Homo sapiens
ccaggttataattacagctttctcctgccccttctttactttctctaccacagttttctccgctgtttgttttcctcttgccacaatttgctaacacttaaaaaattttcctgcacccagta

SEQ ID NO: 303475 - DNA, 122 bp, Homo sapiens
tagtctggctcagtggatctgcatttttgcataaacaatagggcagaagaagcaatcagacgttcatttgtctcaggtgagcagagggatgactttgagttctgtccgttgtcctgcacctg

SEQ ID NO: 303476 - DNA, 122 bp, Homo sapiens
ccaagaaagcaggtgagctggggcccgctgtggggtcagggccaggtgacagacctctatcgcatatcctgacctctatcaccctcaggaaagtcagtgggagtggtaaccaccacacgggt

SEQ ID NO: 303477 - DNA, 122 bp, Homo sapiens
atcacttttgttaagtttttgtgcttggtccaggattcctccccagtggagaactaaaggcgggggatactgcccagcccagcttccttgacttgagagctcttagtttcaatggcatgcca

SEQ ID NO: 303478 - DNA, 122 bp, Homo sapiens
tgggaatggcgaggctgggatagattagtctcatggtaagacaggtgctcagtgggcccacgtaccctcgccggtagtccccgagccccgcgaccccggccgtgccgcacccacctcctgcc

SEQ ID NO: 303479 - DNA, 122 bp, Homo sapiens
ggtttaaatggctcggctacgccccaaatgcgcacctccgagtccacagtctcgcacgcacgcacaaagtcgtgcctaacaattggaaagtaaccctgacccgaaaccgggacaccaaggtt

SEQ ID NO: 303480 - DNA, 122 bp, Homo sapiens
gagaagggacaaggggagctcatctggcaagaatgatctgaaaaggcctccaagggtgggcgggattttgcggggggagggaggaatttccaactggagggacaatgacaaagggggtgaat

SEQ ID NO: 303481 - DNA, 122 bp, Homo sapiens
cgcaggcgcagcgcatctgcacgtggttccaggccgagctgacctcggtgcacagccaggcggagctagacttcctgagccacaacttgcagaaggtgggcattggattgagcagggggctg

SEQ ID NO: 303482 - DNA, 122 bp, Homo sapiens
ctgttgggggggggggggtggggccgagagagtggggattacttcagaaagttctcaagacgtccgccagcaggaaggaaaaacaaacgaacaaacccagaggccaaattcccaattccccc

SEQ ID NO: 303483 - DNA, 122 bp, Homo sapiens
ccgccccttcggcctgggggccgggcaggcaggcgggaggctcggggcggccggggtgggcgtgtgctggccgctgaccgcggagtccggcgtccccggcccgcccgccgccccccgcgtgg

SEQ ID NO: 303484 - DNA, 122 bp, Homo sapiens
cgcagctcccaggtgcgtgttaaaagctggaggggggatatgtgatcccaggaccaaaagcgcggggccagactcatcggttcattcaacaaccagtatttagtgcctgctgtgttctgcag

SEQ ID NO: 303485 - DNA, 122 bp, Homo sapiens
cgctttttgcccccgccgccgcggctttttgctgccgcgactttttgccccggtcgccgccgctttttgtcaccgcgactttttgcccccgccaccgaggatttttgtccccgccgccacgg

SEQ ID NO: 303486 - DNA, 122 bp, Homo sapiens
catatatgtgagaaaaacctgaatataggacaggggtcctacttttttccccacctctgtcgcccaggctagagtatagtggtgtgatcttggcccactgcaacctctgcttcctaggttca

SEQ ID NO: 303487 - DNA, 122 bp, Homo sapiens
ctgcagggttacaaacagtatctccctgctcccccggcctgaattaatgtgttactatttcgggcgagccagtgtttccaggggaaacctaatgacgcaatgacgtcaatgcaggtcagcag

SEQ ID NO: 303488 - DNA, 122 bp, Homo sapiens
ccttcaaagtactccctagcatcctctgccaaccttggttctaaggttcattctcatcttcgttctagtcatttgcctgtgtccctcattagaccgtgaggtccttgaggataagtaccacc

SEQ ID NO: 303489 - DNA, 122 bp, Homo sapiens
tccccggaacttccaaatccacagctggcgcctcagctcccgcactgcgcatgtccggagcgtgcgcaagaaacttggtcccactgaccgccccacccctgcccactaaagaattacagggc

SEQ ID NO: 303490 - DNA, 122 bp, Homo sapiens
tgaagagcagtacttagaggaaaacctgaacagaatttaaaactaaagcctcaaacgctgcgagctcccccgcccacaacagcccttgtcagagagcccagaagggcatgaaaggaggagga

SEQ ID NO: 303491 - DNA, 122 bp, Homo sapiens
gacaaccttcctgggtccctacaccctggacacaccttcggtgcgtgcccggcatggagacgctcctgctgccggcatggctttggggacagcactttgctcctggagcctcagaggagggg

SEQ ID NO: 303492 - DNA, 122 bp, Homo sapiens
ggcgtcccggcgctacgaggccaccggctgcgggtctgagcctgtcgctttccggctgcccgactttaactcacaccgaagcctggcgggagaacggatttctcaaggctcggaagtgtctg

SEQ ID NO: 303493 - DNA, 122 bp, Homo sapiens
gatgagtcttttacatcttttaacttcaggaaaacagccatggtggttctgccagcaagtcgttgaatggattaagtgagataatcatacaatgtgtttagcactgtgcctggcatgtaata

SEQ ID NO: 303494 - DNA, 122 bp, Homo sapiens
agagaggcagaagggccatagtctttcctagctggaaaagtaatttgctggggcgctgcccggtgcactttgcccccatcctagcaactcgagtgtgctcagcagaatgaagttagcaaaac

SEQ ID NO: 303495 - DNA, 122 bp, Homo sapiens
tgccctcccaggctggagccgggctcctggcggagcggtgggatgctgctgccgggccggcgtgcagtaggggcggacccccagcaggaggaccccggctgcggctgcggcgggggtgtagg

SEQ ID NO: 303496 - DNA, 122 bp, Homo sapiens
acggagctgttgggaggcacagatcccaaacaacacctgtaaagcacttagcccaggacccggccctagcaagcaattagaagctgtctgcctttattttaagtcgcccctccagctaatgg

SEQ ID NO: 303497 - DNA, 122 bp, Homo sapiens
gcggagaaaacctacacgtgatgggcgcccaccgagtgccagcaccgcctcctccagctccgccaagtaggtgggatccactactttgcagaggaggaagccgttcaggcctccctctgtgc

SEQ ID NO: 303498 - DNA, 122 bp, Homo sapiens
ctgggccggccgctggttgtctgcgccccgcacaccgcacgtcggagggagggcgcaccgcggcggtcagcacccgcgcccccgcacgtgcctcaccttctgtcaccctttggctgcacacc

SEQ ID NO: 303499 - DNA, 122 bp, Homo sapiens
gagtcaaagccctttggttttgtttgaccattcttttttctccacgttttcaaattatctcggcctgttgacttgtcacagagttgattgtggactttgctactgcagtgtttataaagcac

SEQ ID NO: 303500 - DNA, 122 bp, Homo sapiens
cgcgaattccgataaatcagctctaaggaaaccctgggccgcggagagcagaagggctgtcgcggatccaccacgcgggcgccgggccgcggagccgggagcgcgcccaggcctgcacccgc

SEQ ID NO: 303501 - DNA, 122 bp, Homo sapiens
cccaaaagctcccgaatccacgggaggaaggagtggaccccacacagcccatcaatgtgccggcccctcagggcacagcctcatggctcagtcactcagcccaaggtacggcagctgggcac

SEQ ID NO: 303502 - DNA, 122 bp, Homo sapiens
cagcgtccccctaaatggccggccacgaacccgtctcacggtcccgcggccaggagccgccgctcatctgtctctgcagccaccgctgaggaagagtctcctctgaggggagagtcggtcat

SEQ ID NO: 303503 - DNA, 122 bp, Homo sapiens
tgcttttataaaggtcactggctgttggtggagaataaatgatggatagggtgaccagaacgggagcaggaaaatcaggtattatatcattggagagcggtttgggatagggtattattagt

SEQ ID NO: 303504 - DNA, 122 bp, Homo sapiens
cacgcaggcccacactgcccctctcattctcttcaaactgtgactttttacagactcgggcgggtgttctgcggccccccaggtgctatgggggaggggggcgttgaatggaattaaaccag

SEQ ID NO: 303505 - DNA, 122 bp, Homo sapiens
cgaactcctgacctcaagtgattcgcccgcctctgcctctcaaagtgctgagattacaggcgtgagccactgcgcccggcccggcccatagacacttttttaaacctctgttccacaatatt

SEQ ID NO: 303506 - DNA, 122 bp, Homo sapiens
cagagaggttggcccagcccagggcagcagaggcactgcatggagaacgaaagggtcaagcgagttagtttgccaagcagtgagaccatatcctgggtagctccccgaacaccgcagcttcc

SEQ ID NO: 303507 - DNA, 122 bp, Homo sapiens
gcggccgcagtggcgtcctggagccctcctcaggtgagctggagctgcccggctcggcagcgggaaggtgagacggccttgttggcaggcagacacacacacaccccccttcagtccgctgt

SEQ ID NO: 303508 - DNA, 122 bp, Homo sapiens
gtcagcgactcccgtcaccgccccgcagcgcggcccccacccggcgccgtgacgccggcccgccgcttccgctctgcccatatttggctcagccactgcgccgccggcccggggtaggctgt

SEQ ID NO: 303509 - DNA, 122 bp, Homo sapiens
taaatggagtataaccactcccatcttgcaggagctttttggtgataattaaggtgacttcgtgaaaagtaccagggtctcaaaaatctcaaaatttgtggaaagtatgcagtttctaggtt

SEQ ID NO: 303510 - DNA, 122 bp, Homo sapiens
ttctgataatctgacaaaggtgttttagtccctggcagcagccgctgggaccaccagggacgaaaacgtgttaaaatccaggacaaacattctgcagcatctcggggccgggccacgtgtct

SEQ ID NO: 303511 - DNA, 122 bp, Homo sapiens
atttcgttatacagggcctcccggctggccagcaagttctgctttcgcatctcactggtccgctgctcccacacggacttggctggcttttgattcttctgttgctctttcctgcagtggca

SEQ ID NO: 303512 - DNA, 122 bp, Homo sapiens
cacaccaacatacattccagtaacattaccaaaaaaacacacgcggctcctaaccgagaacgtcaccgagaatggccacaccaacatacgttctagtaaaattaccaaaaaaacacacgcgg

SEQ ID NO: 303513 - DNA, 122 bp, Homo sapiens
aagatcctagctctactgtgtgacctcatcgatggcactggtctgttctgtgacccatggcgagggcagaggctgaggctggataccaggagaggcttcccaacatgttctcatttccccat

SEQ ID NO: 303514 - DNA, 122 bp, Homo sapiens
acaattgtattcaccttctctccattctgagacttatccataagaatactcactttaatccgacttctactgcatggttggaaaagaagatacgcaataactctttcaaactcctttatctc

SEQ ID NO: 303515 - DNA, 122 bp, Homo sapiens
gccttcggaccacttcaccccagacaacatctagcctcacgcagccggaaccacctgtggcgaaggctaaaatgactccatcttggatgctgacccgccatgtggacttccgatgaacccta

SEQ ID NO: 303516 - DNA, 122 bp, Homo sapiens
acctcgtgtctgagtgtgcgatgttttgattttgccctctggattaaaaagaataaatggcgagcgattaaggcatatctacgggcgcccatactttggtggccactgaaagtcagcggcgc

SEQ ID NO: 303517 - DNA, 122 bp, Homo sapiens
tgggagttggggggggaaactcacgcggcccgtacttccaccgcatctcagattgaccgccgtaacagcaggatgagagggaatgcccctctgctgcacctatattttgcacgctatctccc

SEQ ID NO: 303518 - DNA, 122 bp, Homo sapiens
cgatgcccagggcaaggccccacaggcacatccacgcgccgctttgtccagccagtggggcggcatacccaaggcacgagtgctcccagtccccaggctgccggcacggagcagcggcggtc

SEQ ID NO: 303519 - DNA, 122 bp, Homo sapiens
ggctaacacggttaattggttccaaccttcagctaaaagtaggagcattgatcaggcacccgtgaggctcagaagctgtggcctctgaggatgctgtacttccgtgtaagctcaaacccaga

SEQ ID NO: 303520 - DNA, 122 bp, Homo sapiens
ggacaagagctagacttcgtcccaaaaaaaaaaaaaaaagaaagtaaattccacgaaagacgggccttgctcaccctgctcgacgctgggttcccaagcccagtcctgcacctagtcctcga

SEQ ID NO: 303521 - DNA, 122 bp, Homo sapiens
ggaggctgtggcagatcctagctggggcgcacagcttagtgataacttgttgattctctgcgctgttcataagtagggcttgcgtttggtttgtggactgtggccaaatccgccaggtgaca

SEQ ID NO: 303522 - DNA, 122 bp, Homo sapiens
ggaggctgcggcgggagccgccaggcaggatcgggcccgcgggggcgggctgctggaggtcgcgaggtttgcggcgggagggaagaaacgtggggggcgccaggagtggagatattcagtta

SEQ ID NO: 303523 - DNA, 122 bp, Homo sapiens
ctgcgcgcccgcccgcctttcgcggccgctctcccccctccccgacacacactcacaggccgggcattgatggtaatgtatgcgaggaaacagcagagactcagtgatgggtaaattgtctt

SEQ ID NO: 303524 - DNA, 122 bp, Homo sapiens
aattcgaccgcaccgcgggactagggctgctgccgctgctgctagtggaggcggcggcggcgccccccgacggtccctccgcctcacaccgcctctgggtcactgacatacactcgcaagga

SEQ ID NO: 303525 - DNA, 122 bp, Homo sapiens
gactcacaacaggctccagagctctagtttcccagggttcatgttcaaagtagggattcccgctaccccaaattcttattcagtaagcataaaaaggatttggggatttccattattaaaag

SEQ ID NO: 303526 - DNA, 122 bp, Homo sapiens
gagtggaaggcggcaggcggaagggagggggccggtgcgagtgaggagaagctgggcgtccgccgcgacttctcattggctctctgccccgcagcctacaatgagcccgccgattggctgca

SEQ ID NO: 303527 - DNA, 122 bp, Homo sapiens
aggcatcccaggtccagtgcaatgcagtgaggtaggcaggagactccatcctggtccacccgtggaggaccagagcagaagactatggtggaccccaattccccccttccattcgatcctgg

SEQ ID NO: 303528 - DNA, 122 bp, Homo sapiens
cctattacacactaagtgctcaacctgtatcttttctgttaagtgaatggatggtccaaacgtaaagtatgcattcaaacaagtctttcagtggagtctggaagtcagtataaatgcttaag

SEQ ID NO: 303529 - DNA, 122 bp, Homo sapiens
acagaaacacagaaaccacggagaatcacacctcccaaaaagtgccgtgtgtggaaagaacgtgcaagggtgggcagaaacgtcacgtaaactgagaagtgctgatggcaggaggtgtggat

SEQ ID NO: 303530 - DNA, 122 bp, Homo sapiens
gcactccgggacgcgcgcgaacacgcagcagccagaatccacaggggcgtggtttgcgcgcgcaggaacttggatctcaaccccagggctaggtgcctcctcccgctgctttccgccagctg

SEQ ID NO: 303531 - DNA, 122 bp, Homo sapiens
aaccgcacccgctccgtcccattgaagaaatgacactccctcttaggctgccacaggaaacgtgctgtggggacacgaaccatccggtcacagggcggcctcctgagaagacacggacagcg

SEQ ID NO: 303532 - DNA, 122 bp, Homo sapiens
aaaacagacaggcattccagagtccagaattcagatctggtgtcagatcaaaggatcagtcgtgcaggctagagcagaagtgggcctgtaaattctccagcactaggcctaagtgagaggct

SEQ ID NO: 303533 - DNA, 122 bp, Homo sapiens
tggcttcaatcagagcagctccagtttttaatgtattacatatatggaacattgatggcccgtgatgaccttagctttaaataactgttctgacatgaatgaatatgtgcatgtacgtatgt

SEQ ID NO: 303534 - DNA, 122 bp, Homo sapiens
gtgactagttagaactgaggaattgaaatttcatttaattttaatctatttaaaaagacacgtgcatgctgtatgcagtggctcatgcctataatcccagcactcaggaaggcagaggcagg

SEQ ID NO: 303535 - DNA, 122 bp, Homo sapiens
cgccgacggaccataccggcctgctcctcaaggccctgggggcagggtggccgatgccctcgccgggactacgccccttgcaggcgggccatctggcctcagtcattcggcctttggatttc

SEQ ID NO: 303536 - DNA, 122 bp, Homo sapiens
tggcctcaaaccatcctcttgtctcctcccaaagctctgggattacatgtgtgagccatgcgcccagccctcaaatgctgtatttttttgtaggtgaaatacttctgaatatttggggattt

SEQ ID NO: 303537 - DNA, 122 bp, Homo sapiens
agtgatccacctgcctcagcctcccaaagtgctgggattacaggcatgagccacttcacccggcctgttttgtttttaaagagacaaggtctcactctgttgcccaagctggagtgcggcct

SEQ ID NO: 303538 - DNA, 122 bp, Homo sapiens
cggagaggtggggccctgcctggggattctgggcactcaccgtgcagccatcgacagtgacgctgtaggtgaagcggctgttgccctcggcgcggatctcgatctcgttggagccctggagg

SEQ ID NO: 303539 - DNA, 122 bp, Homo sapiens
caagcctgagtgccggaaaacccacggcaatcttcagcagccaccacgtggggcagagaacgcgagcagtacctgcaggacccacagccggtcgggctctggcgccagcctcgacggcggcc

SEQ ID NO: 303540 - DNA, 122 bp, Homo sapiens
atctgtgtttacagtataacacaatgtggcaatattagggaaacgtgtcagcaagacagacgacagaaaactgaggaagtggcgtgtgactgcatttggcacagccctggaagttgtgggtg

SEQ ID NO: 303541 - DNA, 122 bp, Homo sapiens
tttatatcgcaggctccaggagtcaagtcacagacacagatcggtaagactatgaaagtacgacacagagtgagtgggatgaagatccccaaactctcccaggtgctcaccctccttcttcc

SEQ ID NO: 303542 - DNA, 122 bp, Homo sapiens
tcaaggcccggcaagtcctctgttgttgacggttctcaggtggtagaaacgatctcgcagcgcacctgcgtggcttccgaaaccgttgtctcaagcgtgttccacttgatgtgattaaaaaa

SEQ ID NO: 303543 - DNA, 122 bp, Homo sapiens
tggctggagccacctccctccctgcagcccgcaacgggaatggagtaaagggagacccgtcgacctggccacggggatcagcgatggaattaaagcaatctttgtccacccatctggaagcc

SEQ ID NO: 303544 - DNA, 122 bp, Homo sapiens
cccatcactgggtaaaggtgctggcccattaccttaaggatccgtgagatgtcacagggccgcattccactgactgctagccgcacaatctgctgccgggtatccagaggcaggggccggcc

SEQ ID NO: 303545 - DNA, 122 bp, Homo sapiens
tacaaacacgtgaatacgcaaaagatttcacacctgatcctcattacaaacacgtgaatacgcatgttatatcagttttacaaatgaggaaagaacgttcagagaaaaaaagagacaaccat

SEQ ID NO: 303546 - DNA, 122 bp, Homo sapiens
aggcacacacccgcactccggggcagagatactccgacgcaagcttggcgctccgatctccgcacgtcgctcccgctgcagccaggccgctcccctgggactctggtccaccacccagacgc

SEQ ID NO: 303547 - DNA, 122 bp, Homo sapiens
caatgtactgtaaaatatagcgcagctcacaatggctggggtctcacatgggaggaccctcgatgacactctcctggcccaggaccacccttccagagcccctcaggctacatggtctttag

SEQ ID NO: 303548 - DNA, 122 bp, Homo sapiens
tggaatgaaatagtatgtcctcttttgtgtctggctgcttttgctcacaagatttatccacgttgttgtgtgtattagcagtttgttctttctgttgctgaatagtagtatttcattgtatc

SEQ ID NO: 303549 - DNA, 122 bp, Homo sapiens
tgctcccgaaagaagtaatccatgtttctcttttgcaggctgtcaaggtaatgttggaagcgagtgtatgtatatgggtagcagtaagcaaactggtaaatatcttcttctcggtcaaaaca

SEQ ID NO: 303550 - DNA, 122 bp, Homo sapiens
gcggcagaggaccagcatgcagggcgcggtcaccgtcaccatgctgctgggcgtgtttaccgtgtgctgggccccgttcttccttcatctcactttaatgctttcttgccctcagaacctct

SEQ ID NO: 303551 - DNA, 122 bp, Homo sapiens
agggttctcgttcctctcagctgtctactgttgcctgcctctagctggggaggcggggtgcgaggagaaagacgtcgtttgttgtggtgaagctttatccagagacgcttccccaccattct

SEQ ID NO: 303552 - DNA, 122 bp, Homo sapiens
agcctccgggagcgtggtgtgtgcctgagggctcggagccttggggatcgcaggaggcatcggccctggctggcgcccggcacccaagtccctccacagagcccacgacccgtacctctcct

SEQ ID NO: 303553 - DNA, 122 bp, Homo sapiens
gaatgctttgcaatcacctgctttcttgatttccctttccaggcttcctcctctccaaaacgtggttgttgcagagttggcccagttttcattccacatattatctgtgggtggtttcaatt

SEQ ID NO: 303554 - DNA, 122 bp, Homo sapiens
ccaaccatcgggctctagggctgcaaagcgtcatgcagtggttctcaaagtggggtcccccggccaggaccagcagcctctcctgggaacctgcagaaatgcacactcctgggccccaccct

SEQ ID NO: 303555 - DNA, 122 bp, Homo sapiens
gacgcggaaacttcgctcagagaagtattaacaggcgattggtggacaatccttccacttcgcccacccccacaaccccctccccccgccgcaccttcaccctttctgaaaaggtcaatcgt

SEQ ID NO: 303556 - DNA, 122 bp, Homo sapiens
ggccaggccctcagctgtgggggcgtgtgctgagcaccaagcagagggagctgagcccggcgccagccttctccagttctgagcaggacacaggtaccagggtgacatcagagagcttctgc

SEQ ID NO: 303557 - DNA, 122 bp, Homo sapiens
ttctccctctctgctcaatgatgacaacctaaaatatctccgcattatcagaggtcttctcgggggtacgatcattcctagatgagagtcactgggctagtccaattcccccaccgacagat

SEQ ID NO: 303558 - DNA, 122 bp, Homo sapiens
cataacatgtcattccttgagcacttcagagtcttgatacaataacattattctggttaccgtggtctacttagttacctttcttgaggcagagggggtttgtgaaatggatgggaaacctt

SEQ ID NO: 303559 - DNA, 122 bp, Homo sapiens
taacaagctctccggtgccaccaactcttgtgtggaccaagagtctgaaagatatccttacgatagagggcgcacctgtcttaggtaaaattacttctgtaacgtcatctaagggaagtcaa

SEQ ID NO: 303560 - DNA, 122 bp, Homo sapiens
ccttctgtcttgctgccccacccccagccccaacaccccccaccccccccacccccaccccgagacaaacacagaacactgagcaacttcaggttcaggcaggggaggaataaaggtgcttt

SEQ ID NO: 303561 - DNA, 122 bp, Homo sapiens
gaagtgctggtccccgcctgccctctggtggacagtctgtgaaacaggccttcagttgggcggcgtgcaggttaccacaggggaggaaggcaagtcctggctccttttttggctcccttagc

SEQ ID NO: 303562 - DNA, 122 bp, Homo sapiens
ccaccctgtgcctgcagatgaacacacaccgggctggttgggctcgggcccgctgtggggcgctgctgcagccgctcttcacattatgccacgcggaggtccccccgcagcagcactatgag

SEQ ID NO: 303563 - DNA, 122 bp, Homo sapiens
agggttaggaagaaccaaagtgagctgtggccagatagaggtgttgggtatgttctgccccgcttatggcagggtgccatggtttggagttacagaacctgaggaccagagaataataataa

SEQ ID NO: 303564 - DNA, 122 bp, Homo sapiens
gtggcccacccacacctccaggcctaccaggagggcacccacagacagttcctgaccaggcgcctacttcctgtgtccctcctgagggcattttcagctatgggagttagtgtggggcaggc

SEQ ID NO: 303565 - DNA, 122 bp, Homo sapiens
accagagaaagggattaaatctcggaaattatccatcagctcaggcaaaaataaacacgacgcacacctcagaggaaaagagaagagagagagagactctgcccctcccaggaaaagtaaaa

SEQ ID NO: 303566 - DNA, 122 bp, Homo sapiens
ataggtttcttctctgcaacttcactgccaccccctcagaaactgagacccatcggcggccggcctgaggcacccacagctgcagagagccgggcacatccagggccttgggtgtgtctctc

SEQ ID NO: 303567 - DNA, 122 bp, Homo sapiens
ttacctctccaacattgaaacctattttcatatttgtgtctgactctcacctctgggatgcggtaatgaacataaaaggctataaaagaataatgtaatggaagccataggctccagaattc

SEQ ID NO: 303568 - DNA, 122 bp, Homo sapiens
ccttccccgccccgcgcgggggaagggccccgtttcctgggctcctcctgtgctccagcacgctgcctggggagatcagcctgtaccccggcgctggcctccagacagccaggtgctgcctc

SEQ ID NO: 303569 - DNA, 122 bp, Homo sapiens
tggccaacatggtgaaaccccgtcagatgtttgtcagagccaaaattatgaatttctgaccgcaactattaataaaaaattatgttcttattctttgattcttattctttgcttcaagtcct

SEQ ID NO: 303570 - DNA, 122 bp, Homo sapiens
tgaaatctcaggctcctgggcggggctggggaggccggccttgtcacaggcaggaggggccgcattccttcctcagcagctggtggagctgggcctgagcaggacttccccaaaggactgag

SEQ ID NO: 303571 - DNA, 122 bp, Homo sapiens
agagcgggcgacaaaggtgcgggatggcatggattctgcaactctccccagcctccactgcgtttcgaagcgacgcccttgactgaggagtgtttttaataatcatctggccgacttggaag

SEQ ID NO: 303572 - DNA, 122 bp, Homo sapiens
cgtggctgggctgtccagctccgaatccccccagtgctgcacccgaacgcctccctcccacgcagcctcctgccgtctccgcaggttttaaatcagacgccgctcaggctgtgcccaggctg

SEQ ID NO: 303573 - DNA, 122 bp, Homo sapiens
agcgcgccggcccgggaggacggcgtgcccttcagggaggggcgccaggtgcgaggggggcgagcggtcgccccctaagccgggcgccggcctcccggggcctccccgaggctggccggctc

SEQ ID NO: 303574 - DNA, 122 bp, Homo sapiens
catgacaggagacggtggagcagcgaaaagtttgttagaagacagggttccacttcggggcggggcgggggcagtgaacattcccacaaagaacgccagagagaaactaccaataatgtaaa

SEQ ID NO: 303575 - DNA, 122 bp, Homo sapiens
aagtaatttaagactcagaataaaacttggtatggtttcaaggccctgggatgggtcctgcgtttggctcctagatttttactaagggagaattatcttggcaagactagatttctcttttc

SEQ ID NO: 303576 - DNA, 122 bp, Homo sapiens
tgaattttttccatctggaattttatttgatgattagtctagcatcgtaatggtgtccttcgtgttgacgtgaaaacccagtcttccttcagttcatttcccgtttattagggatgcaaaac

SEQ ID NO: 303577 - DNA, 122 bp, Homo sapiens
tttatgtgaaaattaaagttggatctaacataggcatccagcctcctttttttgacctttcgtcatactctctttgctactctcaaatttggtcaccccacactggagactggtaatttgca

SEQ ID NO: 303578 - DNA, 122 bp, Homo sapiens
gccccctcacatcacatgtggcaggaggcactgcaaagctcactgatggctctaggtgcacggagggggcttcgctgggggagtctggctgtattcaacacctttccagcatcacaggaaac

SEQ ID NO: 303579 - DNA, 122 bp, Homo sapiens
ggccgctggagtcgaggtggaggttccagtagcggctgcagaagacagcgaggccgaggccgaatcctccatcttgtttccacctcgtgaagaggcgcgtgtgcaaccccactgctggcttc

SEQ ID NO: 303580 - DNA, 122 bp, Homo sapiens
tggagggagcattgctgtgcgccctttgtgtccgcggtaggggagctccagtcgtcacaccgcaggctggaggttacgcttcgagtcgcttaccgaatttgtgtgcattcacgtggacacgg

SEQ ID NO: 303581 - DNA, 122 bp, Homo sapiens
tttatcgaagggcctgccgctgggagatagtccccttggggtgacatcaccgccccaacccgtttgcataaatctcttgcgctacatacaggaagtctctggccggctggggcaggtggtgc

SEQ ID NO: 303582 - DNA, 122 bp, Homo sapiens
cgggctccccagctccccacagatcccaggaggggcgggagagcggccatgaagcgaagccgcaaacgcttgtcagctgcctcccggcgccgcccgcgctgctcccattgtcaccgcctcat

SEQ ID NO: 303583 - DNA, 122 bp, Homo sapiens
gcgggaaggtgggcgtggcttcagggaacgcctgcgcgttgctcctccgaaggggtggggcgatccctgaactggagttagtgggcgtggcctcagaggcgcctgcgcggaggcggttggag

SEQ ID NO: 303584 - DNA, 122 bp, Homo sapiens
tgatgctttgacacatgacaggcagtccctccagtggccagaatcagattccgttcattccgaattctttgttgagaagattcctggctgctcagagtaacagggcagcctcaatacataca

SEQ ID NO: 303585 - DNA, 122 bp, Homo sapiens
acacgctgcagaagtgcagcaagtgtggcgaggtggtccgggaccacatcatcagggccccgggccaggccttccaccccgcctgcttcacgtgtgtgacctgcgcccggtgcagcggggat

SEQ ID NO: 303586 - DNA, 122 bp, Homo sapiens
atttgctaacaaccagctaccctcctccaacacagtgcaggagaggcctatggaatagtacgcatttacaggggtcaaagaatcaaaatttaggcttaggaatgataaataatgggattttc

SEQ ID NO: 303587 - DNA, 122 bp, Homo sapiens
tggaccctttccatcttcacaatctgggtagagggaagatgaagatatggaaaaggggaacgtgcgataaaactgaagttttccccagaaagaaggaggtaaagacaaaacaaagcctatca

SEQ ID NO: 303588 - DNA, 122 bp, Homo sapiens
ttgactgacaatgaatggatggatggatggactgacttgccgggtgggaggccgggactgcgatgaactttactggccccgctgcactctccactatgggcaccccttcctcctacctctcc

SEQ ID NO: 303589 - DNA, 122 bp, Homo sapiens
ggccttcaggagtgaagctgcagacctttgccatgagtgttacagctcagaaagctggcacggacacagagtgagcagcaggaagatttattgcaaagagcgaaagaacaaaacctccaaag

SEQ ID NO: 303590 - DNA, 122 bp, Homo sapiens
ttaagttttctttcttcactaaaaagcatcccgttgaattgcgggagtcttttgcttttccgtaaatattctagtgccttaatatagttcattgcagcagttaatgtatcagttcgggttgt

SEQ ID NO: 303591 - DNA, 122 bp, Homo sapiens
cctgagtgctatggtatatgcctggccaggagtcagcaccgctgtgggcatgtgcacacacgtgtgtgtgggtacacgtatgtgtgttgtgtgtgtgcacgtgtgtgcacgtatgtgcgtgt

SEQ ID NO: 303592 - DNA, 122 bp, Homo sapiens
gggcggggcgtagagcaggcggggctggaggggccgcggggcggggacacccaggacaagcgccccaggcaaggtttttcagtgtcaatgtcactcttattacagttaatttattatcccta

SEQ ID NO: 303593 - DNA, 122 bp, Homo sapiens
cagaatgctgggcagcagcgtcaagagcgtgcagcccgaggtggagctgagcagcggcggcggcgacgagggcgcggacgaaccgcggggcgccggcaggaaggcggcagcggcggacggca

SEQ ID NO: 303594 - DNA, 122 bp, Homo sapiens
agaatggagactgagggtcaggctccagggcagcagaaaccaagagcagatgttagccagcggattcctgcgacatccctgcttccttcacatactcttaatatgttgcaaaacacattgct

SEQ ID NO: 303595 - DNA, 122 bp, Homo sapiens
cttatccagtcacctttccagcgaggcagggatgacagagacagacacaaagcagagagacggaggcagagggagacatgcagagtcacggagacatccgggctcaggccccgactctcagg

SEQ ID NO: 303596 - DNA, 122 bp, Homo sapiens
gagcttcaggaaaccgagcgagacaccaggtgggcacactgaggattaaagagggcctcgcggttccgcactgcggccgggagacaaaccagtagccactatcaccagccccgggcagacca

SEQ ID NO: 303597 - DNA, 122 bp, Homo sapiens
gttacagtccagtcttcacgacatcccaattatcttctaagtgcaaatcaaaccacagctcgcccctgctcagaatcctcccacagcctctcactgcaaccagaattaaatccaaagtccaa

SEQ ID NO: 303598 - DNA, 122 bp, Homo sapiens
caaagtgacctgaaaacctttagagaagaagctgctggctgagaaggaggtgtgtggctccggtgagaccaccagcttggaggactggtcatcagctgcacgttctgggtctgtcttgggta

SEQ ID NO: 303599 - DNA, 122 bp, Homo sapiens
ggaggtggctgaaagagcaataatgaaacagaatgggcggtccgagcggacatgaaacagcgattacacggtaggtatttctttgtagttaggcactctctttgccagcatgaaactcaact

SEQ ID NO: 303600 - DNA, 122 bp, Homo sapiens
atctgtgagaacaagttacttttgttcaatctcagtttacatctcaagaggatgattattcgtagaactttaaatgatgtggtaacaaatactgtaagctatttgttttccgtccttcacag

SEQ ID NO: 303601 - DNA, 122 bp, Homo sapiens
ttctttaatgtaaacacactgacaagggtggtatttaacaactggagtctggtttggctccgggtacccaccgttgtcttgggtctggcatccaaggctgctgagctggtgagtctggtgcc

SEQ ID NO: 303602 - DNA, 122 bp, Homo sapiens
catggctgactcgaggcggccgtgcaccctgatgggcatttatccccatgaacccaaacacgagaagaaggttaataaaggtgctactgcggcccaaacttcttacctcatggaagatatca

SEQ ID NO: 303603 - DNA, 122 bp, Homo sapiens
ggaacccgaagcaaagcctccagagggtgctggagaagctgcggctgcagagcagtgacccgaggcggggggcgcctcacccgccaggcaatggtggccgcagcctcctgacagggatgcag

SEQ ID NO: 303604 - DNA, 122 bp, Homo sapiens
gcgcccgtaatccctcaaaggggcttctctggaatcacccccaggccctggggccaggatcgaggctgctctgggaactgggcttacacgggtgtgggtggggacctctgggatcttagaac

SEQ ID NO: 303605 - DNA, 122 bp, Homo sapiens
cggcgcaggtgagtggacgaggtttcggccttgctgctgctgtgctatttctagaggcctcgtgggcaggctggaagccaagacagccacaggatttttctttgtcgccatcgtttatttaa

SEQ ID NO: 303606 - DNA, 122 bp, Homo sapiens
taaatagcgatgttttgtgagctcttccacagacaggggttcacaccccgtttctcctcccgtgagtcctgtgtgcagggtttgttcatccggacacctccattgcctgagcactgtggagc

SEQ ID NO: 303607 - DNA, 122 bp, Homo sapiens
ccccatccatctctctctctctgtctctctctctcttatatacacatacatgcacatatacgcatgcacacatatatatgtgtctatttatctatttttcaaacatgttataaataaagagg

SEQ ID NO: 303608 - DNA, 122 bp, Homo sapiens
tggttgtggctgtggcagggtgcagggagcagaagtacgcggtgagacggtgcatgcgcgcgcaatcagatccgggttagcaggatgcatctttgaggtccccaaaccaagccacctgcacg

SEQ ID NO: 303609 - DNA, 122 bp, Homo sapiens
ggaagcgacagccaggagccacggggtgcggcgtggagaggcaggtgtctcagactggggcgcaggaggtgttcccagggggccggcagcgtggggcttgggagacccgtgccctgacaatc

SEQ ID NO: 303610 - DNA, 122 bp, Homo sapiens
gacccaggagcggccgcagaggccggagcgcagcagccgggacgcacccggagccctgcccgccagctggtaactgggcccggctgtgcatctgtgatgcccaatttggaggctggaaatct

SEQ ID NO: 303611 - DNA, 122 bp, Homo sapiens
agtgagctgagccgtgccccccgccctccctggagcaggtacaagatgctcatccacatccgcacacacaccaacgagaagccacaccgctgtccgacctgcagcaagagcttctcccgcct

SEQ ID NO: 303612 - DNA, 122 bp, Homo sapiens
agtttctgggtcgtggtagttggacatttaaactgctttctagagcagctgcaccattcacgttcgcaccaccacctgcccgcagccctgcctttctctgtcctcgcttgtgtctgacatgg

SEQ ID NO: 303613 - DNA, 122 bp, Homo sapiens
cgctgcacacgcgcagaccgagcatccgcgtcaagaggcgaagagagcgcgcgctccccacgtcctgcgctcctggctgccgggcattcgtctcagccgtgactctcgccaggccggggctg

SEQ ID NO: 303614 - DNA, 122 bp, Homo sapiens
gccctaccagtgcccggtgtgccagcagcgcttcaagcgcaaggaccgcatgagctaccacgtgcgctcacatgacggcgctgtgcacaagccctacaactgctcccactgtggcaagagct

SEQ ID NO: 303615 - DNA, 122 bp, Homo sapiens
tggccaacacagtgaaaccccgcctctactaaaaatacaaacattagccaggcatggtggcggacgcttatagtgccagctactttgggaggctgaagcacgagaatcacttaaacctgaga

SEQ ID NO: 303616 - DNA, 122 bp, Homo sapiens
tcactctctggcagcatctgaaggttttctagtgtcagctggcccagctgctgctgtatccgggtgcttgggcggccccaggtgagctggtagggagaatagccctggtaggtaactctgtt

SEQ ID NO: 303617 - DNA, 122 bp, Homo sapiens
ggtgacactgcagccactctccatggccccagggtgagtctcagcacgtccaggcgtccgcggtgacactgcagccactctccatggccccggggtgagtctcagcacgtccaggcgtccgc

SEQ ID NO: 303618 - DNA, 122 bp, Homo sapiens
agcttctgggaggcctcaggaaacttacattcatggtggaaggcaaagaacaagccaacacgtcacatagagcaggaggaagggggagggggaggtgctacacacttttaaacaaccagatc

SEQ ID NO: 303619 - DNA, 122 bp, Homo sapiens
caattatctttgtgtcagatgattatctgagagcttaatttaatctccattatcctcccccgtcatatttcaattaaatctgctatcagagtgttaacacatctttgaacctgctatttctt

SEQ ID NO: 303620 - DNA, 122 bp, Homo sapiens
ttcagcacaccgttccccgcggcaacacgctacttctgaacgcaggagcgactctccgtccgggctccctccaggagaatggaggcaaatgtacattcgagggtctcaatacctggaattcg

SEQ ID NO: 303621 - DNA, 122 bp, Homo sapiens
gcttggcagagcctcactttcccctctttcacttgccccacgtcggacccaagtttccctcgtcagcggccaggccgcggccagcggtccccaacccacagccccgcctcccagcccaactg

SEQ ID NO: 303622 - DNA, 122 bp, Homo sapiens
tggagcattcggccttccgcggatgggccccattacggctgcaggctggcgccactgctgcgggggctcgctacccaatgaaagtgtcatccaactggaagatgggggggctaccagtgtta

SEQ ID NO: 303623 - DNA, 122 bp, Homo sapiens
caggcattaaggactagctggagagagatgaactatcaaacttcagcactgcaaaagcctcgttaaaagaactactcagcaagagagttttccttgagaggtttttaactaaaaggttctaa

SEQ ID NO: 303624 - DNA, 122 bp, Homo sapiens
cctcagcagagagaagctgaagtgattactgcattcctatgagctgtgggaggaataaatcgtggaaagaaatcctcatttgcaactgtatggcattaggggtgaggggtctcggaagaagc

SEQ ID NO: 303625 - DNA, 122 bp, Homo sapiens
ggccgcagaaccctggtcggtttgacgcaagaccctggcggatcccagagccaaagtaagcgctcacctccgccggacagggtaggtggggttgccaacccaggagagcgagggaaggggga

SEQ ID NO: 303626 - DNA, 122 bp, Homo sapiens
agggaggggtgggggacagtgggtgggcattcagactgccagcactttgctatctacagccggggctcccgagcggcagaaagttccggccactctctgccgcttgggttgggcgaagccag

SEQ ID NO: 303627 - DNA, 122 bp, Homo sapiens
tgtccacccaaattaaattttaacccagctcataaatcttccactaagtacgtcccctgccgcccgcccgggtccaccccaggccgcagcgtgggccagcacagcgacagccttgttcctct

SEQ ID NO: 303628 - DNA, 122 bp, Homo sapiens
attagctggtgtctttcccagggcgggacgatcattggcagtgcgcggtgccaggccttccgcacgcgggaaggccgcctgaaggctgcttgcaacctgctgcagcgaggcatcaccaacct

SEQ ID NO: 303629 - DNA, 122 bp, Homo sapiens
actgctcgggactggcgcgccgccttcaggccacttccgggagcgccgagattccgctcgcggcatcgggacccagcttatgaccacttccgggacacagccagtcggggaggggacggggc

SEQ ID NO: 303630 - DNA, 122 bp, Homo sapiens
ggcagggagcatggaagcatcaaataccttgacaatcagttcattgctgagtggcttgtacgataaaaggtgcactactgttagactgcaaacagtccagaaagccaaaagtataacacaga

SEQ ID NO: 303631 - DNA, 122 bp, Homo sapiens
cacatcgtccctttatccgctcagacgctgcaaagggccttctgtctccgggggtaggaccgcagaccctctggtggcctgcccgccgctgacccggcctcactcggcctcccgctgcactt

SEQ ID NO: 303632 - DNA, 122 bp, Homo sapiens
accactattttaatctttttaaactttctttagtagagatcactttcaatgaaaataatacgcaattctgcatttgaagtttctctttatgacatctttgctataagtacaaaatactttat

SEQ ID NO: 303633 - DNA, 122 bp, Homo sapiens
cattcggtgcaggatgctttccatggagatgagctttctccaatgtcacgtcaggttaggcggatgaaacagacgtctatccccgaggtactcattctggctgttgggaagagagaagccga

SEQ ID NO: 303634 - DNA, 122 bp, Homo sapiens
cgggcggcgctacttccctttcccgaattccgagcccccctctccaggtcaaatgctcggcgcggcctttccgagactacccgagaaattctgacggtgagcgccagacagcggcgtggtag

SEQ ID NO: 303635 - DNA, 122 bp, Homo sapiens
ccgcgccaggccggggggcggtgagtccgggacccgcgggtacacagctgggtcgagctgcggctgtcgcaagttttgttgcgagcgacggagggcgaggcggggtggggggttgggagggc

SEQ ID NO: 303636 - DNA, 122 bp, Homo sapiens
ggccacagcccagtctggggccgctgaagccaggctgggaagcatctcacaggctgggcacgtggcaccaggcgcctggcaccaggagcttccccgcctgcgtcagctggtgtgcccccgcc

SEQ ID NO: 303637 - DNA, 122 bp, Homo sapiens
ccccaggcgcacccgcgccccgctcacctgacatctcgtcctcattctccatctcctcggcgaacagccgcggcagctcctcctcggtgcccactgggccccgcatgcccggcgcggggagg

SEQ ID NO: 303638 - DNA, 122 bp, Homo sapiens
ctacccgctcgccggccgctatcctaccccgggcccagcgaacttacctcgcacgcctcacgccctggcctggctgaacgtctccacgccctgaccaaaaccagcagcgcatgcgccgtggc

SEQ ID NO: 303639 - DNA, 122 bp, Homo sapiens
aggctaagagctggctctggtaggccacggctcactactgaattcccagcattcagtacacgaaaggtggtgacggcacttgtggaaacacagcacagccccgcagtggcttcactcctgaa

SEQ ID NO: 303640 - DNA, 122 bp, Homo sapiens
gaaggcatatgctgggtgtgtctgtctgtgcctatatctttgtttgggtctcccatactgcgtatagatgaatgggtcaggatatctggaacaaaatatggaggtgaagggtgagatcggga

SEQ ID NO: 303641 - DNA, 122 bp, Homo sapiens
accgggtttttcctcatcctctccaccccctggcaaccaggtgtaccttgctcccgagcccggcccacctcctgctggatgaggcgggcactcagctgcagttctgcatccaggcggttccg

SEQ ID NO: 303642 - DNA, 122 bp, Homo sapiens
aaaactttacccacagaattgggagccggacctctagccttaaaccagcgtgaaaaggctcggccggaaccacaaggaccgtgcctctgcggctttctctactgccggccaactcacggctg

SEQ ID NO: 303643 - DNA, 122 bp, Homo sapiens
aggagcctgtggtgggaatcctcagagacaggagtgagggatcaaaaagcgggatacacgcgatcagggaggccatggaagtgcagaacagggaaggatcccagccccaaaacacttcgcat

SEQ ID NO: 303644 - DNA, 122 bp, Homo sapiens
caccttcccaacaccccttttcaaagctgtaagtttcgtcagatctttccaaatggttgccgtggctttcttctttcatttgaaggctttagtcaaggaacttctgaaataagaacgtcaag

SEQ ID NO: 303645 - DNA, 122 bp, Homo sapiens
cagagggagcccgtgagctgagtgggccagggactgggagaaggagtgaggaggcagggccggcatgcctctgctgctggccagagctcttttcacattgtgctactgtctgcacctgtcac

SEQ ID NO: 303646 - DNA, 122 bp, Homo sapiens
ccccctggagagggccagccagagctaaaggcccatcttgctgccccattaggggaaacacgccagagacaggaggggcattaagattgagctggtctcctcattcttggagtgggcttgga

SEQ ID NO: 303647 - DNA, 122 bp, Homo sapiens
agccgtgcctccatcttcccgatgacctcctgttgccggctccgctcctcctccatgtcccgctgctgctggcccagccgctcctgcagtgctgggggcaacccacagggtgctcagcagct

SEQ ID NO: 303648 - DNA, 122 bp, Homo sapiens
gggcggagcgatctgggtgacacacccaccccgcccggctggggcggcgcggaactatgacgtagtagctgcgtcaggagcgcgcccgcgtttctaaactttgtctggataaggcgcacgct

SEQ ID NO: 303649 - DNA, 122 bp, Homo sapiens
cactgggtcatttgggcgtgtgcccctcgcacgcctgtatcttcccaactggtgtcagctcgaaaccctctgtggtctgcagtgctcagcctggctttccaggtctgggcagctccctcctt

SEQ ID NO: 303650 - DNA, 122 bp, Homo sapiens
gctgggttttgagtagccatttatttcattggggagttttggaataggacatcccacatccgtggacacacatgtagaatacttttataagtaattacagtcttaatagtgatttgagttac

SEQ ID NO: 303651 - DNA, 122 bp, Homo sapiens
cccccctacataccaaccacacacgtgttttaagtgtgtgtgcacacgcacacatgcagccgtctggaagagcatggccggggagctgggctggaggggtggagggggaagggagaggaagg

SEQ ID NO: 303652 - DNA, 122 bp, Homo sapiens
cggaatcgagaaggagcagctggacgctcaacgggttggggtagccgcggccgtggccttcgggagcggggcgttgatggtgagggaggacccggggaggaacccggggggatccctgctga

SEQ ID NO: 303653 - DNA, 122 bp, Homo sapiens
cggtttcgggactacgaagggtcggggcggacggactcgagggccggccacgtggaaggccgctcaggacttctgtaggagaggacaccgccccaggctgactgaaagtaaagggcagcgga

SEQ ID NO: 303654 - DNA, 122 bp, Homo sapiens
gtgaggaggcttcactagaagccttaaattaggaattaaggaacttaaaactcagtatggcgtctagggattctttgtacaggaaatattgcccaatgactagtcctcatccatgtagcacc

SEQ ID NO: 303655 - DNA, 122 bp, Homo sapiens
gcagataatggaacgctcttaaatactacccaggtcagtttttgtgattttgattccatacgcttaaattttcattccatccttcttgaccatttggatttcttgtccatttgtgtgctgat

SEQ ID NO: 303656 - DNA, 122 bp, Homo sapiens
gctacaggttttcctccaaatctgagtgctgaggctctggagcggacagagaggaaatgacggctgtgaaccacacgtccggctcagccattttctaggcggaaaaaaggaagcccctttgg

SEQ ID NO: 303657 - DNA, 122 bp, Homo sapiens
taaaaggataaagaacataaaacaactggcaaggcgctgtggctcaggtctatatctcagcgcttggggagggtgaggcaggaggagtgcttgaggccaggagttcaagaccagcctgggca

SEQ ID NO: 303658 - DNA, 122 bp, Homo sapiens
cataggctggctttgcctcagcaccactaaatcactcaggatcatgtttctcacaggcggcggctgaaataaaatatgcatactatgtaattggaaaaagattctgtctcattttccccggc

SEQ ID NO: 303659 - DNA, 122 bp, Homo sapiens
acagacttgctccgtcaaccacagggcatgggcgtggggaaacagtagaccacaggctgacggggaagaacacgcctgttgacttgggactttcttttcttacagctgtctcatatacaaat

SEQ ID NO: 303660 - DNA, 122 bp, Homo sapiens
gcggctatgaggccagtataaggcggtaaaattacgataagatatgggattttacgtgatcgaagacatcaaagtaagcgtaagcacgaaagttgttctgcaacataccactgtaggaaatt

SEQ ID NO: 303661 - DNA, 122 bp, Homo sapiens
tggggttcccgagacctcagagaggggagccgggggccgggccagcattcccagagcttgcgagccccactcctgcccctggaccccagcaggggcttttggagcagttgcatgaatgtggg

SEQ ID NO: 303662 - DNA, 122 bp, Homo sapiens
gacatgtctgatgccacagcatcaccatgggggctgcagtcctggcagggtgtccacactcgccacctcgatggtcccctcttctcccttccccttggaggaaaaccccacagtccttagtc

SEQ ID NO: 303663 - DNA, 122 bp, Homo sapiens
acatcacatccccagacaaccagaagggctcacttgtttttccctgccttctccagagcacgtaacacagggagaatgacaggtgcttctctgtacagtcataggaaaataaagttcatagg

SEQ ID NO: 303664 - DNA, 122 bp, Homo sapiens
ggggtcccccagtggaggatactgaatgagggtcttaccgtctggatccccatgacggagcgccttttcctccaccacctgacaagccgacagatcccacaatgcgccgcggggcgggtcgg

SEQ ID NO: 303665 - DNA, 122 bp, Homo sapiens
gagcggctgtgcggtcccgggagggccgtgcctgatggcggcttgtcctggagcggtggccgcggctctctgagctctaggctactttcccctttgtttcctagagtttcataacagaagag

SEQ ID NO: 303666 - DNA, 122 bp, Homo sapiens
agcaaccagatgatttttgaggtcctttgcagctcgaacacggaatgactttgtggtgatcgagtagccagaagttcacggaatgcactgtcacaattgtgattccgccatagcgccgtgca

SEQ ID NO: 303667 - DNA, 122 bp, Homo sapiens
ccctggtgtcacaaagcaggttgggcagggctgaaatccaaacccaggcctcatttcaggcgctgctgtttccatcatcccaagaacaagaccagctggccttctgcagtccctgccaggtc

SEQ ID NO: 303668 - DNA, 122 bp, Homo sapiens
tgacgatacggggcgggcactgttctagagacagcctgtggtgtgggcgagttccgctgccgggacgggacctgcatcgggaactccagccgctgcaaccagtttgtggattgtgaggacgc

SEQ ID NO: 303669 - DNA, 122 bp, Homo sapiens
cctgcgcaacagaccaaagaacagtacaaagaacatccgtgtacccagtaccctgactaccgactacctacaacccgtccctgccccatcctgagttcttttgaagctgatctcaggcatcg

SEQ ID NO: 303670 - DNA, 122 bp, Homo sapiens
aaaagaaaagaaaatgggacactgttgatacagtcacagagctgaaggagcagcatgggtcgtgattctggatcgtccctccagggcagctagagtagctgctgggaagtatttctctcagt

SEQ ID NO: 303671 - DNA, 122 bp, Homo sapiens
gcggccagcctgactagaccccaccctgaggtcctgcatttctcagtcggtgtgtaatcacgttccagggcccaaagcccagctctttgttcagttgacttactgtttcttaccttaaaaag

SEQ ID NO: 303672 - DNA, 122 bp, Homo sapiens
ggattgaaggtgccagaacctggttgagacctccccagaagtagtacactggcgccaccacgccaaacctgtgccagtgacaactgccgccgccgggttcaaaacttcgggttggttttgaa

SEQ ID NO: 303673 - DNA, 122 bp, Homo sapiens
catggtcccctctggggcgccttcagcctccccgtcttttgtctaacctcaccctctaaacgttcagcggtggaaagatttttagaattttaaattattactgctttgaaataaatggaagt

SEQ ID NO: 303674 - DNA, 122 bp, Homo sapiens
gaggggccgtgtgaggtgcatggcgcgccgtttcctctccaggcgctcctctcagggctacggccctagaagatctggcctgcaccagcccaaaggacatgacaggagtgggtagcccacgg

SEQ ID NO: 303675 - DNA, 122 bp, Homo sapiens
gtgaaagaccccgtgcccagcaccgaaggacctgcccgacacacagtccccagccttgagcggagacccccagactgcatacaactgtgcaaatgcacttgacctccctttggttgtgagtc

SEQ ID NO: 303676 - DNA, 122 bp, Homo sapiens
agcctcagtcccattcccaatccccatgaggggtatccatgccaagggcgtggggcctgccggtaccccctgtgacctggctgccttgggatgggctggggggctgcctcagtcaggcagcc

SEQ ID NO: 303677 - DNA, 122 bp, Homo sapiens
ggctctccaggcccagcgtcagggttcagcgcccgggcctgagcacctgcttgggcgctgcgctgggtttgggtctttgcacttacctgtcccgcttttctcgaggccccgtgtagaaggcg

SEQ ID NO: 303678 - DNA, 122 bp, Homo sapiens
ccatgtgagatctcagggcgctactactgctgggttcctaactcaaaccattacactttccgtgccaacgtaacaaggaattgaggaggttccattttgggaattaaggagtgtccccaaca

SEQ ID NO: 303679 - DNA, 122 bp, Homo sapiens
cctctttccctttcacccactcccaggactgactgcccatccatgggagccatatgagggcggaacttgggaaactgtaggtgtgactgagactacgtctaagcacaggctctgggtctgag

SEQ ID NO: 303680 - DNA, 122 bp, Homo sapiens
atgaggatctttgaaagcaactcggcgccttcaaagcacttggtgaaacctagcctaaagcgttgtcccaccatgctctgcggcgataacggcctttggcgggaaagagtctcggaggcggg

SEQ ID NO: 303681 - DNA, 122 bp, Homo sapiens
ctggaggctaaggtgggaggattgtttgagcctggttgtagtgaagtatgattgggccaccgtagtccaacctgggcaacagagcatgaacctgatgaacctgtttccaaaaaaaaaaaaga

SEQ ID NO: 303682 - DNA, 122 bp, Homo sapiens
gaggacgggggtgtggccggcagggtggggacccgcaagccctcggggcagagccacggacgaggcgcgagctggatttacaatcattctacctgtcgcctaaaggaggtgacagacaggaa

SEQ ID NO: 303683 - DNA, 122 bp, Homo sapiens
aaacgagagtcactgaaccacacaggggtgaggagtctctatccgatgtgcttgcagtgacgtcactctgcgcagtggagagggctttatgaaagcagtggggctgattaagatactctatg

SEQ ID NO: 303684 - DNA, 122 bp, Homo sapiens
gagcctctgccagcccatctgccttcgcacatgtatgtactgagattaacacagatgcggcgtggcctagcatgtgcctcttccaccaagcagtgggtgtcaaccgccgagtgcacatcgga

SEQ ID NO: 303685 - DNA, 122 bp, Homo sapiens
taacatcaaaattcatggggtcttaaccacattccacatcctgcgtttcccaaggagcgccggtgatctggttcctgtagcccgggatagagaggaccggccagcaggcctggtcatgtgcg

SEQ ID NO: 303686 - DNA, 122 bp, Homo sapiens
agacggtgaaggtgtggcttcaggagaacctgctggctgtgggcatctttgggctgtgcacggcgctggtgcaggtatggcctgggggcctgcgggctccctgcccccactttgttaggacc

SEQ ID NO: 303687 - DNA, 122 bp, Homo sapiens
tgtgaaccgtttccagcgattcagccccatccttttctttgagaaggaccttccctgaggcgccaggagcattttccaagttcgagcccgaacctcggccaaagctgcagcaaccgcccttc

SEQ ID NO: 303688 - DNA, 122 bp, Homo sapiens
catctcccttcaagaaccctacggagagtcggactgcatctccgcagcgagctcttggagcgccgccggccgggaggcgaaggatgcaggcggctccgcgcgccggctgcggggcagcgctc

SEQ ID NO: 303689 - DNA, 122 bp, Homo sapiens
cccgggctcgggctcggggtgaagggcagccctgccaggcccgccccgaggccgcggatgcgaaaccgggacacaaaggcacgcactcttgattctggcgcccgcgaggaagagggttgagg

SEQ ID NO: 303690 - DNA, 122 bp, Homo sapiens
gaaacttgggcaggcaccccctgtaaagcacttgtgaacatggggactcgtcttctacgccgaaaagtggtgactcacaccataggcaagtggcagatattcagcctctggaagagaatatt

SEQ ID NO: 303691 - DNA, 122 bp, Homo sapiens
ccccgggggacggcgggcagagcccactctccgcgacgggcgaggctgctgcgccgcgcgcgccttcctgccccgcctcccgccgcgccgccgaagtcccgcctctcgccaagctgcccgcg

SEQ ID NO: 303692 - DNA, 122 bp, Homo sapiens
gggttaataatcattagcgttccagccctgttctctcacctttttatatgtgagggaagccgagaaccttaagtttcaagttggtggtttaaggtcatctgacttgaatctcatctgtctat

SEQ ID NO: 303693 - DNA, 122 bp, Homo sapiens
caggaggtccagcctgaaatggacgctcactgataaacgatgatgtatggcagccttcttcggtaaaacaagttcactccagcaggctggggcttctcggggaggaaggtggatgtggaagt

SEQ ID NO: 303694 - DNA, 122 bp, Homo sapiens
aagtgtaggggaggggcagcgtggagaagaaaggatgtgacgtcactgagataaccagctcggctgttagcaactctgttagcaacgctgtttgtctttctcggaaacaacaggtgagaatt

SEQ ID NO: 303695 - DNA, 122 bp, Homo sapiens
ttgaggactgtccaagagaagccagatgaaagacggaaatgatctgcctggaacaggtgccggctgagcagtgtgtgccacccagcatggcccagctctctgccagccccggctgctggccc

SEQ ID NO: 303696 - DNA, 122 bp, Homo sapiens
gggaaggagggagggggtcgggctgccgggagggcgggggcagcggccgggactgcgggccgggagcgagcccagccgcccgcgccgtgtggagcccgggcggggcaggtgggcagcggcgg

SEQ ID NO: 303697 - DNA, 122 bp, Homo sapiens
ccatctgaggccacgcctctgcatacctcggtctcccacagcctggcctccagggccgcgcggggtccctgcgtgttgtcattgacctgcagctggtcctgcacagccttcatccatgcctg

SEQ ID NO: 303698 - DNA, 122 bp, Homo sapiens
agattctgcaactcgacttttataggggaaaccaggcacgcatttcaaaatcttctcatccgtccccacctccttgcgccgcttttccgcgcctcctgtgccacggaagctgccctctgctc

SEQ ID NO: 303699 - DNA, 122 bp, Homo sapiens
ctggtaagttcccctgacggaagggtccatctacattcctcgagtgcagaaagattaaaacggcctttgaagcagaagccttacaaagcccttaaacctcaggaccttaacacagggacctg

SEQ ID NO: 303700 - DNA, 122 bp, Homo sapiens
cccccgggggcgaggactgcggtcccggtgtccgcgcgcccctccgcagggccttcgggacgtgccctggcccctgaggataagcggccagctcggcgccagcccttcccggattccgaccc

SEQ ID NO: 303701 - DNA, 122 bp, Homo sapiens
atttattgttgtgcaaatttggactctcagactcttctctctgcactcggtttccagtagcgcctgagaaagttgtctcttgcttcctgttgagccctttccatagttcacagttgaccctt

SEQ ID NO: 303702 - DNA, 122 bp, Homo sapiens
ttttgtagactgcttctgtgctagaaaatacttacttttctggcttggcgtggtggctcacgcctgtaatcccagcactttgggaggtcgaggcaggtagatcacctgaggtcaggagttca

SEQ ID NO: 303703 - DNA, 122 bp, Homo sapiens
taacagcctgggttttctcttctgcatcaatgcagggaggaaatggaatgctatgtgggacgacagcaccatgctaggccagggatactgtgaagaatcaggatgtgttgggaaggaaggaa

SEQ ID NO: 303704 - DNA, 122 bp, Homo sapiens
ctaaaggggaaaataatctattctctaatgtgatgatgaatgtagagtgatatgacagtccgttttccaaccaggagatacaaatggctgagtcagacttgctccaaaatatttagcctctt

SEQ ID NO: 303705 - DNA, 122 bp, Homo sapiens
tctagaatcctgtttctgtctgccactaagccctatttctcgccatttcaaccttgttctcgtgttgcaccaaacttcttcttgcttcctaaaaacaacattcctggctgattttttttttt

SEQ ID NO: 303706 - DNA, 122 bp, Homo sapiens
tactggataatttgcgctgtgaggcgcctagatcgcaaggcgcactccgcaaatgacagccgctcccgtgcacttgtccagtcattcgggtggcatactgtccgggtggaagcccgccaaaa

SEQ ID NO: 303707 - DNA, 122 bp, Homo sapiens
cacagtctagtcacaaggcattgaccaagaaagtaatgactaactgcccatctgagactgcgcatgattcacaagaatgtttctttgttttgttttttgagacagtcttggtctgtctccca

SEQ ID NO: 303708 - DNA, 122 bp, Homo sapiens
taggcgtgagccaccacagccccggtcagcgccaggctggccgccatcatcactgccgtgcggaacattgccctggcccggagacctgcatggggcaagaaaataacttatgtgatgctcgt

SEQ ID NO: 303709 - DNA, 122 bp, Homo sapiens
gctttgttcgccatccaataatcagcaggtttcgggttggggtgaactactggggaggagcgccccagggcttctctcagatggaggagggacaggtcacccagagtgaaggaagttgtgag

SEQ ID NO: 303710 - DNA, 122 bp, Homo sapiens
ctgcggagaggagaaagggggtcacagcagctggggccactgggccatgcccatccccatcggcatttcttttcctgtccacattctctgcacatgacacacaacataaatgttgtatttcc

SEQ ID NO: 303711 - DNA, 122 bp, Homo sapiens
ggcgtggtggagctcggcggggcccagcgcgggccttgccgcggggacacagggcagggtcgcgctctgccctctgccgccactccaggtcagcatcctcagggctcgcgtgggtgacggcc

SEQ ID NO: 303712 - DNA, 122 bp, Homo sapiens
tttccaagtccgggggaaaaatgtgtgtgtgtttgggatggagcgccgcgggcgcgcatgcgctgcccaaagttgccggatcccggatttttcgctcccagtctccgctctcgcccgctgtg

SEQ ID NO: 303713 - DNA, 122 bp, Homo sapiens
cttcatttctcttgcccctgccccaggcaggtttggcactccttccagagtcccacacagcgtgctacttccttgtagcacctatcaccttatatgtgacttaatcagtgtgttcctatttt

SEQ ID NO: 303714 - DNA, 122 bp, Homo sapiens
ctgatggtgggtggatgagtaatgcatccaggaagcctggaggcctgtggtttccgcacccgctgccacccccgcccctagcgtggacatttatcctctagcgctcaggccctgccgccatc

SEQ ID NO: 303715 - DNA, 122 bp, Homo sapiens
ccttgtactcaccatggtggaaaggacccagcactgcctcccgagaagaattccacactccgcccagctctctgcagcccaggaacaataaatacttcctccccatgtttaaaaataacccc

SEQ ID NO: 303716 - DNA, 122 bp, Homo sapiens
gtctaattttaaaatctatacttctaagcatctggctacactatatctctaaaagttttacgtagttcaaatgtgagcagcgttcgtctacgcagaaaaactgaataagcagcattaaccgc

SEQ ID NO: 303717 - DNA, 122 bp, Homo sapiens
cacactgcaaggtggctagaggctccttctgggagccaggaggtgtggctgggcagcacccggttaaggatggcagctcttcaaaagagggtcaagaagaaaggacccgagggactgctggg

SEQ ID NO: 303718 - DNA, 122 bp, Homo sapiens
cacaacataaaagaggactttttttaaaaaaagaaaaaagctgagaaaaatgttagcagacgtctgggatggatttagctgtgcattttctggcagtgaaggtaaaaaaggaaatctccatc

SEQ ID NO: 303719 - DNA, 122 bp, Homo sapiens
taagggcgagtcccgtagagacctggccgtccgtgtgaagaggtcttcaaacccgtttggcgtgaggattcccctgcctttgcccgcttgataaaaaacgcgcggtgttctctctccatggc

SEQ ID NO: 303720 - DNA, 122 bp, Homo sapiens
aaaacgctgcggagcgttttcgactttgcaaagctgttgatgttggtgggtccaagttcccggtgcagcgccgctggctgagaaatttgtactcagtttttactcttctaattattcttaaa

SEQ ID NO: 303721 - DNA, 122 bp, Homo sapiens
tgctgggagagcacatcacataactgctcacatcacagggcacttttacagcttagaaagcgcctggctcaccctctgggtgctcccaaatgccacccgggagaccataggccgaggatgag

SEQ ID NO: 303722 - DNA, 122 bp, Homo sapiens
cgctgcccggccggcagcgctggggttaagtggcccaagtaaacctagctcggcgatcggcgccggagattcgcgagcccagcgccctgcacggccgccagccggcctcccgccagccagcc

SEQ ID NO: 303723 - DNA, 122 bp, Homo sapiens
ctggggtattgagtacactttcaccttacaatatttctgacttcagtgaattcactgggacgtaaccccatcataagttaaggatcatctgttcaagggttttaggagctctgtgccaagac

SEQ ID NO: 303724 - DNA, 122 bp, Homo sapiens
ccttgagggcgtgtcaggcggctgtgttccttcgccacgcaggcgccccgcgccttttcccgcagctctgcgccactcccacactcccgggtccgagctaacctagaccacccgtgaggacc

SEQ ID NO: 303725 - DNA, 122 bp, Homo sapiens
tgtcctcacccgcagcgcagtgacgccgacccatccaacggtcatcgcatgcgcgtgccccgcgcaggccccaaacccccacggattaggttgaaggtcagacaaaaaatcccggacccata

SEQ ID NO: 303726 - DNA, 122 bp, Homo sapiens
cgctgtccgcagcggagatggatttctttaacgttcctgttatcaagccctcctatttgtcgcccccaaactcagtttcccccagatgtcttggactgcttcgtttgaggcttctgcagcag

SEQ ID NO: 303727 - DNA, 122 bp, Homo sapiens
tgtatgtgcaaaactacattaacctcgtaaactgcaggtccttcccaagtacctcatttccgacattattttgacagccttgaagaaaactgttctagaaattgaagttaccgtgaatagta

SEQ ID NO: 303728 - DNA, 122 bp, Homo sapiens
gccctggttggggtcaatccagtattcccctgccgcagagccaggcagggtgggtgagtccggatgggacccgacggaccccaaccccccccacacccccactccgcccatccaagtggcgg

SEQ ID NO: 303729 - DNA, 122 bp, Homo sapiens
atgaccttaaaactgacacatggagagcagctatgactcaagaaacacctcctacgactccgtgcttgataagtacaaaataagtgccaggaagaaaaggcatggtgggatggaaaatagtg

SEQ ID NO: 303730 - DNA, 122 bp, Homo sapiens
ggccaggatttgaaagcagagccacagcatggagcagaagcaatagttcaaggaaaagggcgactccttgtgtttagattgtggtataggtgtctgtgtgattcttccggagtgtggaagtc

SEQ ID NO: 303731 - DNA, 122 bp, Homo sapiens
ttcaagaccaacctttctatccatgatgttaaatctgactgcccgtagtttaaagaaagccggggatggagtgggggctagcatcgatatggctttccttccgatggcctttagttttgttt

SEQ ID NO: 303732 - DNA, 122 bp, Homo sapiens
gccctttcgctaaggctggggagagggaagcctccgcgtgctgggttagggccaagcccgcgcacatagggtactgggaacacgggtgtcttgggacagaattacatttctttttccctatc

SEQ ID NO: 303733 - DNA, 122 bp, Homo sapiens
agtgctgcattacaggagtaagccaccgcacccggccaatttttgtatttttagtagagacggggttttgccatggaaaccagcctggtctcgatctcttgacctcatgatccgctttcctt

SEQ ID NO: 303734 - DNA, 122 bp, Homo sapiens
ttagttgggggggtggcgagctaaaacgggcattctacgggagctggaagacttctggggcgtcccaaggactttgagagacttggagaatgtttgaagccactttgcacggcgccgaaggc

SEQ ID NO: 303735 - DNA, 122 bp, Homo sapiens
acgctaagtggacgctaaaaagacacgctgtttgtcacacaaggcctccaactgggacggcgtccaccgcgccccgccccgcccgcggcaccgtggcatcttgggacatgtagtctttggag

SEQ ID NO: 303736 - DNA, 122 bp, Homo sapiens
tggctttgagggctatgaagagggggaagaggcgctgccagggccaggccaggggagggacgggaatcaggaggccaagcctggagcaaagctgcccccaggagggtgctgataccaggatt

SEQ ID NO: 303737 - DNA, 122 bp, Homo sapiens
ctgagctctctgtgtgcagagctctcactctgttcatctttgcagccacggtgtccgccacgatgccagactgcggccacagaggctctacaaatgtgttgttcaatgaacgagggaataaa

SEQ ID NO: 303738 - DNA, 122 bp, Homo sapiens
cggcagggtggcctcatgagtgctttacgaggcccaaacaggaagcacccagcgcaggcccgacaggcccacagcactccggaactgtccgtggaccccgcgtgggagtccgggaggccgtt

SEQ ID NO: 303739 - DNA, 122 bp, Homo sapiens
agatgggctcgtggggcaaggctgctcctgctcccagtggaagggcgtttggtgtgtgcccgtgcagggcccaccctcccgtgggtcaccttgggccaggagcaccagcccgctgatgatga

SEQ ID NO: 303740 - DNA, 122 bp, Homo sapiens
gagtggagaaaaaaatttttcttccctacactgtccaataccattgatttcttttcttggcgtaattctccatgtacacacacaaattaaagttttgatgatgggaatgtctgtgggctcaa

SEQ ID NO: 303741 - DNA, 122 bp, Homo sapiens
ctggccacgggccagtgtggcgggagggcaaaccccaaggccacctcggctcagagtccacggccggctgtcgccccgctccaggcgtcggcgggggatcctttccgcatgggcctgcgccc

SEQ ID NO: 303742 - DNA, 122 bp, Homo sapiens
cagccatcctgtgaccacctggtccatcaagagatgggccatcgtcccttccccagcagccgtctgtccagccacactgtccctggctgaccccagcgggcggctgcctggaggcctgtgta

SEQ ID NO: 303743 - DNA, 122 bp, Homo sapiens
taagcactttttttcctttcagtaggagaacatctctgggctagtaggacagtacctttccgttctcccctggccccacaccccctgtccttttttcagctcctttgactttgcggccccgg

SEQ ID NO: 303744 - DNA, 122 bp, Homo sapiens
cagagtggaatacttgttacaactgataagtctacattgatgcatcattattcgcctgcccgcagtccatggtttacattcaggttcactcttgttgtacattctgagggtttggataaatg

SEQ ID NO: 303745 - DNA, 122 bp, Homo sapiens
gggctaagatgcctacctccatattagcattttatatgctatgctttaattgttgatttacgtctctatcttctccatcagaggttgtgcctacaatttttctgtgcctaacatataataga

SEQ ID NO: 303746 - DNA, 122 bp, Homo sapiens
gggcatctgttctgtagaaggtgctgacttttgtgggattcatcagatcccaggtccagccgatgatgtccattaagggttctatggcaatttccaaaggagtcaatttcaagttacggatc

SEQ ID NO: 303747 - DNA, 122 bp, Homo sapiens
agatgagaagttggggcaggatgaccagcggcggagggagcctccttaatcctctttccacgcggggtcaggcagggaagcctggggtgcagcgcctctcgggggacggcatcttacagaag

SEQ ID NO: 303748 - DNA, 122 bp, Homo sapiens
cccacgattagcaccgcgcgctctggggagccgccaaggtgcagccacttcccagagctccgaagggtcagcaagaaaagaggaagccacgaacgctcccagcctccagctggaaaccacgc

SEQ ID NO: 303749 - DNA, 122 bp, Homo sapiens
ggcttcctctagcagggagggggccgaggagcgagccagtgggggaggctgacatcaccacggcggcagccctttaaacccctcacccagccagcgccccatcctgtctgtccgaacccaga

SEQ ID NO: 303750 - DNA, 122 bp, Homo sapiens
gggccagggctgagtcacgtggcttggttgcctacgcgctggtgggccgtgggaagatggcggacggaaagggagacgccgccgctgtcgccggggctggggctgaggctccggcggtagcg

SEQ ID NO: 303751 - DNA, 122 bp, Homo sapiens
ggggcaggaggagaggactcagccggtctacagggccagacgctaacaggcggcccgatccgcatcgactgggaggactagttcgtagccatacctcgagtccctgcattggacggctctgc

SEQ ID NO: 303752 - DNA, 122 bp, Homo sapiens
gcactggttggtggctcagttctaacgagaacctaggtctctgggtttgtggtctagccccgcccttctggtctggcatctggcgtccacattgccagtgcttagacggctccctcacattg

SEQ ID NO: 303753 - DNA, 122 bp, Homo sapiens
ttgctatcttttcttccggatcaaggaacaaatcgcaaaagaaagctctcccgacacctacgcaaaataaaatgtttccggggtcaatcataaattttctgcttctgtgctcgccgctagcg

SEQ ID NO: 303754 - DNA, 122 bp, Homo sapiens
ccccaggattgtctagacctgtaattagttcatctcattttcactattgattaaaggtctcgtacttaaggaatttactgattaatttgcagggttttgtccagtagagatgcaaataattt

SEQ ID NO: 303755 - DNA, 122 bp, Homo sapiens
gcttcactcctgaagccagggagagcacgaacccaccatgggggaacaaacaactccagacgtgctgccttaagagctgtaacactcgccgtaaaggtttgcaggttcactcctgagccagc

SEQ ID NO: 303756 - DNA, 122 bp, Homo sapiens
ccaggaggggtgccaaggcggcgtcagctcgggctccggcggccgctcggcgcgcggtggcggctggtggcgaggaaaaaatgggccattgcccgagcgatcagtccatataaggctgggct

SEQ ID NO: 303757 - DNA, 122 bp, Homo sapiens
gcgtctttgcgcctgcgcctcctgggctggggtgagccattggctgtcgagctcagggcacgtgctagggggcggggccttgaccggaaagggtggggcaacggcgagaaaggccgcgtcga

SEQ ID NO: 303758 - DNA, 122 bp, Homo sapiens
aaggtagctggggtaccaggaagagcagggcctggtccgactgggatcccttgggttttccgttccttcccggttgggtcgtgggaaagcggcacgtgggtgtggccggcgccgcctttgcc

SEQ ID NO: 303759 - DNA, 122 bp, Homo sapiens
catgcagacagttggagaagggtgccattgccctctagtggccagaagtgcaatcttccgcgaaggagtccatttccagagttgtacaaggctctcaatgtcagggtaaaattatagcagaa

SEQ ID NO: 303760 - DNA, 122 bp, Homo sapiens
ggtcacgtgttgctgcttgagccctttgaaagcatttttactgtttgccggaacagcgcacggctcagttgtcgtctgggatttgagagaagactcaaggctgcattactctgtgacgctga

SEQ ID NO: 303761 - DNA, 122 bp, Homo sapiens
tgacgtgtcaaagttggttacagggatcatcctggccgtgtttggctccgtgagggacgacgggaagtttctggtggaagaccactgctttgctgacctcacaccaacaagcccgcacccct

SEQ ID NO: 303762 - DNA, 122 bp, Homo sapiens
gaatttttatcctttccatgtctgcctatgtgtggctcagggcatacccgcctgttcctccgtgtgtggtgtgtccccactcctccaccccagggtgcaggagcagacgctgcctgggtaca

SEQ ID NO: 303763 - DNA, 122 bp, Homo sapiens
tcccaccggggatgagttatccagaagggccacttccttgggaatcggacccaagaaggacgcctgtcctgaagcccagcaggggtggtggtggtccaggcaggaaagggttcattcagcac

SEQ ID NO: 303764 - DNA, 122 bp, Homo sapiens
ggagacacccaagttcacttttaaatcatttctccgcgtgccagacgcggcttttgaagtcgtctgcaccaacccacagggaagccagcgccctggccccaacgagcggccccactgtgtgc

SEQ ID NO: 303765 - DNA, 122 bp, Homo sapiens
gccctgatgcagtgcacaaccttagctgctgtgcgcgatggggggcgactcctcggcctgcgagcagagaggaaagttcagattcttctaacatagagaaccagccttccaggaggacgaga

SEQ ID NO: 303766 - DNA, 122 bp, Homo sapiens
ggggtggagcgcgatgtggaatctgactcgcttgaaacagcaccgcggtggattcggatccgggtgagtagggaaatgcgcctcagcccctcccacgggccgcccacggattccaggatccg

SEQ ID NO: 303767 - DNA, 122 bp, Homo sapiens
tgtgcgctgccatcccgctccccgttgtgcgcgcagcctgctttggggagtgcccggccccgagatccccctggtggtcttgcagttgccagggctaaattctgagagcttcacagcgtttc

SEQ ID NO: 303768 - DNA, 122 bp, Homo sapiens
tcatgctgggaggggccctacctgcttgtcctgagaacaggagcgaggccaggaggcagccgagcaggaccagcgccctcatggtgactgccaagagagcccagctgctcctcgcctctatt

SEQ ID NO: 303769 - DNA, 122 bp, Homo sapiens
cccacagtgtagctagcgcggggttctgaacctcgcgaggggaggggtccgggaagcccacggggaggatctgggtgtagacataaagcagctgtctgacgcccagtagcttgttaaaactt

SEQ ID NO: 303770 - DNA, 122 bp, Homo sapiens
tcccattcatcagtcagcgccgcaggctgggccaggtaaggtttcagtggctgctgatggcggctgcccggcaagggttctggccaagtccgccccctcgttcctttctaactgggctttgg

SEQ ID NO: 303771 - DNA, 122 bp, Homo sapiens
tagcttgggtcctgtgtgaattttttgccactttggaaacggcccgattaaaggaaagcccgaggagcagtccgttcacactgggttttccctgcacctcgactttgaaaacgtggactaaa

SEQ ID NO: 303772 - DNA, 122 bp, Homo sapiens
acctctcgctgcctgaaaggcagctctcagagccctttcctgtccttctaattacagcggcgggggcagtgcgcgcttcgggacgcaattggaaacgtgagtatctgtgtcccccgcgctgc

SEQ ID NO: 303773 - DNA, 122 bp, Homo sapiens
cctcgccttccgcggccctactccctccaggtgaccccacccccgcagctcctcctcctccggacaacctgcagccccgcccctgcaggtgaacggcggcccagtccctgcaggtgacccgc

SEQ ID NO: 303774 - DNA, 122 bp, Homo sapiens
tgtcttgagtcattcataaatactgactgaaccacgtactatatgccaacttagcttgtccgctcaccaccgcacgtaactcgatttattgacactagcccttacggagagtctgcaaagcg

SEQ ID NO: 303775 - DNA, 122 bp, Homo sapiens
acaatcttgtcattctgtgtggaaggccttcttagccagcgtggagtgcagggccactggcgctttgcctggcgtggccatggcggggcccagttggtcccgactgccggcccattcctacc

SEQ ID NO: 303776 - DNA, 122 bp, Homo sapiens
tttgctctttgcggcttttcatttgcgtttgtttccacagcgatttccaatagatttctgcgtggccttgacacagacagctagtgtgaatccccgcccacagaggggcggcacgttggttg

SEQ ID NO: 303777 - DNA, 122 bp, Homo sapiens
agtttaccttctgcttaacaaaattgtttccactccccgtgtggtataaagacagagccccgtcagtccacacttagtcgtgtgactggtttgcagccctctgctcatttcctggcttgcct

SEQ ID NO: 303778 - DNA, 122 bp, Homo sapiens
gaccacaatacctgcaggacaggagctccgcacttctgcaaagccagagtggagacaacacgcaagtgtgaggcccgcagagaggggtgttaacccgagacaaaaatgatcaatagttttac

SEQ ID NO: 303779 - DNA, 122 bp, Homo sapiens
gccatcttgggcaccggccaggtgctggactcagggggagcttccaggctctgcctctgccggttactgcctctaccatacagatggggaaactgaagctcagggaggtcaggtgcccagcc

SEQ ID NO: 303780 - DNA, 122 bp, Homo sapiens
tgtttccacgcgtgcatttcctcttctgcccctctcctaagccaggatgacccttctgaccgcgtggaactatcacagaaactgcttccatttataccagatgacttgggattcagtcttct

SEQ ID NO: 303781 - DNA, 122 bp, Homo sapiens
aaaccggagattgggtggaggagagcttgggccgactcgtcaaggagcgtctgtgtgggccgtgcagacaggcttgctgttgaccaatggatagatttaaacattaaaatgccttctcagtg

SEQ ID NO: 303782 - DNA, 122 bp, Homo sapiens
gcacagagcctggcgggcggagctaagggcctccaccagcatccgagcaggatcaagggccggaaataaaggctgttgtaaagagaaatggccgcctctgtgtctgtgcttgcccctcctcc

SEQ ID NO: 303783 - DNA, 122 bp, Homo sapiens
agggtgcagtctggtgcctggcaggtagtaggtgctcactgcacacagctcctcccagctcggtcggggggtcctcatcctaaccccgcgggttttctttgccccgattctgcagacgagta

SEQ ID NO: 303784 - DNA, 122 bp, Homo sapiens
ctagaagtttgtgctaaaagaatgttcaagtcttactctaaaaactcagtgatatattttcgactacactttgaccacatccaggggttggtgtagaagttcagtgttggagccatgacatg

SEQ ID NO: 303785 - DNA, 122 bp, Homo sapiens
ccgctgagcctttcatttcggggatggggagcggcaggcccgggctggttccacggtcctcgccaccatctcccctggagatgtggtttaggggcggaggtggggcggggcggggcggggtg

SEQ ID NO: 303786 - DNA, 122 bp, Homo sapiens
agacgtccagggcctcctggtccgatatgtccatcaggtccatctgctccagcatgtccacgttcacttccatggatgacatgctgcctatgggctctgcggatagatcaacacgagaaagg

SEQ ID NO: 303787 - DNA, 122 bp, Homo sapiens
tgcctgtctgcacccatctcccaggtcccaggttactggccctgtttgggcagctctgggcgcagcctgttcaccacaggcctggtacctgccttctccctgggcctcagcactcactcaca

SEQ ID NO: 303788 - DNA, 122 bp, Homo sapiens
cttctcggcttttaaaagtctaccctgccattttttggagggtggatcaaccccttgctgcgatccacgtggaccctgcttcctggggtcggtctccacagcctcctaaagaattcctaaag

SEQ ID NO: 303789 - DNA, 122 bp, Homo sapiens
cctttgcccttttagcttcagggaagtctttggtgagcccatctctcattaccaaggtaacgaagcgcagactccgggcccgggtgggcggcatcaccaccaggttcacgccgagaaggagc

SEQ ID NO: 303790 - DNA, 122 bp, Homo sapiens
gagaatacaaatctatgaggaataatgagttgattaatgtcgactttcccaatccacattcgcctaaaagaaataagggaaaatatctgttaaactcacccactttactcaaccttaaatat

SEQ ID NO: 303791 - DNA, 122 bp, Homo sapiens
ccaggcaggacacaggtaacgcgtgtgtcttgaactgttagcctgggttcactgcaacgccggatttgacacgcgcccctgtctgtctgtaacaacaggcctgggtcttccgttggctgctg

SEQ ID NO: 303792 - DNA, 122 bp, Homo sapiens
tcgggacctgcagcccgccattctgagcctcccacaccccccgtgggctcctgtgcggcccgagcctccccgatgagcaccgccgcctgctccacggtgcccagtcccattgaccacccaag

SEQ ID NO: 303793 - DNA, 122 bp, Homo sapiens
ttaacttgccaagaccacacaatggatccatggcagagctgattccagaccagctaccctcgtgaggatgaggattcaaatgatgtacttttacttctaaaggcagtagaacaggataaaat

SEQ ID NO: 303794 - DNA, 122 bp, Homo sapiens
ttctcttaactgagcattctctactgggaacccagcctcaaagggacatttctgttcccccgtcctagacagagatggtttgaggcagggggtgtgcctgatccactcaagacttgggccag

SEQ ID NO: 303795 - DNA, 122 bp, Homo sapiens
tccagtctcctcctctggtttcttctactcactctgccaggcatcagaaactcaattagccgaatgatgcagttagcaaaggagaacggggagggaaagagagaagggattggaataagaag

SEQ ID NO: 303796 - DNA, 122 bp, Homo sapiens
ataacagtggctcagactgtaatccagtttaaagtgggaatatatggcatataccagcctcgaacacttttttttttaaagaaagaacaaacacaatataagagccatatttcaagtaacaa

SEQ ID NO: 303797 - DNA, 122 bp, Homo sapiens
tttagacctgttttaaatggtttctccttggttccatctcccgtggcatcgcttccctctcggtcagagacgtacagctctgctgtttgacaaaatgagggtaagttatggtctggccatta

SEQ ID NO: 303798 - DNA, 122 bp, Homo sapiens
ggcgcgcgctccagaaagccgcggttgcccacgggccacagctcctagagcagagatatccgggccgggaacgcgcacgtcggcggccacgcgcaccgagagccgcacagcgcgcgcgcgta

SEQ ID NO: 303799 - DNA, 122 bp, Homo sapiens
tcggactgtgtgctcttccgcatgcggttgagggcagcgcagaagttgggcaccgtagcccgcccgccggccggcccagccctgccatgcccgcctcctcaggggagtacgcccgcgcatcg

SEQ ID NO: 303800 - DNA, 122 bp, Homo sapiens
tatttaggacacataggagccaagtcagatagaagtcatagaagtgttgcagtcaagaggcgtttgattataaggtgcatcattactttgtagactactaagaaagaaaatgcagccaatta

SEQ ID NO: 303801 - DNA, 122 bp, Homo sapiens
ggggagagtgagggctctggaggccctgccctaggccaccgttggagcagggggtaggcccggccaagaggctcacctgagatccagttgccggggttggctgggatgccctcagccaagca

SEQ ID NO: 303802 - DNA, 122 bp, Homo sapiens
ctcgcagagcacaggcagaatcgttccttccttgctgcatttcctccttagactaatagacgttttggaaagttcggctagtgttcgtgtgtttgtcgtagcacccagagcctccaccaaac

SEQ ID NO: 303803 - DNA, 122 bp, Homo sapiens
aggtgaagcagaaaagtaaagccatacctaagtcttttccaaagccagattgtttaactccgccaaatggggccgccacatctgtcttgttgtatgtgttaataaaaacagttcctgcttcc

SEQ ID NO: 303804 - DNA, 122 bp, Homo sapiens
tttggtcgctcgctcctctcctacttggaaaactgtggtaattctagagctaatgcatgccgaagggtgctgacccccttcgcggggaagatgcctgcatttatcagatcaaaaccaacccg

SEQ ID NO: 303805 - DNA, 122 bp, Homo sapiens
gcctctgctctgtgtggccatcctgagctggggttgcagccagatcccaggccccagccccgtccccacctggaagctggatctggcccagcactccattggcgacctgagtcccagctcaa

SEQ ID NO: 303806 - DNA, 122 bp, Homo sapiens
tggagtgcataatttcctctctccatctttgaggaagaccattgataagcctgattctatcgttccacattctgtaccaatgacagctcccaagacatcccatctaaaaaaaaagggggatt

SEQ ID NO: 303807 - DNA, 122 bp, Homo sapiens
attgaggtgagcacaccaggaaagcaaacctgctccagtgagctcaaacctttccagtcgcgtcagcaagctcaaacttttccagtctgtcatctagacctcttcttgacgaggcatgctgg

SEQ ID NO: 303808 - DNA, 122 bp, Homo sapiens
gggacccaggcgtcccggccccagcacccgcgctcctcccagcctctcgaggttctcgggcgcccgggcccccaaccaggcgggccccaaacccggcctcagtgtcttttccgggaacccaa

SEQ ID NO: 303809 - DNA, 122 bp, Homo sapiens
aactgggcttcccgggcagcggcgagggggcggggatgtggcggccggaggtcaccggggcgtcactgcgcccgccctggccctcccccggcccgccccctgccccgccccctgccccggcc

SEQ ID NO: 303810 - DNA, 122 bp, Homo sapiens
ctggctgaatgtgacttgaccccatttcaaaaaaagtttgacatagtgcttcaacatttccgcattcctccgcgactacaaaggctgcagccgcctccttctgctttctgtctctgctctct

SEQ ID NO: 303811 - DNA, 122 bp, Homo sapiens
caccagtgtctgctgataccgaatttggcctagacacagtggtttgaaggaaccagttggcgacagggtttggaaggaataggtccatgtctaagatgtagcatctggcctccaagttcctg

SEQ ID NO: 303812 - DNA, 122 bp, Homo sapiens
tatcataatggaagcaacttaagttcagcaagtataagacttcagccccaatagctgctccggaaaatcttcaccacctcaaaacatgggaaataaaagtatatcattataggccccccgct

SEQ ID NO: 303813 - DNA, 122 bp, Homo sapiens
tatgatgtatcaatgtaggttcatcagttgtaacaaatgtaccactctggcggaggatgtcgataatgtagaaggctatgcatgtgggaagcatatgggaagtttctgtaccttcatctcaa

SEQ ID NO: 303814 - DNA, 122 bp, Homo sapiens
cagcgaccgggcgagagcggggcgggagccgggcccggcgcccccggagccagcggcgcgcggctgacaaggctggaccctcgcgcgcctggagaccgtaccaaagcagcagggcttcgagt

SEQ ID NO: 303815 - DNA, 122 bp, Homo sapiens
gagtagatgggctccagcgcctccggctggagcttcaacactgggagtgggcccttgacccgatgggaccccaggctcagccgtaccagggccggtgcctcctgcaccatcagtgctgccac

SEQ ID NO: 303816 - DNA, 122 bp, Homo sapiens
atgatataataatggcacccaactttcaaggttgttgtgatgattaaatgagttagttcacggaaagcactcaccccataactggcaagtactaatgtgcttgataaatggaagccattact

SEQ ID NO: 303817 - DNA, 122 bp, Homo sapiens
accagatgaggctgcaggagcgagatctccaggccgtgggagtcgcaggctcctggtgcccgactgcctccagagacaacagtctgcggagagtctgcggcaacacatggtcaactgcggca

SEQ ID NO: 303818 - DNA, 122 bp, Homo sapiens
ctgacttcaactctgttcccctggaactaatgggacgacgtcagcgacactgctaagcaacgctgcttatgggaaaaatgacccgactggccagttgcaaacatctgatgcatacgccgtac

SEQ ID NO: 303819 - DNA, 122 bp, Homo sapiens
agaaaagggaaaaagccccacttttgcttcgtcactagaaaccgggtcatctgagtcagccgagccaagtgacgttaggccgacccgggccccgggctagcagagcggaggcgctgccacga

SEQ ID NO: 303820 - DNA, 122 bp, Homo sapiens
agggcaggagtgacagatcagggctgaatctggcccacaggctttttttagtttcacccacgatatgttttaaatgttggaatcaattgcctactgttacaaaccaggcagtttgctttttt

SEQ ID NO: 303821 - DNA, 122 bp, Homo sapiens
tcatgcagacctgtcacacagtggcggtgaggaaggactcctagctcgctttcccaggcccgtaatcgggggccagccagcagcaacttgctctcccatagccccaaagggtgatggcaggg

SEQ ID NO: 303822 - DNA, 122 bp, Homo sapiens
acctcaggtgatccgcccacctcagcctcccaaagtgctgggattacagacgtgagccaccgtgcccggccctgcctatagtatttttaagaaataaagaaaaagtgtaagaatgtatttag

SEQ ID NO: 303823 - DNA, 122 bp, Homo sapiens
gttgtgatcttagtggtgtgtgacttcggcaggatctccaaggcaagctctgggcctagccggaagcttctgacccagagagtctgggtaggccccagaaaagaccactgaaagaagccact

SEQ ID NO: 303824 - DNA, 122 bp, Homo sapiens
tccgcttccggctccacgtccgcccggaagaagatctgctgcacacttccgtttccggtccgtgcccttggggctccgtgtcctgctgtctttccgtccgctgcctagtctgcatctgagta

SEQ ID NO: 303825 - DNA, 122 bp, Homo sapiens
ttccgcggtagaggtgacctgactctctgaggctcattttgcagttgttgaaattgtccccgcagttttcaatcatggtgagtgtgggccccgggttcctgcccacctctggccctcgcgcc

SEQ ID NO: 303826 - DNA, 122 bp, Homo sapiens
atccataaagcatttacaatattgttcaaaatctatacactatttacattccctgccctccgtgcaggtacggtgaatcgaggaacttggccagagtcctggagaaacagctaagactcaag

SEQ ID NO: 303827 - DNA, 122 bp, Homo sapiens
atgcttgtagtcccagctacttgggaggccgaggtgggagatcacctcaacccgggaggccgaggctgcagtgagccaagatcacactccagcctgggtaacaaagtgagacactgtcaaaa

SEQ ID NO: 303828 - DNA, 122 bp, Homo sapiens
gcgccccgggccaccgccccttaccgatggtggagatgtgcgaggagtggaactcgttgtcggtgaagcggcacagcaggcaggtcttgcccaccccggagtccccgatcagcagcagccgg

SEQ ID NO: 303829 - DNA, 122 bp, Homo sapiens
caatacactaataaaaaggtttagatcctttaggtagtaggcaaagtaatggacctccagcgcttttactccctaatctttggaacctgtgaatatgtcaccttacagggtagaaagaaact

SEQ ID NO: 303830 - DNA, 122 bp, Homo sapiens
tgttcagtggcacggctgagcttttcttccactttagaaagcttctcttcttcctctattcggtaattttcctccactgttaatttcctatagagtttcatttcatcttcttgatagaattc

SEQ ID NO: 303831 - DNA, 122 bp, Homo sapiens
ccaccgagacggcgcacagagtgggggtgcggcacgcacgggcccgggaggagcagctgtcggagctggagcagaggaaggcagccccgcagtgaggtcacagcgccaggagctgaccgcaa

SEQ ID NO: 303832 - DNA, 122 bp, Homo sapiens
gatgggaggactcatgaacacagacctgctgtgcaccctgcagggccacaggtatcgccccgtcaggggagggaggcaaagaagatggaccacagaaaaccaggggctaggaagaagctcag

SEQ ID NO: 303833 - DNA, 122 bp, Homo sapiens
cgcgcggaagctgcgaccggctgggccgagacctcgcgggttggggtcccgtggggcgcgcgccgcccacgcccccacctctcgggtcgacttccgcactcggctcacgtgacgtttcgccg

SEQ ID NO: 303834 - DNA, 122 bp, Homo sapiens
ttctcttctatttcccacatccgtcttataatgtctcaatttaaccaggggaatatggagcgtgaactctttctatttacccttttaacatccaggtagatatttctgagatacatggcaat

SEQ ID NO: 303835 - DNA, 122 bp, Homo sapiens
gcggcggccgcggcgtgcttggggctgctgtgtgcatccggagtcacagggggcgatcaccgcctagctgggaagcggagctcaggactcagccttctttcaggtcccaagtccaaaagccg

SEQ ID NO: 303836 - DNA, 122 bp, Homo sapiens
cgccgcacctcgcttcctgggagaactgggccaccgccaccttggtgctctggaggttctcgatgatgacgttgctgttgattacggagaagttgcccagtgttgtcaggtccccgagttga

SEQ ID NO: 303837 - DNA, 122 bp, Homo sapiens
tgctcgggcgaatgttgtttttctccgcagccatgtgtcgaagggcgattaacattcgctcgacaaaaccctgtcccgggccatttgggagttgcacgcgttcacacccggggctcagcccg

SEQ ID NO: 303838 - DNA, 122 bp, Homo sapiens
ttattgcaaggctgtggtcttagtgaattgattgtgtctgtgcagcaagctggaagaacccgttgggcggttacaaaatgagtaaatctcaaagaggtggcatagacttcaggtttaactac

SEQ ID NO: 303839 - DNA, 122 bp, Homo sapiens
atctgtccctggctgggtcttctgttgagcccccctgtgccagccctgacagtgtcccggcgtccacaggcgggctctgtggtgctttgtagctacctctgtactaattggaaaaaaccatt

SEQ ID NO: 303840 - DNA, 122 bp, Homo sapiens
agggattcctggctgcttcttccaggcctgtctccctttgtctttaagccctggaggagtcgaccctactttggcaaaaaacatttagcatgtcccctcctctctctgagtactgctaccta

SEQ ID NO: 303841 - DNA, 122 bp, Homo sapiens
aatctggactctggtaagcagaaggcacccaacatttccctttaccttatggggggctctcggggaggtgtctgtgaagtgggtaacaggctccagaccccgatcttttgtccaaagaacag

SEQ ID NO: 303842 - DNA, 122 bp, Homo sapiens
cagaaggtctctaagccccctagactggcttggggggtggcatctcagcctgcccagcagcgtgcgccatgggtgtggcatttgcctcccgcttgctcccctcctctgcctgtgaacgccgt

SEQ ID NO: 303843 - DNA, 122 bp, Homo sapiens
tagagggaaaggggtttataaaccataaaactagagcacatggctgggcgcagtggctcacgcctgtaatcccagtattttgggagctgacgcgggcagatcacttgaggccaggagtttga

SEQ ID NO: 303844 - DNA, 122 bp, Homo sapiens
tggacacagacatgagagctataaacaatgtgatactatgtcctgttaactcacagagaacggaagggctggaacgggacccagccagcagggtttgtgaccgcctctgctgtgacgtcaca

SEQ ID NO: 303845 - DNA, 122 bp, Homo sapiens
ccctgttgcgtccccggagttagcctgcctcgcccctgtcgagctacaataagagcctggcgatctgcgagccttcacttcatgagctgcagggcgggaggtcccctgtgggaggaggttct

SEQ ID NO: 303846 - DNA, 122 bp, Homo sapiens
cagagggggaaaccgaggcctgggcgggagggaggtgcagtgatgtccccagcagtgggccggagcatctgggtgtcccacaggcctgctccccgctggcccatgggttcccggtgggctgt

SEQ ID NO: 303847 - DNA, 122 bp, Homo sapiens
ggcaaaatgtcaggcatggaaagaacccaactcgccatgctgctttgacagctggagctgcgatcccttcactaggagtgatcattttttctaacttcagtgagaaactgggccacagaatg

SEQ ID NO: 303848 - DNA, 122 bp, Homo sapiens
atattgtacagagtggggcaaaacacgcccccatctgctgccttttctattgccctgcaacgtcccatctatacgaggtgttggagaaggtgaagaaccctcccattcacgcccgcctacca

SEQ ID NO: 303849 - DNA, 122 bp, Homo sapiens
ggaagaggcccgcgccctgggccgggcagtcaggatgctgcagcgcctagaagagcaatgcgtcgacccccggctgtccgtgagtcccccttcgctgcgggacctgctgccccgcacagcgc

SEQ ID NO: 303850 - DNA, 122 bp, Homo sapiens
tccgcggggcgtatggctgtgcgctacctcctgcggaccccaggctgggcgagggggcagcgatggccacatggcgcgctcggggagatggcagctgcgctttgtttccagcagtgataggt

SEQ ID NO: 303851 - DNA, 122 bp, Homo sapiens
gaagagattcagagaggctggaaattgggggcaggagggggatggttaaggcggtaaaggcggttttttaaaagacaggaaaaaagggttaagcaaggaaactccataaggacctcataggc

SEQ ID NO: 303852 - DNA, 122 bp, Homo sapiens
ctcgcctgtccattcgcgggaggcggggctgaagggggccggtccaggccagcgaccaatcggaagcggtggcaacgtgggcggctgcgtgacagacaggcggcaggacgctgtcgccgcag

SEQ ID NO: 303853 - DNA, 122 bp, Homo sapiens
gtgcatagccttttatttataacttggtaagtgccagcgaactcgcctcctttacacccccgagtgccagccccgcgctctgcactgcgctttattcgctcgagcctattcagggactgtca

SEQ ID NO: 303854 - DNA, 122 bp, Homo sapiens
cgcataccttgcccacagccgagcagctgggaggctatttataaaggcgggtgagatcagcggccggccaaggctataaattcgcaggccgcggccgggccccacaggagcagccgcccggg

SEQ ID NO: 303855 - DNA, 122 bp, Homo sapiens
ctacttccgggaacgaaggggcggagacccataatccggaagtgacctcgaaaccttttccggtcttactcacgttgcggccttcctcgcgtcacagccgggatggtgagtttcagagttag

SEQ ID NO: 303856 - DNA, 122 bp, Homo sapiens
aattacagggcttcaagtttctggagctctgtttgtctctgttcttagatgtggtggaggcgtgcccacctactgttagatgtgttaatagcaatcaatgagctatttttcataaaggcaat

SEQ ID NO: 303857 - DNA, 122 bp, Homo sapiens
gggaggggctggggtctgaactgtggttgttgctgctataggagtcgagactgagaccaccggtcagggaatgggagccagcccaggggctcggcgtgcaccggccatggcgggggctgtgc

SEQ ID NO: 303858 - DNA, 122 bp, Homo sapiens
tttatgggagttgggactaagtacaacgggaaacacatgaagtggcattgccagcactcacgcctggcctcggcctgcccaccgagaagggccttcctgtggaaacctggtggcctgcccgc

SEQ ID NO: 303859 - DNA, 122 bp, Homo sapiens
ccctgcgctcagggccgcttccgtcccctcccgagtccgggaagcagctgcggcgaggggcggggccgaggccccaagtttgtagcgctcagccttgctgtgtgttgttttctgggtagctg

SEQ ID NO: 303860 - DNA, 122 bp, Homo sapiens
ttagcatacgctttctaaatgtacttgtaatgttgcaatttagacagttccgtttctgaccgatatcactggcaatgcaagttgatgctctggatctgtgagacctacttctttgagggacc

SEQ ID NO: 303861 - DNA, 122 bp, Homo sapiens
gctgtggcggtcccttggtggggaagctgttgctgttgctagacgacgggaactagctctcgtcacttcctcagcccgccgtctgcccactcctctagccggaacctgggggcccggagccg

SEQ ID NO: 303862 - DNA, 122 bp, Homo sapiens
agaactatctgtatctaccatctctccgttaattcctacacctcaattctcaatctactgcgttctggctttctgcctccccagtccaccaaaactactcttaccaatagacaggatgacta

SEQ ID NO: 303863 - DNA, 122 bp, Homo sapiens
caaagacaacaccttatcctattacaccaggggccaactcttcctccaacctccccatagcgattgctggcctgtcatttgttgccctcgcccatcttggatttttcccttccccatcatac

SEQ ID NO: 303864 - DNA, 122 bp, Homo sapiens
ggagcctgagccgggctggggtgttgggccctggagggtgcacagactcttctctcggaccggacccacaggcccaagtacgccctcctggatgaaggcaccagtgccgtgagcatcgacgt

SEQ ID NO: 303865 - DNA, 122 bp, Homo sapiens
ttgagctcagttttcatgataatagactccatgcaacaccacttagggcacttcctacagcggcagggaggtgtgagcctgtgctaggttataggctggaatgaaggacttacagaaaaagt

SEQ ID NO: 303866 - DNA, 122 bp, Homo sapiens
ttgaggcgatcacggggagtcgttgaatggctggagagagctgtgtggctgggctgcccccgacctggcctaggctggaggctgagcccgcgggaaggtccggcggtgccagccgtcccagg

SEQ ID NO: 303867 - DNA, 122 bp, Homo sapiens
gggtcgggctgctggacaggggtgagaagaggggccgcagcgtccccgagaaggggatctcgggaaagatgaatagcagtgacccatcggtggcactgtagaaagagagatgtccagcctcg

SEQ ID NO: 303868 - DNA, 122 bp, Homo sapiens
caaattcgaataaagattcaaactgttctcttgaaactgcattccttcctggaacccttacggaccagtctggttaccgtgccccattgtgtcttgggctcaagtcagccttcatagtgacc

SEQ ID NO: 303869 - DNA, 122 bp, Homo sapiens
actttgcgtatggttctttaaggaaaatttttgaagtgtttttttcagttgagattgctccgttaacagcacatgttatcagctgctttccgagaggaagaattcatcccacattggctttt

SEQ ID NO: 303870 - DNA, 122 bp, Homo sapiens
accctgatgtcagaacctgaaatattgcagagtgtaaaaatcctcaacagcccactccctcggagctgggggtccacacgcacaggggctgcagtgggaagggggcgaggtcttcctcatag

SEQ ID NO: 303871 - DNA, 122 bp, Homo sapiens
ttactgtctgcttcctcagtggttctagaggtaattgcatcctgctgtgtacagttaggtcgtggaggagacaggcaccttctctcgtctttctggaaggtaaccagaggtctttccccttt

SEQ ID NO: 303872 - DNA, 122 bp, Homo sapiens
aggctggagagagaacaaatgttgccgcaggagtgcagtggctgtccccaggcgtgaaggcgattctggggagacagtagcccagacgagattttccagggagaggaagctgtgcctgaggc

SEQ ID NO: 303873 - DNA, 122 bp, Homo sapiens
ggagaaggggggagccccaggtgcacgcctggctgggtgagtgcggcgggcaggagccctcgcttctgggcgggtctaaggaggagaagtggctcgagttcagctccaaattgggacggagg

SEQ ID NO: 303874 - DNA, 122 bp, Homo sapiens
ggtgtattgtttttccagttgagaaggtggacgcaggtgaagtgctggtacccaaaaacacgcctctccaccacgtgaccatcctcgtctatcccagtataacgctgcactctcaggggcat

SEQ ID NO: 303875 - DNA, 122 bp, Homo sapiens
gcgagagggtcacactcccgtaggctccggagctgcagccctacccaccaggcgtccccgcggcctctagaatattgtagaatcttcccaagagcccccgcgggaaggaggcccgccccctc

SEQ ID NO: 303876 - DNA, 122 bp, Homo sapiens
atctccacctactctcacactttagttgggtaagaagcccggcttgctggcgtgtggagccgggtatggaatgtgagtgcctagtgggccgcttctggtaagcagacctggctctgcgggat

SEQ ID NO: 303877 - DNA, 122 bp, Homo sapiens
gcaggttcgagctcgggacttagcggggacactttaggattcaggggcggccaggagccacgtagaagggaggtggggaactgagtcctaggctgcccaaaggaccccaagacggtgcggcc

SEQ ID NO: 303878 - DNA, 122 bp, Homo sapiens
ttttgcttaattcgggacttccagcgggcattagcacttttcccttacagtctatttaaacgccctaggaaaacaaataccatcgccttggcaggcggtccccgcacagacagacctagctc

SEQ ID NO: 303879 - DNA, 122 bp, Homo sapiens
caggagcccctagctgcaggaccaggcacgtgcgattccacgtgagcctcccggccggagcgcagatgggaagtgcgcatgcgcctaccgcctggaaagtaggtcagactcctcctctcacg

SEQ ID NO: 303880 - DNA, 122 bp, Homo sapiens
ggacggggggctcagcgcacgggggcatcttccaaatggccacataaatgagtgcaattccgggtccacccgaaggtgcggggggaggttcctctcccggttccacctcacacgggatgctg

SEQ ID NO: 303881 - DNA, 122 bp, Homo sapiens
ctccaaagccccgtgaggccgtcgcatcaaatcctcaatagaggctggatcctggaagtccggcctcggggggcgttgccaggaaggctagagacctggaagtttgtccccagcccctcctc

SEQ ID NO: 303882 - DNA, 122 bp, Homo sapiens
aaagataataggcccaagcacccttcctcttctcctgacagctctgttgtaactgagttccgaatgccaggcattgtccatgccatgaaatctagacatcaggcagtcagggatcaagggat

SEQ ID NO: 303883 - DNA, 122 bp, Homo sapiens
atcaaagttttaaaattactgaaaaactcccagtaggttgaacataagacatccccttggcgcggagaacaaagtctacgcttttcccccgggcctcaccgtagcggcccagctgccagctg

SEQ ID NO: 303884 - DNA, 122 bp, Homo sapiens
gagcacgtggtgcctgccctcttgagaaaagccgcttaggctcccaggcaccaattaaaccgataggtaggctctttctccacccccacccctttgcccacctgggagcacccgggtcagct

SEQ ID NO: 303885 - DNA, 122 bp, Homo sapiens
agtaaccggaaagaaaatacagaatgaatgtaatccatcatttgtggataccctaaccctcgccttatagtaactctagttactagagcaactaggaagctctcctgaaatcgtagttcatt

SEQ ID NO: 303886 - DNA, 122 bp, Homo sapiens
tatgctgtttatgtttcttctatttgagaagctcctgactcaaccactattgaaaaattccgaagtcctataaagatacaattctcttgactgagaataacattctgaaatattattattag

SEQ ID NO: 303887 - DNA, 122 bp, Homo sapiens
ctcccatcttccacgggacagctggccggtccttccagctctcaggatggtcccatgtggcgaggcaacagcaggggccactgttcctaagacgaccggatgggggtggggccctcctgttc

SEQ ID NO: 303888 - DNA, 122 bp, Homo sapiens
tgcggctggcctggctgccttttgcatgactgctctgttacattcttccccttcaggaaccgagggttgttttcccatctgtaacctcattaggatgtccacaccagcgggctccacacgca

SEQ ID NO: 303889 - DNA, 122 bp, Homo sapiens
caggatctgcagccggctgttccctgggagttcctctgggttctgggccaccaaggcaggcgggacgatgttcactgcagcggcggcagcctggacgatggtgttcgcctggggcacctgat

SEQ ID NO: 303890 - DNA, 122 bp, Homo sapiens
cagtccccatcccgacccctctccagccgggttcatccgcctgctgcctcccgtcctccacgtttcccccaccagccaccaacaagcggcaaccacgctgccttctgcaaaagaggaagaag

SEQ ID NO: 303891 - DNA, 122 bp, Homo sapiens
gaagatgtgatgccaggttctcaacagtcaacttagaaacacactcttggaatagaaacacgttgggtaccatttgtacgtgtattatatatgtatttccttttcatcttttacctattctc

SEQ ID NO: 303892 - DNA, 122 bp, Homo sapiens
acataattttttttctatttaaaagaagacaggccaggcatggtggcttatgcctgtaatcgcagcactttaggagaccaaggctgggggactgcttgaatccaagggttcaagaccagctg

SEQ ID NO: 303893 - DNA, 122 bp, Homo sapiens
ctcgccgcccaccccgcgcgcccggccgccgcacttccagactccgcggactccggcgctcggccgccaccctccgcctcaggccctcaaattgacacataagggagagcggcggcccgcag

SEQ ID NO: 303894 - DNA, 122 bp, Homo sapiens
agaacttggaccagaaccctggttttagccacagaaatcatgttcttagcagcattctggcggtaacaccatcagcctcttcttcaacatcaaatgtttaatgtctactgggtaaaagggca

SEQ ID NO: 303895 - DNA, 122 bp, Homo sapiens
ttggtcggccctgctcgagaatccaacctggttccattttcaattttggaagcgttgttgcggattaaaaaccggtcaaatgatgggaaagagtcagagagaacagctgctctgtccccgcc

SEQ ID NO: 303896 - DNA, 122 bp, Homo sapiens
agtttgcatttctaacaagttccagatgatgcgaatgctgttggaccacactttaagaaccgctgctctagagggtaactcggacctatcccagcgtcccagggaaacgaaatctgcagtga

SEQ ID NO: 303897 - DNA, 122 bp, Homo sapiens
caatttcaggttcagtctctatctgcatttgtgtgcatgaatggactaataattgcagtgcgttgaacgatttctgcatattccaacacctagaaagtagcttcctggattagggaacggtt

SEQ ID NO: 303898 - DNA, 122 bp, Homo sapiens
cattggagctgcccatcaggagtgcaactcgggagcggattggccgcgtgaggcggggcacggcgcgacgaaaaaaggggcccaaggggtggggctgacgctgcagctggcgcagctcagga

SEQ ID NO: 303899 - DNA, 122 bp, Homo sapiens
aaatgcaaggcactgtgcgtatccccaccgaaacgcagggcctgccctgttagcctaggtcgtatcccaccgaaggcagggcttgccccgttagcctaggattagctatatatcactgcatc

SEQ ID NO: 303900 - DNA, 122 bp, Homo sapiens
ccgcccccacgctggttcccgcgctttcaagagcctcagagccccgagacaagggggtgtcggctctacccacctggcccagcccgaaagaacagggccaacattttgaaaccaaaccaata

SEQ ID NO: 303901 - DNA, 122 bp, Homo sapiens
tttgttttcatttgtgtttgttcttaggccctagaaactctgacaggtgccttattccagcgacccccacttattgctgcagtaaagaggcagctccgagtgaggaccatctacgagagcaa

SEQ ID NO: 303902 - DNA, 122 bp, Homo sapiens
gccttgctctgggtgcaagaatggccacagtgggggcagctggcggtgtggaacaggggccgccctgggaatgtggaaggccagctggtgccactccagagcccacccctttgccccatggg

SEQ ID NO: 303903 - DNA, 122 bp, Homo sapiens
gccataaatgaaagtttcttgtttctagagagcaagttagagcttttatattatctgccgcggagctcggtgaatttaaatgtatctcttgggctttggtaatattcgtgttaatgtcaaaa

SEQ ID NO: 303904 - DNA, 122 bp, Homo sapiens
aagggggacagacggagcacttcacttccatcccgagagtgtctcccagacagcgcaccccgcagcggccactggctgacccgtggccttgagaacacaggaaagccccctcttagattcac

SEQ ID NO: 303905 - DNA, 122 bp, Homo sapiens
gagagagagagcaagtgggagagcggagagcggacgcgcgctgaggagagcgagtgagagcgcggcgctacggggtcaggactcaaaccacccgctccagcccccatgcactgatttgcatg

SEQ ID NO: 303906 - DNA, 122 bp, Homo sapiens
taaaatgattgtgataacaacagcagggaaatgtgatagtcaaggaagctggtttgaatgcgatcttgtggaatgaagtgggtgttagggaaatccaggctcattcacttcagtcaggcaca

SEQ ID NO: 303907 - DNA, 122 bp, Homo sapiens
gccagccaatcgtgggcagccggggtctaggcaccacggtggctggcggcctgcgggcggcgctgtggcccgtcgggcggctccacagagccgccctagccttccgccttccccaagccaac

SEQ ID NO: 303908 - DNA, 122 bp, Homo sapiens
atgtgaccgcatggcagggctgtgcccgggtaggattcgtgaccccgtcagcagcaacaccggccacatccattgttgccaattcgcttctctgactctgggcccgaacaagcggtgtccag

SEQ ID NO: 303909 - DNA, 122 bp, Homo sapiens
gggaggctgaggcaggagaatagcttgaacccggaggcggaggttgcagtgagccgagatcgtgccactgcactccaccctggcgacagagcgaaactcgtttcaaaaaaaaaaaaaaaaga

SEQ ID NO: 303910 - DNA, 122 bp, Homo sapiens
gactcccgcgaacgccgtcgtcaggattctctctagaaatggacgacagaaactcagccacgccacgcaccaccgcttcgccagcacgagggaacgtacaacatccctccccaggtactcgt

SEQ ID NO: 303911 - DNA, 122 bp, Homo sapiens
ttttacactttttatatcactatattacatggagtaaagtgtggagttttaggtcaagtacgtagataaatgctggcttacaaacagaaaatacacaaagcatttatataacaaagtagata

SEQ ID NO: 303912 - DNA, 122 bp, Homo sapiens
cctctacccccagggcaccaggggaggatctaccagggggttctggtggaagggcccacccgggaagcggcgcgcggggaggactcgggggcgccgagaggaactgtccgggaaggggcgcg

SEQ ID NO: 303913 - DNA, 122 bp, Homo sapiens
gaacacctcgaacacctacaagtaagtaccccttttccctttcacattttgaataacagacgtttagttgtaagctatagattgtgggtatttaatcaataacacactagaaatcaccactg

SEQ ID NO: 303914 - DNA, 122 bp, Homo sapiens
gcgcagctactcagtggtccaggttcctcccacgttttgggtctgtctccccgggagcctcgggtcctccctgggatcccgtatctggctaccgataagaagagggagacagcaggtgtgga

SEQ ID NO: 303915 - DNA, 122 bp, Homo sapiens
tcactttttgtttttattgttgttgtttttgagacagagtctccctctgtcccccagactcgagtgcagcggcatgatctcagcccacagcaacctccgcctcacgggttcaagcaattctc

SEQ ID NO: 303916 - DNA, 122 bp, Homo sapiens
tcgcgcggcggcgggcgggcaggctttggagcggcagttttttcggaaagtgcttttggccgggagtgccgcagaaccccagcgtcacgaggtgaggggtgtcgcggtgtgtcgcctgccgc

SEQ ID NO: 303917 - DNA, 122 bp, Homo sapiens
aaggcgtgtaaagcatgcatgtctggcatgtttgcatttgtggattggcaacccttggtacgtgtgccaaacgcagatggttagtgaggtcctggccatctccacgctcctgtgaccaccac

SEQ ID NO: 303918 - DNA, 122 bp, Homo sapiens
ctcctgtcctgctcttccatcctggctcactcccctcacccactggcctcctggtcgttccgggacacactccctcagggcagctcccacctctgagctgtgacatctgccagtccctggac

SEQ ID NO: 303919 - DNA, 122 bp, Homo sapiens
acaagacacacagggcccctgtgggaccattttctgtttgagagatgtgctcctgagagtcgcccatgccccctcacaaaccccagaaagccagatctggcagagccggcagcactatggaa

SEQ ID NO: 303920 - DNA, 122 bp, Homo sapiens
gaaaaaacagtgccagtcctgcccgcgcgtcgcgggactcagtaattcccggctccgcagcgctcgagcctgttctccgcagcttcataccctctgccccgcgaaagtgacctcaggggccg

SEQ ID NO: 303921 - DNA, 122 bp, Homo sapiens
agggaactccctgaccccttgcgcttcccaggtgaggcaatgcctcgccctgcttcggctcgcgcacgttgcgcacacccactggcctgcgcccacagtctggcactccctagtgagatgaa

SEQ ID NO: 303922 - DNA, 122 bp, Homo sapiens
aggttccccagaaagaggcgtaagaagggcctctccttagcagagcttccacctgccatccgtcttgggttcagtgagcttcaaggctcacaatggaagcactgtcatttccccagaaaagc

SEQ ID NO: 303923 - DNA, 122 bp, Homo sapiens
ttttcccctatcttcccctccttaaggtcttgtacgtgcctaagttctagagcctcctgacgtgagcatggctgagagtgaggaccgctccctgaggatcgttctggtagggaaaactggaa

SEQ ID NO: 303924 - DNA, 122 bp, Homo sapiens
gtgcagcctgaaaatgagatgttaacaacgattggtttctccacaacactctagccctggcgtttctccaaaccgcagctttactggtgctgggaaggagggtatttcctgttcctcaggaa

SEQ ID NO: 303925 - DNA, 122 bp, Homo sapiens
gcctttttgggcttccatttcctcactttgcaaaattgaagtaagaacagccttgtttgccgccttgtagtccctactactcgggagcctgaggcaggggaatcacttgaacccgggaggcg

SEQ ID NO: 303926 - DNA, 122 bp, Homo sapiens
tctaattccttccaccctcccctgtcccaaacactgggcaattagactggagataacagacgcagggaaatctgggtttccatctgtcaaggagtcccctttccccacacccgctctcatgc

SEQ ID NO: 303927 - DNA, 122 bp, Homo sapiens
aatggctcgagaaaagagctttgaattgcccgctttttccaaagctggttcatactccctcgcaaagcagggaatagggtctggggacaaaaggaggcacatgcctgccacatgaggaaaac

SEQ ID NO: 303928 - DNA, 122 bp, Homo sapiens
cccaaagacctgtttaacccttctgcggactcccctgcggatctggcttatataagaccgcggctttgatgtcaacctctcccgggagccaatggcaggggggcggggataaggaaaagggg

SEQ ID NO: 303929 - DNA, 122 bp, Homo sapiens
gccacccggaggtggcctgtcctatttgcgcttgcattctctctcccctcggatgggcatcgctggagagtggaaaacatctgctacatactcagtgtctctgccacttcctgggcccagtg

SEQ ID NO: 303930 - DNA, 122 bp, Homo sapiens
ccctgtcacttcgggctttctgccagattgacacaggggcagccaccgctctgagagacacgtggcttcgggcacccagctaggcaagcccagctcagtcggtgtccggaaaggccgcgttc

SEQ ID NO: 303931 - DNA, 122 bp, Homo sapiens
ccactgcaaggcagttatcccttgtccacctcagacatggcaaagcaagagccgtctggtcgacttcaatcatagcagctgagggccatctggtcaaccatctggtatcttctctgacacgt

SEQ ID NO: 303932 - DNA, 122 bp, Homo sapiens
cgcagggggcggcagtggcggcggcgaagtcccgtgcagtcccagtgctagagcgtgggacggacttgtggggcacccctcggtgttctccagccaggcctgggggcaggaggcccagccac

SEQ ID NO: 303933 - DNA, 122 bp, Homo sapiens
ccccgcctttaaatttaaaatttcccaaacgccgcatctgattgagccgtggcctcgtgacgtcatgggccattccacgtgcggagcagcgcgggggacgcaaggcgggcggcgtgaccact

SEQ ID NO: 303934 - DNA, 122 bp, Homo sapiens
cctgacttccagcacgagtcttgattgcttttttttttctcgagttcgaggcggagcccgcgaaccccatctcctcagagcgccaccccctcagcttcgcccgttgggcagaattttccaaa

SEQ ID NO: 303935 - DNA, 122 bp, Homo sapiens
gccaggggtccctccccaccgccgaggtctagccgccgcccgcccgccttcagggcagcgcggggaccccctggccctcgcccagtgctccggggctcacccgccgctcctcgccgcctccg

SEQ ID NO: 303936 - DNA, 122 bp, Homo sapiens
ctcgcgagaccgaggctgcaaagagagccgccccccattggccaaccggcgagtcccgcgcgccacctcctgggagatgtagttccgggaacagctggcccctgcgactcgcgggtgtgacg

SEQ ID NO: 303937 - DNA, 122 bp, Homo sapiens
ggccgacctgtgtttcatcctgtgctgcgtgcccttccaggccaccatctacaccctggacggctgggtgttcggctcgctgctgtgcaaggcggtgcacttcctcatcttcctcaccatgc

SEQ ID NO: 303938 - DNA, 122 bp, Homo sapiens
caacagtttttcagcctcagcccatgccacttccttctcattggccttcattcatttcctcgattgtgttaagccctttccggcttcaaggcctttgtggatgcttctcctctacggggatc

SEQ ID NO: 303939 - DNA, 122 bp, Homo sapiens
caagcggtggcagcttgattgcacatatcttgtgtgtatgtgttttagggggaagatcctcgatttcacagggcttctaggctgggaaggagaagatgccgtcttgctggcctgctgctgcc

SEQ ID NO: 303940 - DNA, 122 bp, Homo sapiens
cttacatttcttctaccatttgatgtaagcctagaaactggaaaagcaaacttttaaaaacggaatgattgaagttttctttagtaaagtttaaaagttaaagtgtaataaaaaaattttct

SEQ ID NO: 303941 - DNA, 122 bp, Homo sapiens
acctcgtgatccgccggcacctcggcctcccaaaatgctggaattacaggcgtgagtcaccgcgaccggcctcatcacatactcttaaatttagggtttaagcaaagaaggcaaacactttc

SEQ ID NO: 303942 - DNA, 122 bp, Homo sapiens
ttggccctcttccaagtgtactttatttccttttgttcctgctctaaactttttcataaacgttcactcctgctctaaaacttgcctcagtctctttctgccttatgactcttaaattcttt

SEQ ID NO: 303943 - DNA, 122 bp, Homo sapiens
agctgttcttcctagcttggaaagcaagtcatttgttttctacacacacacatgcatgcgcgtgcacatacacacaaccacacacacaaacacacatggttatcaacatgctgctaggaaaa

SEQ ID NO: 303944 - DNA, 122 bp, Homo sapiens
ctctgtaatctacaaccggatgcgctcttacacccaagccttgatgggattctgctgcgacggaaattctgagcaaatttgatgtgattgtgcaggtactgaacctccacttcctgtctgta

SEQ ID NO: 303945 - DNA, 122 bp, Homo sapiens
gtgagcacctgcaggatgggtaaataaacagctgtgagaaccaaccagccaatctcacaacgaggggaaacccagggttaggcaaggtcaaggaccctgtagcccttttgtagccttgaact

SEQ ID NO: 303946 - DNA, 122 bp, Homo sapiens
gcagacggagagcaggactcactgggagacagcctgggagtgacagccacagcaagacagcgagagacacacagagtcacggagagagggcggacacagcggggacagagacgcagggtcag

SEQ ID NO: 303947 - DNA, 122 bp, Homo sapiens
tacatgtgtactgtgaaataattacaagttagctcacatatccatcacctcacatagtcacgcgcgcgcgtgtgtgtgtgtgtgtgtgtgtgtgtgtgttgtggtgaggacatttcttaaaa

SEQ ID NO: 303948 - DNA, 122 bp, Homo sapiens
aggtgggccccggagaggccgggcaatctcgggtcttcggtggatgcctttgggcgggctcggggccacgccggagtcccgcttggaaactggggagtcgggggggggactggattcccagc

SEQ ID NO: 303949 - DNA, 122 bp, Homo sapiens
gcatcccaacattgctgctttaattatgtggaaaaaattatcccaactccacaggatatgcgacagtgcgcttgcaaatccacgagagaacgtgcactcctcccacggtgagagggcgagcg

SEQ ID NO: 303950 - DNA, 122 bp, Homo sapiens
acatgatctgtcggtcactctagctcttgttctctctagctcttgttctctatgtccagtcggctggggtcaaagaaaggtacccaagctgcctgcaagagtctttgtgtgtttgtatttaa

SEQ ID NO: 303951 - DNA, 122 bp, Homo sapiens
atgtgcacaaagttgttgtggtattcccttactatccttttaatgcaagcttgtccaacccgctgtccgtgggccacatgtggctccggacagcttggaatgcagcccaacacaaattcgta

SEQ ID NO: 303952 - DNA, 122 bp, Homo sapiens
ctgctccccgagatggcttggctgtggggagggtcggcctaccaccccagagacctaggacggaaaagcgaccgagaaacttggctccctgcccactctagagcgcgtctggccccggggca

SEQ ID NO: 303953 - DNA, 122 bp, Homo sapiens
gacgtgataatccaaactgacaggattgtcagctggttacgagtctcctcctccttcccacgtcactcagaggacaggagggcagagggagagatcggaagtgctgggcattaggatcgagg

SEQ ID NO: 303954 - DNA, 122 bp, Homo sapiens
gtgtgtgtgtgtgtgttttaaatgaaggcttgtggtacggggtctgttctcattttgcgccggtgttgggcctgaagtgtgtcctgtgtgcatgtctctgacccccggagtcatgggaccca

SEQ ID NO: 303955 - DNA, 122 bp, Homo sapiens
attgttctctctggtgggctcacgttgcaacagacccagtgcagccacctgctttcctcccgcggagctgaaaccctagagatgacaggcctctgcctagtattacatcttgatcaaataag

SEQ ID NO: 303956 - DNA, 122 bp, Homo sapiens
caccccagggcatgctgggccaccccagggcgtcctccgccatactccctctcccgcctccgccagtgcggccccagctgccctcgccacaacaaaccgcctccttcaggctcaccttgaca

SEQ ID NO: 303957 - DNA, 122 bp, Homo sapiens
cgtctcctctgggtggccccagtgcgcgggctgacactcattcagccggggaaggtgaggcgagtagaggctggtgcggaacttgccgcccccagcagcgccggcgggctaagcccagggcc

SEQ ID NO: 303958 - DNA, 122 bp, Homo sapiens
tggaaactacatgtcattggctacctgggaggtgaatttgaaaaggcttcattctccattcggcccacaatccagagtctctcagaattattgctaggaagaatctaagatgggcagataca

SEQ ID NO: 303959 - DNA, 122 bp, Homo sapiens
tcccgctggcagcgcacgcactggaaggggcgcgctcccgagtgggtcaccccgtgctgccgcaggtgcgcccggcgcctgaaacctttgccgcactctgggcaccagaagcggggctcccc

SEQ ID NO: 303960 - DNA, 122 bp, Homo sapiens
ccgacggcggcgctgagtggccgggcggattcgctgggtcagggctgcagagacgcctggcgcacccgcgggagcggagccgtggcgcgctcgccccggacgccggccgcccctccgctcgc

SEQ ID NO: 303961 - DNA, 122 bp, Homo sapiens
accactaccattgtgcaattagctacttctagattgattgttaaagcctatttgatcaaacggaaaacttttggaaataaaatcacaaatggatggctaaatttgtgtggattattctaagt

SEQ ID NO: 303962 - DNA, 122 bp, Homo sapiens
atctagggagttcaagactactggaaaaattagtctcattactaaaagaaacttagagaacgagggaggtaccagagtctaggaggtacctctgggttgcagaagtaattgtaaaataccag

SEQ ID NO: 303963 - DNA, 122 bp, Homo sapiens
gacccaaatgccaatctcttctggaaactccttatagatacacccaaaaataatgttttacgtcctaactgtgcaccccttctgtcaagttgatatataaaattaactaccacaagggctaa

SEQ ID NO: 303964 - DNA, 122 bp, Homo sapiens
tcaccacttcctttttaagggctgacacaccatctagtcataccctgtttcaaaatcaagcgtgcagatctgtaggtcacagaatacactttcctccacctcattttgaaaaattagaatac

SEQ ID NO: 303965 - DNA, 122 bp, Homo sapiens
gaacacgtgctgctgggccgggctagggggccagacggaccctggggagtaggcaccccccggatggagcgcaagcgaagcatcaggtgagatcccagcccaactggtgctaagaggcggag

SEQ ID NO: 303966 - DNA, 122 bp, Homo sapiens
gctgtagcattcaccgccaaagtttgcagctttattctggagccagagagaccacgaagccgccgggaggaatgagtaactgcagatgcgccgcattaagagctgtaatactcaccgggaag

SEQ ID NO: 303967 - DNA, 122 bp, Homo sapiens
catctgaggctctgcagtccagacaccttgcgggattcctgatacttcagctcaggtaggcgtttccggagaattctgggaagagtagtccattttacgggaagtgtagtccactggctcgt

SEQ ID NO: 303968 - DNA, 122 bp, Homo sapiens
gaagccgggagcagagtccgcgggcacgcggtgggcgagggacagtgcaggtgccgggtgcgggggtctccgggacagtccccggcacgcgctggtccgccgtggggccctgcggtgagcgg

SEQ ID NO: 303969 - DNA, 122 bp, Homo sapiens
aactagtaaaaacaggtctgcaaaggaacacaactgacttgttaaaacacacaattaaaccggagggaggagaaatgctgaagctctctagtctcaaatatttagcatgctatggacatcac

SEQ ID NO: 303970 - DNA, 122 bp, Homo sapiens
cccactgtttgccagccatggggtctcctgcacaccccatcatagacgcaggtgctgggccggcatccccctttcacaggaaaccaggcgttggggcgaatgccctttgcagggtcactgcg

SEQ ID NO: 303971 - DNA, 122 bp, Homo sapiens
cttcgtgaatattaatgaggcttcgttttagggggacgtcctcgcatgccgccatttgtgcggcattgaccaaactgcttttctaaatacaagaaacacgtagagtgttcggtttgagtcag

SEQ ID NO: 303972 - DNA, 122 bp, Homo sapiens
ctagctattgttcttgtggacagtttgcacagagatttcttcccaatgcaatgctgtcaacgaatagaaaactaaagggcatatttcctccttaatctgcttgtggaaatctcattcacgga

SEQ ID NO: 303973 - DNA, 122 bp, Homo sapiens
ccctcctcaagcccgcggtttggccatggtcccaacttttcccctttggcagaagtcccacggtcagctttcatccatgttgatcccccagaatttgaggccagggggctcagggacagcgg

SEQ ID NO: 303974 - DNA, 122 bp, Homo sapiens
gccttaaggaaatgaagagaatagaactcgccccatggcacacactgtgagggaaccaggcggtgtgggaccctcccgagacgcactatgcagagcctgggctcagccacacaactgcagaa

SEQ ID NO: 303975 - DNA, 122 bp, Homo sapiens
agcagcggcggcggcggctccagagtccttggctgacgtggaagggggtggggtaacgaccgaagccacagccacctagcacctacggcgactcagagaggacatgctttctttgtgcagcg

SEQ ID NO: 303976 - DNA, 122 bp, Homo sapiens
cttgtgtgcgactgagatgcacagctgccttgtgtgcgactgagatgcaggatttcctcacgcctcccctatgtgtcttaggggactctggcttctctttttgcaagggcctctgaatctgt

SEQ ID NO: 303977 - DNA, 122 bp, Homo sapiens
gctcagggtcaggaaacctcttgggaaacaagaggacccaggacaccagggtccttcctgcggggcagcctctgacccaccctggggatttcccgctcggctgtttctctacacggcggcag

SEQ ID NO: 303978 - DNA, 122 bp, Homo sapiens
gggcgccagcatttctgttttcctagagtgaaaaggtcaaatcgatgggggctcctacaccgctggacacaggtgcgcccgggcgtccagtgcgcgcaacacacgcccagacactctatatg

SEQ ID NO: 303979 - DNA, 122 bp, Homo sapiens
gcaggtgacagatggtgtccatgagggcatggactcaggggcggctgcgacctcccatggcgtccctgcaggcagggagccgcggagtccccgaaggccgctggatcaggaagcgctcagac

SEQ ID NO: 303980 - DNA, 122 bp, Homo sapiens
gcggcgccaccgtgagcgacccaggccaggattctaaatagacggcccaggctcctcctccgcccgggccgcctcacctgcgggcattgccgcgccgcctccgccggtgtagacggcacctg

SEQ ID NO: 303981 - DNA, 122 bp, Homo sapiens
ggtcattttcgagccttttctcccttctgcagttcagcactgggaaaggcgtgaggcggccggccgtttggctgaatgcaggcatccattcccgagagtggatctcccaggccactgcaatc

SEQ ID NO: 303982 - DNA, 122 bp, Homo sapiens
cagccaggtctggggcctcacctctttgagcctcagtttgccccatctgcgtatgagtatcgaagtgcgggtggagtgagaggcccttcattttttcttaatgctgccaagcctggtgtcct

SEQ ID NO: 303983 - DNA, 122 bp, Homo sapiens
gagcgcgcacggtccggaggcggggcttgcgatgcaaagacaggtccgtctggcgaacagcgagggggcgggccgcaaccctctgcctctttccgcgagcgctgacgtcgccgacgtgttgt

SEQ ID NO: 303984 - DNA, 122 bp, Homo sapiens
tgacctcgtgatccgcccgcctcggcctcccaaagtgctgggattacaggcttgagccaccgcgcccggcatcagttcatcattttaacagtgaagccagagtgtatgggcaactaactgtg

SEQ ID NO: 303985 - DNA, 122 bp, Homo sapiens
cactgtctactctgatagcctgaaggaaacagggaccttagtcctacaattaccagaaaccgaattctgccaacgagctctatataagcttgggggagaatcccaatcttaagatgaggata

SEQ ID NO: 303986 - DNA, 122 bp, Homo sapiens
tcacccaaggtaccacggacgctgctcacactggatgagcaagtggtgagtggcgggccgcggagcccccagccatacagctggccccagtctgaacccagcctgcccagctcccaaacccc

SEQ ID NO: 303987 - DNA, 122 bp, Homo sapiens
tgcagcgtccggatcgctccgcataggcaggggtggtgccccctccccggggcacagaaacgccacatcccgggggcgccgcccagaggctgtctctgtttctgtgtcccttcatgaggctc

SEQ ID NO: 303988 - DNA, 122 bp, Homo sapiens
accccagattgcttcggcttgtttctttgctgtttgtttcaatagggtttgctggcccatcgagccatggcacacagaggaggggcacaggtggccctcagcaggggcagagagttatcctt

SEQ ID NO: 303989 - DNA, 122 bp, Homo sapiens
ctcagcttacgtgatcacaggattaagagattaaagagagagcgccaagatggccgaatacgaacagctccggtctacagctcccagcgtgagcgacgcagatgatgggtgatttctgcatt

SEQ ID NO: 303990 - DNA, 122 bp, Homo sapiens
gaagcagcccgggcctccaagaggagctgcagaaacagccacgtggggttgggccctgcacgccagagcggccgctgagggacgctgctcccgtgttcagggtcacgaacacgtggccccca

SEQ ID NO: 303991 - DNA, 122 bp, Homo sapiens
gggtggccgggaccgagcaagctggggaaggccgccggcctcgccgctccggggcccccccgcagccgctccaaacaaaaggccccggtccccggagccgccgccaccgccgccgccgccgc

SEQ ID NO: 303992 - DNA, 122 bp, Homo sapiens
ttcccgctcctggctctgtgctctggcccttttgtgcccctagtaatttagtctggacaccggccggattaacttgcctgccttctcagtctccctcatccactacaagttctgtattatct

SEQ ID NO: 303993 - DNA, 122 bp, Homo sapiens
ttttcatgtttcggatgttgtccacctgacttgatgcatattcaaatgtctctctcccgacgtgggaggccggagtcagaacctgacagacctgccgtttactaactgggtacccagggcaa

SEQ ID NO: 303994 - DNA, 122 bp, Homo sapiens
ctctcaatttaatactacaaaaagcatttctagtcagagaaagaactctacaatcttttgcggacaagaagatatggcattaaactgtggagtttttaagggcgaacagggatatactaatt

SEQ ID NO: 303995 - DNA, 122 bp, Homo sapiens
gcggaactgcagcagccctgagacttgtgggaattcggcccaagggttcccagggcaacgcgcaagcgcagttcggctcccggctgcagactccagctcattgtgttctgactgcgatgtgg

SEQ ID NO: 303996 - DNA, 122 bp, Homo sapiens
gtgaatatttcttgaatgaaaaaatgtctgaggcagaagggacaaagtgtgcacaggccacgtgagtgagcaagtctgctgatttccaggaaaggaaagagggccagtataactgaagtgag

SEQ ID NO: 303997 - DNA, 122 bp, Homo sapiens
taagataggaaggtcaggaaaatctttctgtcgggggcgattgtaagctgacaggcagtccgtaagcgctgtccctgctgcgttcaaatgaattaaatctttgccttatgggtgatgcaggt

SEQ ID NO: 303998 - DNA, 122 bp, Homo sapiens
tccggtgcttgtggggggcgggctggggacacgccttggccaccagccgcccgcactcctcgtctcagtgccaaaggcatcctccgatgactcggccgaagatgagctcagtccgcagcccc

SEQ ID NO: 303999 - DNA, 122 bp, Homo sapiens
ccctggtaccttttcagcattgaagtcaggctgcagcagaacctcagcctgagccgtgggcgcccagagcagggtcaggattgcgccgagcaggaatgacatcatcccctcccctgccctcc

SEQ ID NO: 304000 - DNA, 122 bp, Homo sapiens
gacatgagtcaccgcacccggccagggatacctatttctataagttacaaaatacttggccgggcagggaccatgtcggtctcagtcatagctcacaaccagtacttagcaatgtgcctgta

SEQ ID NO: 304001 - DNA, 122 bp, Homo sapiens
ccaccccaagcgtggggtggggcttgtccaagccctgagaagtcccactatctgtctgtccgtctgtcttctatgggagtccgtctgttcactcccctccaggcatatgacaggcatgcctg

SEQ ID NO: 304002 - DNA, 122 bp, Homo sapiens
agaggtgtggtgggaggatggcaagggtggaggaggctttcttgacagaacaggaccctgcggccctgctttctgactgcagcatcccagctccccggcctggctgcctccttaaactcccc

SEQ ID NO: 304003 - DNA, 122 bp, Homo sapiens
cccacactcccttcccgcaggtggcagcaggctggccacagaacaccccttgactgaaggcggtccctcctatcagatgcttctctttcttcggattctggtaactgctccctctgcctcca

SEQ ID NO: 304004 - DNA, 122 bp, Homo sapiens
ctttcctcctctgctgccagcttccaaggaggtctcctctttaatgaatcactgatttctcgcttccgttgctgaagtaaaaagttcacactttggccctctctgccttttaagctcaggga

SEQ ID NO: 304005 - DNA, 122 bp, Homo sapiens
cctgcggcagagaggttaagcacagattagagctgggatttgaacccagatagtctttttcgagagtcagagcccagaaacaaccaggaggcctggattctgagtctgtaggcctaatgacc

SEQ ID NO: 304006 - DNA, 122 bp, Homo sapiens
tccactctcttcccacttgacctcatttttaaaacaagcagtttcacccacagatccactcgagtgcagtgtgtcatctccctctgggccttctatgcatttgctcatactggttcctgtat

SEQ ID NO: 304007 - DNA, 122 bp, Homo sapiens
ttctctgaatacactgaattactccgagcatctatagttggcaatgccctgcgcattttccgcactccgatacactttacactgaacaccaattcggaagttgtgtggaccgtgctccagat

SEQ ID NO: 304008 - DNA, 122 bp, Homo sapiens
tgatttctgagtctgctttccaggtcagggaatgcactggggctgacgacaaggctggaacgtcccgggattgaagcttggatccgaactgttggacggcgtctggagttttgcacaaaaga

SEQ ID NO: 304009 - DNA, 122 bp, Homo sapiens
cggcaacagtcttccctaaaaccattcctaaaacgaaacaaagctacttcagaccaacagcgttgaacaagggaaaagaacagataaaacacagtgccatgtgcatgtagcaatatactaga

SEQ ID NO: 304010 - DNA, 122 bp, Homo sapiens
cgtatgcagcactgcttggtggctctgtgctgctgcctctgctggctgcctatttatgtccgcaggtgttcccgtggaggcgagacgcggccgccaccccctccccagtggctccccaggag

SEQ ID NO: 304011 - DNA, 122 bp, Homo sapiens
tacaattcaactccgttatttactcacattcaagaagttcaagtatgactcacatgaaaacgttcaacattacattaatgagctaagttttacaactgatatttctgggagaaggtgtttag

SEQ ID NO: 304012 - DNA, 122 bp, Homo sapiens
aatgaaaactatgcttgtgtggccagtggcgagggagctgagcgtctccttgtccctagccggccctggaggccagcggccccgccttcctcgcccacccggcgcccgcgcctcagctgccc

SEQ ID NO: 304013 - DNA, 122 bp, Homo sapiens
aggagttctttccccagggcatggcttgttctgggagagccaaagcagcacgactcccagcgatgttgctggtggactgggcaggtgggtgctgggcccgagctgggtggggcccagcatgg

SEQ ID NO: 304014 - DNA, 122 bp, Homo sapiens
ccgggacccgcacagtagcggactgccagtacaggggcctccctgggtgtccctggaaaccgaggaagtaaccgccccctcgggaagccacgcctcctattttgttccggctcgggggcggg

SEQ ID NO: 304015 - DNA, 122 bp, Homo sapiens
ccacctcccagccgcctgccttggcctcccaaagtgccgagattgcagcctctgcccggccgccaccccctctgggaggtgaggggcgtctctgcctggccgcccattgtctgggatgtggg

SEQ ID NO: 304016 - DNA, 122 bp, Homo sapiens
cgtcacgctcatcaccctgaactcggaaggtgcgtccagggcggctttcctcggccagagcgccagtacaattgtttgtttgttttgccttttagaaattttgttgttttttaaagaagtga

SEQ ID NO: 304017 - DNA, 122 bp, Homo sapiens
gggtcacagtgtgctgctgagatgggagcgggtggaggcgtgtggctggggtttcccaggcgtgtggatgggcgcggggctggcctgccagggtgcagcgatgggcgcggggctggcctgcc

SEQ ID NO: 304018 - DNA, 122 bp, Homo sapiens
gtttgatttataaactagtccacaacacatttcagatgttgtaagaattaattgctgttccgttgctgattttcataatatgtaaagatgtttataagcacaatctaattctccaacctctt

SEQ ID NO: 304019 - DNA, 122 bp, Homo sapiens
atgcaccccaagcctggaaatcttagctgtaccagggaaaggagagattccagaatcctacggtggtgaaaacatggacatactgatggcaagtgaaatgaatccagcttgcaactagacca

SEQ ID NO: 304020 - DNA, 122 bp, Homo sapiens
cttgccaatccctcacggatctttctccgatagatgcaaagaacttcagcaaaaaagacccgcaggaaggggcttgaagagaaaagtacgttgatctgccaaaatagtctgacccccagtag

SEQ ID NO: 304021 - DNA, 122 bp, Homo sapiens
gagggcaaagggctctacaccgtttaattgggctcagttcatggctctcaaactcagctgcgtaaggcagggagtggggctggggggactgtggccactgagcctcaaggcactggcaactc

SEQ ID NO: 304022 - DNA, 122 bp, Homo sapiens
ttgtctgttccttgggtaacttctgggcggatccctctctagactgaaggcttcatggggcggcaaccgtggttttctgtgctgctcacacgctgagaacacaggagaggccgtcagtacat

SEQ ID NO: 304023 - DNA, 122 bp, Homo sapiens
tacccagaagtagtcgcagtagctccactcggttggtttcagcagctgctgttccggcatcgtgtctgggtgagggaacgtcacacagtttatctgtagggcacagaacaagaaagaatgac

SEQ ID NO: 304024 - DNA, 122 bp, Homo sapiens
ccgggcgacgtgagcttggacacacccacactgggcggtctggaggctacgttagtgtggcgtcatccgagctgggcagccgttctgccttacagggttgggaccccggaagcttatcggcg

SEQ ID NO: 304025 - DNA, 122 bp, Homo sapiens
tctccaatgtgtatgttatcagctttgtttcttctggtctgcatgtttggtatcttactacggagaattcacttggctgagttttgttgcagctttaatatcttggctgtcttctttctctt

SEQ ID NO: 304026 - DNA, 122 bp, Homo sapiens
tgaggaacaatgatatcagcatgtaatctcagcattttgcccttgaaataaaattctgcccgccattgatatccagtagctcactcctcactaattcaaaataggtcccagtggattggcat

SEQ ID NO: 304027 - DNA, 122 bp, Homo sapiens
gagctagagtccagacaaccaaatctgttaaaggtaaagtggactgtaatcacacaagcacgccctctactcctaattgcgcctgctccggcagctccggagggcgtggttaatggaactca

SEQ ID NO: 304028 - DNA, 122 bp, Homo sapiens
gagactttcttcaccctttcctttgagaggcatcagtgaagggcacagtggttgtacctccgtgaatgtgtattcctaaattcatgctggctgaattcaggtgtaattagagactgagaccc

SEQ ID NO: 304029 - DNA, 122 bp, Homo sapiens
tttgggaatggggtatgtgaggaagaattctgtccaaggaaattcagggtagctatctatcgatatggattaattactaattgcacattactttgcctttaggaaatagagcaaattctgtt

SEQ ID NO: 304030 - DNA, 122 bp, Homo sapiens
tgtgccgattcacacacctcgcagtccatggaatgccattcgtgcacgtggaaaggagaacgtgtagccacgctatgctgtgccgattcacacacctcgcagtgcacggaatgccattcgtg

SEQ ID NO: 304031 - DNA, 122 bp, Homo sapiens
gagaggagaaggagaagagagtgggcccgccttcagggtctggggccttccaggttgggtcgtaggggcgggagcgcacaggctgcgagagaggagcaaaggttggtggagggagaagagca

SEQ ID NO: 304032 - DNA, 122 bp, Homo sapiens
ctgtggcttcgcccggcattttgtgcagggaacgcggaagcaagatggcggcagaaagagcgcgagcgagagcgtgacccacgcttgttgcagcgggaagcaaaaagagagcatttaaaaag

SEQ ID NO: 304033 - DNA, 122 bp, Homo sapiens
gggcggggtggggggggtgggggatggggccctccgaggtccgcaggggtcggaccggggcgctctgttagaaaccctgctccccccagctcaggcctgatggaaaatgtgggagggagggg

SEQ ID NO: 304034 - DNA, 122 bp, Homo sapiens
ggattacaggcgtgagccactgtgcccggcctttttttttttttttaaatataatagagacgagggtcatgctatgttgcccatgatggtctcaaactcctgggctcaagcaatccacccac

SEQ ID NO: 304035 - DNA, 122 bp, Homo sapiens
atgctccaatccccagtacttcctcccgcaggccctcatgccatctttaacagaaacagacggaacaacctttctaaacaaggcattttgcattaggacagaattgtatctcctctacaaca

SEQ ID NO: 304036 - DNA, 122 bp, Homo sapiens
tccccctccccgaccccttgtctcgggggagttggtcgggagggcgggaccgcagcctgccgggtttgtgacccccacgccctgcttcccgaggaagggcgcgccccgggctcggccgcttc

SEQ ID NO: 304037 - DNA, 122 bp, Homo sapiens
gcgtcccgcccgggccgccgcctccgctgtcaccgagccccgcgcccggcgcccgggctccggctgtcactccacgcacacttccctccgcgcccggcagagggcagcacccgccccgcctc

SEQ ID NO: 304038 - DNA, 122 bp, Homo sapiens
ggaagtagacgatgggcttggcgctgctgttgatgcagatgcacaggtcagtgacgtactcggggaagggggccgggatctggaagacccagaagaggaaccagtcgatccctaagtagatg

SEQ ID NO: 304039 - DNA, 122 bp, Homo sapiens
aatgggcaaggtgggctccctgctgcacagagggcagacaagctctagcacctgagctcccgggcagaaggctggcctggtgtccacttcctgccgctggactcgggaactgagcaaaagca

SEQ ID NO: 304040 - DNA, 122 bp, Homo sapiens
ctcacttgatatgctggagcctgtggtttccagacagtgctgtggcaatgcatatcgccccgtccatccccagagaattctcttgaagactaagtggaaaagagatggagacacacggtgag

SEQ ID NO: 304041 - DNA, 122 bp, Homo sapiens
aaccacagtgcagactgtgaggaccccagaaaggctcctccccaaaacctgaccagtggccggtgctggcagctcccaggctgggacacccctctgtctctctgtccctctgccccctctgt

SEQ ID NO: 304042 - DNA, 122 bp, Homo sapiens
acgttcaagggtatcagcaaaggcatgttgggatcctcacagaaacaaaatgttaattaacgtgggtaacaatgtggactggggaaacaaacaccattacctacctaaacagctggcttgat

SEQ ID NO: 304043 - DNA, 122 bp, Homo sapiens
ggcggaggggccagttcctgtcgggccggaggcggagtcagaggttgcttgagctccgcccggactccagggggctcctccccctgctcctttcggctgggcgggcggcgggctagagaggg

SEQ ID NO: 304044 - DNA, 122 bp, Homo sapiens
gccccgccgtgcctgcggagagaggcgggtcctgtcggcggggcggggccgatagcaggccgccccgccccccacggccccaggctcttggacggcgaagaggtctgggcgtagcggtgacg

SEQ ID NO: 304045 - DNA, 122 bp, Homo sapiens
ccttttttttttcttggatgaaagccccatagtttgaattaaacaccccagactagttcccgttgcagcaataatgccggggttctcctcacaactcctccaccagaaacactctccaaaca

SEQ ID NO: 304046 - DNA, 122 bp, Homo sapiens
ccctccacatccaccccatcgtgggagggaggctcagtgctctgcaggggcctgagcagtcggggagacaccccctgcccacagccaccctctctgggctatgtgggaggtgcccacgtttc

SEQ ID NO: 304047 - DNA, 122 bp, Homo sapiens
ttgtgcagccacaggcccgtgtcgctctcccgcatggacgccatcttgggggaaagcgcgcgccgctgccccggcatcttatgaagacacctacgcgtccctcgctaggaccccaacatggc

SEQ ID NO: 304048 - DNA, 122 bp, Homo sapiens
gtctaaaacaaaactaaacaaaaaaaagaaccaagtaaactcaaagtgagatgaatgaaacgactcttgagatgcaggaagagaatattagaacccttatttgtatgtcctttttattctca

SEQ ID NO: 304049 - DNA, 122 bp, Homo sapiens
aagagagaaagagggaaggaaagagagagagagagagagagaaagagagagagagacagccgagggaacatctataggcagccctggtgagtggatactgaaagagaacattgagtgttggg

SEQ ID NO: 304050 - DNA, 122 bp, Homo sapiens
gctctgtcagaagtgggattcgaacccacgcctccaggggagactgcgacctgaacgcagcgccttagaccgctcggccatcctgactgcttgcagtgtgtggcgcataaagcctcttcaca

SEQ ID NO: 304051 - DNA, 122 bp, Homo sapiens
tccctttggtgacaagaagtcacggcacgtgtgggccagagcagatgccttaggggtgggcgtgtaaaaccacgagcatcttcagagggacttgaactcttgacttaattgatcctgaacac

SEQ ID NO: 304052 - DNA, 122 bp, Homo sapiens
ggaggagctgaccgaagtcatcactgcagccgagttccacccgcaccagtgcaacgtgttcgtctacagcagtagcaaagggaccatccgcctgtgtgacatgcgctcctcggccctgtgcg

SEQ ID NO: 304053 - DNA, 122 bp, Homo sapiens
ctcagcatccccctaccccccgctgcccacgcttcttccctcggctcccaccacccagaccgtctgggcccccaagacttggaccacgcaaaactctaggactgtccaggatggggatgcag

SEQ ID NO: 304054 - DNA, 122 bp, Homo sapiens
ctggggcagagccctgggttctgagctggagaaaatcgtgggtttgatacagactgtactcgggaccgggaacctagggtttgggtagaggtgaggcctgtcccctttgggctgggggcaga

SEQ ID NO: 304055 - DNA, 122 bp, Homo sapiens
ccagggtaggtggatgctttaccaaagacctggggaggggtgatcacttcccaggcagggcggtggttgcagagactaagaaatgaaggagctacaccctagggggatgagaggctgggggt

SEQ ID NO: 304056 - DNA, 122 bp, Homo sapiens
agatgtacagggtattcctcgattgcatatgaggagcacttaacttatatggtagtggatcgaagaaggtgacatctgaattgaatcatgagttatccaggtgagggatgggagcgggagac

SEQ ID NO: 304057 - DNA, 122 bp, Homo sapiens
gcgctcggggccctccgcctagtagagatctggagccagaagcccagagacagccgagtgcgccgtgcggtctccggacgctcgctgctcagcccgatccccgccaactgtgcaggcggctg

SEQ ID NO: 304058 - DNA, 122 bp, Homo sapiens
tggtggatcccgggatggggggagctgggtgggggcgctggtttctcacggggccgtgcccgccttgtgcaggtggtcacgggctcgggccgccaggaggcccagaagacggacgcggagta

SEQ ID NO: 304059 - DNA, 122 bp, Homo sapiens
gagatcgccgtcagagcaaagccaggctactaccgcaggtaccaagacagtggcaccgcccgcgcctccggaacaggaaaccgagggaattaaaaagcaaacctgagaaagctgggccaagg

SEQ ID NO: 304060 - DNA, 122 bp, Homo sapiens
aaagggttgggagctgatgaaactcacaaatgatggtaggaagaagctctcgacaatacccgttggcaaggagtctgcctccatgctgcagtgttcgagtggattgtaggtgcaagatggaa

SEQ ID NO: 304061 - DNA, 122 bp, Homo sapiens
gcggtgttgggagtgagggccgtcagccgcgccccgcggaggattctgggagtggtagttcggcctcatggttggccggcgctaggcgtccccgccggctgttagatgcctttgtcgtcggg

SEQ ID NO: 304062 - DNA, 122 bp, Homo sapiens
gcagtgttgggattttcttacagggccgtggctcatctgggcatttgtttactctggaaccgagtggcaccaagcccttcgtcacatctagctttttcacagtgaacgagccagtgttgtcg

SEQ ID NO: 304063 - DNA, 122 bp, Homo sapiens
atttctcctaggcttcttcaaagcccaagaccggtgatgcagaatggactctgccagcttcggagacttgatccaggtcagggatcccaggttcgcagccgggggatttccacgaaaacagc

SEQ ID NO: 304064 - DNA, 122 bp, Homo sapiens
aaggggtccttctcactccaaagtgacaccgccgcagacgcacgccccacaccccgccagcgcccttggcccgcacccgctcctgcgcgcacgcccaaactcagacccagccgcaggcaccc

SEQ ID NO: 304065 - DNA, 122 bp, Homo sapiens
tccagagactcttcgtccattggccagcgagagtgtcagttcccaggctcctgccgcgcacgggcgagcccttctaggcgggaaaagttcagctgagagatataaaagagcagtctttccag

SEQ ID NO: 304066 - DNA, 122 bp, Homo sapiens
acgcctctggctctggtctagtggtgcagcgtctctagccctcgccccgcccaccgtccccgcgaggcgtccactcgccgagccccgccctcacccagcacccaccccgctcctcgcgccct

SEQ ID NO: 304067 - DNA, 122 bp, Homo sapiens
tgaagccttctcaattggtggcagtttttcttcccaccctccaggggcctggaggtggaacgggtgtcattttgaagcatgagaccctttgcccttgtctcttcctccctaccagctctcag

SEQ ID NO: 304068 - DNA, 122 bp, Homo sapiens
cctgtctgggtccctttggtcctgtcaccctggcaacggggccttttccaggggattaggcgccccgtccggatggagaagcgactcagggcccagcaccagggctcacgcctgtaatccca

SEQ ID NO: 304069 - DNA, 122 bp, Homo sapiens
tgggttcccagcaccctggaaagtgacccgtttggctatgtttttagccccttagcaacacggccagctctcaatgaccaagagtccatcttgtggccgaccctgacttctgtggtttcctg

SEQ ID NO: 304070 - DNA, 122 bp, Homo sapiens
ttaatccttgcttttcttgacaaaccaatcctgattggcctactgcatgtcttaagcggtcgtactcttgaaatgccatgtggaaagtgactacctaaaaatataagacaataaaagtaaaa

SEQ ID NO: 304071 - DNA, 122 bp, Homo sapiens
tgatggattagaaatattgcaggagtagaatctgctggacaggctggctgaatgtgtgcacgttttatatctcattatagtaaaactgtgtttgaatcataccagtgcagcctaattatggc

SEQ ID NO: 304072 - DNA, 122 bp, Homo sapiens
ttattaattgctgccacaaccagctgatttagtaagcatggactttaccaacttcattgtcggaagcaacctaatttttaacactattactgtttattaaaagttccttcctccaagagaaa

SEQ ID NO: 304073 - DNA, 122 bp, Homo sapiens
cccaaagggagtaggaggaggtactctctccaacctggtaagccaggctgctaaaatctacgcctctggccgtaaacctccaacagcagtaacacaatggactgtttaaaggttattttatt

SEQ ID NO: 304074 - DNA, 122 bp, Homo sapiens
tacaaaaccaactctttatagtagacagtttatcccccagaaagctttttaggctgaaaacgtttctatagattttggatttccttctgatagctaaaatttgtttctgtataacagagtag

SEQ ID NO: 304075 - DNA, 122 bp, Homo sapiens
tatttgatgttcacaaaagaatggaagtggtagggtgttgctcagtgaagtgtgcattttcgagttacccacagtggtgtctattgtcctgtttctcaattgaatgatgtcatgtttcattt

SEQ ID NO: 304076 - DNA, 122 bp, Homo sapiens
agctgcaaagtcgcgggtgcgtatgtacgggggctgcctcccgaggaggagctcccaagccgcagggtggacgctggagacaagaacctcagggtcacaagtttactgtttttctccctttt

SEQ ID NO: 304077 - DNA, 122 bp, Homo sapiens
tgttggggtttgccgtgtgttggggtttgccacgtgtcggggttcgcctgtgttggggttcgccgcatgttggggttcgcctgtgttggggtttgccacttgttggggttcgcctgtgttgg

SEQ ID NO: 304078 - DNA, 122 bp, Homo sapiens
ggatcctcttttcccctcagtcttcttcactcccaacatttgttgcaggctctcctgctgcgttgctctccccagctataaaatactgagaatgccttggggtagcatgttttccatccaaa

SEQ ID NO: 304079 - DNA, 122 bp, Homo sapiens
agggccaggggaggctgaaaccaggtgtggtcaagacaaggcctcctccgctacctgagacgtccggtcgagatacccaatctcccagccatcatcctcgctctcgctactctcgcctccgc

SEQ ID NO: 304080 - DNA, 122 bp, Homo sapiens
ttcataatttaagaagattttttgttacgtggctagcccaggtactgaccgctgcgggggcgggctcacacagttcccccgctggcaagttttgtgacttgctttggaaaacccgggaattg

SEQ ID NO: 304081 - DNA, 122 bp, Homo sapiens
ggggcctgcttaaggtggcacgggctttaaggtggcccttgcagatcttgcagacattttcgtgggctccagggacgacacttctaaaggagaggcgaggttcactggacgttttgggaaac

SEQ ID NO: 304082 - DNA, 122 bp, Homo sapiens
agcgacccccgcgtgtaggtcaaaccggcttccgatcctgttcctgagcctcagtttccccgacctcaaggggcccacgggctcccccacgtgcacggcaggtgtccctcccgcctcgtctt

SEQ ID NO: 304083 - DNA, 122 bp, Homo sapiens
agaagcctgggtgccaggcagtggtgaacatagcccaggacagtacgttctcatgcacgccgtagacgggttcatagaaacggcaacacacgtcataggttcttggaaatggcaggcttggg

SEQ ID NO: 304084 - DNA, 122 bp, Homo sapiens
gataatctgtttaatttttctctgaggtaatggtgtctcagttatggaagagtcccttcccgcctcttcacacgtgccagctttgatgcaaggagtgttccatatacctgagcactggttca

SEQ ID NO: 304085 - DNA, 122 bp, Homo sapiens
gtcgtgtggccaggtgtcacaggtgtccacaggtgtggactgagggcttgtagccaccgacgctgcctcggtatggatctcttggcagagggggctacaggtgtgactgcaggtgtggccgg

SEQ ID NO: 304086 - DNA, 122 bp, Homo sapiens
gctgctggggacaggacccttgtctggtatcgatggcagggaaggctgtgagcctcccctcgtgtgggcatcagcctcagcctcccagtgggggtcacccagggagcatatctcctggtgag

SEQ ID NO: 304087 - DNA, 122 bp, Homo sapiens
tttttacaacagtgatcagagaagcccttactccaggcacgggtctgaatccacacaggtcggtcagccccgggcaggttcaggctattcaaactgaccttttcctggcttccgccttatct

SEQ ID NO: 304088 - DNA, 122 bp, Homo sapiens
tttagaaaaccggggccagtttatctctgtcacggccatggcctcagcagccttcccttccgccgttcagtctgtgctgcagcagtggcagccagcgtcgcaggcgtgctgtaggactgagg

SEQ ID NO: 304089 - DNA, 122 bp, Homo sapiens
ccgcggcaggaacgctgcccaggagggggagggcgggcggcgaggccgaggaatcttcgacgtgtcactttctgaggctgtagatttccatatggtggagggaagagggcgggagtgcgaag

SEQ ID NO: 304090 - DNA, 122 bp, Homo sapiens
ctgcctagaggtttcccactggccacttggtattcatcccatgcaaataaagtagtggcccgcaatcagtctgattggttgcttttgcttgctgcaaccaatgagaggccgaagtgaagtta

SEQ ID NO: 304091 - DNA, 122 bp, Homo sapiens
ctcgcccctgaggtgtgggaagccgaaggtcccgttgagtgtggttggccttgactcgggcgttgcaccggcatgatcgcattagcctcactggttatgggtagctgctgctgggagcgtgg

SEQ ID NO: 304092 - DNA, 122 bp, Homo sapiens
aggagcactcactggagtgctcacaaggtgcacactgctgtgtgtaccttgcagacaggccggcgttcagcctccaaggggctcactcccccagttgccaaacactgtggatctctctgtcc

SEQ ID NO: 304093 - DNA, 122 bp, Homo sapiens
cgggggaattacactgccttacatttttagctgcacagcttgtttagaaattggctcaggcgaggctcacaaccaccccttgtaagcattaggattcccactgtacagatgcaaaaactgag

SEQ ID NO: 304094 - DNA, 122 bp, Homo sapiens
gggcttgcggctgggctgccgctgttctccccggtgttcatccagggatgctcggagaaacgctttcggagcatttctcgaaaatcaacatcatatgggcctcattctgtgatcgcatgtga

SEQ ID NO: 304095 - DNA, 122 bp, Homo sapiens
gcagcagaagagtgaccctgatgtacactagggtcccatccactgccattatgaagctgtcgttatggagccatctgtccagagcagaagaggacaaggtgtgaggcactgctggtctggct

SEQ ID NO: 304096 - DNA, 122 bp, Homo sapiens
cgcccatccctcctccgcctgcgggtctgcaggggctcgggtagggcttcgcgcctcccgcggtccagctgtctacatctggccagcagctgggagccgcccaccgcgaactgctgaggaca

SEQ ID NO: 304097 - DNA, 122 bp, Homo sapiens
acagcctgccaaggccatcgtggatgacggtcgcattactcacgcgcgttgccacccaaccggctggggcatcgccgcacttcccattctgctgggaacacgtagaattaagatgctaggtt

SEQ ID NO: 304098 - DNA, 122 bp, Homo sapiens
ggggaaagagaaagagacggaaaattactaattacactaattgtattttacccccaagaacgccattaccagcggttaacattagttccaggagtccaaacatagttttcaagataaaaccc

SEQ ID NO: 304099 - DNA, 122 bp, Homo sapiens
agcagggagagagggtggagtgtggtttgcggccaaacctaaaggctgcaattaaccagccgcccggccttcgctactccggacagacgaacgtcttaaaggacgtcttcgctcctcgggag

SEQ ID NO: 304100 - DNA, 122 bp, Homo sapiens
gggaggcgtggaagtggatgtgagccggtgtgcactgggctgcagtgcgcgctgctgggccggtccgggagcccacactgttgggtgctggctgctagaagcccacagcaggggcccgaggc

SEQ ID NO: 304101 - DNA, 122 bp, Homo sapiens
aagcctttgggcacctgctctggaagttcgtggaggagtctgtccaagttcgcccaaggccgagggggctatcaaagaagagctctgggttttgtgctcaatattgatacatgtgaagggta

SEQ ID NO: 304102 - DNA, 122 bp, Homo sapiens
tcaagaatacagtcttcacccatgagggcattgtgtgtgtcgtcggggttctgtagtgcacgttgagcacgaagacggtgatgacgatggacaaggttacaaaaatcatggtgaacaggagg

SEQ ID NO: 304103 - DNA, 122 bp, Homo sapiens
atagaaggcgtcacctttaggagacatcctctgtcatagtgctcgcagccccgctgacctcgctcttgaccgctggcgccatcttcccgggccgtcgccgccatctcctccacctcccctca

SEQ ID NO: 304104 - DNA, 122 bp, Homo sapiens
ctcccttaccacctgaggggtcactggtgaccacacccatggaatcggctggatctcctgcggggctggacaatttgaccctcctcctccccaggccccgccccttcccccctgagtctttc

SEQ ID NO: 304105 - DNA, 122 bp, Homo sapiens
ggtggcggcaagggggcagcctggactggagccagaaagcctgtgctggcatccgccacgcggacggggaagctgagacccagggctcaggtcacgcttacgtcgtttggtagccaggtacc

SEQ ID NO: 304106 - DNA, 122 bp, Homo sapiens
cctctgaacgttagtaacgcaacatgtgtttctccgcgactacagacctcgggagaggagcggtgggcaacgtgtctgtgctcggtcgaatgcgcacactccagttaggccgctggctcgga

SEQ ID NO: 304107 - DNA, 122 bp, Homo sapiens
tcaccctgcagggtgtaagaggcgcacttcctgcgccctccccgcggccaaaccggggtgcgggaaccttctccagagaagctgcgagttggggaaactccgccaccgatccatcgtggcgc

SEQ ID NO: 304108 - DNA, 122 bp, Homo sapiens
ccaacatagagaaacactgtctgtactaaaaatacaaaattagttgggcgtggtggcgcacgcctgtaatcccagctactggggaggctgaggcaggagaatcgcttgaacccgggaggcgg

SEQ ID NO: 304109 - DNA, 122 bp, Homo sapiens
ttagcataaatcaattttatttatgtagtaacacttgaatactaactacccaatgccatccgtcaagacaaaattgatgactatacctttaggttaatattacttgaacatttcattctgaa

SEQ ID NO: 304110 - DNA, 122 bp, Homo sapiens
gaaggcggcaggggcagcaaccagagcagcagcagtggcagcagtagcaggcgcggccgccgccgcctccggctcagctcacgcggaaaccccactgggccgtcgtggctccgcgcggttgc

SEQ ID NO: 304111 - DNA, 122 bp, Homo sapiens
ggagtggaaggtgatattactccccgaatcgcggggcccccgcccccatgcgatgtgaatcgtaatatccatggggggagagggcggtgatattactccccgatttttcctaggatcctttc

SEQ ID NO: 304112 - DNA, 122 bp, Homo sapiens
agtgctgtccccctaggcccatagaccagaccctaaagcctgcagagggattgggcagaacgtgtggtaccagccacccacactactgtcggaccttggaggaccagaggcgtcaggcatca

SEQ ID NO: 304113 - DNA, 122 bp, Homo sapiens
cagccgcccctctgcgagatccaccgggcgatgccttgttgcagcatgaagaccacgaagcgggtcaccaggcccaggaagccagtcaagccgtgctggtagacatgtaggaccagacggta

SEQ ID NO: 304114 - DNA, 122 bp, Homo sapiens
cagctcccaggtgcgtgttaaaagctggaggggggatatgtgatcccaggaccaaaagcgcggggccagactcatcggttcattcaacaaccagtatttagtgcctgctgtgttctgcaggc

SEQ ID NO: 304115 - DNA, 122 bp, Homo sapiens
cggggataaataacattaaaccaggtaatagcttcgtcttgctggttccctccttcgtctcgggtcactttgatgagttccctgggagtgctggtaggaaacaggcaccagcgcttgtggcc

SEQ ID NO: 304116 - DNA, 122 bp, Homo sapiens
ccgggaccgcgggaaggccggaccgctgggagctggaagtggtgggggtctgcagcggggcggggggattctcaaggcatcagagataggttgggggagagaccgtgctaagtgcaaggacg

SEQ ID NO: 304117 - DNA, 122 bp, Homo sapiens
cttaatcccaggtttgtttatccaagcagtggtgtcagctgcctggccaaaccacacaggcgcctggatcctaggagacataaaccaatcctcccacccaagcaaagccccgtagcagcccg

SEQ ID NO: 304118 - DNA, 122 bp, Homo sapiens
agggcaaaacccaaacgtactcaagacctggcattgaagactcttcagattctcactccacgcctcatcaccacactaactcttctttcaagcttctcctacctttgtgttctgggccttgc

SEQ ID NO: 304119 - DNA, 122 bp, Homo sapiens
cagcgctggtgggtgtaagacggtgcagccgccctggaaaacgggctggcatggagctaccgtgggaccctggaaacccactccccggtatgcgcccgaggacggcagaaaacacgtccaca

SEQ ID NO: 304120 - DNA, 122 bp, Homo sapiens
cagggttttctggacgtcaggaagggaccgcggtggggtgctttagaagtggccggagcccgcacctgcatgcagctcgcgcagaaagcgcctggacgctcccttaggaccgtttgcattct

SEQ ID NO: 304121 - DNA, 122 bp, Homo sapiens
gcgccgtccgagttccgccggtcgtgctctcggccctgccgctgccccactggccctgggcgcccctgagagctgtggtcatcagacactgccccttccggttcgggctggccctcgccttc

SEQ ID NO: 304122 - DNA, 122 bp, Homo sapiens
gaagcccagtcccagccacacacaagatggcagcctcacacctaccggaggaaacagctgcgccaccactccagtgatgccggcctctcgactacgagtaactccattggctcagctacagt

SEQ ID NO: 304123 - DNA, 122 bp, Homo sapiens
gcggtgtctttgtcaaggcccacagtcggcccagcacaggaccaggaactcggtcctcaccgggaggacacaaagtccagacctgggagtgccaccgccacgcactgtggaattttgtcaca

SEQ ID NO: 304124 - DNA, 122 bp, Homo sapiens
tcaagaccagcctagccaacatggtgaaacatcgactctaccaaaaatacaaaacttagccgggcatggtggcgggcacccatagtcccaggtactcgggaggctgaggcaggagaatcgct

SEQ ID NO: 304125 - DNA, 122 bp, Homo sapiens
ggtcagtgccctgagctctccgtctgatttttaaaaactggcacagctgcttttaaacaccggcacatttttggtggcacaagggccaccaaacaggacccaaagtacaggtccttaacttc

SEQ ID NO: 304126 - DNA, 122 bp, Homo sapiens
ctggaaaatcgggtcactcccacccgaataccgcgcttttccgacgggcttaaaaaacggcgcacaagagattatatcccgcatctggctcgcacctggcttggagggtcctacgcccacgg

SEQ ID NO: 304127 - DNA, 122 bp, Homo sapiens
tgtgagagcacattggtgaggctgcccatgcatgccactgtggacaaagacagatgcgatcgtgtgtgtgtggggactgcgtatatgtttttgtcagtgtgtgtgaccacgagtcagctggg

SEQ ID NO: 304128 - DNA, 122 bp, Homo sapiens
cagctgggacccgcggaatttgaggcgcgcgctgggatcttacgtgcgcagaggccggaccgcagagtagaagtgagtcttgacccaccagggcctatattgagatggaaacctctctcttt

SEQ ID NO: 304129 - DNA, 122 bp, Homo sapiens
atttgagcaaatttttcatcttttgcatcaggatagagcactcaaaagataaggtagtgtcgctgctgattaaatattctttgtccaaaggctgttaatcagtggctgatagataagatttc

SEQ ID NO: 304130 - DNA, 122 bp, Homo sapiens
ggaagcacggtttcctgggccttcgggcgacaccaggactgggggtctttcagtagaggtcgccgcggcggagtcttgtgcgagtgcggcggagtgttgtgcgagtccggcggagtgttgtg

SEQ ID NO: 304131 - DNA, 122 bp, Homo sapiens
agtgactgcgggccccggatgtgagagccttggcttgacgccctggctgcgctgcaggtgcgccgggccgaacggagccggcagcctggcggcgacctgaccgcccgaggctccccttcacc

SEQ ID NO: 304132 - DNA, 122 bp, Homo sapiens
ctgagacttcctgcgtcggtggaaacattccgtcatctacaccggccagtcctgtagcaacggcctaggtggtttttgaacgtgtgtgtgtaggtgtgcccacacgcataggcatgtggtga

SEQ ID NO: 304133 - DNA, 122 bp, Homo sapiens
gcgaggtagacgccggggccacccgcagcacgcagagcttctgggagccggtggcaaggccgaattgggatgcaaaccaaatggacgtgggtgactggcagaaaacgcctcccacaaatggg

SEQ ID NO: 304134 - DNA, 122 bp, Homo sapiens
gctgctgcctgcaggtagaggaagggacgtgtttggcagtcctgtgacccctgggcacctcgcctcccccacggccggctctgcttgtaaacagacaagtgcacaagcgcagcccggtgaag

SEQ ID NO: 304135 - DNA, 122 bp, Homo sapiens
ggcccctcccgccgccatcttgcgccgactccctccgccctccgcctccgctccgcctcccgcccctccgcctttaaaggcacagccgggcaccccgcccgtgccgctgggcaatactcggc

SEQ ID NO: 304136 - DNA, 122 bp, Homo sapiens
aaaaaaccattcttatcttgcaggtagttggctggatctggcctgaggccatgacttatccgtttctgcctagaccaagagcagtgcagaaagccactgactcactgtgtgcagttctcagt

SEQ ID NO: 304137 - DNA, 122 bp, Homo sapiens
gcatctactcggccctcattctgcacgacgatgaggtgacagtcacggtgagtgcgggcgcgggccggcggccgggctgcctgtgggcggtgactttcggctctccatgcggttcccggctc

SEQ ID NO: 304138 - DNA, 122 bp, Homo sapiens
ccccgccccgccccgctcccaggtggagtccgcagtgggctttgtcccgggccggcccggcgcgcctgccccgcggggcctgttctttgggggaaataaacacaatgaccggaaggaaaact

SEQ ID NO: 304139 - DNA, 122 bp, Homo sapiens
tttgcgcggctgagagtggactttgcggagcgggtggccggtgctaccctttggaggtggcgcggctctaggcggagcaatgagccaggagtccgttttctagaatgttgacacaagggcat

SEQ ID NO: 304140 - DNA, 122 bp, Homo sapiens
ccccaacagccccggcgcccggccgcttcctactctacaggaggggacaagtttggctgccggcgtctgattcgggagcaagcaccacgctaaagaagagtttgacaagtattctcacctaa

SEQ ID NO: 304141 - DNA, 122 bp, Homo sapiens
gtcggaagtgtcacggcctttatcttagatcttaagggcccagggacaaggtgttactcccgcccccacccccacccccacccccacccccacccccctccgcccaatttctctcctggaaa

SEQ ID NO: 304142 - DNA, 122 bp, Homo sapiens
tcccggcgcctgattggctagtggtctccactaaggtcagggctgtgtcacacacacgggcgcacgtggacctgggtgctggtgctgggctgaagagccccagacaccgcccagccaatggg

SEQ ID NO: 304143 - DNA, 122 bp, Homo sapiens
cttggtgaataatgctgggccacgctgaaaatttgtggctgagagctggaccctcgtcatcgccacgtactctgtcaatgagacagggtaacccatggttactgagctccgatcagttaagg

SEQ ID NO: 304144 - DNA, 122 bp, Homo sapiens
attacaagcctgcaccaccatgcccggataatttttgtatttttagtagagatggagtttcgccatgttggccagggtggtctcgagcgcctgacctcaaatgatccgcctgcctctgcctc

SEQ ID NO: 304145 - DNA, 122 bp, Homo sapiens
tccaacaattgaccgcagcctttttgaactccagagactgaggccagggtgtctacatttcggtgacctttcttggttcccatcccgggcttcgctgttccatgctcacaaagcctcttccg

SEQ ID NO: 304146 - DNA, 122 bp, Homo sapiens
attatttaggttagattacatattaacaaaatatcagcatatcctttagtaagatatccacgcagtaatgtcaactaatcacagtagcatagcatttaaagggagttttgagcaggattgaa

SEQ ID NO: 304147 - DNA, 122 bp, Homo sapiens
gagcgcgccttagggtgtgtgcgccagggacctggcgcagccgaccacgtgggagtgcggcgcgtgtacgggcgcgggcggcagcggcagcggcagcggagaccgggtgagcaccggctggt

SEQ ID NO: 304148 - DNA, 122 bp, Homo sapiens
gacagcagtgagagcggttgcgcagtgaaggctagacccggtttactggaattgctctggcgatcgagggatcctagtacaccgcaatcatggtgagatggggagttaaagcaaaggggcat

SEQ ID NO: 304149 - DNA, 122 bp, Homo sapiens
tggatgaataattacgtctgtggttttctatggaggttccatgtcagataaagatccttccgacgcctgccccacaccaccacctccccccgccttgcccggggttgtgggcaccttgctgc

SEQ ID NO: 304150 - DNA, 122 bp, Homo sapiens
aagccgactttgtcaccaacgtcatttccattgtcatcagcaccgtgcacttaatcgcagcgtaaggagggaaggcttgctggggattagcagatgatgggactgtgagcctctctctgagg

SEQ ID NO: 304151 - DNA, 122 bp, Homo sapiens
ttctccaaactggtcctgctcacagcctccaaagacagcaccaaggtggcgggggccaagcgcaagggtgtgcactgtgtcatgtccctgggggtgcccggccccgccacccttgccaaggc

SEQ ID NO: 304152 - DNA, 122 bp, Homo sapiens
agcccaaggcctgaagaatagtagagacagaggccctggcaccctcctcacctgaaaagccggggctcacggatgtgctcaggctccagggccacaccctgcatgtactcatagcacagccc

SEQ ID NO: 304153 - DNA, 122 bp, Homo sapiens
actgctttccatgagcctccttgatttgttaaatattgaaggcacttacctaaatactgccgtgttgccagtagcgtgccggttaccagtttggccgttcttgtacacaatatgtgagtaat

SEQ ID NO: 304154 - DNA, 122 bp, Homo sapiens
cacgctgctgtcctaaccttagcgccactcggggagaatgaaggaggcccaccgagcccccgacaaagctgcaaaacccaggagacgcgcacgcgggaccatcacactgtcaagcagaccgg

SEQ ID NO: 304155 - DNA, 122 bp, Homo sapiens
gcaaagggctaaccccacgtgtccctacaatggtgcatctcccgcgtggttaaaccccatcgtgcatgccaaggtaaagtccactggtgcctccgacactgttacctgtagtttgtggggac

SEQ ID NO: 304156 - DNA, 122 bp, Homo sapiens
gagggtgcaagagtgatgagagatggtgagagcatgggttgagggcagggcatgcgggaacggagggagagatgggcagagaggtgatgactcctcaaacccgttgccatcctgaccctgct

SEQ ID NO: 304157 - DNA, 122 bp, Homo sapiens
tccgggagggtgtctctattgtcccgggggctggggcctggctccctaacaaaggccccgcgccccctccccggccggccctgccccgcccaagggggacccagacgggggagagccagggg

SEQ ID NO: 304158 - DNA, 122 bp, Homo sapiens
gcggcttccccgcgtccccggccctgcccgccgcctctgctcccctccctgcccggccctcgtcctcaggcttccccgcgcccccaaaccagcggtgccccgcgccccctctcctctcgcga

SEQ ID NO: 304159 - DNA, 122 bp, Homo sapiens
tctgttgatatgatgtgtcacattgagtgatttgcatatgttgaaccatgttggcatcatcgggataaatcccacttagacgtgatgaatggtctttttcataggatgagtttggaatacta

SEQ ID NO: 304160 - DNA, 122 bp, Homo sapiens
gattttgcgtggctctctggccggtctgatgcagtctgtggccagcggcagagcccctcccgagtgccctgagctcacgtgggcccggccctctgtgctcagtcctaccaggacctggtcca

SEQ ID NO: 304161 - DNA, 122 bp, Homo sapiens
gagagagaatgggtttggaagtagagtagtggcagagtagatggccagaaatgagaaggtcgaaagatatatgttaactgtagacaccaggtgaaggaggaagggatcatggcaaccagaag

SEQ ID NO: 304162 - DNA, 122 bp, Homo sapiens
taggcgatcggcggcagcgctcctgcaggcggccggctcatcatgaagaagcactcggcccgggtggccccgctcagcgcctgcaacagtccggtcctgacccttaccaaagtggaaggtaa

SEQ ID NO: 304163 - DNA, 122 bp, Homo sapiens
gggggcggttggggcaagggagcaaacagatgccacagtgcagattactaaaacttccatcggaggccaacccccgccttcccccgacacacacgctagcgcactcacacaccctggcctcg

SEQ ID NO: 304164 - DNA, 122 bp, Homo sapiens
gctgggcgtggtggcgggtgcctgtaatcccagctactcgggaggctgatgcaggagaatcgcctgaaccaggcagatgcaggatgcagtgagccaagattaagacactgcactccaaccta

SEQ ID NO: 304165 - DNA, 122 bp, Homo sapiens
ttctacgggcctgggaggggacgcagaggctaccccggtggtcccagcctgcagcgttcacgtgaggaaacttccgcaaaagccctgatgcatgcacattctgactgcagaggccagagcat

SEQ ID NO: 304166 - DNA, 122 bp, Homo sapiens
tccttaggggcgagcttgctgatggaggggaccacagtgtggagccaccagacggcatcccgctggatggcggcaatctggttctggaatgagcggagcacttccaggtctgaaacagacac

SEQ ID NO: 304167 - DNA, 122 bp, Homo sapiens
atccaaaggagtgggcctgttagggggttcacaggtcgtgggatgagctcttatgagcgccggctaagtgccgggctctggggtgcccttggcatgtacgggctcccctaattcccaagacc

SEQ ID NO: 304168 - DNA, 122 bp, Homo sapiens
tggccgcccacccgccggctgcacctcacagccgctcctccccagcctgctggtgtctgacgttggcatcccctctgtgggatacatcaggagcccatccggatccggggccggcaggtggg

SEQ ID NO: 304169 - DNA, 122 bp, Homo sapiens
ttgagacagcctgggcaacagggcaaaacccagactcttaaaaaaatacaaggccgggcgcggtggctcacgcctgtaatcccagcactttgggaggccaaggcgggcggatcacgaggtca

SEQ ID NO: 304170 - DNA, 122 bp, Homo sapiens
ctagtccaaccgggtcattctacagatggagaaactgaggcccggagatgagcctcaacgcgtctaagtcacagaacaagtcagtggctatgtctctaaggctcaccgtggctgttggagtg

SEQ ID NO: 304171 - DNA, 122 bp, Homo sapiens
aattctgtaataccaagaagagggagctgaaaaggaaaattttcagattaataaagaagacgccaatgatggctgaagagtttttcccagatttacaagccactggagaccccttttttctg

SEQ ID NO: 304172 - DNA, 122 bp, Homo sapiens
gccagagtgctgaggagaagcctcgtgccccagagaaccaggaagcgcagccctccccttcgttgactctggcgccctctgcaggcgaccttcagtaacaactgcacagcaacataagcaga

SEQ ID NO: 304173 - DNA, 122 bp, Homo sapiens
accacccaatctaatccgtagtcccgtcatggccagatcgcagcccagatcctggagggccggaggtaacggggtctcgcagcagcagcacttccctagttcagcaccctccatcccggacg

SEQ ID NO: 304174 - DNA, 122 bp, Homo sapiens
cctgtccccaagttcagtcatcaggagggcaggtgcagcttcccactgtagcacagcgtgcgccttcttctaaagagaggacctggggacatgtaggcttgggtgggtgactcagccttcct

SEQ ID NO: 304175 - DNA, 122 bp, Homo sapiens
gaagaagaagaaaaaccaacttaggcaggagagtacagagggacatgaaggaagcaggagcgtgcacacttgaaagcgtgtgttagcatcagcagcccccgccacccctgcaggacatacca

SEQ ID NO: 304176 - DNA, 122 bp, Homo sapiens
tctcgcggccgcgggtacagaagtacatgcacgtctcgaaccagaccttgttgagcagcccgaagggcgtgttggtgctgaagacgctggaggtgtacagcttgcgcaggtcggcgcgcgtg

SEQ ID NO: 304177 - DNA, 122 bp, Homo sapiens
tgtacactagctcatatgtgccattcttgtggtccaccactggcaccggaaggcgcgtgccgtccgggccggtgatctctgcacgcagctcagcgctgcctgtgcgcaccaaccgcccgtcc

SEQ ID NO: 304178 - DNA, 122 bp, Homo sapiens
cctctggcctgtcgcagcctagctcacggtcaagggcgggagcctgctgggaagcacggccgcgggggctcgctcggggccacctgcctggaactcagcgcgaggtccagagttccctccgg

SEQ ID NO: 304179 - DNA, 122 bp, Homo sapiens
gacaccaataatttattggtttaaaaaatattcctgtttagggccaggcgcagtggctcacgttagtaatcccagcactttgggaggccgaggtgggcggatcacctgaggtcaggagttaa

SEQ ID NO: 304180 - DNA, 122 bp, Homo sapiens
gtgaggggaggccgggggtggggggcaaacggaagggagaggaggccaggggaagtgagacgctgcttctcagctcagacacagcccggccttgccagccgcccctgctgctgctgtggtga

SEQ ID NO: 304181 - DNA, 122 bp, Homo sapiens
ggagatacctgtgtgagtaattcggttctccaatcccctgggtcactttgctcttgtgcacgctttccagtctttcagcgtaagccagagtcattcccaaggatgctggtttctctctgggg

SEQ ID NO: 304182 - DNA, 122 bp, Homo sapiens
tactactatctttggtttgcagtgttgactcacctgtggagtggtctgagcctgaatgcccggggctgtggccaccgagtgaacgggctgtgctaaggggaattgccaccttgggaaacctg

SEQ ID NO: 304183 - DNA, 122 bp, Homo sapiens
ccgcttccccaagacttgggggcttgtggccgagttgttttagttttcctgtaggattcacgggtggctgaggcaaacacgcttgaaggcctaagacttttaagtctcttccgcaccctctc

SEQ ID NO: 304184 - DNA, 122 bp, Homo sapiens
tcacctagtggatcccgcactggggttgcaggtggagctgcctgccagtcctgcgccctgcgctcacgttcctcagcccttgggtggtcgatgggactaggcacagtggagcagggggtggc

SEQ ID NO: 304185 - DNA, 122 bp, Homo sapiens
ctttgctttcgaagcattaagtagtaataaaatgtatttctgaccagctgggcaatatagcgagacccccatatctacaaaaaattttaaacattaggccaggtgtggtggctcacgcctgt

SEQ ID NO: 304186 - DNA, 122 bp, Homo sapiens
tgctcctctgaactgggacgggcgtcgctgaccgcttggcgatgtcccaagtcccagtcacgcctgacggggaaacttaaaacccagttagattactgcgccagctctggaatcgcacagca

SEQ ID NO: 304187 - DNA, 122 bp, Homo sapiens
cactggcttgttaactcttcaagggcagaattatgggcaccgagcctctaaaatgttgaacgaatgactgaatatcatcaagaggcagtactaaaagatgatgaaagaatgaatgagcggtg

SEQ ID NO: 304188 - DNA, 122 bp, Homo sapiens
gcggctctggcagctccccggggcagtgaggccttccctctgagtgctcaccatgacaggcggcaaacactcttgtctccgggtcctggtctaagaacctcctcccaacgtctgtctggctc

SEQ ID NO: 304189 - DNA, 122 bp, Homo sapiens
gcaaccttgaacttctggcagagcgctccgctgaatgcccctcccattcgtgggttccaccgcactctggaaacatgaaaactgtcctttgcacgcaaggctacggggctgagatcaaagcc

SEQ ID NO: 304190 - DNA, 122 bp, Homo sapiens
gcttttcaaatctgtaaaaatgttccggggaatgtttccgaagtccagggctccgtccttcggcgggattgctggcattcgggcaaggcgagtcgcggtggcctctgaggctcgcagccagc

SEQ ID NO: 304191 - DNA, 122 bp, Homo sapiens
gggctcgggacctgcagcttgccatgcctgagcctccccctcctccatgggctcctgtgccgccgagcctccacgacgagcgccgccccctgctccatgccgtccagtcccatcaaccaccc

SEQ ID NO: 304192 - DNA, 122 bp, Homo sapiens
gagcctgagaagacatgactgctagatgtaatgtggtatcctacatggaattatataccacgaaaagaaaaaaaggtcatttggtagaaactagggaaatctgaatacagtgtggacttcag

SEQ ID NO: 304193 - DNA, 122 bp, Homo sapiens
taccgggggcttccacttctcatttggtgttggtgcttttccctttggctttttcaccaccgtcttcaatgcccatgagcctttccgccggggtacaggtaagagtcacactcagctcccat

SEQ ID NO: 304194 - DNA, 122 bp, Homo sapiens
cagcacctccatgttgaaagggtttttatcttttatgttgaaaatggcgccatatacctacgatgcaacagaacaaagcaggagaggatgaagttcttctccaatatagagtcttatatgtg

SEQ ID NO: 304195 - DNA, 122 bp, Homo sapiens
gccaccacctatacgacaggagctacttaatatgtatgctcttgtttgatcattttttaacgtaaccaaaaatttcaggcagccaggattcaaaggttaggtggctatgttggtctaagaac

SEQ ID NO: 304196 - DNA, 122 bp, Homo sapiens
gggatggattaggggtgtgggaaggggagctcattggtgttggggaggcttaggtccacccgatgtctctgaggcagcccctaagggcccaagcccagcgtgtcacaaagcccagctcagac

SEQ ID NO: 304197 - DNA, 122 bp, Homo sapiens
ttttcatctgcggaactctttctgcgaaggaaatctcgcctggaactcaaatatatacaacggataggaaacctattttcttactattaatatatttgataagtttgaatgtgtaacattcg

SEQ ID NO: 304198 - DNA, 122 bp, Homo sapiens
agcttctggattcttccgcaggaaagctcactccggggtggggacctcacctttgtagagcggtgtctctcgggatttgttggagatgtccggctctgcccctgcttggagcagtgacagga

SEQ ID NO: 304199 - DNA, 122 bp, Homo sapiens
cctagggtcagccacccatgtcccaagatctttggtccctggtgtgtcttaccttcaggtcgccggggcaccgccccctcctgctctgtgggactgggaggccgggctggtcgtggagtaca

SEQ ID NO: 304200 - DNA, 122 bp, Homo sapiens
agaaaaggggaaactttccgctgcgcctcctgtcgctgttttccttggctcccggaggtgcgcagtatcgggtccgtttttaaggtaaagaaactgaggcctagaaagagaacaggataacc

SEQ ID NO: 304201 - DNA, 122 bp, Homo sapiens
tgacccagtatgagaaacagacacatgggtgacacaactgtagaagctgagggttcaagccgtaatcctgttagaggccatgtgtcccctacacatccctgaactctgtgttgacagagctt

SEQ ID NO: 304202 - DNA, 122 bp, Homo sapiens
caggcaaaaggtacaacagggaaacacgagaatgggtctcagaggcacccctggtacccccgtcatcacctgctgagacagagagcctccctggccatccaggaataatctagaagttatcg

SEQ ID NO: 304203 - DNA, 122 bp, Homo sapiens
cccccagcgtgcgcgcggccgccgtgtacgacccggcgcatgctcccggcacgctccacgcgctcctcccatccaggccgcgcctgcgctgtatgccgtgtggccgctacctcgcaggctct

SEQ ID NO: 304204 - DNA, 122 bp, Homo sapiens
ccaaccagcaaggagcgtttcgcacagagctgcagagagtctgtgccttccaacgagagccgtgtcccgaacgccatccacttagctctcactctcctccttcctcctttccctgccgcttt

SEQ ID NO: 304205 - DNA, 122 bp, Homo sapiens
gattgccgtggctcgaggcccccggagaccaaagaccgggcgtggagcaagaaaaacagacgatggaaacctgcacctcgtccccagccctgccactgacagcgtgtggctgtggaggcctc

SEQ ID NO: 304206 - DNA, 122 bp, Homo sapiens
caaacaaactgcaaacaacaaactatgagtaactatatctcgccagtgtgcaaatgattccggtagtgccatctcttgttctgacctgttatgcagggttactgagtggctactcaaaagaa

SEQ ID NO: 304207 - DNA, 122 bp, Homo sapiens
aggtagatggatcacttaaggtcaagagttcgagggagcggcagcggcggccaggcacggcgcgaggcgacgccacaggacagcggcggcagcaggaaatgcagcggcggccgcagcagcag

SEQ ID NO: 304208 - DNA, 122 bp, Homo sapiens
agccataggagagcaccagctgagccctggggctgtgcagagaggtgacccctggcggcccgtcagctccagctctgcctccactgtgacaaggacctcatgagagacccagagcagaactg

SEQ ID NO: 304209 - DNA, 122 bp, Homo sapiens
gcgctcggccgcctgggtcctctcgtcggctccgcggcacaccaggcggccttgcatcagcgcgctcaggtactggagcaccacggcacgctcggcctcagccagcagcagctgcggggagg

SEQ ID NO: 304210 - DNA, 122 bp, Homo sapiens
agagagtaaagttctaggttgaaatagcaatttctgcacatttcctcatttttattcatccggttacagagttgaacatcctctggaagaatttaggttgtattcagttattctcattttca

SEQ ID NO: 304211 - DNA, 122 bp, Homo sapiens
aaggggtgtgccaaggcctcttccgctgtgtagcggttctggggttgcaccaccaggaatcgggagacctgtgagaggaggagaggggaaccgagaatgtcaaggcaggtcccctccagcat

SEQ ID NO: 304212 - DNA, 122 bp, Homo sapiens
tcaccatgcttagtcatgcgctcagctggcagggcagccatgagacgtgtgtgcgagaggcggcgatgggtggagggaaccccacacccttcctgagaagcaggggcagcctggctgcggct

SEQ ID NO: 304213 - DNA, 122 bp, Homo sapiens
caagaccggcctggccaacatggtgaaacttcatctctactaataatacaaaaatcaggccgggcctggtggctcacgcctgtaatcccagcactttgggaggcggaggcgggcggatcacg

SEQ ID NO: 304214 - DNA, 122 bp, Homo sapiens
gctgggcttgggcttgccactgtagggagtgggggtgcctgcagcagcacctcgactgcccgcctcttggcctcagcttgctctaagaccttacccatcaggaagtgcttgcatgaataagt

SEQ ID NO: 304215 - DNA, 122 bp, Homo sapiens
aaagtcaaaaagggcagccttaaggtgggaatgtgggttaccatgtttcgtcagcatgatcgctgtgatgggagagggaggattaggagggccgacccagtgaagaggagggggcttcacag

SEQ ID NO: 304216 - DNA, 122 bp, Homo sapiens
cagggggatgagggctgtgcaggggagtggcatcttcccctcctccattctggatctctccgtgaaatccccctaacccccagcactcccagtggataaggtgggatgtggagtaggggccc

SEQ ID NO: 304217 - DNA, 122 bp, Homo sapiens
tataatttctttgtcaggttccaaacggaaataaccctagaataccttgtgctccatagacggtaattccttttctccttccctacaaaagtgatgtttcaggaaatgaagttagacggaat

SEQ ID NO: 304218 - DNA, 122 bp, Homo sapiens
aaggagacaaagagaaggtcccagaaagggagaccgcggagagactgcgaagagcgcacccgccctgtacctaagcagagaaagagacggggctggtggggacatctgaaaaactgggggtg

SEQ ID NO: 304219 - DNA, 122 bp, Homo sapiens
agacctgggaccagccctacctccacctgcccttcagggtcactgtaaaggataaagagacgtccggctcagaggagcgccccagacccggttctgtgaatggcatgcaggtagcagctgcc

SEQ ID NO: 304220 - DNA, 122 bp, Homo sapiens
ctcctcgttctgtgcctataacattgcattcccagagcatcggtgccacctttccagctgcgacagtgtaccctgtgtaccacatccagtaacctgcaataagagacgctccatacgctgcg

SEQ ID NO: 304221 - DNA, 122 bp, Homo sapiens
caaaggacatttgactgtttactttctccacactaagtcttctccatgttttgtggccttcggttgtaataaacttggcttctttatacatctgtaactgtgcctgtgtccctcattcactc

SEQ ID NO: 304222 - DNA, 122 bp, Homo sapiens
atccctgtaggagaaggaagagataccaaggctctatgaggacgcagtgtgggaggcggccgtctgcaagctaggaaagaggcctcaccagggactagccttgccggcatcttgattctgaa

SEQ ID NO: 304223 - DNA, 122 bp, Homo sapiens
gggacccgcaccgtggtcctctgattagggttgggtcgtggagagccggcgacgtggaaacgctccggattcaggaacggcgcccaccccattgccgctcggccgcgtccggggtccaattc

SEQ ID NO: 304224 - DNA, 122 bp, Homo sapiens
actgtgtgaccgtgtcagctcgccccgtgtctggtgttagtgagatcagagctcgccccgcgtgctggtgttcttgagatcagggctcaccccgcgtctagtgttagtgagatcagagctca

SEQ ID NO: 304225 - DNA, 122 bp, Homo sapiens
gtggggagggagaatgcggagcgcgtgcgtgcggggggcgtccagtgtccctgaacctggcgtgtgggggctggagcttattgggaggcgagggaggtggccaggggagccgggaccgtgcg

SEQ ID NO: 304226 - DNA, 122 bp, Homo sapiens
acaatatatataaatttctattgtgtaatgccactgaaatttgtaagttgtaattgctaccgaagttagcattcccttactgctacagaaattggtacaaaagtgaaatcttggctgggcgc

SEQ ID NO: 304227 - DNA, 122 bp, Homo sapiens
tggactgcttcccagcctcagacagagagcagtctgagtcaggcaggaaagtgggacagccggggagctggaccccaccctctgtgagccccgctggtacctgatggcatgtggcttggaga

SEQ ID NO: 304228 - DNA, 122 bp, Homo sapiens
aatcagtatagaaagtggacgtggcttggcttgttagatcgtttctgtatccgggaaaggcgatgtgggcagagctggagctgcccccccagaggggccagttgttggagacagcagtgatg

SEQ ID NO: 304229 - DNA, 122 bp, Homo sapiens
gtgtaaaaggaggtgagaaaatacaacctcatgtaaagaacaaaattacatcatgtaccacgtatttatttttaagggcatcattaaagctctccttttataatgtaaatgaaacaaaaaat

SEQ ID NO: 304230 - DNA, 122 bp, Homo sapiens
ccccagacaggcttctgaccaggcccttcccacctctgtcctcagcctgcgactgtcacccggttggtgctgctggcaagacctgcaaccagaccacaggccagtgtccctgcaaggatggc

SEQ ID NO: 304231 - DNA, 122 bp, Homo sapiens
ccgggcagcctggagtaggatttcaacatctcaagctggaggtcacgtgcacagagcagccggtggcaaacggggaactccaggaagccaggctgtttcagagaagtacttggagctggggg

SEQ ID NO: 304232 - DNA, 122 bp, Homo sapiens
cacctgccctctcctgagctatgcctctggccttcccgcctcctcctccacacggacctccgcgccccctgaagaaggggggaaaaagaaatacgcattaatacctcgagccttggcgcacc

SEQ ID NO: 304233 - DNA, 122 bp, Homo sapiens
cgagagcggcgcggggagaagcccgcagtgcggggccgggcgggctcagccaatggggagcgcggacggcggcgcgcgcggcgggggggcgggggcggggcactatttcagcgggggccgcg

SEQ ID NO: 304234 - DNA, 122 bp, Homo sapiens
gattgcagtgagcctgagatcatgccattgcactccaccctgggtgacagagcgaaactccgtctcaaagaaaacagcagggagtgacagaatccagttagttttagatggcatgttgcaat

SEQ ID NO: 304235 - DNA, 122 bp, Homo sapiens
ggcccattccaggggagcggggcagcaaggtgtgagacaggcaccgggcaggcgcagcaccgagtagcagcagcagcaggtagaaacaataagcggatctgaactcatcaatatggaaagtt

SEQ ID NO: 304236 - DNA, 122 bp, Homo sapiens
catgacttgtggggagctgagttctgggaaatgcatcctctggagaggcaccagaggccgcgcatgcctgagtgagtgtgggggtgcgccctggcctcactagccaaacaccaacttcatct

SEQ ID NO: 304237 - DNA, 122 bp, Homo sapiens
tgctgacctctcctttcctgatacaagtaagtaaattttcatttgcttatctaagtttaccgactatagaccctccaaggtgtctgaaggtgacttctaggttgcacagtcatatgagaaac

SEQ ID NO: 304238 - DNA, 122 bp, Homo sapiens
gggaggaaagccggggctgtgggtgacatgataagaaggccctgaggaacgttcaaagttcgccccttcctcctacaggaaccaaactttaacagccagagccagggagtgaaagagaaacc

SEQ ID NO: 304239 - DNA, 122 bp, Homo sapiens
ggaacacaggtggcaggtgtttggtacccagcctgcccaagaaaagtctccgcctggccccgccccaccccaggcccagcccacctctcccgttgctccgccgccagccgtcgccagcgggt

SEQ ID NO: 304240 - DNA, 122 bp, Homo sapiens
gggcaggtgagagcgggcggtcctgcccgggtgtgagcgcgacatcccgcgcggcacacacgctcacagcccccagagaaagaccagaggcgctcgatgtatcccgcacaccccacacgcaa

SEQ ID NO: 304241 - DNA, 122 bp, Homo sapiens
acacctgcttacaagtcagattaccatctcttttcctaaaattctaattcagtaggtcagcgggagggtttttgttttgttttgtttagaaaaaacaaacaaaccctacaggtgattcttta

SEQ ID NO: 304242 - DNA, 122 bp, Homo sapiens
gcgcgaagggcagaggccgaggcccaccgggaggcagaggcccaggcctgggagcaagcccggctgcgggaggcagtggaggctgctggccaggagctggagtctgcgtcccaggaacggga

SEQ ID NO: 304243 - DNA, 122 bp, Homo sapiens
attaacatgcccatcaccttacctgctcatcatttcctcacttttcatccagctaggtggcgtagggtaccacaagttgatttaatcctagctcctctggggacatgaagaacacaagagcc

SEQ ID NO: 304244 - DNA, 122 bp, Homo sapiens
gcttccggggaaggcggagggaacacgtgggcacattgagttgcacgtggacgcggagtgcgcaggcgtgcgctgaggccaggagggcgcactggggattggaggcgagggaagtgcagggc

SEQ ID NO: 304245 - DNA, 122 bp, Homo sapiens
gcgagagcagctgccctggctatccacgctcctctctgattggtcagctaagtgcgcatgcgcatgcgggtgaaggaccttgggggccacgacccctgctgacacgccttccctctttccgt

SEQ ID NO: 304246 - DNA, 122 bp, Homo sapiens
ctcccctcttactgtcgggggtcagcctttcttccttttcatggctaaatcgtgttccatcgtgtgggtaccggaggctccatcctgctcagggccagggccgtctccctggcacggccggt

SEQ ID NO: 304247 - DNA, 122 bp, Homo sapiens
gtaccctatgctctgaaaaggatccagaaaagtaccccaagttgggggatgagatttttacgcagtaattgttgactggtgagacattgactctgtttgacatgaatgtttatggttgtgtt

SEQ ID NO: 304248 - DNA, 122 bp, Homo sapiens
gggccatggaccagggggtggcactcgtcggggaagctctggccacgcaggagcccatggcggggagggggaggctcaggcatggtgggctgcaggtcctgagtcctgccctgccgggaggc

SEQ ID NO: 304249 - DNA, 122 bp, Homo sapiens
tttctaaatatcaccagataacttcacttttggtaacttgaattattaaaaaagtcctaccgtccctcatctcttgccacttccccaacattactggaggctctggctacaaataatttgtt

SEQ ID NO: 304250 - DNA, 122 bp, Homo sapiens
cagggccaatgaggcaccacacagatctgaggtatgcgacacacagagccagagaccctacgagtgggtctgttgtaacaaaggacagaagccaaaactatcagcatagggctactgtaata

SEQ ID NO: 304251 - DNA, 122 bp, Homo sapiens
atgtcagtaagttggtatgcagcttcttaacatcttataacccaacacaaccaattagtgcgttactactaattagtagcttactaccaattagtacctcacgtattaagtagtactcagta

SEQ ID NO: 304252 - DNA, 122 bp, Homo sapiens
gaaggtgccacacagacggggagccctcgtgccgaccgtgggcttcagctaatggcgacgcgtccatatggcccctcagtgcggcagacgcccccaccgcaccagtgcacgaggcactcgcg

SEQ ID NO: 304253 - DNA, 122 bp, Homo sapiens
gagagcgcccccttccagtcacgtgcagcgttcacttgttctccaggcaaggattagagccgaaggtgaatgaggcacagttcctgccgtcacagagttcaagggccgcttggagagaagga

SEQ ID NO: 304254 - DNA, 122 bp, Homo sapiens
aaaactgaggccaaagtcagagaagggtagccaaaggaaaacagagaaaagtgacaagaccgtatgaccgcagaacagtgtaaggaagcgagcacaacctagaggatgctgccttgagagct

SEQ ID NO: 304255 - DNA, 122 bp, Homo sapiens
ttaaaagaacaatggccaggtgcagtgtctcatgcccataatcccattcttttgggaggccgagacagggttgcttgagcccaggagttcaagaccagcccaggcaacatagcaagacccta

SEQ ID NO: 304256 - DNA, 122 bp, Homo sapiens
tacattatggaatcgtgaccaggtccagagggtctgcagacgagaacccaaacgcatcagcgtcctggcgtaaaacacccgtacccccaccgaagatctcgcggaagcctagggcgtccggc

SEQ ID NO: 304257 - DNA, 122 bp, Homo sapiens
tgttgtgtttgagcaacaccatccacgccgtgagcttactggaccctgggccgtgcccagcgaccgtggacactgaactaagccagagctggtgctcacgtgaagacaagggcagaggagga

SEQ ID NO: 304258 - DNA, 122 bp, Homo sapiens
acatgctcaaagacaaactacaattgtctgctagctatttcttcagaactggaactaatacgactatccttttctgttttatactttgattagaatgttatttcctcgcttacttaaaatgt

SEQ ID NO: 304259 - DNA, 122 bp, Homo sapiens
gcaagaatacaggatttacctgaaacggtggaggtgaaacagcagacacccccggcccaccggcatggctgtgcagcattcaggccacagccctgggcagccggcatcctccccaccaccag

SEQ ID NO: 304260 - DNA, 122 bp, Homo sapiens
ggccgcgcgggaccaaaacaagccgcgtttcctgagctccgcggagcaagcagaggagaccgcagtgaaggggctcagcagacaggggttccccaacccaaacccagtcttcgtcctcgtcg

SEQ ID NO: 304261 - DNA, 122 bp, Homo sapiens
taaaggggccgcgcggcgggggagggaggaaggagggggtgggggtgggatggggtcccgcgggtcatgaccctagtcagaggctccgagtctgcagctaacttaagtcttcggcactcgct

SEQ ID NO: 304262 - DNA, 122 bp, Homo sapiens
aaacgaggggcgatggggctccgtgaaggagcacgaaggagctgcgtgcggagcgtcctgcggtgggagcggtcctgatttgctgttcacacagtcgggacccttctcacagtctcacatga

SEQ ID NO: 304263 - DNA, 122 bp, Homo sapiens
tgcctcggcacgatgctaattcggcagtgcccggatggagcgggccggggcggcggggggcggtgccgggaccctcagcccgccgcgccccgcccccgccccgcccgcgcctgcgcactgcc

SEQ ID NO: 304264 - DNA, 122 bp, Homo sapiens
ccttctccctgctttcacaatttgcctttctctggttacctgggaggggctgcatcttctcggagggctactgaaaatttttacttttttgttggggaattgtttcatcctttcctgggcta

SEQ ID NO: 304265 - DNA, 122 bp, Homo sapiens
gcgcaagtagttttcagaacgtgtctgcgatcacagcacacatttttcagaacgcatctgcggtcatggtgcatgtgtttttcagaatgcatctatggtcatagcgcatgtatttttcagaa

SEQ ID NO: 304266 - DNA, 122 bp, Homo sapiens
atgcccgtcgccagtgacaccgggacaacagctgcgggctctgtgcgagcggcccagcagcgcggagcctcagcggagtgagcgagcgcggggcagtagcggcctgcggtgagacctcattc

SEQ ID NO: 304267 - DNA, 122 bp, Homo sapiens
gcggacattgcttcgtctttatcttcatcgccgggctgtttcttagactagcagccttgacgttgggcttcccgacgatgctatccattacactgtcagcaaagcggggggccgcgcatagg

SEQ ID NO: 304268 - DNA, 122 bp, Homo sapiens
gccgagcggggggcggggctgcggtgcctgcagaaccttggacagaagctccctagctgccgccgccgccgccgccgccgtcgccgccgccgagcgcgagcccagccgatccccgccgagcg

SEQ ID NO: 304269 - DNA, 122 bp, Homo sapiens
aagtcaggctgggaggatggggactggccagtggcctcctagagcaggggtgagtgtggccgtatttcaacaaacctctatttacaaaaacaggcagcaggagacatgtggccccccagctg

SEQ ID NO: 304270 - DNA, 122 bp, Homo sapiens
gaataatagaaagggaagtccccccacgccagcatggggattttcccaaagagcaaagcacggatttatgttcccctttcagtctcttccctccagtgtaatgatgggaaattctctgaaaa

SEQ ID NO: 304271 - DNA, 122 bp, Homo sapiens
cgcgtccccggagcccatgagcgcgctggcctcccgctccgcccccgccatgcagtcctccggctccttcaactacgcgcgccccaagcagttcatcgccgcgcagaacctcgggcccgcgt

SEQ ID NO: 304272 - DNA, 122 bp, Homo sapiens
taatccagagagcatccaaccattaccctaaaattaccaaattaaagaacttctccttctcggggagacctcaagacttatccccaatcctgtatgatccatggtatttatttggattctca

SEQ ID NO: 304273 - DNA, 122 bp, Homo sapiens
ttgggagtctaaggtgggcagatcacctgaggtcaggagtgaccatcctggccaatgtggcgaaaccccatcttaactaaaaatacaaaaaaaatcagccaggcgtggtggcgcacacctgt

SEQ ID NO: 304274 - DNA, 122 bp, Homo sapiens
aatgtgaaaggagagcctcatgtctagattgtgggcgagtgattgagccctgtgaccgctcgcgcgtgtgacccacagactgtgactgtgtcccctcagcatttattttctggatggtcaca

SEQ ID NO: 304275 - DNA, 122 bp, Homo sapiens
atccacccatctcggtctcccaaagtgctgggattacaggtgtgaaccaccacacctggccgaggtctgcttttctgatcagacaaaagtgggttccaaccttgactcactacatggcctgg

SEQ ID NO: 304276 - DNA, 122 bp, Homo sapiens
gtgaacgtgtgggaccagaccctgtcctgggggtgcgcccaagtcactttaaccacaaaacgccatcgtcgtcagggtaagctctgctctctacaaagactcgcgagccgggccaaggggcc

SEQ ID NO: 304277 - DNA, 122 bp, Homo sapiens
gggttccgcatggacgctggtcttgcctcccaggcgcctgaactagcggagttggggtatcgggtggagtctcggagaaccaatccaatctgagggggacgcctgtgggagtcctaagtatc

SEQ ID NO: 304278 - DNA, 122 bp, Homo sapiens
actaacctctgctggggctgagccagggcgcgtcggacagtcagggcgacccagccagggcgaccgttggccccgctcctatggggcagcagggaccgacgtcagcagggtggggcgggcac

SEQ ID NO: 304279 - DNA, 122 bp, Homo sapiens
ccaaacaagtatggcgttttgactctgtttaaacttgccgcctccaccaatgaggacctccgggcaccgccctcctcgtcacgggaccaatcggtgagcagcatcccctggccaatgagacg

SEQ ID NO: 304280 - DNA, 122 bp, Homo sapiens
cctgggtggtgacagagtagagatgtttgttttggtttccaaatcaacgcttgacaacctcgtcctcattgcggcttcagcgaccacatttcccacgtggtaaagacctggttgggccaagg

SEQ ID NO: 304281 - DNA, 122 bp, Homo sapiens
gcacctttgaggagccttcaggttgggagcccttgagggctatccttccgttagcacttccggcttccagagcaccaggagggtcccatctcagacaggctgggagccatactcattaaccg

SEQ ID NO: 304282 - DNA, 122 bp, Homo sapiens
tgtgttcctgtgagtaggctgtgccgatggcagcagcgccacgtggtatctgtgcgctggcgaggagaggagcgctttccatttggaggcagtgtgagcacacgctggagtgcagcgttcca

SEQ ID NO: 304283 - DNA, 122 bp, Homo sapiens
ggctctgctgctgtctgggtgtgccgtctctccttctcctggtctcccctgaggggtgcacgtgtccaccccaggcaaccgctgtgggtagaagtagctacggggctgtgcctggctctccc

SEQ ID NO: 304284 - DNA, 122 bp, Homo sapiens
cgcgccgccatgctgggcctggacgcgtgcgagctgggggcgcagctgctggagctgctccggctggcgctgtgcgcccgaggtgagcgggccgggcaggggcggggggctcggctggtctc

SEQ ID NO: 304285 - DNA, 122 bp, Homo sapiens
aacaaaacagacgctgactgctaccctcttgggatctaacctatagaggaggtcagctagcggtaagcgctaaagagaaaacaaagctgggaaggagagaggaagtgccagagatgggcgtg

SEQ ID NO: 304286 - DNA, 122 bp, Homo sapiens
tagttctcattgttttgcttttggcaaattttcactaagtgcccttcctccccaaacacacgtatatgtctaccagaccctaaagccctttatgaacatgcaaactcctcccttctgaaaac

SEQ ID NO: 304287 - DNA, 122 bp, Homo sapiens
tgtagtttctgtagtgggttggccttgagggtgccttgcttggattccatctgcacagggcggagcttgggcctctgactgtcacagttgccctgacagacactgaggtgacctcggccaag

SEQ ID NO: 304288 - DNA, 122 bp, Homo sapiens
atgggattagcctgtaatctcagcactttgggaggctaaggccgaaggatcctttgagcccgagttccagaccagcctgggcaacaaagcgagacgcggtatctaccaaaaataattttaaa

SEQ ID NO: 304289 - DNA, 122 bp, Homo sapiens
agggtcagcaaaggccctggacctgcctcaatgacactcaaggagtcatcgccaggtcaacgcggacaaacagcacggagcttccgaaccgaatggaatgtatggaatgccatgggatgagc

SEQ ID NO: 304290 - DNA, 122 bp, Homo sapiens
agtgtcagtaggggcgccccgtggtcagcgttgtgttttaaaacgatcactatcagcagtcgggagccagggaggccagttgggagactcagaattgaggtgggtgacagcaagaaccagaa

SEQ ID NO: 304291 - DNA, 122 bp, Homo sapiens
agccttcaggggactcctggctgggcggagtctgtagaggcgcgcggagtcctgggagagcgtcagatgtatttcctttcccttttttcgctcgtgtcccgccgggtggcgctcaccacctc

SEQ ID NO: 304292 - DNA, 122 bp, Homo sapiens
gatttctgcctttccacaccttaacttggaatcattcaggtgggttcctaagcattctctcggaggtgaggaatcctccaaagaggagactctaggaggggcccaggtgtggcaatcttcaa

SEQ ID NO: 304293 - DNA, 122 bp, Homo sapiens
ccgacagtggaagtcccacctgcgcccgacggcggaagttccgggagtgccaagtacccgcgtgcatacggctgccggcatggcacattacaacttcaagaaaattacggtggtgccgtccg

SEQ ID NO: 304294 - DNA, 122 bp, Homo sapiens
cacctttgagtcgcatcgagtcccagccccgccccggccccgcccctccccgccccgccccgccaagactccagccctggatccgccccgggcctcggcccagccccagttccggcccctcc

SEQ ID NO: 304295 - DNA, 122 bp, Homo sapiens
taagcacccctctgaccatcacactcacccggttgactaccaagtattgcctgaagcgaacggagcattcctgcaacggctccttttactgcccctccccctggcctaacctctgcttcccc

SEQ ID NO: 304296 - DNA, 122 bp, Homo sapiens
aacgacctggcatgctctgataagaaaacgctttataatctcgccaactaccttaactgccgtacactcccaacacgctcccgccaaagattaaagtgtggaaattggacctgttttttcct

SEQ ID NO: 304297 - DNA, 122 bp, Homo sapiens
tcttctgctaggtcctacagtgaatcaatatctcgtatttggtccttcagacagttgccacggaaatgagagctgcaaacactttcagctttctggcttcactgtgggatccagcatagaac

SEQ ID NO: 304298 - DNA, 122 bp, Homo sapiens
cgcgcgccaggctcgcgcagccgcagtggactgcgccgggctcgggctgcggaaaaggggcgggtcttcccccgaccgagagggccagtagctcctcggctcattcctatcccgcaccaggc

SEQ ID NO: 304299 - DNA, 122 bp, Homo sapiens
gctcacggaggaatcctcggtggctaaaatggtgccccgcgcagctgaggtgctcagttgcggactggatcgatctcctcatcccccacactctgcctggccgccgaggcgacttaatgggt

SEQ ID NO: 304300 - DNA, 122 bp, Homo sapiens
aagtaagacccctttgcctcacatgcccttctctgcccccgccctcctgcggtccttccacgctcagccaggagccccaggctcaccaggagcccctgcggtgcctcctcggtttctcggca

SEQ ID NO: 304301 - DNA, 122 bp, Homo sapiens
tgcaagaaggtacaaccatctctgggctgagaaccgcattagaaatggtcatccattgagcgcccccttgtgccaggcacttgcaactgctgccacgtgtgtgctattaagagctaacatgt

SEQ ID NO: 304302 - DNA, 122 bp, Homo sapiens
gggcgcgcagcgctgggggcaacagcgtggggtccggtcggcagtggggcgcgggctgcgcggtaagcagctcctcggagctcagcaccagccccagcactatgcagggtacccacgaggcg

SEQ ID NO: 304303 - DNA, 122 bp, Homo sapiens
ttcgcgccgttggggcgcccaggcgggaggtgtgagggttgatttggttcgatgtcccggcgcggcgtttccgaagctgtttcttttcctaggttaagcttacaccgccgcttttggccaca

SEQ ID NO: 304304 - DNA, 122 bp, Homo sapiens
caggcccgcccctcctgcctcaccgccaggtgagcgatcctcgagctaggcgggaccctacgtgcccagagctgccctggaagggggctcctgcgggccctttaagagtcaggcctggagtt

SEQ ID NO: 304305 - DNA, 122 bp, Homo sapiens
cctcccgtcggctcattcagccgcggaagcccctgggagaccccgccccgccccgtcccgcggtgccccccgcgcactcaccctcgctcacccacgcggccttcctggcgggagagcgcttc

SEQ ID NO: 304306 - DNA, 122 bp, Homo sapiens
tctcctccctgcgcagtgactgtgctttggcctggagccctccctgggcagctctgcacccgcagcgtcgcatctctcgccgagtgtgcagggacgacgggagaatagtaaagagaagaatc

SEQ ID NO: 304307 - DNA, 122 bp, Homo sapiens
ccgccatgcctgagcctcccaccccctccgtgggctcctgtgcggcccgagcctcctcgacgagcgccaccccctgctccacggcgcccagtcccatcggcgcccagtcccaagggctgagg

SEQ ID NO: 304308 - DNA, 122 bp, Homo sapiens
gccattgagacactgtccagggcctcactagaaacactagatgtgagggtttggcaagggcgtgatagggacttactagctgtgaaaggtggaaaccgcttgtcgtttccactcttctggaa

SEQ ID NO: 304309 - DNA, 122 bp, Homo sapiens
cgcgcgggaggagcgcgggggacgccggcgcgcgccgccccacctcccggcgcccgcgcccgcgccccgccccgcccccgagccccggaggacccgcccatatccccgcccacagccccgcc

SEQ ID NO: 304310 - DNA, 122 bp, Homo sapiens
gagtaaagctgggaggagaaggcaactcaggcaagggtcaggactgaaggggtggcgggccggaacatgggtggaatccctgtgctcagttatccccgcacctctccacccacacccgcagc

SEQ ID NO: 304311 - DNA, 122 bp, Homo sapiens
gtgtatagcccaaactcttcttgagcaccctacctggtttttgtcccatttttttgcatccggttttgtccagtggaccttagtcacaaggtgtaggcagggctgctgaaccaaggcccaaa

SEQ ID NO: 304312 - DNA, 122 bp, Homo sapiens
gtcatatatttttgttatagccaaattctttcaggtgaatcactcagcttttgtactgttcgtgccttacagaaagctggaagtactgtgccccctgctgttgaaatgtgaatacatttggt

SEQ ID NO: 304313 - DNA, 122 bp, Homo sapiens
ctccagctgctgccaattccagcccccaaggctgtcccaggaagctgtggccagagactccgggactgtcctgtgagcagagggcacccactgaccctggggcacccttccaatccccacag

SEQ ID NO: 304314 - DNA, 122 bp, Homo sapiens
acaccctcgtctagtaaccattctatctgagtcactttcttgtatccatttactgagtcacgtctactccaccctatgaaagtatgctcacttttgttgcacccacactatttaacacataa

SEQ ID NO: 304315 - DNA, 122 bp, Homo sapiens
gactgcaggcccgtaggtcgctccctatccgtgagggattggttggttccaggacacctgcggatcccaaaatctgcggataatcaagtccctgttataaaatataaaatgggctgggctcg

SEQ ID NO: 304316 - DNA, 122 bp, Homo sapiens
cgggatagatggacactgggaggcacatctcgtctgcagttcctcattgggctaggtaggcggcttgcaggtgatggcagtacaagaggtgaagaaggtgcgggcagcgcctgggcgagttg

SEQ ID NO: 304317 - DNA, 122 bp, Homo sapiens
aaacagggcctcactggaagcattactttcactgggtacctcctgtgtctgactctgcctcgtgtttttgcactgcctggaaaatgtgagtacttacctaagaggagactgggtagggtcag

SEQ ID NO: 304318 - DNA, 122 bp, Homo sapiens
ccccgcccagcaggctgcggttcctttaaaggcgcgctggtgtggggcggccccttctctcggggctggctcgggagtagcgcagtcgccaaagccgccgctgccaaagctgccgccactag

SEQ ID NO: 304319 - DNA, 122 bp, Homo sapiens
ctggctgtaatgaagcagcatctcactgagcagtctcacgttgttgttaacttcctctaacgtgtgcagacgcttggtcaccttctggatccgtgcctcgtcctgccccagtgaagaagttc

SEQ ID NO: 304320 - DNA, 122 bp, Homo sapiens
ctaaactggcaggcccttccccatgtcacacttgaccatgcaaggggacactcagatacacggtgaccagcccggccgactggacttcagggggacagcatgtggccgcccatccacggggc

SEQ ID NO: 304321 - DNA, 122 bp, Homo sapiens
ggccggggatcaagcgtggtcggcgggtcagaggtcaaggaaagccgcagagagcgcgtgcgcgatacggcgctgggcatgcgcattgcctcagtctaagggcgggccaccgggagcgtctt

SEQ ID NO: 304322 - DNA, 122 bp, Homo sapiens
agcatttaagtggcagaacctgatccaaaccaaagtctattcccaaggactatacaacaccgtgccttggtttgtggtttgtttttcttcagttcctgcagattaaaaatggggattctaac

SEQ ID NO: 304323 - DNA, 122 bp, Homo sapiens
tcactggacctgcagtctctcaggggctggtggcaggcgactaggagactagggtggtggcggtgggggtgccagcggctgagccggagccggagccggaggcgggggaggggaagagggcg

SEQ ID NO: 304324 - DNA, 122 bp, Homo sapiens
aagtcagggtggtcggtagccttgcgcccgcaggagagatatggcctgaagcctgctgcacgtgcgtgccacacgcgtgtggggccacctctgcacatcctgaggtgacccttttggggggg

SEQ ID NO: 304325 - DNA, 122 bp, Homo sapiens
cacccggcctcatgcaaccttttaataaacataaaatgtcattagaaacttccagtcaggcgcggtggctcacgcccgtaatcccagcactttgggaggctgaggcgggcggatcacctgag

SEQ ID NO: 304326 - DNA, 122 bp, Homo sapiens
agaggttgcagggagcaagatcgtgtcgctgcactctggcagggcagtagagtgagactccgtctcaaaaaacaaaaacaaaaacaaacaaacaacaacaacaacaaaaactattatgaaga

SEQ ID NO: 304327 - DNA, 122 bp, Homo sapiens
cagacgagaaggctgcttgtgtttagggactgtagtacccgatcggggtggcggttcacacgggtgcgtggcatcaactcccggcgctttgcacctggatggattcccaccatgtaagattt

SEQ ID NO: 304328 - DNA, 122 bp, Homo sapiens
cgagctactagggacacaggacctcggcttgtcgcctgaactcttctctgttgaaagccccgcccccttgcaatgtcattgatttgtcattgtttgttctagcctatctccaccctcgcagc

SEQ ID NO: 304329 - DNA, 122 bp, Homo sapiens
cccaggtgtcctgtataaccagttcctgtcgcaagtggactttgagctgctgctggcccacgcgcgggagctgggcgtgctcgtgttcgagaactcggccaagcggctcatggtggtgaccc

SEQ ID NO: 304330 - DNA, 122 bp, Homo sapiens
cggcggctggttcaggatcggtggctttctgctgtccggccggaaacaggcgccagtttccggccggagcgggttggtggtgacacccaggccgcccccgggcctcctcccgctccgccccg

SEQ ID NO: 304331 - DNA, 122 bp, Homo sapiens
tcagttccttaaggtcatcttcaacgctggaaatgattcacatttggaacactgacctcccgtgctttttctgaggtgtgtttcaacaccaacagcaggctaaaccaaacatctgaaatgca

SEQ ID NO: 304332 - DNA, 122 bp, Homo sapiens
tttaacagtgatttatccattttcagcaaatatttattgagcacctattctggtttttctcgcgtggggaacaaatagacaaaaattctgtcccccagtggagtttggggaaagagggacag

SEQ ID NO: 304333 - DNA, 122 bp, Homo sapiens
catttctcattgggcttcagaagtcacccttgaagtactccccgttttagttgtttgctgcgtgcaccttgctgggcgcgtggggcacaggttcacagccggcctagcccctgagggcatgt

SEQ ID NO: 304334 - DNA, 122 bp, Homo sapiens
ggacctccatcatagccatgatcctgtcagagtctgactgctgtaagtcagccaggcagccggtcactgaagcccttccttctctattcttttatagtcagtgaggaaatgaaagcgaatga

SEQ ID NO: 304335 - DNA, 122 bp, Homo sapiens
gctcacactcacctcccctcactgtgtatctcgcacagtaatacacggccgtgtccgcggcggtcacagagctcagcttcaggtagaactggttcttggacgtgtctacggacatggtgatt

SEQ ID NO: 304336 - DNA, 122 bp, Homo sapiens
ggatcacgatctttcagctactctactcctatgatcgactgcatgtaacagagattctaacgttcaacgacaagaggattctcaacgtccactccaggctcacagatgccaaactggcatta

SEQ ID NO: 304337 - DNA, 122 bp, Homo sapiens
ttcctgtatttcattcctttgttactttgtgcatttcgttcgagcaatgactcattctgtcgcccaggctggagtgcaggggcatgatcacggcttactgcagcctcaacttcctgggatcc

SEQ ID NO: 304338 - DNA, 122 bp, Homo sapiens
cctggagtgatagattcactttcatgtttcagcctgattttttcccactgtatgcccacgcgtgtgtgtatgagtgtgtgtgtgtgcgtgcaggcacacacacgcacactcacattttcctt

SEQ ID NO: 304339 - DNA, 122 bp, Homo sapiens
gataaaccctaaaggacaagggtttttgtctcagggccagcaatcagttcaacttctattcgtggcctgttcccttctctgaagacctctggactctgatgaaaaaataaaccctacctttt

SEQ ID NO: 304340 - DNA, 122 bp, Homo sapiens
cttggcgcagctcaccgagagctcgtgcatgccgggcaagcccacgctggtgtaccgcagcgtagtgggatctggtcttactcgcagcaaaggagattttactctggagagtcgcctcccaa

SEQ ID NO: 304341 - DNA, 122 bp, Homo sapiens
tctcggggctcaggctgggaagggctgggagatggggaccgaacggagactcggagaggacgtcccctgctggcagaggaactggcgttaatgccattttccgagctaagctcttagttgag

SEQ ID NO: 304342 - DNA, 122 bp, Homo sapiens
ggagccttcagcctcccgccgcgaggctgccacgtgcagggctggggtgcggggcccggacgcatccgtggacttggaggctggctcgggcccgcacctcccatccccagctgcccgcaacc

SEQ ID NO: 304343 - DNA, 122 bp, Homo sapiens
ggtttctctgctcccgggtctcaaatccgggttcttcccttgacagctggcgtccaccctcgagcatttgcgaatgtcaggctgacacctgtgtctgagcctgtctgggcaccgggactgct

SEQ ID NO: 304344 - DNA, 122 bp, Homo sapiens
tcagcatagccctccctgtggccctggtttccagtggggcccacatcgggcctgcagagccggccctgctcctcatctcggaggaggcccactgggccactggaccccgggggaggcagatg

SEQ ID NO: 304345 - DNA, 122 bp, Homo sapiens
tggagctctcaggacgtacctggtcatccatggtgttaaccccatccggacccaaggcctcgatggcttggttgatgaggtccgtcctcccacagttgagcatgcggaaacccaggtcctgg

SEQ ID NO: 304346 - DNA, 122 bp, Homo sapiens
aactcctgccgcccagcgcgcctgagtccccacgttgcgcatcaggctgcaccaaagttccgcgagtgccggaagtgccccgggacttaagaaaacaggagcaccacaaggaaggccagtcc

SEQ ID NO: 304347 - DNA, 122 bp, Homo sapiens
tatctttttgctttctttttaaaaaagttccctgctacttacccctagaactccacaatgcgagaatccccctcaatttgtgagctcccgcgacttcctcttgtgggcttttggggatgcta

SEQ ID NO: 304348 - DNA, 122 bp, Homo sapiens
cttggagcccaaagaggcgtgggttggaggccggagctgagttctgctcgcgtggcctcccggcctcagcttacccatcattgcagcggggatcacggtcccatctgcacaggactgaggtc

SEQ ID NO: 304349 - DNA, 122 bp, Homo sapiens
tgcgctcctttcctagctcttccggcctcagattactctacccgctcaatctttcctccccgcacaggtgccccggagaggccatggagctgagcagcaagaagaagcttcacgccctgtcc

SEQ ID NO: 304350 - DNA, 122 bp, Homo sapiens
cctcgtggccgacggcttctgagccaggcccgtctgggcagcagctcccaggccctggcccggggctcagcgctgcctcgtggctgagaagctcctcaccacctgctgtgaggccgtggaaa

SEQ ID NO: 304351 - DNA, 122 bp, Homo sapiens
gaatcgcagggcctggcacatggagaagctgccagggtgaggctccccatacaccccacgcgccctgcccaccacgaggcctgtaccctctgggcagcaggtgccgcgcgcccccgggtacc

SEQ ID NO: 304352 - DNA, 122 bp, Homo sapiens
tgaggaagctggggcttagaaagggtgtaggaccttgctcaaggccaccaggcaaattcccggcagagacagggctggaagccagacccctcctgacggtaactctctccactcacccggca

SEQ ID NO: 304353 - DNA, 122 bp, Homo sapiens
tttcaaacatgggaaggaatcccacactgatccctacagtttctagagagggaaccttaccgtcccagagacacacaccctcctggaagagcagaggccaccagggaagtctccgaattcct

SEQ ID NO: 304354 - DNA, 122 bp, Homo sapiens
ttcccatccaccgcgggtgcccaggaaaggcctgtggggctctcctccccgcgctccacacgccctcgcatcccaccgaggggccagcttctgcctgcacgttgctgaaactggcctggagg

SEQ ID NO: 304355 - DNA, 122 bp, Homo sapiens
tttgtgtatgtggttataacaaagaatgctgttattaagatggaaagaaaggaaaattctcgtaagtcaggcttggtgtgcgcctgacatatttcactcttggaggttatcagtggttgacc

SEQ ID NO: 304356 - DNA, 122 bp, Homo sapiens
tgaccagtcagtcgcctttgattatcagttgccagcagcccttctcttggctccttgacacgagctccatataaggcagcgatctccatagaaacgtgtcagtttcaatagtagtgtcaaag

SEQ ID NO: 304357 - DNA, 122 bp, Homo sapiens
catcacaaccgccacctattgggccaacctgtggaaggcgtgcgttaccgactccacgggcgtctccaactgcaaggacttcccctccatgctggcgctggacggtctgcatccccgcggcc

SEQ ID NO: 304358 - DNA, 122 bp, Homo sapiens
agagggtgatttagtccattttcagctcttggacatgaggaggtagttctcaaaagtggccgcaaggtggcagtgagggatcacaactttaagtgtggctaaggctggcaaggtgggaggct

SEQ ID NO: 304359 - DNA, 122 bp, Homo sapiens
ctgatctggcagctcctattcaaccctgtggctcctgctgggaggggactctgcaaacaccgcctagagggtcccccagtttcccctgggagagtgggggcgccaaattgttgaggtgggga

SEQ ID NO: 304360 - DNA, 122 bp, Homo sapiens
gcagcgccgccgagtcccccaatgcgggcttggcctcctcgacgccggtgaaccccgcgccgggctccatggagtcccccaaccaccctctgctcaacagtcccagtaacctcctgcccgga

SEQ ID NO: 304361 - DNA, 122 bp, Homo sapiens
ggaagaagaggaggaggagtcctttgtggccacccggaggggagagacttggttgggaggcgccaaccgagctggccgctgggactctgcacccaggtgcgccaacccttgggcgcacgctc

SEQ ID NO: 304362 - DNA, 122 bp, Homo sapiens
tcgctcccctcttccagcagctgctcttacaggcactgatgatttcgctgggaagtgtggcgggcagctttgcctaagcgtggatggctcctcggcaattccagcctaagtgaaggcgctca

SEQ ID NO: 304363 - DNA, 122 bp, Homo sapiens
tgaagtgcacaaactgctggttcagcttgataaacttgaggtgctggtcaaagaactgcccgtggctcacacccttgcggccaaaggtcatcgttcttgagatctcagggcgtatgcaggcc

SEQ ID NO: 304364 - DNA, 122 bp, Homo sapiens
tttgctctgggacagtggaggtctaggcagtgctctgcccctcccaggtgaccctgccttcgagttgctgcacccaatgtggtaacccaaagtgaaggactatgtgtaaagccactttagtc

SEQ ID NO: 304365 - DNA, 122 bp, Homo sapiens
gtccgttttccaggcatgataaatctacgcaatggcagccagcctgcggatgtaacaaaccgcacggctcgtgcacctagaaggtcacaataagcgaacaaaatgtagaagaggggtcagcc

SEQ ID NO: 304366 - DNA, 122 bp, Homo sapiens
gtccccccaccaaggcacgcaaggaggccattcatcttcactgcctctgccgaaaatatacgtctacgggagagccaggaatctctctccaagggtgaccgggttgggggttttgttgttct

SEQ ID NO: 304367 - DNA, 122 bp, Homo sapiens
gaggccaaggcaggaggatcacttgaagccaggagtttgagaccagcctgggaaacataccgagactcttgtctctacaaaaatttaaaaagaattagccagggatggtggacatgcacctg

SEQ ID NO: 304368 - DNA, 122 bp, Homo sapiens
gaggaaaacaattatatcttattcaagccactgtattttatggtttattcattatggcagcggagcttgataatgctcctgtagaatcagaagtaaaatccaggcccattcactcccagtgc

SEQ ID NO: 304369 - DNA, 122 bp, Homo sapiens
gcgtactgcgggccccacgggtgttagtggcgggggcggcagagtccgggtgggttgtcgcgacggagccgggcctcttcgccgtcttgagacggggctggcgagaagggcccctcacggag

SEQ ID NO: 304370 - DNA, 122 bp, Homo sapiens
ccttcctcacattcccgccggggtggcgaggagcgggtggagacgctgggggttgtgtcccggctgtgttcgcgcgccgcagcggaagcctgctctcagtcccttgctcttgtcttctcaga

SEQ ID NO: 304371 - DNA, 122 bp, Homo sapiens
gacgtgagttaagggcatgtacttcaatatagctgataattttaatcacatcctgcaaaacgttgtgaagttcaggtgacatttttcagctagccagcatttccccatggacgacacagtgc

SEQ ID NO: 304372 - DNA, 122 bp, Homo sapiens
cactcctttctgttgctgaagtggcccttacattcccgctagcctaatcacagaagtgcgcggctttccactccagggaggtgggtcccagttggctagccacacagaccatcccagcaacc

SEQ ID NO: 304373 - DNA, 122 bp, Homo sapiens
agggactactttcccgttttaggctgaagaaactaagactcataaggatggaacgattcacgtggccacggcctcgtggtccacaggggagcacagggtttgactcccagccccactgcttg

SEQ ID NO: 304374 - DNA, 122 bp, Homo sapiens
actcctaccatgcccttctttccactacatcctctacaggaggctggtgcattcgctcttcgcctttccagaccccagtacagtcctctgcttctactgaaagccctgcttccactgagagc

SEQ ID NO: 304375 - DNA, 122 bp, Homo sapiens
agcaggtcagaacaggtgcgtctctgggggctgggcctggcacggagactcagcagccaccgcccccatggcctgggctagctaataggcgccagggagggagggaaggagggaaggacctg

SEQ ID NO: 304376 - DNA, 122 bp, Homo sapiens
gtggctgccgagatcttgcgcctcttgtccttggtgatgaacttgttagccgcatactcccgctccagctcccgcaactgccccttgctgtacggaatgcgtttcttgcggccgcgacgaaa

SEQ ID NO: 304377 - DNA, 122 bp, Homo sapiens
aaaaattcctcaaagtttttgcagccttaaacctgacatttgtgttttatgaagcaccctcgaatgaaacaatgctcctttgctgccataagcacttctcaccatgtgcaaaccacaaaacc

SEQ ID NO: 304378 - DNA, 122 bp, Homo sapiens
tctgccggcaccgcccaggacccgcccaggacccgccccgccccctgcggccccgccccccgcatgctgaatgccatataggcgagtgacgtcaggccgtttgttgtcattggcggctccca

SEQ ID NO: 304379 - DNA, 122 bp, Homo sapiens
gaagctccaaccttgcgccaccaccccagaggtattctcccagcaattaggaaggctgggcggcggtcaactcccgggctggacttcggaagtggaaatgagcggccacctagtcccgagtg

SEQ ID NO: 304380 - DNA, 122 bp, Homo sapiens
caggcccgggcagcgacctcttgctgttcagcaaaaagcaaacattcaaagcagtccctgcgggctcagcgtggcgaccatgagcgcacgtttgtgtgccggctgactctcctcctcgcata

SEQ ID NO: 304381 - DNA, 122 bp, Homo sapiens
agccaaaattctttgcttgtataacactctgctgtgtggcatggcagaaggaggccagcacgcagcccctccagctccacgtggagacagaagggatcccggcacatcagtggtaacagcgg

SEQ ID NO: 304382 - DNA, 122 bp, Homo sapiens
cgttaatggcgctccttcctgaaagcaaattggaaagacttcagtttgacggagccttgtcgacttccaccccgccgcccccgctcaaatgcaagcatgacttttccaggttctgtgcgcag

SEQ ID NO: 304383 - DNA, 122 bp, Homo sapiens
tgagctccccctcagtctgggtggcaaacatcccatggtgaagtggaagcccgcagatcccgcggagcagaggcgctgctgcggccgggctccatgccgccatgccccgctgacgcgacccg

SEQ ID NO: 304384 - DNA, 122 bp, Homo sapiens
cacgatgcggagactgctgcaggaaacggaggtgaggcggggtgaagtcctcccagcccgcgtggggtctgcaccggcccccggcactgacccaccaccccctcaccccagctggtggagcc

SEQ ID NO: 304385 - DNA, 122 bp, Homo sapiens
ggatcgtcatgtatacttacggcaacaagcagcacaacagtcccacctgggatgaccccacgctggccatcgccctcgccgccaatgcctgggccttcgtcctcttctacgtcatccccgag

SEQ ID NO: 304386 - DNA, 122 bp, Homo sapiens
cgcagcaggagcaggacttctacgacttcaaggcggtcaacatccggggcaaactggtgtcgctggagaagtaccgcggatcggtgagtgcgcggggtctggcggcgccgctgggcccggcc

SEQ ID NO: 304387 - DNA, 122 bp, Homo sapiens
catagccttgattcttctgctcagctcagctctgcacttcccaataggaaccactgttctcgctccctcaaactgagcctgagctctctatcatgttgtcctgggttattttaccactggct

SEQ ID NO: 304388 - DNA, 122 bp, Homo sapiens
gagaccctgactttggacctctgagttagggccctgaactccctaggtggctcagtggcccgcacgcaagactttgagtccaggtgaggccggggtccggctctctccatcacggcggcccc

SEQ ID NO: 304389 - DNA, 122 bp, Homo sapiens
tctggcgccctctgctggcctggcgcgcaccgcggacacgcaaggcccgggcctgcgccgcgctcacctgtcccggcccaggtgctcgctgtcccttgcccgtggccaggcccgctctggcc

SEQ ID NO: 304390 - DNA, 122 bp, Homo sapiens
ttgggccaggggggaataaatcatgttaactaagaaagcaagggagggaactactgagaacgtcaaggttggaatccatattgcttcaagccagaggccagttcctagtcggtggctcccat

SEQ ID NO: 304391 - DNA, 122 bp, Homo sapiens
ataaaattgtgaactcttcttggaccagaacccgaataacgaagtgttcaataaatattacgttttttggtttgtttgtatttgtttgtttgttttttcgagatgtggtctaggtctgtcac

SEQ ID NO: 304392 - DNA, 122 bp, Homo sapiens
tccactcgagatcgagacaggtgatgttctgggcagagcagcccagtttcgctgggtgggcggtaaggagcctcggcagggagagcagatggtggccaggaggacgtggcttagctcagtga

SEQ ID NO: 304393 - DNA, 122 bp, Homo sapiens
agggcggctctggtgaccttggctcttgctctgtgtgagccaggagccatgtgagggtttcgagcagaggagtaacatggtctgatttcattgttttgggctggagggactggaagatggag

SEQ ID NO: 304394 - DNA, 122 bp, Homo sapiens
ctctcccttaatgctcagttcttagaagaccgaggtaggtgggcagatggtcctcttccccgccccgctttaagagccgaaaacaaacattaaatcacccggcgagttgtgtttcctaagtt

SEQ ID NO: 304395 - DNA, 122 bp, Homo sapiens
ctgccccctcccagcaggcctcagagggaaggccaggctggctctctccccatcagcggccgccttcattagcattccgaggtgcactgcccaagttgccattatgtggttgggtagattca

SEQ ID NO: 304396 - DNA, 122 bp, Homo sapiens
atcctcccctttgttttcctgataatgaagcccttttttcctcttagaataatcataatccgtacatttgtaatcatttctttgccattctttgttttataatttatatatacatttgtaaa

SEQ ID NO: 304397 - DNA, 122 bp, Homo sapiens
accattgcggtgtcccaaggcgcaaacccacgaacttgggtgtgatctaatttgggacgacgcccgggagaatggccgaggacgacccctctcccaggcccttccaaaaggtctcctggggc

SEQ ID NO: 304398 - DNA, 122 bp, Homo sapiens
cacacgcaaatgtcaaatggccatcatttagcatctgccctcgggcttccgggtccatcacgtggttactgacaggcaggccgcgcatgcgcgctgctactccgccgagcctacgtgacacg

SEQ ID NO: 304399 - DNA, 122 bp, Homo sapiens
tttgtactttcgtactgatagacaaagatagtgacaacaaagacggaaagaaacaagcatcgaaagctacatgaagggggtgcagcgctgttctaaaacacaaaatgccgagccccgttttc

SEQ ID NO: 304400 - DNA, 122 bp, Homo sapiens
aaaattctgggggcttgtctccctgtcccccccccgccccaagtttccctccgtcgctggcgctgtccggtgccttcggtcgctcgggccgcccccctcagcgacttttttttttctttctc

SEQ ID NO: 304401 - DNA, 122 bp, Homo sapiens
cagacaaaacccctcagacaccaagttaaagaaggaagggctttattcggctgggagcttcggcaagactcacgtctccagcagtcgagctccgcgagtgagcaattcctgtcccttttaag

SEQ ID NO: 304402 - DNA, 122 bp, Homo sapiens
ccaagctgctgttggctggactcagactcagcagggagcacctgggcgagccctgtgctgcgggctggactccggcccatctcgctgattactcttgcttttgctccccagtgtgtcctcaa

SEQ ID NO: 304403 - DNA, 122 bp, Homo sapiens
cgctttcttgcggccgatggggaccctgctcgcccagatggctcctggacatttgcccagcgtcctactgagcaggaactgagggcccgtaaagcagcacggccagggggacgtgaacgggc

SEQ ID NO: 304404 - DNA, 122 bp, Homo sapiens
cggaaggtcagaggcagcaccagcgagaagtccttgccgacctgcccatgggcccagaggcggacgaagtgcctcaccagggtggtcttgcccatgccggccaccccgatagtgatggagac

SEQ ID NO: 304405 - DNA, 122 bp, Homo sapiens
cagctgtgccacccacatcgggacgcgtgctccactcgtggcattccaggctcacaatgtcgcccttatccgatgatcagccacctcggatgtgtccatcaagcttttaaaattcacaaaca

SEQ ID NO: 304406 - DNA, 122 bp, Homo sapiens
agccctcctcctcctgggaggctcagctgagcctggccagctgtggcttgggcaagctgccggctccaaggctcaggatcccactgaacttgtgtcaggcccggcctcttacccttggcccc

SEQ ID NO: 304407 - DNA, 122 bp, Homo sapiens
tagagatcctactatctatcaggaaagttagataattacataaatagtcctaagaaaacccgaatgagtattagagtatgaggcactataggaaccccaggtgttggggaggtccctctgaa

SEQ ID NO: 304408 - DNA, 122 bp, Homo sapiens
cccgaatcaagctcacttcaaagaatgtagctatgagagcatgaaaccgtgcgctcacgccgcacacgagttgggtaaatggagcgcctcattttccagatgtgttacagaaactgtgctgg

SEQ ID NO: 304409 - DNA, 122 bp, Homo sapiens
tcaagcatataatgaatggagtaccactgattggaaacgttcggccctagatgatatttccgcaagttgttttccttctacaacttggtaatggatttttctaactttaacagaatggttga

SEQ ID NO: 304410 - DNA, 122 bp, Homo sapiens
gcccagtgctgaacaaggggctcctcctttgtcctgggggagttgcatggatcctgtcttcggtcaagggaagcgcctgctggtgaaggagacctcccctcctctgttctgccagagccccc

SEQ ID NO: 304411 - DNA, 122 bp, Homo sapiens
gaggggggtcggtccccggagaaagcgagtcactgacgggaccttggcccgttcccgttccggttcccgttcccggcaagcctcggccccaggctctccgcagccctcctcgctgcgcgttc

SEQ ID NO: 304412 - DNA, 122 bp, Homo sapiens
gaggtggatgtgctggtgtttgtggtggactcggctgaccgactgcggctgccctgggcccgacaggagctgcacaagctgctggacaaggaccctgacctgcctgtcgtcgtggtggccaa

SEQ ID NO: 304413 - DNA, 122 bp, Homo sapiens
tcgctactccctggtgaccaccagggggaggcagtgccctacttactggacagcgggggccgccggccccaccgggcttcccgggaaggaagcctccgtccccgtcctgcacagcccgcccc

SEQ ID NO: 304414 - DNA, 122 bp, Homo sapiens
cccagaaacacaggcactcttcccagcggcgcggacctcctgctcccgggaacacacccgcgctctccgtccacccacccctcaggtgaaggcacagctgtccagagctgaggcttcctaga

SEQ ID NO: 304415 - DNA, 122 bp, Homo sapiens
aggtgaggaggcgggtggctgggtgccaatcatgctgaggagagatttccagtggttccccgcggggctcatattcacattccctaagaggacgttctggactctcgggcagagctttgtga

SEQ ID NO: 304416 - DNA, 122 bp, Homo sapiens
tcacagagatatccaggggtttagaagaaagaacactagcctgtgaatcagaagacctggcgtcacatttcagctctatggccttctaacaggagaactgctgcatgccatttaacctttca

SEQ ID NO: 304417 - DNA, 122 bp, Homo sapiens
tagtgagtcttgagctggcttgaggtgtgttggacctggtggttgctaaaagcaattaagcgggcatctgggtcagctagtagctgttaaaaagattaaagggaggtgaagacgtgtagcac

SEQ ID NO: 304418 - DNA, 122 bp, Homo sapiens
ctctccctgcgctgtgcggtcgcgaccccgccacgaccccggacccagctccggtggcctcggacaatcttccagcccctggggtcgaattcctggggagggagtctgatcccgtggaactc

SEQ ID NO: 304419 - DNA, 122 bp, Homo sapiens
tggagagggtccggttggaggccaaggcctcagccatggacctggcaccatcatccctaacggtgttgccctggaggctgcagagacaagaagaggctcatcactgatggagcagaagctgg

SEQ ID NO: 304420 - DNA, 122 bp, Homo sapiens
cgatggagagaagatttggacgtgcgcacgcccgtgcgccgggtcccttctccacaccatcgcagaccggggccacgcagaccttccccgcagccctgaaagtgagttctggtctctgccag

SEQ ID NO: 304421 - DNA, 122 bp, Homo sapiens
gatccggcaccgccaggactacggagctgtcttcctctgtgaccacaggtgcgtgcagtccggtggcaggcgcggcgccaggggacacgcccacaccccactgggcccctggactctccttc

SEQ ID NO: 304422 - DNA, 122 bp, Homo sapiens
tgcggagagaaaggtccaagaatgcaattcgtcccagagtggcccggcaggggcggggtgcgagtgggtggtggagtaggggtgggagtggagagaggtggtttctgtagagaataattatt

SEQ ID NO: 304423 - DNA, 122 bp, Homo sapiens
ttatccatttttataaaatgtcacatggatttaacactgggattagatagggaggcaacacgcctacacactttgctgtgtgtgaactgaataatagatgtgcagtgacgggctttgcaaca

SEQ ID NO: 304424 - DNA, 122 bp, Homo sapiens
cctgacgaccctctcctccccacgcttgcagccagcctcgctcggggccctgcactctgccgacaggctctagcctggacgactcagggaacaaaccaaatggtcatttttctgtcctttcc

SEQ ID NO: 304425 - DNA, 122 bp, Homo sapiens
gtatgtgaccgtgtggactatttcaaggtgctgatgcaacactaataaacctggaggggccggcccccgcctgcagtgtgattctctcggccgtccaccccttgggagcacgcggcggagca

SEQ ID NO: 304426 - DNA, 122 bp, Homo sapiens
gggtcccgtagtaaatcatttttcattcagttacttgtttttcctcacttgaaaaatgggcgtgatactggtggtcgctgttgtcttcccgcagcgatagaatgaggctctgcagtgatttc

SEQ ID NO: 304427 - DNA, 122 bp, Homo sapiens
gacaaagggtacatctagcacatagttcgtgttcaataaatgtttgttttcatcatgccacgggaagtgagatataccaagtattcaaaaaagtgttcaaatcattactaacagtgcttgct

SEQ ID NO: 304428 - DNA, 122 bp, Homo sapiens
ctctggcgagggtgaggaaggcgtcgcgcccatccatgaggtcacagctgagcagggggtcggggtcgacgatggggggcagggtgttgatgacaggcccagcgtgcaggtggatcacgaag

SEQ ID NO: 304429 - DNA, 122 bp, Homo sapiens
tgagacgcagggccactccagtggcctgcccggaagtcactccctggcctaccgtcgctccgtctggggtgtgctcctgctgagggagcccctgcttcctggactctacccggcccctgcct

SEQ ID NO: 304430 - DNA, 122 bp, Homo sapiens
gcctggagcaaattgatttcctgtttcagtttcacgacgtggttttctgcctttacagcccgtttggtcatcagctccaggttctgctccacctgctgaaccaccgactccaagtcgtggta

SEQ ID NO: 304431 - DNA, 122 bp, Homo sapiens
ggtaaataaggccacgtggctttttctccttggcttcggcgaaacattacgtcacactaccgtctctgaacaattatttaatgaacttatgtgatgcgctagacaatgtgaagacaatgcgg

SEQ ID NO: 304432 - DNA, 122 bp, Homo sapiens
caaaggaagggctgccccgactggcctggaccctccagggagttcagcaagccggaaatgcgtgtctgctgctctcctggcccctgggccacctgcttctgtggccctgggattggggagcc

SEQ ID NO: 304433 - DNA, 122 bp, Homo sapiens
atagatgaactatgtcctcttagtttgaaaacaaattgctttgggttgcagcttgcctggcgcgtttaagtgtgtgcacagatgacttattagacagtggcatggggaagggcaaagggctc

SEQ ID NO: 304434 - DNA, 122 bp, Homo sapiens
tctaggagtgatggctgaggacgaacaagggtgcgaactgtcactgacatttccgtggggcgtggacgtgacacatcccgaatgccatacctggctgtggacagtcgcaccgttaaaggcag

SEQ ID NO: 304435 - DNA, 122 bp, Homo sapiens
cggttgcccggaacccgaggctcccggcggccgtcccctcccctccccctctccggtgcgcgcggagctggttttccgggttcccctggacggagctggatcctgcttctcgccaaggcagg

SEQ ID NO: 304436 - DNA, 122 bp, Homo sapiens
gttcggacgagctctctgttgctgacagcaccggccttcggtctccatgtcaggggtgggcgggtgactgctgagggaggcccgcaggtgtgtttctccatcccgtcatcttgctgcatgcc

SEQ ID NO: 304437 - DNA, 122 bp, Homo sapiens
gacataggacgtggctagggtcttctggaaagtgagaggccatgccaggatgaacaattccgactctgggaaccatttgtgtccagcatcctccttgcggccaaggctgctacgtgaacctt

SEQ ID NO: 304438 - DNA, 122 bp, Homo sapiens
agtgctgtcagctgcaggcgggggcgtgaatggtgacaagatgggtgctgaacgcggaaacgtgagccgagggccactcatggagaggcgtgggaggcacctcgattcccttacagttgaga

SEQ ID NO: 304439 - DNA, 122 bp, Homo sapiens
ctccagtacctcttgattctgcccctcccagtcggtgtccctctggctgtcgtgggaagtcggtgcggagcccgcctgggccgggctgtgcagtgagccgtgcaccagacgtgtgagcctga

SEQ ID NO: 304440 - DNA, 122 bp, Homo sapiens
tttatctacagcaatacaatgtgcctgccttcttcacctgataccttgcaaaggtcacaacgataagcacatgaaaactttcactatcctggcataaagttaggcatatagactgaaaagag

SEQ ID NO: 304441 - DNA, 122 bp, Homo sapiens
gccaccagtacgtcttggacaagtagtgccaggtctgatgccgggtgtggtgagtgccgccgggacccaggtgcgccgcctcgatgaggtcccggcgtcgctccggctgcagcaccacctcc

SEQ ID NO: 304442 - DNA, 122 bp, Homo sapiens
agcctttagagggcagcagcacactggctgactccagcggatttcagagaggcgaactcccgaccagaaccttcctcctggtcaccatgccaaaggttgatttgccaggctctggcctctca

SEQ ID NO: 304443 - DNA, 122 bp, Homo sapiens
cggaggccagggagagacgagatacatgtgcaaagctccaagaaagacaagcagatgaaacgcaggggaattttcctagtcattcccctctgcctcttagtcaggtgacacgtgactgtgtt

SEQ ID NO: 304444 - DNA, 122 bp, Homo sapiens
gagcaggaggccctcatccttctgctgccctggggttggggcctcacccctctggagggccggaggcaggaggtggaaaccccaggggctggcttttttaaaactggttttattttaatttt

SEQ ID NO: 304445 - DNA, 122 bp, Homo sapiens
atgggaaagggggccccaaaagggaacggcagaacccagagagctgcactgacaagtaagcgaccgcgagtaatcggtcagcacaaaggagccaatcccgagccgcgtggaagaccttggga

SEQ ID NO: 304446 - DNA, 122 bp, Homo sapiens
tttgcctccacagaccatggacccgcacagcggccgctggctcggtgcgcggccgcccgccgagaagcccagtcctcccgcgtgctgaccggccccgccgccaccaccgcctgtgaccccgg

SEQ ID NO: 304447 - DNA, 122 bp, Homo sapiens
acgggccgcgtcccgcctccccagcctccctggcccccccggccgcccccactcacatcccgttgccccccacctggcccccaccatgcacccagcatcccaggcccaggtgccccgccccg

SEQ ID NO: 304448 - DNA, 122 bp, Homo sapiens
tctgtcgggcgtttacaggaaagccttctaacgcctctgttatcagcgcatgacggcagacgaggagccgccatgctggtgtcacttggtgtggtgcgctggctcccgctccctcgttacaa

SEQ ID NO: 304449 - DNA, 122 bp, Homo sapiens
tagttgggtggtcctacataaactctatataatcaaatacatagggccactgcgacatttcgactcagacctaaaagatgagcaggagctggaggaagagccttccagaagtggggaacagc

SEQ ID NO: 304450 - DNA, 122 bp, Homo sapiens
ggctacggtagtaggcgcgctccgttagcgcggcgatgaagctcaggttgcggggaatgtcggtgcccgggggccgctcacgggacatggcagccccttccccggcggggccagctcgcagc

SEQ ID NO: 304451 - DNA, 122 bp, Homo sapiens
agacgctcacatggcaaactttcttttctgtttctctttggcacaaagcctcagcgctcccgcgcctgccctaccactgaacaaaacagcctcttccgggcccagctcacttgtgcctccgc

SEQ ID NO: 304452 - DNA, 122 bp, Homo sapiens
ggttggaccatctggtcattaggagcccctcaatcaacaacaataacaggggatgatggccggggaattgtggtcctctttagagtggctgggggtagcagtggctgtccctgtgggtgaag

SEQ ID NO: 304453 - DNA, 122 bp, Homo sapiens
tctaagacgtgggggctaaagcttgtttggccgttttagggtttgttggaatttttttttcgtctatgtacttgtgaattatttcacgtttgccattaccggttctccatagggtgatgttc

SEQ ID NO: 304454 - DNA, 122 bp, Homo sapiens
tcccagacggggcggcccggcagaggcgctcacttcctagacaggacagccgggcagaggcgctcctcacctcccagatgaagggcggcctggcagaggtgctcctcacctcccagacgggg

SEQ ID NO: 304455 - DNA, 122 bp, Homo sapiens
gcagcccctgcctgcctggcgggaccccacgtccctcccgggcccctgtgagcatcttaccggacagtgctggatttcccagcttgactctaacactgtctggtaacgatgttcaaaggtga

SEQ ID NO: 304456 - DNA, 122 bp, Homo sapiens
tcccggactggggctgggctgcggttgcgagagacaatccccggcgtcctggcttcctgtcgcctctgggccaggcccgcgcctgaagaggaaagatgccaccccctcccctgcatttcccg

SEQ ID NO: 304457 - DNA, 122 bp, Homo sapiens
ccccttcgggaggcacgtgctttacctgtcgccgtgtcaggtgcgtctgtgtggctgccgcgctggatgagtctggctgcaaagctgttctcatcaaatgaagtcccatttaccacggggac

SEQ ID NO: 304458 - DNA, 122 bp, Homo sapiens
tcttccatccctcctgagagggccagctccctcctccccgcactgggattccccctagtacgaagtcctctggggctcacctaggtgtatttaagcatgtctgacaaattgagggactccag

SEQ ID NO: 304459 - DNA, 122 bp, Homo sapiens
ctgggcagaagctcgagcagcttcgaggatgtcgggcctgggggcggggccgcgaggcagcgacgtcgcgcggggcgcggccctgacgcagcgtgacgcaccggcgccgcggcgggtacggg

SEQ ID NO: 304460 - DNA, 122 bp, Homo sapiens
gctccccctgcgaggccacgcgagccccgaccccccgcgcaccgggctgcagacgggagacgggctccagcctcaagaggccccagacttgctggaaaggcagatgtgtttaaaaatgaaaa

SEQ ID NO: 304461 - DNA, 122 bp, Homo sapiens
ctgattatggtactgcccaaccaacaagcatactctttccatctgaactaaggtattccacgtgcttatccaaatgagctgagcacacctgtcccattggaggagggccagcttaggtgcac

SEQ ID NO: 304462 - DNA, 122 bp, Homo sapiens
ttgtggaattcctggcggatgttggcgcccgcgggtctgcctgcttctgatacccgggctcggtagaataggccgctaacgagctcccattaggaggaattgtcactcctctgggagcgagc

SEQ ID NO: 304463 - DNA, 122 bp, Homo sapiens
tcctagatcagccaatcagtgtcgccgcggttcctggttctaaagtcctcgccggcccaccgggactcagattctccccagacgccaaggttgcgggtcatggagtcccgaaccctcctcct

SEQ ID NO: 304464 - DNA, 122 bp, Homo sapiens
atagcttagtgtgggcgtccgcgccgcgcctgcgcctccgagcgccggccgagaagggcgcgcagccacagccaccacatgccactagccccgcaaggcgcctgactcctctaaggggaact

SEQ ID NO: 304465 - DNA, 122 bp, Homo sapiens
ctggaagcacccgcttaatgtgcctcatctccccaagccacgccagccctccaacctgcccgtccccaggactggacacgggaacctggtcccagatccctttcggcagccagatctttcat

SEQ ID NO: 304466 - DNA, 122 bp, Homo sapiens
ctcctggacaagctgcttggcccggatctccgcctccagggccgactgcagctccagccgcgcggacatgtccagcttctggctgcggcgcaccttccacagcgggtccttgagacacggtc

SEQ ID NO: 304467 - DNA, 122 bp, Homo sapiens
ttttcaaatcacctatatttacataaatatgaaccaacttcagtgatcttaattctttcccgaagatccaagtttctttccatctgcctgaagaactttctttagcacttctggtatagcag

SEQ ID NO: 304468 - DNA, 122 bp, Homo sapiens
ctcgccccctcaggcccgttcattctcgcgagagaaagcgcgaggcctgccgggagtgagcgcggccgtacttaggtttgctcaaaatggcagcgctggaggaagaattcacgttgtcttcg

SEQ ID NO: 304469 - DNA, 122 bp, Homo sapiens
catcagccctctggccctcagttctcctaacggtcaaatggagcagcagtgacaggatcacggtgacgccccggcttccgtgctgggcccctcggtggatgctcagccactgcttgtcttcc

SEQ ID NO: 304470 - DNA, 122 bp, Homo sapiens
tctgccgtgtatgggtgcccctctcggaggactctgaatgagtgtgcgtcaaatcatatgcgcataaaagaaacatggatcatggagagtcacagttatcgcagccattaaagtgtctaaga

SEQ ID NO: 304471 - DNA, 122 bp, Homo sapiens
agctaagccggccgccgtcagtcccgcccccaatctctcagaagtcgtttgtttggttttcggctccgcccgccttttcgcagggaaggtgcccggccaaactctgctctcttcctcccgcc

SEQ ID NO: 304472 - DNA, 122 bp, Homo sapiens
attgaagtcaaaaccttagatatttacctggtgttttgttctactgtggttaaggtggcacgtgacccacaagacaagttgcttcccactcttccctcccctttccacgggcagaagatcct

SEQ ID NO: 304473 - DNA, 122 bp, Homo sapiens
gacaatgactctagagattccccggcagagttcctctgggaagcttttcctcaccgaagacgcggcctcaagtcatccccaagccggggctcctgggtggcttctcaggaagccaagctccc

SEQ ID NO: 304474 - DNA, 122 bp, Homo sapiens
tctccagcaacaaattgggacaccacgcgtcaagtgttgtcctccagggaagctcataagcgagtcagtgcccaaagctttttgtgaggctggtcacgtaggcagcttctttttatcatgtg

SEQ ID NO: 304475 - DNA, 122 bp, Homo sapiens
gatgggcgccagacaaatgtactgcgtgtcggagcctgtgccgggatgaggggcctgccccgctctcccagttacctcccaacatggggttccccagcagctcttcccaggtacaaaagggg

SEQ ID NO: 304476 - DNA, 122 bp, Homo sapiens
tcatcacatttataaggtttctctcctgtatgcactctctgatgaatttgaagatttgagcgctgggtaaagcctttaccacagtcttcacatttataagacttctctcctgtgtgtactaa

SEQ ID NO: 304477 - DNA, 122 bp, Homo sapiens
ccggtaaggaggcggcaggaggcgctggtggggggcagggagccgggggtcggcgcggggcgcgggcgggagagcctcgccgccttggcctcgggtccgggctgggccgacacaagtccctt

SEQ ID NO: 304478 - DNA, 122 bp, Homo sapiens
gactcagaaggaggaggtatgtcctggcccagccttccatgcccacctcctgtgggatgacggagctggaccagctgctccacagctgttattggcagaatccctcaagagaaaggtaatta

SEQ ID NO: 304479 - DNA, 122 bp, Homo sapiens
ccaagagacagcacttgggatccggaatgtctggacttgggcacggcgctgtggagctggcgccgttgggagccatgcgagttctgggtcggtaggtcacctcagaggtggggagaaggttc

SEQ ID NO: 304480 - DNA, 122 bp, Homo sapiens
tgagaagtaggcctactacctataacactgcagaggcgggctcacaacaaagtaggccgacgacgcgttcactaaatgtggaccttttccagtgaaggtctggtttgagaagtcaaagtcct

SEQ ID NO: 304481 - DNA, 122 bp, Homo sapiens
caaaggcacacatgtcctagcactccaaagcccaccagggtgggctcccaggggtgaggtcgaggtagaccgggaacccaagagagctggtgggcctttcttctacccctctcccctcacag

SEQ ID NO: 304482 - DNA, 122 bp, Homo sapiens
acatcagcgttgttagagctgtggggtggtcaccagggatcacagggaagggcttgtccacgcagatgctagggccgagcgctagcctggcactgagaagtgccagagcgcggtcgttgtgg

SEQ ID NO: 304483 - DNA, 122 bp, Homo sapiens
tctccccaccccttgagtctcagcagtgttaaagctgttactttcacagcttcctgggagcgagtgctttctcaagcccgtcttgcaaggtgggtccttttttgtttttggcagaagggagg

SEQ ID NO: 304484 - DNA, 122 bp, Homo sapiens
atgattaactacttttatttattggaagtctgcttataaaaaccccgctctgtctttgttcgatgctcagctttttagatgacagtccactaagccagtgcgtacctgaaataaacagtcct

SEQ ID NO: 304485 - DNA, 122 bp, Homo sapiens
cacttctggctgttggtctcggggctaccggactagaatcctagcatgtgcctggtggtgcgcagccccggagggaggggcagggccgtgtgcaccgctccgcttccaaagccatgctggac

SEQ ID NO: 304486 - DNA, 122 bp, Homo sapiens
accccaagacaaaacattgacaaagagggaccctcccagtacctcctgtatcatatgttccggtctcctaatattctatcttaaaagggggttaattaaaggaaatctcctgggcttttctt

SEQ ID NO: 304487 - DNA, 122 bp, Homo sapiens
acagaggggtgcagggttgcagtagcgggggctgggttgcctgggggactcgaagagtcgcgggagccgtgcggggacgagtgcagtggtgcgtgggggtcgtggggatggcgacagcgggg

SEQ ID NO: 304488 - DNA, 122 bp, Homo sapiens
tatttggatgaaagtttcagccatcgctggcgaacccagagcttctgaaccagcctggagcgccacctagtggccgtaggcggggctagccccgttccctggcgaagctttgtgatggccca

SEQ ID NO: 304489 - DNA, 122 bp, Homo sapiens
ccaggattcccaacctttcagatctggagctccccatcatgccttagagttctgtccccacgctccaatccttcagatttggatctccccttcacacacaccctcgccttgccccaaagtca

SEQ ID NO: 304490 - DNA, 122 bp, Homo sapiens
cacagctcacactgggagtccatcacaggcgaagtcacctccttcccaacaccccacgcacgtgtcatctccagtgagcagacgtccaggcttcccgaagcttcctggctggaaaccgcgca

SEQ ID NO: 304491 - DNA, 122 bp, Homo sapiens
aaagtgctatgaagtttgaggctaccaggatggggcgccaagccaaggttcctccggacgcgcgaggctggtgctccaggcgggctggcgggaagagggggcaggaagggggccggggcggg

SEQ ID NO: 304492 - DNA, 122 bp, Homo sapiens
tcctttctcctgggctatggagctggagggatgtatccagcaagggtgcatcatgcttagcgcgcgcccgttagggagcgcgggcctgagcgcaccagcaccgctagcggctcagctcttga

SEQ ID NO: 304493 - DNA, 122 bp, Homo sapiens
aagaggctacgaaactggaaggaacgctgccgggaggcttctatccgtgtaacactcgcccggcagaagagtgaggctctccggactttctctcgagcgctgacactctcccggcttggagg

SEQ ID NO: 304494 - DNA, 122 bp, Homo sapiens
gaactcccggcctccagagatcttcccgcagggcctcccaaagcgcggggattgcaggtgcgcgcggggccagcggccccccgggcgggagaggagggcgtggccggggggcgtggccgcgg

SEQ ID NO: 304495 - DNA, 122 bp, Homo sapiens
ctgggtttggccggggagccatcatgacagccccgccgcgcacattacggctgggccaggcgttctcaaatggctccgacatggtgtgaatacactcttgtgtctttttgccatctgctgct

SEQ ID NO: 304496 - DNA, 122 bp, Homo sapiens
tgtattaatttaatcttcacctgcttaagctatttattgtacttatacataatagtaattcgcaatgaggtctttgtgtgcaggtatttctcccggaatgcctgcagcgctctcttggccta

SEQ ID NO: 304497 - DNA, 122 bp, Homo sapiens
agcctctggcagagccccccgacccggcagcgcggaggggactcgcgtccgtccgcgtcgcgtcaccccaaaccctaagcagcgccgccccatcggcgcggagctccggctggaggcaagag

SEQ ID NO: 304498 - DNA, 122 bp, Homo sapiens
ggaccagaggcccgcgtgccaggcaccatgaggtacagctagagggtgcagggtgaggtccgggagctacgtggtgccggcctggaaggtcacactacaggtatggatcttattctgatgga

SEQ ID NO: 304499 - DNA, 122 bp, Homo sapiens
ctcggcgagccccagctccacacctgcctcttagttattagtcgctacccaaccagctgtcgttcagccctggggcttttccatttccgactccaaagtgccactgagctgaatgtgccctc

SEQ ID NO: 304500 - DNA, 122 bp, Homo sapiens
cgccaatgggagtgtctacaaagcccgggaacactttgccacgctgtctagaaggcctggcgggaggctcgcgcctatgaaatcccagcactttgggaggcctaagcgggttcatcgcttga

SEQ ID NO: 304501 - DNA, 122 bp, Homo sapiens
gggcttcaggccagctgtgtccctaatccgcccacgtcccagatttgggtatggtttccccgcccctccccgctttcttccagtctcatctctaccaggtcatctgaggcctcatctacact

SEQ ID NO: 304502 - DNA, 122 bp, Homo sapiens
ataagagtgaggccagtcccagaaccgcaggctcctggcgcgccccgcatgcctccagcacgtttacctttccgaagtggcaggaatggggaaagcgcacgcttaggagagcttcagacaag

SEQ ID NO: 304503 - DNA, 122 bp, Homo sapiens
caacggagcaagcgcgccaggtgtcccgccctttctgagaggggaggatgaaaaccaaatcgctgagactgagggtcccccaaagcaggaaggtccatggagaaccatgtcactgatgggtc

SEQ ID NO: 304504 - DNA, 122 bp, Homo sapiens
acggccaaaaaggatctttgtcttgtcttgtcccacagccaggaagtgtccccctcttcccggcctgctgtatcccaggacacagggcgtaagtgtggaggaggaagggctgcagggtgagg

SEQ ID NO: 304505 - DNA, 122 bp, Homo sapiens
tgccgggactacgaatcccaataagcccgcgcggcgcaagtcttccggtctggcgtctgacgtcttaccctccacagaatcggaagttctggactgcagttgagtggaaatgggcaacggcg

SEQ ID NO: 304506 - DNA, 122 bp, Homo sapiens
catgcagatgttaagagttgcaaaaattgaaatgacttcattaacaaagcaacatcccaacgtttaatgtcaactcctcagactcataaaaaaatgaaacaaaaccaattatattaccacta

SEQ ID NO: 304507 - DNA, 122 bp, Homo sapiens
tcagtccttcccgccggctgttgcggacaatcttcacgaggcctgggtaccgcttgttgacgtactggtccagattgaacttgagttccactgaggagagacaagactttagcacgctggca

SEQ ID NO: 304508 - DNA, 122 bp, Homo sapiens
gaaacttgatcccgggttccaccatggcctctgattataagctgcttagctttcagccatcgcggcccacaattccctcactgcttgggcttctttccaattagatcccctgctatatcggc

SEQ ID NO: 304509 - DNA, 122 bp, Homo sapiens
ccgccagcctgagctccggtccatgctcactggatgagtctcacccgccagcctgagccccggtccatgctcactggatgagtctcacccgccagcctgagctccagtcgacgctcactgga

SEQ ID NO: 304510 - DNA, 122 bp, Homo sapiens
cgcagctgttgggggaaaggggaaagagaaaggaaacacttctttagcatcatcagagaccgtctcaatcctcaacccgcccacgcgtccccaagcacaggcctgactgctggagtggatct

SEQ ID NO: 304511 - DNA, 122 bp, Homo sapiens
ttgaggaaacagcaaacagaacgaattagggtcttggcctctgcaggaataaattatttccgacttggtctggatacctgtaattatttgtaagctgtgggtagtaatactgtaattgtccc

SEQ ID NO: 304512 - DNA, 122 bp, Homo sapiens
catcatttcaatctaagtcacattcttcatgcatggcttatttgaatcttctgtgtccttcgttctcatgattgtatgtcacactgtgcattttaatgttctaattatccataggtcgaaac

SEQ ID NO: 304513 - DNA, 122 bp, Homo sapiens
gtagttgggccagcagacacacggctggctagagagttttggacccctctcacttcctggcgtgtttggtcaagtcccatttataatatgtaaagtactcccataaagggggatgcagtaaa

SEQ ID NO: 304514 - DNA, 122 bp, Homo sapiens
cactgctgtttcaagtccctctcttattttctggtattgcttcctctggccaagttttgccgaggctcagcctgggtcagccttccctcttcttgcccggggtcctagcccttacttcaggt

SEQ ID NO: 304515 - DNA, 122 bp, Homo sapiens
gaggtggccccggcaggtgtcccagcagctttcgccttggcaggtgggagcatgacctatcgtgtgcagttcctggcgggctatacatagccagtcaaagcttcttacaagagaaacctctt

SEQ ID NO: 304516 - DNA, 122 bp, Homo sapiens
cttaccaagccctatgtgatccagactttattacatctatggcttcatctcatgcaggcacgcatgcacacacacaacacacacacacatacacacacacacacatatgcaaacactcactc

SEQ ID NO: 304517 - DNA, 122 bp, Homo sapiens
tgtactgggctgaagagtgtctcccaagaattcatgcccatccagaacctgtgaatatgacgtttagaaatcaggcatttgcaaatgtaacctggttaatttgaggtcatattgaataagga

SEQ ID NO: 304518 - DNA, 122 bp, Homo sapiens
ggctggcggatcactcgcggttaggagctggagaccagcccggccaacacatcgaaaccccgtctccacccaaaaaacacgaaaaccagttacgcgtggcggcgcgcacctgcaatcgcagg

SEQ ID NO: 304519 - DNA, 122 bp, Homo sapiens
aatagatccataatatcatcaagtcaacataatcaatacaaaagtaactgaggtattttgcgttcttttttcttgtaccaaacctctaaaatctggtgtattttgaacttacagcacatctc

SEQ ID NO: 304520 - DNA, 122 bp, Homo sapiens
taggttaacccactgtttcacttagagatttgaccagagaacattaacttgtgtgttctccgctaacaattgtgaatctagggcactgtttcagtctacttttctcttctctgaccatgcta

SEQ ID NO: 304521 - DNA, 122 bp, Homo sapiens
ttacataggcttggtggtgtaaataagaacagtagcttaatttctataccacgccctctgcgacggtttgcaggcattagcacctatggaagtatgtactcgtttccctgttgtataggcga

SEQ ID NO: 304522 - DNA, 122 bp, Homo sapiens
gccagggcaaagcgccggaggcactgccagggctgcatggggacgcgtggggctgggggacgagcaccagcagccgcacacgccccgccgggccctgacagctgagctgcggaggcacccgg

SEQ ID NO: 304523 - DNA, 122 bp, Homo sapiens
agcacctacctcttaggattgctgtgaggactaagttagcaaagtgcttaaaacaatgcccggcacctagtcagcatgtgctattattaaccgtacgattaagataaaacctgagttgttgt

SEQ ID NO: 304524 - DNA, 122 bp, Homo sapiens
tgcggcggtcacccctgcttcctctgccagaccgtgaatgtgaccctcgagccagcgcagcgtcaatgtgggcaaggagggcgcctcacaggatgccggtgtcccacagaggatactcaggg

SEQ ID NO: 304525 - DNA, 122 bp, Homo sapiens
cacccgggcggtggtgggagtgtcgcggcccggggtgggtgggattcaggctgccgggggcgggggggggggttgccgcagagggggctggggagggcggcacccccccattgcccgtcctg

SEQ ID NO: 304526 - DNA, 122 bp, Homo sapiens
ccatctttgatgagggcagagctcacgttgcattgaagacgaaacctcggggaggtcaggcgctgtctttccttccctccctgctcggcggctccaccacagttgcaacctgcagaggcccg

SEQ ID NO: 304527 - DNA, 122 bp, Homo sapiens
aagggctccgttcacaacaccctgcacagtgaacagagctgagtaaatggggctgcttagcgaaaatcatcggactcgaagctccctgatggctccaacatcttccgtgactctgggcaact

SEQ ID NO: 304528 - DNA, 122 bp, Homo sapiens
tcctccccataactgtggggtcagggttaggaagcttaaggtgactcaggtggcgaattccgaagggtgccgctggagcacctccagcctcaacgtccggactaatgggggcatttcctccc

SEQ ID NO: 304529 - DNA, 122 bp, Homo sapiens
tgggctccacatgactgtgttcttgggccaaggtgtaggctattgggcaagctttgaggtcggggagaaacagccgggggcttctcctttcactcaagcccttaggacctctgtggccgagg

SEQ ID NO: 304530 - DNA, 122 bp, Homo sapiens
ctggactcaaatttccttctagaatagaaaacctgcaggccctgcttatccaccagtgggcgccatggcccataaagacccttccccatcccccatttcccttttccctccattttccgttt

SEQ ID NO: 304531 - DNA, 122 bp, Homo sapiens
gtcacccctaaacctcagcatcacacaatatacccattagcaaacctgcatatgcaccaccggaatctaaaataaaagttgaaattatttttaaaaatgcagggcagatcaggccccaagac

SEQ ID NO: 304532 - DNA, 122 bp, Homo sapiens
acaccaatgccaattaaagactatagatatgtaacaagcaggagacacacactattgcaacggcagctgaattatgacaactgacaaagcacatacctggaagttggtgatttcgctatgaa

SEQ ID NO: 304533 - DNA, 122 bp, Homo sapiens
acattcccaagttgagcctaggttcatcctccaagctgcctggtgatgaaggagcattaccgggcttggggaccatccaatcccacacccaagaggcaaacagctgctcggcatttcctgtg

SEQ ID NO: 304534 - DNA, 122 bp, Homo sapiens
tctctccccatctcttgcacatcttgcaccacagatgttccagcctggctgaaaagcctccgcctgcacaaatatgccgcgcttttctcccagatgacctatgaggagatgatggccctcac

SEQ ID NO: 304535 - DNA, 122 bp, Homo sapiens
aaatgcatgcgaaaatgcatgcaccagatgaatgctcgaaaccccgccgcaaaaggcacgcgcccgctgcatcacccctgcacctaatgctgcacaaagtgcatgcaccggcattcattccc

SEQ ID NO: 304536 - DNA, 122 bp, Homo sapiens
ttgtcttatttctaggttgctcttgggccataggccttcttggtgacagaagtgatgaaccggaggttaagcagagagtaggtaggcggggctcaaggggtggggccaagccaaagggctct

SEQ ID NO: 304537 - DNA, 122 bp, Homo sapiens
gtcaccaccttcaaggaactccggtcccgaagccgggccccagccccgccagtcccgcctcgagaccccccagttggctgggctttggtcccgccccggcccccacccccgcctgtccctcc

SEQ ID NO: 304538 - DNA, 122 bp, Homo sapiens
caggccacggcctgccttgagcgcgaggctcagttcggggcggccttcgcggctcggttccgcctctctggtgctatcacttgcaaaatggggatgtcagatacctgccccatgaccatgaa

SEQ ID NO: 304539 - DNA, 122 bp, Homo sapiens
ctgccctttttcttttagtcaaaattgtttaccatatcctttctcctgtttcctgcctgtcgaaatcttacctatgcttcaaataatagctcaaatgacacttcacaaaaactttgtgtttt

SEQ ID NO: 304540 - DNA, 122 bp, Homo sapiens
tggtgcatcctccgcgtggagcagagcaggtgtgatgttgagggcgatgttgctggaccacggggctgaggttgtgtctgctggtttctcctcggggaaggggcttccttttgggaagtccc

SEQ ID NO: 304541 - DNA, 122 bp, Homo sapiens
aaccccgagctggcagatgctctcccgcgcggcggcggctgacgtcagtgctactttcagcgtctttggtgcagtcttggtgttcgctctcaaatgggctcttttcagtatcacatatcata

SEQ ID NO: 304542 - DNA, 122 bp, Homo sapiens
ggagaaggggttgaaacatgttgaaactctgcttagccccaaagcagtgctgaccacgcccgtgcactaaggaatccaaagttactggtgctctaaggtgtcttaagaaagtgactgcacag

SEQ ID NO: 304543 - DNA, 122 bp, Homo sapiens
gggttcgagaccagcctgagtgacatggagaaaccccgcgtctattaaaaatagaaaattcgccgggcatggtggcgcatgtctgtaatcccagctactcgcgggaggctgaggcaggagaa

SEQ ID NO: 304544 - DNA, 122 bp, Homo sapiens
tgaggcttgagacagaatttaggcgcacaagatttaggtacaatttggccttgaggggagcgctctagggaggaaggtaatgaaaggaaagggcagtgaaaggagtggagcaacaatattgt

SEQ ID NO: 304545 - DNA, 122 bp, Homo sapiens
ctatgccataaggaaagttaagcttggaaactcagtcaccaatactgtcttttttgttgtcgttgttcccaaactgatagctgtaatttcataatcccaagacatagcatcatttcctctac

SEQ ID NO: 304546 - DNA, 122 bp, Homo sapiens
ggactatagactcctgaagataataacaggataaactattcccaaactgtctcaaaaatccgagtataaattgtgcagttgccagatatgaaacaatgcatatattatacaattaataaact

SEQ ID NO: 304547 - DNA, 122 bp, Homo sapiens
agggctgcagactcagaccacagtgctaaagccatgaactccacctgctctctgaaggctcgccaacctgagtccagcagaatgttctcgcttgtgtccaaccccactggtttaggctgaat

SEQ ID NO: 304548 - DNA, 122 bp, Homo sapiens
aagcaggagtgaaatggccaaaggctggattcaggaagtggtgagtcatgggtcaaaccccggtgcttccccttttgagctgggtggctttgggaagtcatttcccctctctgactctcagt

SEQ ID NO: 304549 - DNA, 122 bp, Homo sapiens
actcccgccacacagcgcgaattgagcctcggggcttcctgggaattgtagttttagtcacggacacatcttttttattcgggccagtatgcaatgaatcagaaaactacaactcccaaagt

SEQ ID NO: 304550 - DNA, 122 bp, Homo sapiens
gcacaaagacgatgctccgacttgtggaatctgtcataaaacaaagtttgctgatgggtgcggtcatctctgctcctattgtcgcactaagttctgtgcgcgctgcggaggccgcgtgtctc

SEQ ID NO: 304551 - DNA, 122 bp, Homo sapiens
cactttcttctgcccgttcagtgctctcgggtcttttgccgcttcctttcaacaacagtccgatgactttgtcttcctgcatatgtgcgaagggagaggagctcactggtcctcccagaggg

SEQ ID NO: 304552 - DNA, 122 bp, Homo sapiens
tggtaacggtcgcttcagttgtttttcaggaacctggggcaactcctgtccagtttaaaccggttgagactaccgacctttcaactggacccacgcaagtgcccaagaggtggccaaaaact

SEQ ID NO: 304553 - DNA, 122 bp, Homo sapiens
gaaacccagccagaaccacgttggagaaattaggaacctgctgctgaatttcaagccgatcggaaccgccccgctccccttcttccccccataaacaagtcgctggacgaggtgggatctct

SEQ ID NO: 304554 - DNA, 122 bp, Homo sapiens
tggacacacacactcagatacagacacacgcagcaccctcatagaaacacacaacggaaccggggtgcacctggacacacagatgtggactcttaggtcagatctgggatcaagaacacctc

SEQ ID NO: 304555 - DNA, 122 bp, Homo sapiens
tgtccgcgaatcggcagtgcgggtggcagccccctgacaggggcagatgggtggatcttgcggttttggtaatcccatcgggaagggtccgagtcggaagagaaaagggaaagaatgaggat

SEQ ID NO: 304556 - DNA, 122 bp, Homo sapiens
ttgtactcaacttgtgaagcaaacacagccctcgagggtgctgggtgctgtcctccaggacgagggggaacgggagactgcagactgctcagctctcctgtggaggtagagagctaggccct

SEQ ID NO: 304557 - DNA, 122 bp, Homo sapiens
ggcctaaaatcttggaagtacatgtccatgaatacaaattttaaaggatgaaaatcttaccgtactttggaacttgctgtttaaaaagacagatgaaataagttgaagaaacctcatgtaat

SEQ ID NO: 304558 - DNA, 122 bp, Homo sapiens
tgagaggccctgttgcctgccctggaggccgatccctgcaggggccagtctaggcagggacgcccctcttgtctgcatattcccggggcctggcttcctggccgcgtgggcagcctccttgg

SEQ ID NO: 304559 - DNA, 122 bp, Homo sapiens
ccagctggtgatggccccactcccctctcctgtcctcagctgctttcttagacagatcctcggagcctcctggcagcaacccagccccagccacctccagaagtttccagggccctgttcag

SEQ ID NO: 304560 - DNA, 122 bp, Homo sapiens
gctccagttcccacctggactggggtcttccgctgctgcagcctcctccagacgcgccgccgcctccggttgctgcacccagctcggagcccgcagttttcaccggggatggaggagagggg

SEQ ID NO: 304561 - DNA, 122 bp, Homo sapiens
atcttggctcaccgcaacctctgcctcccgggttcaagcgattctcctgcctcagcctcccgcaatatggtgcctctaaatcagggtcgattcagttggccatacccctagaagagatttgg

SEQ ID NO: 304562 - DNA, 122 bp, Homo sapiens
tagtcatttatggggcacaggctcttattggttatataggatatggtccaaatgccttggcgtgatatactaggcccttcatgatctgacttctacttcatcctacactccaattccagcaa

SEQ ID NO: 304563 - DNA, 122 bp, Homo sapiens
ttaactgggtggagcttcagaaatgcaatcagataccactttttgattggaagctagcagcggatacgtggaggggcgtgggtgggagttgtgattagaaaggtcaataaaagcttctaaag

SEQ ID NO: 304564 - DNA, 122 bp, Homo sapiens
tggactcgcgggtagcgacccccccaacccccccccccccgccctacacacacaccctcgcgccggctgaaagcatggaggattcagggcatttgaaaaaagaggggctgggcgcggtggct

SEQ ID NO: 304565 - DNA, 122 bp, Homo sapiens
gtgtgcgcggtggccaatggcgggtgccagcagctgtgcctgtaccggggccgtgggcagcgggcctgcgcctgtgcccacgggatgctggctgaagacggagcatcgtgccgcgagtatgc

SEQ ID NO: 304566 - DNA, 122 bp, Homo sapiens
tgcaaaatcccagaaattacttcaagacagctcttgttaaaataatgtcagccagaggtccggacggactgggacccagaagagccaccagaacaagacatgcggacacaggactcagcccg

SEQ ID NO: 304567 - DNA, 122 bp, Homo sapiens
ggctcggcgcctctagtgacctgacggtcaatgttcacctccctagtcattagctgtggacgtagaaatagcctttctcccttcttttcagccctggaatctcccgtctgctttacagtcac

SEQ ID NO: 304568 - DNA, 122 bp, Homo sapiens
gggcaggaaggaggccagccaggagggggagccaagctgggctcaaatggcacccatccccgagctgctccagaaatctagttgctcttatagcccctggggtggccctggctgagtgcagg

SEQ ID NO: 304569 - DNA, 122 bp, Homo sapiens
gtgcgcgcttccggctgccccctcctggctttgacccagcactgctggacccatctagtccgttcctcacactcgcggactggaagctccaggctgcacaaccaccaactggtgtgtgtgta

SEQ ID NO: 304570 - DNA, 122 bp, Homo sapiens
tctaccactttccacctttcctgggcagctggctcgcctgccttcagggcaacagcgagccgtcacacggccagcgacaactaccagactgcaactaggaggagggactaatccacgcattg

SEQ ID NO: 304571 - DNA, 122 bp, Homo sapiens
tggtgagttcagatctgtttcaccttcgtaattttctcactgttaaaatttttgcaaaggcgattgcagcgccccttgtccacacctgcgcgctccccaaggggtccctacccaccccgccc

SEQ ID NO: 304572 - DNA, 122 bp, Homo sapiens
actgcagcctcaactcctgggctcaagcaccagactccttttatcacattctatctcacacgcgtgtggttccaatcctgcctctgccacttctcagttgtatgccccaacccaacctgtct

SEQ ID NO: 304573 - DNA, 122 bp, Homo sapiens
gagtggtgcctggaggagctggtcttcggcgatgtcgaggacgacgaggacacgctgctgcggcgtctgcggggtccgtgggttcaaggacatgaagacttgggagactcagaagcggagaa

SEQ ID NO: 304574 - DNA, 122 bp, Homo sapiens
aaccatgacagagtcagctccaggattctgagagaacgctccttcctcacacgctcaaaacgtagggccttgagtttctgcttctgctactgtgcacgcttacgttatcctgtccttactta

SEQ ID NO: 304575 - DNA, 122 bp, Homo sapiens
cccagaaaaacatcaacaagcattagcagccatagtgttggaagatgaatgtgaccccagcgacctccattccaccccccaacccccatcccactcccaccccatccccctcaccgccccct

SEQ ID NO: 304576 - DNA, 122 bp, Homo sapiens
tgcgggctcgcgcttgttccgggacaggggcgtggcgcctgctgctggctcggctgcccgcgctgcactggctgccccattaccgctggcgggcctggctgctcggagatgcggtggccgga

SEQ ID NO: 304577 - DNA, 122 bp, Homo sapiens
ttcaccaccaattctggcaagagctggagtcagcctgggactgtggttattttgcatacacgaaaagcttggtaatctctttgaagggcctggactgtgtacaaagatccctccctttttgc

SEQ ID NO: 304578 - DNA, 122 bp, Homo sapiens
ccgctccgctccgccagcccgcagcgccgcagtcgccgctacccgacttccattttctctcgctttaaaggaaaaccagatcagctgttttgctcccgctcgggctccgcggccccctcccc

SEQ ID NO: 304579 - DNA, 122 bp, Homo sapiens
tatgacgagtaagtgataatcacgagccagtgagaggacaggcaacttccttctacctaacgctcttccttcttttcttagataaaacatgcatgccaggcagttcaagcctgcgaagactg

SEQ ID NO: 304580 - DNA, 122 bp, Homo sapiens
cctggcggcgctggtcctgtctctcattctgccgaggagcagccagtacatcaagtggatcgtctctgcggggcttgcccaggtcagcgagttttcctttgtcctggggagccgggcgcgaa

SEQ ID NO: 304581 - DNA, 122 bp, Homo sapiens
gagaagtgcaagaccaaggcttcagcaggttaggacctggtctctatgcttccaagatggcgccttgaagaatgttgtgtcttttggaggggaggaacactatgtcctcacatggcagaaaa

SEQ ID NO: 304582 - DNA, 122 bp, Homo sapiens
ccgcgccctcctggtctgttccggctccgcagttgcgtccagaggcctgatccttacgtccgcctggtcctccgggcctgtctctgcctccagcccggttcccaagggcgccccggggccct

SEQ ID NO: 304583 - DNA, 122 bp, Homo sapiens
cagtccaccccaaacaccgccctcccgctgtgcacggccactgctgcccctcctgcaccccgacacatggggagctggtctgagcctgccccacctgctctcctgtgatctcccctctgcca

SEQ ID NO: 304584 - DNA, 122 bp, Homo sapiens
agacaggcacggttgggttgcctgggcttcactagtgctgcttaaaccgtggggagactgcgctgggttctgtccccttgtcagagccgcattcttccagggccgggccactcctcttcacc

SEQ ID NO: 304585 - DNA, 122 bp, Homo sapiens
ccggggcggggcctatggaggggcgggaccgcggcgccctataagtactgcggagcgaggcgcgcgcccggccagagagcgagcgcgcaacggcggcgacggcggcgaccccaccgcgcatc

SEQ ID NO: 304586 - DNA, 122 bp, Homo sapiens
gtttggggtgtgcgtctactccttcatgtgccagcactctctgccatccctcattacccccgtctcctccaagcgccacctcacaaggctggtgttcctggactacgtgctgatcctggcct

SEQ ID NO: 304587 - DNA, 122 bp, Homo sapiens
cagcatggagctgatggaacagactcctctctgtgagtcacagttgagctgagctggactcggatcctatgaccaacctgtaacatgagttcagcttcttttcccctaacccaagaacagtc

SEQ ID NO: 304588 - DNA, 122 bp, Homo sapiens
ctccacaaactcgttattaagcagttggatccgggcaaccaggcaactcttgctggacaccgtgtagcgccgggtgcgtttcagtttcaacccaaatggcagtggcatcttcttctttcttc

SEQ ID NO: 304589 - DNA, 122 bp, Homo sapiens
agcagctacggagggggcgctgggtcccctaccgctgccggcccacccgcgccgcgctcgcgtgcttcagccgcctcctcgcggggcagggcttgggacctgcaacctgccatgcccgagaa

SEQ ID NO: 304590 - DNA, 122 bp, Homo sapiens
gggcagcaaggagcaatggggtcgtgtgcctctatacgtgtttagttgctgtttggaagccgcttgcaggtggaatgcgtgttctgatctccccatgtggctgagatccgtccagggcaggc

SEQ ID NO: 304591 - DNA, 122 bp, Homo sapiens
agtgaccctcccacctcagcctcctgagtagctgggatgacaagcaccagccaccatgtccggatgccctttaattttaatgtctgcggctgggcccggtggctcacgtctgtaatcccagc

SEQ ID NO: 304592 - DNA, 122 bp, Homo sapiens
gaagagaagaccaagaactggaaggaacttatttaaagccctgttgctgtacattgcagacgggatgtactggtagcatagcttaggaacagatagatacgggtttcctcatctgtagaatg

SEQ ID NO: 304593 - DNA, 122 bp, Homo sapiens
gacgggtggcggggcaggtggcctggggtgggggctgggaggccgcgcgggccggcggggcggggagcaggggtggggagagggcggcgggggtgagtcaccgggcgcgcgctgccccggcg

SEQ ID NO: 304594 - DNA, 122 bp, Homo sapiens
gttcaactcaggaaggtgcaatataacaaatgtgcatattataatgaggaatggtactaccgttccagattttctgtaattgcttctgcaaagtaataggcttcttgtcccttttttttctg

SEQ ID NO: 304595 - DNA, 122 bp, Homo sapiens
cggggctcttaacaaccgccccgaaggtcacctattgaagtagaccccaacccagtgtcccgacactcttctgggacttatccacatcccgctgctgggccagggctagcaggacccagaga

SEQ ID NO: 304596 - DNA, 122 bp, Homo sapiens
aggatcggatgggaggaggggcagggagcgcctgtggacaagtgcagaccggtcggcgcacgtcccacgccacgtggactcgcctttgtcggtggccgcctttctcgtcaggccgcgacgac

SEQ ID NO: 304597 - DNA, 122 bp, Homo sapiens
ctctgtgccatattgccttctgattacaagaaccttgcagatcctgttctctccagcccccgacctgccttcctagcctctcattctgttattgcatctgacaaacacagcccaatactcaa

SEQ ID NO: 304598 - DNA, 122 bp, Homo sapiens
aaagattcgttgtcgttgtcatattccagctttttaaagtcactctccaacactcgtttccggctaacaagctttccagaaacgccacccattaccccctccatcaatttccctattctcca

SEQ ID NO: 304599 - DNA, 122 bp, Homo sapiens
ccacagccgcatccgtatccgtgccttgtgacttgtttgagacccaaacaaaatgttatgcgtttaaaagcttactgggctgctcggggaccagtgttttgaatgaacctcttcgagtgtct

SEQ ID NO: 304600 - DNA, 122 bp, Homo sapiens
gggccctcagagttctcagtgtcgagcgaggagaggggctggcccctgcccccggagaagcgggactggtaggagagagaaactcagcaccggggcccagctgagccccttcctgcgtaagg

SEQ ID NO: 304601 - DNA, 122 bp, Homo sapiens
agtgatcctcccacctcagcctcctgagtagctgggactgtacgcagctgccactatgcccggctaatttttaagttttctttgtagagacagggtctgctgggttacccaggctggtatca

SEQ ID NO: 304602 - DNA, 122 bp, Homo sapiens
gggagagtccgtgcctgggggcgtggtgagccagggccggtgctggggcgcagagcagggcggctcagattccgggaggggcggggagatcgggttgctgggcgatcctggggtgctggagg

SEQ ID NO: 304603 - DNA, 122 bp, Homo sapiens
cttgtgagttaaagcctgaggctctcattgaaactctgtattaggagtattaacacacatcgcacagctctcccaattagcattaacagaggcccatctcaggacctcattttctgctgctc

SEQ ID NO: 304604 - DNA, 122 bp, Homo sapiens
gtggccagcagttctagtgatgaggaaggtctttgcccccattagaagagtgtccttgtccggaaggactttcctacccaaaggtaagagttgctgtgactacctgaagcaggtcccgtggc

SEQ ID NO: 304605 - DNA, 122 bp, Homo sapiens
tattaaattcggcagacgcacttagttgaaaaatggccacgatctaaatccctttcgtggcgtctgatcaaatcggagctcaagccgcagcagccggaaacctcttaggctgctcgtgccaa

SEQ ID NO: 304606 - DNA, 122 bp, Homo sapiens
tacttgggtaagtcccccaggggcgagttcctcgctctgggatgcaggcatgcttctcaccgtgcagagctgcacttggcctcagctggctgtatggaaatgcaccctccctcctgccgctc

SEQ ID NO: 304607 - DNA, 122 bp, Homo sapiens
ggccctgacccctgacccctgtgccctgcagagacagcctgtccttcaggcaagaaggcccgcgagatagacgagagcctcatcttctacaagaagtgggagctggaagcctgcgtggatgc

SEQ ID NO: 304608 - DNA, 122 bp, Homo sapiens
gcctcgccttgaccctccaggaaaaatgttcctgagcggaaagatcgttcaagttgcctgcgaaccaagtccttgaggtctttgtggggatcaggcgatgagagcatcaattataataataa

SEQ ID NO: 304609 - DNA, 122 bp, Homo sapiens
tacatagctccattggcctgggcttcctcaaagcatgtctgcttcagcatagtcacacttcgcatatgatgcaccatggttctacagctcattccagtggacgagaacattggtcaagaagc

SEQ ID NO: 304610 - DNA, 122 bp, Homo sapiens
cccccgccagcctggatcactcacctgcgctcccccgtgtgccacacttcatgcttcgtgcggtactccgccagagcaaacactttctcacaatagcggcaggggtacttcctccgccacga

SEQ ID NO: 304611 - DNA, 122 bp, Homo sapiens
ggccgccagggccgcaccgcggccctgcgcacgcgcagctccgccccactcaccctgcggcgtggtctgtagccaataggcgcacagctctcgccccgcccacttccgcccctctcagttta

SEQ ID NO: 304612 - DNA, 122 bp, Homo sapiens
agagcgcccagcaagggaggcagcagaggagcaggaccagcgcgccccgctgcaggatcacgcccacgtgcttcttgttggggctgccgaagctctgcaaaacagcccgccccgcgtcagcc

SEQ ID NO: 304613 - DNA, 122 bp, Homo sapiens
gctccgcatgcctcggcccagcgcgggccctcagccggccagcccctccgccgcggcgcccgttaggcagctgcccttcatggcgcccggttcgcccggcatcgactccctgcgtccgctca

SEQ ID NO: 304614 - DNA, 122 bp, Homo sapiens
cgagcacgccgctgggctggaggcattccgaggcccctcgcagccctcagtctgtgatttcggctccacgagctccctccactgcgaatgcataggggttttaagagatgatgcggatcagg

SEQ ID NO: 304615 - DNA, 122 bp, Homo sapiens
tggactgctttggtctctggacacgttttctaaccctggagcccagcttcttcgggcgggcgtgcttactcaccagctggccgatccggtccaagttgtccaggaagtacttcaccgactcc

SEQ ID NO: 304616 - DNA, 122 bp, Homo sapiens
gccgcggctcagcccagcaagtggctcccggggcccgagacgccgccgcccgcccttcaccgagtccggtgactccgcaagcgccctcaaaacgcctttcctgacagaaatgtcccccagct

SEQ ID NO: 304617 - DNA, 122 bp, Homo sapiens
tttctgatcagtaggtctagtgggaagggatttggcacctgaaggttttcaaagctctgacgcacaccctaaaagccccctgcaaatagttctgaaagactatgtgggggaacctggctctg

SEQ ID NO: 304618 - DNA, 122 bp, Homo sapiens
ctctcttatttttttcaacctcagccttttatgtgggcggagtggtgatcacctaattctcgcagacctggctgggggctgtcttctcctctaatcttacaaaaatggtctagcagctcggt

SEQ ID NO: 304619 - DNA, 122 bp, Homo sapiens
ctttctctcttgctcaaagctgcgtgtgtgcaacgcgccagtcccaggataattttaactcgcggccggagagaacgcgccgcccgcccggcgtcttttttgttttcgcccaggcgggctgg

SEQ ID NO: 304620 - DNA, 122 bp, Homo sapiens
aatccgggttggactgtgtgattgggcccggtggtgtgggcagggcaggttaggtgtgtccgctcctttcacactcaccggtggtcgggcggcggaggcggtgggagcgccggagttggatg

SEQ ID NO: 304621 - DNA, 122 bp, Homo sapiens
aggggctgagcctcaggacccctaggccaggccgtgttgaaagcagataccccgaggcctcgcccagcctgcgctggagggaagaaggcgctggaggtgcggcagcgggcagtggggggacc

SEQ ID NO: 304622 - DNA, 122 bp, Homo sapiens
catgaggcagcagccagggctgcagggaggaggggcagcgccgggcgcggggccacataccggcactgcccagggtacacacacctcaccgaccacgcacgccgggcaggggcgaaagcgct

SEQ ID NO: 304623 - DNA, 122 bp, Homo sapiens
caaatgaactacagctgtgacggtagttcacctcccatcccaaagtgctgggattacaggcgtgagccactgtgtgcagcctcatctgctcttctgatggagcaatctgagagggcaatggg

SEQ ID NO: 304624 - DNA, 122 bp, Homo sapiens
tccatcttagggtgggtggagggatgatttctagtctcatctttgtccctcccctgtgaacgtaagctgttaactaacattgtcagggtgaaagaggccacctgaggagctatgtagccatc

SEQ ID NO: 304625 - DNA, 122 bp, Homo sapiens
atgttacctgcatgtttcctgatcatatgctcctttgatgctgagtgtggatcttgtgtgcgtgttatctctatgtgtgtaccacctggctgcatttctttaagggctgttccatggattat

SEQ ID NO: 304626 - DNA, 122 bp, Homo sapiens
ggccctgccggccctgccggcccggggcaatgaggggtttagcacccgggccagcggctacggaggctgtacttggtccccaagcagtgccagctcaccggccctgggctcgatttctcacc

SEQ ID NO: 304627 - DNA, 122 bp, Homo sapiens
atacgggactcctggaaggcagcttctcaccgtcactgccgtctgccctgctacatgtgacggctgtgtttcacatgttcaccggtgtgtacgcccgggtgtgcttcgaactgagaagccag

SEQ ID NO: 304628 - DNA, 122 bp, Homo sapiens
tcctgtttaagatagcgtcccccatggcagcgcaggcctggaagcttctgcaagccctagcgctgctgccccgcttcctggtggccaggtcccgggcagttcaattaacctccagaagatgg

SEQ ID NO: 304629 - DNA, 122 bp, Homo sapiens
cgcagcccgttctccattgccatttggtcctgccttccccagagctgctagcagctcggtcgaggcaagagtgactggctcagagagcgagctttgtggtattgataaatgaataaattagt

SEQ ID NO: 304630 - DNA, 122 bp, Homo sapiens
ggcgctgttctccctgtgctcttggaccccgcagttgttttaggaacattcactggagagcgagaagggggccgccttccggtgcccggtgggcaacacctaagccgcggtgtttactggtg

SEQ ID NO: 304631 - DNA, 122 bp, Homo sapiens
cagagacctcccacacgctcgtctgtgtcaccgccgccccttcctggttggccctgcagacgaggaagccctccaacctgcagccaaattcactccttgctgacaagaggctcctagaggag

SEQ ID NO: 304632 - DNA, 122 bp, Homo sapiens
ccatcctccgcagtgtaaccagctctttgagctcctgcaagacctggtggaccatgtcaacgattaccatgtcaagcccgagaaggatgcggggtactgctgccactgggagggctgcgccc

SEQ ID NO: 304633 - DNA, 122 bp, Homo sapiens
agatggaagtcacaggacttaaaagtgggttgacctggcagaggatgagggagggacgagcgccaatggttcccaggggtctggcagagcagctgcatgggccactgagtcatttcacaagg

SEQ ID NO: 304634 - DNA, 122 bp, Homo sapiens
cccacctcagccctcacgccccctggatgcccagggctcccacctcagccctcacgcccccggatacccagggctcccacctcagccctcacgcccccggatacccagggctcccacctcag

SEQ ID NO: 304635 - DNA, 122 bp, Homo sapiens
gtgggaagcagagccaaaagatggaagttctgatggcagtgtttgtacctttgggtcagccgccatgcctaaagtcagtgctatctctgtactttcaaattatgtgagctaataaattcttc

SEQ ID NO: 304636 - DNA, 122 bp, Homo sapiens
tgttgggcactgtgttagcactgctgcatatccagcaagacaatctcaaggcagacctttcgggagagagaaaaataagagagggagacataaaactatcttatgccttagaacacgtatct

SEQ ID NO: 304637 - DNA, 122 bp, Homo sapiens
ggatcagcgggcccggcggggggcggcgacggctttacccccagctcgggacgtgagcctcgtagtcccagtactcgcggctcctcagactgttcacctcggcgtagacccgggccctgctg

SEQ ID NO: 304638 - DNA, 122 bp, Homo sapiens
tagggactgggggctgagcattagtacagggttccatttaaggtccagcgttggtgctagcgtcactatcaaggttagggcaagtagaagtaataaagagatttagagtcagaattggtatt

SEQ ID NO: 304639 - DNA, 122 bp, Homo sapiens
gaggtccctgcggctttccgcagtgcactgtgtccctgattaatcgagaacggagaatggcgatgacttttaccaagcacactgcctgcaaacaaattgttcacaaggcacatcctgcacag

SEQ ID NO: 304640 - DNA, 122 bp, Homo sapiens
ctcaccccgccgttctcagcgctgcccgaccccgctggcgcgccctcccgccgccagtcccggcagcgccctcagttgtcctccgactcgccctcggccttccgcgccagccgcagccacag

SEQ ID NO: 304641 - DNA, 122 bp, Homo sapiens
gacagttgggtaagatgaggggtaacacagctcctatcttcccctggagtcactaggagccggtcggtccctctgggcctgtatccacgtctggggaactgcaggctgtgatcaccttgcct

SEQ ID NO: 304642 - DNA, 122 bp, Homo sapiens
agtcctccttttcgggaggaaggccacccgatgtaagccctggtctcggtccagccctgccgccgatgagctgcgtgaccttgagcgaggcccccccggcctcagtttccccgcctgtcaac

SEQ ID NO: 304643 - DNA, 122 bp, Homo sapiens
ggcggcggccgcttcgtaccgcgtcctgagccgcctccttggctatggagaggcggcccccgagccaggccctccgccaccgcccccgggccatggccccccgccgccacccttcctcgcgc

SEQ ID NO: 304644 - DNA, 122 bp, Homo sapiens
ttataaagataacgaatagagcattaatagtattacttacactccctctagggcctagagcgctaagattcacaaatggaacggttgcaagaaaaatgtcctgtgttaaggagccagtcagg

SEQ ID NO: 304645 - DNA, 122 bp, Homo sapiens
taagtgagactgtccacatcatctaggaaaatggtggccctgtccttaaagatttgtgtgcgccactgcaacgtggtgaagaccatgcagtttgaaccatctacagctgtgtacgatgcgtg

SEQ ID NO: 304646 - DNA, 122 bp, Homo sapiens
agctgcctgaggactggaggactgaccggggccagcacagcgggcgggggcctgaggactcgaggactgaccggggccagcacagcgggcggggctctgcccattaaatacactttcgcgtg

SEQ ID NO: 304647 - DNA, 122 bp, Homo sapiens
gggctcgggacctgcagccggccatgcctgagtctcccaccccctccatgggctcctatgcggccggagcctcccagatgagcgccgccccctgctccaaggcgcccagtcccatcgaccac

SEQ ID NO: 304648 - DNA, 122 bp, Homo sapiens
gactgatcagcaaacatttcaactgctagaacatgactttcacaacttttcaacagtgttcgaagtacagtttggggtgtctggttcccttgattaggtttgtaaagctattttacggagtc

SEQ ID NO: 304649 - DNA, 122 bp, Homo sapiens
atacagcttcctgtgtgaacagaacatcctggacaaaaacccaggggcgggaggcacatgcgcgttttgggatcagggtgcatcctgttggtggagtgtgacttatgctacaccagaggggg

SEQ ID NO: 304650 - DNA, 122 bp, Homo sapiens
ctgtccagaggacgatcttgccgggcctcccgtcagagggctagaagcttgctctttgggcggagccactgcttaggttttcagtcttggtgaggtaacaggaggcagtctgtcacctgagg

SEQ ID NO: 304651 - DNA, 122 bp, Homo sapiens
cattgtgagcattcatcactcaccacctcctccccacattcagctgtcagtcctactggccgcagtggaaagaaagcctgctccattatttctagtgacagacctggccatcattcccaagg

SEQ ID NO: 304652 - DNA, 122 bp, Homo sapiens
cgctcaaaagtaactcaagtttgcgcgccagtgggaaacttggcgctcatgactcgccagcgcgggtcgaaactccttcctgatgccctctcagctgtttttcttcccccgcgtggccagga

SEQ ID NO: 304653 - DNA, 122 bp, Homo sapiens
gtagggagggcaatattgggtgatgtagaggttttgtactgagggccaatgatggtgtttcgatatttatttcctgctactgaaatttgaatctgagtgagttgtccctatttcttgataat

SEQ ID NO: 304654 - DNA, 122 bp, Homo sapiens
ctactctcgagttcaccgaggcggaaagcccctctgactccaaagcagggctcagcgcgacgtcccagaggccgcttctagtggcaggtgcccctcctcacagggccctcgcagccccgccg

SEQ ID NO: 304655 - DNA, 122 bp, Homo sapiens
gacctcaactcgccattgggctgtcacagagactgacccactaatgataggattagctaacgtcacatgttagccacaacaaacccagtcgtttccactgcattttcccagggaggatctgc

SEQ ID NO: 304656 - DNA, 122 bp, Homo sapiens
caggagggagggtggctttgctgttgttgggacatggcaatctagaccggtagcagcgctcgctgacagcttgggaggaaacctgagatctgtgttttttaaattgatcgttcttcatgggg

SEQ ID NO: 304657 - DNA, 122 bp, Homo sapiens
ctgtcgctgcagacggaaactgactggggtcaattcaagtcatgcaggctgtgagaaacgcggggtcgcggttcctgcggtcctggacttggccccagacagccgggtaacaaatgactgcc

SEQ ID NO: 304658 - DNA, 122 bp, Homo sapiens
gccgggccgcccgggcagcccacgggggtgcagccccgacgctccactcggcggggccgacggccaatcttcccagcacgtcgccgagggagcgctcctgaccccgggaacgtccaggacgc

SEQ ID NO: 304659 - DNA, 122 bp, Homo sapiens
ggtatcatattttatcactgaaattaacttaaaaattgcatgctctgagtaaaatatgtacgtatagatcacgatgcctacttagaacatgaaatattgatgttcatataatgttaatattt

SEQ ID NO: 304660 - DNA, 122 bp, Homo sapiens
cagagcccagggaggccaggcagcaggatggcaggcagacaggcggcagcaggggacaggcggcaaggccagaggaggtgagggcctggggggcggaacttagccactgtgaacacgacttg

SEQ ID NO: 304661 - DNA, 122 bp, Homo sapiens
cccaaggctgccctccacgtgctgccagacctggtgcgcttttaacacaggagtggtggccggatgttctcacctcccaactctcaccaccttgctggccgtggccgggcaagtcctatgac

SEQ ID NO: 304662 - DNA, 122 bp, Homo sapiens
tagagacttaaagctactggtgacagccagcgacagcgggaaccctccactcagcagcaacgtgtcgctgaacctgttcgtgctggaccagaacgacaacgcgcccgagatcctgtaccccg

SEQ ID NO: 304663 - DNA, 122 bp, Homo sapiens
tcattaaacttggaatttcatcttcccttttcttgccgtgttcccttagataactccagtcggatgtgccattgaaaggccgcgaagaagcttccgctttagccgtagcctttgaggatgag

SEQ ID NO: 304664 - DNA, 122 bp, Homo sapiens
gctctggcatctgtgactccagtgcccattcattcccttgcctacctgcagcaggaaggccggagaatctcccattccctgctggcctcccagagatctagctgatagacttaaaaaagaaa

SEQ ID NO: 304665 - DNA, 122 bp, Homo sapiens
ccgagcccagtctcggatccctcgccgacccgattgcactcggctacctctggaaacgctcggctgtctcgggggcaccctctagtccaccagtcccgcgggattacgttcggctacttccg

SEQ ID NO: 304666 - DNA, 122 bp, Homo sapiens
tccccacctcacgccggcggggccaccctttcactccgcctccatctgctctgtggtccgcgctcgctcctgaagttaggcgtatacaccaccttccaactgggacagaagatatcagtctc

SEQ ID NO: 304667 - DNA, 122 bp, Homo sapiens
cccaatgccttgtgggagttgtagttcttggagaagccccacctttccctttgtagtgcccgcctgcctgagaggctgtgagcgctcctaagaggtttgtgcgttctccaggcttcttattc

SEQ ID NO: 304668 - DNA, 122 bp, Homo sapiens
taagggggaaattggctgtggagtcataccttagaccctggttgggtaggaagtcaggatcgcctagatggagctatggagaataaacagagcagaagtgtagtggtctgtgccaccctgac

SEQ ID NO: 304669 - DNA, 122 bp, Homo sapiens
catcagcctgaccctccttctctgggcagcacagagggcaccctcaggggcacgggtcctcgccccaggacctagatgtgcatcattgcagccgaaggacaaggtcagagggcgggactgtc

SEQ ID NO: 304670 - DNA, 122 bp, Homo sapiens
aatcatccacccgcctcggcctcccaaagtgctgggattacaagcgtgagccaccatgcccggcctataatgttcttattaatgtctgcagattttattggagtgagaggtggaccccgaat

SEQ ID NO: 304671 - DNA, 122 bp, Homo sapiens
gattcagtagatccagatgggacctgagatgctgcatttcttaggccacatgtatgctgtcgggccgtgggttataatttgaatcacaagagacttgtctgatagatttggttcacagtggt

SEQ ID NO: 304672 - DNA, 122 bp, Homo sapiens
taagtctcattcattattcagcgctcctgtccgcccccgccccccagcagtctgaggcgtcgctttggggcccctcccagcctaggcccctcagtgagccctaagaggtcatatagagagca

SEQ ID NO: 304673 - DNA, 122 bp, Homo sapiens
cgcgtagcagacgttgtcctccaggaaccgcacaaaggcgtacatggtgggcgccgggggcgggccccggtcgggcagctcagcccgcggggcgggcgcggaggtggggatccggcgggggg

SEQ ID NO: 304674 - DNA, 122 bp, Homo sapiens
gctaaatacagctgataattactgataaagactgaaatcaacgaaggcctgcagtgctcacgcgctgaagactcggtgtgactaagatgtccaccctccccatagtccatctccagattcag

SEQ ID NO: 304675 - DNA, 122 bp, Homo sapiens
atggagctaacagaatgaaagaggacgcaaacaaaacaagaaataagtaaaataattaggcgatcacaaataagggaatggacactgaaataagaaaataaaaagacctttagggtagtaag

SEQ ID NO: 304676 - DNA, 122 bp, Homo sapiens
tagagcgcgcgttttctccgccgagcacgctgcccgacgccgtcgcagccgcgcacttcccggttttgaaagccagagagatgagtcaagcgcaaaagctccggagtgacaatgcgagcttt

SEQ ID NO: 304677 - DNA, 122 bp, Homo sapiens
gaggggtgcagtgagccagtctccagaggacgtgccgggggtggctgcgtgccctcgtggcgggttcccagcccaccgtcgccggccccggcgcgctgcggctgtgggcgcggggtgcgtgg

SEQ ID NO: 304678 - DNA, 122 bp, Homo sapiens
ggaggctctgggaggttgagtgacttgccccaaagtcgcacagctcctaagtgaaggattcggagtggactccaggcagcctggtctgactccctgcactgcgctgtgcttatctctggccc

SEQ ID NO: 304679 - DNA, 122 bp, Homo sapiens
acattactcaaggaccagatcatcaagagctttacttgtcccacaaaggagtctggacctcgtttaagtgcacaggagaccgctggaaggtcctcagtggcgtgccatggcccgacttctat

SEQ ID NO: 304680 - DNA, 122 bp, Homo sapiens
accacgcggaggtcggtctctgtgtcggtgtcgaggccgctcgacatggacggcgtgaaacggagcttgtcgtcaggcaggaggcagttctccaaggtgatgagcaccccggagtacagcct

SEQ ID NO: 304681 - DNA, 122 bp, Homo sapiens
tgcaagcagttgtggttttcccgaccagcttgctgccactgagccagtggttactttgtccggctcattgccactggaccatttctgtacataaggtggttctcgtgtccagcctaccacca

SEQ ID NO: 304682 - DNA, 122 bp, Homo sapiens
cctgagccagctcaagagttactgcaggagcctgcctgccgggagagccatttggagcctcggccggggctgggcctgcgttgggaacgcctactccaacccggggcgccagggccagttca

SEQ ID NO: 304683 - DNA, 122 bp, Homo sapiens
cgcgcgtcggagctggccccggacctctcaggcgcgtccgcgggggggcagctgcggccacggaacctcgctgcccgtccccgcccagtctaagctggccccgggggcccgcccgcgcgcca

SEQ ID NO: 304684 - DNA, 122 bp, Homo sapiens
tgctctgtgtggttactaggaccaacgaggagggcgttaggttagtccctgtcaccttgtcggggatcagtctgctgtgcgtgctcagactcttcccagagccagcagcaagaacccgaggc

SEQ ID NO: 304685 - DNA, 122 bp, Homo sapiens
ccctgtttgagccttatgagggggctgtgtgtttgagaaagaagaaaataagcttaagagcgtatatgtcccagacacaagctctgagtggctcagctgggatgagagtgcagtttccttta

SEQ ID NO: 304686 - DNA, 122 bp, Homo sapiens
cctcctatcttgagagtaaagagtggaaagaggtccccaggaccaggcgcctcagagcgccgcaggctttttgcagcgctgcgcttgcagaataggactgaaattttcggctatatagcctc

SEQ ID NO: 304687 - DNA, 122 bp, Homo sapiens
tgcgcagctccgccgccgccgctctggacactacacctcttcctcgcactccgggactagcgtcccctccgcgactagcgtcccctccgcgctgtgttcccggagcccctcccgggcctcag

SEQ ID NO: 304688 - DNA, 122 bp, Homo sapiens
tccagctgctcctgcatcttctcctccgccccggcctcccgctcctgaagctgccggatgcgcgtcaggagctcctggttgcggtcgacctcacgctgttaagagagcaagagtcagatgcc

SEQ ID NO: 304689 - DNA, 122 bp, Homo sapiens
gcactgacacagctcccaggaggaacgtttcatgggcttgagttttctaactctttgggacggctgtggcacttttcatatcatatcattcaaaatattctttttttttgagacggagtctc

SEQ ID NO: 304690 - DNA, 122 bp, Homo sapiens
gaagtagttgctgctgctgggagattgattctcactggcccggctggaggcatgggagcgcgcagagcccatggtagcaggggccacagtgcccccactcccggatggcaccccagcaccag

SEQ ID NO: 304691 - DNA, 122 bp, Homo sapiens
cgtcacttccgctcgcgtccctctcggcctcagagcgacttcctgtgaacgcgcggcgcgcgccgtcaccctcctggctccgcccccgctccagccgcctaggcgtcgccctgcgtggagcc

SEQ ID NO: 304692 - DNA, 122 bp, Homo sapiens
ctgaggaacagtgccacagagtgccccaagacgagtctccgagtcagtccctacctggtccggctgcattctcaggaacagtgctggaacaaatgaacattgattcacttctgtttacaaag

SEQ ID NO: 304693 - DNA, 122 bp, Homo sapiens
cagctcccacactagcaaggttttgtcactctcgatgggaaccgcaaaaggtaccaactccgccatcctcccttcaccgcacctgcgcggctaaccctcgccccagcattgcgcctgcgcaa

SEQ ID NO: 304694 - DNA, 122 bp, Homo sapiens
atacactagcaccctgatgccacattcagtgcctctcgcccaggggaagtgctaatcagacgtgtttccctctgggcctcagtgtttgcatctgaatgcgggggtgcactttcaaggcccct

SEQ ID NO: 304695 - DNA, 122 bp, Homo sapiens
gcctgtcccttgacgccctgcatcctcctccctgactcgcagccccatcggacgctctcccgggaccgccgcaggaccagtttccatagactgcggactggggtcttcctccagcagttact

SEQ ID NO: 304696 - DNA, 122 bp, Homo sapiens
tgtgggaagggctgacttttctacctgttgccaaagacctgctgtctgtggcagccgcaacgatatttgtcctgctattaatcctctggaatcgatcaaatatcaaaaataacttctctttg

SEQ ID NO: 304697 - DNA, 122 bp, Homo sapiens
gaatgaggccctgggccccaatttctccctttgccctgaggcagaactgggagcctgggccgctgatcagtttaccttttcttttgttcagagaaatctgcaggtaaagacaggaacctcag

SEQ ID NO: 304698 - DNA, 122 bp, Homo sapiens
aagagtcgagatggctttgatggacaggcatagcgcgagtgcgggctttcgcccaaccggcgggccgctgtcccgaaaaaggaccaatgaggaggcggcaggggtggggcgaaggggccggt

SEQ ID NO: 304699 - DNA, 122 bp, Homo sapiens
gcccctgcaggatccccgggcgcggtcccccgcgcgagtcccggcgaatccctgcagccgcgcgcgaagctcagaagtccaggctcgcagaagaccaggttccacgcacacgccgcgcatcc

SEQ ID NO: 304700 - DNA, 122 bp, Homo sapiens
agaaggcctcagaggcctgggggctgggcttcccctttcacatcgccctttagaggcccacgtgtgggcattggcccgcgatctgaaaggggctgtcctgttcctcatgggcgctgccagcg

SEQ ID NO: 304701 - DNA, 122 bp, Homo sapiens
tgaccttccaacagggctgggttcccatagagctcacgcaccaggcagccgctgtggcctcggaggacagaggtggcctctccagggcttccgcgaggttttctggtttggggaggagtgtg

SEQ ID NO: 304702 - DNA, 122 bp, Homo sapiens
tttttaacttagtaaaattcttttccagataagctccgaagaagtatgcctaacctagcccggatgccaagtacaactgccattagtagcaacattagttctccggtcaccgtgcgaaatag

SEQ ID NO: 304703 - DNA, 122 bp, Homo sapiens
ggcctggctgtgggcgggtggccatcagtccaggatggtcttgaagtctgagggcagtgccgggttggctgcggcctccagggcagtcagcgtcgtccccgggagcttccgactcagctgcg

SEQ ID NO: 304704 - DNA, 122 bp, Homo sapiens
agattagtagcagagcacaaagaatcagaaactcaggctaaaagtaaaattcattctctccgctagtgggcttctagtatatttccccattttccacagtccaattcctagagactttgttg

SEQ ID NO: 304705 - DNA, 122 bp, Homo sapiens
aaaacctctagacagggaacatcagagctctcatcgcttaatcctgactgccatggatggcggggacccgcctctaagcggcaccacccatatctggatccgagttacggatgccaatgata

SEQ ID NO: 304706 - DNA, 122 bp, Homo sapiens
gtgaatcaggcacgtagcccgatgtggctcgtacaagggtcctacccccgatgaccctcgcgaaccaatgcggtgcctggcctgttgacccgggatgtttctgcaggcaaaccacaggtagc

SEQ ID NO: 304707 - DNA, 122 bp, Homo sapiens
acagccgtttgggtttccgatcgcgggcacggcacccatctgcggtgtctgtgaagccggcgcgttctgccgggggtttgggtttttttgtgtgtgtgatagatctttttagcttagatacg

SEQ ID NO: 304708 - DNA, 122 bp, Homo sapiens
cttcccctggggccgggacctggggggttggctaggggcggccttccctgcactgtcgaccggtaagtcacccgggagcccaggggagcaaccaggtcctccacgaaggctaggggagcgga

SEQ ID NO: 304709 - DNA, 122 bp, Homo sapiens
tctggcatcagctggcaggtgcccccattcgaacagcccctaggagggcagggtcctgcccgcagctcacaacgtggaccctcctgccccacagggcagaggcactggaaggagcccagggt

SEQ ID NO: 304710 - DNA, 122 bp, Homo sapiens
aaacacgttcgcaaagccccgggccggccggtcgcctgcctctcacctagcccgaccgcccgacgtcctactgccgagcgagggcgagcaagccaatgtgcctagcctcctttccccgatcc

SEQ ID NO: 304711 - DNA, 122 bp, Homo sapiens
agagtttgctttcatttgcaggacataggtgcttatggttgtgagctgacagtcattcatcgaacattatctcattcatgactagaggaagttttttctggttaaaatagggctggaatcat

SEQ ID NO: 304712 - DNA, 122 bp, Homo sapiens
tctcccagctgatgataaggccttgggaaaatgcccctaggctcatgcgctctggagagacgccaaaggtttactgatgtacaggcccagtctgctgctaaaagaaactttgggaggcacag

SEQ ID NO: 304713 - DNA, 122 bp, Homo sapiens
cccgggggccggggcggagaccaggtgcccgtcggggcggagcagccctccctgccccggcgccagcttcgctcttaccagctcctgtttgaggcgacggagatagcagtccatttccctgc

SEQ ID NO: 304714 - DNA, 122 bp, Homo sapiens
atctgggccatggccgagcctggagagggactgccagaggaggtgctggcactcatcttccgccacctgtccctgagagaccgtgctgccgccgccagggtctgcagggcctgggccgccgc

SEQ ID NO: 304715 - DNA, 122 bp, Homo sapiens
cttgagggaggaggcagggaggccaggagaaggaagacagccagccttctgtgagatttacgtgcgtgcctggcttccaagacaagtaacttctgttgtaaatacaaattaagctatttttt

SEQ ID NO: 304716 - DNA, 122 bp, Homo sapiens
tttaccttgtgatctctgcacgtatgacccgggaacgggggccggggtgggggtgtgggacgctcaccccctgagcagggctcctcccctgtgtgtgggcccagagggtcaaacgggagggt

SEQ ID NO: 304717 - DNA, 122 bp, Homo sapiens
acaggcccagaagtcctttcttgctcttcggctgtctctgcagggcatcttttaacagggcgagggcgatctgcagtaatggagcaaacactgtgcgctccctgccctctcgcagtcggtgg

SEQ ID NO: 304718 - DNA, 122 bp, Homo sapiens
gcaatgaaaatactctcaaagcccaccagaacctggagcaggacgtaaacctagaaaggtcgctcgtgctcactgccctctccctttctcccactctgtctctgtctctgtgtgtgtgtgtg

SEQ ID NO: 304719 - DNA, 122 bp, Homo sapiens
cttccaggacgcaacgtgctattaagggaccgtgaggggcgggcagcccttctgagatcgcgggctaactgctactttcacccctccttctccggacccctctctccgtctacagctcgcgc

SEQ ID NO: 304720 - DNA, 122 bp, Homo sapiens
tggctgagggccgctgcgtgctgggggccatgccaatggggcacctgatctggctgccaacgacccatcagctccaggacttcacagcgccgcaacaattatgcatgagggagtgattcggg

SEQ ID NO: 304721 - DNA, 122 bp, Homo sapiens
atttgatgattgggcttatttatatttataattatctatagagtgataagcacttatatgcggaaggagagagttcctgtcctgctcactgatgtatcatcaacttgctaatgaatgaatga

SEQ ID NO: 304722 - DNA, 122 bp, Homo sapiens
gaagaataaaggcggcttgcaacaggctttccaatagctctgctctctgcttctcagaggcgggggtgggagagacgtgccagcaactcaggactcctggcttctgctctgagctctctctg

SEQ ID NO: 304723 - DNA, 122 bp, Homo sapiens
tgggtttcgggacgctttttggggagaacccgatggagtctgaaggatctctaaatcaggcggaacccacggtgcggcgagttgggacggaagtaaccggtgggagtggggaggagccggaa

SEQ ID NO: 304724 - DNA, 122 bp, Homo sapiens
gtgctacaggtttctccacacaccttgctcccagggcagagggtggaattactaacactgcgcacctgatggctgttcggcacctgtactgactgaagttcagctcccccagcactcacttt

SEQ ID NO: 304725 - DNA, 122 bp, Homo sapiens
tgcgcattgtgaggctttctggaggtgatagcaggtgaaaggaagagagccaggggtcagcgtcacttcctggtatttgaagatgcggttgaccatggtgtgtacgctttatttgtgacgta

SEQ ID NO: 304726 - DNA, 122 bp, Homo sapiens
tcgtcgtctgcagctcctcattccagtctcgggtctgcagagagatcagggagggaaaaacgagctcagcctgtgccctgtgacctgctcccggaagtcgctccttctaccttcctgagaag

SEQ ID NO: 304727 - DNA, 122 bp, Homo sapiens
ggcctcctcttctgcctgggggtggccatgttcacctaccagagcctccagggctgccctcgaaagatggcaggagagatggcggagggccttcgctacatcccccggagctgtggtagtaa

SEQ ID NO: 304728 - DNA, 122 bp, Homo sapiens
cctggtgtttgggatgtctccttctcattcccccgtgtcttgctttaagctgcgtgtcctcgtgtttccgctgcccctgttcttgggcactgcgttgtgttctgtctgggatccccgtgcaa

SEQ ID NO: 304729 - DNA, 122 bp, Homo sapiens
gttttagtgcaagattttaaaatatgaaatcaacgatttatgaactgggttcagagtctccgtgtctacccggcctcttcaagcacagccacaagaaagcactaaggttttcagctaacaaa

SEQ ID NO: 304730 - DNA, 122 bp, Homo sapiens
ctctaccctctggcagcctgagcagcgcaagcggggaaatggccggttgggcgcagccggcgggctttgatagggagccaggaccccctgctgggtgttcccaggaggattggctgcggaca

SEQ ID NO: 304731 - DNA, 122 bp, Homo sapiens
gccatctgcgcccacacacccagcgtcgccgctgccccgcccccgcatgccccgcccctccgaccctggctccgccccacgcgccggtcccgcccccgtccgccctaagcaggccagagttg

SEQ ID NO: 304732 - DNA, 122 bp, Homo sapiens
ccgcgcccgcccattttttttaaacgtgttggggtttgggtttcagccacaggccttctgcgatgagaggaaacccaggacgcgcagccccaggtcaggcccgcggaacagccgggcggact

SEQ ID NO: 304733 - DNA, 122 bp, Homo sapiens
ggggcggagccggggaagggcaggtaggggcggcgttctcaccttcactctgctgactcccggtgctgccgctgccatagctaaagcccgggtcctggtaggcaggcgggaagcagggtggg

SEQ ID NO: 304734 - DNA, 122 bp, Homo sapiens
tccccagtcgggcgatggtgtcaggacacgagagcactccctgggcagatgacctctcaccggggagtgggcaaaaaccttcctttaatgtttttacttggatccttgatcttccagctaga

SEQ ID NO: 304735 - DNA, 122 bp, Homo sapiens
caggttactcattttaggacttgcagttctagtggctgacacgaggtggcagtagtgctccggccagagtttctgaaagtgcggtcccgtctggcagcattggcaccggctgggaacttgtt

SEQ ID NO: 304736 - DNA, 122 bp, Homo sapiens
ttgttaagggcttgagcgtacccacaatctccattagttcccttccaatccaccaccaatcgcacaccccagacagggaggcagtgtgcttggtaggcatacttaagagaaatctgccttag

SEQ ID NO: 304737 - DNA, 122 bp, Homo sapiens
ccgtttattttactccagacatcttgcttcccgtaatatacgcctttgtttcagtgattccgattccaaacgacacatccaagttactgtttgaatcggcatcgagcttactggggcggggt

SEQ ID NO: 304738 - DNA, 122 bp, Homo sapiens
attcactattgtttctccgctgtgggagaggaaggctgtgggtagggagtaaactataaccgagatgtacacttactgtatttcatggtggttagtgccctggaaccaacgtttttgtttcg

SEQ ID NO: 304739 - DNA, 122 bp, Homo sapiens
gccctgggcgccgggagggacagccccatgaccttgtcacctgggcccggcgcgcggccacgtggctcgggtgactcgcattgccccgcccccctgcagtgacttctccagtttggcacacc

SEQ ID NO: 304740 - DNA, 122 bp, Homo sapiens
cccccagccccagagaccgggtcccgggtgggtggtcaagtctcagcagctcctgggctgcgtgagtcggggaggtgtgggacccgggccttgactcctcctccctcggcaaggcgtctcca

SEQ ID NO: 304741 - DNA, 122 bp, Homo sapiens
atggccgaagcacgggctgtctccaggaaggctgccaacacagccaccaccacgggtccccgccagcccttcagcagggcccgctcaggcagtgcccgatacacctccagtgagtgccaggg

SEQ ID NO: 304742 - DNA, 122 bp, Homo sapiens
tcccaaggggagaggcctgggcctggccttgttccggatggtcccaccatgagttcgcatcggtcctgcagcagacacgttaggacgctcagcaggtccactcccgtgttccggtcgtggct

SEQ ID NO: 304743 - DNA, 122 bp, Homo sapiens
gggattcgtgtctgagttcctctctgtgaaggagcttgctggcactggtctgtccaaccccggggtttacggagactcaggttcccggacgatactgcgtctccacggcgtccagcgaaatg

SEQ ID NO: 304744 - DNA, 122 bp, Homo sapiens
atgtgttcaaacaagtccaggaggccatcgccggcatctccaatgctgctcaagctacctcgcccactgacgaagccaagggccacacgggcatcggcgagctggctgcggctcttaatgag

SEQ ID NO: 304745 - DNA, 122 bp, Homo sapiens
atgcaaaatcccgccagacagtgcaccaagggctgtcccaccctgaaatgaaatcagagccgggttttcccaatccacaggaaaaactaagctaatggatgtatggaatttagaactatctc

SEQ ID NO: 304746 - DNA, 122 bp, Homo sapiens
acaaaagccaacacagatgtcagcctgggggcactctcagcctaaggaagcccctacagccgagccctcagccctaatgacttaggcagtaggttaggcaggagatgtagagttggtctggc

SEQ ID NO: 304747 - DNA, 122 bp, Homo sapiens
cgcggagaacagcaggtccagcatggccggcccttccctcgctggctgtgcacagggtgccggctgagtcctcgccccatagttggcaagtctagaaccaccggatcctgttacctcaccag

SEQ ID NO: 304748 - DNA, 122 bp, Homo sapiens
ttattgcatgtcaattcacaaagagacgggatgtcaagcccaaatctgtctctctgtcctcgcttcaaggcagtattttcattagaaaaggttcaagggattagtaagtgattggtggaggg

SEQ ID NO: 304749 - DNA, 122 bp, Homo sapiens
ctcacagggaggaagagagcccagagcagtaagcacagcccgtcagagagcgggcagagacgcactgcgcttcctgagaccgcggctcaccgctcccctgcattctgctcttcaaagacaca

SEQ ID NO: 304750 - DNA, 122 bp, Homo sapiens
aaaacaaaaacaaaaacacaaaaagctgaacttctgcttgtgtttctcccttgcctgagccggaattgaatttagcctttgttttcccagatttggatgatgtatgagttccttaacaccca

SEQ ID NO: 304751 - DNA, 122 bp, Homo sapiens
ggtccatccagcacccggggggccagcgggtcatcgggcactacgctggagaagatgcaacggtaagggtctgggggcgccccagccacccttctctgctgcaggcggagtcaggatccctg

SEQ ID NO: 304752 - DNA, 122 bp, Homo sapiens
tcacccgggcagaactcagtgctgggatgcccacactgcccaccacgcggaagcctggcccggaagtgactccgagactaccactcccataaggtcttggggctttcttgcctagaactccc

SEQ ID NO: 304753 - DNA, 122 bp, Homo sapiens
tggtcccagtcagcaaacttggggtcccgttgcctgggaaagggagagggtactgggcatcgacgcctctgcttccacgaaagccttgtgaagaaaggatgggggcgcttttgtgcaggaga

SEQ ID NO: 304754 - DNA, 122 bp, Homo sapiens
ctgagaacttcacttgaagatgctgcaggaacaactgcagggaacctggagataaggccccgggtgatgatgtaagctaattgctgagctgggtggagctacttaaccttatggtaggaggt

SEQ ID NO: 304755 - DNA, 122 bp, Homo sapiens
aaacaattttatttcagtgaactcttggtgtgacttgctaacaaggcagttctctccctccgatagaacccttttagtggatctaaactgaagattcagctgtgttactttcacggaaccaa

SEQ ID NO: 304756 - DNA, 122 bp, Homo sapiens
ataaaaagcttccacctgacagcattcaaatcttggatttttcctcctttaaacctattccgatcatacctgtagctgattctggccataatcagaaaaaaataagatgttggaattatgag

SEQ ID NO: 304757 - DNA, 122 bp, Homo sapiens
tttgacgaattaaatatgagtagaggtggcacgtgccatttcctagaagaaagatttaggcgttatcaaaaacagacatagtagcccatcaagtaaaggtgagttcaaggataatttttatt

SEQ ID NO: 304758 - DNA, 122 bp, Homo sapiens
gcgggcctctctggcggggtctgctgctatggagtccacttctctccagtggcgactcagcgttttcttcccggtcgcggcctcttctcgcttccctcaggcgacggcagcagtggctggct

SEQ ID NO: 304759 - DNA, 122 bp, Homo sapiens
cgaaagcggagaggggcccgggtccggacaggcgccggcagaacaagaccctcagccccgcgcggctttgcgcgcacaacgaaaccccccaacccaccgcccaccccaccgcccagaggctt

SEQ ID NO: 304760 - DNA, 122 bp, Homo sapiens
tataactgcatgtgggggaatcgagctgtcattacaccaatgcagggcaatgcaaagacacgtatcatcatctacaatgcattcttaccaaaagtgctgaaccccagtccatcacatctaga

SEQ ID NO: 304761 - DNA, 122 bp, Homo sapiens
cccgtcgtgagcagaaaggcccggggaggatgacggcccaggccctggttctctgcccagcgaagcaggagtagctgccgggccccacgagcctccgtccgttctggttcgggtttctccga

SEQ ID NO: 304762 - DNA, 122 bp, Homo sapiens
ttgttaatatcgaagtcgccaattccaggtcttcaggccaagtgctccggtctgaccaaccgcggaccctaaagcctagcccataggctgcatgaggcaggggcggggtaaagcttggccaa

SEQ ID NO: 304763 - DNA, 122 bp, Homo sapiens
acaagggtggcaaggaggtaatcaggtagatgttacacttacatttcatttgaattatagcggaggaactctgagcttagggaacttgaatcatttatactgaacagtaagcatgacttccc

SEQ ID NO: 304764 - DNA, 122 bp, Homo sapiens
ggaaaaaaacgcctttcctggtattctcaaagtacttgattatttacctctcaataagctcggcactaatgtttttatctcaaaggatctcagaataaaatgtatgtgatacaaaagcactc

SEQ ID NO: 304765 - DNA, 122 bp, Homo sapiens
gctaagccactcactgcttggggcttgcacgccggccagctgcgccaagtgcgggcccaccgagcccactcccacccggaacttgcggtggcccacaagtgcgcgtgcagccccagttcccg

SEQ ID NO: 304766 - DNA, 122 bp, Homo sapiens
tggagccaggacctcatctgccatctccacgcatgcattggctctgagctagtgcgatggcgcccccttcctgtctcccacttccctcccaggacaaccgcaggcttcctgtctctgtactg

SEQ ID NO: 304767 - DNA, 122 bp, Homo sapiens
ccgctggcgggcctggctgctcggagatgcggtggccggagtgaccgtgggcatcgtgcacgtgccccagggtgagaggccctaacagcagcctgtcgggagcacaagctctagagggcttc

SEQ ID NO: 304768 - DNA, 122 bp, Homo sapiens
aaacagcaagctgaattcagcaatatattttaaatacacatagcatggcttggtttacttcgggaatgcaagaatgaatttacttttccaaaatctataaatttattcaccattttaacaca

SEQ ID NO: 304769 - DNA, 122 bp, Homo sapiens
ctgaaatagggtggggaagggcgcgtcttactttgtgcgccggtctttcttctgcgcctgcgcatgagttggactaaccgggcttcttatctttctctgagaattgactcctgaaatatttg

SEQ ID NO: 304770 - DNA, 122 bp, Homo sapiens
gaaagcaataaaatccttctctatgtgtacttgattaatagcatcatcctcaaaatctcccggagttggtaaagatatattttcagaggccggtactgaatcttttaccaacaccacaccat

SEQ ID NO: 304771 - DNA, 122 bp, Homo sapiens
tcctatctcctcacagaaggtctgtgccccaccatgccaaattaagtgtccctcctttgtcgtctcatagtgccactccctatggcctcatgtgcctctgttattgtttttatacccagcac

SEQ ID NO: 304772 - DNA, 122 bp, Homo sapiens
atccaaaatatgatggtgatttccctcataaaatgtgaattcggtagcttattttaaaagcgtgattccttgttgaatgtacaagacatataaatgcacagacttacccattcttctgagca

SEQ ID NO: 304773 - DNA, 122 bp, Homo sapiens
gggactgaaggattagaatgagggaagtaacccatgcactgcttatttgagatggggaaccgaaggactttggcagttcctacacagagacagatggcagagatgacaaggtttctcagaga

SEQ ID NO: 304774 - DNA, 122 bp, Homo sapiens
ccgtcttgcaaaagtttgcagcattcacccgaggcggactacaactcccagaattccgggcgctccccggtgctgattggcggagcccgtgactccagggggcggagtttcccccgcctccc

SEQ ID NO: 304775 - DNA, 122 bp, Homo sapiens
gttattcagcatctccacagggagattgtcaggcatttccaaccctgtatgcccaaacctcgtcactttccccgcaaacccacttccctacctttcatctctgccagcagacactcccatct

SEQ ID NO: 304776 - DNA, 122 bp, Homo sapiens
tgaaaactctaaaagtgggttgcaaatgttagtttgttttcacacaatggacacaaaaatcgcccgtgcattcagtcacttgcagactgaagcaaacagctgtatttggatgaggcagagga

SEQ ID NO: 304777 - DNA, 122 bp, Homo sapiens
catgcgccggcacccagggggggaccgcacaggcaaccacacctcgcgtgccaagatgagcgccgaactggccaaggtcattaatgatggcctcttctactatgagcaggacctgtgggctg

SEQ ID NO: 304778 - DNA, 122 bp, Homo sapiens
gctgttctgcattgcggcacccgttctcctcccctccgcagcggagatgaaaatgaggagcgcgctcctgagggcaaaacccagagcagacaccgcagccaccgcggatgcaaagtgagtaa

SEQ ID NO: 304779 - DNA, 122 bp, Homo sapiens
gagccagggggccaggagtgtcccactcattttccaggagatgcaaaatcaccctgtctccgtgggtttcctgatgtggcccacagggaaggctgccacttgggagacaggccaacagggca

SEQ ID NO: 304780 - DNA, 122 bp, Homo sapiens
tggatgtagcttgcaggatagctggggatgtggaggcaggggaaagctgggctctgggaccgggtggcctgagttccaagcccaagctattgactatagggacagtttaagccgaaataaca

SEQ ID NO: 304781 - DNA, 122 bp, Homo sapiens
ttccgaccccacggatctcctgtgaggaccttagggagccctgggggtcccttcagacctcgctctgagaatggctggtctaacagcagggacaccaaatggacgcatcacaggcaaaccgg

SEQ ID NO: 304782 - DNA, 122 bp, Homo sapiens
tgggatttgctgaggtcagcaggtggcaccccaattaaatggcactcttgagccatcatccggaaggaatcatggtttctgcttggacttgaacttttctttaggttctccttcctggaggc

SEQ ID NO: 304783 - DNA, 122 bp, Homo sapiens
ctcttcttccctaaccacagaatccttcaggactgcaaccttgagatacatctgtcacctcgtgccatgctagactgagattcccagtggcttggagtagcagggctgggggtagggcagag

SEQ ID NO: 304784 - DNA, 122 bp, Homo sapiens
ctcaggatttgatgaatctagctcacaaaagtcaatgctttcaaaatcaaaacacttttacgatcacctataattctcactaaaagctctgtatgttgttatgtaattatcatattgacagt

SEQ ID NO: 304785 - DNA, 122 bp, Homo sapiens
ctccactctgggaccagccctgccttcccccaggctgcggtgggtcccgtcggagcacagcggctgctcataaagctcccgatgaaaggcacgctggacaggagaggtcaaggttcacacaa

SEQ ID NO: 304786 - DNA, 122 bp, Homo sapiens
tggccccaagcaaagtcctgcggcccacgcgggaaggcgccctcttcgcggcgctgaccccggccctccgcggtgcccctgaggcgccccccacaccccgccgcttgcacaggggcgcgggg

SEQ ID NO: 304787 - DNA, 122 bp, Homo sapiens
gccgacaccccacacagccgcgccgacaccccacacggccgcgccgtcacaccacagctgcgggggcagcacctttgagcccgctcctcagttcgtttctcagaactgtcttggccgctctt

SEQ ID NO: 304788 - DNA, 122 bp, Homo sapiens
catattctccttacctggcgaccgggcccccagcacagcagtggcagcagcagccgctgccgcaaacaagctcccccaggacagctccagcccggagtccacctgagccatttgtccccgcc

SEQ ID NO: 304789 - DNA, 122 bp, Homo sapiens
gattcccattgtgattgtccacagaacctggaaggaagggacaggaaggaatgtcaggaacgaacaaatgactgctggttgtctcaaaaaccaagggctggaaggccaagaaggcttctgag

SEQ ID NO: 304790 - DNA, 122 bp, Homo sapiens
agggtagccgagggtcagagtcccagggccaggcgggcaaagcgcgcaagacaacgtggccgcgtccgagcggatgccggcggcagcgtaaaccccaccccagcgcgagcggaagaggcggc

SEQ ID NO: 304791 - DNA, 122 bp, Homo sapiens
tggatactctggagaatggccgtggggaggcgctaggaggcggcgggggctccctgggcccgggggccgggccgccgcctctgctgctgggcagcgcctccgacatgaaggctgagctgtcg

SEQ ID NO: 304792 - DNA, 122 bp, Homo sapiens
ccttcttctatttataagccaatggaagggctggaatcctagctcttgcatgggtacaagcgccccctcactcctgggtatgaggcctcccaggcctgaccgaccttccccatgggctgtgc

SEQ ID NO: 304793 - DNA, 122 bp, Homo sapiens
ggcctcggatgaaggcggaagggagggcaccgcctgttgctgggcaactgtgccccaactcgtctgcccctggggagtgtttgtttccaaagcaacccaaggggatgtggtcactgcggtga

SEQ ID NO: 304794 - DNA, 122 bp, Homo sapiens
ggcggtggcagtggtggccgttcaggaaggggctgccaggaggcagagggtcccgaaggccgggtgcttccccagggaaggcgctggtcctgtcgtctgtgtacccatcatctgccttctct

SEQ ID NO: 304795 - DNA, 122 bp, Homo sapiens
agcatcacgcatcggggcctgtcggggggtagggggctgggggagggatagcattagtgacgggttgatgagtgcagcacatcacccagggcacgtatatacctatgtaacaaaactgcacg

SEQ ID NO: 304796 - DNA, 122 bp, Homo sapiens
ccgggggccagcacagggcccggtgtccctcgggccgtgccggtaactgggattggcacccgccggccatggaagagcctgggcccccaggtgggctcagccaagaccaaggtaagggggca

SEQ ID NO: 304797 - DNA, 122 bp, Homo sapiens
cagcttactgtctttatcattatcactcttaacccaccctaaaatttcctaaaggtatcccgttgacctcaggatacattaaagctacttagtggtgactggtttctgcctaccacttcctc

SEQ ID NO: 304798 - DNA, 122 bp, Homo sapiens
atcgagcccgcgctgcccagggccccagcgccctcacccgtcccgcggaaggaacccggccgcactgccgccggtgtaaacactcactctggccctctcgccggaaaccggaaattccgcgc

SEQ ID NO: 304799 - DNA, 122 bp, Homo sapiens
catcccggaaaggaagactctgaatgactacaactcccagtactgaagaggctgctcttgcgaggaggcggtggggacaggctacggaggatttcgggacttggagtttttgcattgagtgt

SEQ ID NO: 304800 - DNA, 122 bp, Homo sapiens
aaaaaaaacggtttctgctaccttgcccaggctggtcttgaactcccaggctcagtcgagcgccaccccctccacaaagtggtaggattatttgcgtgagccacggagccctgcggagactc

SEQ ID NO: 304801 - DNA, 122 bp, Homo sapiens
catggtgcgcgcacccactgacctgcgcccactgtctggcactccctagtgagatgaactcggtacctcagagggaaatgcagaaatcaccggtcttctgcgtcgctcacgctgggagctgt

SEQ ID NO: 304802 - DNA, 122 bp, Homo sapiens
atggagcaacggcggctgccgaggaaggcggagtctgagccgggcacatccctgcccggccgcagatatacacggaggttctgaacagtaggactgcactgtcttccgggctgaatgactcc

SEQ ID NO: 304803 - DNA, 122 bp, Homo sapiens
cccggttccgctgcggcgccacggtagggttcacagctgggctggggctagaggctctgccgcccacctgccggcacctgccacgcgtgcgtcgtggtcttgggcaggctcggccccgtggg

SEQ ID NO: 304804 - DNA, 122 bp, Homo sapiens
acacacgagcggtgcggggctgaggcccctcagagaaggtcctcgcgagatgggcccactcgccgcccggcttctctccacaggccattccggatccccgcagggacggcaaaccacgcaga

SEQ ID NO: 304805 - DNA, 122 bp, Homo sapiens
caggaaatgatctggacagagagcaattcgaatcatagacagggagggttgggcaggatgcgatgggggagcgaatgacagacacaagtgacaggaacaacttagggagacaggtcagaaaa

SEQ ID NO: 304806 - DNA, 122 bp, Homo sapiens
tggtatgacttgctaggctatccattctgcaacaaataaatcactaggttcccccttccccgaccctggggggtcgttgcggtgggggtggaggggggcactaagctctctcctccattgca

SEQ ID NO: 304807 - DNA, 122 bp, Homo sapiens
acccaccgaacttacgtcgaagggcagcacctccacagacgtgttgaagagcttgtcctccgggtgctcgatgttcccactgcggaagaagaacctgcagccaggcaggcctgtgagctgct

SEQ ID NO: 304808 - DNA, 122 bp, Homo sapiens
tggtgtgctgactgtggataggtctccgccaagccgtggctcctgtcgtcctgacatagacgccgccattttaacgctgacctccaggggctggtggctggacctgcgcggccatcactgcc

SEQ ID NO: 304809 - DNA, 122 bp, Homo sapiens
acatcccttttctgtggtccttccctcttcaactgaccagtcccctcttcccccagcccccgtcctcctgatgggcacccttcatcagggttctgccctgtagaaatctctggtttctactt

SEQ ID NO: 304810 - DNA, 122 bp, Homo sapiens
acactgaccagaaagctcagcaacggcagcattctcaacaggaaagcccatcgcaggctgcgcttctgtgtccccgagacgactgtccgcaaggtggtggccagcacgcccggggccatcga

SEQ ID NO: 304811 - DNA, 122 bp, Homo sapiens
gcagaaatgggagaaggtggcgtcgcgcgtgtcggagggaacggcagaacgcacgcttggcgtattatagtgggaaagggcacagcctcaactcagcacccgcaactcactcagcactcccg

SEQ ID NO: 304812 - DNA, 122 bp, Homo sapiens
ggctcctttgttatctattgtgacagatgttctgggctcatcttgtatattttctgcccccgatctcgactaagccattctttaagaagtcctagcttctttcaatgggaataatagagaga

SEQ ID NO: 304813 - DNA, 122 bp, Homo sapiens
tgagggtgactgagatacagccccggcggccttggggagccgagaatcacaagaaaacagcggggctgggaaggaagaagagggctggtggcacgaggagatggatgccaggggtcgggggt

SEQ ID NO: 304814 - DNA, 122 bp, Homo sapiens
gtgcgaaggggagctgatgggaacaagtacccagaactggtgctggagcgctctctggaccgcgaggaagaggctgttcaccacctcgttctcgtggcttctgatgggggtgacccagtgct

SEQ ID NO: 304815 - DNA, 122 bp, Homo sapiens
gtttctggacagcaccggccaggaagtcaggaggcttggtgctgctcctgcgcctgccctcgccccaagtcctgggcttcgggatccccatggcaaccccaggtcccgctggctgtgaggct

SEQ ID NO: 304816 - DNA, 122 bp, Homo sapiens
gtcacaggtggcaggtgccgggcgccacgacctcactgtgcagggcgcacgctctctccccgccctcccacaccccagcggccccaggccctgggggattctcagaatgttccacgtggagc

SEQ ID NO: 304817 - DNA, 122 bp, Homo sapiens
atgcggcagagagcactttctctacaggactccagaaaaagcatataacttcctgcctcgcgcttcaggaagtggtcccagtctctaacaggtcccttcccagcctccagagcaagccaatc

SEQ ID NO: 304818 - DNA, 122 bp, Homo sapiens
tctggcatctctaccagcatggcggtgccacgggggctgtgtgtgcacactgaggcctggcgctgtgcacctctgccagcacggcacagtgccacgggggagtgcctggagcaggacaggct

SEQ ID NO: 304819 - DNA, 122 bp, Homo sapiens
aatggggcaagagaagatcatggtggtgggctcagtcaggagggccgggaccgagggatgcgctatgagaaaagctggagatttggggctccaagacctgaatttgagcctcgctgactcca

SEQ ID NO: 304820 - DNA, 122 bp, Homo sapiens
ccacgaggggcccagggcagcaggtgcagctcagccgggtgtagcctcgctggagaaatgcgtctgcagccgggctctgtggggcctcgggacaggcactgggaaacctgagaaactgcaga

SEQ ID NO: 304821 - DNA, 122 bp, Homo sapiens
gaagtttttgaggaggggattggcagatgtcaccccaaaaaagaaacattttctctaccacgctgaaaagcatagcataagggagaaaatagcaatcaagatgcaagttggcattagactta

SEQ ID NO: 304822 - DNA, 122 bp, Homo sapiens
agcagcaatgaccttccctcgggaattccacctctgcgtttttccctccaggtacgttcacggaagtggcacactgcatgcgtccagtgagtcaatgtggcaccgcctacatgcgtgtcact

SEQ ID NO: 304823 - DNA, 122 bp, Homo sapiens
cctaaaccacttgtggcgcgtgtcgggaatacagggcgctctggctcttcttggggcctccgctggtccgaccatctggcagctctcttaaccaccacggccaccccacgaatggaagtttg

SEQ ID NO: 304824 - DNA, 122 bp, Homo sapiens
gcagcagccgcacctgcggaagaacacgctactgcaggacctggccgacaagtaccgccgcgccgcacgcgagatacaggcgggctccgaccctgcccactgcccctgcccgggctccagtt

SEQ ID NO: 304825 - DNA, 122 bp, Homo sapiens
aaaaacggggctgggtgcagtggctcacgcctgtaatcccagcactttgggaggctgaggcgtgcagatcacaaagtcaggagtttgataccagctggtcaacatgatgaaaccccacctct

SEQ ID NO: 304826 - DNA, 122 bp, Homo sapiens
tagtttctctaagcctcagagagatgcaggatgacaggaaagtgcagacctgcccccagacgatgtttatgtctcaatggccacgaatatgaagaagtatgggtttgatagtcaatgcctgt

SEQ ID NO: 304827 - DNA, 122 bp, Homo sapiens
actccatctcagaaaaaaaaaaaaagtgtatgtacagattaaagaataaagtgaacctcacgtgactacactggagacaggagcacctccagagacccttgagcactctgccattccatccc

SEQ ID NO: 304828 - DNA, 122 bp, Homo sapiens
aacaaacaaattttcccgtttctctctgtccctttctctataacatggataaaatattcacgtcttatgtatttattattgctgagtcattggtgccttattcttcagtgtttcagtctgta

SEQ ID NO: 304829 - DNA, 122 bp, Homo sapiens
actagggaggaagaagcgggtgagaaacaaaacttctttccattgtcctgcccgtttctgcggacttgttctgaggccgaggtaggttcacactcctgctcctcctcctcctctctggtagc

SEQ ID NO: 304830 - DNA, 122 bp, Homo sapiens
ttctgcgcgctgatttcctcccacattccctcccccggccccgaaagcccattccaggcgcgcgggtctcatcgcagccaagaggagtaaagacacttcggtttcctcctagcctccagccg

SEQ ID NO: 304831 - DNA, 122 bp, Homo sapiens
ctggaaaagatagtctaactactgacgcatcgtgtgctcagcctagggtggctgctaccgcgggtgcctgcggactcctaggacgggcaccagcccgggacccctgacaaggtgttgattag

SEQ ID NO: 304832 - DNA, 122 bp, Homo sapiens
gtgccacgcccagctggctggagatgcagcagctctgcctgcccctgaaggacccaactgcgaatcagcagcctggtatccaggcaaccagtctccctggcttcagataagcagaaacagct

SEQ ID NO: 304833 - DNA, 122 bp, Homo sapiens
caagacccgcctgagcctgcgttagagctcccgctcggaaagtaaaagaccatcctaatccgcggcgctgcggaaccggtgtcccgtgtgggaggaaccgcggcgttccctgggcgtagggc

SEQ ID NO: 304834 - DNA, 122 bp, Homo sapiens
gtgagcactcatttaacttcctgataccatctgggagtgcttgcagtctttccgctaacacgctaattaagcatctatcagggtcctccagggagctgagtggctcagtaacaccatccagt

SEQ ID NO: 304835 - DNA, 122 bp, Homo sapiens
ttgctctcatataaataaatgcccttctaccatatcaaagaagggacatctggaactcatcgtaattgtcaacaaactgcaaaagggtctgcctggttaccgagccagtctatcttttgcat

SEQ ID NO: 304836 - DNA, 122 bp, Homo sapiens
tcttccttctcctcttcctcttcctctctctctttttctgttgaagcctttgtattttttcgtctctattgaagacttccttgacttcctctcttctttgagttcatttcttgagtctcctc

SEQ ID NO: 304837 - DNA, 122 bp, Homo sapiens
ttattggtccatcttctggctgcataaaaccagtctgtcccatccaccagggggtcagctcggattccaagtagatttgcagagaggacttggtggacatttagatgggtacataaatgtgt

SEQ ID NO: 304838 - DNA, 122 bp, Homo sapiens
cctaaagtttctaattacagcggtgaatctctgttctctaggacagtttgaagtctgcgccgcctaatggcacaggattaccattgcatagccatctggcctgacaagaagtggaggaggag

SEQ ID NO: 304839 - DNA, 122 bp, Homo sapiens
acgtgaaatgtctccccctcctcctccagccgccagcagaaagggctgctttcccttcagcgtgcgcccctccctaatgatcactcagccaccctgagcagtgagtctcattcttttcagta

SEQ ID NO: 304840 - DNA, 122 bp, Homo sapiens
cttccttgggattggatgttgggaccgtccaaacacggcgacttctcatttgtcagcctgcggcagtttaaattgggtggcggtggtggcatgtcctgttagctgtggagtcttttcctctt

SEQ ID NO: 304841 - DNA, 122 bp, Homo sapiens
gccggccgccgggggaagcccgcggaggggacgcggggccgggcgagaaggtccggagagcggggggcacctgagcccgggcgggcccgccgcgctgagcggcgctgagagccgcggcggag

SEQ ID NO: 304842 - DNA, 122 bp, Homo sapiens
caggtgttttgtaggatgcccctctactagaatttatctgatattcttctcatggttagacggaattgaacacagaaatgtaaagttagcagattatggatgaccactccagttttcccttg

SEQ ID NO: 304843 - DNA, 122 bp, Homo sapiens
cgcagccaccgccgcctctccttagccgccgccgtgacgaccgcgtccacctcgcaggtgcgccagagctaccaccaggactcagaggccgtcatcaaccgctagatcaacctggagctcta

SEQ ID NO: 304844 - DNA, 122 bp, Homo sapiens
tgctgactggagtcccatggggaagcatgacggggagccgggaagcgctggtcgtccgaacggggcgggagcctggacaacaggggtacgaggacccaaagccttccccttgtttcctcctc

SEQ ID NO: 304845 - DNA, 122 bp, Homo sapiens
gacttggtgtacgctgtatgcaaatggagaagatatttcctgtcatagctgatgagtttccgtttgatttagttctaggaagtcagcgtgaatcggctttgcgttccctgcctccagaccct

SEQ ID NO: 304846 - DNA, 122 bp, Homo sapiens
gtaagcgtgaggccgcaaccccaaaccaacccatgggagataacagcgagaagagggccccgaagcccccactcagagcccggactccgccactttgccggcaaggctccccaagcccggcg

SEQ ID NO: 304847 - DNA, 122 bp, Homo sapiens
gtcgaacagagaaaactggtttgctctctgtcttaaaggctgtccccacctttcgaggggcgagggaaggatcataaaatcatttatttttattttttaattaactaatttatctatttttt

SEQ ID NO: 304848 - DNA, 122 bp, Homo sapiens
aagtcattgcgtgtctcacaaaatcagaagaaatatgaccataaggggtaagagattgtccgatgtaccaacacatcccctgtatttagcacagtggtattcgttgaatgtatgaataataa

SEQ ID NO: 304849 - DNA, 122 bp, Homo sapiens
tctgctgaggggtcacggtgagtctctgtgggtgcgggtcggagggatgcccaggtgcctcgtcgccccacggcccgggcggaggcgggtccggaacctcccccaagtccggcctcagcctg

SEQ ID NO: 304850 - DNA, 122 bp, Homo sapiens
ataaaatacatattttttattgtgcatttgaattggtaatacattttcatatataggttacgttttgctattaaaaagcaattcattgtgaatagcaatatgctcataaacacggggagaaa

SEQ ID NO: 304851 - DNA, 122 bp, Homo sapiens
gagcgtcgggactgcgcaggttcctcgggaggtggctaaactggccaccgcctctggggccgcctaaagcaagtccgttaaccactagtcagggaggaatactgtgtttgagtaaatatatg

SEQ ID NO: 304852 - DNA, 122 bp, Homo sapiens
gttcaggaaaggccgcacatcacaagtgcacagctcaatgaattttcaaactgtacaaagcgtgtcactagcatcctaatccataaatgaaagtttagaccagtccctaaagagcgccttca

SEQ ID NO: 304853 - DNA, 122 bp, Homo sapiens
tccgcttccaggcgcttccgcttccaggcgcttccgcttccaggcgcgcggtgctagtaccggcccccgggctgggaacacctccaggccagcgctttagcatcatccgaggctctccgctt

SEQ ID NO: 304854 - DNA, 122 bp, Homo sapiens
gtttcctctgctctcacaccgtgaccatcatcaacacacaaaaagactgctgggaccaaacgtggggttttttctggacacagcaagcagtggacaccagctgggtgtcctctaattcagtt

SEQ ID NO: 304855 - DNA, 122 bp, Homo sapiens
acagaaggcagtggcaggtttttgagccaggagccagggaagaagagaagtcactgaaatcgcctcgtttcctggcacttaaagtcttgcgaaagggggcagattttcagagactcaggctt

SEQ ID NO: 304856 - DNA, 122 bp, Homo sapiens
cccgacgaggaggcctcgccccaacacagtgtgtcaagctggctggtgccacccactacccgctagaccggtgctgctatgggaaattcctgctgacgtcccacaggctggacccctggaag

SEQ ID NO: 304857 - DNA, 122 bp, Homo sapiens
ctagccttgaagagcaccctgtacatacttctctggcgcactcagcccattgtatactaacgtgtttccatgctatcttcccagctggggcatgagttcatcagtgtattccagcacatctg

SEQ ID NO: 304858 - DNA, 122 bp, Homo sapiens
aatgggttcatactgacctcacaccagtcaaatcgagcatctgaggaagagcactgttggcgttcagcgaggagggaggcgccaggagagcgctgaggcgccaggagagcgctgaggcgcca

SEQ ID NO: 304859 - DNA, 122 bp, Homo sapiens
ggaagcagcttgccgggaacctgccaggtttgcatcgaattccccgagttccggaaaccccgtccgtcccaggcaaacaggcaccgtgggtcacccttccgggacccacattcgcgccaggc

SEQ ID NO: 304860 - DNA, 122 bp, Homo sapiens
agcatttaccgcacaaactcagacctcattagcattatttattcttgctttgtccccaaccgtaggacaagggaagcctttttcctgcagcctctggctgcaagagctccctgtcacacccc

SEQ ID NO: 304861 - DNA, 122 bp, Homo sapiens
caccgccctgacggactccaacatcgtagccatctgggggaggatgtagcctcacaccatcgcaaaggaccagggacacagctaactaacttattcagctttgggccgatgggggtgggggg

SEQ ID NO: 304862 - DNA, 122 bp, Homo sapiens
ccaggcacagcacggcatgggcgcctggtggaatcctcgccgcctgggcgagtgctgggacgcacaccggaggtgaccgtctagctgcacgcccccgaactcacccctcacccctcttcccc

SEQ ID NO: 304863 - DNA, 122 bp, Homo sapiens
agaggtaataataatggctaacatttttggggcaccaaaaatgcccagagctgttctcagcgccttagagaacttttaagaaacttgccatacgactaggaagtggagcagctgcggtttca

SEQ ID NO: 304864 - DNA, 122 bp, Homo sapiens
aaattaccaaacggtctcccagacccagatcagcccacgcatatgaagtccagccccttccggctttgagacatatcatatgttgcacaaagcctgcctggcaattggatttgtggaatgag

SEQ ID NO: 304865 - DNA, 122 bp, Homo sapiens
tctgcaggtcttcttgatacaatcacattcattcccacatactggagcatttcccacgggcggctgtggagctgagcacttcaggtttgtcttagtgaattctctaacagcctgagagggag

SEQ ID NO: 304866 - DNA, 122 bp, Homo sapiens
cctcctagaggccaagactctggagtggaacatttggcactgtctcccagatgacttcagcgagtgaagtcacaaaggaggagtgccctgggggaatgagaccctggcctgaggcacttgga

SEQ ID NO: 304867 - DNA, 122 bp, Homo sapiens
agacaaatggagagcagagctaagatggctgctctcccatcctcattcctgccctctgagcgatgacagaagtgatacctgcaaactgtcccctttgcaacttcccaaaggttcattagctg

SEQ ID NO: 304868 - DNA, 122 bp, Homo sapiens
agtaaaaaacacctgaaatctcactaccagagcttggggctgtgaccactttgatgagcgcgatcccgcacatcctctcctgcgtttacggacacgcgcagcaatcgccgtgtgcgaatggg

SEQ ID NO: 304869 - DNA, 122 bp, Homo sapiens
gcctgtcaggggacagctgcgtcctcagggatatgctgataagttcttggctgaagtttccgtcttcgggtttgcaccggctgggaaatcatttcctgcgggttctgcgtgaagcctgctgc

SEQ ID NO: 304870 - DNA, 122 bp, Homo sapiens
tcagagcagatgtgcaatcttctcaggttatctctgtgttaaacccacaggtctctatctcgctgattcacctctgatcaaacttgaagaaaatgacaccagccatctgcctatacttttat

SEQ ID NO: 304871 - DNA, 122 bp, Homo sapiens
tccagtgagtagcgacagcgacctctcagacttgtttgtagtaacagtatgaccacccttcgactgcatccatcccgcgcgcgcgcgcgcgtgtgtgttgggtgggaagagatgcataaagt

SEQ ID NO: 304872 - DNA, 122 bp, Homo sapiens
agaggcctcctatttggcagagatttccccacctattaagacccaaggccctgcctggagcgggacgtctccgcctcccccagcacacacatccactccaaccccagaaaaccatagggccg

SEQ ID NO: 304873 - DNA, 122 bp, Homo sapiens
tcttatcagcagaggcttgtcttgtacacatctgctgggtcattcatgctgagatcaccacgtttgtcccaattaccatgattcttatgtgatctctaaactagataaatgctcatccactc

SEQ ID NO: 304874 - DNA, 122 bp, Homo sapiens
ggatcccaagttccccagcatggccagtatattttaggcaggagaccctgaggctctgaacggcatctccggggggcacaaccctggctctgggctcctctgggaggcagcccaggttccct

SEQ ID NO: 304875 - DNA, 122 bp, Homo sapiens
gacggcggctcccacgtcagagagaaccttacaaaatggcgacggccgctcgagcctggacgcgaccgggccctttctcgcgcgccagctcacgcacgcgcgagtgcgcgctgcttccctcc

SEQ ID NO: 304876 - DNA, 122 bp, Homo sapiens
caggcgggcgggcgggctagggctctggatcggaacctcgcagccggagaaggccgggggcggtggcgtcggagactgggcttagagaccttgtgggataactgaccccggggtccctcccc

SEQ ID NO: 304877 - DNA, 122 bp, Homo sapiens
ccgagctccccgagtgagcaatttctgtcccttttaagggctcaccactctaagggggtgcgcgtgagagggtcgtgatcaattgagcaagcagggggtacgtgactgggggctgcatgcac

SEQ ID NO: 304878 - DNA, 122 bp, Homo sapiens
ctcaagggtgaggtgccctcgcctgtgcccgtctggcagctccagtaatgaggtccccgccggaggcccaacgcacaacacaaacacgcacggtgccacccaattatcacgtttctcggctc

SEQ ID NO: 304879 - DNA, 122 bp, Homo sapiens
gatcagggtcaaggctcagggtgtgcccagggccagggttcagtatgtgaccaaggtcagcgcttaatgtgaccagggtcagaggtcagtctgtgaccaaggtcagggtgcagactgtgatc

SEQ ID NO: 304880 - DNA, 122 bp, Homo sapiens
agtcttcacccacccggcccccacctacgaagacctggagcgcaagcgattacggggtggcgcagaaagtccctcgaggcaatactcggtcttcggagtccgcccctgaagcatttccagtg

SEQ ID NO: 304881 - DNA, 122 bp, Homo sapiens
ggagaaagtgggtgttgaatgtggctggaccggagggatctccacctcctgggtcgggggcgggggagggcggcgctggtcagctcctgcccttggcctccatcctgtcgtcaggggaactg

SEQ ID NO: 304882 - DNA, 122 bp, Homo sapiens
gcaagccgcttcttgccctctgcccggagctctcccgcatcctccccagagctgccctggcgacctcgaggtctccgcaaccttccccgaagccgctcacagccttgtgatctggatgcccg

SEQ ID NO: 304883 - DNA, 122 bp, Homo sapiens
tggtggggaggggtaaggatatcctggagccctataaaatatgtctgctcaggttgggcgcggtggctcacgcctgtaatcccagcactttcggaggctgaggcgggtgggtcatgaggtca

SEQ ID NO: 304884 - DNA, 122 bp, Homo sapiens
ccgccgtgtgcgtggggcggggatggagcacgcgccctggagccccggagccaggtatcacgcgtgtgacgcgtgtccctgaacctacctgcgcttcttgtcccaactctaaaatgggaatg

SEQ ID NO: 304885 - DNA, 122 bp, Homo sapiens
agaaaagatatagtttgaggagacagtagtggcgcttcggccgcgcccagggccgcggttcgctcttccccgcgtgcgaccaggctgccagcactggggacctctggcgcccgcccgtccgc

SEQ ID NO: 304886 - DNA, 122 bp, Homo sapiens
gtgaaggctgcggggcgtcgccggaagtgtcgtaaacgtcggatatccggttcttctgggcgctaagggagctgacggagagggccaccgcccagcaatagacggtgcctcagcctgccgag

SEQ ID NO: 304887 - DNA, 122 bp, Homo sapiens
attttggaggtggggcccagcgatctgtgcttttacaaatcctctaggtgattctgatcacgctcaagtttcagaaccactggtgcagggtctagtcacactcaaacacttttcaaatgtaa

SEQ ID NO: 304888 - DNA, 122 bp, Homo sapiens
cgggacagcacagcgatggcacgccggctgcgcacagctctgccccccagtgcccgaccccgctccacggcgctcagcaggcccagtgcccgtgcctgtcgctctgatagcctggcccttgg

SEQ ID NO: 304889 - DNA, 122 bp, Homo sapiens
ttattcacagttgttttcctttccttctattaccaccattttatctggtgaaacttggcccggaactctcctgaacttggagacctatccttccggtaaggctttagctactatggtttaca

SEQ ID NO: 304890 - DNA, 122 bp, Homo sapiens
tccaaatacgccaaacgggcgggagtgagccacaggctgtcttcgcggaagactcacaggcgcaggcgcagacgggtgcgcgcccctagggtgcgcgcgagctaagaccgcggcccggggca

SEQ ID NO: 304891 - DNA, 122 bp, Homo sapiens
gatcttgaatactatgtcaggcacccacaacaagagctttgggtgctttgtgtctagggccgggtacccttgtttctgctgctgatgccgtgtttccagtctggattttagcaaaattaact

SEQ ID NO: 304892 - DNA, 122 bp, Homo sapiens
agaacagcgggaagatgcgctcccccagggggccaggcgcctggaaggcgtaaagcaggtcgagtgagcggccgtcgtagaaggccacgcggccccgctcccagtccaggtccacgcgaatg

SEQ ID NO: 304893 - DNA, 122 bp, Homo sapiens
gagcctgagggggaggggcccggctgacaccttgattttgcacttctggcctccagaatccggcaagaatccatttccgctaaggccacctggcctgtggtaacgtgttatgtctcaggaaa

SEQ ID NO: 304894 - DNA, 122 bp, Homo sapiens
ctcccaaccagctgttaggaccccacccttttgcctttattgtcgacgtgactcaccagacgtcggggagagagagcagtcagaccgagctttctgctaacatggggaggtagcaggcactg

SEQ ID NO: 304895 - DNA, 122 bp, Homo sapiens
tttttggaacacaatttttccacggaccagggagctgggcggatggtttcgggatgaaaccgtttcacctccgatcatcaggcattcgagtttcataagaggtgcgctacctagattcctcg

SEQ ID NO: 304896 - DNA, 122 bp, Homo sapiens
cggcgtcgcagttggtgtcgtacttctggcgcacctgcgacggctgggcggtggccatggcgggcagcgcaagtgcaggcgagcacacgggcgaagtcggtgcggtagcgagggcagcagct

SEQ ID NO: 304897 - DNA, 122 bp, Homo sapiens
atgtcaaacacccgtgcaagggcaaacatctttatgactttggtcctgggaagagagacccggcttgggattagaaattacagctgacaagctgctgatgaggcagtaatgacattcagcgt

SEQ ID NO: 304898 - DNA, 122 bp, Homo sapiens
gcttctctgaaggactgagtcctcccacagcctcagtcagggcccgccctggcttccccacgcatggagtcctctcgcttccatggttgttactgatgggagcagctgatggctgtaagcac

SEQ ID NO: 304899 - DNA, 122 bp, Homo sapiens
cgagaacaagcagggctggcagaactccatccgccacaatctgtccctcaacaagtgcttcgtgaaggtgccgcgccactacgacgacccgggcaagggcaactactggatgctggacccgt

SEQ ID NO: 304900 - DNA, 122 bp, Homo sapiens
gccttagaagactatctaattcacaccataaatctaatgttttggaatcaggagacaaaacgggtgtctggactgatactacaggagaacagcatcttagagatgaatatatgagcagacaa

SEQ ID NO: 304901 - DNA, 122 bp, Homo sapiens
atggggggtggaggagaagatgcaagacacaaaatagcacaaggcagggtccctctttaacggcaaaaaattatacatgcgatttgcattttagaagtctcaaatagacatcaaaatgctaa

SEQ ID NO: 304902 - DNA, 122 bp, Homo sapiens
gcccagatctttactaaattttgtgagatcagcattgttgggcttgaattaaccaaacttcgccatactgtgccttcagaaatcccagattgggcgggttgtgagttcatctcatcctcttc

SEQ ID NO: 304903 - DNA, 122 bp, Homo sapiens
tgccagggggcgggcaggggctggctctgcctggggccaggcccatgttaacctgtgccccggcctgggggccagaggggcaggcctgcgcacggggaggctgttgtggcagcggaacagag

SEQ ID NO: 304904 - DNA, 122 bp, Homo sapiens
agaaatgaaagcatccaagtggctgtgtgacatctgtcaccccgtgtcatgctcacatgacggtctgggaggaatcacacagttatgtcaaatgtgatgtgcttgagaacgtgtgggtttta

SEQ ID NO: 304905 - DNA, 122 bp, Homo sapiens
tcagggtctatatataagcgcggggagcctgcgtcctttccctggtgtgattccgtcctgcgcggttgttctctggagcagcgttcttttatctccgtccgccttctctcctacctaagtgc

SEQ ID NO: 304906 - DNA, 122 bp, Homo sapiens
aatcagatgtgttgtgttcccagcacccacgtgtggcagtgcacatggagtatcatcagccggaggtgcttccccaagccttggtgtccagagtttttcccggggctctgacatgggcagga

SEQ ID NO: 304907 - DNA, 122 bp, Homo sapiens
ccttggaagccacagttcctccaggactaaggtaatgctgagaaccctacaaatcagggacgaaaaccaaggtcgcgaagcctggattttcaggttttatagaaattcttaggtgccttctc

SEQ ID NO: 304908 - DNA, 122 bp, Homo sapiens
ggggggaagagaaacaaagacaaaggctggcaaaaatagaccacggaaacggcaggcagccgggataaggaggacaagaggcaggatgtggaagaggaggggaggcggaagttgtcgtgggg

SEQ ID NO: 304909 - DNA, 122 bp, Homo sapiens
gtagtccatgatcttgaaactttccaggacctggcgggatcgggcaggaacacgccacgccgtcagccgtctctatcccccacaacggctcccggaccctatggggttcccagcacggatgg

SEQ ID NO: 304910 - DNA, 122 bp, Homo sapiens
cggtgggcgccccccaccgcacccggtttctcgtcaccagggctgcgccgcggggcagagcggaacgaccgcaatatccctccccgagggcgctggctgcactagctagtccactcccgagc

SEQ ID NO: 304911 - DNA, 122 bp, Homo sapiens
aggccttgtcacaggatgggtctggggagaagcccatgcacacagctcctccacaggccccggccccgccagcccagtcctggacagtgggtggggacatactcaacgccaggttcattcga

SEQ ID NO: 304912 - DNA, 122 bp, Homo sapiens
aaacatctcccctacacatcctatggttacagtggctggatgctgcccactcttctagtacgctggatttgtacgtctggatgtctgccagaaaacccttcctccagggcatccctaacaga

SEQ ID NO: 304913 - DNA, 122 bp, Homo sapiens
gtagcgtccgcaccgacatggtgctggaaacgagctggactggtgaagagccccggggttcggtagccagtggcctgaaggccaggccgcagcgtcccaatagtccggttgctggggcaacg

SEQ ID NO: 304914 - DNA, 122 bp, Homo sapiens
aaggggtgacagagggcacctggaaaatcgggtcactcccacccgaatactgcgcttttccgacgggcttaaaaaacagcgcaccacgagagtatatcccgcacctggctcggagggtccta

SEQ ID NO: 304915 - DNA, 122 bp, Homo sapiens
ctgggaggggtctagtctggagacccaggatgttggacagcaacagtcccatcccccactcgccccattctccactccccagccaagcccagctgcccccgcttccagcgctgcagagaaga

SEQ ID NO: 304916 - DNA, 122 bp, Homo sapiens
ccgccctcgtgcgcattctggttctagacgtaaatgacaacgcccctgattttgtgcggtcgctctacaaggtgcaggtgcccgaaaatagccccgttggttccatggttgtctccgtgtca

SEQ ID NO: 304917 - DNA, 122 bp, Homo sapiens
gttgctgggcgtggaaaaaacggccaggaccacgggccggcccccgaggctgaccacgcccgtgacagcctgcagcacgttgaagtagaaatgggagtctccgggtacagagcagttgagcc

SEQ ID NO: 304918 - DNA, 122 bp, Homo sapiens
ggcaggaccctctggcagacaggggtgagaaggacacagctaagagcctccagcccttggcgccccggaacaagacccgtgtggtcagctaccgcgtgccccacaacgctgcggtgcaggtg

SEQ ID NO: 304919 - DNA, 122 bp, Homo sapiens
gcctgggtcccaagaagtgtagttgttttcattctttctgcaaacatttgaggaaccacacggggatactccctgccttgggcagaaattcctctgtgtcaggggccttccctctcaaattg

SEQ ID NO: 304920 - DNA, 122 bp, Homo sapiens
catcggccccgcgctgtacagcctccgtatacatatgtacacatataaataaagtgcgtccgtgctgcgtgagttttctggggctcactcctctccaggcaaggcgagacatcacacgaccc

SEQ ID NO: 304921 - DNA, 122 bp, Homo sapiens
gcgaggccactcagggctttgtgacctagacagaggatttatgtgggtgattagctgtcacgttgggtctaagctccttaccctcagaacctagctttcctgcctgcccccagggctaatcc

SEQ ID NO: 304922 - DNA, 122 bp, Homo sapiens
ggcgagaaggggtcccacgaggaggaggtgagagtccctgcgctgagctgggggaggccccgggctcccgccccagcctcgaagccccgccccaggctggatttgaattgcttgtggctccg

SEQ ID NO: 304923 - DNA, 122 bp, Homo sapiens
gctcagaaacagcctctggatttcagcaccgacactcagatggcatgttggggtcatcaccgccccgcccggcccgtaggcccccggccacactacgaaggagaaggcaaaagatattttaa

SEQ ID NO: 304924 - DNA, 122 bp, Homo sapiens
ccctcccccctactcccccgcctcctcctccggcacaacttaaagaaagggggagcggcgcggctgctgccttcatctggggaaattcgtggccactgcaagtttactacgcgaggcgcagc

SEQ ID NO: 304925 - DNA, 122 bp, Homo sapiens
cgtgcgatttgagaaattaacccttggcgagggagtgtgcgaaagagcgcgacctctctccgcccgggggggacagttttgtttacagcgaaggtggttggaagagtgggggaagggcgcag

SEQ ID NO: 304926 - DNA, 122 bp, Homo sapiens
agcggtttgctggaggaggtcttcctggacctggaggtgggcctggctctttcctcctgccgttttctgggccgaagcccagtgcttcctcactgccctctgggacacaggctgtgaactgt

SEQ ID NO: 304927 - DNA, 122 bp, Homo sapiens
gggaacgggagcaccaggcgatatcacgtaccccgtggaggtgtgatgtgtcaccgtcaccgagggctgtgagccttttctgcagagagcttcgtcaggaatgcccagaccagagctcgctg

SEQ ID NO: 304928 - DNA, 122 bp, Homo sapiens
ataagaggaggattttcggtttctgtttctgcccagccctgaagaggctgcagcgctacgcgctgccgggagactgggcgccggccgggcgggggcggagcccggaggagcgcggggcggcc

SEQ ID NO: 304929 - DNA, 122 bp, Homo sapiens
gggctggctgcaagacattgaggatgctgccccaggggccagcagggtgactggggcaggcgccatgatggctgtgcctgggtgctggccagtgtggccccaagaagaggccgggagccaga

SEQ ID NO: 304930 - DNA, 122 bp, Homo sapiens
gtgccagcagcagggcggatacttgggccagaagcttccagggcgcctaagtgagggggtcggtccccagctgcaggagggcgggaatcgacgctcagcgcggccctggaggctgcacggtg

SEQ ID NO: 304931 - DNA, 122 bp, Homo sapiens
ttaggtcatcgcctgggaaagcgccgagaggtttctagtgtgggcttctcaaggtgtctccgcccaggaggatttcgccatccatttaaacgtaaggcggggtttaatctggaatgaaagga

SEQ ID NO: 304932 - DNA, 122 bp, Homo sapiens
ggcaagagacagtagggccggggcgggcagcgggaccccagaccgtcagggcagcaacagcgaggcccagaggagaagatcttggagagatgacaaagaagcacaggaaagccgggttctgg

SEQ ID NO: 304933 - DNA, 122 bp, Homo sapiens
ttgaactcctgagctcaagtgatcagcttgccttggccttcctaagtgctgggattacagcgtaagccaccctgccgggcctactgggagctttttaaaacagtagaaccttcaggttcttc

SEQ ID NO: 304934 - DNA, 122 bp, Homo sapiens
tcagactattatgagggtggcaaagggcaagcctcaaagtgagtgactccttcaaatctgcgggccccatgttctctttctgcgctggagcaggccggagagaggaaaagttccatgaaagg

SEQ ID NO: 304935 - DNA, 122 bp, Homo sapiens
gcgaggggcgcggggggcgggtggcggggcagggcggcgcggtactcacaggcagctcagcgcggagcgggggctgcccatggcgcgcggccccggggcaccgagagcccggcgggtcacgc

SEQ ID NO: 304936 - DNA, 122 bp, Homo sapiens
gcccaggaaaatcaagcacctttccttactttagtcttcaatcttagctgaactgtgtcacgtacaaatatcttgcataggatagtttaattatcatcctccttcaccacctgagatacaca

SEQ ID NO: 304937 - DNA, 122 bp, Homo sapiens
agcgcttggtttgcttacccgggagtgggtgcccaagggggtcgtggcgggtgcgagaagcgtcgtccccctcggactcgggcgcccccagccctggcgggtccccgctgagcggctgcccg

SEQ ID NO: 304938 - DNA, 122 bp, Homo sapiens
tattgtctcctctgtgtatttttcttcagttcctaaccaaccaaaccgctgtgtgtgtttcgcctttgtataaaaaacagagaatgcaggatagccttctatcctaagtgttttaaataaaa

SEQ ID NO: 304939 - DNA, 122 bp, Homo sapiens
tggcggatgaaaccaggatttagtggatggtcaccaggtagcttgggcagacctgggccgcggggcccctgaggactcatacgtctttttcctgttcacatgttccttccccacaccttggc

SEQ ID NO: 304940 - DNA, 122 bp, Homo sapiens
tgtgatttgtttcctgctttaggataaacttcccacactatcagaataagctttcccctccgactcctcaacagctggtatcaccacgtttcttagcttattgtaaaggttgagtggctttc

SEQ ID NO: 304941 - DNA, 122 bp, Homo sapiens
ctccctcctctcttctcccctttcaacacttgaattgggctctccgctacttccgcacagcgcaggacccacacgagcccagaaccatcacggcctgctagttcccacccctcccgtcctgg

SEQ ID NO: 304942 - DNA, 122 bp, Homo sapiens
cgccccggtgccttggcgagtcgccaggacaccagcctgggccgggggagctcgggaaagcggctgtcacccatctcgctgggacaactcagctagtccaagactgcctggagggagccccg

SEQ ID NO: 304943 - DNA, 122 bp, Homo sapiens
gggggagggtgttggcggcaccattgtgctttcattccacgtttcctcagtgattcaacacgttaagtaacgtgtcacgtgcctgctggccaccaccgtccgctcctgggaagaacctgttg

SEQ ID NO: 304944 - DNA, 122 bp, Homo sapiens
catggcttttaatcccctgtgcatgccggccggcgccttcaaaatgtacccctccagccccgcggcctaccctgatctcccgactactgccgtgctacctggatgtctaataggcaccttga

SEQ ID NO: 304945 - DNA, 122 bp, Homo sapiens
cgtcgagtcacctatcctcactcctttctgttagctgccggccctagcgctccctctcctcggctgaatctcacttagtggaggaaaggctgaaaggactacaactcccaggggacgctgcg

SEQ ID NO: 304946 - DNA, 122 bp, Homo sapiens
tagccacgtcacgctcctcagggaggccccgccccgtgctctcgggccgcccctcttcgccgtctccacgcctccgcgggcagttaccagctttggctgctcgcgcctccccaactcgggta

SEQ ID NO: 304947 - DNA, 122 bp, Homo sapiens
ttcgcatgaagtttcgacgcacaacggcactgaaacggaaagactcttcacgttcccaagcgcaccctgagaggcaggtgcagcagctttccgatggcttctctgccgcccatgtatcccag

SEQ ID NO: 304948 - DNA, 122 bp, Homo sapiens
ccactggtcaccacccacctcctgcctggcctggccctctccttaccctcgagtcatgcccgataagctgctggcactcagcacaggtgttggcaaaggtattgtcatagcagggcacacag

SEQ ID NO: 304949 - DNA, 122 bp, Homo sapiens
ctccgccacccggtcctgggaacgagggccgatgagagtcaggagccccagagccaagtgcgagcccagcgggagaaaatcaaggaggtatggactcagcccccaaactcctcccaccaact

SEQ ID NO: 304950 - DNA, 122 bp, Homo sapiens
acctgccttggagagttgttcacaagctcgtatgcattgatagtgtggtcctcgtgtggccgatagagttgcactgtggatatatcaagcgtgtgggtctttcgcctgctgaggggcgtctg

SEQ ID NO: 304951 - DNA, 122 bp, Homo sapiens
ctgcgcgggagaagggacagcagagaccgcccgtggggccccggggtgtagggagctgtccgttcagccctggcgcccgcctcgcccgcggcagagggcggcacagccggagccttggaaag

SEQ ID NO: 304952 - DNA, 122 bp, Homo sapiens
ccggagcgcgctgctgccctctaccggtcatccgtgcggccggacaccgtgtcaggcccgcgaggagggctctgccgcagtcccggggaacagcacccagcagcgccactgggagaggaaac

SEQ ID NO: 304953 - DNA, 122 bp, Homo sapiens
ggcgggacctggagccctatccattcagcggcgccgttgtcgagcctgtccaatcaggcgcgcagccgaaaaagggggcgcacttcctgtgttctgggctggccttttcctctcccaggtgc

SEQ ID NO: 304954 - DNA, 122 bp, Homo sapiens
gggctgggggcgggccctgtgatcgggcggggcggggcctgctaaggggcggggcctgtgcgcggaggccgctcgcgaaccagccgtggggaactggtccacgtgggctcggtttgaccgca

SEQ ID NO: 304955 - DNA, 122 bp, Homo sapiens
ctcaagtgatccacccgcctgggccgcccaaagtgctgggattacaggcgtgagcccctgcgcccagccccagtgattaaccattcagagtgctccctgttaagagccccttgcttgcgatc

SEQ ID NO: 304956 - DNA, 122 bp, Homo sapiens
cggagagcggcgagggctccggctccggacccagccgagcgcgcagcgtgaagcggagaacgccgggttagcgccaggctgaatcctcgctctgactcctattgcggtgggatgtggtctct

SEQ ID NO: 304957 - DNA, 122 bp, Homo sapiens
gcccgcgcaggaagggcacccggggtgcccactttaccagcagggccttcagggccttcacggcccccacggcctggggacccagctcagccacacacttctgggagccctctatgaggtgg

SEQ ID NO: 304958 - DNA, 122 bp, Homo sapiens
tccttgccccatggtgctgggcgcccccagaagagcatgctggggtgagtacccctgcttcgccccctgccccgcgtcctgtccctgctcatctcttagggtattgactgggctctgcctct

SEQ ID NO: 304959 - DNA, 122 bp, Homo sapiens
tcttcttaaaatggtttcccgtttcctaaggataaagttcaagctccctaaccaggcctacgaaacccgttaggtcagcctactgcccttctcgtctgccccgtgtcccttcacgtcccatc

SEQ ID NO: 304960 - DNA, 122 bp, Homo sapiens
cccagtttctctgagaggtagactcctacaaacccaatctcaaggtgtgtgcaaaatgaacgcaagaattagttgatactcctctgtgtctttaactgagtagcctctgttctcctctgctg

SEQ ID NO: 304961 - DNA, 122 bp, Homo sapiens
ctgccgcccggcccgccccctgcactttgcagcgcggggaggagtgggcactcgaacacacgcgtgctcacacagggacactcacacaggcgtgtgcacactcacacacgcactcatacagg

SEQ ID NO: 304962 - DNA, 122 bp, Homo sapiens
aatggtggggtccctccgatgctaccaaatggcgcttggcgctgctgggctgggggatgacgtgatgtctatttctgggcctcctggcagcgccgacgctctccttccggggcctttgttcc

SEQ ID NO: 304963 - DNA, 122 bp, Homo sapiens
gaagctccagacgtaaaggggcaggtgacctgtttttttttttttggagcacaggcagaccgacctcagctctgcaaaagtggccaattaaggcaccaccctggtggaaagaacatggcgtt

SEQ ID NO: 304964 - DNA, 122 bp, Homo sapiens
gcacccggcgccggctccgccgccctctctcacacgcacccttggcagggccccgcggggcgccccaaagcttgggggcagctcccaggtgtctctgggaagggaaagaaaggccacaaagc

SEQ ID NO: 304965 - DNA, 122 bp, Homo sapiens
gcctgccgcgtcgaatttggggtcttcgctaggcctgcaaggttggccgacgttcaggatcggtgcccaggagatgggctgccttctctggggctgggcaagggactctgcctggcagcgcg

SEQ ID NO: 304966 - DNA, 122 bp, Homo sapiens
gtcgctggcggggcttcccttggagctgacgaaggcggggtccgcggtccaggctgctgccgcgacggggccggcggcggggcagctgccaggaacgagggtagcaggtaagcggggacgcg

SEQ ID NO: 304967 - DNA, 122 bp, Homo sapiens
cgcagctctcgtggaggtgcagctggtatttctccggcttgcggacgtgcaggatctccacgttgctactctccattccgaccgccagccagtcctggttagggcagtggcccagggagaaa

SEQ ID NO: 304968 - DNA, 122 bp, Homo sapiens
gtcccgcccgctcgtctgcctggctgcggggtgacacggggcttcgccttgggaaggggtcgagggaagcagttagacggctgccgggcggcggctgccgcgcggcacacaatgtgagcccg

SEQ ID NO: 304969 - DNA, 122 bp, Homo sapiens
aacagaaacgcttctctgggggttgtcctcgtgaacatcatcagactaatcatgtggaagcgcgcctggtgccagttggatcaggagagagcgggtggatgccttgtggtcctggtgaggat

SEQ ID NO: 304970 - DNA, 122 bp, Homo sapiens
gatggacctgggagcagcgcagggggctggtgtggcaagaggcaggcggagctgtgaggccgagttcggggggaaggggaggactcctgagagcccgtggccaggctcaaggtggctgtgtc

SEQ ID NO: 304971 - DNA, 122 bp, Homo sapiens
ggccccggggggtcgggtaccagggcccggcaggaggagtagccgtagacgtccttgctgcgcaggatgtgcggggagaactggtgcttgaggctgcagaggaagctccagagctccgcgtc

SEQ ID NO: 304972 - DNA, 122 bp, Homo sapiens
gcggaggcggaggctcccacccagggtcggggccgggggtgtgagctaaagagctgacctcgcgctgctctggactcggcacaaagagccggggacaagggcacgacgagatcctgatcccc

SEQ ID NO: 304973 - DNA, 122 bp, Homo sapiens
cgactcactgcccccccctccgcattcccatctgcacaactttctgtgattcaaacagtccggagccagggctccctgcaactaacgctatcgtgacattataagccggttaaatactgagg

SEQ ID NO: 304974 - DNA, 122 bp, Homo sapiens
cccgcccagtcccccaggccctagcgtttacccccacgccccgcctcgccccgcgacccacgtaccccgcctccgagccccgcccccgcccccacgtgccccgcccccgagccccgcccccg

SEQ ID NO: 304975 - DNA, 122 bp, Homo sapiens
agcatctcattctcctgataacacatctatggagcaggtgctgttcttactccattttaccgaggaaactgagctgctcagtaacttgcctgggtcactcagctgggagagcagcatcaagc

SEQ ID NO: 304976 - DNA, 122 bp, Homo sapiens
ttgacagctaattagctgtgtgtctttgcaccggggggcctctcagatggcaggcatcatcgtcacggccctgaagccgcatgccgggacttcagaggaagcatgccttggcctccctcctc

SEQ ID NO: 304977 - DNA, 122 bp, Homo sapiens
gctgaggtgggaggattgcttgagcccaggaagctgaggctgcagtgccattgcagtgatcgtgccattgcattgattgtgccattgcgctaatcaataatattgattagtgactggctaca

SEQ ID NO: 304978 - DNA, 122 bp, Homo sapiens
acaccctcagtgaataattgttgaatgaatgaatccaggttctttcttccctggctttctcgtacgccttgtagtttctttgccattaatccttctcaagaatcttgctctttagctcctta

SEQ ID NO: 304979 - DNA, 122 bp, Homo sapiens
actgaggctggaagcttgtatggctggtgtgaaggaagggctcccctttactcccccgaccggctgcctcccaaataagtcctgcggtctggggctctcctaccctgagacccttgtcctct

SEQ ID NO: 304980 - DNA, 122 bp, Homo sapiens
ccagtggctgcggagggtgtactgggtcccccagcagtcccggcccactggcgctgccctcgatttctcactgggccttagctttcccgcggggcagggctccggacctgcagcccgccatg

SEQ ID NO: 304981 - DNA, 122 bp, Homo sapiens
cagaggagatgtgaatttgcataaggaagaatcatctgatgatgctctgggctataccttcgcccacactagctctaccattctctgacctcctggtatattcttcagcacctgctacagtt

SEQ ID NO: 304982 - DNA, 122 bp, Homo sapiens
gttgcctttcagcttcccgtttcactctcccccagactgtgttgaatgctggtcaaactccgttagttgagttttagcttttgattcctggtattcaaggagcttgggcacagggaagaggg

SEQ ID NO: 304983 - DNA, 122 bp, Homo sapiens
ctccggagtagccggggccacaggcagggcatttgtcattaatggggtcttttgagaccgcgggtgacagacaacaggagccaggccacgcgcggcgcctctgcgcgaacgctagggaggac

SEQ ID NO: 304984 - DNA, 122 bp, Homo sapiens
tctctccccgcctttctttgggacctggctgggtgtgcctactgacctgccagcccgcagcgggagcgccccctggctgctgacgacctacgcaccgtgcagacctccctcctgggcctggc

SEQ ID NO: 304985 - DNA, 122 bp, Homo sapiens
cctggcctcgccgttcctctccccgttgccttttctgagcacctaagcatatgtatgaagcggaaatcaaacgcctgccttggacttgacagaactgctgaactaagagccatataatgtcc

SEQ ID NO: 304986 - DNA, 122 bp, Homo sapiens
acagggcgaatcttctcaaaaagtgaagccaactgggtctcctcttcagcagtccaggaacgtttccagtctctctcctccccagactggaggaaaatatgtacatcaatgcgcaccagtga

SEQ ID NO: 304987 - DNA, 122 bp, Homo sapiens
acacccctaatcccctcggtgagtgcggccgcctcactcacaccacacccctaatcccctcggtgagtgcggccgcctcgctcacaccacacccctaatcccctcggtgagtgccgccgcct

SEQ ID NO: 304988 - DNA, 122 bp, Homo sapiens
ttgtcagctggagtctgaattgaaacgccttctctgcggccctccccagaccgaccccagcgttttacaagggagccctggcgttgccttacgctgcccgatgctgccccctgcaggcggct

SEQ ID NO: 304989 - DNA, 122 bp, Homo sapiens
ggggctgggggctgggggctgacgtttctccctctcaaagttcaggttgaattgccctaacgtgctgattactgcaccgaggatgccggtatctggcttgtaataattatagatttcctctg

SEQ ID NO: 304990 - DNA, 122 bp, Homo sapiens
tgacgtcgttcttggaaaagttacaactgaagagctcggtgggaccgatcatggggatgccgaagacataggggacctcatcaccatgggccgaatctgcccagctgggcttcatttcgctt

SEQ ID NO: 304991 - DNA, 122 bp, Homo sapiens
attatatagtattctatttttaatttttgggggcatcgccatgctgtcctccacagtggccgctctcttttgcatttccagcagctgtgcaccgggttccgacgtctaccctcctcgtcaac

SEQ ID NO: 304992 - DNA, 122 bp, Homo sapiens
ggggacctggggtggagaggactgagcaagtgaagaccggggacatgggagagcccagaccgctttggaaaacacagcagtgtgagtccagctgaaaggggctttgaaatgaggaaagagaa

SEQ ID NO: 304993 - DNA, 122 bp, Homo sapiens
aggacgctggcggcggcgaggagaccccggccccggaggccccgcacccccctcagctcgcgcctccggaggagcaggggttgctcttccaggaggaaaccatcgatcttggcggagatgag

SEQ ID NO: 304994 - DNA, 122 bp, Homo sapiens
ttctgtgtcttgtagctgtagggtgccagctcagggagtggggtgttggcggcgtttccgcggttggcctccttgctttgccgcacctccaggttctgggcatgagaggccgtggcctcatt

SEQ ID NO: 304995 - DNA, 122 bp, Homo sapiens
cttatggagctcctctccttcctccctctcttcctgcatgggtgtgacctttgtgcctgtcgctggggctgccctgggaggacttctgggaggttggagcccttacatctcaaagccaggga

SEQ ID NO: 304996 - DNA, 122 bp, Homo sapiens
gctgtcatggcctgcctcaacccggtggtaaggaagacctcaggctctgtgtagagggagcgccctgggactccgggttcacggcagccgaaccctgcaccttttgtttccccctgacactt

SEQ ID NO: 304997 - DNA, 122 bp, Homo sapiens
gtaattcgccacattttatccaagagaaaattatggctaagagagtctctgattgtagctcgaaagtgctagggatgggattcgttcccagttcaattctgattcttcgctttagcgtgttg

SEQ ID NO: 304998 - DNA, 122 bp, Homo sapiens
accgtcggctgagccaagaaaggccgcttccgatcctccagcccccgaggcgcgggggcgcgcggacgcccggttataactgaacaacccgagccccacgtctctgattggctcaggcagag

SEQ ID NO: 304999 - DNA, 122 bp, Homo sapiens
agcgctttttctacaggctccagggtacccctaaacaggtctgcacacaactcttcaaatcgagctctggtgatggatgtatagaagtcaatgccttcataaagtgaatcaatttctaggtt

SEQ ID NO: 305000 - DNA, 122 bp, Homo sapiens
ttgtgtggccaccagtgctgggtggtgtgggtttgggctgttctccctcctggctcagcacgggcccgtcagcccagtgtcctttgggcctgcccttcccctagcatccctggttggaaggg

SEQ ID NO: 305001 - DNA, 122 bp, Homo sapiens
tttcgcgctactcaggttgcaactccggagggaagacgctgggacttccagcttgataggcggggattggaaccaatgaaagaggtctgctgtgtatgctgcagccaataatagcggccgaa

SEQ ID NO: 305002 - DNA, 122 bp, Homo sapiens
caccacctatcttccccatatattgattattcgtgtttctcacttccatggtagtgtgcacgttatttgcttaactttggcatataaattcagaagaaatatcatttaactctgtgcctaag

SEQ ID NO: 305003 - DNA, 122 bp, Homo sapiens
atgtgcagaacactagacgtctgatgatgcgaacaccgctggaaccctcattctgttagacggcaggcccgaagagcacacgccaaagttggtggcctaatcctcttggcatctgttatagt

SEQ ID NO: 305004 - DNA, 122 bp, Homo sapiens
agcccttcagcccaccgctccactgtgggagcccttttctgggctggccaaggccagagccggctccgtcagcttgcagggaggtgtggagggagaggcgcgggcgggaaccggggctgcgc

SEQ ID NO: 305005 - DNA, 122 bp, Homo sapiens
gcgagggatctctgtgcgtcctcactggcccatgcacccagcacctgcgactcccgccgtcgggctgcgtggccccgcgcccacacctgcccgtcccttccgtcgtccctcgctcgcgcaga

SEQ ID NO: 305006 - DNA, 122 bp, Homo sapiens
cattggtcgcccgctggggtgacgtcacgccggggcgaaagtcgtggcggagaggtggggcgttaaaggggccctgccccggctggggctgggtcccacctgccgattagggtggccccgcc

SEQ ID NO: 305007 - DNA, 122 bp, Homo sapiens
tccctttctccagcaggtggttctggtcctctcccccaactcgggcgctcacgtcaccggcgaacctctaaccagcgccagcgccgctaccaaccgggaaaataaacaaacccccgcgctcg

SEQ ID NO: 305008 - DNA, 122 bp, Homo sapiens
ctgacgtcccaaacagctggcatggggcatgcacacagtaggtgcttaataaatgtgtgtcgggttaagataggcccaaagccatttcaaatgtccaggcagtggtgtaggcaggggtcagc

SEQ ID NO: 305009 - DNA, 122 bp, Homo sapiens
ccaatatatccagtaggctgctgaagcacaatgctgtttttctagctgattatgcacattcgctgcatccagaaagatgtggagcttggcttccctcttacattatgaggacaatttatttt

SEQ ID NO: 305010 - DNA, 122 bp, Homo sapiens
cgggcgctgattggcccgtttgaaatgcgccaggcgggagctcacctgggctcttagcgtcgccgccggcttcgcagagcaccgcgccttagccgcgaagttctagttcttgctgccggtcc

SEQ ID NO: 305011 - DNA, 122 bp, Homo sapiens
ggaagaagaaatgaataatgactttccctagcctgggaaatgtgggtctctgagttctcacgatgctctgtaattttctccttgttgatatctggcttcatcgagtgccgcagaccaaagct

SEQ ID NO: 305012 - DNA, 122 bp, Homo sapiens
tttcttccagactccaatccaaattctgggttgctgggactgtggtctgagagaagaactcggaagtggaaggctgggactgcagataggaaccgttagccatgcagcctgggattagggaa

SEQ ID NO: 305013 - DNA, 122 bp, Homo sapiens
ttgggagcctgctctgttcaaaagtattgggccaaaggacacgaagacttttcagcaagacgatccttgctttttaggggctcataatttagagtgagaaatagatatatagctaatataaa

SEQ ID NO: 305014 - DNA, 122 bp, Homo sapiens
ggagacactcactggggcaatctgaggtaatccaacagactgtggcggagggaccggaagcgccaggcagggacccggggtagatgctaaatccaaactgaaacgtacagggctggatgatt

SEQ ID NO: 305015 - DNA, 122 bp, Homo sapiens
agagggaaggagactgggacctgattgatgcttgtgctgccctggccgccatagctgccccgccgggccctgttgggactgtgcgctggacttggagccgcgagtatggcttttcagacgcg

SEQ ID NO: 305016 - DNA, 122 bp, Homo sapiens
ggagcaagaatagattgggcaaacaagcaaacaaaatagataaagcaggcgctgtgtgggcgcgtcattagcggggtctcctcttggactgtgaacacaccccaaagcttgcaaccccctgg

SEQ ID NO: 305017 - DNA, 122 bp, Homo sapiens
ccaccctgtgatggaaagtagtggttcctcacctgcggggctggggccgataccaggagccggaggaaagcatgagtcgggggtactgggttggcttctcgtccccctgcagtcacagtcac

SEQ ID NO: 305018 - DNA, 122 bp, Homo sapiens
gtcacgtgtggccttcgcccgaaagcggtaggggagtcgctctgaaaccgccaaggatcgcgagcgacagatttgtgttggccagggttttaagatgacgcaatagctgagtgtggttgaaa

SEQ ID NO: 305019 - DNA, 122 bp, Homo sapiens
tcccaagttagggaagcagaagccagacagggagactgggtaggtgcgcgctggtaccgccgcggcgttcgctccggcttcagtgcacggccggaggaggacgccagggggcagcagcgcca

SEQ ID NO: 305020 - DNA, 122 bp, Homo sapiens
gtccctagaatttttaaaaatcctaatataagcttgcttcagttgatttcccaaaaaagtcgaatataaaatacattcaaggtaacctaagttaaatgagattctacccaatctagaacatc

SEQ ID NO: 305021 - DNA, 122 bp, Homo sapiens
agacccaggtgcccagcaggtcaagataggtgcagttggcaggtgtgtcgcagcgcacggcgccgtcgccggagagaagcagcaggagggcggcgagcagcaaggagggcccagcacccatg

SEQ ID NO: 305022 - DNA, 122 bp, Homo sapiens
agcctgagcgactgagagtcgggagtgggagcgaggctattcatactcccgccaggcgggcgggaagaggggcgggacccaggccttaaccccttagaggtcagagagtggcagcagcctct

SEQ ID NO: 305023 - DNA, 122 bp, Homo sapiens
cgcggcggtgccaggccgggcgtgggcgagagcacgaacgggctgcctgcgggctgagagcgtcgagctgtcaccatgggtgatcacgcttggagcttcctaaaggacttcctggccggggg

SEQ ID NO: 305024 - DNA, 122 bp, Homo sapiens
tgatgtccctacaggtggggaatgatgtccccacagggcggggaatgatgtccctacaggcggggaatgatgtccctacagggcggggaatgatgtccctacagggcggggaatgatgtccc

SEQ ID NO: 305025 - DNA, 122 bp, Homo sapiens
gggcctggcacggttccgtcaggccctcttaccagcccagtcgtgtctgtgaccagagcacgtgggaggtgcacatccgtgtagaaaaacctcccactggctgccagctctggatttttgaa

SEQ ID NO: 305026 - DNA, 122 bp, Homo sapiens
cagcctgttctggttggcacagcctcacctcttacctttgccacgatgctactcctgctgcgtcactcagttctgcatggtgagtctcctccatccactgtgatctggaaccacgtcattgt

SEQ ID NO: 305027 - DNA, 122 bp, Homo sapiens
cggctgccagccaaggggccggagccaagagatttgcattggaagcgccatcctcttgcgcgtctgatgaggaagcagaacccggtgaccgactgagctgcatttctgaagcatttgctggg

SEQ ID NO: 305028 - DNA, 122 bp, Homo sapiens
actgaaggccttacctagattgaatggggaggagccatgggttttctggagcacttcaagcgtctacttttaacatgcagacactgattacgggcaccttctatgttcccttttacatcaga

SEQ ID NO: 305029 - DNA, 122 bp, Homo sapiens
ttttgaatttgaatgtttttggcaaggcatgtattaatttttgccacttagttgcaaatccgtacatttactttttttcagatgaaggcattcaagtttaaaaccactttatatattttctc

SEQ ID NO: 305030 - DNA, 122 bp, Homo sapiens
aaagaaacataatgaatatcctgatgcctctcaaccatctggaaaatattaaccgggcaccgaaatacttgataaatgctgtgaaaaacatgggattgggtggtgaataggttgactgacaa

SEQ ID NO: 305031 - DNA, 122 bp, Homo sapiens
ctggcccccgcgcgtcgcggcctcggggatgaggggcttcgcgactaccccggcggcccccggcccccgctcccgcccgagcccccaccttctggaccccggccccgggctgggctgcactg

SEQ ID NO: 305032 - DNA, 122 bp, Homo sapiens
ggacggggtcgcaggtctggacggggtcgcaggtctggatggggtcgcacagctttggaccgggtcgcgggtctggacggggtcgcgggtctggacggggttgcacaggtctggatggggtc

SEQ ID NO: 305033 - DNA, 122 bp, Homo sapiens
tggctctgtccggagaccaggtgagcacagcctggagcctgtgcccagggccgacaggcgcgacacccagcaaggccacctctccccgggcccccgcgcctctgccggacacggaccggccc

SEQ ID NO: 305034 - DNA, 122 bp, Homo sapiens
cggaggggacgtgtgagtgggtacacaccagaacgctcaaccctatctagacatacaaaacgtacagcaaaacccagtgttaccatcttacgggaccacccccccatgcgattggccagtga

SEQ ID NO: 305035 - DNA, 122 bp, Homo sapiens
agcaacaacaagactagggctgcagggttttgaagaagctgctcgggacaagcatgcacacgctcatgtgaaacggcaactgctccacatcatgctccattttctccttctggcaaactgtg

SEQ ID NO: 305036 - DNA, 122 bp, Homo sapiens
tggctccgcaggagctgaggtagctttgctctttttaagtgggtggtagactgtaggtgacggactaaattttctttaagggttcaggatatgaagcgtctagagtcaggaagaatctacta

SEQ ID NO: 305037 - DNA, 122 bp, Homo sapiens
cccagcccctccctctccagtgccttcgctgacttctcacctttccctgggttgcagaagcgcagggcagaggcgctgacggcccgcaccctctcggcctgcacggcgatgtctgcctccac

SEQ ID NO: 305038 - DNA, 122 bp, Homo sapiens
tgtgtgctgctcccctgcgtttcccattttgtaatgatttccgtctcttcccaaggatcgcggaggccatgcatcaccaggactgcctgctgttcgccaccagccacctgatttccctggag

SEQ ID NO: 305039 - DNA, 122 bp, Homo sapiens
agggacagtgtgggtgccacaggtaaccccaatttctggccttcaacttctccccttgaccgggtccaactctgccactcatctgccaactttgcctggggagggctaggcttgggatgagc

SEQ ID NO: 305040 - DNA, 122 bp, Homo sapiens
atttttggcccccgctgcagcaagttgggggctggtgaggagtgtagcggtgactgggggcggagtgcggactcgcatccgctgtaccaggagcccactgccacctcgggatttttttttta

SEQ ID NO: 305041 - DNA, 122 bp, Homo sapiens
aagctcccttcagatcctcctgttacaggagtcagcaggctcccccgaggaaacacctcccgccattgcacattgttaaatccacttcaatattcccttttacctcctgtgtcaatcaccac

SEQ ID NO: 305042 - DNA, 122 bp, Homo sapiens
agagtccaggaggctcaccttcccggcgccttcctgcgctctcccagctgtgaagctgtgcgcaaacttctcctgacttaagagtctcaatcctagcctgcgctcccgccccacccccgccc

SEQ ID NO: 305043 - DNA, 122 bp, Homo sapiens
taccagatccacaattggcagataatcgcagcaggagcctcttcggggtaatcagatacgcggcgcagcaggggtctcagggccacagccaggggggcggcgggagacatgcggaatcgcag

SEQ ID NO: 305044 - DNA, 122 bp, Homo sapiens
accctggcaatactaagtattggttgtttgcccttgtgatcaatggctaactgggagctgcggcttgctgcccctgcccagtattgcaagaatactgcattatcgttagcttaggaaaggat

SEQ ID NO: 305045 - DNA, 122 bp, Homo sapiens
cgcgtggccgcggcgggcaccagcgcttctgagagagtggcttgtcctccgatggatcgccgtatttatatttgatttattttttattttgtagcacaaacagaaatccataaactgtcggt

SEQ ID NO: 305046 - DNA, 122 bp, Homo sapiens
gttctcggccgtcctgaaggggcaggatcttcagcctgtgggcggtgctctcgccgtgagcggggccaacgggccgtgttctccctgaaggggcggggtctgatcgctgcgggtcggattcc

SEQ ID NO: 305047 - DNA, 122 bp, Homo sapiens
tctgtgcctttcagctcttctttctgggtgacttcctgagcttttatcttccagtcctcccgtcatttcctgggtcacgtttttcttgaatgtatttctcttctcatagcatactttagaaa

SEQ ID NO: 305048 - DNA, 122 bp, Homo sapiens
ctccaaatgcgcgttcctaacctttgccagtggctgggatgtaataaatcctggcggggccggggcgctcagcctccccaggtcgcggccgctgcctccctcccccgtcccgccccgccccg

SEQ ID NO: 305049 - DNA, 122 bp, Homo sapiens
cgactttgtatgtgctgttctgcagtccctgttgctctctggccctcttctctccctcctcgccccgtctcacacacaggcattctcttggcctggctaatctctactgatcctttaaacaa

SEQ ID NO: 305050 - DNA, 122 bp, Homo sapiens
ggaatatgctgatatcaattgcctcctgaagtgatgcacaacttaacctgtgtagcacttcgcacaaaaatatttaacttgaatctgaatgcaaggcaacaatcatagaagtccaaagtaag

SEQ ID NO: 305051 - DNA, 122 bp, Homo sapiens
agcggctgtgaaggagggacccgcaacacccgctaaggcaggtaattgcaagaaggcactcgcgaggaggacttcaagcccctcttctatttcttcatataaaatcagggggatggggaaag

SEQ ID NO: 305052 - DNA, 122 bp, Homo sapiens
attcttggtttactgtaccatttaaatatcattgtgagttttacaacatcgcaacacaagcgttagtggtggatgaatgcttgtggagctgcagcacagcatgaattcttcctaacacctct

SEQ ID NO: 305053 - DNA, 122 bp, Homo sapiens
gggcgcaggcgagaggctggagctagatagagaggacccgctgcgataccgaggcgaggccgtgagccccgcgaggccggcgactgcggttttatcccttccggccttcgccgccccacccc

SEQ ID NO: 305054 - DNA, 122 bp, Homo sapiens
caggagaatgaacatctgcatttttcttgtccatgattcttctacataatgctactgaagcgaagataatctttaattgtagaaacaagaagagaagcaaatatattactagtatccagaag

SEQ ID NO: 305055 - DNA, 122 bp, Homo sapiens
cttcccttgcccctccagcctggccaaaagctcttctctcttaccctaccacatagacgacgatcccaaactgcagcagcctctgcagggcgcccccccaccagttcctggtcatcacatac

SEQ ID NO: 305056 - DNA, 122 bp, Homo sapiens
caaactttccctctgtcctccaggcaggacgggaaagcagcaagggctgaagcacaggcgcgcttgctaggagtgaggctggctgcttaatgagacacagctgcatcttaatgcacctcctc

SEQ ID NO: 305057 - DNA, 122 bp, Homo sapiens
tcatagctgggactgagccagaagacagcaaggggtggccaacagagggaggtcctgcagcgttgccagcactgcagcatttggcagcctgttaaagttccacatcatatgcatttcctcct

SEQ ID NO: 305058 - DNA, 122 bp, Homo sapiens
gtcaaacacacatggtatacatattctcctgggtataaacaaatttacattaattaatagcgcaacagaacccaaaacattggtagaacaaattctaatgtgacaatttaaaagcagacagt

SEQ ID NO: 305059 - DNA, 122 bp, Homo sapiens
gaaaggtgcttggaaactaatgacttagtttttgaatgctctgttcccaggctgtacttccgggagtatcaaacttctaggacacttaatatgttgctgagggtgtgctacttcagcaatga

SEQ ID NO: 305060 - DNA, 122 bp, Homo sapiens
ggaagaaggggagtcatccccatgagtctcctgcagaggtggccagagataaacactagccgaacacaactgcactgtccctggcatttggggcctctcagaatgaggtttgttgtcaactg

SEQ ID NO: 305061 - DNA, 122 bp, Homo sapiens
gggcgagaggctagagcactgtgggaggccgaggcgggagtctacaccatccagcactgccggaagcggaggcagaggctacaccactagcaccaagggaggccagggtgggaggccatggc

SEQ ID NO: 305062 - DNA, 122 bp, Homo sapiens
ccagctgggcatccctgggaggtcgcgaggatccccggagacccagactcgggcccggggcgcccccggccagagcggcccctggctgcctccctacgccccgcgactccggtccggacgcc

SEQ ID NO: 305063 - DNA, 122 bp, Homo sapiens
tgtgtattgtgtgtgccgtgtgtgtgccatttgcatgtgccgttttgtgtgtgccatgcgcgtgtgccatgcacttgccgtgcgtgtgccatttgtgtgtaccatgcgcatgtgccattcgt

SEQ ID NO: 305064 - DNA, 122 bp, Homo sapiens
ctgcttccctggttcaagaaattctcttgcctcagcctcccaagtagttgggattacaggcgcccaccaccacgcatggctagttgttttgtattttttgtagagacagggtttcaccatgt

SEQ ID NO: 305065 - DNA, 122 bp, Homo sapiens
gctcgctgctccctgtgtccggcgcgagtggagctgttgtaaaatggcggccgaagctcacgccgctggcagcaaacccgatccagttccactcgcctccgagcgcgctcccggtgcgcgcg

SEQ ID NO: 305066 - DNA, 122 bp, Homo sapiens
ggagtccggcgggtggaactccacttggagaactccaagctcggttctcgattcagaccacgtgtagctgccctggaattgacgtgtgagcctaggagggccagtgatggcaatgctcttcg

SEQ ID NO: 305067 - DNA, 122 bp, Homo sapiens
ctctgccactgcctttggcgtagtcccctgccagaagcaaatgagtgttgaattgagttgcggtgaatatagcccagacttgaatcataaaaacagaaaaacggccataaggacaaccactg

SEQ ID NO: 305068 - DNA, 122 bp, Homo sapiens
aaagtaaaagacgtaagttctctggttgctgatatctggtacctgagatcaaggcaagatcgcttaaaccagtaaagtgaggattatgggagcaaactcaggaataaagagggtgaaccagg

SEQ ID NO: 305069 - DNA, 122 bp, Homo sapiens
ctgcctaaccctcctgactggagggtcagcggcggggagtcctggccttcaatcggccatcgccacggcagaaactggggcccgggctgcgtccaggcccttccccgtccgtccacaggtct

SEQ ID NO: 305070 - DNA, 122 bp, Homo sapiens
gaacctgcaggtggacagccggcacatagacatggctgacttcattgccaacaatggcaccgtgcctggtatgggggcccggggtggagccaggctgggatcccagtgctgagaggaggggc

SEQ ID NO: 305071 - DNA, 122 bp, Homo sapiens
ggagagggtcttaaaattctgcgtcaattgaatcccgttggcctacccagtaaatcttaacgcctctgatgctctagcttcatttctgattgattttccctggcagaggtaccaaattcttt

SEQ ID NO: 305072 - DNA, 122 bp, Homo sapiens
tctccgcccccgccgggcggccctgcaccagctcccgcaggctgggctcgttggcggggacgactggggggctgttccatgtggtgagagcgccccactgccagctggcctcgcaggccttg

SEQ ID NO: 305073 - DNA, 122 bp, Homo sapiens
cggacggctgagcgccgcggggccagcccgagcgacccacccgggccctacgttcggccgcggagctgggagcgcacccaggcaggtcctccacgcctggactcctggcccggttctccgat

SEQ ID NO: 305074 - DNA, 122 bp, Homo sapiens
ggtggtatctgcatatcatgagatcagtgcattggctggactctgccccccaccgcggtccgagggtggggtgtccctaaactccatcaggtgaagtgtgtctgtgtcgtctttgtccatag

SEQ ID NO: 305075 - DNA, 122 bp, Homo sapiens
acctcaagaaggtgtcatttctgagcacatctgagactggtggaagagcactggagttcccgctgtgttaactgagtgagtggctgtacactgggtgggcttggcccccagcagggcgtcat

SEQ ID NO: 305076 - DNA, 122 bp, Homo sapiens
agcccaggacggagagtcccgcggagtggggggggtccggctgcctgccttcccctccagcggctgcccctcggtgtggagacccagccccaccccggcccccaggccttgccggagagggg

SEQ ID NO: 305077 - DNA, 122 bp, Homo sapiens
ccacgttggccgtgaggccgtttgatgggctttgtgtgaggaatcctgagatgagctggccggggagtgaggaccggcacccgcctacagcagcgatctggagtagtgagtgagcagcccca

SEQ ID NO: 305078 - DNA, 122 bp, Homo sapiens
gggtgaggacttccaagagatctctgtgaactctgagggtggtctcggtgtctcggagcgcgtggcctcgggcctgggtcagctcccacagctccgaccaggcggtcctgcccacggcgtgt

SEQ ID NO: 305079 - DNA, 122 bp, Homo sapiens
aatgttaagtaacccatccaaggtcatacagctagtaagtgacagacccaggcagtcaggcgttggagtctgcacatctaaccgctgggctgtgatgttcacatgaatgcagggacagcatt

SEQ ID NO: 305080 - DNA, 122 bp, Homo sapiens
gatttctttttcagtgacgttcaagtgtttctcacggatggaattctagtcagctgcaggcgggaagccaggcgggtggagcccatgggagcaagggcgagtggccggtccccgctgtgcca

SEQ ID NO: 305081 - DNA, 122 bp, Homo sapiens
caaatctgtttctcaattccaatagcacagatcttcccccagtcactataatcaatacttcgaaatctcccggacactcctccatcaagttgtcacatcaacttgccaagtgtatgaccagt

SEQ ID NO: 305082 - DNA, 122 bp, Homo sapiens
acccccggcccctcaaagggcccgcaaagactcagaattagctccacttaccacggtgcccgcggatgggggtgcggatcaacaccccagcggaaggccgctcctgggcccccagggcctcg

SEQ ID NO: 305083 - DNA, 122 bp, Homo sapiens
cgttgggggtagagaggtaaagaggggagttagcggggcatctccctcccagggctgagccggcaagcgcatcttctccgcgagttcctcactgtccagcgagcgctgcccaacttctgcgc

SEQ ID NO: 305084 - DNA, 122 bp, Homo sapiens
gctcacctgctattggccaggtggggctgtcggctgccagcagtgcttatgctttaagtgcggagcgggtggctgcggagccaggcgcggcgcaggatggtggacagcgtgtaccggacccg

SEQ ID NO: 305085 - DNA, 122 bp, Homo sapiens
gaatcgacctatggccagcagtcgtccccgccctgcttcaaacatttgggtttcaggagccgggcggaggtgactgccgcgtgtttgcgttgcacgcccaccgcccgaaacacggcggcggc

SEQ ID NO: 305086 - DNA, 122 bp, Homo sapiens
gcacccgggccaatggctgcggagggtgtgctgggtgccccagcagggccagcccactggcgctgagctcgatttcttgcgaggccttagctgccttcccgtggggcagggctcgggacccg

SEQ ID NO: 305087 - DNA, 122 bp, Homo sapiens
accagacactcagggaactgaaggctggcaggggcccgcccagtagtctcttgcccactgcgtgcctttaggctacagcctcccaggccccgtgccccctcccctcctcgccatgccacact

SEQ ID NO: 305088 - DNA, 122 bp, Homo sapiens
ttctgcccagggcccaggtatgcagcacccaccacccagatatttgggcatccttggtctcgacagaagccctggagcctaacccccctcggtcatcctcactccctccctcatccccctcc

SEQ ID NO: 305089 - DNA, 122 bp, Homo sapiens
cggaccccgccccatgtgtcccattggcttctgggaaaccgagtgcggttgccttcccgccggccttcacgtcgccgtgctcggtacttgaaatcccggcaagctcggcggcgctttagctc

SEQ ID NO: 305090 - DNA, 122 bp, Homo sapiens
aggcgcgaaggcacggaggccgcgctgagtgccctctccctccctgcagaagatggtgaccgccttgggcactcactggcacccagagcatttctgctgcgtcagttgcggggagcccttcg

SEQ ID NO: 305091 - DNA, 122 bp, Homo sapiens
cttatctctaatataattaaccactttaacattctagagactggataaaataaacaaatacgatttaagaatttgggcagactgacttagttaatacatcataatgtcctgatggtccaaga

SEQ ID NO: 305092 - DNA, 122 bp, Homo sapiens
gccttttgcggggcaggatgtggggcgggggggctccccaggcaggtagaaaggccagcacgatcccattggctgcccagggccctcatcacttgtttctgggcaggcctttggattcataa

SEQ ID NO: 305093 - DNA, 122 bp, Homo sapiens
aagtgcctgccaccatgcccgattaatatttgtattttcagtagagacggggtttggccacgttggccaggttggtctcgaactcgtgacctcaggtgatccacctgcctcagcctcccaaa

SEQ ID NO: 305094 - DNA, 122 bp, Homo sapiens
ctctttgggtcacttggagcgcggccagtttggcagatttgtttttttcccggaacaacccgcggcggctcggctgtcccgggaaactgcaaactttgctgtgcgcgttctcccgcgcgcgg

SEQ ID NO: 305095 - DNA, 122 bp, Homo sapiens
acccgcttgtaggatttaggggcaccgtgcaagacaggggtcatggtatgcgggtgcctccgactggcggctgcgtggtggatctggccacttggtgaaggtcgcagtgaccttgatctgct

SEQ ID NO: 305096 - DNA, 122 bp, Homo sapiens
ggcaaccccaactccagactggccaggatgggagggaggtggtggctcagggtaaaggaacggggtcttgggtcttaaagctcttctggcccacaaagctcagaagggagcaagagctcccc

SEQ ID NO: 305097 - DNA, 122 bp, Homo sapiens
aaaaaacccaacggagctcacagcccacatcagcgaacaaacgaatgaagaacgaacaaacgaatgaacaaggagacagcaggactcctgctcaggtcaaggcagagtgcggatcgcaactg

SEQ ID NO: 305098 - DNA, 122 bp, Homo sapiens
cgtgatctgcctgcctcggcctcccaaagtgctgggattacaggcgtgagccactgtgcccggccaaaaatgtacaaatgttaagtatagtgttcagcttgataaagttttacttacacaca

SEQ ID NO: 305099 - DNA, 122 bp, Homo sapiens
ctcccttgtcctagccatggaagggctggaggaggcagaggccaactgctccgtggcgttcgctgaggctcagagatgggtggaggtgagtgcctttcactgctttcccttccgcaggtgtt

SEQ ID NO: 305100 - DNA, 122 bp, Homo sapiens
cctctgctcctccctcctcccctggccgagggagcccggcctgtcttcctggccacagttcgggaggccgccgtcctcaaagctgggcaccagctatggctcagtgtctccagcctccagga

SEQ ID NO: 305101 - DNA, 122 bp, Homo sapiens
cagctccctgagacaccatttctctacaacgggatcacgctgcctgcctcgtgggatttccgtgggcactcagggtaattaatctgggagaaggctgactctctacctgacacacagggagg

SEQ ID NO: 305102 - DNA, 122 bp, Homo sapiens
agctcatctttaggaggtgcaggctgaattcacgcctcggtgtcgtccatgtctgcctgccgcgcagaggagacagcgagaggccttcccaccgcacggcttttacgggaagctcttcgcat

SEQ ID NO: 305103 - DNA, 122 bp, Homo sapiens
gagaaaggtctgggcggctttgtaaacatgagctttatgcgaaccagtgagaggaacagtcgggcttgtccaagaaaatgtgtaaactgtaaagtggatgtctgaggttggaatcctgagaa

SEQ ID NO: 305104 - DNA, 122 bp, Homo sapiens
tctctctcggtcccggtctcggtcccggtccttctctttgtctttgtctttgtctttgtccgctgtcatgattcgccacgtgccttcttctgtcctctcacggctaggcctccgtgaaaggt

SEQ ID NO: 305105 - DNA, 122 bp, Homo sapiens
tctctgactttgtgaacacaagacaaaagagactacaagactattgtgaactggctcttacgattttctccaggaagtggcataagtcacttctgctaactggcaaaagtgagtcacatgac

SEQ ID NO: 305106 - DNA, 122 bp, Homo sapiens
gcgtggggcaagtcctgcaccccgggcctgcgtttcccgctgcgtgaacggatggtcttgcgaatctagccaagggcacacagcgagcctctactcgggcattaggcaggctgtaacgactg

SEQ ID NO: 305107 - DNA, 122 bp, Homo sapiens
atgcatctttcactacaggcatttgttgttgacactgatgcagtccagcttgctgaatggcggttctgcatgtgaaatcaacatttagattgattttacacgagtgtttaatgtttgtggaa

SEQ ID NO: 305108 - DNA, 122 bp, Homo sapiens
acaggttgggggtggggtggagtaagctaagaagcaaacttggacctctagaacaaatttcgcgagacctttattacagggcctcagcaaccggatgataccgcgagagaggacgcctgacg

SEQ ID NO: 305109 - DNA, 122 bp, Homo sapiens
ctctcatgggatggtagagcggcctgggcaggggcggagctgagaacagaatttcacccccgaggttctcggactggagctccagaggagccgctgcccaggggcacttatcgtgtccttca

SEQ ID NO: 305110 - DNA, 122 bp, Homo sapiens
gttaagtgacttgcttcaacactcactctacccacgctgttaggcaggtgtgtctccctccgccgcagggtggaacctccctaggtcctattgccctccagataatatcatgaagggggaac

SEQ ID NO: 305111 - DNA, 122 bp, Homo sapiens
cttgtatctgactgcccaaatagagtatgaacatcttaaagggttttattcatgtttatacggcccaaaggctcagcaaatcactttgtataaaggaatgaagggcttcacaggtactgtcg

SEQ ID NO: 305112 - DNA, 122 bp, Homo sapiens
gctggagaccatggacgtttaggagtggaggaaccagagctgtgaatgacggccaagggccgtgggggaagaaatactggatcaaaacgggaaagctctgaattgggaaaaaggagaaacgc

SEQ ID NO: 305113 - DNA, 122 bp, Homo sapiens
caggcatgtgccaccacacctgattaactttttaaaaatttttgtagatggggtctcactcggttgcccgggctgatctccaactctaggattcaagtaatcctacctccatggcctcccaa

SEQ ID NO: 305114 - DNA, 122 bp, Homo sapiens
cccatctttcctattcatcagatttcctggagcccagcctgctacctggagccagggcctcgcctctactgccccctccgctcgctctgcctgtgcagggtccatcctgaggagagtctgag

SEQ ID NO: 305115 - DNA, 122 bp, Homo sapiens
ttcaagctggctgcagaaatctgcgtaagtatcaaggagcctaatgttaatcccctagaccgtggggaaaatgtctccaggctatgtcaaagaccttcatggcagcccctcccagcacaggc

SEQ ID NO: 305116 - DNA, 122 bp, Homo sapiens
tggggaaggctagagaagggaaacctcatctgtctgaagggcgtgcatctctctgccctgcgttgcggaggaggctttcgttaaagagactgcacgctgcggagcagggtgggtccgggtca

SEQ ID NO: 305117 - DNA, 122 bp, Homo sapiens
gaagcccccaaatttttatgttaacccagcctcacgccactcctcctctccctggtcctccgagtccccagaaaaggactcgtatctaaactcgttatctaattctcgagttagcggtctgg

SEQ ID NO: 305118 - DNA, 122 bp, Homo sapiens
tgctaagctcctcactgcccggggccagtggggcctgccggccgctccgagtgcggggtccgccgagcccacaaccacccggaactcacactggccggcaagcaccccggcagcccaggttc

SEQ ID NO: 305119 - DNA, 122 bp, Homo sapiens
aaagagatggctgctagagacgcaaggcttcccaccattttttttttttttggtctttcccgttttacatcttcacagtaagtttaagtgagaagaacagctagatcacatggtactataag

SEQ ID NO: 305120 - DNA, 122 bp, Homo sapiens
ccaccctggtggctgaccggaactcagccttgggcggttccaggttcatggtgaggctgacggagacaccgcggcaaccttggctcctggactccctcctgctgcggtctgggggcagacca

SEQ ID NO: 305121 - DNA, 122 bp, Homo sapiens
gattggcggtcgagaagcctatataaggcgcggggcagccaggctgccctgtttagcgaccggacccgaaacggggaagttgtcttgtttggagaggttagtagagcagcgcgcgcgtcacc

SEQ ID NO: 305122 - DNA, 122 bp, Homo sapiens
actggcagtcacagctcagaggtatccatagagctacacagacatagctacacagacatgcgaatttgagtcacactcattcctttggtttctttttggttttgttttttgagacagagtct

SEQ ID NO: 305123 - DNA, 122 bp, Homo sapiens
tgtcgtgcacggcggcaacaagcagcaggctggggtcatttaccgtccgaggagacttctcggagcctttgtgcacggatgtcctaaggtcgagttacgggagggtgactgagacttcactg

SEQ ID NO: 305124 - DNA, 122 bp, Homo sapiens
agcccaagtccctgcacgcagaggcgccgatcacgggtgggaggtggatcccggaggccccgccccaggccccgcccctccgtgcgcccaagctcgaccgcctgaaatcggggaatcgggcc

SEQ ID NO: 305125 - DNA, 122 bp, Homo sapiens
cctccccacgtgaggccctggaggctgattggccgtgtgctgcggaggcggcaagaggaacgtgtcctggcacgtgccgaaggagcgctaaaggccaggggcggtcccacccgcgaagccct

SEQ ID NO: 305126 - DNA, 122 bp, Homo sapiens
ctgagacaacactcaggatacctaagccccatgctgataagggccacagatggcctcactcggtgtgagtggtccttatcagcatgggtcttaggtatcctgagtgttgtctcactgtattt

SEQ ID NO: 305127 - DNA, 122 bp, Homo sapiens
tcaggcagtctttcacatttaatccacaaatatttaccgagaatttgacgtgccaccaggcgcggggctaggttcacaagatacagtagtgagttaggcacgattcctactaccagaagctt

SEQ ID NO: 305128 - DNA, 122 bp, Homo sapiens
gtgaggggtgaccgtgaggcgtggactgtgaggcgtggactgtgaggtgtgactgtgaggcgtggactgtgaggtgtgactgaggtgtgactgtgaggtgtgactgtgaggtgtggactgtg

SEQ ID NO: 305129 - DNA, 122 bp, Homo sapiens
gacatagtgagaccctgtctcaaaacaaaaacaaaaacaaaacaaacaaacaaaaatccccgtgacccagcccagagaggaatgacagccaggaatggaactcgaggtttcattccacacca

SEQ ID NO: 305130 - DNA, 122 bp, Homo sapiens
ttaccacatagtcacactgtatgaattaaaacgaaggcccgggatgcacattgtgtctcacgcctgtaatctcagcactttgggagtgtcacttgaggccaggagttcaggttacagtggac

SEQ ID NO: 305131 - DNA, 122 bp, Homo sapiens
ctgtaaagatcctatttcttgccttcataaccgactttctgagtggaggctctaacctagcgttgaaaatcggacggatctggccagttgttcacatgctgttgactgctggctttggttag

SEQ ID NO: 305132 - DNA, 122 bp, Homo sapiens
agcctgggtgataaagtgagactgtcacaaaaacaaaatggcatagcacagtcagcccaacgtatttgcaggtttcgccctgaggttggctgaatctgtggatgcaaaaccctcagatatgg

SEQ ID NO: 305133 - DNA, 122 bp, Homo sapiens
ttgtctggggaactcttaagtatcacaaaggttcacatgagagattctgtgtcttgtactcggtcacagcagtgaggaatgacatgtcatggtccacaagcaggctccatccttctcttcac

SEQ ID NO: 305134 - DNA, 122 bp, Homo sapiens
ggcccgcgcaggttccatttccggtcatctgttccttctggggctggacccggaagctggcgcgcggtcccgcaagaggagctttctggggcgctgctgccagtgttgtgaggtctaaggtg

SEQ ID NO: 305135 - DNA, 122 bp, Homo sapiens
aatttcatgctcgtcacaatttgcctaaactagccatcaaacagaaccggaaaagtggctcgaatagagagcaccaccaggacgttaacattttgcagatgtgttatctgagcttgtgcctt

SEQ ID NO: 305136 - DNA, 122 bp, Homo sapiens
ctctcgacgacaggaccgacgctccgcctcctcgccccggttccagtagttggtatggtccgagacagtatggctgctgcatttcggccctcgaatcgagttctcctgcaggcgctgcagat

SEQ ID NO: 305137 - DNA, 122 bp, Homo sapiens
acaaatgagcacttcataaattttaaatttgttttcagtcatagcccaatgttgcattaccgtgcctacattgttcccctcactttatctcatcacgtagacattttatcttcccctgaagc

SEQ ID NO: 305138 - DNA, 122 bp, Homo sapiens
cctctggcaagccaaggttgtccctggcatgggtgcgaattcaggagactgccggctttccgaacatagacagggccgtcaggcagagtcacacagaagatgaagatgaggctgagtcacta

SEQ ID NO: 305139 - DNA, 122 bp, Homo sapiens
agccaggaagcagcaactgcgtgccaggctctttctccccagaaaagatcgccccctggtcgttgcccctaccgaccgcctccctgctgccagctaatgacagggctttattctggggcgct

SEQ ID NO: 305140 - DNA, 122 bp, Homo sapiens
ggctacaccacaagggggcggtgtagacacagtctgggtgagggcagctgctgaaggccccgctagttggagctctcacgagctggctgctgcgttgtagacaagcaccagaacacgacagg

SEQ ID NO: 305141 - DNA, 122 bp, Homo sapiens
acccttcctacccggcttcaggcccgtgtcctctgcgcctggccccgggtgggtcagccgcgtggaccacctgaccttggcctgcacccccggcagctcccccacacttttgcgctggttcc

SEQ ID NO: 305142 - DNA, 122 bp, Homo sapiens
cccccaaccctgtaaccgccaggaaagcgcttggtgagcgtcgggactgcgcaggttcctcgggaggtggctaaactggccaccgcctctggggccgcctaaagcaagtccgttaaccacta

SEQ ID NO: 305143 - DNA, 122 bp, Homo sapiens
ttctgtagtcctttttcaataggtgcttgtcgtccaccggaggaaccctgtcctgctcgtcgtcctcatcaaactcatactcgtccttgacgggggccgtggccttctgtggctctgggttc

SEQ ID NO: 305144 - DNA, 122 bp, Homo sapiens
agacctggaaaatggctctgcactagagtcagaattggtccactttagagatagggcaatcggtgaaaaggagcttccagtggctgactcactgatggaccagggagacatttctcttcctg

SEQ ID NO: 305145 - DNA, 122 bp, Homo sapiens
gccgatggcagcgggtgtataatcagaaatggaatatgccctcataaaaaatggcggcggcgcgggtactcgacctttgcccctacgcagtcgtgcccaagacaacgcccccggtatctcca

SEQ ID NO: 305146 - DNA, 122 bp, Homo sapiens
cgcgctccgattggctgccgcttttgggcggattagaagctggattgtagcagagtgactcgcagaggccatgccccctcgtcttgtggcaggaccggaggggcgatcccggcatcccacgc

SEQ ID NO: 305147 - DNA, 122 bp, Homo sapiens
tgaaaggtggggcctcagctcccaatgccctccttcctttcctctctcccgccctctacacgaacgagcatgagcacgtctgcacaaaggtcccaaactcccgcagtcctctctttactttc

SEQ ID NO: 305148 - DNA, 122 bp, Homo sapiens
acagcaaggcagccccttcccggtgcagatggggaaatcgccacagggggcagcactgagcggccaggggctgcacggccagctagtggaagggctggagatggggcccagctgggcctggc

SEQ ID NO: 305149 - DNA, 122 bp, Homo sapiens
ggccaggagtcaactaggcttcttgcggaaaagcccactctaagaaggcctggggcattccggctccaggcaggtagcacccgcgggcctcaggccctttcacttacccgggaaacgtaacg

SEQ ID NO: 305150 - DNA, 122 bp, Homo sapiens
aaagaccctggcgccaggctgcctcagctcatttcctagctctaccacttactagttattcgtagttgaagaagtcagttactaacctctctgggcctcaatctctcatcagtaaaatgaaa

SEQ ID NO: 305151 - DNA, 122 bp, Homo sapiens
tgtcagtgaagtcacgtgcattttcagatggaattctcctccccgatgtgaacaatgaaccgacggtgttattttcataggattgtcctggagcccacggagacgcgggcttgggatccaac

SEQ ID NO: 305152 - DNA, 122 bp, Homo sapiens
agagggttcacgcagctcacgtgtaaacggacccctctttccacctgccctgagaccactcggctgtgtctggatggctgaatcagaactgggtgctgcccctactcctcacgccggaaccc

SEQ ID NO: 305153 - DNA, 122 bp, Homo sapiens
ggagacaggctgaacagccccttttgggagtgttctatgagctgtgtccctggaactggacgagggcaccaccttgcatattaccagcactatcccccttcccttgccgtccacctgcaagc

SEQ ID NO: 305154 - DNA, 122 bp, Homo sapiens
tgcacgtgctcctggtggacggcttctcccagccctacctgcctctccctgaggcggccccggcccaagcccaggccgactctctcaccgtctacctggtggtggcgttggcctcggtgtcg

SEQ ID NO: 305155 - DNA, 122 bp, Homo sapiens
ggctcccggggcgggcagggaacaagaggcgctctagaggggctgcgggccagtcagggacgcggatccccggcccgcgctgacagcgctgggagggggttagagaaagaaggctgaggcgc

SEQ ID NO: 305156 - DNA, 122 bp, Homo sapiens
aggcagtggaatgaattccacaactagtttaaaatgcagtgcctcttgcactgggagctccgggggctgccctcacatgactcatgccttccccaactcacctcagacctctcgtccaggcc

SEQ ID NO: 305157 - DNA, 122 bp, Homo sapiens
ggcatactcctccgatgcacagcctgagtcgtcgtcggagatggagtggcgctggaagtccgagattagccgacacatgatgcgttccaggtccacaggcaccgcgtgcactgcatgctcct

SEQ ID NO: 305158 - DNA, 122 bp, Homo sapiens
gtaccggcgacggcgctcgaggtccagctcaaggtccaccgaggcctcgccctccagggacgtgtcgcccatgggcctgaagatcacaggggccatccccatgggggagctgtccatgtaca

SEQ ID NO: 305159 - DNA, 122 bp, Homo sapiens
tctctcagcctttgggccactgaccccatccaaatggcggaaagtgaaagaagccggtcccgtgaagaggtctacgttttcagcccgtttgtggacattctcactgcctgacaaagccgcac

SEQ ID NO: 305160 - DNA, 122 bp, Homo sapiens
gatgtttgcaaggtttgcaggatccctcattctgtaattttggtgggactttccaagctccgtagtggaggattagtcataattaacatgtattaatcatggactttacgggaggtggacct

SEQ ID NO: 305161 - DNA, 122 bp, Homo sapiens
cactgtaacagggaccggagctggtgctccaaggtgtctgtccctcagcatttcctcaaacgccacacgggacatgctgcgcggcagcggcaggatttggggggaagtcagaaagcacctcg

SEQ ID NO: 305162 - DNA, 122 bp, Homo sapiens
caacctgccctgaccaccccagggccaggtactggataacaaggggcagctcctgtgccccggagcccgctgaaatgatccaaacagccaacctgaagcctgctcgccctgcctcacctgtg

SEQ ID NO: 305163 - DNA, 122 bp, Homo sapiens
ggatgcacggctctagcccgtggtcatgtggtttcatgactctctgccttttgcatgtgccgtcctctccacccagactgttgttcctgctttttacctaaagaacccctattcttctcaca

SEQ ID NO: 305164 - DNA, 122 bp, Homo sapiens
tgagcacgcgtgtacacggatgtacacgcgtgcctgggggctggtcggaggctctgtaaccggcctgccgctctcagcaaagctagcatctacaaagcacactaggccaaaagaaatgaaaa

SEQ ID NO: 305165 - DNA, 122 bp, Homo sapiens
cgagcggcctgttcacaattaccggcttattcaggttgtttttctcttgcagagccaggtcgttgggcttcgctggatttttctcctctttctccctggctcagtcccagccgccgcgctca

SEQ ID NO: 305166 - DNA, 122 bp, Homo sapiens
ccccgcgagcccctttccgaggcctttcgggtccccccggttatccccgcccgggcggtgcgcgcccccgctgttcccgcttccgctccagagaggcagggctttccgagcctgctagcccc

SEQ ID NO: 305167 - DNA, 122 bp, Homo sapiens
ggccgctgtaggtgggcacggggcagcacgcgttaaggggctggacggggggtggccatgcgtgtgagggcgctgagcaggggcgtgcccatacgtgtgagggggctgggtaggggcgtggc

SEQ ID NO: 305168 - DNA, 122 bp, Homo sapiens
cacttctcagatggggcggccgggcagagacactcctcactttccagacggggtggtggccgggcagaggggctcctcacttcccagtaggggcggccgggcagaggcgctccccacatctc

SEQ ID NO: 305169 - DNA, 122 bp, Homo sapiens
gaaggcaggagacggagagagggcggagggagggtgaggcaggcccccgggggctcaccgcgctgcttcacctggcccggctgcctcccaggcccagcaccgccggtcccgaggccatgcct

SEQ ID NO: 305170 - DNA, 122 bp, Homo sapiens
cgccgaggccgggcctccctccctccctccctcccgcagcctccagggcgcgccacctcccgcctggtccccagccagctggcgaggctgctgtggcagctcccgctgcagacccagcgcgg

SEQ ID NO: 305171 - DNA, 122 bp, Homo sapiens
ccttttctcggtcttccttcttgctttagggaccggaagagtccttgaaccaaaatagctcggcgggcacttccggggccggcgcccagagttccgggagggtgcaggcaggagagggaaag

SEQ ID NO: 305172 - DNA, 122 bp, Homo sapiens
gcctgaaactcagcttctgcccttagggcactcatcaccccaagcagagaaatctcagggcgctggggctttggagttctctaatggagccacaggtgctgggccaactgacttcctacatg

SEQ ID NO: 305173 - DNA, 122 bp, Homo sapiens
cttccattaatctcaaaggttgccttcaatttcacaaatttaattttaatcccctctaaacgttcaaaacacctctatttagctaatgatgggcaaatataaaacaaaacaaaacaaaaata

SEQ ID NO: 305174 - DNA, 122 bp, Homo sapiens
gaggtaggaagcagatctgtgccatgccctgttattatattaacagccagagctttcacccgatcttatgctgatgccgccaggatgctagtaggaacaggaggtgttatttccctatggac

SEQ ID NO: 305175 - DNA, 122 bp, Homo sapiens
ttcagtggctgggcacagagaggtcagctggagtggtgattgcgggatctggggcaggggcgcagccctggagacctttaaaggaaccaagtgtctaagtggacaagaagtgcaattagccc

SEQ ID NO: 305176 - DNA, 122 bp, Homo sapiens
tgtgagcatgtaactttattgtaaactaatatctaagaggaaaaaaatcaagcaacttcccgaggttttcagactttgccttgcaaattttggggttgagagcaccagtagtaagtgaggct

SEQ ID NO: 305177 - DNA, 122 bp, Homo sapiens
tgaccgatgatgcccactgaccatcaccagcacccctaggatgccaaggcacggcaaagacggcgggcaagcatcagcggactgaccacacggcatttactagatatgctcaaattctaatc

SEQ ID NO: 305178 - DNA, 122 bp, Homo sapiens
agaagttcagctccagtgtccaaggatgagactttgagacccgcctctgccagtagtgaacgtgtcagcttggacagcctcacaccgctgagcctcagagtcatgctttagagaagagaaaa

SEQ ID NO: 305179 - DNA, 122 bp, Homo sapiens
cgggccagctgcggaggcgggggaggggaccccgctttccatggcagtgccgaggcggcgcgcacaaaggcgccgcgatcagcgcttcatcggttcgagtcaattatctgaggcgcggaggc

SEQ ID NO: 305180 - DNA, 122 bp, Homo sapiens
gagaagaatttgctccggccaaattggccgttagccacctgggtccacatcctgctaagacgtttaaaacagcctaacaaagacacttgcctctgggttttgcattgtgtctgctgtgttgc

SEQ ID NO: 305181 - DNA, 122 bp, Homo sapiens
tggatgcaacacccgatccgcctcggggactgggaaagttccctccagggctcccacaggcgctccgcctcctgaactcccattggctgctttcgacgttgtgctccaccctttccgggcgg

SEQ ID NO: 305182 - DNA, 122 bp, Homo sapiens
acggggtcctggcgcgtgatgccccgtcctgggcaccgagaagagtgaacggggtcctggcgcgtgatgccccatcctgggcaatgagaagagtgaacggggtcttggcgtgtgatgcccca

SEQ ID NO: 305183 - DNA, 122 bp, Homo sapiens
tacttgggagggtgaggcaggagactcgcttgaacctgggaggcagaggttgcagtgagccgagactgcagcactgcactcccgcctggcaacagagcgagacttcgtctcaaaaaaaaaaa

SEQ ID NO: 305184 - DNA, 122 bp, Homo sapiens
ggaaagcggctgctctgcggctccaccatgaagcccagcagtgctcagcaaagccaaagccgcgggagaggcttttgaaagttccgtgaaatcttgtggctccaaacatgttcccctcagct

SEQ ID NO: 305185 - DNA, 122 bp, Homo sapiens
tgcgccactcgggctgggtcaggagcggctgcccgaggtccagaggaagtgtgtggacagcgcggccttcctggccggtgagtcggccccgggtcgtggccggtgaggggaccctgagcttc

SEQ ID NO: 305186 - DNA, 122 bp, Homo sapiens
ccctggcggttgaggagccgcggcgatccttggtcttcaccgcagcagccaagcccggcgcgcaccaaccggcgctgctgaaagttggagagctcccagctcgccgatagaattcggcggtg

SEQ ID NO: 305187 - DNA, 122 bp, Homo sapiens
ctgcagctgaacggccgcctggcagacgatgcaactcaggggcaggcgcctggcagccatcggtcagcaccgtgtggagctacatgggacgcccagaagaccgcctctgcctcctctagtgg

SEQ ID NO: 305188 - DNA, 122 bp, Homo sapiens
cataattcactcagacccatgagtttcctgggctgagagtggcctggggggagcagagttcggctgggatcaccctgaaaaggcctgtggaggtgattccttgctcagttgtgcacaaggtc

SEQ ID NO: 305189 - DNA, 122 bp, Homo sapiens
taggaccctccgagccaggtgcaggatataatctcgtggtgggccgttttttaagctggtcggaaaagcgcaatattcgggagggagtgacccgattttccaggtgcgtccgtcaccccttt

SEQ ID NO: 305190 - DNA, 122 bp, Homo sapiens
accaacccattccttgccccatcctccatcctgacctccgtctttgtggtttctgactcacgcctcattcactggttttcagccttactttgcctgggcttgagtcactccctgtagtcctg

SEQ ID NO: 305191 - DNA, 122 bp, Homo sapiens
tgataaggcctcgtagcctgcgcgggcgagataaagccagcacgcgcctgtcctcaatcccggccgccatcaacatgcagacagcctgagcgactggcattccagatagaataagcacgcac

SEQ ID NO: 305192 - DNA, 122 bp, Homo sapiens
gtcggctgctgagggggccatctgtttaagcaacgagaagtacggagctaaagaggcacacggtattcaaacatgtgagttccctgcaccagggcttctggtcagttcttcaatcaggagag

SEQ ID NO: 305193 - DNA, 122 bp, Homo sapiens
atccacacacaacaggagggaaaacccagaagtggcctcctggtcccctacagccccatgcgtatgttatgcagtggatcctgagctttcctgtgacccagtgggggtaatgcagagactaa

SEQ ID NO: 305194 - DNA, 122 bp, Homo sapiens
gcggcccggcaggctcgcgtcagctccccggccggggccgccagcgcccgcggctcggcgcgctccgcaagctttagctctcgctcccccgtccgaccactcgggcgccctgcagtctcgcc

SEQ ID NO: 305195 - DNA, 122 bp, Homo sapiens
cctcggagggcagcgccaggctggagctgtccagttgtcccaggatctgctggcccaggacggtccggatgtagccgtactcagctggggcgccgggggctgccatggggccggtgggggcg

SEQ ID NO: 305196 - DNA, 122 bp, Homo sapiens
caggatataaccccaccctaagttgagaagcatctatatataattatgatccccatttttcggatgtagaaaaatgaggtacacaagttatagcttgcctaaattcacccagctcataagtg

SEQ ID NO: 305197 - DNA, 122 bp, Homo sapiens
gattggattcctcccaaatttcctaaaaagggagccgcgaagggcgctgggcagtgtggccgccaacttccaccccggcaagcccctctgtcctatgcagaagggcgctcaagggaaggaag

SEQ ID NO: 305198 - DNA, 122 bp, Homo sapiens
ctagagttgggggactgagcggtgggccaggacaagcaacggatgaagtatctcggaagccggagaagggtggtctggggctcttgggagcatgcgcggggtggggcggtggggggactgag

SEQ ID NO: 305199 - DNA, 122 bp, Homo sapiens
ctgaactgtgatccacccgcctcggcctcccaaagtgctgggattacaggtgtgaaccaccgcacccggccagaaccctggttctttaggacagtgacagcccagagtagtcagggccatca

SEQ ID NO: 305200 - DNA, 122 bp, Homo sapiens
tgggccaaggagatggcctcgttgtggggggcccctctccctggcagagcaagccgtccacgccgacttcagaaacgccctgcagtccatgacccccgccctccttccgcaaagcccaccag

SEQ ID NO: 305201 - DNA, 122 bp, Homo sapiens
aaccaggtaggtgagccttgggccagggcccccagcctctcagaagccgtgtgtgtctctcggtccggaggatgggctcactgagcggccgtatgtgtggggagtgtgagtacccccaccct

SEQ ID NO: 305202 - DNA, 122 bp, Homo sapiens
gtcatcttagttcctccctgcactagcaagcgctcagcctctttctctgaaattggtttccgccttccccagggagctgtcacaggatatgttactatctgcctggggataaaaaccccatc

SEQ ID NO: 305203 - DNA, 122 bp, Homo sapiens
tcttgatacaaatctgccagcttcgtcatcacggggacaagaacttgctgtctctggaatcgaagtaaaacaacttgggaaaaagatctgatcatccagcattagccaggtactatctcttt

SEQ ID NO: 305204 - DNA, 122 bp, Homo sapiens
aacaccacactttgcattacaaatctatccttaagaatctcagctggactaggtggctcacgcctgtaatcccagcactttgggaggccgaggcaggcagatcacctgcggtcaggagttca

SEQ ID NO: 305205 - DNA, 122 bp, Homo sapiens
gcgctgctggtgagtggttcggctttgtttcagaccactcaaagaaatcatctagaacaacgtccgcaagactggcggtgcaactgtcccccttggaacctctcgggaacacagcctctgtc

SEQ ID NO: 305206 - DNA, 122 bp, Homo sapiens
ggggccccagcaaatgtttccttaacgtgggaccttcagaaggctctttcaggctgggcgcggtggctcacgcctgtaattccagcactttgggaggccgaggtgggcggatcacttgaggt

SEQ ID NO: 305207 - DNA, 122 bp, Homo sapiens
aaatggctagctgcgccaagaactcggtgagctgcagagggtgaataaaccacaaccctgcgctgatgccacaagtgacaatgaacacacacacatacaattccaggctctaatgacagaga

SEQ ID NO: 305208 - DNA, 122 bp, Homo sapiens
ggaatgctgctctccagagctgggccggcgactggcagagctggagcgcaggctggatgtcgtggccggctcagtgacagtgctgagtgggcggcgaggcacagagctgggaggagccgcgg

SEQ ID NO: 305209 - DNA, 122 bp, Homo sapiens
catgctgtgttttctccaggctgtttcttaagcctgtcctcttttatgttcttgcttacccggcctccccgggagggcaaggaaggtggggtgggcctgcagcctttctccgcggagctgtc

SEQ ID NO: 305210 - DNA, 122 bp, Homo sapiens
tctccccgccccccgggtgtgtcagatttttcagttaataatatcccccgagcttcaaagcgcaggctgtgacagtcatctgtctggacgcgctgggtggatgcggggggctcctgggaact

SEQ ID NO: 305211 - DNA, 122 bp, Homo sapiens
gcggcggacgcgtcttcgaggaccccgggcgtcgggtctcaggtgcacgctgagcaaccgcgactcccgctgcctcggccccacccgggacccaatgccgcggtcacgcccccggcgcgccc

SEQ ID NO: 305212 - DNA, 122 bp, Homo sapiens
ccctggggagagagagggcggtgcccaagccaggaccctgcgggccggggctggaggaggcgcaggtcccggcgtccatgtgcagccctgcggccggggcgcgagatctccccgcaggcggc

SEQ ID NO: 305213 - DNA, 122 bp, Homo sapiens
gcacgtgaaccttcctttcacccgggtgcccagagactcctccctccaagccttcgggagcgctagtgattcagggaataggaagcagtaggtgcaatataattctgttaccagaaggcaac

SEQ ID NO: 305214 - DNA, 122 bp, Homo sapiens
attttctcccagaaggtgacgtgtataaagcaccgactcctagcaaggaaacccaaggggcgctggacgtcaaagaggagcacaatgtgcagctggaggtgcctgtggaccaggtgggtgtc

SEQ ID NO: 305215 - DNA, 122 bp, Homo sapiens
acctggcagcggcgtccggtcccggaaccccttcctgttcggggtcccgggaccagcccccgcctgggccctcacctggacccccacgttaggccttgggactgcactcaggcccgagatca

SEQ ID NO: 305216 - DNA, 122 bp, Homo sapiens
ggattttctcagctgtgtccaccatggtatcatgaactcagtaccaggcttggcaaaaagcgtgggactccttagaaccaggtatgattctcccaaacaacccttgctctgctctgaggctg

SEQ ID NO: 305217 - DNA, 122 bp, Homo sapiens
gctcccggtgagaggttccgggccacaggcccaggacagcaggagggctcctctgcctcccgcccgtcctgtcctcaccagctggaccctcctggtgttgcaccggctgcacagggccgtcc

SEQ ID NO: 305218 - DNA, 122 bp, Homo sapiens
tcagagcgttaaagaactggaaaggacctaggattcaatacaattctctcatctcgcagacgaagaaaatgaagtgcagaggagctacgcaatctacgtaagtcacatagacacacattgga

SEQ ID NO: 305219 - DNA, 122 bp, Homo sapiens
ttgaacaatattctagagcaccatgaaagactcaggagggtaaagcactagcgcatgtgccgactgagctcccggctggtggaggcagagaggcggcagggcagagccgcggcgtgggcagg

SEQ ID NO: 305220 - DNA, 122 bp, Homo sapiens
tttgccgagggggtggggccttcctagggagtgggcggggctagttggtagggctcactccgcggtcctggtgccgcgtgcaggtcggtgcgcgcttctcccgaggtggaacgggcggcagt

SEQ ID NO: 305221 - DNA, 122 bp, Homo sapiens
gcccaggttgtccagcctggaagtggcagagaccagctgaaatgcagcctggcttacacccggctgtctgagctccccctctcatgtgctcatagcaggttacatcttccctacaggtggag

SEQ ID NO: 305222 - DNA, 122 bp, Homo sapiens
tccagaagaagccaagtgatctagttcttgggaagctttcattttttaacactcaagttacgtaagtacccacaactgttttaactgattttttttttttttgctgacattgtagaatgaat

SEQ ID NO: 305223 - DNA, 122 bp, Homo sapiens
cgtatcaaaaaaaaaaaaaaaaaaaaaaaaaaaaaaatctcacttaggaatcttggataacggatgaagattgtgctaactggacgtggcaacatccatataaaaagcaagacagtcagtca

SEQ ID NO: 305224 - DNA, 122 bp, Homo sapiens
ctggccgggtgctgctctgggagaggtgcccagcaggccatctggaacagcagggctctgcggcaggaggacgcaggtgtgacctcagctctgcgcccaccaactatgagacttcagcaagt

SEQ ID NO: 305225 - DNA, 122 bp, Homo sapiens
cagttagttagctgtccaaggcaggttcggttctttcgttggattgttccctgtgctgcccgtggggccattcacagaagggagctacgacggagggaggctcgcagccccgccagctgaca

SEQ ID NO: 305226 - DNA, 122 bp, Homo sapiens
tgcgcccgggccgctgtagctgctccggggccagggcgctgggccagctctggcgcccggcgcttgtgattggctgcccccagcctcagcccagcgcgccctcccacccagggcgcagttgg

SEQ ID NO: 305227 - DNA, 122 bp, Homo sapiens
gaaactgcgagtcctccagaaagacacatcgctgttggggtgtccaacctttctgggattcgtagtttatacccaggtcctggttatattttagttaagagttctaataagcagctgtttaa

SEQ ID NO: 305228 - DNA, 122 bp, Homo sapiens
aagaataaaaccgttaccccaggatctcgcaaagcgagaattgactggtaactgccatcacgcttccaaggctcatcattcactgggctactgacctgtcaatcacttctgctaggccaatg

SEQ ID NO: 305229 - DNA, 122 bp, Homo sapiens
gtttgtcaacatgtcaattgacttgcctccatctgctttttccccatgccaggacggtgccggctgaaagggaagtgtcagctgttcttctgtctttaaaaggcagcaaagaaaaaagcgca

SEQ ID NO: 305230 - DNA, 122 bp, Homo sapiens
ccgcgatccacccccaaatccaagatccacccccaaacccgcaatgtagctcagaatccgcgatccagcccggtccaccacagccttcagcagcgacactcgcagactccgacctctcagac

SEQ ID NO: 305231 - DNA, 122 bp, Homo sapiens
tccggaccggggatcccgcagaagccaagggtgtagccacgaggactcgggaacccgaggcggcccagcagatgcgtgaggaacttcattttctcaggagtgggaggaggagcatcctggca

SEQ ID NO: 305232 - DNA, 122 bp, Homo sapiens
gtggctgtcgctaaggttggctatttgtttcagttaactgaacacctaagatggtccactcgcactgctatcatctgttgaccagagtggcctcctgtattaactgtattttcatgttttct

SEQ ID NO: 305233 - DNA, 122 bp, Homo sapiens
aaaattgtgagatgcagcaaagagcattatgtgagagcaatctataagcttagttgtttacgctggaaactcagaaaggctgaaagttaattaagcatacaactcaagttagaaaaaagtag

SEQ ID NO: 305234 - DNA, 122 bp, Homo sapiens
tttctaagattgtgttactaatggtttttcctgaggttttacaaccagtagtggtgtctgcgctgtagtcaagtgaaggttctttgatctaaggctatacttgtcagttgctgtttattgct

SEQ ID NO: 305235 - DNA, 122 bp, Homo sapiens
cagggagtgactgcaaagtcagcagcacatgggccagggctggccagcctctcagctccacgcacccagacagaagcatccacatctgcactcttcatagcagagacctctccctgttcagg

SEQ ID NO: 305236 - DNA, 122 bp, Homo sapiens
gagcttcttcaaaacatagcaccagccccagccaggagaaggaagtgcacacgcctcacccgcacctctagagagttgctgggcatctctcaaccgcgatccccaacaccattcttccccca

SEQ ID NO: 305237 - DNA, 122 bp, Homo sapiens
agaaataccgttttgaaacaggcagctgttatcctagtgctattcggccgatacatcctgcgttaaattctatgggttcaataaacaaaattgccacattcgggcttgccccccacctaacc

SEQ ID NO: 305238 - DNA, 122 bp, Homo sapiens
ctccgacgggtgcgcggacagcacctggcactgaggaggtgaacgtgactcccacacacgcgggactgaaccagcgccccagagtccccagaacacgcatgggcccgcggggccgcagccca

SEQ ID NO: 305239 - DNA, 122 bp, Homo sapiens
accacagctgcccaagtttaggagcccgcactcgtgagcgatggctactccgcacagccccggggtcctctacggaaatccctggcacctatcagtacccctaagggaggtcgctcgttacc

SEQ ID NO: 305240 - DNA, 122 bp, Homo sapiens
cgcccccttagtcttctagtcgagccggccgaggacccatcctgggatcgggctgtctaccgcaaacgcctgatcacaaggtccgaagtgggggctcatcctcgccccatttcccgtaaata

SEQ ID NO: 305241 - DNA, 122 bp, Homo sapiens
ggacctcgtcgaaagcccagatgcgagaatcctgctttgcagtcggaggtagagggtccgcgaccgtggactggagagaaggcgccgcacatcagctagaaagactcaggagtccctatcac

SEQ ID NO: 305242 - DNA, 122 bp, Homo sapiens
ctgcagaaagctgtggcaagcaaaggataggctagagagagacaggactaataaatgtgtcgacttcagatacattcttgtgaaggacagcaaagaataggtggccttttcacctcctagag

SEQ ID NO: 305243 - DNA, 122 bp, Homo sapiens
tacaggagcgacctggcaattcccgccgccggccgccagaggaagctgctttgctgctgtcgttgcccagcaactcgtagcccggaagcagtaccccgtctcgctcggttccgcggcggcca

SEQ ID NO: 305244 - DNA, 122 bp, Homo sapiens
gggactaggggcgaatccgagggggcggagcagggctcggggtgcggtcgggggcgtggccggggcgcgctgcggccatcttgggggcgggcccggggcggagacgagcccgaaggggcggg

SEQ ID NO: 305245 - DNA, 122 bp, Homo sapiens
cttccagtttgtggtggtggaagaacagtatgaagagtcgttttggatctgcgtggccagcgcttcggcccatgctgcaaacttggtcgtggtggcgatcagtcaaattcccctccctgaga

SEQ ID NO: 305246 - DNA, 122 bp, Homo sapiens
ggttggactgttgaccagctgaattccagctctgtcctgcagctgatcacccttctttctcggcgtgcccaatgctcttacctctatctagaatactctttccagctccgtggtgaggtttt

SEQ ID NO: 305247 - DNA, 122 bp, Homo sapiens
ccatctctcctcgtcgatctggaaggctttctgaaggaactggggtttgtgtccctggcacgcccgggacctgcgtggggctcagcgcgctgccaggcgacctcagcagcccagagcttcaa

SEQ ID NO: 305248 - DNA, 122 bp, Homo sapiens
atccaggcctgcgcggactttcctgctccgggctttagaggtagctgagcggctgcgagccggactgcggaaggggaggcagcgggtggctaactgcccggctcccggcccgtttgaggtgt

SEQ ID NO: 305249 - DNA, 122 bp, Homo sapiens
ggcggggaaggggaccctggccccattgtagggggacgcccggagaacgaggactctcctcgcttcccagacgtccccacccgccccgccggccccagtcccttctactgcgagggcacgga

SEQ ID NO: 305250 - DNA, 122 bp, Homo sapiens
taggctcttcaggccctaccgtcggccggcaggccgttcgccccgcccacagatcgctcccgctacttctaggtcctccgccggatttccagcgccgcgtccgactgaccgcagacccctcc

SEQ ID NO: 305251 - DNA, 122 bp, Homo sapiens
ggggccgagcacgaaagggagagttggagggcgcttcctcgccgggtgttgcggtgtgagcggggactggtgagtgtgtgctgtcttcagagagagaagagcagttttcagggtgagtagcc

SEQ ID NO: 305252 - DNA, 122 bp, Homo sapiens
cgggcgtccgggaacgcccggaaggggcgaggccagcggcggggcggggcttatggagatcgtgagctgggcgtgaggagaaggccgggttgggagctgcgaggggccgggtttagcggggt

SEQ ID NO: 305253 - DNA, 122 bp, Homo sapiens
ctccaaagccgtgagtagccacagctcaccacccgggactttgctgcattccaagtgtagcgtttggagactaacgagttgtggtttggcggtttgagtctggaaaatcgccaaacgttttc

SEQ ID NO: 305254 - DNA, 122 bp, Homo sapiens
tttgccactttataacaagggtagcttttcctccagtccccaacagcatgttcctaatttcggactgaggcctcatcagaatggcctttattgtctgtatttctaccaatattctgttcatg

SEQ ID NO: 305255 - DNA, 122 bp, Homo sapiens
tcggtctccttgcccaggggctgcgtttgaggggctgctctctcctgataggtggggtcccgagttcctcctagcttttcttcagcccgggccccaggataggggtacaccatgtccctgcc

SEQ ID NO: 305256 - DNA, 122 bp, Homo sapiens
gtggagggagaggtgtccgtgggaaccggggccagagcaagttccgggtgggcgtgggctcggcgggcttagcacctgggccagcagctgcggagggggcaccaggtcccccggcactgtgg

SEQ ID NO: 305257 - DNA, 122 bp, Homo sapiens
tacattagctgtaagcaggataataactataatatctaaggaattaagactggacagtagcgatttgttataggcttttgctgcagtatgaagaagatttctgtagttgaagataatccctg

SEQ ID NO: 305258 - DNA, 122 bp, Homo sapiens
cagccatggaagccagcagtatcgagctctcacagtgccggaactcacccagcaggtcttcgatgccaagagcatgatggctgcctgtgacccccgccacggccgatacctcaccgtggctg

SEQ ID NO: 305259 - DNA, 122 bp, Homo sapiens
ggggcccgccatccaaccccgcgtgccgaaggcgcccatccctattccactcagattaaacgagagaggctgaaaggtttaaacgctttattgtgcccaaaaaaaggcccatggaatgaagg

SEQ ID NO: 305260 - DNA, 122 bp, Homo sapiens
actccacgttgtccagcaggatggggcctcggccttggccaaaggcaaggggccgtggcacgggcagtgccaggccacagcccagctggcgacacactacgttggcgtccaccacgtcccag

SEQ ID NO: 305261 - DNA, 122 bp, Homo sapiens
gggggtacagtgggctgtgctccgcaaacggggagcaggccgggtctggagaggcctcggcgctgctttcccaccttgggctacgctccaggctggcgtggggcttgaggacatccttaaat

SEQ ID NO: 305262 - DNA, 122 bp, Homo sapiens
ccgagggaggccgcaggcctactggggtttcctgctgggggtcgcacccggacccgcggccgggacggctctgcaccttcgcggcaccccgtgtgccaccctgaatcaggccccggcagccg

SEQ ID NO: 305263 - DNA, 122 bp, Homo sapiens
cgtgggcagatggcgaaggctgcgaagggtaatgagcgcttcctgaggactctcagaaggcgggggtggctgggtgttttggctcacgcctgtaatcccagcactttgggaggcagaggcag

SEQ ID NO: 305264 - DNA, 122 bp, Homo sapiens
ttctggacagacttggtctaaatacagccacgtgctcggggctgctgtgctccagctgtgcgtttcggagcggtttgcgcgcacgcgcacgtacacacactcacacgggcgcgtgcctctgt

SEQ ID NO: 305265 - DNA, 122 bp, Homo sapiens
acaccaaggcgtttcaccttctacccttgcgtcctggctactgagggtttcacctcaggtcgacactactgggaggtggaggtgggcgacaagacccactgggcagtgggtgtatgccggga

SEQ ID NO: 305266 - DNA, 122 bp, Homo sapiens
accctcagcgcggaggttgccacggttctggagcgaagtggaggtgccgccctgggcgttcgggtctgtgtgagtctgtgggagtgacagaatgtctcggcttttggctctcgcagacgctc

SEQ ID NO: 305267 - DNA, 122 bp, Homo sapiens
aaacaaagacaaaaaagctaaatccggggaagttatctccatctcctcccttttcttgttcggccccctccccaagaaccgccgggtcgggatagcccccggctactttctcacccggcccg

SEQ ID NO: 305268 - DNA, 122 bp, Homo sapiens
ctcaggcagtccacccgcctcggcctcccaaagtgctgggattacaggcatgcgccactgcgccagaccacctgccgtcttaaatggtagatggcaaccctatctaaatagatccgtcccta

SEQ ID NO: 305269 - DNA, 122 bp, Homo sapiens
tgttttgcctgtaaaaatttcagtgacctctttattctctttctcaggttttctagagtccgtgtttataatagactaaccagctccctcagcctttccatccaatgtgagcaaaaacataa

SEQ ID NO: 305270 - DNA, 122 bp, Homo sapiens
agctgggtctcgggaggtgctgtgcggacccggggtcgacctctgcccagttgccagtcccgctgtcagcatgcgggtccgaggaagaggcccccagcaggtccagggctgcagcgtcagcg

SEQ ID NO: 305271 - DNA, 122 bp, Homo sapiens
ggcgggggcgggggttggggggggtgggtcggagccgcgcgaaggcgcatgctcagtctccgcatctgctccttcatccagtgccgcagccggaaaaccgcagcggcggcggcggcggctga

SEQ ID NO: 305272 - DNA, 122 bp, Homo sapiens
aggaagccactcagatggccggccctgcacagggcctcatcctcctggcctccccgaggccgtgccctccatgccatgggaagacatggggcccaggacactcaccctaggccagcccagga

SEQ ID NO: 305273 - DNA, 122 bp, Homo sapiens
cccaggctggaaaaccagaccgcgttgggggagccggaaatagccccgcttgctgcggagcgtcagggcgggggcgccggcgggaatgcaggcccggcaggccgtggctttgagagagccac

SEQ ID NO: 305274 - DNA, 122 bp, Homo sapiens
gtccagactggagaatttggagttctaatccaaccagtgccagagcttcctggagctgcccggtagcagggatgtaggccacaatgagagttttgccacagccatcatctgacctctagctg

SEQ ID NO: 305275 - DNA, 122 bp, Homo sapiens
cgccccgggcccacaagggagaacgactatagcttcttctccaggacagaaggcctagaacgtgtagaggtggtgaagggggcggtgaaggaggagggccccaaggcggcagcggcggaggt

SEQ ID NO: 305276 - DNA, 122 bp, Homo sapiens
aatcatcttccaatagccccatcttctaacaccatcaccttggggttaggtttcagcacccgaatttgggggggtcacaaacattcactctcttgcaggcgggtggggagataaaaccttaa

SEQ ID NO: 305277 - DNA, 122 bp, Homo sapiens
ggggtggaccggaccagggtaggggcaatgtcaggagaaggggacactcagatgcaaagccggtggggacctgccaagaagccagcccacaaggccatggactcctccacgccatcagctgg

SEQ ID NO: 305278 - DNA, 122 bp, Homo sapiens
ggtgcgggatataatcttgtggtgctccgttttttaagcccgttggaaaagcgcagtattcggggggagtgacccgattttccaggtgccgtctgtcacccctttctttgactcagaaaggg

SEQ ID NO: 305279 - DNA, 122 bp, Homo sapiens
acgcctggggagtgacgcaattgcacccctgtgcagtgatgtcacggcaggtgcggccagcgttccgagtcgaggacagttggcgacactgaaaattcagcgtctccgggagtctctctctt

SEQ ID NO: 305280 - DNA, 122 bp, Homo sapiens
gagcgcttggcctctgagactacccggcagaagggacgtccccaaatgacactcggaggccgcctccctgggctccggtgctcggtgccgggaggagcggcacggctttctaccccgcctca

SEQ ID NO: 305281 - DNA, 122 bp, Homo sapiens
agcaaaaaataagtccctttgtggatatttggcaatgaaatctggggttgcttgttactgcggcataacctagtctaaactgactgatacatacactatatgatgtgtttcctctggaaact

SEQ ID NO: 305282 - DNA, 122 bp, Homo sapiens
agacccccatggcctgctggagctagggggcgccagaagccttacttctgtgtctctggccgatgaacaagagagcctggatactgctgcagagcagaggctgttccggagagcagggctgg

SEQ ID NO: 305283 - DNA, 122 bp, Homo sapiens
cccggccagccctgactctgttcatcagaacctgccctcagtgaacagtttgggagggggcgtgtgatccaggctccaccaacccaaggcacccttgagacttggctggagtgaggaagaat

SEQ ID NO: 305284 - DNA, 122 bp, Homo sapiens
cctggcccagtgggctcggtagtgcccagctggcaggcctgaggtgtacatagtccttcccggccatattaaccacacagcctgagcctggcccagcctcggctgccagaggtgcctttgct

SEQ ID NO: 305285 - DNA, 122 bp, Homo sapiens
gccccgccccaggccccgcccccaaccctttagctctcaccatcgcacttgaggccctggcgcactaggccgaagagcatctccccgcagtgatcacagaaggcaggcgcccgataggagtg

SEQ ID NO: 305286 - DNA, 122 bp, Homo sapiens
ccgctacactggccttcatttgcatgggatccttctttttatgcagcctcagtatcagaacgagccaggaggttaacggagcgtcgtcgtgcagcgtcccgggacaccagggcccagcgcgc

SEQ ID NO: 305287 - DNA, 122 bp, Homo sapiens
acctcatgctggtggattgctcaggatggtaagcattcctctgccccatgtgctgagtgacggtgtcttttggatttccaagacccataatgagctgtttctcatgaggccactaatggcat

SEQ ID NO: 305288 - DNA, 122 bp, Homo sapiens
accgacgcccccagaatcatgaagatcatggtgttcgcgctcatggacatcgggcggggccgggccgggccggagcgccgccccccggccccggcgcccccccggccccggcccgatgctga

SEQ ID NO: 305289 - DNA, 122 bp, Homo sapiens
aaggacaggggcgtggtttagaggccagggaggcgggacttcacttatagttgtcttaagcgtgcccgaggagcaggggacacattgaagttctttttctagggaaacaaacttcgaaaagc

SEQ ID NO: 305290 - DNA, 122 bp, Homo sapiens
cctgcctttttgctccttaatctggaccctctgttccccaggcctcccttttccagccaccggttctcctgaccccgagtgtggggggtgacttcagtctcctgacatccagtgttctctcg

SEQ ID NO: 305291 - DNA, 122 bp, Homo sapiens
ccactttgtgaatatctgtatcttagcatttaatgtttttatcgaagtgttctgtttatacgtatgtctcagctactaaacagtaaggtcaataaggacacaatttttaaatccttattttt

SEQ ID NO: 305292 - DNA, 122 bp, Homo sapiens
aaaccagtgtctggcgagggcagggcttctgggacagcacctgagcagcagcagcgggtgcgccaccgccagcttccggcaggccatgctggcatccgcccctcggttctccaacgcccggg

SEQ ID NO: 305293 - DNA, 122 bp, Homo sapiens
tccaatcaggcacgcagcttgagcggagaggacggcttccgggatgtggcgggatttgtccgcttctttgtctttggctgccgctggaactccgggtctcgtcttcactgctctgtgtcctc

SEQ ID NO: 305294 - DNA, 122 bp, Homo sapiens
tcaactactgaggaggttacggcacaaaaatgtcatccagctggtggatgtgttatacaacgaagagaagcagaaaatatatcctttccggtgttgggaccgcggggcctccgtgggagggg

SEQ ID NO: 305295 - DNA, 122 bp, Homo sapiens
gaggtaccagacatatggccctcgtgtttcgtaccctgctgcggccaccagcaccgcgggcgtgcctgccttcgaaaggaatcaacgaatccattatgttcacacctatgagacaaagtggc

SEQ ID NO: 305296 - DNA, 122 bp, Homo sapiens
cacagggtgcagagatgcagccccctagctctgcctcacactctggccccgtccaacccacgtcacacacacatgaggatctggttgtaaagagaaaggggagggtttttctcttctcctac

SEQ ID NO: 305297 - DNA, 122 bp, Homo sapiens
aagggaaagaaagaaaagttattacgcgccctgccgtttgcttagcagggttcacattttcgcggttttgaattgagggactttggagtttggcccgggagccttggcggtttgctgcgaga

SEQ ID NO: 305298 - DNA, 122 bp, Homo sapiens
ttatggtgcatctgctagaacagggggcccacggtaccgtccatggcccgttaggatcggcgccacacagcagtaggtgcgcggcgagagttatcgcctgagctccgcctcctgctagatcc

SEQ ID NO: 305299 - DNA, 122 bp, Homo sapiens
ctctgaactctggccaggaaggggcgcgaggggaaggccccgggggaaggcgtgtccccgcgccccgccccgccccgcctcggaaagcccccgcggtcccgcccaccccaggggctcgctca

SEQ ID NO: 305300 - DNA, 122 bp, Homo sapiens
ggctgggcctgatcagaaaactctcccttagggttttcagtcactggcgaaacttgagcccggcactgaggataggatgttaaaatgtgactctgggccaggcggcggctcatgcttgtcaa

SEQ ID NO: 305301 - DNA, 122 bp, Homo sapiens
gcagtggtggccctgggcacctcgggcggcaaggattccacggtgctggcacacgtgctgcgcacgctggcaccgggcctgggcatcttactgcagctcatggctgtagacaagggcatcgg

SEQ ID NO: 305302 - DNA, 122 bp, Homo sapiens
ccacccaagcctcctctccttacctgctcatacttctccagctccgagtggtatatgtgacggatctgggcaagtttgctgcgatagtccgagtgttcgatggagttgtcaggggacacacc

SEQ ID NO: 305303 - DNA, 122 bp, Homo sapiens
gtaactgacattgaggtacggatacccttgagacagcaggattggctggttgctgtgcatcggtagaccagctgaaagaaaatggactcgcattactccgacacgtttcctcttggtgggtg

SEQ ID NO: 305304 - DNA, 122 bp, Homo sapiens
ggctcggacggagttcatttgccgggctgaggtggcggcgttggcggagggacacacacacgcacacgcacagcgagcttcggggcaggagaaaggggtggggagagtgggagaggggggag

SEQ ID NO: 305305 - DNA, 122 bp, Homo sapiens
gtggcttctcccgcaggacccggtgcgccagaaaactctaggcggcgccacgcttggaagcgcaaggtccattcatcagccgcgccccagcgtctaattggccttttgtttattagtgtctg

SEQ ID NO: 305306 - DNA, 122 bp, Homo sapiens
tggtgccacctccccggtgcagcggctggcgatcggccgcggaggtgcgtgcagggcccgcgccgccgccggtatctccaccgccaacacctcagccactgccactgccacagccacacgag

SEQ ID NO: 305307 - DNA, 122 bp, Homo sapiens
tttattcactcattcagataacttatcgagtaccagtttcatgccaggtgccgttctgggcggttcattcaccgaaagccaagcttttggtttgggtttcagtttaaatctgtctctgcaaa

SEQ ID NO: 305308 - DNA, 122 bp, Homo sapiens
tatgcattgtgccacagccgtgagcttctgttcctgtttcatctctgatctgtgggcttccgaccacctggatccaggctgaacacacggctcctttcagaattgtgcgcgttggttgagtg

SEQ ID NO: 305309 - DNA, 122 bp, Homo sapiens
gacgatgctcaggaatggctcagcacacagcgggcatgcggcaaatggccttttcttccccgtgtccgagcttggctttgtggcccatcccaaagtccctgttgtctcccctctccctcttt

SEQ ID NO: 305310 - DNA, 122 bp, Homo sapiens
gaggccggaggctgcatgcggctgctggggccccggttccagggcgggtgggggacccatcgtctgatgccaaggggcgtggtaggggcggctgcctcgcagtgtgcggtggtcagggctgg

SEQ ID NO: 305311 - DNA, 122 bp, Homo sapiens
cctctgtcccagagctggacaggggcgaagctggggctcaagtctggtctgttaagagcccggctgatgtcccctttgtgcccacagaggtggccgccaagttctgccggctgctggagcct

SEQ ID NO: 305312 - DNA, 122 bp, Homo sapiens
tgctgggattacggacgtgagccaccgtgcctgaccatagcttctgagcacacacagaaccgcctgcctctgtatctaaactgtgggctgaaatgctgctttggcgcagtctaacagaaact

SEQ ID NO: 305313 - DNA, 122 bp, Homo sapiens
aatgcaaatacaggacaagaaacagggacgtgtgcaacagggacctcacactgctgctgacggagggaggggtacagctctagcgtgggagggcgcgggaaggtgacttggagagggagcgt

SEQ ID NO: 305314 - DNA, 122 bp, Homo sapiens
tttcatgagggcacttgctgtgaatccagtggcttaagcccagccccatgttgggacccgcgttccccgtcctacacgacgccgtgatgcgtgtcagcaggcagcctgctcagtgggcacgc

SEQ ID NO: 305315 - DNA, 122 bp, Homo sapiens
cctagggatcatctgcgtgctctgtgcagagtggagtgcaggccaggaccgctcctttaacgttttctcctgtggacggcgtgtttggtccttcagcccattgtttgaatatgtggttgtaa

SEQ ID NO: 305316 - DNA, 122 bp, Homo sapiens
aggggtgaacacagcggtggacttgcgggctgggaggacggccctgctgggctttgggttcggtggtcgtattggtctttctctttgccccttttcttttctttctcccttgttaactgatg

SEQ ID NO: 305317 - DNA, 122 bp, Homo sapiens
attctgtattcagcttcttacatttcttttttttccttctgatactagcttttggcttcacgttcctataaatttagaaataaggtctctaaagtggaatatagaattgctgtataagatca

SEQ ID NO: 305318 - DNA, 122 bp, Homo sapiens
gggggtggggtggtccattagggtcccctggcgagggggcggctttctagtgtgtgagggcgacgccctagaagctccccttcaaagttggccccacgcgctgaatgtggaaagttgactgg

SEQ ID NO: 305319 - DNA, 122 bp, Homo sapiens
tgcagacgtcagccaccgtaccaggccaacgggctcggtttctatggttttgtggggagacggctgagggaaggtcggcttccggcgtcgcgctgcaaacgtctcgctgaggtcatccttta

SEQ ID NO: 305320 - DNA, 122 bp, Homo sapiens
caggcctctgcctagcctgagacaggagtaggaaactgaggcattcacacttttatgtggcgatcacagttcctgcagactgtagcagagctggggagcaggaaccagaggtatagtcccac

SEQ ID NO: 305321 - DNA, 122 bp, Homo sapiens
atccagccctgaggatcccgaagaaagggtggaaacaccctggatgtgctaagctgtggccgggtacactcaagtgttaattttttggagtcaaagcctccctcagtcaaatcgaagaaact

SEQ ID NO: 305322 - DNA, 122 bp, Homo sapiens
tccaaacccctccagcactgaggtcttggccacaactgtcccagtgcagccccccagggacgggagggcagaaagcagccttgctcaatgtcctgttacaaggcagggacgggggtggggcc

SEQ ID NO: 305323 - DNA, 122 bp, Homo sapiens
ccgccgtccggggcgcccgcggctttcgctctcccggcccgcgccctggagtgcggctcccgctcccggccgccacacgcagtctaaacacgcggcgctcgccacctccctgcccgggggtg

SEQ ID NO: 305324 - DNA, 122 bp, Homo sapiens
caagggaaggggactttaggatgggctgctccaaaccactggcaaactgatattgtccaacgccagcctcccctgctccctccaagggccccggggcaggctgggagcctctgcacaaatcc

SEQ ID NO: 305325 - DNA, 122 bp, Homo sapiens
gagctgtggttcctgctgctgtgtcctgcactactccacatttcccagttcagaggtgatcggagccccctctaatatatgccatcccagggcggggcagcagggcacaaggccacttcagt

SEQ ID NO: 305326 - DNA, 122 bp, Homo sapiens
ccaagctgagcaggtgggagtgagagggcctgagcgtgttctaggccctcctgggaatgtcgattgaattcagggtgccctgcagaagaaagtgttgtgctggggaccctgaagggcgagag

SEQ ID NO: 305327 - DNA, 122 bp, Homo sapiens
atgtggtctgagttagaatggtctgatttgccatgatctatttaacatagcttgatttagcgtgtcctgtgttctgaatttaaaactcacagttgtgaaactgatcagtaaaaaataagggg

SEQ ID NO: 305328 - DNA, 122 bp, Homo sapiens
accctgaacttagtgaagtttccttcacttggttttgctcttcaactcggaccccgaaaacgctctaaacgctggcggaagtcacgcagagatgggctagacgctcaaccccggtctcttcc

SEQ ID NO: 305329 - DNA, 122 bp, Homo sapiens
agggagtaagtctaagacctggcttcgagtacattcggtgaaagaaagctcattgggagccgcaattttggctagctagtgaaaaaaatcaccgaatgcccctgcaggggttgccaggactt

SEQ ID NO: 305330 - DNA, 122 bp, Homo sapiens
taattaaataggcttttgtggattggcctggggacttagccgccgtatataaatgttattcgagtgactgtacagcattgtttccatgcagaaaagccctcggaactcagagcatctgacca

SEQ ID NO: 305331 - DNA, 122 bp, Homo sapiens
gccaccacacccggcctggtttcagaattttcttgccttagttgcatcatacctttcaatcgacttacattttcaaacccaagaaacaaaatttaacacactcacatatggaataacattaa

SEQ ID NO: 305332 - DNA, 122 bp, Homo sapiens
cccgcccttcccaggcgctggaatggacacggacgcccacagtggcgggccaggtagtgccggagtcgggggcccaggccgcggcgccccgcgcctcatcacttaccttgcctttagctatc

SEQ ID NO: 305333 - DNA, 122 bp, Homo sapiens
atctgttaggagacttgaggggacctgagcaatgaggagcagctgtgatctgtctttgatcgagaaccagggaggcagagataagatgtgagtggggcgggctcagggaggacagcaggtcc

SEQ ID NO: 305334 - DNA, 122 bp, Homo sapiens
acccctggccctgccctgtgggcagcagtgccaggtctggcactcagaggttaggccgggcgcagggagggtgcgggctccgcagcgagcgcgccgggcggcctctaggagccgggtcagcg

SEQ ID NO: 305335 - DNA, 122 bp, Homo sapiens
tgtgttgtcagcacaattgattacagctcctaccggaagacccaaggaaatccggaatttcgcaccagaggacccaccacgtcctgtggatataaagggaagggaaacaggataaagagatc

SEQ ID NO: 305336 - DNA, 122 bp, Homo sapiens
gttctgtctgggtgaccctggtgagtggatgcctggatctcccctggactgtgccgtgggcgtgggggctgtgtgcagcctggctgagcctgcaaatgcattcgaagtggcctcgaaggact

SEQ ID NO: 305337 - DNA, 122 bp, Homo sapiens
ggaggatttagcaactgtcttcaaatgctggcaactggaagagaaatacttccacaacgacgcaaaagcattcagtctggtcgtttcctcaggagagattttcaagtggagggggcaggagg

SEQ ID NO: 305338 - DNA, 122 bp, Homo sapiens
tacagttacattgattagggaaggtttttcgttagatagttgagacgtttgttattgtatcgtgagtgaaatgtaatgactggcaaatgtgtattccttatttgtgaaaagggaatcttatt

SEQ ID NO: 305339 - DNA, 122 bp, Homo sapiens
gggagggacagcccctgtcccaccctgccatgccctgttcaaccctgtcaggcagctgaacgtaggctggacccatggctgcccaccctggctgcagtacagaatcacctaggggacctcgt

SEQ ID NO: 305340 - DNA, 122 bp, Homo sapiens
tgctatggtcattctgatctcaaaccaaatggagaaactacggattttttttccttattacggtcggatgggatgaagaccttcctgcctgctaagagctggggatctatctatagagatac

SEQ ID NO: 305341 - DNA, 122 bp, Homo sapiens
tctgcaaagaagcagggttaaaagcaggagctctggagggctactgcctagattcaaatccgagcacagtcacatggtagctgtgtgcactggacaaatcccacttctgtttatctgtttag

SEQ ID NO: 305342 - DNA, 122 bp, Homo sapiens
tctgcgggggcagcacgaaggtgtaggtgcagcgcggggcgcccgcccgcgcccacgacgcgcccagcaggagcagcagctgtagcgcacgcagccagggcttccccatcgcggcggacctg

SEQ ID NO: 305343 - DNA, 122 bp, Homo sapiens
ttttgcttcgggctcgctgctctcccctgtgggggggccttggctcatggtgcccgggtccgggggcagctcccggtcacaggcccctgccacccaccactaccgccaacactgccgtctcc

SEQ ID NO: 305344 - DNA, 122 bp, Homo sapiens
gagagcgtcgggccttccggaagggtaagttctccgccaaggggtcccgagggagctggacgtctgaatctggacttgcccccagcttcggggttcgattctgggttttgcgcgtccccaac

SEQ ID NO: 305345 - DNA, 122 bp, Homo sapiens
cttcacatcccagacgatgggcggccgggcagaggtgctcttcacatcccagacgatgggcggccaggcagagacgctcccctcttcccaggtgcggtggtggccgggcagaggctgtaatc

SEQ ID NO: 305346 - DNA, 122 bp, Homo sapiens
ttggtggcacctgggaccggcgcggggcctgtgtggggagtgggcttggaagtcgctgtccgagtcctggagaagcccaggccgccaccccccgccccgccccggccacggcgacctcctaa

SEQ ID NO: 305347 - DNA, 122 bp, Homo sapiens
acctgtgatcacagggacttggatgtcacctagggtggtccctacacatcgaagtccttccggtatgaagagacaaattttcagtcccctgtatcttttgccctccttccaggtctctttcc

SEQ ID NO: 305348 - DNA, 122 bp, Homo sapiens
ttcggtcgaatccacttgggagaccctggaggtaatgaaggcgagcacgaaggcaaggggcgcccgggccggaaaccgtgcaaccccagataccctctagacccggtccatcgcccccgctc

SEQ ID NO: 305349 - DNA, 122 bp, Homo sapiens
gagtagagtggaaagagctgaggccttaaacaggtggccaggtccaggtccaggtccacccggccacccactccacacaggtgcctggaaaagcatctcactcctgtgagctgaacccaagg

SEQ ID NO: 305350 - DNA, 122 bp, Homo sapiens
accacttcaaagaagccatttgaccccaaacaatatgtgtgggctgggtgcagtggctcacgcctataatcccagcaccttgggaggtcaaggcgggtggataacttggggtcaggagtttg

SEQ ID NO: 305351 - DNA, 122 bp, Homo sapiens
aaggatctcctacgctgctccgggcagcgagaaccgcaacgcccgctcacctgaccaggccgtaacccgccgcactgccaccccgtcagccccgcagcgactcacgccgagcccggcagtga

SEQ ID NO: 305352 - DNA, 122 bp, Homo sapiens
gctccgggctgctcataagctcggtttccagggctccatctcaccgtctggaaaatggtccgggtgctctccagcctggcctggccaggcagagctgctgggagcgtcagcagggagagaaa

SEQ ID NO: 305353 - DNA, 122 bp, Homo sapiens
ctgccggcgcgctgtgaccagacacgcgggcgcgggtggggggttccgtccagcagagggcggcaaaggacgcccggcgcggtcccacggccctgcgggcgagcagcaagctactgcgttcc

SEQ ID NO: 305354 - DNA, 122 bp, Homo sapiens
tcaataggagaagccacctctgatttccagtccactatcgtgcactctttcttgccaagccgtcatagtcattagattaaaaaaaaaaaaaaattcctgctttcctgcctcgcctgtgcgtt

SEQ ID NO: 305355 - DNA, 122 bp, Homo sapiens
cgcagcctgccacctgctgcgcctcctaccacttccaaccgccaccggcgacagattgaccggggtgtcacccacctcaacgtgagtgcccaacctggcgtggatggagtggaagagctcca

SEQ ID NO: 305356 - DNA, 122 bp, Homo sapiens
cagaaggctgcgcaggcgcagtcccgacgagcaacgcgtttgtagaggggtgggtgcgcacgctctgtccctgcgtgaccttccgaccccgctgtcctcaccgcaatggcggctgtgagggt

SEQ ID NO: 305357 - DNA, 122 bp, Homo sapiens
agattcgggttattacaacacgccaatctgaaggccaggggtcagagagtgagaggcgagcgaaatttcaactcaaattaacattctgtcagctccagaaaatgggataaataaagtcgaat

SEQ ID NO: 305358 - DNA, 122 bp, Homo sapiens
ttccagaatggccacaattttttcactgcccactctgggccaaacagtgtccatacactacgtcattcttatgagggttacttagttccattttatgatgaggacatttaggctcaacttgt

SEQ ID NO: 305359 - DNA, 122 bp, Homo sapiens
gataatccagagaagtggagaatccaaaggtgcttctctctgcctcagaatcccttcctgcggacttgtgttttcttcgaaatggcagaaagtcctggagatgtgggtttatgactcgattt

SEQ ID NO: 305360 - DNA, 122 bp, Homo sapiens
gctggtcgcggaagactgacggtggggctagtgaggctgctgtattttggctgccgccgccgctgctgccactgggcagataccgcagtgaggggtctgaccgcgctgagtgctctcgggaa

SEQ ID NO: 305361 - DNA, 122 bp, Homo sapiens
aggttctggctgaggcggacgatgcggtgggaacctgggcccagtcccaccatccgggcccggggctcacctgctgaactctgagggtctcacgctccaaagtggcggccgctgttcgtggc

SEQ ID NO: 305362 - DNA, 122 bp, Homo sapiens
gcagggcctggggaaggcaacaccacgaggttttcacccttgcacaggcagacgggaatccgagttggtggagagtgatgcggaagtcattgtgggtgtgtagcttgttttcaaacccagcc

SEQ ID NO: 305363 - DNA, 122 bp, Homo sapiens
gagcaccttcgtgttgagtaacctggcggaggtggtggagcgtgtgctcaccttcctgcccgccaaggcgttgctgcgggtggcctggtgaggagaggaggcggaggcgggaagcttgcctg

SEQ ID NO: 305364 - DNA, 122 bp, Homo sapiens
ttccacgtgacaggcatttgtggatcaccgtgggccatccagttccatgcaggaagctgacggatgtctggactccactggggcgcgggtggagattttctttgctccttccctataagctc

SEQ ID NO: 305365 - DNA, 122 bp, Homo sapiens
tatttttctggaggtctgagagccttcttgaccccagctccctggcacggccggctcctgcggaggcatgaaaagtagagaccaagagctccacgaagatataggccactgttaaaaacgcc

SEQ ID NO: 305366 - DNA, 122 bp, Homo sapiens
gcgaagaccacagggtttttcctctcgggttttggctcccgtgggatggatgtggctgtgcggggggttggcctgagcttcgcttctaagccagcagcttggtcagggaaacctgaaagcat

SEQ ID NO: 305367 - DNA, 122 bp, Homo sapiens
caggaagggcgtgatgcagagcaaagagcaaaacccgctggctcctttttcatcaacttccgaaagatcctaaatcgttttggctgccaagtcagtagcaaataacttaatttgagggagac

SEQ ID NO: 305368 - DNA, 122 bp, Homo sapiens
ccggctgaagaagcaggcttcttttctggaagcagagggcggtgcaaagaccttgagcggcggccggccgggcgcaggcccggagctggagctgggcacagctggcagcccaggtggggccc

SEQ ID NO: 305369 - DNA, 122 bp, Homo sapiens
ctggacctcatagaatcctgggaggtcatcttgattggcaagctggagtgttttctcatacgggtacttcaggaagcagtgcccaaagtccacctctgtattgaccaggtggagggcaggta

SEQ ID NO: 305370 - DNA, 122 bp, Homo sapiens
gcaagctgaggcctgccccggacttggatgaatactcatgaggaataaaggggtgggccgcgggttttgttgttggattcagccagttgacagaactaagggagatgggaaaagcgaaaatg

SEQ ID NO: 305371 - DNA, 122 bp, Homo sapiens
gagcctggggcggggggacgcgtgcatgaggcggggacggagcgcggggggacgcgtgcacgaggcggggacggagcgtggggggaccgcgagcacgagggcgtcggctgctgggatttgaa

SEQ ID NO: 305372 - DNA, 122 bp, Homo sapiens
gggactcatgagaccccagaaaagtgctggccatcgtgggctgcggggacgttgtgcccacggagctgtcctgggtcacggggtgtgcctcaagggccccggcccttcaggccttgaggcac

SEQ ID NO: 305373 - DNA, 122 bp, Homo sapiens
gaccctgtccgtgtctgccctccggcccccagggctcctctccccagagccgccgtcccgcgcctgggtcccacgctgggggaagcgcctgctgcttatctctgtctacctcaggtctgact

SEQ ID NO: 305374 - DNA, 122 bp, Homo sapiens
ttaccagcctcccccgttgttaggagccagaccggaagtggcgcgcatcttcggcgccgccgagaaatttctcacggtctctcgctgccccagggcgccaaaaggagaccaagaatggaaac

SEQ ID NO: 305375 - DNA, 122 bp, Homo sapiens
gttagttattcaatcactatctttacctgtattagaagactctccacttagcacagtcatcgctctgatcagcgtgtccgaccgcgactcaggagtcaatggacaggtcacctgctcgctga

SEQ ID NO: 305376 - DNA, 122 bp, Homo sapiens
ctcgtacctcctggtaggatgtggagcgctcctgccggatcatggcactgaccagagcttcggcacacctgagaccgccccagcccgcggcgcacggacgcagcactgcggccgctgcacct

SEQ ID NO: 305377 - DNA, 122 bp, Homo sapiens
atttctgaggtttcaaaggttagcatcaaaacttgctagtggctaatcccatgagaagaccggaagctgccccaggagggagtaaacaggttcctccgaggccctcagagcccgattcatgc

SEQ ID NO: 305378 - DNA, 122 bp, Homo sapiens
actagatcagtcaggtggaactgatcagactgccgacggcgcacggaggccatttcctaccgctcgacctgcagatacctagcatactgtcaggcagtgggcacggttaggaagataaatga

SEQ ID NO: 305379 - DNA, 122 bp, Homo sapiens
tctatcatttttatgtggcatttcaaaggaggaggcctaggcagtccacagacaaaggcccgctgcggggttaatggagaacccccatttaatcattaacgcttaatactaaacccgcccag

SEQ ID NO: 305380 - DNA, 122 bp, Homo sapiens
tcgcgccgctccagccagcgtgaggctgagcgcaggaagcggaagtgccgatcggtggggcggaaccatgcaggaaggcggaagtggcttcgctagggagcctcccggcgtggagatggcgg

SEQ ID NO: 305381 - DNA, 122 bp, Homo sapiens
taacacggactaatcctgcagacctggagctgggagccgagggtggggcctctgcagggccgggtgctttgaggccctgagggagaatcgtccagggcccgtgtctgccgctcccaggctgg

SEQ ID NO: 305382 - DNA, 122 bp, Homo sapiens
taatgtaaggatgtctaactccgggacagaaagcaaggaaggaagcacccgttctctccccgccctcctcacgcgccctctgcggaggactcccctgcggctgcttgggtaaatgggtctga

SEQ ID NO: 305383 - DNA, 122 bp, Homo sapiens
tagtacacactgcctccatttaaggcatgaaatcacttgataatgcagcctctcgaatgacgtacattaacatttagctgccacctgcagaggtgctgttcctgcaagttgagaactatact

SEQ ID NO: 305384 - DNA, 122 bp, Homo sapiens
ctccttccctgcaaaaatgtccagatcctaatctctggaacctgtaaatatgggactttacggatatgggtaagtttaggattttgagatggggagattatcctggattatctagatggggc

SEQ ID NO: 305385 - DNA, 122 bp, Homo sapiens
cgcaagttggcgttgccagcgtctgcccaagtcatctgcagggcgcccggagcgccaaggcggcctccaacctcgggcccaactcccggcttggacggggcttacctgcttacatggccccc

SEQ ID NO: 305386 - DNA, 122 bp, Homo sapiens
aggactcgggaaaccatgcaattgaggcaagccttgggctgctttagaggcgctgacatccgaggagacttctcctgggtatgctgcatcttcgtggggggcccatcaggctgcttacagag

SEQ ID NO: 305387 - DNA, 122 bp, Homo sapiens
gcccacactgaaggccgcgttccttcgtggcgccgtcccatgccaaagctgctgttcccacgtggctacggagctctggagatgaagtgagtgacaccaaggagctgaatgttgaattccat

SEQ ID NO: 305388 - DNA, 122 bp, Homo sapiens
tttaagtctgtatcattcatcatagcctcaaaattagtatcatccctaggccccttagaacgtttcccctttgctcgattcctctctttcaatacagtcctccaaaatcctccatttggctg

SEQ ID NO: 305389 - DNA, 122 bp, Homo sapiens
cgggggtgtcctggctccgtttcctcgggggctgggtgaatgaagtcctcgcacgccccccggagtggtctgtctctcactggcatcctctgcaagcttgtcatggtgtggctgggtgtggg

SEQ ID NO: 305390 - DNA, 122 bp, Homo sapiens
gcctcactgactcactgcccctttattcaacaacatctgtggggcctcccgcgaggcaggcgctactgcgcaggtgcacggggaaagggttcctcgtggccagcgtctctgcacgccacgcc

SEQ ID NO: 305391 - DNA, 122 bp, Homo sapiens
gcggcgggcgccaggactcgctgctggggctgcgaggggctggaggggccggggccaggccgcgggcacgagcgcctcgcggtttcggacgcagtgtgactgggtttccaaaaagaactcgc

SEQ ID NO: 305392 - DNA, 122 bp, Homo sapiens
gggccagcgacgccatcgtgacagctccttaaagggccagtgcccagcacagggttcggccgagacggggtggaagggaagggatcggaacccagcgagcaggagtggaaggatcgctgcag

SEQ ID NO: 305393 - DNA, 122 bp, Homo sapiens
tccttgttcatatgggtcctagtcttctgaaattttccctttctttcattttctctctttcgttaaacaaaagagctgtagttgcccgttctgcttgtagcactgttgactcttcccgacag

SEQ ID NO: 305394 - DNA, 122 bp, Homo sapiens
gcatcctggggatggggtccgggctttgagctcctgggacggggctgggggccctgagcacgggtggtccagggagaggggtcggccccctgcagccacggaccaggctccagcttcgtcag

SEQ ID NO: 305395 - DNA, 122 bp, Homo sapiens
accagaaggaagaaactctgaacacttctgaacatcagaaggaacaaactccggacacgccgcctttaagaactgtaacactcaccgcgacggtccgcggcttcattcctgaagtcagtgag

SEQ ID NO: 305396 - DNA, 122 bp, Homo sapiens
agtgcagtctgcagtgaccactgcatatgtgggtgggccctgtgtgtctgcagggtccttcgaggacagggccacccagctatccactgcagtggactctccctttccattctgcctgcagc

SEQ ID NO: 305397 - DNA, 122 bp, Homo sapiens
tcgcaggctcaagcgattctcctgccagagtagctgggattataggctcaccaccagacccgggtaatttttgtatttttagtagagatggggttttgccatgttggccaggctggtctcga

SEQ ID NO: 305398 - DNA, 122 bp, Homo sapiens
cccggcggcggccgcaccgggacccggggtgtgtggagacccggcggccacacctggacccggggtgtgtgggaggctctggaagagccactctgtgtcccaccctctcactttccctcctg

SEQ ID NO: 305399 - DNA, 122 bp, Homo sapiens
atgatactcactgcttggcgataggcgattgtctcacggctcggcaatggtctcaccgctcggtgattgtctcactgcttggcgataggcgaatgtcccttcatggtcaccaaaatgtgtcc

SEQ ID NO: 305400 - DNA, 122 bp, Homo sapiens
gacggctcggagagcgaggcagtggcggtggccctggcaggtcggctgcgggagctcctgcgggacctgccgcctgagaaccgggcctcgctgcagtacctgctgcgtcacctacgcaggtg

SEQ ID NO: 305401 - DNA, 122 bp, Homo sapiens
cccacgccaagcctgagccaggagtcccaggtcgagctgtgggaaagagaaaatgcggatcggaggtcaggtgcacccttaccggcaacttggggtacacaaccggggtcccagcatcacct

SEQ ID NO: 305402 - DNA, 122 bp, Homo sapiens
cgtggattacgacttccttaacgactggggacccaggtttaagatgctggctgagctgtacggctcggacccccgggaggagctgctgtattaggcggccgaggtcactctgggcctgggga

SEQ ID NO: 305403 - DNA, 122 bp, Homo sapiens
ggctcccggtgcaccccgggatcagcctggcctgtcatatcagactgggggcaactgaggcgttggcctccccccgggcacccctgctcatggttactagtgctctggcacacaggctgggc

SEQ ID NO: 305404 - DNA, 122 bp, Homo sapiens
cctgggagcaacagggctctgaggacgtgaggagccatcgctgtgggaggcagcaggccccgggtggggggcagaggcgcccagccttggatggggaccccagcccctggcctgtacctgtt

SEQ ID NO: 305405 - DNA, 122 bp, Homo sapiens
ggggagaatgcccgcgagtcaccctgaggcgcttagtctgggggacgaggttggggtcctcgggtgactcaggggcggggcagcccaggactccgctgggactgcggggaggggggctgtgg

SEQ ID NO: 305406 - DNA, 122 bp, Homo sapiens
tctgtagttaagaaaaacagtagttaggaaaacatcagtagatccagcaaccccacctctcgatatttacccaaaacatttgaaatcagtatgtcaaagagatgtctacattcccatgtttg

SEQ ID NO: 305407 - DNA, 122 bp, Homo sapiens
gataggggacctgcagggggcctggtctgccttgtcgggagggcggatgcccaccaccctcggactatttgttcagccaatcagagcagccagccaccgggaagtgcctcggagactccgcc

SEQ ID NO: 305408 - DNA, 122 bp, Homo sapiens
tgtcacagaatgaagtaaatgggacgatgaaggggcagtgtttaaatggctgctttagcccgtttggaagtctgctaattattctcttgaggaaagaaatgcaggttcattattataatgag

SEQ ID NO: 305409 - DNA, 122 bp, Homo sapiens
tctccagtgtgttcttggggcctggtgcgaggcccagagaattctctgcaggcctttgcccgggcactgattaaggctgcgaagagacgcaccgggctgcgggcttagtagcttcaggcttc

SEQ ID NO: 305410 - DNA, 122 bp, Homo sapiens
tcgcccccaggtcccagggcctccatggctgcgcagatgagtgctgaggctgggtggctgcgtgggtcctgggaaaacacagatgtggtgccgggtgaggagctccgggtgagggctgggac

SEQ ID NO: 305411 - DNA, 122 bp, Homo sapiens
acagaccaggaaaacgggcggagaggctgagtgactgcccgaggcgacacacagctctcccgccctgtttgcttacacacattcttggccatgcagtgaagggagttcccagcagtgtcccc

SEQ ID NO: 305412 - DNA, 122 bp, Homo sapiens
ctttcaccctgtccagttcccagggaaggtgatgtgggagatgaatattgagatttgtgccgtgtctttcagtctctggtacccctgccaagcaagagttgagggcatgcaatgggctgccc

SEQ ID NO: 305413 - DNA, 122 bp, Homo sapiens
ttttttttctacatacttgtctgcattcagtgtcttcccaagaaacgtcagttaattccccgattcgaaaaaggaactttctcgtaacagttgtacaaccaggctaaagagcacaccctcgt

SEQ ID NO: 305414 - DNA, 122 bp, Homo sapiens
attgaactgcagtctccaggaaggaactccccaaatgttaacacattccacattcacctgcggaaggggctcctggggtcatttactttagaagaaaaggtgttacagggaaactgcctcag

SEQ ID NO: 305415 - DNA, 122 bp, Homo sapiens
cataactgtatcttattagtcactcagacattactggcagcctaccgcctccagggctgccgtaggatgtagcagccatataaggaagcagcaggaatcagtcacaattatcccttgcttta

SEQ ID NO: 305416 - DNA, 122 bp, Homo sapiens
cgatttggatggcaccctatttattgagtgctcattgtgtgccagacactgtgctgggcccggggcagatggagactcgtaagccataaccgctgcctcccaggagctagtctgctggggca

SEQ ID NO: 305417 - DNA, 122 bp, Homo sapiens
ccagaccttctcccgactccagagggctggctcccgcttctcctccctggttttggctggcggactgacatcagctggtattcctagggataggataaggaaccctgagctgcatggctcag

SEQ ID NO: 305418 - DNA, 122 bp, Homo sapiens
caagcaatttccatgtcaaacatcatccgcgcggctgctccatctgtgaacgtgagtggtcgcctggctccctcttccgcggcggccgcttcctcataccttcacacggcgcacaccggccg

SEQ ID NO: 305419 - DNA, 122 bp, Homo sapiens
gttctgagcacattaaattaaagataatcgttgtgaaaacatttttctgatttgaaaaaacgtagttgaggtggcacgacattgtgaaagtaatcaatgccactgaattgtattcaaagtgg

SEQ ID NO: 305420 - DNA, 122 bp, Homo sapiens
tgtcattcccacaagatgcaagtaaagaagcaccgcggacgcccggggagggtcacagagcgacaggaggggttgttgaccaggtgactggcctcacttctgacaaatgcaaattacccagc

SEQ ID NO: 305421 - DNA, 122 bp, Homo sapiens
gcgtccctgcggcttggtggttgggagagacggaggcacttttccctccccggcgggccccgcgttggaaatccacaagacccggctgccgggtggctcagtgacttcagagtcggctccgc

SEQ ID NO: 305422 - DNA, 122 bp, Homo sapiens
atcttggcacccccaccctgtttggtggctctcccgcccctacgcccaatctactgaccacgcgcccctgcccacctctcgccccagtgctatgcgctgaacctttagccccggcccccctc

SEQ ID NO: 305423 - DNA, 122 bp, Homo sapiens
gcgcccggactcacccgatgacgtagaccaggaccaccagctggatcagtcggaagataacgcccaccttcttattacgcaccagcaccatgcggggggtgtcatactcgaagaggaaggcg

SEQ ID NO: 305424 - DNA, 122 bp, Homo sapiens
cgaaattcgccgaagggagtgcggatgcacaggcctggcggactctgcccccctccagaacgcagcggcccagcgccccggcgggcgcggctgcgaccagagggtcccggaagcgagtgaac

SEQ ID NO: 305425 - DNA, 122 bp, Homo sapiens
tctcaccctgttccgctgaagctgctagcaccacgctgccactcaaagctgcctggctctcggtggggctgactcacctgctttggaaggacaaagcaaaccacctctggcacctgctttac

SEQ ID NO: 305426 - DNA, 122 bp, Homo sapiens
cacgacctgctccccggtgcccagccctgagcagcggggcttccccagcctctgtccacgcgcctttctccagctcagaccagggacaggagctgggtgggtctcctggcactggccagagc

SEQ ID NO: 305427 - DNA, 122 bp, Homo sapiens
acagggtgtgggagcctgagaggtactcacgcaatgcccgctggaagataagttcattgtcgcacagactttgtaacattgtaaggaaagaagcctgacagtagttttacaaatcacaccat

SEQ ID NO: 305428 - DNA, 122 bp, Homo sapiens
cctccacgcccatggccactaggcagagggaatcctctatcacctcctgctgttccacctcgagctgcgacgcagacgacgagggcgtgcgcggcacctgcgaagatgcttccctgtgcaag

SEQ ID NO: 305429 - DNA, 122 bp, Homo sapiens
cggacggtgccctgcgcctctccgcccccgccccggtccccctgagccctgggcccttcccgtctccactgttcctgtccccggattgtccccgtccccggattgtccccctcccctcaccg

SEQ ID NO: 305430 - DNA, 122 bp, Homo sapiens
tcagcacagcagctactggcccaggtgctaagcctctcactgccccggcccgctggccggcgggcagctccgagtgcagggcctcccgagcccacgcccacccggaactcgcgctggcccac

SEQ ID NO: 305431 - DNA, 122 bp, Homo sapiens
ggctgcacgattccggctgccctgtctgcctggcggtgcctctcgggtctgagcttaaagcgggtgggtgcaaacctttgggcatccagggagagctttcttgttagagcccacacacaatc

SEQ ID NO: 305432 - DNA, 122 bp, Homo sapiens
acttgtagaaggaagggctttatttagctcggagcatcagcaagctactgccttaaaatccgagctccccgagtgcacaatttctgtcccttttaagggctcacaacactaaagatttcaca

SEQ ID NO: 305433 - DNA, 122 bp, Homo sapiens
cccctggggaaggtcctgccccaccccgctgggattgcgtgcaaccatctggaatcctcccgcgcacaggcgcagtttcgcggttttattacttggttttccccaacgccggtgtttccgac

SEQ ID NO: 305434 - DNA, 122 bp, Homo sapiens
aggtcttcggggatccagtgaacacggaagcccttttcctaagtgccttggaatcttttccgaaactctgtgtagttcgattaaagccggacccacccaccccctccttccaagaatcgaaa

SEQ ID NO: 305435 - DNA, 122 bp, Homo sapiens
ccctccccatagactccccggtaggagttcttttaacagcgcatgcgtgcagtgttgcctcgcccaaagaagactacaatctccagggaaacctggggcgtctcgcgcaaacgtccataact

SEQ ID NO: 305436 - DNA, 122 bp, Homo sapiens
cccacccaggaataacttgtatgatctttcatttcagaataccaggagcgatatggttctcgccccgtctgggctgactaccgccgcaaccacaagggtggtgtacccccacagcggactcg

SEQ ID NO: 305437 - DNA, 122 bp, Homo sapiens
gaaatgagggcgcgttccccatccccatccgcgctgcagagtcctggggttgggcagggacgtggttccttcaacccccgtttctgattaagggcttcccagaggctgcctgggcctcgggt

SEQ ID NO: 305438 - DNA, 122 bp, Homo sapiens
gatcttttgttacatcagccaccctgtctcatagatgactgctggctcctcttttctgcacgaaggccagaacatgaaaagttagatatttataaaattgctcaattcataatatttgagag

SEQ ID NO: 305439 - DNA, 122 bp, Homo sapiens
gctggctccatttccatgtaaatggcgccgttcatatttcacagggacgccgtgcatctccgccgtgcgtccccggcacgtgtttgctgtgctctgtatctctgtttttcttcctggaaggt

SEQ ID NO: 305440 - DNA, 122 bp, Homo sapiens
ggtggcagacgtggagcggcgcgcatgcgcagcagctcactctgctgaagggctgagaggcgcacccgggcggccagctgggctcggagcggaacggggtcaggatggacgaggacgtgcta

SEQ ID NO: 305441 - DNA, 122 bp, Homo sapiens
cgtcttcgctggctcaagcaggagcagctacggctgcagggactgcagggctctgggggccggggcggggggctgcgcaggcccccagcccgctttgtgccccctcacgactgcaagctacg

SEQ ID NO: 305442 - DNA, 122 bp, Homo sapiens
gccgcccggggtccgaattggggggggcggctgtgtgaccttgggcgaatcgccgcactgcgctgggtctgcgctccgcatccatcacaggcagactcctcaagaggctccaaccttttctt

SEQ ID NO: 305443 - DNA, 122 bp, Homo sapiens
cactgtactccagccttggcgacagagcaaaagcaagagtttaactgacttgaggctggccgtgtgaaagaactggaattgtcactcaaatcagtctcccagaaaactggggttagggtttt

SEQ ID NO: 305444 - DNA, 122 bp, Homo sapiens
ccatggccagggcaggtgctgctggcaaggcctcccatctttactttgatccctttgttgcgccctttcaactccagtttctacttaagtttacagaaactggggccagtctccaggaagag

SEQ ID NO: 305445 - DNA, 122 bp, Homo sapiens
aacaggtgaatcgctccaagtgggtctcggttgcatggatctcggtgcgcttggtttggccggagcagatgggggccggaagggacctgtggtccgcaggcgccctcccagcgggccagtca

SEQ ID NO: 305446 - DNA, 122 bp, Homo sapiens
ggtggctgtccaccagccagtccctcttggaagttggaggggccaagctgtacgagaagacgttttccttaccccagccacccgcatcccagcctcaggacagttttgctctgctccacacg

SEQ ID NO: 305447 - DNA, 122 bp, Homo sapiens
ctcctgggggtcgtcctctgtcagcgcaaacacagtcagcatgtcagccaggttggccagcgcacagcacttcctccccgggcccaggatccgactctggatctgtgtcagcccgcggagca

SEQ ID NO: 305448 - DNA, 122 bp, Homo sapiens
tcgccattgcacaggcttcagggagggctcaccagccacgtgtgagagctgcgagtctggcgcataagctccatgccggttgaatctctttaaagccagggtcctggctgtgagcctggggt

SEQ ID NO: 305449 - DNA, 122 bp, Homo sapiens
actctgcatgctcagcgtcctgcgggaaaggtgagacatcacagtgcgttccccgcatctcggtccaaaccccccaactgacactcccgcatcctggattgtggggccacgcccgaccctgc

SEQ ID NO: 305450 - DNA, 122 bp, Homo sapiens
ccccgctcactccagctctatgcttcagacgagcacctgagctgacccaagtcgcctggacgtgaccctgcccccgcctaccggccccaagtccagacttttttgatgtctgcgaatacgca

SEQ ID NO: 305451 - DNA, 122 bp, Homo sapiens
ctgtggcgtgaccccgccactgagatagatctgcagatgcttcgtcccagtcagggaggccgtctcggcatttccaggttcttaacgctcttgatttttaccctctaggactcattgcgtac

SEQ ID NO: 305452 - DNA, 122 bp, Homo sapiens
aatccctattcaagcacatcaagcccaagatttcaagaacagcattgcttaggcagaggccggatggcttcttcctaatccacatcggatatggttactgtgggccctttctgcatagcacc

SEQ ID NO: 305453 - DNA, 122 bp, Homo sapiens
tgtatttcccacatcccacattgcgttcactctcactgttgcaagatccgtggaattctccgtggaaggccaacagagaacctgctttcttttttttttgagatagagtcttgctctgtcct

SEQ ID NO: 305454 - DNA, 122 bp, Homo sapiens
gggcgtggtgacgagcggagtcctttgaggtatggcaggaggaggacatgcgttcgaattcgcgagaaaacttatttaaaagaaaaagaaacaagttttccgggccctgctgcagacttacc

SEQ ID NO: 305455 - DNA, 122 bp, Homo sapiens
gaggccaaggcaggaggatcacttgaacccaggagttcgagaccagcctaggcaacatagcgagactccgtttcaaacaacaaataaaaataattagtcgggcatggtggtgcgcgcctaca

SEQ ID NO: 305456 - DNA, 122 bp, Homo sapiens
cgcagttacagacagctgaccatggaagcgaatgggttggggtgagttctccagagcacgcggtgtggctagccgggcttctaatttgagtcttccaactcaggactctatccctctactcc

SEQ ID NO: 305457 - DNA, 122 bp, Homo sapiens
acagcctgggactcgatgcagcccacgccagtgcaaagccgagcagagagaagggatggacggaggacactggaggtccgggctccctctgggccttagtatcaccatggcctcatagacag

SEQ ID NO: 305458 - DNA, 122 bp, Homo sapiens
gcagctggctggcttccaggaagctcctctgatgacaaggtgtgctgaagtctgtgttcacgggcacggcattcaggcgcagagcgtgggatgcgggagaaaaacctgctgccgttgctaat

SEQ ID NO: 305459 - DNA, 122 bp, Homo sapiens
acagtcgccccgacgctagtgagggacccaatctgagtccccggccagccgaatccaagccgtgtgtactgcgtgctcagcactgcccgacagtcctagctaaacttcgccaactccgctgc

SEQ ID NO: 305460 - DNA, 122 bp, Homo sapiens
gggaaagaatattaatataaatcccttctgccactgtgtgcgtgcgtgtgtgtgtttgtgcgtgtgtgcccacacatgagcatattttaattcacagaaaactgaacatgccctcctttaaa

SEQ ID NO: 305461 - DNA, 122 bp, Homo sapiens
cgagctccgacagcattacctcacccggccccatctgttgccccggtccagccctgatggcgcgcgcctggtctgtctgattcccctagccgccaccccacgtttctgtaccgggtctctgc

SEQ ID NO: 305462 - DNA, 122 bp, Homo sapiens
attcccccacaagcattttaggagacctctggcaaggcaggtggattaattgtataggggcggaggactggcccaagccacatcatatacagctgttcaaagaaaacaaaatatcttcaaca

SEQ ID NO: 305463 - DNA, 122 bp, Homo sapiens
tctcagccagagagagtgaactgggacaccattcacgtgatgggccagatgggctggcagcggctcgctggagccgtccgggtgggaacgctgtgtctgttggtctggtgctgcttatgtgg

SEQ ID NO: 305464 - DNA, 122 bp, Homo sapiens
gctgagagctcggcgctggtgctacacggagcaggcccaggtgcagcaggaggggctcaccgtccttggccacgtccccgatgggcacactgtgcttctgtgccatgtaccccaggaaggag

SEQ ID NO: 305465 - DNA, 122 bp, Homo sapiens
atccgcctggcttggcctcccgaagtgctgggattacaggcatgagccaccgtgccaggccgacagagtgtgttctaaatacccagcaggtccaggtgagtgacaggcttgttcagggctcc

SEQ ID NO: 305466 - DNA, 122 bp, Homo sapiens
accccgtcccccaggtggttcagtacatcggggagatctgccgctacctgctgaagcagccggtgcgcgaggcggagaggcgacaccgcgtgcgcctggcggtggggaacgggctgcgtcct

SEQ ID NO: 305467 - DNA, 122 bp, Homo sapiens
gcattttttaaaaattatatatattcttcaggcgcggattgggtgcctttttccgccgcgcgccaccagaatgtccctgtcttgaggtctaatggcggacgccagtatgttggagttggtgg

SEQ ID NO: 305468 - DNA, 122 bp, Homo sapiens
gcaggtgtgagggacaggtgtggcgggctggtcacctgggacagttgtgcggggcaggcgcgcggggtaggcgcgcgggaaccggacgaggcgagaggccggcgggcgcacttgcctgcgaa

SEQ ID NO: 305469 - DNA, 122 bp, Homo sapiens
tgccttccccctcctgcatcatcactgttctagcacggaaaacaatacacaccagcttttcgcagtcagcctcagctctctgtctccgtttgatctctacatccacctgattacgtgcatgc

SEQ ID NO: 305470 - DNA, 122 bp, Homo sapiens
tccgcgcccccggcctccgattggctgtcgggcctagagcccgcccagaattggaccgttcgcttgtcgctcgggtctggctccacccccagagggagcctagaacctggtcgcagttttta

SEQ ID NO: 305471 - DNA, 122 bp, Homo sapiens
cctgaaggaccctagcgtcgattgctctcaaaactcaaggggcctttccttcggccttgccggggccatccccacctgcgtccaggaggcgccccacagcgccggggccgggggacggcgga

SEQ ID NO: 305472 - DNA, 122 bp, Homo sapiens
agaggatggaaaatatcctgaagatacgggctagaaggaaaggactaggtgggacaggggcgcgatagagtaagtccacgcaaaaggcctacccaagagggccactgtgtagaagggaacac

SEQ ID NO: 305473 - DNA, 122 bp, Homo sapiens
ggcaggaggaacaggagaggggagtcatggatctgcctggccaccagagggcagcagagacgggctcactgtcggcttcaaggatgttccgcaagtcgattcacttacagactcttcttcaa

SEQ ID NO: 305474 - DNA, 122 bp, Homo sapiens
acccacgtacagtgcaacttggtctgtgccaggcacccttcctttacctgtgaatgcatccggccctcccagcccctctgagccactggaccgtcaatggacacaggaggtcacctgagtat

SEQ ID NO: 305475 - DNA, 122 bp, Homo sapiens
gccagcacccatgccagtcctctggtcttttctgcctctgcacgtgactttcccccagtccggctaccttacctgagtcctggaaggctcctgggatgggactgatgactggaaagacagag

SEQ ID NO: 305476 - DNA, 122 bp, Homo sapiens
cgtggtgcccagctgaaggccagcgcgcttcaggaacacgcagtgctggacagcgcaccgcgcgcttcggaaagcctgagccgtctcggtaaataactttacctggatcacagaggttgtga

SEQ ID NO: 305477 - DNA, 122 bp, Homo sapiens
agaagctctcctcctcagcagctcccaccgggttcctcccaagttcattttcctaaggcccgagtaccaagaggggttacagctgtggctccggggacctttccaccaaacaggagtccatc

SEQ ID NO: 305478 - DNA, 122 bp, Homo sapiens
atcgcagatcctcattttttcggttttctgtgatgcgcttgtccccatatggggctctggcgtctttctgggtctggaggtccccagcgccctctgccgaggcatctcttggtccggcggtc

SEQ ID NO: 305479 - DNA, 122 bp, Homo sapiens
ataaaatgccaaggcagactctcaagatattcacaaccagaattaactctgtacagcaagcgcatcttcctctaccaaggacagttccagagtgttttcattcgtgctggttttcatcctga

SEQ ID NO: 305480 - DNA, 122 bp, Homo sapiens
tacaagtttcttacagggacaaacggaggcagcacatcaatgggctgagtgagagtcggccgtgagggaacatgggacgcattttgaaaacacagcagggaaatggtggggcagacacttct

SEQ ID NO: 305481 - DNA, 122 bp, Homo sapiens
actctttgggtccacactgctttcatgagctgtaacactcaccgcgaaagtctgcagcttcgctcccgaagccagcgagaccacgataccaccaggaagaacgaacaactccagatgcgcca

SEQ ID NO: 305482 - DNA, 122 bp, Homo sapiens
tccccagatggacaactcctcaattgtctggaggtcgggggcgtgttggacagtcctggtcgctgagtcatgctgaagcactctctttttgactcactctttgtgacgtaggtctttctcac

SEQ ID NO: 305483 - DNA, 122 bp, Homo sapiens
gggccgtctacctaggtccagcagccaggctgctgaggagtacccccgccaaaggcttttcggggttctctccagcagacgggggcagcctaaggcctccataaaatctccccgaagcagcc

SEQ ID NO: 305484 - DNA, 122 bp, Homo sapiens
gtagatggccttggggacccctgaaacaagtccaaaaacaaaatacgaccttttaccagtcgatcattaacatttgttaatttttctaaagaggaaaagacggtgccagtattaaattcttc

SEQ ID NO: 305485 - DNA, 122 bp, Homo sapiens
gtcccaacacagcgctccaaggactccctaacgccaatggaaatggtcgctactaaagggcgccgggagtcccgcctctaccttacttgcgcacacggaaacgccttcaatgtgaactctca

SEQ ID NO: 305486 - DNA, 122 bp, Homo sapiens
acaagggcgtggccctcagcctggacgacgtcaaaagacacgtgagggagcgagcgagggcgccctccagcccgcctgtgcctccaccgccccaggaaccccgtccacccccgcccacccgc

SEQ ID NO: 305487 - DNA, 122 bp, Homo sapiens
ccatgtgccaggcccggctctgcccagctccctgcagctgcgccagtgtgtgctgtgactcgtgctcctggtttgtcatctgcctctcagtagacaccacggccttcaagctttctccgctc

SEQ ID NO: 305488 - DNA, 122 bp, Homo sapiens
acggacttaaacctgcaccagctccagagccctgcggaaacagagatcggtcccctccggcgtctaggtaaggcccaccctcccagaccgcaaagagccaggatccgacggcagcctctccg

SEQ ID NO: 305489 - DNA, 122 bp, Homo sapiens
cggggtggagagcaactccaatggggcctccccggaaccctgcaccgtcccccctggtgccgtgaagctggagaaggagaagctagagcaaaacccggagaagtcccaggacatcaaagctc

SEQ ID NO: 305490 - DNA, 122 bp, Homo sapiens
ctcataccccaccaacccctgcttccccttctcggtccccgagggccctggcccccgctgcgtccgcatcactctgcatcagcactgccggcccagtgacaccgagttccaccccatcggct

SEQ ID NO: 305491 - DNA, 122 bp, Homo sapiens
cgggacatctggctgggcggagtcagatcggctttaatagagggagcctgaggaggctcccggggtgcgggcgcggcccagccccctcctacttggctgcggctggcggtggggcctgggcc

SEQ ID NO: 305492 - DNA, 122 bp, Homo sapiens
tttaatacgtaaaattggctaacagtgtctgcacagccagagagaagttgtctagcaaatcgggtcaatgacacacaggaaacaaacatcaagaaaggggtcctagattggtccagtcaggt

SEQ ID NO: 305493 - DNA, 122 bp, Homo sapiens
ttttttgagaggagtcttgcactgtcgcgcgggctggtgtgcagtggtgtcatctcggctcgctgcaacctccgcctccaaggttcaagcgattctcctgcctcagtctcccgagtagctag

SEQ ID NO: 305494 - DNA, 122 bp, Homo sapiens
gcatgggggcgggaccggaggcgggggccgacggagcagcgttgggggcgcggcaggaggcggggccgagaaggaccctggagggcaagggggagctagaggcggggaccgggccgagggag

SEQ ID NO: 305495 - DNA, 122 bp, Homo sapiens
gaatcgggcgccacctctggtggaagctgctgtcctcggcttctgcccaactccaagaagcggaaggggggtgtatcctgcgccccaagctcatgggagcccacgcaccggggagagcccgg

SEQ ID NO: 305496 - DNA, 122 bp, Homo sapiens
tattccagcactctatgaacaagaaactagggaagggtggggtcgcgggtaaagagtggtcgcactgcagggaggagtctaaatgccagggtggagctgaggactctcttcgccatcaaacc

SEQ ID NO: 305497 - DNA, 122 bp, Homo sapiens
caccatctcaaaaattaaaataaaataaagatgactatagaaacatttattgggtcttaccgtgtgccagcaattatgctaagcatgttccatacattagcttatttatcccccctcaagaa

SEQ ID NO: 305498 - DNA, 122 bp, Homo sapiens
tgaagactgtccgctggagaagtgacggcggcgctagccaatcagaggcctgatcggggtcgtgatcggcggactaaagggcgggcggagaaggaagcggcatgaagaaggcgaaaacggcg

SEQ ID NO: 305499 - DNA, 122 bp, Homo sapiens
catcgtctttttagtaacagtgcatgctgtgaggcttgtagagtcgcctctctcttcaggcgcagcagagggcggccgcaatagtacgctcgcgcggcggtggcgggtggtggtccttggac

SEQ ID NO: 305500 - DNA, 122 bp, Homo sapiens
ctgacctcaggcaatccgcccacctcggcctcccaaagtgctggaattacagccactgcccggcctggggtaagctttcaatgttgtaactccctccagaacctcatggcctatgaagatgg

SEQ ID NO: 305501 - DNA, 122 bp, Homo sapiens
ctccccagccttctctccctctgcactgctgaccctgtgcgggcaaagttggcccagtatcgcatcagtcgctgggcgaagattttctcctctgccgtgtagtttcgagaggggtccagggg

SEQ ID NO: 305502 - DNA, 122 bp, Homo sapiens
agaggcaagccctggtgccacaggatccagcctccagccccagcgtgtggcgggggactccgctttcgccttctttaaggtgcgaacggaggggttgggaacgctgaggcacaacagcctgc

SEQ ID NO: 305503 - DNA, 122 bp, Homo sapiens
gctttctattgtgctattctagcttcatcacaaatgatgtatcatacctgggaatgtgcccggtgaactataaggtattacgtaaatagagaattaggagctgtgccattaataataatgtc

SEQ ID NO: 305504 - DNA, 122 bp, Homo sapiens
gaggaagcgcgacaacaaggccagcacgtatggactcaactacagcctgctgcagcccagcggagggcgggccgcggggggcggccgagcagacggcggcggggtcgtgtacagcgggaccc

SEQ ID NO: 305505 - DNA, 122 bp, Homo sapiens
cccctgaaagcgccgggcccagccgctgcacgtgggtgccgcgggggcggggcctccggccgccgctcgcccattcgcacatggcttctcaaggatcgctgttgtcatcctcggggcggggt

SEQ ID NO: 305506 - DNA, 122 bp, Homo sapiens
gccgacggggggcgggaggctgggcgggagcaggccggcgagggagcgcgcgctggggtgcggacctccaggcgtccggggctcccgctccaacgtgggtctcaagcgaacccgctgtgatc

SEQ ID NO: 305507 - DNA, 122 bp, Homo sapiens
tccctggagccctgatctgggaccagtgaggcatgggggagaagcagctcccatcagctccggtccctgcaacaggacgcactggagtgaaaaattaacccggacgcataaaaagtcctatt

SEQ ID NO: 305508 - DNA, 122 bp, Homo sapiens
cgttgtgctcctgggagtgagacgccacgtcccattatcccgcatattatctccttgtcacgaggacaacaaataccgattaatcttcggagtaaactgtttcctattcttgaccaagctac

SEQ ID NO: 305509 - DNA, 122 bp, Homo sapiens
aatacagcatctttggagagcttcatccagttcactactgtgctctagcagatattcctccggtatccctattttcttgacttcaaatgcccccatctgcagaggagtaacttattaaaata

SEQ ID NO: 305510 - DNA, 122 bp, Homo sapiens
tgaaggaatgaattgagagctgcttcttacttgggggaactggggaatctacctggtccccgtgtatggttgcatggacagatgctgtgaagcttggcaccttcttcctctttgtaagtatt

SEQ ID NO: 305511 - DNA, 122 bp, Homo sapiens
tctccgcacttccctgtttggggcagttaggtccgcagaagtctgtccgcgagctgtcagcgcgggcgggaacgccgcggggcgcggggtgggcgcggccgacctggtccctgagccggccg

SEQ ID NO: 305512 - DNA, 122 bp, Homo sapiens
taaacaatccccgcaggaatcttctgatgaccaaacagattagcaaactccagattttcacgccattaataatatccccatccagattaggccttttattttaataactccaaagataaagt

SEQ ID NO: 305513 - DNA, 122 bp, Homo sapiens
actgaatgagtcacaatgatgcacagtactgagggcacccagcttgtcttggacagatatcgtggaagcacctgtgagaatgggctggggtcctcaatacccatcagtgtccagctggacca

SEQ ID NO: 305514 - DNA, 122 bp, Homo sapiens
tgttcagagaaaacactttgaccctgtctgtgtttacagtccctgctgacagtgtactgtcgtatcctcagccttgttctatttctttattttagctttacagagattaggtctcaagttat

SEQ ID NO: 305515 - DNA, 122 bp, Homo sapiens
gggtaaccaggcagacaaggccggggccacggcgaagtgcccacagcagactgttcccgacgcagaacgtgaaggctcatgctgtacctaaggcagcacaggcccgggccaggccatccgcg

SEQ ID NO: 305516 - DNA, 122 bp, Homo sapiens
tgggagatttaaagggatatcctcaaaacagaacaccagcctctcaccaccagagatgaccggaaatatgttttctcttcttccttccctgcatcaggggaagaggctggtgaagttggtga

SEQ ID NO: 305517 - DNA, 122 bp, Homo sapiens
atcaaaaccttgatcactttagtaaaaaaaaatattgtcaatgacatatatttggttatacggaagtaaatcactgttttgataaattatttaatgacaatatgatttagccattatattag

SEQ ID NO: 305518 - DNA, 122 bp, Homo sapiens
gtgaagtttctttctccccatttccacactgtcctctgtggcaggaagtcactgtgcagccgaggcttaaggcatggggagctatgccacagctctcagagggcggagcatctacctatatt

SEQ ID NO: 305519 - DNA, 122 bp, Homo sapiens
ctttatctccttttggcaatctgagtaggcggggaacctaggcagggctggctttcttagcgtgtaacttgtgtagcagcacagggcccacacttagaaggaccccacacttggttcaaggc

SEQ ID NO: 305520 - DNA, 122 bp, Homo sapiens
acatggggacgcgctagagctttcgaacacgtctctgcatctggacatgccctcggtgcacgtgtattgctttaagttcagagacgtcaaatgtcatttaatgaaaagactccggctacata

SEQ ID NO: 305521 - DNA, 122 bp, Homo sapiens
cccgagccacgggccgggcggggttgattctcgagtggaggggcgtgtcgtacgttggcccggaactgggtcgggcaatttccacttactggttccaaatgaatgtgaaaattcaaatgggc

SEQ ID NO: 305522 - DNA, 122 bp, Homo sapiens
tgctgctcgccctccttgaggtgcacagagcgcgcatcctgccgcaggctctccagcagccgctgtgtcttcgatgtctgcccacacttgcggtagatgccctcggaggtcaggcctaggga

SEQ ID NO: 305523 - DNA, 122 bp, Homo sapiens
gggaggccgcggcgccatgggggggccgtaggagcggaccgtggggccggaagggggcatcgcggcggcgccggcggctgcggggttatctccgcggccgcgaaggcagcatccacgccgtt

SEQ ID NO: 305524 - DNA, 122 bp, Homo sapiens
cgtatcagtgctggaaagtgcagcaaggataagagggtactgttctctcatttctgagggcgttgtctcgataattaactaacttgatagactttttagtgagtggcaggtgagatgcaagg

SEQ ID NO: 305525 - DNA, 122 bp, Homo sapiens
ttcagagagctctgggctgtttcagggtggcggccgagccctctgacaactgcgaagagacggagacaatacaggctggggatgaagcggttcgatgaagggcattacccccaacgagaacc

SEQ ID NO: 305526 - DNA, 122 bp, Homo sapiens
ggggggcggcgccgagtgcacctggagaggcgtgggaggtagcagccgcagcttgcctggcgctcgcgccgcgtctgagcgcgcaccctgggcctgaatctcagcagttccgctgcgacgcg

SEQ ID NO: 305527 - DNA, 122 bp, Homo sapiens
actgcttttatgagctgtaacactcaccgcgaaggtctgcagcttcactcctgaagccagcgagcccacgagcccaccgggaggaaagagcaactccagacttgccaccttaagggctgtaa

SEQ ID NO: 305528 - DNA, 122 bp, Homo sapiens
gaactgactcaagttttgaaaaaattttgaaagaaattacctgggtaaaacactatcaatcggcgtcctatgttacagagaaatcttttgtgaaagaaaaagtctattgatgctgcaaacgt

SEQ ID NO: 305529 - DNA, 122 bp, Homo sapiens
aagctcagttttaaccaaaacattggtgatctggttaagtcattactgaattatccactacgttgaattctcccaaccaccccgtcccagcccttagcttggccgaaggaaaattaattggt

SEQ ID NO: 305530 - DNA, 122 bp, Homo sapiens
caggctcttgagcccacggcgcacctctctccgcgcgcacagcgctgactgtcggcggcgcgcaggcagctgagaaaagctatgtacatcgaggggttagcaccaagtaggcggctgctagc

SEQ ID NO: 305531 - DNA, 122 bp, Homo sapiens
tctccagtgaacgggaatagtagctgtcaaatggccttcccttccagccagtctctgtaccgcacgtccggagctttcgtctacgactgtagcaagttttgacacaccctcaaagccgaact

SEQ ID NO: 305532 - DNA, 122 bp, Homo sapiens
ctcgtggggcttggaggtggcgagcgggagagtgaccacgcccctctcttgcagggaacccgagcgtcatgttagggtgaagcagaggacctcagtgctgaacatgctaaggaggttggaca

SEQ ID NO: 305533 - DNA, 122 bp, Homo sapiens
ttccatacccttccgtgtttcttgggagcacttccttaataaattgcttccacacgaatccgcgtctcagaagctgcttctgagaaaaccgaagtgatggggcccctgggctgcacagtaat

SEQ ID NO: 305534 - DNA, 122 bp, Homo sapiens
tcttcaggccactctaattacagagtctgtggtaggttgcgtggaggagctgtctcggggcgggaagcttccctgcgtattgtatttgcctataaatacttcaaatagttaagtgaaatgtg

SEQ ID NO: 305535 - DNA, 122 bp, Homo sapiens
ctcccgtctatatccctcttgctgtcattagatctttggagcagagaaggggtggtttgacgatattgatgccaactgctcattctggcaggaaatggctaggattccccttttgggggggg

SEQ ID NO: 305536 - DNA, 122 bp, Homo sapiens
gcgtgggaaacgcgggaaggccgggccgggtaggtccacacagcgactcacgtcgctgcacgactctgcacagcccactggagggaacaagcagttctacacactttgagacccctatggag

SEQ ID NO: 305537 - DNA, 122 bp, Homo sapiens
gagccctcacagtgctctctggcacccacgcgacgctcctccatgcaaactctttccacgcgagaagcgccatgtgcacgtgctccagcaggtacgcgctccctgcaggacatctgtgcacc

SEQ ID NO: 305538 - DNA, 122 bp, Homo sapiens
aagtcagtcctgcctgtaaacacacgctgaaatgctctgcctgaaacctctaccttttcccgtgtggtgagtttctcttttcgcaagagaaatccagcaggatatgggagtagtgaggataa

SEQ ID NO: 305539 - DNA, 122 bp, Homo sapiens
gcccagatgatgagtgcacgtgggtgcgatgctgctgcgggagcagcgagggtctggagccgcccagggtgactcaccgctaggacagggcagctcggcttcacatcttcccagaggccaaa

SEQ ID NO: 305540 - DNA, 122 bp, Homo sapiens
ctgctgctgtgactgcttttgtacctttgcaataaagaattttctggtttcagaccctttcgttgcgtagctggtgctttcagctggggctttcttgggccaagaaccacacccccccccca

SEQ ID NO: 305541 - DNA, 122 bp, Homo sapiens
tgccgagggcgggagcctgcgggtctcggggagcgtggagaggcgcagcctcggaggagccgggtggttgtaggaaggaggtggggcccgccgcgggctcaggggacggtgttgagcgaaac

SEQ ID NO: 305542 - DNA, 122 bp, Homo sapiens
gttcatttaaacccctgactgcagccctttgacatacatccaattgaggactggggactccgggaaacatctaaaaggcttaaaaactttgtctaacttcagccgggcatggtggctcacac

SEQ ID NO: 305543 - DNA, 122 bp, Homo sapiens
ctcttctttccccctaaagccctcgatgtcagcaggagtccgggacaatccaataccaggcggggcgcagcggaggctggcaggcacgccctgggaggcaggcaagttgattccaaggacga

SEQ ID NO: 305544 - DNA, 122 bp, Homo sapiens
ttcaccgcgtcctctagattctagaatctagaaactcatctaggacgcgaggtcatctatcgcggggagtaaaattgccaggattcgcccgtagattgacccctcccagctctggagccccc

SEQ ID NO: 305545 - DNA, 122 bp, Homo sapiens
ggtatctcagagtgccaagctccagggcccaccggagaccgggccagactcaccccagagcgccaggggactggtggtgtacagatacactcgggttcaaacagtttaaacaaggggccggt

SEQ ID NO: 305546 - DNA, 122 bp, Homo sapiens
ccagcagctgctcaatgtgctgctgcttctccttcagggcctcctggagggcagtggtaccggagatcttcctggcgtaacgggaggaggtttcagtcaactgtaaaggaaagttagagaaa

SEQ ID NO: 305547 - DNA, 122 bp, Homo sapiens
aagcatcctcagtccagggccatggaaagaaaggttttttcacttggaaagtagtcactacgtccataaagaaggatattgagccatgtccactgagtggcccatggagaggaggtgccagg

SEQ ID NO: 305548 - DNA, 122 bp, Homo sapiens
ttggactgagctctttctcagaagctgctacaagatgacacctcatgtccctgccctcttcgtgtgcttttccaagtcttcctattccactcagggctgtggggtggtggttgccctacctg

SEQ ID NO: 305549 - DNA, 122 bp, Homo sapiens
caatcaatgcggggttattatgggcgagccctccccgccttgccccgccccgccccgccccgcccttattcttccggacaacttgcctagtgggtggggagccagcaaaaaaaaaaaagaaa

SEQ ID NO: 305550 - DNA, 122 bp, Homo sapiens
agagggttattacacactggtttgtattgccaagggaggcagcacaatccattttcctgacggttttggcacgatccttcctggcacctcagagatgggcaatgtgatgttatatacactct

SEQ ID NO: 305551 - DNA, 122 bp, Homo sapiens
ctgtctgaaatcatagcaccccatccgggtggcggggagatcaactccgagctgtttttccgaggcagtgaggaacggtgccggctctgcacggagctgaggacaggacagaccttgctttg

SEQ ID NO: 305552 - DNA, 122 bp, Homo sapiens
agaaccaggtcagccttcagagcttcccagtcagcaaatacctgtgccagattcaggggtcgaaggtgccccaggcaaaagagggctgatggcaggcaaatgaaacagtgatcccccataaa

SEQ ID NO: 305553 - DNA, 122 bp, Homo sapiens
gatataagaaattagatcttaggcatcgcgtcatagaggaactacaccttccagaaccctcgcgccctgcgtcgtgctggcacttttaccggccgggccttagagcgcagcctgtagccggg

SEQ ID NO: 305554 - DNA, 122 bp, Homo sapiens
gcaaacagttgtaagtgcttagcaattataagacaggagccatgtcttacaatgtttgcacgggatgactgcaaagcatttgtatggatggccatctccaatcatccctaccaccttcctgg

SEQ ID NO: 305555 - DNA, 122 bp, Homo sapiens
ggagcgcaatgtgctggcgggggccggggctggggcccggggaggccaccagggcggggccgggcgcggggcggcgcttcttcgcgcctcccggccccggcctggcgtccgtggggcgctgt

SEQ ID NO: 305556 - DNA, 122 bp, Homo sapiens
caatacctctgtctgaattcctggaaaactattcggttagggaagccctggcgacagattcggatcccttccaggacaccgttacagcgaagctgatctaggactaggtgtggatccaattt

SEQ ID NO: 305557 - DNA, 122 bp, Homo sapiens
tgcctacatggctgtgataacaagtggagttatacgcctctgtctaaacttgctgagtcacgcaggatgtaaacatcttaccttggcctatccttgaccaaagcacagccatgttccttaca

SEQ ID NO: 305558 - DNA, 122 bp, Homo sapiens
accatgtgaggccatgtgtgtgtccggcgtcccgctcgcctgcggtagccacgtagactccgcgtcccccccaggctggatcctctccaggctgcagtgggcttgttctggcagtgctgtcc

SEQ ID NO: 305559 - DNA, 122 bp, Homo sapiens
atagttctgctattagccatcttcccctttaactctagtggttagtcttgccctctcccacggcttcataaccatttatacacaaatgattctggaatctacatttacaggcagaactgcaa

SEQ ID NO: 305560 - DNA, 122 bp, Homo sapiens
aaagagcactggatcccccgcttctgtcaggtgagtttgtgtgtctttgctttggacccacggagacctgggtttgcctctggttctgtccttgactgtttctgctctcatcatattacctc

SEQ ID NO: 305561 - DNA, 122 bp, Homo sapiens
caaaatcaactttactgagggacaacttgcataaaataagttgcagccattccaagtgtacggttcaatgggctctcacaaatgtatatgcaccaccacctcagtcaagatgcagagcagtt

SEQ ID NO: 305562 - DNA, 122 bp, Homo sapiens
ctccgcggggcagaggtcgcggtgtcctcaggctgtggcgccggcctacaacccccacgccgggcccgggccccgtgattatatttgggccccgtgtgattatatttgacaggtcttagttg

SEQ ID NO: 305563 - DNA, 122 bp, Homo sapiens
caattctgccgcgctaggacgatgggacatgggcttctcttcgaggaggtaacatgtccgcgccctgagccacggctctctgggcgcggccatcttggtagatctgccgtacagaagggaaa

SEQ ID NO: 305564 - DNA, 122 bp, Homo sapiens
tcgccaacagttttttgctatgtggttcaaacacacagcaaagtacagaaagtaatatgacgcccgtgtgctcactgagatgttacacaagtcgatattttcctatgttgcatagacatcag

SEQ ID NO: 305565 - DNA, 122 bp, Homo sapiens
ccaaacaattccaaatatatccatgtcatccaatcaacccacagagtagctgttactctgcgggtgagtgagctggctgggaggggctgcatgctgtgtgctcaggtcacactggaaggcat

SEQ ID NO: 305566 - DNA, 122 bp, Homo sapiens
cgcactctccggttgtggagagagaaggcccttacctggctaaaagccgcctttcctctgcgctgctaccagccctgtcacaggtcccggcgctctacctagcgcacctgtcgcgaccaagc

SEQ ID NO: 305567 - DNA, 122 bp, Homo sapiens
agatcctgcaccccctcatccaggctgtgtttgtcatcatccaggtgggtggaggagtgtcgctgtgtggaagaaaggagctaacacttggccattgggaaggacccaacaaggggtcggag

SEQ ID NO: 305568 - DNA, 122 bp, Homo sapiens
gtggattgacctgttctgcacattttgtgtaaatggaatcatatcatatgtgctaccttgcgtctggcctctttcactcagccccatgtttgtaaggcttattcctgttgtagcccctgtta

SEQ ID NO: 305569 - DNA, 122 bp, Homo sapiens
ggcggctggacccgggcggccgcaagggcttggctgggccgcgggaggcgggaggttcttcgtcctcccgagccatctccctgaactgacaagcaggactcccgggtccagggggcacaggg

SEQ ID NO: 305570 - DNA, 122 bp, Homo sapiens
cccgcatctgattctccgaatggcctttgtcgcctccctggaccctcacctccgcccatgcgcgctcgtcacagtggggcgccactctgccacctcttaatcggcttcctcctggaaggagg

SEQ ID NO: 305571 - DNA, 122 bp, Homo sapiens
tgggcggaggcggaggggcggcgggagttgcaggaaccccctctcgtggccgatcggcctcgctgccttctcccgggcagcgctgttgtaacctcggaaataaacaagtgccagcggcggga

SEQ ID NO: 305572 - DNA, 122 bp, Homo sapiens
atactcttaaatttttgttttgaaagaagccctctcattgcttgcatgtgtttgcatgagcgtgggcagagcctgcgagaagcactgggctgctgctgcccctctccttggccagggagagt

SEQ ID NO: 305573 - DNA, 122 bp, Homo sapiens
ctgtgaccccaagtcctaaaagtttgtacgcagtgtctgggatatgcagtatccttgatgcgaaactcttaaatgtttgctggtgcaagtccatacaaaacgaggttggcctgcctcgctta

SEQ ID NO: 305574 - DNA, 122 bp, Homo sapiens
ggcgctatgcgcgctgtaaatgcagtgtgcgtaaccgggcgcgagagcatagattcttaccgcaaaccctgggagcagtgcgcatgcgtactttcccggcgcccgccgttctccagatgccc

SEQ ID NO: 305575 - DNA, 122 bp, Homo sapiens
tgctgtgagtgtggtgttccgataagtccaaatcctgccaatatttgtgtggcctgtttgcgaagtaaagtggacatcagccaaggtattccgaaacaagtctcgatttcgttctgcaaaca

SEQ ID NO: 305576 - DNA, 122 bp, Homo sapiens
attaggacattccatggaaagcaactagactgatacctctgcagcacccaaacccccagccgaatgccttccaaggccatccctggctgtttgacttgtgccttgacagtgaaggtattatc

SEQ ID NO: 305577 - DNA, 122 bp, Homo sapiens
gagtcatgggacccggccagagcaggacagacagaggccccgtctgtcagtattcagacacgccccaaacacacacacaccccactctgacctgtgcccagactcagccgccagcctatgca

SEQ ID NO: 305578 - DNA, 122 bp, Homo sapiens
ggaggctgaggcaggcgactcttgaacctggcaggtggacgttgcagtgagccgagatcacgccattgcactccagcctggacaacaagagcgaaactccgactcaaacaaacaacaaaata

SEQ ID NO: 305579 - DNA, 122 bp, Homo sapiens
gtttttaagaaccatttgccactgcttctctttaagaaaaattaaaacaatgcccaaggacgttttggggctaccgtaggtattttcagaatgaattaaatcaccccaagtggggctgctgg

SEQ ID NO: 305580 - DNA, 122 bp, Homo sapiens
cctgagtctgacccctgcgctgtacacggcactgttcatcacacacgcggctccagagcccgacccccgcatgcacacagcgctgttcaccaccgcatgtggctcctgagcctgaggaggag

SEQ ID NO: 305581 - DNA, 122 bp, Homo sapiens
catggccgcctcaggcctccatggagggagctgctatgtccccaccagattggccccgtgcggctgctggcttctgtagaggctgcccagaggggccaggtggcacaaataagagaggggag

SEQ ID NO: 305582 - DNA, 122 bp, Homo sapiens
tctctcagagcctgactcttacttagggaggaattagccacaactggggagaagtgttctcggacaggagttagctgagacctggcacagttttgggtgggcaatgttaagacggaggatgt

SEQ ID NO: 305583 - DNA, 122 bp, Homo sapiens
tgctctcagcatgaccgggccttggagcggttctatgaacaggtggtccaggctatccagcgccacatacactttgatgttgtaaagtgcatcctggtggccagcccaggatttgtgaggga

SEQ ID NO: 305584 - DNA, 122 bp, Homo sapiens
cccgggtcaggaagctgtgctgtggcccgggctgggctctacacctgcacacaggctgcgcggttatcacacacatcccatgcggcaaatgggctccgaggaaccgaagacacacagcaggg

SEQ ID NO: 305585 - DNA, 122 bp, Homo sapiens
ccagcctcccactccttacccaagaatcccattcttgtcaacaaggataataacagcaaacgttaattgagccctactacatagcagatcccattccaggcatttttatgcatattatttct

SEQ ID NO: 305586 - DNA, 122 bp, Homo sapiens
aaggggtgagggacagcacctggaaaatcgggtcactcccacccgaatactgcgcttttccgacgggcttaaaaaacgtcacaccacaagattatatccagcacctggctgggagggtccta

SEQ ID NO: 305587 - DNA, 122 bp, Homo sapiens
taaaggcactgggatcactgaagacaactcctctaggctcacagctggcctttccttgagcgtatggttggaccttagacagagtcaggggtgacagtaagcctccttcttgctggtcaaac

SEQ ID NO: 305588 - DNA, 122 bp, Homo sapiens
gtggtttttatcggccaacgacgtatgcccggtgtctgggtggctgctctggagaatacacgttgcactggtagttattcaatggttatttgagccgcgaagtagattaaatggagggcgag

SEQ ID NO: 305589 - DNA, 122 bp, Homo sapiens
ggattttatataatttgttgaagagtgattctccctcatcctctgcaaacattccataggcgataggaagaactatgcctctgccaagctttctgagttgctgccagaagaagttgaagcag

SEQ ID NO: 305590 - DNA, 122 bp, Homo sapiens
tgccagctggcggtcctgggcctcgctgtacctgcacggtaggtgctttcacggggcctgcggcaccgtgtgtcggtgcagactcccaccaggaccccaggccggccccaccgtctggaacc

SEQ ID NO: 305591 - DNA, 122 bp, Homo sapiens
ccgtgatgtcagagcgggcggcgggcggtgatgtcagggctggtgctgatgctggcggcgcggtgcattgtgggcagctccccgctctgccgctgccgccgccgtcgcccaaggaggatcgg

SEQ ID NO: 305592 - DNA, 122 bp, Homo sapiens
agggaatctgcccttcccaggagaactcctggctgcctccgcgtgctcctagggcctgcgcgaaatgggaaggcgcatcctctagcctgggtaaataagggaccctgcctcacccgggtggc

SEQ ID NO: 305593 - DNA, 122 bp, Homo sapiens
gagaagggagacgaggagaaacaggctgctactttggaagttttgcaggcccacggcggccgcaggtctaacctcggtgcacagagcgctcccaggggccagaccggcgtccgggggccgga

SEQ ID NO: 305594 - DNA, 122 bp, Homo sapiens
ctgtctcttcgaacccaaaggggtacgcgtctgggtgagccaggtccgcctcttccctggcgctggccgggggcgggggtgggtaggctgggacctgtgtctgattagctgggagggggaag

SEQ ID NO: 305595 - DNA, 122 bp, Homo sapiens
cgggcagaggatgtggaggttaagatctgggcagcctcagggcgttgtcctagaaaacaccgtttaaggagagaagtgttagtgtctcggggcgtctcccaggctccgccctgcgcccgcag

SEQ ID NO: 305596 - DNA, 122 bp, Homo sapiens
actgagagagggcataaaccagcagagaactgacaggtagggcctgcacgcgcactcacccgtgcctcagcgccaggcgcacgaagcctttgcgcttctggagcgtaaggcagtgctccccg

SEQ ID NO: 305597 - DNA, 122 bp, Homo sapiens
attacttcccaatatgcatcagtgtcctttattattaattttttcctattgaattcctcccgcattagaatgctgctccatgaggtggggattttgtctgcttgttcactgctgtgtgccca

SEQ ID NO: 305598 - DNA, 122 bp, Homo sapiens
ctcaactaggccccggcaccagactcaaaggatgtcagccgtagccctgggactcccgagcgtggagcccctggccccggggcccggccccccgcgcccgcccccatttcaggtgctgtcct

SEQ ID NO: 305599 - DNA, 122 bp, Homo sapiens
tttcctgcctggctgtcatctccgggccctgacactggcaggtgaccgcaggtggccctccgctccctgctgcagcctgctgtggtccttgcccattcatggcatgtccaggccagaacctc

SEQ ID NO: 305600 - DNA, 122 bp, Homo sapiens
gcttccaggagtgaccaatcagaggacaccaaagctggtcccagggtgcacctcacactccgccccggtcccttgaggccaaggccgaccgaagcccacctcccctgccccgcccagctccc

SEQ ID NO: 305601 - DNA, 122 bp, Homo sapiens
agcattcgactgggcatggtggctcacaactagtaatcctagcactttgagaggctgaggcgggaggatagcttgacaccaggacttgaagacctgctggggcaacataggaagaccccatc

SEQ ID NO: 305602 - DNA, 122 bp, Homo sapiens
ttcacccgctttccacgcagcgccagacaagagagggcaaccgtcaatccagcgccgtggcgatcattacaggtctgcagtgaagcagaaaaacgccgtaataaacaggccccgctgcctcc

SEQ ID NO: 305603 - DNA, 122 bp, Homo sapiens
cacagaaaacaatcccagaggtgtctctatcttctctgtgacagcccatgaccccgacagcggcgacaacgctcgagtcacctactccctggctgaagacacatttcagggggcgcccttgt

SEQ ID NO: 305604 - DNA, 122 bp, Homo sapiens
ccccccacggccaacagcccacagcaggccaccaacacctccacaatgactattttgaagcgacctaactggttgccctgcatttacccctgggtccctccaatccattctcagctgctttc

SEQ ID NO: 305605 - DNA, 122 bp, Homo sapiens
tgagaggtgaagggagaggaaaggaggctgactcacacaggcttcctggtgcttcctcagcggtggatgctgtcaggatcagacccatggggtggagaccttggtgaaccgaagctcaaaga

SEQ ID NO: 305606 - DNA, 122 bp, Homo sapiens
gggggagagggttagctgggggtgtgtcggcagaggaagtcgtgagcagcccggctggagcgtgcaagatgctcctctcctgccctattgcttccccagagtcctttggcaagtccgctgcc

SEQ ID NO: 305607 - DNA, 122 bp, Homo sapiens
gatacacttcaggccaaacacacctgctgggggctagctgaagcagccagccccagtttgcgatcctgcccaggagggccctcaagcgcttgccccagggtcttggcagttctccggaaagt

SEQ ID NO: 305608 - DNA, 122 bp, Homo sapiens
atcttgacctacccgctgctcttcctcctccttatggcttcttggttcctctatttctcgcgtcccggctccactagttggctcctgaaatactgccagggcgcacgacttctctccatcct

SEQ ID NO: 305609 - DNA, 122 bp, Homo sapiens
ttccagatccagagaattcatttcaaagagcaccgcgcagttttataattttttcctttgcgaagttctgggagcattatccggagtgcgaatgacccggcagaggcgagcctgatagacaa

SEQ ID NO: 305610 - DNA, 122 bp, Homo sapiens
ctctggcgtaacagtctggggctaggtgggcctccaggcaggctgggtggctgggctccacgaggttgcttggcgatcctgcctcctcttgcagcattgcgccctacccactcagatacggt

SEQ ID NO: 305611 - DNA, 122 bp, Homo sapiens
ttttaacttttattttagggtcaggagtatatgtacagatttgtcacataggtaaacttgcgtcatgggggtttgatgtacagattatgatgttgtcacccaggtactaagcttagtaatca

SEQ ID NO: 305612 - DNA, 122 bp, Homo sapiens
agccatttctccttccaagcacaaccaacaaccaggtgcactgcgccaacgtctgcccaccgggaggatctgcccccaccgctgtccttcgggaatgtccaaggaagaggctggagggcaac

SEQ ID NO: 305613 - DNA, 122 bp, Homo sapiens
gaaaggcgcggggcatggggcggggcgccgaggggtcgcgcgggtggggagcggagagaacgaagtgggaacctggctgggactccaagggtcttcacacctgcaagctcaggtcccgtgag

SEQ ID NO: 305614 - DNA, 122 bp, Homo sapiens
atttatctcattatattttcacaacaacttgagacctaactattagtatctttattttcccgccgaaaagctaaaagttaggttaaaaacttggccccttatcagtcagtatttcattttgt

SEQ ID NO: 305615 - DNA, 122 bp, Homo sapiens
gtgcggaagcggccggccccgcccccaggccacgtgcgcgacccttcccccctcttctcccggcctggggccctgctttgaccccgcactcaggcatctgctcgtcctcttctctggggttc

SEQ ID NO: 305616 - DNA, 122 bp, Homo sapiens
tggccatgactcatgagtttctcttgcctttgtgctggatggaattgttgactatgaaaacggcagtcacgttttaagtaaggaaagtcccacattgtagctttgtggcctgggagaaattc

SEQ ID NO: 305617 - DNA, 122 bp, Homo sapiens
ttggatacagagtgctaagctgaaatacagtcatgtgctgcataacaacgttttggtcaacgatggactgcacagacagtggtggtcccataagataatggagctgccctatacaggtgtac

SEQ ID NO: 305618 - DNA, 122 bp, Homo sapiens
gagggagccaggggaaaaataccctgacttcacttttctccttcccactagtcctctcctcgggtccctgctggtgacacccagctgggagccagaagacatgtgggccctgtgttttttgt

SEQ ID NO: 305619 - DNA, 122 bp, Homo sapiens
tctttccttcccaggatcgagaatatcccaaggaaatgccaagtaaaaaagtaaaatcagcgattgattttgcgtttggagaactgaccacgtttcttgatcaaatgccgattgcaagtctg

SEQ ID NO: 305620 - DNA, 122 bp, Homo sapiens
ggccggttccccgcgctggggcgggggccgccaggtgtgcgggctgccggaggcaggtagcggcgccgggaaggagggcagcccgagcgtcgcgagcctccacatccgcagcaccggcgggg

SEQ ID NO: 305621 - DNA, 122 bp, Homo sapiens
ttccccccgccccctgttgcaggagacaccgaggctccgcggagctgcggcgggggcccacgcccagagaccgtgcgaggaaagccaacctcgtcctgcctgccctcccagccgcgggggag

SEQ ID NO: 305622 - DNA, 122 bp, Homo sapiens
cgccggaggttcgcgacagggcccggcgcagcctccgcgaccggcccgggcgggcgcccccggagctctcagagccgctgtcgtccgagatcacgatgtaatcctccatggctgcgggcccc

SEQ ID NO: 305623 - DNA, 122 bp, Homo sapiens
gttcaaagtccttcagtgctctccacgacaaattctatacccctgaattaacctcagagccgctctttcctcttcctagaatactctcctccaaatatattcattgtttagctgttacttcc

SEQ ID NO: 305624 - DNA, 122 bp, Homo sapiens
ttccctccataaataaatgcctcgctgagaaagtgcttctaggcattgtgctgccacttccgagtgatattagcttgcaaaagaggaaagcctaatcaaagagaaagtgttccccaaacagg

SEQ ID NO: 305625 - DNA, 122 bp, Homo sapiens
ggagggctggggagagtgaggagatgaaaagtaaaagggagtttctagaggagcagctgccgtcgtgtacaggataccaagtggtagagaaggagaaaggattttaaagttattttcctagg

SEQ ID NO: 305626 - DNA, 122 bp, Homo sapiens
cttccgcaggggcagcggggtctcctggaagccccggagcctcatggaagcccgggagggcggcggagcggggcccgcagcgcggggcccggaggggcagccggcgcccgaagccagggtgc

SEQ ID NO: 305627 - DNA, 122 bp, Homo sapiens
tcatccatttttcttctccaggataccagagatgctgttatatacatgaaaacagtcaatcgaccctgggactggcattgtagatgcctgcagctgcagcatcagcaacagggagcactgcg

SEQ ID NO: 305628 - DNA, 122 bp, Homo sapiens
accctttgtacaggaaaaggggtaggaaaggcttcgaggtccctctgagccctctgatcgcgtccctttcccacgccagggcacacagcatggcagaaaaccgagagccccgcggtgctgtg

SEQ ID NO: 305629 - DNA, 122 bp, Homo sapiens
ttatgaggcgagcaaactcctggagctgctaccggtttagaatcaggaggagcaacttcacggggcacggaacttgagctccggaaagaaaccagactgttcctgagcgatgccctgggaag

SEQ ID NO: 305630 - DNA, 122 bp, Homo sapiens
atttccaggagctaagggtcaacttgtgggaggatggcacaggggctgctggacagaggccgtgcagaaggttctgcagcgggggcgcttgtgggtctcctccatgaggctggagctaatgc

SEQ ID NO: 305631 - DNA, 122 bp, Homo sapiens
tgggtgggaggcccgggtgtgtgggaatgcgcgcggctctgtaaacatctggtgactcaccgcatagctatgtcgtggccggcctgtgcactgacgtgctcgcagtggagctggaagcggtg

SEQ ID NO: 305632 - DNA, 122 bp, Homo sapiens
cgtcgccagacaagttgtaagaacgaatttaaaaatctctgcaaagacatccgagagggtcgacggtagatgtggtgattgggagctgaaaaggatttttcttccgtattcagacataatag

SEQ ID NO: 305633 - DNA, 122 bp, Homo sapiens
atttctgcggggaccgcgggtcaccttctgaatttttaccttcataaacagcaaggactgcgctctttcgcacggcgccccgttttttcgtagagttccgtcggccaaaaccacttgaaact

SEQ ID NO: 305634 - DNA, 122 bp, Homo sapiens
tatggcaccagcagatggcggcaaaagagcagcttagcaaaggcagaggcaaacacttggcgtttctttcatttatgtatcctctcttccttgatctttgcaaaacaggtagcttgcatttc

SEQ ID NO: 305635 - DNA, 122 bp, Homo sapiens
tgtcaaaaccgaatgagaccctggtagagaaatctgcatgagcagggttccgcgcagatgcgttcggtggtggttgcggcccctgcgctgtacgtgcatggtgcatgtcctctccgtgagct

SEQ ID NO: 305636 - DNA, 122 bp, Homo sapiens
gtttctcatttccctagtggggaaaatgcaagaaagagcaagtgagccgcagggaggtgccgctggctgtcctgtcttcccagttgggggggcctggattgcttcacactcagcttaaagtc

SEQ ID NO: 305637 - DNA, 122 bp, Homo sapiens
atgatcgggtcggcacctgctcctctcctttgaattccaaaggacagcatgtcactcatgcgtgtctgttcacagttgccggtggtgatggcacctgaggtgtcttgctgccgtggaaggcc

SEQ ID NO: 305638 - DNA, 122 bp, Homo sapiens
caacctgcgattgcctggatggtcaggctgtgccagcccctgcactctctccagggctgccgcctggaagaacacaccacttagcacactcatgcttttggacacataacacacccgtcagg

SEQ ID NO: 305639 - DNA, 122 bp, Homo sapiens
ctgcagcaccttgggatgctgggcgcctcggcggccccacgctgtccggtgccatcgccccggaagtgaagcacagcaggtcccagcttcccagccctgctgccaccccggctctgcccagc

SEQ ID NO: 305640 - DNA, 122 bp, Homo sapiens
gggagaggcgggtctgtcctcgggaactgcaaggccctgtgagcgggaggactgggatcccggccgcggctgctggaagcgtcgaagctcagcggggccgcggacactgacctgtgcttaga

SEQ ID NO: 305641 - DNA, 122 bp, Homo sapiens
ttcagagctcacccccaggagggtgcagacctcagccaaggtcgcagagcagaggagacccgtgggctgggattccacctgtgcccaccctggcagcatcccacctcctgagtcctctcggc

SEQ ID NO: 305642 - DNA, 122 bp, Homo sapiens
ccatggaacaaagcacggccaggaatggccaaagccgaagagcctcccatggtgtcacgtcgagcccctgccctcggaccagcaacgcagcagacgtcgagcccctaccctcggaccagcaa

SEQ ID NO: 305643 - DNA, 122 bp, Homo sapiens
ggcttctttcctggacgcgtttgctcctggcagtcttgtccgcccttgcctgtagcggtccgcaccctgtagtgtgttcttttgcccatttccgggaatggtttatcctctttgagaagcgg

SEQ ID NO: 305644 - DNA, 122 bp, Homo sapiens
cattctcttttcttcttttagccttgcctccccgattgaaagagatgaaaagccaggaatcggctgcaggttccaaactagtccttcggtgtgaaaccagttctgaatactcctctctcaga

SEQ ID NO: 305645 - DNA, 122 bp, Homo sapiens
gacaaggtgacatttaagcggatgcagggtaaagcgtggcttgttctgcggcagcagccacgctgatccagagctcagagcccagcccaacactgggggacgtgacacagtgaggaagtatg

SEQ ID NO: 305646 - DNA, 122 bp, Homo sapiens
ccaagtgctcaatgttattaaaattttttcttctctttgtctcttggatgtacttttctacgtgttggtcttatttaaggcaggctttcccttccaggtatggccaccagtgctccagattt

SEQ ID NO: 305647 - DNA, 122 bp, Homo sapiens
ctggtgaatgtgaacgctccgggtaaggctcggtggctgctgcggtcccagacccttcaccggcccttgggacccagggctaggcgtaacctgttggtgctgtcccccaaaacgcaggctta

SEQ ID NO: 305648 - DNA, 122 bp, Homo sapiens
ttatcagcctgcattctcggctgaaaacgcaagtcagaaagtctgcaactggaacagctgcgagtccctggccgtgcaaggcacaggcatgccagtggtccaaggaaggaaaggaaactggc

SEQ ID NO: 305649 - DNA, 122 bp, Homo sapiens
tggccgttggaattcaaaagtggcgggtgtggcgcggggctggtagcggccggagccgtgcgagttctctaccctgcttcgcgagcgggcgagagaacgcgagtcccaggatccccggcacc

SEQ ID NO: 305650 - DNA, 122 bp, Homo sapiens
acctgggactgccatgacggtggtaagaggggtaactcgagcctctggctttcgaaaaggcgcttgcttcccgccagctgtgagaacaaggcacagtcaaagcggcgttttccttcccccag

SEQ ID NO: 305651 - DNA, 122 bp, Homo sapiens
ttgtgcacccttccttttgaaccactcctaagctagagcgaattgagtgaactttgaaaccgatttgtattgacacagtaatccccctgtgaggtaattggctttccagactctgcaagttg

SEQ ID NO: 305652 - DNA, 122 bp, Homo sapiens
cagaggccagggccggagcgcctgcgcaaactgcgcgcagggccgtcgtttcccaagccccgccccagtttcctaggcaacgtggccttccagaccgctggtagtggacttgaggctgtcgg

SEQ ID NO: 305653 - DNA, 122 bp, Homo sapiens
tggggcgtgtgtagtcaccgccctgtggacatcactaggaagaggtggcccttggtgggacgtggacttggggcccagagggaccccgggcagatctgaggggcccgaccttctctaggggg

SEQ ID NO: 305654 - DNA, 122 bp, Homo sapiens
ccgagtgtcagctcccctggccggttgcgcagcccctagggtaactgtctgagatccaggcgccggggcagcccagggggtccgtggccgggagagaccttgaaacctccattccctgggac

SEQ ID NO: 305655 - DNA, 122 bp, Homo sapiens
tcatttttatggtgtcattttgatgctaaccacaagccaggaagcaggacagacaggcaccgaggccttttgaaaggtgaacaccctgaagcccagagaggtgacacacgtcattgcattag

SEQ ID NO: 305656 - DNA, 122 bp, Homo sapiens
acaatgtcttaaccaagaatgtcctaattaaggtcagatgacaccaagttgtcaagcatccgtctaaggtaggaatagagccaaaatagcattaactgacagttcataaagagtgaggtgca

SEQ ID NO: 305657 - DNA, 122 bp, Homo sapiens
atataatattttctagggccaaattagtacctgaggtcatgacataatgcttaaggagctcggcagccggaaaggaacagcggatctctaatatctcacctgagtatggggacattgatgga

SEQ ID NO: 305658 - DNA, 122 bp, Homo sapiens
gaagactgtgcataaagctggtctaagaacaacaatatcctggccaggtgaggtggctcacgcctgtaatcccagcactttgggagcccaaggtgggtggatcacgaggtcaggagtttgag

SEQ ID NO: 305659 - DNA, 122 bp, Homo sapiens
ttgcatcttagcttgtctgatatattttattccaatgaagtccacaagttctagatgtctcgcctctcttgaaacatcgcattgcttgtgtcccctcgccctaccctgtggtctcctgtctg

SEQ ID NO: 305660 - DNA, 122 bp, Homo sapiens
gttgggacgagaagcaaagttaaaccggggtcagacacatgggaggctccaaaagccattcgcagtccggtctattttccacctcggtgacgagaagatcaccaggcttctgccgctccact

SEQ ID NO: 305661 - DNA, 122 bp, Homo sapiens
tgtgcctgtcctgcagactccgcgtctgaaatggtatttccacggcaggcagcccttggacggaggactcatgtggactggtgggcatttcccatttctcaatggctgagctgagttccttc

SEQ ID NO: 305662 - DNA, 122 bp, Homo sapiens
agtgtctgcgggttctggttctgagaccccacccgttcctctgcagccctggtgtcctgccgccttggcgcctgggcagagctgtcctctctaactttaagggacactgcttagaagatgag

SEQ ID NO: 305663 - DNA, 122 bp, Homo sapiens
atgcggggcctgccagcctcgctcctgaacagccttcccggggcggcggagtcctgcaggcggccgtgcctggcgcacacgcgtggctccaacacgaactagcctatggcctcaccaagcct

SEQ ID NO: 305664 - DNA, 122 bp, Homo sapiens
ctatcaccggcccactctccgtgccgcgtgtcccttaaaagctggggcctgggacaggaacgacagacaatgcagccaatggcgtcacgcgcggtgccccgctacccaatcgaaaggcgtgg

SEQ ID NO: 305665 - DNA, 122 bp, Homo sapiens
gcacgcgagcgcgccgagctctgctcccgctgctcctgcgaagctggtgtccacacccgccggcctgcaggcacctcggggcccacgtgtcctccggccacatcccaccctggggccacctg

SEQ ID NO: 305666 - DNA, 122 bp, Homo sapiens
cccaggctggcccggccacaggggaaatgactccgggaatccttcactgagggtgggaagcggggatgtttaccagaccattcccatgacggctcctgcctgcctcccccggggtgcgtgcc

SEQ ID NO: 305667 - DNA, 122 bp, Homo sapiens
gaagcaattgaactcaaaagtcattgcacctttttacttgcatgcctcgatcgtcacggacgggatatatagaccccacctgtgacccggacatccaattcctctgcctcttgcttccctcg

SEQ ID NO: 305668 - DNA, 122 bp, Homo sapiens
ggtgctgtggctatactgctggctcctctcatagtcagctctaaagaattgaaagttggccgggcacagtggcacacacctgtaatcccagcactttgggaggccaaggaggtggatcacct

SEQ ID NO: 305669 - DNA, 122 bp, Homo sapiens
gctgaatgaaggaaatcagtctagataacatctttgtgaaatgtatgcctatgaactctgcgtcacacaatacaaaggaaattgccattgtcctgcacaagttaggtgaacaaagcacataa

SEQ ID NO: 305670 - DNA, 122 bp, Homo sapiens
ggccgcagtgcggtgacttgaattccgattcgcactgccatttctctctgcatgggtgctcgaatcttgccttttctctggagctccttctgcgcttgggtgtcttggctgtctgcctgctt

SEQ ID NO: 305671 - DNA, 122 bp, Homo sapiens
cccgccctcaatgccgaagcctctcggaagcaatctttcgggacggaagttaagtagccccgagcgggaggctgtggcggaagtggtcgcgttaccgcttgtttgtgcgcatgcgccactct

SEQ ID NO: 305672 - DNA, 122 bp, Homo sapiens
ctcgggctctgaggggccaggccaggtggacagtgggcggggctcagacaccgaggcctccgagggggcggaagggctgggcggcaccgacctgcggggccggacctgggccactgccgtag

SEQ ID NO: 305673 - DNA, 122 bp, Homo sapiens
atgtgccctggtaagtgtgtctgtttgtcatcagtgtacattctgcatgtggcagcagggcgagggggaggcgcacgtgtctaaagtgcacggagccttcctctacccctatgtatataccc

SEQ ID NO: 305674 - DNA, 122 bp, Homo sapiens
cagggtggggtggaagcagctctccataagccacgcccatcagtgtgcccagtcagtgggcgtgggcgttaccactcctttccacggaaatgactccgacgacccagatgttactacctttt

SEQ ID NO: 305675 - DNA, 122 bp, Homo sapiens
cgcgttcccgtccctcactgtgactctgacaggtgcacatcaagagacccgagatgacctcgtcctcagtgtgagccctgcggggccccttcaccaccccctccgccctgccccggacacaa

SEQ ID NO: 305676 - DNA, 122 bp, Homo sapiens
ggtcaccagacttatcgcccgggcccgagccccccgggagccagaagagtgtttgagaaacggacattctccgccggtcccaataggggtccgacaccagcccgttgacgcgcgtttccccg

SEQ ID NO: 305677 - DNA, 122 bp, Homo sapiens
ctgactcaagcggaggcgcgcggaacagtcgccgaggcgattcccgcccaggtagttcagcgccccagtccagctcccggtaccgttccccacatggtctgttttgtgggaggctccttctc

SEQ ID NO: 305678 - DNA, 122 bp, Homo sapiens
cctgaatttggcttgtaaatgatagtgttccttggcactccgtcctgcctcttcatttctcgtggtcctgcattcccatggatggtgtcctttgtcccagacttctgtcctgaaatccagat

SEQ ID NO: 305679 - DNA, 122 bp, Homo sapiens
ccatcaccctgcctcagctatggggaggtattggaattcaagtgtacagactctcaagagcgtcagcaggtacagataagaaataggaaattctgaagtttgaagtctgttgacctggagtg

SEQ ID NO: 305680 - DNA, 122 bp, Homo sapiens
tatataattacgaagataccagcttcagccgacatgaccgtgacctgtgtgaaagctgggcgggtggtgggaaacctgtgtctgtcgcgtagcagcaagttgcatgtggagaagcagaagca

SEQ ID NO: 305681 - DNA, 122 bp, Homo sapiens
gtggaatggcctggcccccccagccccaccacccccaccccggctgcagattacggagaacggcgagttccgaaacaccgcagaccactagcccacccagcatcagagaccttctcttcctt

SEQ ID NO: 305682 - DNA, 122 bp, Homo sapiens
cgggagtctacgggtctcggaggccctggggctccgccctcgggaatgtcactccactctcgctccgccctacgcctctcccaggccagcttggcggccctttggcctccctgcctctcgtg

SEQ ID NO: 305683 - DNA, 122 bp, Homo sapiens
tctgaaaccttctagctcagctccatttaggggcaaactgcatgtaggcactgagacctccgtttccgtgcaattttattgttagactgacaggctggctcctggtctgcatgtgaaatcag

SEQ ID NO: 305684 - DNA, 122 bp, Homo sapiens
acaaggggaaggaaggggaagctcagcgtggtcacccggcagtttctccactctgaaccgcgtgctgggggtcacggggctcccgctgctgacgaggaagcagggcccaccctgtccagcct

SEQ ID NO: 305685 - DNA, 122 bp, Homo sapiens
tcaacggcaaagaggtaaccctgcagctcccactctccactgagctctgaccttaaagttcggtcaggttccttaaggaaaagaatgtatcgccctccccccacctctcccagctggggcct

SEQ ID NO: 305686 - DNA, 122 bp, Homo sapiens
atatgatgagtctggagagctagttaggcagaagctggacctcaggacatgcacaccatgcgaaggagtttggaggttacctaagagcaatgggaggctgtggaagggtttaggaaagggga

SEQ ID NO: 305687 - DNA, 122 bp, Homo sapiens
atcgcctcctccgagtttgcagatgacccttgctcgtcggtaaagcgcggcaccatggtacgggcggcaagggctttgctctccgcggtgacacgcttactcatcctggcggacatggcaga

SEQ ID NO: 305688 - DNA, 122 bp, Homo sapiens
gagctagtgggggcgtgcctgcaccttcctggttgtggcttgctgggggcaggccttgcacggcgttccagaagtctctggaataccaagttccaaaacactttggtgacatagtgatgagg

SEQ ID NO: 305689 - DNA, 122 bp, Homo sapiens
gcggccggggcggggactgcagagcaggctgcactgcgcggtacccactgccggcctgcgcggtactcactgccggcctccgcggtacccactgccggcctccgcgctacccggccgcagcg

SEQ ID NO: 305690 - DNA, 122 bp, Homo sapiens
aggaaaccgcgtctggcctggcagaaagccggactcccatcaacaatgtgcagggaaaggcgctcccctctgtcttctgtgcaccaaccccaaccataaacactcagtggaggctgcaccac

SEQ ID NO: 305691 - DNA, 122 bp, Homo sapiens
cgcgagggcagctccgcgcggaggtgggaccggcgggttgggaacggagttggggcccgtcgggggccggcgcgtggagggtgggaggatccggccgctgccgggcggatgggagctgcgcg

SEQ ID NO: 305692 - DNA, 122 bp, Homo sapiens
aactcctcctctcgcctctttccctccctccttcctgcctggggcctgccctcctttctccgccccccctggaacactgcgcggttcggggctctgacccacccacctcctccttttgtgcc

SEQ ID NO: 305693 - DNA, 122 bp, Homo sapiens
tcctagaatccccttctccaaacgattagtctaaattttcagagagaaatagataaaacacgccacagcctgggaaggagcgtgctctaccctgtgctaagcacggggttcgcgcaccaggt

SEQ ID NO: 305694 - DNA, 122 bp, Homo sapiens
ccaattcctctttggataaattttaaaatccaaccccctgctgattcagaaatgcatcctcgcaatcctgatgaaaatcatcaacatttatgtattcacagcagccaagaggacggttgaat

SEQ ID NO: 305695 - DNA, 122 bp, Homo sapiens
agtttctgcaggagggtggtggcagctgcctcttcaacaagcccctcaaggtaccagccccgcggcggggagcatgggagcgggccctgggcggggtccgggccagactcccgacctgtcct

SEQ ID NO: 305696 - DNA, 122 bp, Homo sapiens
gcggcccgggaagctggagggggcggacccggccggcgagcgcaggcgctccctggctcacgcgcgcaccccggccccaccacccacccttacgccgcggcccgccctccggggcgggtaag

SEQ ID NO: 305697 - DNA, 122 bp, Homo sapiens
gaggagagggatcgaagggagagcaagaagatcgcggatgaggatgccctgcggcgcattcggcaggcagaggagcagatagaacacctgcagcgcaagctgggtgccaccaagcaggtgcg

SEQ ID NO: 305698 - DNA, 122 bp, Homo sapiens
aggagagaatggggagttactgtgtagtgggtacagagttttagtttggaaagatgaaaacgtactggtgatggatggtggtgattccacaacagtgtgaatgtagttcatgccactgaatt

SEQ ID NO: 305699 - DNA, 122 bp, Homo sapiens
gaggtgtgaggcggtgtgtccattggagccactggaatcgggcataaccctgggcccgaccgtgagcgtgcaccctggggtgaacaccacccagcgagaatggctctgggaacacaggccag

SEQ ID NO: 305700 - DNA, 122 bp, Homo sapiens
ggcacacactcgtgtgcacacatccaaccgggcacccccgcgcgcacacgcccgtgcccacgtgtgcacgctcacacccttgcacacacccaggcgcgcgctggcacacttacccggagaac

SEQ ID NO: 305701 - DNA, 122 bp, Homo sapiens
ctgcttttaatcccaccgcgaaggccccaaatatgaggaggcccacaaccaagaacttgccgcagtttttttgaatgtaacaacccagtttaaataagagtctctgaaacttcgctctcagc

SEQ ID NO: 305702 - DNA, 122 bp, Homo sapiens
gagacggatcttggaggccagggtccaggctaggaggctggggtagtggggccaggagcccgccccgcgctcgagggggtagcggccttgggagggttgcctttgagacaaagtggggggcc

SEQ ID NO: 305703 - DNA, 122 bp, Homo sapiens
gactcgcggaagagtcacctgatcttctcccaacccagctatgcagacacgctcatcagccgggagagttgtgagaaaagcgagcctcttctgataactcaggatttacttgaaacaaaagg

SEQ ID NO: 305704 - DNA, 122 bp, Homo sapiens
gcgccctgagggctcgctgacctactgggtgccagagaggctgcggcagggtttctgtggcgtgggtcgggcagcacaggccttggtgtgtgcgagtgccaaggagggcaccgccttcagga

SEQ ID NO: 305705 - DNA, 122 bp, Homo sapiens
gtgcgcctcgcggatctccttgctgagctccatttgtagttgagcttctcctccgcctggcggctgaagttgttattctcctccagcgccttgtgcagcacctcccgctcgtgctcgcgcgg

SEQ ID NO: 305706 - DNA, 122 bp, Homo sapiens
gaaccgatcgcatccgagccctgagctagcaggggcgggtgtccacgcgagggcccccgccgtgggaggtcgccaaaggagtggccacttacacgtccgtctcatgcagaggctcctggagc

SEQ ID NO: 305707 - DNA, 122 bp, Homo sapiens
ctgaacagaatctgatcctgaaaataattattttgaatggtacagtaagcatgcatggttcgatatgaatgagttagcatttgtttatcctgcacagtatataaagtgtggcacacagtatg

SEQ ID NO: 305708 - DNA, 122 bp, Homo sapiens
gtacctggtggtgtccatggcgatgcaggcacccagtcctgggcagagatataaatttcacgcctgttctcactggacctacgcactcccttccttccttcccattttcttggccttaattc

SEQ ID NO: 305709 - DNA, 122 bp, Homo sapiens
agcgcaaggctgggcaggttttgctcaacgtcatgaagtctgatctccacgcacagaacccggcgtggtgcccacaccgtgtgcgtgagcacagggacagaggtgtggacggatgacatcgg

SEQ ID NO: 305710 - DNA, 122 bp, Homo sapiens
ggactgcctggagatctgcatggagtgctgtgggctctgcttctcctcctgagcctctgtcgggggctaagccagcctggcgcccctgcagattccagcagggtccctctgagtggggccag

SEQ ID NO: 305711 - DNA, 122 bp, Homo sapiens
ggggcgtcgtctccgcgtttccaacctgttgaggctcctcgccgcgggccgggccttgtgcgcctctgtccccgccgccctcaggcctctgtccccgcgcccgccgtggtgtcgggttgcgc

SEQ ID NO: 305712 - DNA, 122 bp, Homo sapiens
ccgtgtgtcacatcgcctgacacacttctggttgtgtggtctctggtggatgatgtctaccgttttccctcttgggaccctagggactgtgggtggtgttctcagggagctggtcagatgtg

SEQ ID NO: 305713 - DNA, 122 bp, Homo sapiens
gagaggcaatgaggcggggggctcggggtgcacggcacgctccgcacactcccccttcagcgctcactcagacttggtttccccgaagacacactctcgtccccgccgctgattgcccactc

SEQ ID NO: 305714 - DNA, 122 bp, Homo sapiens
cccagcagtgagcttctttattgtttaaaagctgatcacatctctttctgaaaagcacagcgtacttgttacccttgctacaaagcagccacaatttactgagctgaaaatcaatatgtgat

SEQ ID NO: 305715 - DNA, 122 bp, Homo sapiens
agaacatgattgggttaattaagtaaaagtgaatattttctttactgagtcataaaattacgggcatatgtcttaatcagctaaggctgtcataacacagcaccataaactcaatggcttaa

SEQ ID NO: 305716 - DNA, 122 bp, Homo sapiens
gtcccttcaccccacactgcccaaatggggagcccgggcagcagctggctccaggcaccccgtgtgcctggagctgggaccttgcccttctgggcctcgaagggttaacacccctggctctc

SEQ ID NO: 305717 - DNA, 122 bp, Homo sapiens
gctcagtagaacacggaattggggccagtgtggggtctctactcaccctgtcacctttcacgcctatgtcacctttgaacccaggaaagccatcctcaccctgagaaagatagaggtgagag

SEQ ID NO: 305718 - DNA, 122 bp, Homo sapiens
ccttgatggccttggctccccgcttggcctcctcggtccccttttcactcagctctgcatcgaaccagccacagaaacggttctcctggttccatgtgctctcgccgtgccggaccatcacg

SEQ ID NO: 305719 - DNA, 122 bp, Homo sapiens
cattgggaatcaatgcgcttgggatggggcaggtgcggactagtgccaccagggggcgcgcggagagcaggattgaatggagacgtgcggcgtttggcactcctagcggaggaatggctgag

SEQ ID NO: 305720 - DNA, 122 bp, Homo sapiens
tgacgtgtctccatggggccttaaaccttcagggccacgttgtgatttatcttcacacagcgcttggcgcatgcgggcctctaacgaatgtttagaatttcagtgactctagtatcaccgtt

SEQ ID NO: 305721 - DNA, 122 bp, Homo sapiens
cgtccactgctgctaccccggccccggatgccactgccgaaacctccgcggaagccaccgcggttcccaatcccagggccccgacggccaccagggcctccgggttccaagctgcacctgcg

SEQ ID NO: 305722 - DNA, 122 bp, Homo sapiens
aagttgtagagaatatcccttttgttatcagtcaggatgagctaatttatgctgcagtagcgaacatggaaatgttagccacttaaaacaaaaaagggttatttcccattcacgcagtatgt

SEQ ID NO: 305723 - DNA, 122 bp, Homo sapiens
cgcgtgtgtgtgtgctggggttgtgtgtccttgaagcctggagccagggtgttctcggctcggtcctgtgatctgtgaagctcttgtttcttgtcaggttttttatttttcattaatttatc

SEQ ID NO: 305724 - DNA, 122 bp, Homo sapiens
caacagtgtaaatggtaccaactgtcactgaataaaaggccagacagctgaaatggcccacgggaatttgaagaaactactggccctggcagcagcaagatatcctgaacctagtgcctggt

SEQ ID NO: 305725 - DNA, 122 bp, Homo sapiens
aagggaggatggaggtggcctggttggtggtttaaaaaacactgtggccactggaggggacggttggagggacaatgagtgcgaggagggtgtctatcccagatttggtgcatgctccaggc

SEQ ID NO: 305726 - DNA, 122 bp, Homo sapiens
gcaaatttattttctgcttctaagccaggtggtttggccacagataggccaagaagaatacgaacagacaagccttgctgggtttcccactcagtttattactattagaccattcccttttt

SEQ ID NO: 305727 - DNA, 122 bp, Homo sapiens
cttaacagatgtgtaccttgacgctgacagactggtttgctaccaggtgcacgtggagagcgagcactggaacccagctctcctaaatctagatcacgctgctgtacttgaaggctagatgt

SEQ ID NO: 305728 - DNA, 122 bp, Homo sapiens
atcagccctgcaactgcacctgaagccacctccttccaatcgctggactattcacttatgcgagccagtggggaggcaagactcagccagtgctgctgaagtgaaggtcacagggagggagg

SEQ ID NO: 305729 - DNA, 122 bp, Homo sapiens
agattctcggggccgtgctgggacctctcctcctccctgggcctccggcgggcttgcagccgcgtgcgtggcctcagccaccctgccacacatatggcctgaccccatcctcaccttcaccc

SEQ ID NO: 305730 - DNA, 122 bp, Homo sapiens
ggtgacgtcacagagcaatgtccaatgggaaagcagctcggtgtcacgcacctcctatcccggcgggcaccgcctgcgccgcggcgagtgaggcgtcgtccgtactggaggctagctcttgt

SEQ ID NO: 305731 - DNA, 122 bp, Homo sapiens
gacaagaagaagaaaggcaaaggcaagaggcaccaggaccggggccagtgaccctagctgcgcctcttgggaccatcctcaccgtcacctcccagggctctgtagaccagcagcaacttctt

SEQ ID NO: 305732 - DNA, 122 bp, Homo sapiens
ctccgacaggggcgtaattaaaggggcaggcgcccacgtaaagacgcgccctacgcaatacgtggagtttctcactttgtggagccgcctggaggcgccaagatgaagcccatcggggaagt

SEQ ID NO: 305733 - DNA, 122 bp, Homo sapiens
ggacgggggatgaggtaatgatggagacggctcagggaaggccccacgagagctgggtcacgcgggggctccctcgtgaggacccaggccagcactcagagcccacccctgagggcccacca

SEQ ID NO: 305734 - DNA, 122 bp, Homo sapiens
ggcgggggggggggatgcggcgcagcgggcggtcccagcgagtcagaagggtgcagcagccgggtcggggatggccgggcgaggctgacccctgccgggcagcgcgggtggcgccacgggcg

SEQ ID NO: 305735 - DNA, 122 bp, Homo sapiens
gtgctttattcctgattccatttagtttcatggagaggtacaggtggtgcagtcagtaaacggaagccagccatttgcaggcaacttttcaagcataagggaaagtacttttgttatatttg

SEQ ID NO: 305736 - DNA, 122 bp, Homo sapiens
ctgtggtcggtgcgggcgtggcaggggcggggcggccttatcgctcggctctcccgcctacgcctcccgctgcagagtaagccgggctgccgtcttctcgccatgggctccggtgagtctgg

SEQ ID NO: 305737 - DNA, 122 bp, Homo sapiens
gaaagagggaggaagcagcaggagcctaggggcaccggcacagtgtcactcagcaaagtgcgctgcgtccacacgccctcccgggcctgtgcatagaacctcacgcacacactcacagtccc

SEQ ID NO: 305738 - DNA, 122 bp, Homo sapiens
ccttctccgagtcccagaatcagcgacccccagcctgtgttcaggagcaccccgtgtgcccgccgcacagccccgagggtcctgggacaccccagcctctctgcatctgtctcccgtttcat

SEQ ID NO: 305739 - DNA, 122 bp, Homo sapiens
tttcctctataattaatttccttgagtcactgaatacctttatctaccttctgccataaacgtctcattttctctaatatccttatttgcagtaagtcaaccagaattgagcacaacatggc

SEQ ID NO: 305740 - DNA, 122 bp, Homo sapiens
actccctgccagctcagcttgattgctttctgggttacctactgtggaggttcagcagctcgaccttcctttcagtagagctatattgtcctgctctgaaaaaaggcagattaagaatttac

SEQ ID NO: 305741 - DNA, 122 bp, Homo sapiens
aggtcaaagttttctctgcagggtggtatttctgtggctgagctcatgaaccctggaatccggacttctgtaaacacactcttggtctaggccagcggttcttaaactgtgatccctggacc

SEQ ID NO: 305742 - DNA, 122 bp, Homo sapiens
gccgacgatccctctgctgggaggctgggcgttccgtggagagaacagctgagaccccctcggcagcttcccaggcaacagaaggcgcagggaggtggtggtgattcactgtgtttctaaca

SEQ ID NO: 305743 - DNA, 122 bp, Homo sapiens
cacctgccagacccccaacatagcctgcaagaatagctgtaaaaactgccaccagagccacgggcccatgtccctgaccatgggtgagctcacctcagggaagtacccaaactgcaggtaca

SEQ ID NO: 305744 - DNA, 122 bp, Homo sapiens
tgcagtattaaattgcagtactttcatcaatgaaaatgcacacacagtaaacaggataaacgagaccttcagactcagcaattccagggctggatctcctcctctggagggaaaaaagcaaa

SEQ ID NO: 305745 - DNA, 122 bp, Homo sapiens
tgcgggtcctgcgcaaggccccagtgccccggctaaacctttgccgcaggatcccggagccggcgtccttcaaggagcacagagggccccgtagcacgccccttgcccagcgccaccgaccc

SEQ ID NO: 305746 - DNA, 122 bp, Homo sapiens
gatggttccccagaggaaatggtattttactcacttgatatctgaaatttgagtcctcatcgactagggaaagactggaggtgggacaaggagagtgatttggagggatgagaaaaacataa

SEQ ID NO: 305747 - DNA, 122 bp, Homo sapiens
ctacccggcgcctgtttgtgtccccgggtgtggggtgcggggcgcggggcttcctgggggcggccgtggcccggcggtcttacttcgggaagggagccgcggtgtgggcgtgtgttccgcct

SEQ ID NO: 305748 - DNA, 122 bp, Homo sapiens
cctgagcgtccgttgccattacgaggcggctgagcagcggctggccgtggaggtgctgcacgccgcggacctgctccccctggacgccaacggtgagttgcagcggggacgggtcgggtggt

SEQ ID NO: 305749 - DNA, 122 bp, Homo sapiens
ccctccccggacgtggcggcattcagatgatgggaggtgaggaatgagctcagattacagcgcacattagggaaaacacagcaaggcatttggcccagaaaaggcacctgaggaccttgaat

SEQ ID NO: 305750 - DNA, 122 bp, Homo sapiens
tcactagtgtttactgcactaggttttcgtttgggagaataacaaagcctcctttgagttcggggaaggttggaagtggaagctgcctgtttgggagagatgacttctgacctcttctgggt

SEQ ID NO: 305751 - DNA, 122 bp, Homo sapiens
cccgccccgggacgcctgggcggagccatgttgggaatcgcaggctgaagtgcgcctgcgcggagcccaagaacggaccgacggccattttgagcgtggctgggaagagaagtgtattcgga

SEQ ID NO: 305752 - DNA, 122 bp, Homo sapiens
ggccagttagcctcaccccagaaacatgtcacaggcataaactgctaaacaggcagggggcgcaggtccccaaacccttccgagggccccaagacaagtagctctgaagaggagggctcagg

SEQ ID NO: 305753 - DNA, 122 bp, Homo sapiens
gcggggacgctgtgacgtcacagagcgcccttctgacgttctcacggacccgctttgcctcgggggcccacgctggagcccacccagtactactaagaaatgaggaggaaaaaggggcgccg

SEQ ID NO: 305754 - DNA, 122 bp, Homo sapiens
tcggagccccgcccccgtcccgaggtcctgtgggaagtgaggatctcacccgcgcgtctgcgctaaagcgcaggcaccgctgagcccagtgaaactacaactcccagtgacgccacagcgac

SEQ ID NO: 305755 - DNA, 122 bp, Homo sapiens
gctctgcctgacagaggcagtactgggtaggcatcagggacccaggaaagacagggcaaacgcaaatgcttcctagacgtgctctccttgctggattctagaaagagaccacaagcctcccc

SEQ ID NO: 305756 - DNA, 122 bp, Homo sapiens
tgttccccacgctgcacccccactctggcgcagcgaagtctgcagatctctgggccccggcgctgccgaagcctcccccacgcgccgcgctcactcgctgcacaacagcgccaccacgaggc

SEQ ID NO: 305757 - DNA, 122 bp, Homo sapiens
gaaacttgctaggactaagaagccaacgacgcgcgaaaccgtggggtcctgcgacagagacgccggcggcgccgccacaggactgcgttctggaggccgagccggaacccgtgcggcggcgc

SEQ ID NO: 305758 - DNA, 122 bp, Homo sapiens
ctcatctcccacccacccccagcatccagaactacacggagaagttgggctggtaccactcgatggaggcggtgcgcagggccttccgcgtgtgggagcaggccacgcccctggtcttccag

SEQ ID NO: 305759 - DNA, 122 bp, Homo sapiens
ctgtgtcccaaggaaggggagacggggcggacccagccgggccctgagcctcctcggacacgtcagcgaaactggagccagccgtcctggccgccggcacagtcccgcctgcctggaggggt

SEQ ID NO: 305760 - DNA, 122 bp, Homo sapiens
ctccaagaagtgcatccaggttggcggggagttctacactcccagcaagttcgaagactccggcagtgggaagaacaaggcccgcagcagcagtggcccgaagcctctggttcgagccaagg

SEQ ID NO: 305761 - DNA, 122 bp, Homo sapiens
ggggcggggcttgctcagggttaacgtcactactgagcgccgggcgcgttccgttggcggcggattcgaacgttcggactgaggtttttctgcctgaagaagcgtcatacggaccggattgt

SEQ ID NO: 305762 - DNA, 122 bp, Homo sapiens
ccgaggacagcactcacctaccagctgcggggagacagaggggcagctggggttgggagacgacaggctaagatccacaagggaaacagacaagtggctggtgccaaccccactctaccgcc

SEQ ID NO: 305763 - DNA, 122 bp, Homo sapiens
catcgcagttgctccggatctttgcacacactccacgggcagttggaggtgagctgctgccggccacgccagaggctgcaacaccaggtaggtgaccggctggtcggactgagatgggtgct

SEQ ID NO: 305764 - DNA, 122 bp, Homo sapiens
cagctcccagcaggccctgctgcgacctcggtgcccgctgggagccaggcccgcagagagcggcactccctcaagacccaggtccctggcctgcccaaacctatttggggtgggagggtctc

SEQ ID NO: 305765 - DNA, 122 bp, Homo sapiens
cgcctccggggcggccagaccagagggctctagggccggccgggtgctctccccaaactccgatgtggggctcaggtgacccttgccgcccccaacccgctccacacggcccctctggcctc

SEQ ID NO: 305766 - DNA, 122 bp, Homo sapiens
acttggccttcctcttggccgtgcgtcaggagggcggtggccgctaagaggagcaggagccggaggtccacaaagctgaacatgtctagaccctagacatgtagactctttgtggctgggga

SEQ ID NO: 305767 - DNA, 122 bp, Homo sapiens
cagggagagggaatccaagagacttgctagttaccactaagtccaagagagcctttgaaacgggatacgctgggccacctcccctccggagaccaggtgaaatcacaagggccagaacgtgt

SEQ ID NO: 305768 - DNA, 122 bp, Homo sapiens
caaggatcaaccagcttcccggaaagactgctgccatcagcaccctaaggtctttcttcccgaaaggcccagcctctagtcgcagccgtctgggtaccagcaaacacaccaaatcagttcgc

SEQ ID NO: 305769 - DNA, 122 bp, Homo sapiens
agccccttccagaggctgtgagatggcatattcggcgtaggtctgaggggccgcctgggccgaggtgtccacagtgggaaggctctgtgtagatcggaataagggcttggcctgtggggaga

SEQ ID NO: 305770 - DNA, 122 bp, Homo sapiens
acgtcatagcccatgccttcaggctatttgcattgcatatgggggaatgaaagaagtaaacgtctatgatacagtagaatgtatcacattatgagcacaaggcaggaaataatgataaatga

SEQ ID NO: 305771 - DNA, 122 bp, Homo sapiens
accgggcagccggttcacaggagcagcgcgaggggcgggggtccgatagcgggacaaaggcggggagggggcgagcggaggagggcggctcggggcgcccgggcgcgcatcgggcaggagac

SEQ ID NO: 305772 - DNA, 122 bp, Homo sapiens
catgtttctggatcatctggataccacatgatggatgtattccccgttacacatccccctcggagccctggcatctgctgtcattgtggggcttctcccccttgtagcggaagccgccttcc

SEQ ID NO: 305773 - DNA, 122 bp, Homo sapiens
ctccccgccggcccggctcgggccgcgcaggcgcaccaggcgcggtccggaggccgagggcgaccacagcagcctccgcctcctgctgctcaggactattctgcgctgggctagtcggcggt

SEQ ID NO: 305774 - DNA, 122 bp, Homo sapiens
atacttctcactgtcgaaaacgtggaacagaaagcaaggaagcaagcaaagcagccgtgccgctgctccccagagacaagctgcgttaacatgagggtgtatattcttccagatggtttttc

SEQ ID NO: 305775 - DNA, 122 bp, Homo sapiens
ttcaataaacactgaactaactgctctttaatacaggctctcccagaattttctagtaaacgccctagccctttacaagttggtgttcaacttgtgaagagaagaccattgtaaaatagatt

SEQ ID NO: 305776 - DNA, 122 bp, Homo sapiens
atggcttctttccctagccaaggactctatcagccttgccacttggggacaggttgagctcgctcagggagtcaggccccacagggctccctgccaacctcccatcattgtgattgaattta

SEQ ID NO: 305777 - DNA, 122 bp, Homo sapiens
ccgagaaggctcctgtggctgttgaagtgtcgcggacctgagctggggagggggtcggcacgctgccctcagcctcggtgagttcaatcccagccatttggggcaggcgagagtgggtgaac

SEQ ID NO: 305778 - DNA, 122 bp, Homo sapiens
cggaggggacagtggccaaccagggcgcggcctgggtgggtgggttttaggctgtaagggcgatgcaaaatatgatgttcctcaccgaggagcacagaaaccagaaagttcctgggcaattt

SEQ ID NO: 305779 - DNA, 122 bp, Homo sapiens
tgcgccagcttccgttccaaacggaacggatctccgctggagacaaaatgcgacacaagacgacccgcccttacccccagggagcttactgtgagcaagggaaagacagacaatgaaaagga

SEQ ID NO: 305780 - DNA, 122 bp, Homo sapiens
gtataatacttatcagtgataggcagtctgtatgaatcattgcttatagattttagtcctcgaacagttcacattctgtaaaaatagtcataaattcttaactcaaaaatgttttatggctg

SEQ ID NO: 305781 - DNA, 122 bp, Homo sapiens
cagagccccctttcagcagaggcctgggcgggatttagggcacagtgggagggggagaggcgggcctgggggtcgcagtccccaccccacccataatcaggtctccataattacttccctca

SEQ ID NO: 305782 - DNA, 122 bp, Homo sapiens
ttcaagactcatctcttaaaaacaaaacgaaacaaaactacaaccaccatcaaaaccacacgcaaaaaaaaaaaaaaaaaaaaaaaggataactttaaccgaaggaagggtttggttccatt

SEQ ID NO: 305783 - DNA, 122 bp, Homo sapiens
gttaattctagaatgttaaagtgtacgtgtgtgtgtgtgtgagagtggggggcctctttccggcattgtggaattgaggaacaactcttcccagtcctgatcctgtggaattccatcctgaa

SEQ ID NO: 305784 - DNA, 122 bp, Homo sapiens
tctcacgttgctaatattccatgacgccgtccagtaacctgggctgcccttgctcctgaccgcctctcccccagcctggtcagggatacccctagagcagaggagaaaactgagctccaagc

SEQ ID NO: 305785 - DNA, 122 bp, Homo sapiens
tattgtgaagagcgaaagaacaaagcttccacagcgtggaaggggacctgagcgagttgccgctgctggctcaggtgtcctgcttttatcccgttatttggccccacctacatcctgctgat

SEQ ID NO: 305786 - DNA, 122 bp, Homo sapiens
aagcccggggaggcaggaaggcgtggaaaggcgacaccgcagggcgggctggggccgtgccggggccagagctcgtgctcctgaattactccagccccgtgacgacgctgcgcgcgcagcag

SEQ ID NO: 305787 - DNA, 122 bp, Homo sapiens
ggagaggggaggattccaaggcagcttcagagaggagaaattatacgttcagtccaaagccgtttgattcaaaaggtaaatcagttacctgaggtaacctaatgcaaagcgctcctggaaag

SEQ ID NO: 305788 - DNA, 122 bp, Homo sapiens
aagagagggtggcggctgcagtggctgtggggcagccggaaatggggcgagacagacaggcggagcctcacctggggctgcccgccagcccagacaagctcagactgggtgcctgtggccct

SEQ ID NO: 305789 - DNA, 122 bp, Homo sapiens
tttttttctttatacggagtcttgctctatagcccaggctggagcacagtggctcgatctcggctcactgcaagctccgcctcccgggttcacgccattctcctacctcagcctccggagta

SEQ ID NO: 305790 - DNA, 122 bp, Homo sapiens
gggcgcattaacacttgctcgccaggttggtggaggcggggcggattctgctggcggccgcggggcggcgagagtgggggctctttaagcgcccaccaacgcgggggcccgaggggggcagg

SEQ ID NO: 305791 - DNA, 122 bp, Homo sapiens
gttatctgagaaaccccacagcctgtcccccgtccaggaagtctcagcgagctcacgccgcgcagtcgcagttttaatttatctgtaattcccgcgcttttccgttgccacggaaaccaagg

SEQ ID NO: 305792 - DNA, 122 bp, Homo sapiens
ttctgtgtttgtgcaaggccgactcgagatgttgactcagagcttcctccccacagagcgcgctctcgcacgccaggcagtggtacgagccgccgccgccgccgccgccgccaccgccgccg

SEQ ID NO: 305793 - DNA, 122 bp, Homo sapiens
ctggaggagcttgtgtgcggagctccttgctagtgtatgtgttgggatgggagagaagtgcgggagaactatgagataatgccccctgatcctcagggtcttaggaggtatggtcggagagg

SEQ ID NO: 305794 - DNA, 122 bp, Homo sapiens
ccccactcctgggttcaagcgattctcttacctcaacctcccaagtagctggattacaggcgtgtactagcaagcctggctaatttgttttatttttagtagagactgctttcaccatgttg

SEQ ID NO: 305795 - DNA, 122 bp, Homo sapiens
ccgcaccccgcgcggcgcccccagcccgcccatcgccccgcggaccccacgctccgggcgcggggacacacaggcagcccccgcactgtgcccgagccgccccccagggccgagccgcgaac

SEQ ID NO: 305796 - DNA, 122 bp, Homo sapiens
agaccagggaaaatgatcacaaaaccagattctgaaaagtaccactctctggctttgagacgaagagcaaagctgttgagcaacagtatggggtaatgactttgaaacacctggagtggttg

SEQ ID NO: 305797 - DNA, 122 bp, Homo sapiens
aggtagagacgggctcaccaatcccactcaaaacccgctgccggcttacagctcgcaagccgcccacagtgccagccccatgccaagcatcactaggggctctagaataggcaggggccttg

SEQ ID NO: 305798 - DNA, 122 bp, Homo sapiens
ccagcacgtagaggtgtctcccctccacgctgcgcccaatgctgtagacccgcgtgatgccggggcattcgttttgcaccttgtacagcgtccgcacaagatcatcatagcggtggtggcga

SEQ ID NO: 305799 - DNA, 122 bp, Homo sapiens
ccacattattccattgagttttcacagcaaatgtgtcctattgtattcccattttacacacggaaaaactgaggctcagggaattgaatggacttgcccagattgttaagtggtggatctgc

SEQ ID NO: 305800 - DNA, 122 bp, Homo sapiens
gggcctggcaggacaacctgcacctggtcaccaaggtggacactgtggaggacttctgggcgtgagtgtctgtccccagtggggctagagttggggggctctgagctctgggctccctctct

SEQ ID NO: 305801 - DNA, 122 bp, Homo sapiens
agcacagctgatcaacatctgcataaggaaagatgtttctttatgcatttctggctccatcgagactcgtgactcaaccagtcctgtggctgccaaccagaagcagactcagcattcaagga

SEQ ID NO: 305802 - DNA, 122 bp, Homo sapiens
tctttctctgaaactgtttgtctctacccacatgggaacagaagtcacaaaacttacctacgatgttgtcttccaaatttgctaacagtttcccaaatggcaaccaatgattcaccttattt

SEQ ID NO: 305803 - DNA, 122 bp, Homo sapiens
cggctacgtccgattgagctcgggagacttcggataagttcgagcttgttcgcctaagtccggttacgctcggtctgcttcgaacaagtccgggtgacgctcgggccgggtcgggcatgttc

SEQ ID NO: 305804 - DNA, 122 bp, Homo sapiens
agatgtgttgtcttttttctttgatagctgtctaacttggcctttagggtcttccattaccgttaatgattgcctatcatcgttgtgcaaagagggcaaaggcacaccccccccacccaaaa

SEQ ID NO: 305805 - DNA, 122 bp, Homo sapiens
cactgaggtacgcacgcattccctctggggtactcacgctctcacacactgagatacgcacgcattcccattggggtactcacgatctcacacagtgagatacgcacgcattcatgctgggg

SEQ ID NO: 305806 - DNA, 122 bp, Homo sapiens
tttctcttctgaaccccagaagcaatctcgactttcgcatttgagattccagacaggactcggctctccctctttcatacccaggggaaactgagtccctcacccccttcaagaccccaggc

SEQ ID NO: 305807 - DNA, 122 bp, Homo sapiens
ggctccctgtctgcatgtccttcactttctactttacattaggattatccgtggcaaatacgcccagaacctcctggagagcagagtctacatcagatcatctttgtgacccttaagggcac

SEQ ID NO: 305808 - DNA, 122 bp, Homo sapiens
cgccgcccaggtgagtgccgcccgcccctgtccccctcccgcgcgggcaccccctgccctcggctgttatccccactgggggtttcaccctgtgtgcgcagccccggcccggggtcccgccg

SEQ ID NO: 305809 - DNA, 122 bp, Homo sapiens
cagaggcaagagggtgagctctcaaaaagtgagtcagatcacactagtcctggctcaagacgctgcagtggtttcccacccgacgggaggtggagctgaagtcctcggcacggcctgtttgc

SEQ ID NO: 305810 - DNA, 122 bp, Homo sapiens
cgggctgggaggagcgattggccgccgaggtgggaaagcaggcctgcgccttggggtctccgcgaggtaaggagccctggctgcccccacgggtcgggcacacaagcggcacattgtgtggg

SEQ ID NO: 305811 - DNA, 122 bp, Homo sapiens
cgggaggggaccgcgggggcccggcgggaggcgcggagatgcagactggacagcggggagcgcagaaacttcccagccccaggacgaagcccagaccaggccccgaactcaggcaggagcga

SEQ ID NO: 305812 - DNA, 122 bp, Homo sapiens
gccagcaattcattcccagcactctgcaagaacaacaaaatacgctctctgcaaaaacatcgtggttacaggagaccgagacagcccagcgacagaagctgctaatttctccaagcaaccca

SEQ ID NO: 305813 - DNA, 122 bp, Homo sapiens
tccaccgcagccgagtccgcaggtcctgtaatggcctagcatagttcacccacgagggttcgtggtttttggcgcgtttgatctgacatactcagaggcctgaccacccccctaggaagcgc

SEQ ID NO: 305814 - DNA, 122 bp, Homo sapiens
aggttgcagtgggccgagattgtgccacttcaataaagcctgggagacagagcgagactccgtctcaaaagaaaaaaaagacagctctcaagtaaatgactcaacagatgcattcctaggga

SEQ ID NO: 305815 - DNA, 122 bp, Homo sapiens
acaccacaatatcttcctagggacccccttgggctctctggctcactgcaagcacaggaccgggaccccatgataatcctccaaagggtgaagagagatgctaacatttcctttgggtgtac

SEQ ID NO: 305816 - DNA, 122 bp, Homo sapiens
gccaatgttaacataatacagaaagtggaggctttttctgattaaagctccacgcagacccgcacaatgagtggctggcaattcttactgcaagcctagcaacttaagtccacacctggtaa

SEQ ID NO: 305817 - DNA, 122 bp, Homo sapiens
gccccggccgacaaaagtcccttcagttcagccggctgcaggggaagtcccggcgcccggcgaaaccaccctcccgtgcagccgagcccagccgctctccggccgccgtccccggcggcccc

SEQ ID NO: 305818 - DNA, 122 bp, Homo sapiens
tgccgtgggggcggggtcgctgtgggggcggggccttgtgagccagtgcttggacttccacgtcataaacggaagggcggtgcgtggagggaactcaaggcctgattggttcctcctaagca

SEQ ID NO: 305819 - DNA, 122 bp, Homo sapiens
agaggctcgctggcgcgcacgccgcggagtcatgaacgactttgacgagtgcggccagagcgcagccagcatgtacctgccgggctgcgcctactatgtggccccgtctgacttcgctagca

SEQ ID NO: 305820 - DNA, 122 bp, Homo sapiens
aggagcaagaacccaattaagcagctcagctgcacaggcctgagtgtagcgtggcagacccggggcgccctagcacgccccctttgactctgcctggctgagcttcctttaagctctctgtc

SEQ ID NO: 305821 - DNA, 122 bp, Homo sapiens
gataagttcatgtggagccactacaagatgtggcttctgcaaagaatgatctatgcatatcgcatactgaaattcactttcagttcattcccagttccaagttcaatgccttttcctcttag

SEQ ID NO: 305822 - DNA, 122 bp, Homo sapiens
attcagtctacagctcttgccaggcaaggcagccgaccacaggtgagtcttggcatctaccgttttcaagtggtgacagctacttttgaaattacagatttgtcaggacatggaggacaaaa

SEQ ID NO: 305823 - DNA, 122 bp, Homo sapiens
tagcccctcggcttctgcacgggaaagggtgccactcggagatggggggcgtcacctgggcggcccgcgacgcggaatgctcgccacagaaatctgcaaacttcaaataaatggagctaaat

SEQ ID NO: 305824 - DNA, 122 bp, Homo sapiens
gcggcgtgactcacgacggccaaaaggtggaaaccaaccaaatgtccctccgtggagaaacggatacaccaaatgtggcacacccacacgacgggaggttattcagcgatcgagagaaatgg

SEQ ID NO: 305825 - DNA, 122 bp, Homo sapiens
catttgattagcacccgaagagattcaaaggaagcagttgttccgtccccaacatatttccgtttcaaaccacccacttccggtttttcagccggttccggtcccgcccttcacttccggtc

SEQ ID NO: 305826 - DNA, 122 bp, Homo sapiens
ccgcacgccaccttcccaataagtgcccttgcgtcctcggagcggccagttgctgccccccgagaaagtctggccaccattgtcactggagaagatgatgacactgttgttgtagaaaccgt

SEQ ID NO: 305827 - DNA, 122 bp, Homo sapiens
ttccttcaccaaagagggcgtctccagccccagacgcatacaaggctgtcacagataaggcgtattgtgtcccttccttcaatccctgcagcaccgtattggttgtatctcccctcacagtg

SEQ ID NO: 305828 - DNA, 122 bp, Homo sapiens
ggcggccgcggctcgggattttccaggctgcggaggtgaagctgacggatctccgagccccgccccgccccaccccgcagggtcctagcgcccgcccccgccggccctgggaggggaccctg

SEQ ID NO: 305829 - DNA, 122 bp, Homo sapiens
cgggccccgcgggggctgccccggcgcccgggctgggggcggcggcggcggcgcccggggcgctggtccgcgacgtgcacagtctgtccgagtacttcagcctgctcacccgcgcgcgcaga

SEQ ID NO: 305830 - DNA, 122 bp, Homo sapiens
accgtccacgctcatctcggtgcctagtgtattgtcggggttccatttctccgtagacctcgagccatagtcagtccatcggtacctggtttccagactgcccgtcactttggtggtctcag

SEQ ID NO: 305831 - DNA, 122 bp, Homo sapiens
agccgggcagggtaagaggaacaggcagctgcaggaaaatggcggcgccaggctcctcctcggagctttccgggctgccccgggtcacgtgactcggacaccgcccctcctcccttctcccg

SEQ ID NO: 305832 - DNA, 122 bp, Homo sapiens
ccgtcaccatcctgcacaaagaagccccaccgcagccgaggacacttggcatttagtttccggcccgagggcagcggcgcccgaagccgggctgggagccgaggcggctgcttcggggcagt

SEQ ID NO: 305833 - DNA, 122 bp, Homo sapiens
tgatgaagggtgaggggctgacattggggcttggactccggggcttggagcagggcagggcggtggaggaagcagggccgggggtgccagcgctcaggggagacacaggctctgaggaccga

SEQ ID NO: 305834 - DNA, 122 bp, Homo sapiens
ggccgagccaggacccctctgatgcacaggcgtctcaggagcccgtttctttcttgaatccggggcccagtgcggcttgaacctagcccccgacctcctcctcgccctctcagagtccgctg

SEQ ID NO: 305835 - DNA, 122 bp, Homo sapiens
gtttcatggttgtgaaggaaagaaaatgactttggctacctgcatttcaaatcgtacgtgcggtctgagggagcacctggcacttgcaagaaaacagcatgcaaaaatattttgttctattt

SEQ ID NO: 305836 - DNA, 122 bp, Homo sapiens
aagcctggacaggacgtgggcgtgccgggagctcgccggagcagctggtccggctctgggcgcccagcggaaccagggctgtactcacctggatgccggacccgccccctagagaccccgcc

SEQ ID NO: 305837 - DNA, 122 bp, Homo sapiens
aatgttaataaatctgcgaattacttaaacccacaaaacccaggaacctccccgtccccccgggtctcctcgcagtcccgccccgacgctcgacccaccattcgtccctccctctgggcccg

SEQ ID NO: 305838 - DNA, 122 bp, Homo sapiens
taaccaaagctttattctggggtcatcctactcttctgaaaacacatttaataaaatattcgcacccacgagatgggttacttgccctttaggctccacgcataccgttatcttccatttct

SEQ ID NO: 305839 - DNA, 122 bp, Homo sapiens
ttcaaaattgaagatggccaatattctttttctgagtagaaaagcaattcaacacatattcgttgttgttgttgttgttgttgttgtttgtttggggacaagtctccctctgttgcataggc

SEQ ID NO: 305840 - DNA, 122 bp, Homo sapiens
gattttaatttgaaagcgattttatgtatgagaggggaaaggagccccaaagagaagggacgcagggcaaaaatcatgcagccccagcaccccacctctgcgggctggccacctcccctcaa

SEQ ID NO: 305841 - DNA, 122 bp, Homo sapiens
tgaaaactcatctctcctgtggctcaggctgtctctgtttttctctgctagtctgttccccgtgcttccagtgtgaactagccacaatctcacacacacacacacacacacacacacacaca

SEQ ID NO: 305842 - DNA, 122 bp, Homo sapiens
ttggggtatgaacactggaaactgccagggcaaattggaaccagctggctaccctggttgcggggggtgggcatgtggtttggtgtgtgtgggcacagcctctgatttatagaattataaat

SEQ ID NO: 305843 - DNA, 122 bp, Homo sapiens
cccgcctggagggagcagagcgctggtaagagcaggaccatctcaggcccaggattttcccgaagtggaccggtcgccgagtgtgtttgttcccccagtcccggcgacaggtgcctgtgctg

SEQ ID NO: 305844 - DNA, 122 bp, Homo sapiens
gctgcattctctttgcctgaatatctcacaaggctaaaatcaaggtgtcaattgggctatcgttattccaaggttcaatcagtgatgagtccactttcatagtgactcaagtagctgttggt

SEQ ID NO: 305845 - DNA, 122 bp, Homo sapiens
ttccttgtaatttttattgctatcgttcctttctaatttgatctcgaggtctctctcttacgagtggccataagccagaacagccactcttcaggagagccctggcccagagaggaaagcta

SEQ ID NO: 305846 - DNA, 122 bp, Homo sapiens
ctttgaagatcctagctgcatgcaggtgcaagttgcggaacccaactccaagaggctgcacggaaatgaaaaattgccatagaaagatgactcaccaaatcacagacactaagctattgaga

SEQ ID NO: 305847 - DNA, 122 bp, Homo sapiens
ctcaaatgatccacccgtctcagcctcccaaagtgctgggatgacaggtgtgagccactgcgcccggccccattctacaagtttccatggtgtcctggcttctcacctgtccactagcagct

SEQ ID NO: 305848 - DNA, 122 bp, Homo sapiens
aaatgtgaggctggccgagaatgagcttgccttacctcgatggctcaggtctgagcaccgcgagcactatgttctacgtgttcataaatccaaggttggccttaggacttgtgtgcaggcta

SEQ ID NO: 305849 - DNA, 122 bp, Homo sapiens
cctggaagtcccttgggaaggtctcggtccactcggccaacagctgcagcagtttggggccgaacttccggacccgggcctacgggcaagcgaggggcaccgcgctcgtgaggggcgccggg

SEQ ID NO: 305850 - DNA, 122 bp, Homo sapiens
ccagggtcctcttctgccccgagcatccgactccagcctcccatggccggaacatctgaacgttcattgatctcatcgatttctcaacccaaagccatcgagtgctttgaggtgaagaaaaa

SEQ ID NO: 305851 - DNA, 122 bp, Homo sapiens
caggagccagagagcgatccagagagcgctgttgggcagcaggggtggggaggtgggggacgactgacccctgactcctcatccggccaccagaaaccacctgctgagggggccgggaactg

SEQ ID NO: 305852 - DNA, 122 bp, Homo sapiens
acccccaacgttggccggagaaggtggagtccagccagcgcgataggtgagagcaagggacgaaaggttttctgtttaaattgccaccatcaccagctcgccagcgagtggcagggggaggg

SEQ ID NO: 305853 - DNA, 122 bp, Homo sapiens
cttgagagagagcttagctgtgttgtgttgcctatttcatctttatcttgtttgcttcagcgatcatgacatgtaaatatttagcaaagcactgactcctaaaagttctgcatggtggtaac

SEQ ID NO: 305854 - DNA, 122 bp, Homo sapiens
agcattcgggaagattcttacggtgcccttcacgcggtgcctatggacggagaaagccgccgcaaataaaaccatcccccagagtagttgtggcggaataatctaaatatgggtgttgggta

SEQ ID NO: 305855 - DNA, 122 bp, Homo sapiens
ctcccagcgtaatcccggggagggccatggcgccttccatagtagccacgtctgtaacggcgccaatcagcgcgtaacgactgccctccacaggaactccaccccggccagtcacactggct

SEQ ID NO: 305856 - DNA, 122 bp, Homo sapiens
cgtgtccctcccatgtttcccttaattaggaggaggcaaacttctgtcttcccctcctgccggtttcggtttagtaatcagaccacatgagtcacgccaaacacgcagccccctcccgctgg

SEQ ID NO: 305857 - DNA, 122 bp, Homo sapiens
ctcaccgaacatcgcgatctcgccgaacatgcccggctgaaggcactcagttcccctccgcggctcctttccgccgggtctgattcctgcggctgctgcttgccccgcaggccaggaggctt

SEQ ID NO: 305858 - DNA, 122 bp, Homo sapiens
tgagacgtccttcctgcgggtgaagaacttcggcatctggctgggctatgactcccagagcggcacccacaacctgtaccgggaataccgggacctgacccccgtgggcgctgtcacccagt

SEQ ID NO: 305859 - DNA, 122 bp, Homo sapiens
gcgcggctgtctcagaactcatgcagctgttcccgcgaggcctgtttgaggacgcgctgccgcccatcgtgctgaggagccaggtgtacagccttgtgcctgacaggaccgtggccgaccgg

SEQ ID NO: 305860 - DNA, 122 bp, Homo sapiens
agatctgcttaaggtcacaagagagatggtaactggcagccagattcaaacccaaaacttcggccacctcaacaagcagggcatgaggctgtctgtgaaagagaactggggcctccatttgc

SEQ ID NO: 305861 - DNA, 122 bp, Homo sapiens
gtgtgtgtacatattttaccgtattttcatctttgcttagcttggcatccaacacagcagcgggacagattttgaattcaagtagtaatgtagtcccataagttgccacaggaatactgctg

SEQ ID NO: 305862 - DNA, 122 bp, Homo sapiens
ctgagctgagcgttgtagccgtactcctcatacttgccttccgcctcctggccgtcatcacgcagggtggccgccaagccaccctggcccaggcctcctggcccctccaccaggccgatggg

SEQ ID NO: 305863 - DNA, 122 bp, Homo sapiens
tgcagcgaggctggaaaggttggggatcccccggtcctgcacacctgggtacctggggatcgggcagggccaggataggggccggtgtccgtgccctggggctccccagctgatgagtgggc

SEQ ID NO: 305864 - DNA, 122 bp, Homo sapiens
ctcctcggcccataggtgggggaggacccccacggccaggtgggtactgggttggagccccggcaatactggctgtggcagcagctgcagcggctgcaacagtacctcttccttgtggggtc

SEQ ID NO: 305865 - DNA, 122 bp, Homo sapiens
caaccactagaaaaaagctggcagaaaaacttctgagcttgcattggccaggcaatagttcgttcccaacagccagagtggagaaaccttgtgacaagaggcatgagtttgagtaggaaggg

SEQ ID NO: 305866 - DNA, 122 bp, Homo sapiens
cggtggtggaagctgtggcccgcgcatctctggtgagtcctcgggacactcacgggtccccgagttgctgagttacagtcacctgctgaggagcagcactgcgtgttctgagcatctctgaa

SEQ ID NO: 305867 - DNA, 122 bp, Homo sapiens
agaatacgggtccctgaaattcttagttgatagacgctaaatcattggaacatgttcagccggtgctcaaaatgtgctgcccataaatgtcactcagaagcatattaaccttgcattaatct

SEQ ID NO: 305868 - DNA, 122 bp, Homo sapiens
gataactgaaaccacagaggataaatgagacttcccagaatgggaatgcagagtgaggaacgaggacttaggtcaggctcctgagaagtgcccatatttaagggtctggcagaggcagaggt

SEQ ID NO: 305869 - DNA, 122 bp, Homo sapiens
gagggttggggggtgagcagaaaagctcatgaaacctagcagccacccccagggccggagcgcaggccacgcccccccagcagctatgagctccgtcacctgccaacagcagcagtgtcctt

SEQ ID NO: 305870 - DNA, 122 bp, Homo sapiens
ataggaagaagtcatcccgggcttccccagacttcaagtatctttagaatgttgagcttccggcagatttttctctaccaggacctaccacatcctgcatgtgttataaacagaatcagtcc

SEQ ID NO: 305871 - DNA, 122 bp, Homo sapiens
gttgggatgtggaagtggggctggaacaaagcttctgcctagggaggagctaagcaggcccggcagttggaggaaggccagaggaacagctttgtgctccggctttccctcagggaacagca

SEQ ID NO: 305872 - DNA, 122 bp, Homo sapiens
attcagaataaacaagtgctgcagctgaagcttcctatatctgagtattaaaagtagagtcgcaaggagagtgctctgtaaagatttccaccccataatcagccatgcaaaactaaccttga

SEQ ID NO: 305873 - DNA, 122 bp, Homo sapiens
ttgtgtcttccaagatgatgatccggggaggagggatgtgaaagggggtcagtcgccaggcgagctgaggacccagttctgcgcctttgcctgtgccctgacctgaaggaaagtccctgtct

SEQ ID NO: 305874 - DNA, 122 bp, Homo sapiens
gctctttgagaaggccactctgcctggagtgggggcgccgggcactgtcccccaaggtcgcggcagaggagataggggtctgtcctgcacaaacaccccaccttccactcggctcacttaag

SEQ ID NO: 305875 - DNA, 122 bp, Homo sapiens
agtcgcggacagtacctctccggagctggccatgtcgccggcgggtccgaaccgcggccgcgggatccgcaaccccgtgcctcccacctgcccggctagggatgctcgaagccggcgcgtcc

SEQ ID NO: 305876 - DNA, 122 bp, Homo sapiens
gagtctgggactcctgggcggtctgggcatctgtctcggcctcctctgtcttccccacctcgcggcctctctcggagaatgttccctctgccccgagtgttttcacagcccctcctgacagc

SEQ ID NO: 305877 - DNA, 122 bp, Homo sapiens
caccatcacccggtgctgggcgggcaccatgtggactccacttggcactgggccgatgggcggatgccagagccagagcaaaggcctcgttagcccctcggggagggcacggcagggccggg

SEQ ID NO: 305878 - DNA, 122 bp, Homo sapiens
caggttgactgttctgaatccccaagaccccagttatctcaaggagaagcattcattttccggagaattcattagaagtcaattttgtttttatgcaagtaggaaaaacttgcacagctgcc

SEQ ID NO: 305879 - DNA, 122 bp, Homo sapiens
ctatgacattgggcggcagcattgcagcggggacgtgggccacggaggcgggcatgttgccgctgccgctgccgccgccgctgttgctgctgcccgcgccgccgcccgagctgctgccagag

SEQ ID NO: 305880 - DNA, 122 bp, Homo sapiens
tacatctttttgttaaaaatgcctttatgaaggctataatccttatcaaattaaaccctgcggatcccccttttaatacacagggagtcctcctcatttatgggcgtcggcgctaagcagct

SEQ ID NO: 305881 - DNA, 122 bp, Homo sapiens
ggccaggagtggtgaagggcagggctcctccagtggggtgcacagggtgggcccccgtgccgtcaccgctggccactgggcacacctgtgggctccaccagccacacagctagaactcgccc

SEQ ID NO: 305882 - DNA, 122 bp, Homo sapiens
gacgcagggcctcaggctgggcggggcactgagcactcggctctggggagccagggtttccggtagaacgaggggaggcgaccccctttccccacacacacacctgttggagaggtagggtc

SEQ ID NO: 305883 - DNA, 122 bp, Homo sapiens
ggataatccatttggtttgacaagtctttctgtttgacaaagacttaccttttttgattacgttttgtctgagctatttagatttgtattcaggcaaagcagacctgtgcatgtgctatgcc

SEQ ID NO: 305884 - DNA, 122 bp, Homo sapiens
gaaaatgctgatctctcttccctgtatgctacagagtgctcagtagatccttgatacttgcgctcacttgggttacagcaatgtctaatagactcagaatgtttcaagcaactgcctgcccc

SEQ ID NO: 305885 - DNA, 122 bp, Homo sapiens
gctgcggccccgctgcaggccacctatgaccgagggtttctgggggggcgcaggtgggagcgggcaggaggccgcgtacagcgtccggaactcaaggctgaaggcgtcaacaatttcaccag

SEQ ID NO: 305886 - DNA, 122 bp, Homo sapiens
ggcatggaggggccccgctcctgacggccgcgccgccgcctcggcccgtgctccacctcgcggcccctcccgcccgcccccgctcgcatgtctgcgccgccctagccgaggatgctgaggat

SEQ ID NO: 305887 - DNA, 122 bp, Homo sapiens
ccacctgtgtgtgtgagtgtgtgtgtgtgtgtgttttcggggaggggggtgcggtggtgccggaagtctgattagataaaagcgagaaatacagaggctgccggttacactgagaaattaca

SEQ ID NO: 305888 - DNA, 122 bp, Homo sapiens
ggtcaagtcctttaccaccacgctgccctgggccacatgtggccacacctggaacactcccgactgtgtggagatcttccaccatgaagactgtgccagtgccagcctggccaacctcactt

SEQ ID NO: 305889 - DNA, 122 bp, Homo sapiens
caacaagctgctgggcaaagtcaccatcgcgcagggtggtgtcttgcccaatatccaggccgtgctgctgcctaagaagactgagagccaccataaggccaaataaggagcgaggttgtgaa

SEQ ID NO: 305890 - DNA, 122 bp, Homo sapiens
aaacaaaacatttgtagtttgagtttattagccattgctgagtcatctcaacactgtttccgggtgggttagaaataaaagcttattcagcatgaaaaattagccacagttcagaatgttta

SEQ ID NO: 305891 - DNA, 122 bp, Homo sapiens
ccccctgcggcttaggcggtacctgacacaaagcctgggccccagctgggctggggagagcggggaggggagaggaagagaagcgctgtgggcctcctgcacgcatgcacacacacacacac

SEQ ID NO: 305892 - DNA, 122 bp, Homo sapiens
gaagtgctggatttagatatagctgatcaacttaaacacttataaattcaccattgttttcggttcccaatttgaagagtggagacagaagtcaagaaaataagcttttcttattcaaagaa

SEQ ID NO: 305893 - DNA, 122 bp, Homo sapiens
actttcttcggtcgtctcgaatccgggttcatccgacaccagccgcctccaccatgccgccgaagttccaccccaatgagatcaaagtcgtatacttcacgtgcactggagttgaagtcggt

SEQ ID NO: 305894 - DNA, 122 bp, Homo sapiens
tataagtgggcagtggccgcgactgcgcgcagacactgaccttcagcgcctcggctccagcgccatggcgccctccaggaagttcttcgttgggggaaactggaagatgaacgggcggaagc

SEQ ID NO: 305895 - DNA, 122 bp, Homo sapiens
ccttgtccccgcccggggactccctgtcacggctatcccgtccaacctcgccggggtatccgggctcagaactgaacctactccgtctgggagcccaaggatggctcccccaagtcgccccc

SEQ ID NO: 305896 - DNA, 122 bp, Homo sapiens
agccgctgcaagcacgcacactttctccaccccggcacaatggctttatttctgctcccccggcccgaaagtttaaaaatcgggagaaagtgtgagactcagccggctactttcccatcaca

SEQ ID NO: 305897 - DNA, 122 bp, Homo sapiens
cggaggccgagctcaccggctggttgctctttagagcgggcaggagccaggcgggcggcccgcccctctagggcggagacttccggagctgcggactcactggagccgagaactggggcggc

SEQ ID NO: 305898 - DNA, 122 bp, Homo sapiens
cccaggctgatgctggccaactgatgctgcttctcataatgctgtttcctgtctcgtgtccgccctctgcgtccttgccggtggcagcctactggagacagggagcccacacagaatcctga

SEQ ID NO: 305899 - DNA, 122 bp, Homo sapiens
ttgtcccggcccagccggacttttccccgcccccatcggctcgcggcgagaacggccccgcgattggccacacgcgttccctagcctgagcgccagggctcctcccaattcgctgctggctt

SEQ ID NO: 305900 - DNA, 122 bp, Homo sapiens
gagccggcgtatgcaaagaagctatcagcagttggtgagaaaaactttagctgaagggctcgtgttgaattaggtgtcatggtcaggttagacagaggcacagagagagagagagaaataga

SEQ ID NO: 305901 - DNA, 122 bp, Homo sapiens
gagaggggcattagggttagggagataggctggacagaagaagatcgaggaccgagcaggcgacagctcctatttcaatctggggaccgaagctaccctctccagggggtaacccctggggc

SEQ ID NO: 305902 - DNA, 122 bp, Homo sapiens
gcctctcctcaccttgacagctgagagggcctggaagcagcagcagccagtgtccacgagcgtccccagtggccagatcttggtttctaattccattcttcagtaaaagcaactgggcttct

SEQ ID NO: 305903 - DNA, 122 bp, Homo sapiens
atgaaacatgctcgcacgtgccagtggcctgcacgtgaccctgaactcggcaccgccctccgacagcgggagacatgcacacagaacgacagaagtagaagcaacttctgaccccgggcttt

SEQ ID NO: 305904 - DNA, 122 bp, Homo sapiens
cgggggcggggccgggaaggggttaacctggagaaaaggcgggagggatgacggcaagatcggggatccccgaggctccccaccagatggcctcatcctccactcggccccacccacctgag

SEQ ID NO: 305905 - DNA, 122 bp, Homo sapiens
cgcttcctcctccagctgcacccacccgtcctttcctgctcgggagggctgggtttgaagcgcgcgccacggccagcccgggaccgcgggggagggcgagggaggcgcgcagccgcacgcac

SEQ ID NO: 305906 - DNA, 122 bp, Homo sapiens
cctggggacttcccagagtcttttccctagattctcatattcagccttactgctgtctgtcgacctccataaagtagcattagaaggtattggtaaccagttattacttagaacagaagggt

SEQ ID NO: 305907 - DNA, 122 bp, Homo sapiens
tcgcgggcctgccccccactcccggggccccagacccggctccgccctggcggctgcgcccgccctgccgggacccggtttgtctggttctccccgcgtggctagtttctcgaatttcttct

SEQ ID NO: 305908 - DNA, 122 bp, Homo sapiens
tcagcttctaagaggccccacactaagcaaggattatgccaaaacccttaacaaggcattcgaggccattcagaacataggcttaacccacctccccagcaaaacccaccaccatcctcccc

SEQ ID NO: 305909 - DNA, 122 bp, Homo sapiens
gcccccacggcgaaggcccggggcagttaacccttctcttgctgcggcagagtccgcacccgggcaggcccatctcagaattaacgctttgatggcatcaccgcgtcgggaatccctgggga

SEQ ID NO: 305910 - DNA, 122 bp, Homo sapiens
gcgcttccaggtcacgtcctgtcgcacccgcccgcccctggggtccgcgtgctcgcccgccgcaggaggctgaaccctgtgttcccacgctcgccggggacctcattgcacccgttcctgtc

SEQ ID NO: 305911 - DNA, 122 bp, Homo sapiens
gggtgccgggaggctgcaggtgaccagatccgcgtgcgcagccggcagacagcttggagtcggtgggctgaatcttcaccactgtcctgccgggttccgcccctcccggctccgccccgagg

SEQ ID NO: 305912 - DNA, 122 bp, Homo sapiens
aaggtcacccgactcacaccacaccccagccggctcagacactgaggacccacaagtgaacgggaaaaccttaaaacctctagaagaaaacacagggaactatctttccaaattggggccgg

SEQ ID NO: 305913 - DNA, 122 bp, Homo sapiens
tcctttttcttttttaaactcacacctgggcacgcatctgcgtactgccctggcgactgacgtgagcatgaagggagctttagtcagccgctcggcccgcgggaaggaagaggcgagcagga

SEQ ID NO: 305914 - DNA, 122 bp, Homo sapiens
ggatacataaataggccatggtatactataggtaaaggtcaataataataatgtttaaaacgtgccagaaagcacagaggagtgtgtgacctattatgttgtgtctggtgaggagtatggaa

SEQ ID NO: 305915 - DNA, 122 bp, Homo sapiens
cgggaggctgaaccccaacttccccgcctggaccccttggctcgcccgcgtatcccagaccgctcccactggggctccacggagactgctgccttgacatggaacctcatgggggacctcct

SEQ ID NO: 305916 - DNA, 122 bp, Homo sapiens
gacacccaagcgcggcctttacctcaggccgccagcaataagaacggttggtaggaaccgcggcttccgggtggcgcgggtgaatgacgtaagtggcaagcgcgctggccaaccaaatagcc

SEQ ID NO: 305917 - DNA, 122 bp, Homo sapiens
aggggcgcgggcgggctctagtaggcgttctccagctcggcctggttggctttggcgctccgggcgcggggccgcggcttccggcccttctgcggccgagcggcctcggtcccgaagtcctt

SEQ ID NO: 305918 - DNA, 122 bp, Homo sapiens
gagcagaaacggagcaggcaggacccaggtgaggctccacagcggccccccaggacagctcggcacctcccagggtggcccccacagccgcgctggctccatcaggcgcttctccctggcat

SEQ ID NO: 305919 - DNA, 122 bp, Homo sapiens
ctagtggaataattcggttctcaggcaagagtgcttctggagggtgggggcggaggagggcggctgccgggtctgctcggcagctctgcccccgctacccccaccaagggcggcctcggccc

SEQ ID NO: 305920 - DNA, 122 bp, Homo sapiens
acacgaaagcccgtgtggtcgcgccgggagctcacggcgttccaagcggcacttatcccgcgttgatgcccaggcaccccgcgcgccctgtttcaccaggcccagtcactccagctccagca

SEQ ID NO: 305921 - DNA, 122 bp, Homo sapiens
tggcagccttcctctccatcaggtggatcctgaacagaggcttgaatctcatagggtcatcgacgtgggggtcatggggaggcaggtacatccacccgatgatgaacaggccgtccacctac

SEQ ID NO: 305922 - DNA, 122 bp, Homo sapiens
gagccgctccttccagggccccaggatgccagatccggatccgggagatgcaacttgcggcgccggcccaggaggctcggcacctgctcgagccgccgggccgcgctcagccccgcgccgag

SEQ ID NO: 305923 - DNA, 122 bp, Homo sapiens
tctgcaaaaaattcaaaaattagccaggtgtggtggtgcgtgcccaggttcccaggtactcggaggctgagaggtgggaggatgccttgagcttgagaggttgaagctgcagtgagctgtga

SEQ ID NO: 305924 - DNA, 122 bp, Homo sapiens
ttccttccgggctcaccgtgtggggccgaagatcaacggcccgggaacggttcccgggagcgggggccgctgctgctccagcagctgtaacaacccgcggctgcagcctccccgctggcagc

SEQ ID NO: 305925 - DNA, 122 bp, Homo sapiens
ataggtcagggggctctgccgcggcttacccagctcaggcacaatgaccggggcgccgcgcgcaatggagccccccgagctgctggcggtccctggccggctcttcaggctctcctcgtagc

SEQ ID NO: 305926 - DNA, 122 bp, Homo sapiens
atacgtggaatttccaaatttagcattcaggaatagcttcgtataaacaagggctgctttcgctgcagagatgcgaagtagataatgccaaaaaagtccccctttgtgactggatcctggga

SEQ ID NO: 305927 - DNA, 122 bp, Homo sapiens
aggcacatgaagctggagaccatggacgtttaggagtggaggaaccagagctgtgaatgacggccaagggccgtgggggaagaaatactggatcaaaacgggaaagctctgaattgggaaaa

SEQ ID NO: 305928 - DNA, 122 bp, Homo sapiens
gctttaagcacagggcagaggacatacatctctttcatgcttacaggaaaactttcccaacggggtaaaaaccaatccagccctcctgactagtatcacaactatttctatcacttcatcaa

SEQ ID NO: 305929 - DNA, 122 bp, Homo sapiens
cgcgtgcgtgtacggctgagcatgcatgtgtgtacagatgcgtgtgtatgtgcgcgcgcgcgctatgtgacaaggaacacagagaggtacacctcttatctctgatctctctgtaatctcct

SEQ ID NO: 305930 - DNA, 122 bp, Homo sapiens
ccagcctttgggaggggagcatgcgcagtgtgttcactggagttgtgcgcatactcacttcgaggcgttcttccactaccggtccaatgttcctagaaggtcgtttaccagttaaaagctgc

SEQ ID NO: 305931 - DNA, 122 bp, Homo sapiens
aatattttcctgaggaaaagaattatcctcaacatttatataaatagctttaaaattttacgttaataagcatagctggttttacaagcaagcaaaataaatgactgcccggatgacagaat

SEQ ID NO: 305932 - DNA, 122 bp, Homo sapiens
cgggacggaggcctgggggaactgggagttcagctttctgcagagggccactaggaacctcggattgcccacggaagccagccactttctttgacagtccagcccacctcctcttctgcccg

SEQ ID NO: 305933 - DNA, 122 bp, Homo sapiens
gggtgaagtcactgctacccatgctcttccttcttagtgagactgaggatgtgttttctacgtgaggccacacaggagggagggtcaagtcactgctactcatgcccttccttcttagtgag

SEQ ID NO: 305934 - DNA, 122 bp, Homo sapiens
gggctcagaagtcagagcacctgagtagatcccatgttcattgagctcaatgagaagtcacgttacttctcatcgtttgcctcttcagtttgtctaacttaaaaaaaaaaaaaggaaaatca

SEQ ID NO: 305935 - DNA, 122 bp, Homo sapiens
cggttcggttcaattccgcaaaaataattgaactgataaacagttcaggcttcggccgggcgcggtggcccaagcctgttatcccagactttgggaggccgaggcgggcggaccgcttaagc

SEQ ID NO: 305936 - DNA, 122 bp, Homo sapiens
gtgaagagtgggctcccgtgggcccagagctgcacgccggtccacagacacactcacgcccgccacctgctccccgcaggatgtgtctgtgtgtgggaattggtatcttgcacccgtgggag

SEQ ID NO: 305937 - DNA, 122 bp, Homo sapiens
gtgccaggccaagagcgcacgctctggctgcagctccgcgctgactcttcaaatgattgtcgttttttcctctcctgctgccaactgctcccggagctcaccagcctgtgttctgaagccaa

SEQ ID NO: 305938 - DNA, 122 bp, Homo sapiens
ttaagaaaacccttctcaggtgtggccattggctgtgagtgagtgattgacagtcagatccggtatgatgcttggctgggggaatgctgagctaatgccacctttctcagtagagcaagcat

SEQ ID NO: 305939 - DNA, 122 bp, Homo sapiens
gattacaggcgtgagccacggtgcctggccttttccagcctatttttaaacactgccaatcgtataattagaaattttttaacttactgaaaatcaagataataaatactccaaatgcatca

SEQ ID NO: 305940 - DNA, 122 bp, Homo sapiens
ggtgtggtgcggttacgaaaggaatcagcggaacccagatcaggccgctgctggggcaggcggattcagcgagatttttcctgggtctccagtgccgcttcagacaatgaaatcagcgtgtc

SEQ ID NO: 305941 - DNA, 122 bp, Homo sapiens
cgatgacaccagctaactctgagtacagtagaaaacgtaccgtcgggcaaccagaaaatgcgcactccagtccccaccacgggacagcgccaggcagtaccctccacagccggagctcgaac

SEQ ID NO: 305942 - DNA, 122 bp, Homo sapiens
ccaatctgcacagggctcagagcagtcctccaaggcacgcattggctccactctcctgagcgacggaaggagactttcctgcttggaaggcttgactccaaggggagtcgaagccggcccct

SEQ ID NO: 305943 - DNA, 122 bp, Homo sapiens
gaaagggactgacaatgctacgctttgttttgaggaaggatttctgaggacttcctatctcgaccttcagccttggaagtttcaggggactttgtgcagcctgggagggctgtgctagccgt

SEQ ID NO: 305944 - DNA, 122 bp, Homo sapiens
cgaaacggggtcacccagcacctcagcgtcctgggctctagcaagcctcacagaagcaaccggcagtgctaacaccgaggagcacctagagcggcaaaactagcagtaatgccatcgacgaa

SEQ ID NO: 305945 - DNA, 122 bp, Homo sapiens
atgaagagaaaaggaaaaccaagagcgggtgacaaggctgaggagccccgaaaggcggaccgtcaggctgaggagcgcaggcggactgaggcgtggtccgcggggctcagggaggtggctcc

SEQ ID NO: 305946 - DNA, 122 bp, Homo sapiens
ctgggaaagaaagtagacgtgtaacttcaggttagtttcgctgaacaattgtttgtttcacgcaatccctgaggggtttttgcggggggtgtgggggaggaagagacaaaggaggccgaaag

SEQ ID NO: 305947 - DNA, 122 bp, Homo sapiens
cccgagtttccagccacgccccaatgtccggcggaagggagggagggtctccggccgccacggccggtggtagttgtacaaacagctgtgtgcttattcatcagcggtgctgtgcgagatcc

SEQ ID NO: 305948 - DNA, 122 bp, Homo sapiens
caaacagactaattctggaagaagccagacaagcttgtcaaacattaacccaggaatagacggagcagtatgtgtgacagcagatacctggagatgactcaagaaaaatcaaaagtggctgg

SEQ ID NO: 305949 - DNA, 122 bp, Homo sapiens
ggtgaaagaagacatccatggctcactcagctcctcccagtcttcatagtcacaactgtgcggttcaccttaagggcatacgctttgggatgttttagccccaggacacttacttaggatga

SEQ ID NO: 305950 - DNA, 122 bp, Homo sapiens
cactaagtggggctgaatctgtggactggctgacctccagatctgggaacaaagagtagtcgtgagaggtgatttcagaggagtaaatagatactaaaaaagctcatagactaagaatgtga

SEQ ID NO: 305951 - DNA, 122 bp, Homo sapiens
agctacgtgggggcctgcttcgacaggctgctccacccggacgccgtacccgcccttttccgcaccgtgcccgtcttcacactgccctcccaactgccagacttcctgggggccctgcagca

SEQ ID NO: 305952 - DNA, 122 bp, Homo sapiens
gctgggggagagccgggtctctggttctaatcacttgaatctgacttctgggaaaactggcgtccagggactccccccggagacccataatcttcttggggcgacctcaggttgggggacta

SEQ ID NO: 305953 - DNA, 122 bp, Homo sapiens
acgtggccaggcctagcgagatctccgggcgcggtggcccgtgtgtgcctctagccaggccgccgtggccagggcttggtggtgtgtttgacgctaaccttccatgtcaactctgtgcgttt

SEQ ID NO: 305954 - DNA, 122 bp, Homo sapiens
agtgtgcaattgcctcctgcttcagagctacctgatccgaatactaagcagagcgagtgccgggctgagtgtaagacactgaagacactgcagagcaaggtgcttattccagaggcgttaca

SEQ ID NO: 305955 - DNA, 122 bp, Homo sapiens
tccgttctgacgtcactataaatgctagactttattggaaatgtagtccttgtcctgccccgcgctattcatgcttgtcaatgctgtgaacacgagggggtgctgtggaggtggcggggagg

SEQ ID NO: 305956 - DNA, 122 bp, Homo sapiens
cgcggggctgggggaagaggcgaggagggggcttgtccagtgcctaggagtcagggatggcggggacaggcctccagaggtcagtaaattaaaaaatagacacatagataatcgccagggat

SEQ ID NO: 305957 - DNA, 122 bp, Homo sapiens
tttacttcattcttaatgattattgtcatccctttaaatctgtgcctttttcttcttgagcgaagctgtttgagtaaacctgttgaagagtgtttgtgtcttttgtgcttttttgttgttat

SEQ ID NO: 305958 - DNA, 122 bp, Homo sapiens
ccccgagtctctgcatcagttcctcacagagtttccagttctctggaatctctggaaccccggcccctggagttcccagttctctggaatctctgcaaccccggcccctggagttcccagtt

SEQ ID NO: 305959 - DNA, 122 bp, Homo sapiens
tcaaattctcacatactttttccaaataaaactatcatgtaattatcttcttctctctgccgccgcctcctcctccgtctctttcttcaaatctggcaacaactagttaattttgaaactgc

SEQ ID NO: 305960 - DNA, 122 bp, Homo sapiens
ggtttcattttcagccaaaatccccgcaggttggtcctggcgagggcggggctcggtgggcggggctggccgcgggggcggggccagggtctcacacccatctagaggatgtctgtctgcga

SEQ ID NO: 305961 - DNA, 122 bp, Homo sapiens
gacgggaagtctggaccaccgttgttcggtggaatccatgggacactcatgagagctgtgcggaggacgccgcctcgcatgtgcagggctttcacggaaaatactagaaagagagactttcc

SEQ ID NO: 305962 - DNA, 122 bp, Homo sapiens
atgcctctctctgtaaaccccccagtcaccgttatcatacatggaacatgaagaaagccccgcccagacatccaaaccccctccgggagctggaactgtggcacccttccccccacccagac

SEQ ID NO: 305963 - DNA, 122 bp, Homo sapiens
gatataagcaaatgggtggaatcccagaagcaaaatgtaaaagtttcatttcaaggagaacggagtaaacagatgtgtcaaattgctgctgatgtcaaatcacatgaaagctgagaattgac

SEQ ID NO: 305964 - DNA, 122 bp, Homo sapiens
actctcccctcctctttggagatgacttgaacccctttgagatccgaggggctggcggggcgcgggctggggggcgacagttgtagctccacttcctgctaatgcgagaaggtacaaaaaga

SEQ ID NO: 305965 - DNA, 122 bp, Homo sapiens
gtcacctgtccaggacgacttgttgattcccaggagggccgcctttccggtctgggtccccgagaggactgccttgctcacctgtcccctcggcgcggccccggggagctcccgagaggccc

SEQ ID NO: 305966 - DNA, 122 bp, Homo sapiens
cgagtgggacctcggcaggcctcccgggagcacgagcttcagccagaaggggcgtgaggccgactctcgtggttcccaaggtgcgctgctcatctgccaggaggccagtgggtccgctggct

SEQ ID NO: 305967 - DNA, 122 bp, Homo sapiens
tggacagcttctgcgtcttagaatagcaaggcaccaccttgcgcaggttgtctagcgccgcgttcagtccgtgcatgcggttccgctcccgggcgttagccttcatgcgtctcaatttaaaa

SEQ ID NO: 305968 - DNA, 122 bp, Homo sapiens
ggtcggtgtacgccgccccgcccttctggtcttccgccgtcccctccggggggttctggacggctcggggagcctccctgggcccgcgctgctgcaggacctgcaccctccgcagggcgacc

SEQ ID NO: 305969 - DNA, 122 bp, Homo sapiens
gtgctcacagttgctccagacacattcccaggcttttccaactcttgtaaagctagtaaccgcctcagcccttcaggcctgaaatatgatttcactttccacaaagccagacgatccagtgc

SEQ ID NO: 305970 - DNA, 122 bp, Homo sapiens
taaataaccatttatttctaatatactcagactattccatttacatgtgattcccaatgccgtgggggaaaaatattttgaaagcatcaactatcaactgtccttactgcctcattctccac

SEQ ID NO: 305971 - DNA, 122 bp, Homo sapiens
cgtgcagccagcagtgctgggcatcagtttcctctgcaacagcataataaatggtactgacgagtcagtccctaaacgtgaacgcctcagaaaactgtcccatacagtcgaggctctagcgt

SEQ ID NO: 305972 - DNA, 122 bp, Homo sapiens
ggcagagcttgttgaggttgatgtagacgttgaccagcaggtcggacggcagggcaggggcgaacatccgctgcgggaggcaggtgggatgaggccctcgcaagcccccagcccaggctgga

SEQ ID NO: 305973 - DNA, 122 bp, Homo sapiens
cgcggcactcagcgcagctgggaaagcctgtgttgcgggtctcctggccccacgattgtgcgaggaattctgagccttccgggggggacggctgtcccgcccctacccccacccagcctggg

SEQ ID NO: 305974 - DNA, 122 bp, Homo sapiens
acccacaccttcctcacctgcagcccaggaagacgtggttggtccaggcggcggagagcgcgaggagctggtcgagggcagccccgggatagctgtgcaggtgccgacagatgaagctgcgc

SEQ ID NO: 305975 - DNA, 122 bp, Homo sapiens
caggtcccgggcgggccgcgggctgggggtggtgctgcccggagggcgggcgtctagggccggagggtggagctgggggttcgggggtgtacccgggggcgggaggctggacaaggacggct

SEQ ID NO: 305976 - DNA, 122 bp, Homo sapiens
ctcctgctgcccggcctacgctccccggccagccgcgccgctcacgccccaacttgggcccgcgccccccagcccccgcccaggcccgcgccccccagcccccgcccaggcaggcgcctgcg

SEQ ID NO: 305977 - DNA, 122 bp, Homo sapiens
tgatttagaaaagttcacagctttttctagatgtgtttcctcttcatttaaaagaaatggcgaaggactgggttctttaacatctaagaattggagcattttataaacatttcattttcttt

SEQ ID NO: 305978 - DNA, 122 bp, Homo sapiens
actactactaaaaatagacattaaagtatccattatttgtctcatgcagtaggtaacccccgtcttgagattgacaatttaagccacaagctgtattttttcttcgcctgttgggaaaagag

SEQ ID NO: 305979 - DNA, 122 bp, Homo sapiens
aggattcagttcgatggttttcctggtgaaggactggaaatacaccgggttcccagaaaccgggatctcgggcgctctgcctgctgggggtcgaggtggagggggtatataaagtgagttgt

SEQ ID NO: 305980 - DNA, 122 bp, Homo sapiens
ttgaccgccacccccacctccatcttcaaggctgtgctgggcactccaggctgggcctgacgcgttccaaatctgcagctcccctcactctgcatcctgggcctccaccactctccaggaga

SEQ ID NO: 305981 - DNA, 122 bp, Homo sapiens
ggcgggggcgggggcgggggcgggggcagccgggagcctggagccagaccggggcggggccgggaccggggccagggaccagtggtgggaggaggctgcggcgctagatgcggacacctgga

SEQ ID NO: 305982 - DNA, 122 bp, Homo sapiens
tgcaactcactcctttcttggggaagccaagcacatcactgggtgatgctgtgggtgcaacgtgcagcctcagacccgaaccctgcgcccggggagaagacacgccttcaccacaaaagcac

SEQ ID NO: 305983 - DNA, 122 bp, Homo sapiens
tcatgagtaacaaagacactcccgttactctagaaattccaagggtttaaaggttaactccggagagcagggacaaagacaagacttctctttgagtaaagttaattcatcactatgcagtg

SEQ ID NO: 305984 - DNA, 122 bp, Homo sapiens
gtgtgtgtttcgggggggtgtgtgcgggtgcagcgcgggccagtgattgctccgggaccacgaatcagtggagggggctgcacctcccgcgggcccggggggaaaggaagtgagcgctggct

SEQ ID NO: 305985 - DNA, 122 bp, Homo sapiens
aggtggcatcgccctaagtcgcaggagcgggtctctccgcccctccctcgggccggggggcggggcctcctaatccggaactgaaggtcttgcgtagccggcaccgcccatctgcgtcccgg

SEQ ID NO: 305986 - DNA, 122 bp, Homo sapiens
gccccggcccagcgggggccgcacgtccggccgcgtcagtcccgccaggagtttgagcagcgcctcctgcgggaccttgcagcctcagcccttcatgccggagaagcccgtcagccgccagc

SEQ ID NO: 305987 - DNA, 122 bp, Homo sapiens
gcggagtctcgaggctgaaagccggagactcctggaagggcctgggtggagggtttcactcgtccctctgaagaaatcttagaattatgttttctgccttagttggggtcctggttgttcgt

SEQ ID NO: 305988 - DNA, 122 bp, Homo sapiens
cggcttaggccatcatggtcttctctgctaacagcatcccatttcactttcaaaagttctcgtcctcccatgctgagttaggtggtcaccatagttacctgtaatgacagggatggcctgac

SEQ ID NO: 305989 - DNA, 122 bp, Homo sapiens
ggtgggggaagtgcagatctccgcagctgtgttacaggggagaagggaacacctactgaacgactgtcttttgacaagtcctgaaacaaacccacacacaaagaaattgttgtgggggtggg

SEQ ID NO: 305990 - DNA, 122 bp, Homo sapiens
aaactgacaccagggcgaggacaaggatttcgctcctccagggctgccaggggaggggctcgccaccgtcactctccatgggctctggccccgacggtgtttaaagggcggagggctgggcc

SEQ ID NO: 305991 - DNA, 122 bp, Homo sapiens
tgctggcgcccactcctggaaaggctgagacagcacaggtcccaaagcccagaggctgggcgtgcattactcagcaaatccttacagagcccccggcgtcacaggcattcacagtcccccga

SEQ ID NO: 305992 - DNA, 122 bp, Homo sapiens
gctgcagtgcctgtggggtggcagggctggtccagacactcgtccacgtctccctcacagcgtagccccacaaagcctggagggcaggcacagtggaatcctccaggtttgggagtacaggt

SEQ ID NO: 305993 - DNA, 122 bp, Homo sapiens
gctccacgcagccggggttgaactggccgaagctcttcttgatggtgtcctcggtggtctcgatcatgaggttgcgcacgtagaggatcttcacggtctccatcacgtcctcgtccacgtcg

SEQ ID NO: 305994 - DNA, 122 bp, Homo sapiens
ggcagctttgcactggcctgctggtgcccctgggccggaaccgcctgggcaccataaaggcggcaggatcagacaggctcctgggaaacaggcaggtccctggtgaagccccaccttccatc

SEQ ID NO: 305995 - DNA, 122 bp, Homo sapiens
aacagttatgtgacattgggtacatcaactaccccagacttaaaatgggagcatgatacccgcccagtctgctttcccttccatcccagggacccactagatctttggaaaatccttttacg

SEQ ID NO: 305996 - DNA, 122 bp, Homo sapiens
atctttctctacgtttatatccccagttgtttgtgtgtgtgtgtttgtttttaagcttgacgtcaggtatagttttgtttgggggaagaaagaaacagacccataagatccttaattaggac

SEQ ID NO: 305997 - DNA, 122 bp, Homo sapiens
tggaatggtaggtgcttcagttaaaaccaacttaagtttttaaaggacagtttaaacccccgcaagcttcagtcatcaagcacagagtcgctcacacatttgaggggcacagctgcccagct

SEQ ID NO: 305998 - DNA, 122 bp, Homo sapiens
tttagtagagacaggtttcaccatgttacccaggttggtctcctgacctcacgatctgcccgtctcggcctcccaaagtgctgggattacaggcctgagccactgtgcccggcccaacaaga

SEQ ID NO: 305999 - DNA, 122 bp, Homo sapiens
gctctccctacgaccacacacccggcatggcgggctccttggggtaccatccttacgcggcgcccctgggatcgtacccttacggggacccagcgtaccggaagaacgccacaagggacgcc

SEQ ID NO: 306000 - DNA, 122 bp, Homo sapiens
cgtccacagcgcacgaggacgttcagaaaactccgccccctagcgacgctagcggtgtcacgctaggccactaaagccactcccacttggcctttacgctgtgtcacggagcctaagccttg

SEQ ID NO: 306001 - DNA, 122 bp, Homo sapiens
tttattttctttcatgtgagtgggtgtgtgcctgtgtgtgtgtgtgtgtgtgtgtgtatacgcatgtatgagacagagaaaaagaaagctggtagaaaaatcagcctttaaaagaacaaaaa

SEQ ID NO: 306002 - DNA, 122 bp, Homo sapiens
acagcttgcatctgtgtgcctgtgtgtgtgtgtgtgtgtgtgtgtatgtgtgtgtgtgtacgccctacagcccgcacagcccgcacggccctggtatggtggctctgcttcctcctcctcct

SEQ ID NO: 306003 - DNA, 122 bp, Homo sapiens
tgacccggttggtcacgtggctgagccctccttaaaggggcagaattttgagctgacttacgaagtgaccaggagagttgctcttcacctttcttcaggtacttctttggcgctgctgcttg

SEQ ID NO: 306004 - DNA, 122 bp, Homo sapiens
tctccgatctccacctgcacaggaatatgttcccctccccccaccagccctcagcgcacacgtgcacacagttgacatgagttacacatgcacatcccacaggctgccaccaggtcacacac

SEQ ID NO: 306005 - DNA, 122 bp, Homo sapiens
tctgacttccaggttcttctgtttgcttactccctatccgggggcccaaggcgctgtctccgccgcccaagccccgcgtaaacctgggtgacctcggagacatccgttggagcatgagttcc

SEQ ID NO: 306006 - DNA, 122 bp, Homo sapiens
gttggtgggcctggcactgaccagatgcgggtagctcaaagcaccgagcgatgcaggcgccgtttctgcattgcctgcagcctcttctgcctctcggcaaagttgttcttcggggtctgctt

SEQ ID NO: 306007 - DNA, 122 bp, Homo sapiens
tgtgaggcttctgtgagttgtctgatctatccagataccagtgataatgacctagaggtacgttgtccaatagccacacatggctactacatttaaatttaaattaattacaataatataaa

SEQ ID NO: 306008 - DNA, 122 bp, Homo sapiens
ggctgacactcacggctctagccctgaccctcttagctcttgggctgccccgcccccatacgtactcatgccgtcagcacaatgcagacaatcgggacggtccacgccaggtggactgctgt

SEQ ID NO: 306009 - DNA, 122 bp, Homo sapiens
ttaggagtaacaaaaacactgttaagttataacatctggacttcatcaccacagccctgacgtcaggacgcagcccagatgttaactagagtaaccatctaacgtttgggtgaatgtggtct

SEQ ID NO: 306010 - DNA, 122 bp, Homo sapiens
ctcattcaggcctttaacaacaacaacaaaagcccaaccctccagttttcataggttgatcgttttagctttgggacaaggtattactctcgtcagtggtagcaaaacacgggtcatcaatt

SEQ ID NO: 306011 - DNA, 122 bp, Homo sapiens
gccaccaactgccaaggcctgtgtataagggcagccgccgccttagccacagacctgccccgccatgacccggctgacagtcctggccctgctggctggtctgctggcgtcctcgagggccg

SEQ ID NO: 306012 - DNA, 122 bp, Homo sapiens
gcaaatgccttgcaggaggtagaggctggacccatggcaagccatttacagaaacccactcggcaccccagtctaacaccacaactaatttcacccaaggttttaagcacgttctttcatca

SEQ ID NO: 306013 - DNA, 122 bp, Homo sapiens
cgggcacggctgggattccaacaaggactcccaaaccagtgctctttccacttaacctaacgcacacccttcatctcgccgcccctccccacttccccgtctttgggagttcttcgatgcct

SEQ ID NO: 306014 - DNA, 122 bp, Homo sapiens
gaaagggagctgaatctgcttagctccttttgggggttcttgcagggccccttcccctcccgctacagacctcctctctgtgacagattcaggatggttccctgtccctgcactcttaagcc

SEQ ID NO: 306015 - DNA, 122 bp, Homo sapiens
agaaagtgatatttaagttgcatattgacaaataacagtgaaaggggagaagaatcatctcggttgaaggaccagtgtagacaaagaaaggcacaacaatatggaaatatgtaatatattta

SEQ ID NO: 306016 - DNA, 122 bp, Homo sapiens
acaaccaaactccagcgccaagctgccgcttttgcagaaatgttctatctcttggtctcgcgcgatctcgcgcctccgaggaagccaactgtatcgcgcacgccatcaaatccccgcgggaa

SEQ ID NO: 306017 - DNA, 122 bp, Homo sapiens
tcgcccgcccggccggccccggctctcggcttgcaaagtccctctccccagtccaacccccggcccccacaggcctcggcgccccgccccgccccaggccccgccccagagagttctataaa

SEQ ID NO: 306018 - DNA, 122 bp, Homo sapiens
cttcaacccagggcaggccacggggcctcccgccgcccctaccctgcgcccccggcaccccgggacccccgcgcccgcgtcacttactcctctgccgtcgccacctgtctgggtgccggtct

SEQ ID NO: 306019 - DNA, 122 bp, Homo sapiens
ttgctctcgggagagaggtttcctgcagccgaaggactcacagctaatctgggtcaggagcggctgccggctcccccactcctggagatgagcgactctgtgacgtcacgggaggcgcgggc

SEQ ID NO: 306020 - DNA, 122 bp, Homo sapiens
aaagtgtcaccttagagcaaaaacaaagccaggggaaaagggagaaatcaaaaagcactccgggccagggtggcctcatgcataccaatggtttttgtcatttatggctgggcaagatttat

SEQ ID NO: 306021 - DNA, 122 bp, Homo sapiens
gaccttccaaaaggtaaccccagattataacaacaatgacccaagacatgagggttaggacgactggtcaaacaagggccaagaaccctgaaacacttcttgcccctctgaaaataactgtt

SEQ ID NO: 306022 - DNA, 122 bp, Homo sapiens
aaaaggagcgaagccacgccctgacctcagagtctcagggcataatttctcagcgcccctcgcagtaccatttggcctttgcccagcgtgcaggggagttagccgtcaccacggccaagtgc

SEQ ID NO: 306023 - DNA, 122 bp, Homo sapiens
ttgcgttctgtgtcccccgtcgtccggtgcaggtagggacacctggggagcagagaggcacgcaatgcctggttatcatggacccagaggcagccctaagctccctgggtccacgccctgtc

SEQ ID NO: 306024 - DNA, 122 bp, Homo sapiens
gtgcacaactgtcctcggagaaagttcaagaggaacttccccgcgaacaggtcctgccggcggccgggaatacgcacactttttatgttatgacttggactttcccgaacctttcgaaacag

SEQ ID NO: 306025 - DNA, 122 bp, Homo sapiens
gtgggatcgaaggaaacgggcagagtcaccacacgcttccctccttcactccccgctccacgaggggcagccaggagcagccaccagtcggaagcaaataaacaattcaggtgccagaggag

SEQ ID NO: 306026 - DNA, 122 bp, Homo sapiens
gctgccagcatctgttcctctgtcatttctgataacagtaaaagccagcatggaaaaaaccgttaaaccgcaggttgggcctggccgttggcagggaagtgggcagaggggaggcccggcca

SEQ ID NO: 306027 - DNA, 122 bp, Homo sapiens
gtcctcaaagagcagcaagccttctccatcttaatttgactctaccgcagagcagacttacgctggcgtgatgggaggagatcatgggcagagaggaaaaactaatagcagcattgctcacc

SEQ ID NO: 306028 - DNA, 122 bp, Homo sapiens
aggatctgttgagtctgggagttggatcctgcagtgagcagtgatcccaccactagactccggcctgggtgacagagtgagaccttgtcttaaaaaaagaaaaaaaaagggagagagagaac

SEQ ID NO: 306029 - DNA, 122 bp, Homo sapiens
cagagtcccggcatccgccgtattacagcggatgggtgcatgcgggcggtgacccgagctcgcgcgggctgcggaaccctccactcaccaacgccggcgccgccatgggcccagggggctgg

SEQ ID NO: 306030 - DNA, 122 bp, Homo sapiens
ctgaatgaaatggcggggccataagccatccaaggagccgcctccgtgaagttataggctcgcggggtacaaggagaaaaaaacaatccagctccaacggtactgatgtgacaggaggttgt

SEQ ID NO: 306031 - DNA, 122 bp, Homo sapiens
agcagccagccctcagccatccttggttgcatggacctaggaaagaggcctgcgcaggctcggacaaggggtcaggatccattgggcaggaaactcgggtccccagatacccagacagaatg

SEQ ID NO: 306032 - DNA, 122 bp, Homo sapiens
tgagacggagttttgcttttgttggccacgctggagtgcaatggtgcgatcttggctcaccgcaacctccgcctcctgggttcaagtgattttcttgcctcagcctcccgagtagctgggat

SEQ ID NO: 306033 - DNA, 122 bp, Homo sapiens
cacccacccccagcatccagaactacacggagaagttgggctggtaccactcgatggaggcggtgcgcagggccttccgcgtgtgggagcaggccacgcccctggtcttccaggaggtgccc

SEQ ID NO: 306034 - DNA, 122 bp, Homo sapiens
gcccgcgcccccgccgagcctgacctcgcccctggccctctccctccgcgcgcgtcggaccgtccttcagtccatccaggcgcacgcctcaggggacgcgccgcttcctcttctcccgcaac

SEQ ID NO: 306035 - DNA, 122 bp, Homo sapiens
agcctgcgggggacgttccagcatgtgagcctgcgggggacgttccagcatgtgagcctgcgggggacgttcccgcatgtgagcctgcgggggacgttccagcctgtgagcctgcgggggac

SEQ ID NO: 306036 - DNA, 122 bp, Homo sapiens
ccaccgtcactgtgacttagaaaacgcgcccacacctagccgaggccaagagacaccggccgccccttacactgaaaatgaagtaaaacctcctgagaggcttctccagagaggctcggaag

SEQ ID NO: 306037 - DNA, 122 bp, Homo sapiens
agtgataataataatataatagcttacatttattgacgatctactgtgccaggtaccatgcgtaactctttatatctattatctcactaaattcttacctacctataaggtaggtaaaatta

SEQ ID NO: 306038 - DNA, 122 bp, Homo sapiens
agatgagactttttttttctttttatacctttttttccgcccgtctggtgcgtttgccgacggttcttctcggccctgtgtctcgggagagtcggctgccgtctgggcctgtgccccacctg

SEQ ID NO: 306039 - DNA, 122 bp, Homo sapiens
ctcggcccggcgtggaggttggcgagtggtgcagaggcggccgccgggggagctgccggccggggctgccagcgagcgggtagcgggcgggaccgttgatgccggtagcagctcgcgcgcgt

SEQ ID NO: 306040 - DNA, 122 bp, Homo sapiens
gtgtttttgttttgttttattctgtttaatcacttcaagtatctcatccattatttgaagcgggctcggaggaaacgtgccgcatcctccagtccttgtgcgtctgtttaggtctctccgaa

SEQ ID NO: 306041 - DNA, 122 bp, Homo sapiens
cccccctctctacaatccaaataaaaccaacgcttctgaatgggagtacccgtgtgaactcggtatctggctgtgtctgtgtgacataaacaggggccttgcctgacactgtgtgtgggtgg

SEQ ID NO: 306042 - DNA, 122 bp, Homo sapiens
ttattctaatgtgcatcagtattttccaatacattcatgctttgcttaacaacagagatacgtcctgagaaatgggtcattgtgtgaacatcatagagtctacttacacaaacctagatggt

SEQ ID NO: 306043 - DNA, 122 bp, Homo sapiens
cgcaaggaacggggcctaagcgcctggcgaggccgccctaccgggcagagacagttgctacgtaactcggggaccagaaacccagccccacccgctgcggttaaccgacagccgcaacggtt

SEQ ID NO: 306044 - DNA, 122 bp, Homo sapiens
aatgttaggtccatgcagttcttggtcaatgttaacgaaaagtccaacgttccgttcgcgcggggacagcccgtccgcaaagcggggcagcccgcaggcggccgctccctggctccacgcca

SEQ ID NO: 306045 - DNA, 122 bp, Homo sapiens
aagaggacgtgggaattccgagtttttcagggccatgtctgctctggtggttgaagccagcggtgatgattaactctggactttgctgggttggtgacacgtcacaaatgaaagcgtaacca

SEQ ID NO: 306046 - DNA, 122 bp, Homo sapiens
ccagcgctgcactcagccccagcagggaccaggcctgggagtgagggcgagccccttgcgcgaaccctggagggccggaccctaaccctggggctgtgggctctgcccctccctccattcat

SEQ ID NO: 306047 - DNA, 122 bp, Homo sapiens
tgtttctctggcaagcggggtaagtggggtaagctgctgatgatgtctgccctccagctccgggagtgtgagctgagccctggtgtgaacagggacctgacccggcgcgttcgcaacatcaa

SEQ ID NO: 306048 - DNA, 122 bp, Homo sapiens
aagaggtggggtagccttgctcggccaatgagctgccgtcgctctcttaaaggcacccagcgtctggaaggaaaactagcctggcaacctggagagctcccgggccagagccaggaggcagc

SEQ ID NO: 306049 - DNA, 122 bp, Homo sapiens
caggttaacaagtcaagtcatgtcaaggcttctaaagatatatatctgacccttacctgccgtaccacatcccctttccaattctccattccttaaagacagtcataaaggcagtcattttc

SEQ ID NO: 306050 - DNA, 122 bp, Homo sapiens
gtcctccgaggaccggaacacgtttctgcgacccggggctctggccagcactgtgttctgcgtttggtctcatacctgcgtctaccttccatctgtgtccagcggccccggctccagcccag

SEQ ID NO: 306051 - DNA, 122 bp, Homo sapiens
ggcgaagctgtgctctggggcgggttgagtctagaggccgaggctggacaccacaggctccgccccaccagcctgggaccgcctccaacccaccttcctggggtgtgacgggagccccgccg

SEQ ID NO: 306052 - DNA, 122 bp, Homo sapiens
ggtggtgtgcactgcatttgctggcagtgagccagggggtgggccacatctgggcccgggcggggtggatctctgcagaagtttatccatctcttggctgacagggtgggcgagatgggagc

SEQ ID NO: 306053 - DNA, 122 bp, Homo sapiens
atcactttcagacttaagaataatgttgatttcccaagtgctttaccttatctgttaaagcgtaagatgaattggtatttgcttcataggcagtttgactgcatgtattagagaatgaaaag

SEQ ID NO: 306054 - DNA, 122 bp, Homo sapiens
aggcgcggggtgcgggtaggatcggggtcctggaggcgcgtgggaggatgcgacggagtgcggtaggggcagggtgattgtggggcggggggcgggtaagacgtggtgctggcagggccggg

SEQ ID NO: 306055 - DNA, 122 bp, Homo sapiens
gggggcagaagattacagaattggcattgtcctgcgtggaagctgggccacccacagtggcgtgggaagcctctcagatgctggattctaatgggctcttgatcaccttggattgggctatt

SEQ ID NO: 306056 - DNA, 122 bp, Homo sapiens
ggctggaatcgaactagaagttataaggcaggtcccaccacaatggcaaggctaacatcccgcaagatggtacagctatgaaataggaagaccccagtgaacaacctcatggaggagtcaac

SEQ ID NO: 306057 - DNA, 122 bp, Homo sapiens
gcaagtgcccgggaaccagagctccagagtgggatataaaaataggagccggtggccgggcgcggtggctcacgcctgtaatcctagcgctttgggaggccaaggagggtggattgcctgag

SEQ ID NO: 306058 - DNA, 122 bp, Homo sapiens
ctgcaggggcgtggggccaggccgctccggctctgtcgctgaagagctacccccgagccccgccaggacacgtagctgtagacgggatcagctccaggcacttccccttcccccagaacctc

SEQ ID NO: 306059 - DNA, 122 bp, Homo sapiens
acaggtctcgagtgccgaagtccttcaggattggggcaacgtcccctctagagcatgggccgaggccggggtggggtctggctccagccaaccgcacacagcctacgcgccgttgctgagca

SEQ ID NO: 306060 - DNA, 122 bp, Homo sapiens
ccgccaccgcgcgtaggccccgcccccgcgccgcgcgggacccaaccagggctgccgggccgctgtgcgccacgcccacttccggaggggaagcccgcttcccaccccacgttccacgcctc

SEQ ID NO: 306061 - DNA, 122 bp, Homo sapiens
ggcctcgcccccgcggctccctagtgggcggccgggtctcagggactgggcagtgttgcccggcctggtgaaggcggaccagggcgtggcggaggtccccataacaaatcttgaaataaaac

SEQ ID NO: 306062 - DNA, 122 bp, Homo sapiens
cctccgggacctgtggctggagaggtgaccgccaggcatccggggagcctttggagatctcggcttcctttttcccccgctgcttgccggcgtgtcctcgggtggacgcgggcagcccgaag

SEQ ID NO: 306063 - DNA, 122 bp, Homo sapiens
gcctttcctggtgcacgatgttaactttacactatgtatattactatttaatgtcgacaccgctgtcttttcatttcacatctgttatgacattgtggctttcgccctttgcggtcagggac

SEQ ID NO: 306064 - DNA, 122 bp, Homo sapiens
agatgaagttactactatatttcaccaccctgcaggtaactgaaactcaattaccgctgccgctcactcggttccatccccctgagtttagatagctctggtgcctctcagaactcccctgt

SEQ ID NO: 306065 - DNA, 122 bp, Homo sapiens
gttcagcggccggaatcaccagcactgcggctaaaggggctggtaggctctcctgcaccccgcgtgctcctccgccttctctgtgtcccccggcttttccaggaggaagatggggtgcccat

SEQ ID NO: 306066 - DNA, 122 bp, Homo sapiens
tccgggggctgagggagggtgctacgtggccggaattctgaaggcacagtcagggcaatccggggcatctgaaatcagtctgggagcagtggggaaagaccacatggggaagtgagctgatg

SEQ ID NO: 306067 - DNA, 122 bp, Homo sapiens
taattttgcaaaatccccagtgtgaaagccctcccttgctgtagcattgactaacttcagcgcggcccagccccaggaatatcagtaacaaggcacagctgagtttgtcagtggccgctgtc

SEQ ID NO: 306068 - DNA, 122 bp, Homo sapiens
ggacaaatggttttcccccctaaattttactccagggtacattttctcctctttctttgtcgaacaatgtgaagtaagggcttggattttgtcctgcagatggttttgcaatcagttctagc

SEQ ID NO: 306069 - DNA, 122 bp, Homo sapiens
tccctctgaaacacaattcacaaacgttgccttggagacttattttttaaggcctcagaacgcttggacacttttgaagacgggaacacacggctgaaaacagccctcggacgcgcccatac

SEQ ID NO: 306070 - DNA, 122 bp, Homo sapiens
cccagcctgagcgacagagagatatgctgtctcaaaggaaatacaaactaaaaaaccagccggacatgctggcgtgtgcctgtagtctcagctacttgggacactgaagtgggaggatcgct

SEQ ID NO: 306071 - DNA, 122 bp, Homo sapiens
ctaagtagcgtaactctcgctcatagggctcagaggcggaagcggaagcacattctgtcacgcaattggagttgctgaggcgacgcaacaagtgtgcctcccccctccatggagatccccgc

SEQ ID NO: 306072 - DNA, 122 bp, Homo sapiens
aagaccatcgcccacacaccgctcacatctgctgccgagagcttccagaattccaggccgcgtttaggaagcttcagcggaggcatgcaggctgccctacctctgcaaaaggctcccagccc

SEQ ID NO: 306073 - DNA, 122 bp, Homo sapiens
acttattcattcttctgtcaatggacatttgtgcaggtgactatcatgactactctgtcacgaacattctctctatcaaacatcttttggttggattcacagacacttttctcttggatgta

SEQ ID NO: 306074 - DNA, 122 bp, Homo sapiens
tctttcctccaatcccacacccagtcgaaggcggggcagccgccccacccagcggccagccgggcggcccccagtctggtttaactggttggaacgactaaagcacgctggcgcaaggaaag

SEQ ID NO: 306075 - DNA, 122 bp, Homo sapiens
agccagagcatccagtggtccttccggagctccaacaacccccgcccctccggccgaggtcgccagtgccgtggcatccaccgcaaggcacgcaggtgctctgttccccacccaccggggga

SEQ ID NO: 306076 - DNA, 122 bp, Homo sapiens
ttcctgtctccctcttctccacggggatcatagattatcttccttcccaaaacgctaaagcgtaaggtacaagtgatgagtctttctcctgtaaccccctagtgtgcactgattgtggggtg

SEQ ID NO: 306077 - DNA, 122 bp, Homo sapiens
gtgctctcataagcatttctagcaccatatttacaacgttggcccacagccagaataagacgtgatcttcctattggactgggttcataggagcgtttgttccttaaataactctagtctag

SEQ ID NO: 306078 - DNA, 122 bp, Homo sapiens
ggatggctgggagttcagtcaggacgtctacctgtccaccattgtgaccgaggtgggtgccggcccctgctggggctgagaccagggctcggaggacctgtcgcggtccttgaacccgagct

SEQ ID NO: 306079 - DNA, 122 bp, Homo sapiens
cccctcccgtcctctctctcctcgctcccactcgacgcccaccccccacctccgccgcctcgccctagggaagtggatttggtgaatcctatcgaggatcgtttttttacagtgtattttga

SEQ ID NO: 306080 - DNA, 122 bp, Homo sapiens
aatcacgtctggcaggctgctccagcccgcagtccacacacccccgggcctttgcgccaccgcaccaatttgcatccccaacgaatgcgcgctgccctgatccccgagcacgcgggtattaa

SEQ ID NO: 306081 - DNA, 122 bp, Homo sapiens
ccgggaggcggaggggcggaggaggtgctggcggcggcactgagcggcggcggcgcagggcgcgcgggccttccgcgccgactccatcgacccaaggggcggcggcggtggcggcggctgag

SEQ ID NO: 306082 - DNA, 122 bp, Homo sapiens
caaaaaattattttgatgtcacatctcttgtcaggtcactagctgactgtcatgagctgacgttaaaggaagacacatggacgtgaaatacgattatttcatctgagcaatgtgagttacca

SEQ ID NO: 306083 - DNA, 122 bp, Homo sapiens
cctgctcacctgtagtaagccaggcaggtgccaggtgccacccaatctggagtgcagtggcgtgacggctcactgcaacctccgcctcctgggttcaagccgttctcctgccacagcctccc

SEQ ID NO: 306084 - DNA, 122 bp, Homo sapiens
taagccagatagggcttctcctgcagaagcaaaaaccccagatcacacaccaatgcaagtcgaggcattgatttccattttgcaaagtgccccagatttcaaaaggaataaaaagcaaacac

SEQ ID NO: 306085 - DNA, 122 bp, Homo sapiens
gggggcctgcagagggagcggccacccagcccggggcctgcaagcaggcaggcagccattcgccagcagccccgggcccgggctgactcactgggggccccctgctgtggcctggaccctca

SEQ ID NO: 306086 - DNA, 122 bp, Homo sapiens
tattaacctagtccacactattcagcatgtgatttcaaatctgtcttggcagtttatctacgaagctgttgctgaattctgcccttttggcaaaacacttccaatgttggtaaagtgagcac

SEQ ID NO: 306087 - DNA, 122 bp, Homo sapiens
tgcacgcccctctttggcggcctcagggcctagaacaatgaatgagtcaacgcgcctgcgcgccacgagagcctacccacgcatgcgcaaaaggcttagctagctaagccgcgggaggctga

SEQ ID NO: 306088 - DNA, 122 bp, Homo sapiens
gtatggccctcagcaggcctctgcctcacagctcagagctgggccagggccgcagactggcgggaggcttgctcggtctccagggtcccttaggggagcagctcccagtatggactccccag

SEQ ID NO: 306089 - DNA, 122 bp, Homo sapiens
ccattggtgcgcattccaaagggccatgtaaacttcttcgcgattgcacggattcagggacgctcagtggcgccgcgccgctccttggtttgacttttgtttttcagttgcgttccctgact

SEQ ID NO: 306090 - DNA, 122 bp, Homo sapiens
gaggagggtgcagaaagaggctccgaaattgggggaaactgacccgtgcttctctaccttcggaggtgggacagttgcacgaagtgctagttagaccggatcagttggaactgacggaggac

SEQ ID NO: 306091 - DNA, 122 bp, Homo sapiens
ggctggggcagggacaggggcggggacggggactgggtcggggacgggggcggggcggggcggggcccgggcccggagagttctcacccgccccacgcccctcccgcagaatccagaaggtg

SEQ ID NO: 306092 - DNA, 122 bp, Homo sapiens
cggcagcttgtggaaggacatgtactgctccacctgcttgtacgtctagtactggcgccgcgaggagtccagcgactggatgagggcagtggcgtggccgatgaacatggcgtagcaggtgg

SEQ ID NO: 306093 - DNA, 122 bp, Homo sapiens
ccagcatagccggagcacaggacaaacctgtccaggggcacggcagtcggcacggcagcacgcaagcgggcgcccctcgggcctgcacaaggcccactcgcgttccggtcccccatggagcc

SEQ ID NO: 306094 - DNA, 122 bp, Homo sapiens
tatcaggaaaagagcgccgagcacgggcctattatgccaaagcttctgaaaggggcaccacgttttttgctctatggggcagatgacccctccctaatttcggttttccatccatccccaag

SEQ ID NO: 306095 - DNA, 122 bp, Homo sapiens
ggttgtctagggttgaggctgggaacagggagaacttcaaatgggcacaagaactcgtttcggcatgatagaaatgttccaaaatgatactatggtaatggtttcacaattcaaatttgcta

SEQ ID NO: 306096 - DNA, 122 bp, Homo sapiens
agaggccgggcggggtcacggatgagtctgcctgggtcacctccgcaaaggccaaatccacgaacctcgggcctctttctctcctcctcccctgtccgccactcggctccccagacaccctt

SEQ ID NO: 306097 - DNA, 122 bp, Homo sapiens
atgtttccttcatataaagaacaccaaaatgctagacggctgctctaagtgcttttcacacggatcaacgaatcctccagacaatcatatagcgatggttctattagaatccctcttttaca

SEQ ID NO: 306098 - DNA, 122 bp, Homo sapiens
ggtaactgcacaggagaaggtgaaccagtaagtgggccatatgtctctgcaaaacttgcacgtaggaatcacctgctggggaactaagacacttttatgtttgcagcagaggctgtgttaga

SEQ ID NO: 306099 - DNA, 122 bp, Homo sapiens
gccagtgattaatctcattaggaaagttagagggcagaaaaataagcgacatttgtacagcgatctgtgatggactgagggaaaccccaagagacaatgagtttttctgtctgtccatggac

SEQ ID NO: 306100 - DNA, 122 bp, Homo sapiens
atggggtcccggctggcttggtatgtgcacctgccgagtctgtgctgccagttatccccacggcctctccgtgcaggtcggtctgaccagtgccagtcggatggttcctcaaggtccacggg

SEQ ID NO: 306101 - DNA, 122 bp, Homo sapiens
cagccctgggaatacggtgtcccctgtgggccccggctctcaagagcaccgggactcctacgcttacttgaacgcgtcctacggcacggaaggtttgggctcctaccctggctacgcacccc

SEQ ID NO: 306102 - DNA, 122 bp, Homo sapiens
tctcaaactcctgacctcaagttccgcctgcctcagcttgcaaagtgctgggaatacagtcgtgagccgctgcacccagcccatttattatttttgatttttctgaagtgatataaatgatt

SEQ ID NO: 306103 - DNA, 122 bp, Homo sapiens
gaagctgagcatggagaccatgaggtccagcaggaccaagcaccccgaactgcaaggggacggggtgtgtgaggggctgtaggggcagccagggcccaagacggtcttccatcccataccag

SEQ ID NO: 306104 - DNA, 122 bp, Homo sapiens
acctcttcactcctcccccgccctctcgtggccatgcgtgcgtcagtacgtatgtacgtacgctcgagggaaacttcagaggcgcatcctgacgtcaccccgtcgacgctggcgtagcgacg

SEQ ID NO: 306105 - DNA, 122 bp, Homo sapiens
ccaggccactggaggtgaacacaggagaaaaacgaagtggagagaatgggaagggggaggcgataaacaaaaaagaaggaagtgcagtccgaggggagatgagagacagaaagcatggggtt

SEQ ID NO: 306106 - DNA, 122 bp, Homo sapiens
aggaaaggacagggaaaaagaaaaagacagaagggcccggaaggaagagctccggcagaccgtggcccaccacaacctgctgggccaggagacacgcgaccggcagctcctggagcgggcgg

SEQ ID NO: 306107 - DNA, 122 bp, Homo sapiens
taatttcactctccctttgtgtaaaatgcatctaacaatagcgcctacatacagggttgccgtaagaattaaatggaggatcagtgtaaaggaattagcacatagtatgcttgcaatacatt

SEQ ID NO: 306108 - DNA, 122 bp, Homo sapiens
tctcacacagctagttttttctttttttttttgcaaaagaagtaaagccaaacctcagatcgcagcaagtgagtgtagccattttattgacagatgtttcagccacgaccaatgatctatta

SEQ ID NO: 306109 - DNA, 122 bp, Homo sapiens
tggaccgtcagggagacctggccacctttgctgcctggggctgcgctctgcaccaccagacgctgcgtgggaagagcctggggccagggagggagagggagggcagatcactgatgacagcc

SEQ ID NO: 306110 - DNA, 122 bp, Homo sapiens
tcccagaagccagaggaagctctgggctggtttcttataagtagcatgactaactgattgcgccacaggagctgaggtttcaggccagtttctgtcgtggagtttcaggggtcagcggctcc

SEQ ID NO: 306111 - DNA, 122 bp, Homo sapiens
aggcgcgggccacggcggcactgggctctgttggtgtcagctggccaacagtgtgggcaccggggcaaggagggaacactggagcggctcagccggcactgagctgagcagtggcagaggcc

SEQ ID NO: 306112 - DNA, 122 bp, Homo sapiens
ggaggctgccaccaccgctccggctgtggtctgtgcgcccgccctagggcgacactggcgcgcccatggccgcgcagccgcctctcgccgccgcagcctgcctcctcgctcggcgcggggga

SEQ ID NO: 306113 - DNA, 122 bp, Homo sapiens
gaagtgttatcatcgtgctgagcacaggaggtgtcagggcttcacagggtctccccgtaccgcccgggcgctggagcctgcagggccttcacgcctttgctccctgttggctggcagcagca

SEQ ID NO: 306114 - DNA, 122 bp, Homo sapiens
cccaggcgtggtccagcttgaagcccggtgccagatgcataagccacttgcccgagagcacgtggtgggtgatggcgagctggcgcagggtacccggtgtgatgggccgcccactggtctgc

SEQ ID NO: 306115 - DNA, 122 bp, Homo sapiens
aaaggcgggaagggaggagtcacagaaactacgacttccgtcatgcaaggcgcgcgattccgagttccgggttggaatttaaatccccctacacagcttgagtgtaagaggaactaagcaaa

SEQ ID NO: 306116 - DNA, 122 bp, Homo sapiens
cacgacctacaagtccaaatgtgtcccataacacatcaaggaacttctggcatctcctatcgatcctgtacgggcttctcagactatggggattttctaggcttggtttgccaaggccaaag

SEQ ID NO: 306117 - DNA, 122 bp, Homo sapiens
cctgaattagccaactaattaattatccgtaacagcctgggactccctgggtggaacgtgcgtccctcccagcgcagatgcaggcttgtccctgaatcacagcccggtgacgcagccattat

SEQ ID NO: 306118 - DNA, 122 bp, Homo sapiens
agcaaatgggctcactgcccgttacacactaaagccaaaaactatggcacctgcctttgacgaaaggctttattgcaagtggtcagcaaggagacaggagtgggctcaagtctgtctccctg

SEQ ID NO: 306119 - DNA, 122 bp, Homo sapiens
atggtggtgggaatgttctatggagcaggtttgttcatgtacatacagcccacatctgatcgctccccaacgcaggacaagctggtgtctgtattctacaccatcctcactcccatgctgaa

SEQ ID NO: 306120 - DNA, 122 bp, Homo sapiens
actcacctcctctcccatctcttcatctgctcactacatatttattgagcacctactctacgccacattgtgccaagcataggaaatacagtgctgaaaaagtgagtccccatggcctaaag

SEQ ID NO: 306121 - DNA, 122 bp, Homo sapiens
gcatgagtgttatagctctatgagaagctgtgggtcacggaagagaaccgtggaacccagcgactagtgttcggctccattaggacgaacccgggcacttagctgcgcaggaacaatggcga

SEQ ID NO: 306122 - DNA, 122 bp, Homo sapiens
ctacaagccaaggattgccagcaccagggtagaggcctgagacagaccttcccacacagccgcagaaacaccagcactgcccacaccttggttttggacttcgggcctccagagccatgaga

SEQ ID NO: 306123 - DNA, 122 bp, Homo sapiens
ctttattcaacaggcgtggcttcctgaagcgtaaagccacttcacagacggtggccacagcggcacctcggccagagccatgcggccatcagagaccctgggcggccgggcagagggcttgg

SEQ ID NO: 306124 - DNA, 122 bp, Homo sapiens
aaagtgtgcaagagaacagagaataaaaatagaatcaaacccaagctgggcatctctcagcgtctcccagttgctgagaggtaataattagggtaactatataatttttcacccaagccagg

SEQ ID NO: 306125 - DNA, 122 bp, Homo sapiens
tgctagaacgtctctagacggcaacgaaacattaaagcctaacctgaggtaatccctcaccggcagtgaagctcctctgctaggcactgtcgtcccgtacactgcccaagctctgggggtgt

SEQ ID NO: 306126 - DNA, 122 bp, Homo sapiens
ggccagttggagttccgggtgggcgtgggcttggcgggccacgcacttggaacagctggccgccttgccggcccgccggccctgggcaatgaggggcttagcacccgggccaacggctgcgg

SEQ ID NO: 306127 - DNA, 122 bp, Homo sapiens
ctgaggacagacctgctgggccgcgttggcaggggctcaccccgtcttcccgcaggaaagcgccttggcgggactgcttccgccagcttcccggccagacccaagggtggagctccaggcca

SEQ ID NO: 306128 - DNA, 122 bp, Homo sapiens
gactcgatttgcatcttaaacgcggacgccacgcggggctgctggctccaccccggctcgcgagcgctgggggcgcccggactcccacccgctccccacccaccagccccgccccgtggtcc

SEQ ID NO: 306129 - DNA, 122 bp, Homo sapiens
ctttaaaaaaatacggatgcctggatcccatgcagatcagctaaatcagaatcttcaggacgtctcctgcactttgatgtttttaaaaagctcacctgctgattctaaatatttgaccaggg

SEQ ID NO: 306130 - DNA, 122 bp, Homo sapiens
tgaaccgaccataacacctgccacgctgaacccaacatatgcctgccacgctgaaccgaccgtaacacctgccacgctgaacctaacatacgcctgccacggtgaacctaccgtaacacctg

SEQ ID NO: 306131 - DNA, 122 bp, Homo sapiens
tccctggcggtgacctgtttctcagggaaacagatgctcgctcttgcaaagggaggtttgcgttcaatgaaaggatcaagtgtggccagggcagcccggccgacctcgagaggttcccgcgt

SEQ ID NO: 306132 - DNA, 122 bp, Homo sapiens
caggaggtgggttccgttcccctccctcttgagtctcttcaccagcagctgcaggaagggcgtgggggaccgagagacaaagagcgcgcaggcaccgcctccgtccgggcggcccctttaag

SEQ ID NO: 306133 - DNA, 122 bp, Homo sapiens
aacagacacagcagggccccatccagctgctggaagatgctgagcatgagcagggtctggcggagatcaggggacaggctccactgctcctcttccagcaactccctgaccactccaaagtc

SEQ ID NO: 306134 - DNA, 122 bp, Homo sapiens
gtgagcttggtgggaaaagctcaaagagactctgtcttcctttctggcttcctttccagacggcgcagctttctctcagctgctcccctgccccacctctctcgaggaaatcggtctctttc

SEQ ID NO: 306135 - DNA, 122 bp, Homo sapiens
agcccctgcccgctccgtgctgggccgaggccaaggccctggcagccctgcctgcttgcccgggtcacgctgcccacccacggggaaagctgagccctgtggagtgcacaccatgctgtcag

SEQ ID NO: 306136 - DNA, 122 bp, Homo sapiens
catgccggagcggacgggatgaggtgcaccgcagaactggggactcctggtgccgggacgcggcgggctggggcgccccactctcggggcaagtctgcaatgcccggtgcccacaaaaagga

SEQ ID NO: 306137 - DNA, 122 bp, Homo sapiens
tcaggcacgcaactggagcggacagcacagcttccgggatttggcggggcctttgtctctcgctgcagccggcgctccacgtctagtcttcactgctctgcgtcctgtgctgataaaggctc

SEQ ID NO: 306138 - DNA, 122 bp, Homo sapiens
cagctctcgccgaggctggatttagattttaagcgtctcacccgagcctcccgccggccccggggacccagactgggagctgcatttttgtccgagcccggttaaaaaacgggtgcctgagt

SEQ ID NO: 306139 - DNA, 122 bp, Homo sapiens
atatacaaatgggcaataggcacatgaaaatatgctgaacttcactagtccaagtgttggcgaagatgtggagaagtcacaacacttgtacactgctggtgagagtgtacagtggtacagcg

SEQ ID NO: 306140 - DNA, 122 bp, Homo sapiens
tggtgcctctgcccagcccatactacccagcactgctctcgcagcacccgccccagggcccgccctgtggtgcctctgccccgccttctgctctgctgcagagggcaccacctcccggaacg

SEQ ID NO: 306141 - DNA, 122 bp, Homo sapiens
ctcctccccctcccgcagacgccgccaccaaagttcgagccgctcctccccagcccagcgcgcgccccgccccgtgccccacgtgcagcgcccccaccaatgggcgcaccgcgcgcgcggac

SEQ ID NO: 306142 - DNA, 122 bp, Homo sapiens
tcgcacctcggggtcgccccacccgcaacacctgccgccgcccggggctcctagcgggcgcggcctccgcgcccaggccccgcccccgcgcccccattggtcagtcccgggggtgggcgggc

SEQ ID NO: 306143 - DNA, 122 bp, Homo sapiens
caggggactctgaccaccgtaaatatttgtatatctggggtgtattatagtgctgccatgcgtaagagttactaccggtggtgactccctgtccatgtacccggttcactgcaccaaaggac

SEQ ID NO: 306144 - DNA, 122 bp, Homo sapiens
ctatggaaatcttcatggagcctgtgagtgaaaagcagcccgagaggaaatgaagggaagcgatgcagtgaattttatatcagcagtttgagtgtgacatttggatctggagggagaaaact

SEQ ID NO: 306145 - DNA, 122 bp, Homo sapiens
aaggctgaagtgtccttaagaagaacaacaaagccagcttctctgcatcagggcaaagaacgtggaggaataagatgcttgggccagtgggaccagaaatatgaaaacaggagaggatggga

SEQ ID NO: 306146 - DNA, 122 bp, Homo sapiens
catgtgctgccatgaacacagtaggtgctttagagatcaatatgcgttgttactggtgaacggcagaagtgtatagggattagtggctccattgctggacactgtgcatctgggattgcatc

SEQ ID NO: 306147 - DNA, 122 bp, Homo sapiens
ccggggcccggctgcactcaccagcctgggtgatgtctgacaggtcgtagctacgggccgcgccccgggggaagtgcttcaagcgccggttagacaggttcagggtcccggtggccacggcc

SEQ ID NO: 306148 - DNA, 122 bp, Homo sapiens
cgggaggtggctgaggcatgatagctggaacagagcttgagggcagaggaaggtcatgtgcgtcatgcccctgtcacagccttgttctccagaagaccatccccaagggccctggcaggcca

SEQ ID NO: 306149 - DNA, 122 bp, Homo sapiens
agaggagggtgtgcgaggagacccaaggcgggatctaggctttggaacgttggaggtttccggccacagaggcagggcctccggggagccaagaggggcggggagagacacacacagagaag

SEQ ID NO: 306150 - DNA, 122 bp, Homo sapiens
ggtctcggcgctgctggccagcatcttcatggtgtagcgcacggtggtggccgactgctccgagatgttggccttcacatacttctgacagcagatgccacagaaggtgatgctgcagggac

SEQ ID NO: 306151 - DNA, 122 bp, Homo sapiens
gtgttgtctagtttggattcctcaggtgggttgatggggctgatgtgaaggcctttctcccggctaggctgtgatgaggaggagcggctctttggagccggggcctccctgctggttctcag

SEQ ID NO: 306152 - DNA, 122 bp, Homo sapiens
gttggccttgagctgggtgttgtagcggcagagcttgcactggtatgagtcccccatcaccgccttccactcgtcctccgacaggctgcgctccacgttcatgtgcaggcccagcatgtcca

SEQ ID NO: 306153 - DNA, 122 bp, Homo sapiens
caacagatttcaaaagagggtccaattcctttgtcgtgaagaactttgctactcaaggggcgtgatcatgggccagcagcatccgcatcatttcttgttggaaatgcagaatctctggccct

SEQ ID NO: 306154 - DNA, 122 bp, Homo sapiens
ggttgaaaggacagtgggacaataactgaggcccgtattgcccagagcgtccccatcccccgtccggagctggaagaggccatagaccgctgcctccacatcttttcctctccttcgggttc

SEQ ID NO: 306155 - DNA, 122 bp, Homo sapiens
gtcaaggcaaatgtgccattcatgcccagtgcccaaaatggggcctgttttccctgttagcgtgagtctgactcatatcccacatactgagtgggttgagaattggggttttgagaggtgag

SEQ ID NO: 306156 - DNA, 122 bp, Homo sapiens
aataataattatgaacatcagcagcatggtggaaacgaaagtgaaaggaacataagacctcgttcttggatgtttccagtgaaatagagagggataaattccattcaaactgttattatttg

SEQ ID NO: 306157 - DNA, 122 bp, Homo sapiens
gggacgggggactcttcgctcccagatcctggtcagcaccgccttggtcaggcagcctggcgatgacgctgctctgcgtgactgtccccagtgttattttccccagggcagttggcttgcac

SEQ ID NO: 306158 - DNA, 122 bp, Homo sapiens
aggtgggtttttgtgccaggtccctgtctcatttcccttgcttctcacgggctcacttcccgccctgcctcacacacactctggcctggagaggaacgtgtgcccacacagagagaagtatg

SEQ ID NO: 306159 - DNA, 122 bp, Homo sapiens
ggtcacagaattttgctttgccttctcaccatttagaatctctgctgaaggtgtggacatcgttttggattgcctctgtggggacaacactggaaaaggtctcagtcttctcaaacccctgg

SEQ ID NO: 306160 - DNA, 122 bp, Homo sapiens
gaaattacgcacagctgctgtggcgggccatgcattcaaccccccgctatatttatatagcgtgtttacctctggaggacattcactcattttaccctcaagagtttcccgggaggtggaca

SEQ ID NO: 306161 - DNA, 122 bp, Homo sapiens
cccgggacccacaggagctgaggctgcatcacagagcaggcagagacgagctgggggcatcgtgtgaacgaacgccccggcgtgccgtcccgctccacgcctgcacaggagctgaaagctgg

SEQ ID NO: 306162 - DNA, 122 bp, Homo sapiens
ggtgacgaacaagatcacgaaggacttgaacttggagacatagctcagcgccgaggccatcgcgcgggagggagactggcgggcgagacgagtgaggggcagctagaggcgccgcgggctta

SEQ ID NO: 306163 - DNA, 122 bp, Homo sapiens
atatttatatttaagcctaaaacgactctttgatccctcccctaagacctccttcccgtccgcctaggcctcggtatcccccaccaggtatgagaaggaggagtcttcattcttcccaggcg

SEQ ID NO: 306164 - DNA, 122 bp, Homo sapiens
ggagggggcggtgcagccgcctttcctgggaggagaagcgcgggttcctggctctccacgcgcactgctttaatcagacccgtgcagcctcgagctggagtggccagctgggcctggagcaa

SEQ ID NO: 306165 - DNA, 122 bp, Homo sapiens
gattttcattgctgaaaaggctgagtgaatgtcaagctggtcatttttcagcttacaggccgattagttacaacagttcaactagaaagtcattgcccagggcagtgttcaaagtagtaggc

SEQ ID NO: 306166 - DNA, 122 bp, Homo sapiens
ctattacaaaaccagggtcacaaggctagtgaagtgtgcaatacgcaataatcaggcacacgtacaggtgtctgcactccacactcgcactgactcttggaaagaagaggggggcctgggag

SEQ ID NO: 306167 - DNA, 122 bp, Homo sapiens
tgagagagcagaagagggaaattgttaatcattaaacctaaacgccctagatggaatccgcgtctcatatacgggctctttgaataactctaagccgggggttagcaaaatgtggtcggtcc

SEQ ID NO: 306168 - DNA, 122 bp, Homo sapiens
ctcgcctccaccaccacccccaccagccgctgccccactggctgctcctcctgaggagcccgccgccccgtctcccgaagaccccgagctgccggacacccggcccctgcatctggccaaaa

SEQ ID NO: 306169 - DNA, 122 bp, Homo sapiens
tcctcacctcctttccccccgcttcatgtgacgtgtgcactaaaggagtgaaattacggtcgtcaaagacaaggttgcaaatgattgggactcatgcctttcaagcaaaataaaaagtaatt

SEQ ID NO: 306170 - DNA, 122 bp, Homo sapiens
tattgtttggagctcggctgcctgttttgagaacccctagtcacatgtcactcttgaacacgtaaaacgtcacgtgtctgaattgagatgggctctaggtgtgaaattcacaacagatttcc

SEQ ID NO: 306171 - DNA, 122 bp, Homo sapiens
actcccttctctgcaaggatctcagagatcagcctgtgtccctgagtccagagccacacccggtcagctctgggtccctgagtccagagccatacccggtcagctgtgcccaaccccgggca

SEQ ID NO: 306172 - DNA, 122 bp, Homo sapiens
cgtcgtcctcggccccgggagtgtcccccgtcgcgtcgatcaggtccatctgcagcatctcggcctgcaaccggctccccgcgccgccgccacccgcagagccctcccttttcttttctttt

SEQ ID NO: 306173 - DNA, 122 bp, Homo sapiens
gctcacggaaacatcctgccccttaaaacacctccgtccccgatggcgggtgggtctactcgcagcccgtgagggcagtgttggctgcacgtaccctattgtgtgctgcagtagaaagactc

SEQ ID NO: 306174 - DNA, 122 bp, Homo sapiens
atcaggcagagaaagcccgggcaagagagtgacacacggggcttctgcccagaacacgtgcgcccacaatcccgggagctgtacaaatcccaagcggggaagcggaggcctcgacagttcat

SEQ ID NO: 306175 - DNA, 122 bp, Homo sapiens
cgggaacccgaggggaagaggcacggacacccagattacaacacccacggtgcacagagacggctcccactgacatctggacagggaagcctgagctggcttttactttttaaaagtctcag

SEQ ID NO: 306176 - DNA, 122 bp, Homo sapiens
acctcagccacaaacctaacgccagggccacgttgctcgtttctcatccatcctccaacccggtcaagctccaggagaccggcatgccccccacttgggacgcttcccagggccaggcggcc

SEQ ID NO: 306177 - DNA, 122 bp, Homo sapiens
ggggccctccggctgggcggcgccagcggatgtgagctcaggctcagcggtcgcattttgcgagtggctccgagacacacaatgcagcagaagtaaattccccagcagcaaagccgcctggc

SEQ ID NO: 306178 - DNA, 122 bp, Homo sapiens
aacatggtgccgccaccaccgccgccgccgccgccgccccctctacctccttctccgccgcggggccccaagcccggactgagcgtgctagacactgtccgaccgccacccccggagccgag

SEQ ID NO: 306179 - DNA, 122 bp, Homo sapiens
gcggggccagcgcagttgaggtctggggagcccggctggcatctgctccgggctgcggcgcgggccccgcggagcccaggaggcggcgggtgcttccggccaagggccctggcggccgccgc

SEQ ID NO: 306180 - DNA, 122 bp, Homo sapiens
aatgcatccttgaggccaggaacagagcagatgttctatttctagacatgttctattagacgttctattgtatagataatgcccttgcattgtcttcagactagcaaggaattctgacaagt

SEQ ID NO: 306181 - DNA, 122 bp, Homo sapiens
ctgcaaacctggtgttcgtgtacctgctgtgccgcgagtcgctgcgtggggacgagctggcgtcggccgccgagctgcaggccgccttcctcacctgcctctacctcgcctactcctacatg

SEQ ID NO: 306182 - DNA, 122 bp, Homo sapiens
acaaaatctattaaataacaagtcagaagcataagggagtcacggcaattgggtcacctgcgccctgcacacctgcaaagcctcccgactgtgcgacggaggcggcggctccggcagaggct

SEQ ID NO: 306183 - DNA, 122 bp, Homo sapiens
aaactcctgctcaatcaacaagccccacccaactctcaggcccgcccatctggccgcccccggccctgctctagctctgcctagagtccaacacgcaccgtccagtcccctcccagtcccct

SEQ ID NO: 306184 - DNA, 122 bp, Homo sapiens
gaactcggaaacgactggctcagccggggcgtcgggagggcttcctggaggaggtgccagcgccgggcgcggcggggtcggagcgtgcgcgtggcgccccaccgggcacgcgcaccgccggc

SEQ ID NO: 306185 - DNA, 122 bp, Homo sapiens
cgggatttccaagctccccttcccagggcacaggcgggaggacctccgcgatggtgggggcggaggaggctccaccctgacagcttcctataaccccactgacccgtgccacatgggtcaca

SEQ ID NO: 306186 - DNA, 122 bp, Homo sapiens
cggacactgtgcccggctttagtaggtgccgcggacactgcgcccggctttagtaggtgccgcggacactgtgcccggctttagtaggtgccgcggacactgtgcccggctttagtaggtgc

SEQ ID NO: 306187 - DNA, 122 bp, Homo sapiens
gggaactgctattaggaggatatttttggttgtcccagtgactggggaggatgctattggcgtctagtgggggagggctagggtcactctcatgtgagagtcctgcacagcagagaattgcc

SEQ ID NO: 306188 - DNA, 122 bp, Homo sapiens
gccacaaacccagcaccaaacacatttcttttccctcaattaaacccaattcagggtttgcgtgctgaggacagcatctgcctttgtctggctcttcagctcagaaccaccctgagtcatag

SEQ ID NO: 306189 - DNA, 122 bp, Homo sapiens
gtctgttgcaggctgatcactgagcagctgcggacgtagtgggcccgtgattgggcatctcgcgttattacgtagccttgcccgtgaacacgtctctgtgtttctcaatcaacttcatcacc

SEQ ID NO: 306190 - DNA, 122 bp, Homo sapiens
tcctttcctccacaaagatagaagttaattttgctgcatccctggacaccccgttgccaacgacccagcattccgttggtaagtgaggctggaggttggagtgggagaaatttcgtggaagc

SEQ ID NO: 306191 - DNA, 122 bp, Homo sapiens
cggggagccggcgagaaggccaggaagctgtatggcagcgctcctactcacctcacaggccgactcccgaggcgcacgtcgctggcgggctcaggcagcaggcgctgtagctagcgcggtcg

SEQ ID NO: 306192 - DNA, 122 bp, Homo sapiens
tcccgggggagccgggtaccacccgggcctggagacatgaggaggcagggatgtgaggggcgggggacaggacagccggccttccgttaaatatctgctcctcgcgctcgagcctccctgcc

SEQ ID NO: 306193 - DNA, 122 bp, Homo sapiens
gcctcctgcccgcccgcccgcccccgccgccggctcgcgcgctctcgcaccgcgcgcgcccgccggctcccattgagccccgggcccgcccgctgatgtcatccccggcccgccgccgccgc

SEQ ID NO: 306194 - DNA, 122 bp, Homo sapiens
catttccagcgagccgttaaaaggccggtggagcggcccctgaggggcgctactttgcggcgcggaggagcatcgtggcggcgatgcgtcccccgttggtcgttgagcctgcctctgattgg

SEQ ID NO: 306195 - DNA, 122 bp, Homo sapiens
gcattgatggtttggagggcaaagggagtcctttctcggggaaggggattgttcaggggccgcatgggtataacagagttgtatttatgctgcctgttaacggagttcattagggacgtata

SEQ ID NO: 306196 - DNA, 122 bp, Homo sapiens
gctggccacttgtagcaaacagtagaggtgcagggcggagaaaaggagtacgggaattagcgaggactttcaggagagtgacgtcactcaacctgtagctttgattggctgggctgcgaggg

SEQ ID NO: 306197 - DNA, 122 bp, Homo sapiens
aactactgggtctgtgccaggcactggataccctcttctctccatgggaacacctggccgcggggagtgagtggagcaggagagggcagctgtgaacacagagcccagctgaccctgactgg

SEQ ID NO: 306198 - DNA, 122 bp, Homo sapiens
gtatcccttttcaggtgccaggctttcaggggccccagatgcttttgctccctaggctcgcggtgtatggaagctgggacatcccatgattcctctctggaccttgtccttgaagttagggt

SEQ ID NO: 306199 - DNA, 122 bp, Homo sapiens
catcaaaggtcacttttcctgctgcagttgggtataacagcctcaccactgctcaggtagcggccatgtgtgcctcatgaccagctgttactggggacatgttggggacctgctgacgacaa

SEQ ID NO: 306200 - DNA, 122 bp, Homo sapiens
accctcctgcgcctggtgagtacttccctgtttgtcttctcttttcctggcgaacttttacgcgctgtctcggggcctccgcgcctcagcctgagggctccaggagccccccgctctctgag

SEQ ID NO: 306201 - DNA, 122 bp, Homo sapiens
tgatcatttctcctcgcttccaagaagtcttgggtgtctggtgaaatgacactgtcagtgcgtctgagaggctgaggctgttcaaaggaaatcagaggctggatttggcaggccctttggga

SEQ ID NO: 306202 - DNA, 122 bp, Homo sapiens
ttccttcaggccggggatcccggggaggggttcttcccctcggccagggtcatcgttttgcgatctctcctgggagtctgggtttggagtctggtcttagccggtagcaactgacgtggcct

SEQ ID NO: 306203 - DNA, 122 bp, Homo sapiens
taaagggacaggagccgactttggtgttgggtaaaagcgcggccacggcttctgttgctccgttcgttgtcaggtgtgcagcctccacccatgttccatttgatagtccagataattttcac

SEQ ID NO: 306204 - DNA, 122 bp, Homo sapiens
acatcccatcccagcatgccctctatcacgtcactacatccagattttccctccatcacacgatgtagtccagtgtgataaataaagtatacagacatgctgggtgtggtggtgtgtgccta

SEQ ID NO: 306205 - DNA, 122 bp, Homo sapiens
acctactccttcactaaacatgctttgagcccgacgtgcgaggcgtggtgctggggattccgccgtgaaccaggcagccagggcccggcctggacgtaactcttctctagggtgctcccagg

SEQ ID NO: 306206 - DNA, 122 bp, Homo sapiens
acaaccaccagggaaaggctgtgttggttccttaatcctacaccctgcagggcggccccgcggctttctagcttgtttcctgacccgtgggtcttcctgtcactccacgggagaccgcagaa

SEQ ID NO: 306207 - DNA, 122 bp, Homo sapiens
gggactgggcgggtcggcttccgaatggaagaggtctgtgagaagttaacctggtgataccgatccgaagagcctatcaagtgaagccccctgaaatacggagaataagaatcttagaggta

SEQ ID NO: 306208 - DNA, 122 bp, Homo sapiens
ggggaccctcagagccactgtctgcaccggatgaagctgccctccaatgcttcccacccccgcgcacctcagatccctacccacaccgcacctcccaagacaccggggcacagacaagatct

SEQ ID NO: 306209 - DNA, 122 bp, Homo sapiens
gctccgcctaccagggcggggctcatgggaggggaccgagccgccctgctggggccctgacggcggcctaactcaatctaggcagtgtcccgtgcgtttggcttagtgaccaaatttaatca

SEQ ID NO: 306210 - DNA, 122 bp, Homo sapiens
catgcgggtaaggggtgggcggggaagaggggggatccccagcaggggaaagggactgggcggggcgcgaagctggggctgccgctttagcctccgtccagctcttatctgggtgcttcggc

SEQ ID NO: 306211 - DNA, 122 bp, Homo sapiens
agttaggtcgcattaggggtctcttcactcccacgtccacttccgcggcccagacgtgagcgcccagtggcctggacatcctccacacacgtcagcagggagcaccgcgtcccggggagcaa

SEQ ID NO: 306212 - DNA, 122 bp, Homo sapiens
atttactctcagctctgagtaccatcctaaacacattatctcagaggcttattcaaaccccgcaagttccaaaagcaattttttacaaatacagttaaattaaaagtcgacataaaatctac

SEQ ID NO: 306213 - DNA, 122 bp, Homo sapiens
gcagcccccgctgggcccgctgttcctgcgcgcgcagaggagcgtagcctgcccctaggccgcgttcccgtgagctccatgcccacagtggccgaggccggccacaagcccacggtcccttc

SEQ ID NO: 306214 - DNA, 122 bp, Homo sapiens
tctctgagatttcgtgcccttcccccatgaagctatgctcctccagtctggcagggaactcgcctatggacaagagggtgacagacatcttttgatgatgagcatccacaggcacagggaac

SEQ ID NO: 306215 - DNA, 122 bp, Homo sapiens
gtgtggggaggcactgagctgggggagaaggcactagcctggcaggcaggataagggctgcgcccagacagagttcttggaacctgtgaccacctgggccctcacatattcattcccttctg

SEQ ID NO: 306216 - DNA, 122 bp, Homo sapiens
gcgctctttctgcctgcaaccgtgcccccgaactcgggccctgcgaggtgggggtgggcccgggcccctcctgccgcccctgctgccagcaccgttctctccgaggccctcaacgccccgcc

SEQ ID NO: 306217 - DNA, 122 bp, Homo sapiens
tctctctctctctctctcagttctgaacaaggagggaaggggtaaagagtccttagtgagcgccttctgcagggacaacccttctggacccatctggatgggagcagccaggagaggcaaga

SEQ ID NO: 306218 - DNA, 122 bp, Homo sapiens
taatgagttatctcatatcaccaggaagtagttacagaagacccacagtgcccctagactcgaagatttttagtctcaacctattgaggagggaatgttagagtaagccgatagtttaaaat

SEQ ID NO: 306219 - DNA, 122 bp, Homo sapiens
aggcgagcaggcagggccgcctttgatgtgggctgggcgcacccaggcgagctgagcgcccgtccggccgcgccccgaggggggagcccccaggccccgcatcctcattgtgccggctcggg

SEQ ID NO: 306220 - DNA, 122 bp, Homo sapiens
ggcgcgcgcccaaggggcagccggcgggcactggaggtgccccccagttgggggtgggtccgaggagagggggtgcgcacccaggggacccccagcatgaaggggctggtggggggcgcagg

SEQ ID NO: 306221 - DNA, 122 bp, Homo sapiens
ttctgtcctaccagcttgggcgaggcaggctcgggattcagggggccgcagcggaggcggcgccggccagggactctgcagggaccggggtgccccggagggagtggtgctggtggaggagg

SEQ ID NO: 306222 - DNA, 122 bp, Homo sapiens
tccatcccggcgagggcgcaccttcagagggtcctgtcctccaaagaggtaggcgtggggcggccgagaccggggaagatggtccacggggaagcgcgcgggctgggcggcggggaggaagg

SEQ ID NO: 306223 - DNA, 122 bp, Homo sapiens
ggccgggcacggggagtgcgggacctggctacgcctcggggcgctattggcaatcggtgccgggggcggggcaggagaggcggagcctgggaaatgtggagcggggcggggctcggctcagc

SEQ ID NO: 306224 - DNA, 122 bp, Homo sapiens
tgggccagtggaagacaccggagaaacccagacgtggaagaccgggcagcctggacttcgcgagccctggtggggctggcggcccacagagcccccacctgccccgagctcccacagcgagg

SEQ ID NO: 306225 - DNA, 122 bp, Homo sapiens
cccctcacgtcagggctagcagtatgaggtggggaaagaggaaacctcgagagttaaaagcgagggaactgaaagtccccttgaggggtgtcccccatgccccttgtgggacaaagccccaa

SEQ ID NO: 306226 - DNA, 122 bp, Homo sapiens
atgcaaatgacagttaaaggttcattaggcagagctggggagcaggtctgtatcttcatccggtgggacagaggctgggcaggcaggactggttgaggggtgatggtgtctggttttccagt

SEQ ID NO: 306227 - DNA, 122 bp, Homo sapiens
tcttcttcacagttctggtggctggaagtccaagggccaggtgctggcaggtttggcatccggtgaggccctgcttcctggttcatagatggtgtcttttcactttgtcctcacatggtggg

SEQ ID NO: 306228 - DNA, 122 bp, Homo sapiens
cctggctaatttttgtgtttttagtagagacaaggtttcaccatgtggctaggctggtctcgaactcctgacctcaggtgatccgcacactttggcatcccaagtgctgggattataggtgt

SEQ ID NO: 306229 - DNA, 122 bp, Homo sapiens
acctacatcacagtggtgttataattggatgtaataaccctcagtcatttacctggcatgcggtatagttgtatgcaggagagtctactgtttagaaaaaccttgaacctaattgttagcac

SEQ ID NO: 306230 - DNA, 122 bp, Homo sapiens
tcgccccagtttgacgcattgcagggaaggtcggaccaatgggcgccaagctctcatttccgccatgggccaggcccaatagtgacgcggctcacagagggacgcgtcacgcaccgccgagc

SEQ ID NO: 306231 - DNA, 122 bp, Homo sapiens
ggacgcggggcgcttctcgggcgggtgatccctaacagggcggcttcccagggctgcaggcgggcggaggttccaggagatgggacttcagggagacctggcttgggctaaaatcgaaatac

SEQ ID NO: 306232 - DNA, 122 bp, Homo sapiens
ttgcgttgctgacacccaggctggaggcagcgtccaaatgggcctcataaaactgtgtaccggcaaacgccctctgatacagcttcttaagactgcaaccctacctgttctccagaatgaaa

SEQ ID NO: 306233 - DNA, 122 bp, Homo sapiens
gctgcaccaacaagagtgctttcacacgcacaggagggtcattaaagattaggccttttacggcagggagtggtggctcacacctgtaatcccagcactttgggaggccgaggtgggtggat

SEQ ID NO: 306234 - DNA, 122 bp, Homo sapiens
cccctccgtgagtcttctgtcagtcattggctccctgcggtttccttggggacgtggcgccgccgccggccgggccctccttccggctgggcaaggggccgcggggagcagctcgggactga

SEQ ID NO: 306235 - DNA, 122 bp, Homo sapiens
tcagcgagaaaggtaagggggcggcgccggccgtgcggggacttcagccaagtgaagaggcgtgggcagaggtgcaggtgctaggctagttgctgggttcagcattgaggctgggaatgctc

SEQ ID NO: 306236 - DNA, 122 bp, Homo sapiens
cacctccagagagtagaaaaatattcttcctccactccatgactcatcctttggttacagcgtttagctgagcaatgaagtcaatgctaagaataccatcaatttataaaatactgattatc

SEQ ID NO: 306237 - DNA, 122 bp, Homo sapiens
gttcccattggccagaggccgttcccgcggctgtccatcacctcttgtttaccctgtctgcgggcaaatccaaccaagccgccccatcaactccggcccccattggccagcggtgcatctct

SEQ ID NO: 306238 - DNA, 122 bp, Homo sapiens
taaacagctcaggggcgggggaagcttgtaggccggctccggggacagttattgagcacgcgcagaggcggggcgtcgggtgcgcgcgagcgggcgggcgggccgacccggaggcgggcttc

SEQ ID NO: 306239 - DNA, 122 bp, Homo sapiens
acatccctctctccacctcaaagctcgtcctgggcatccacctccagggagcagaagcagcgcagcagcgccacctggtggtcgatgcgcttcctttgcagatcacgcacagccctgagatc

SEQ ID NO: 306240 - DNA, 122 bp, Homo sapiens
tagaaggtttggcaagaagccacttcttttgctcgatattagctctttgatttacttacccgttgattacagtaactgcatgagactactgacactgaacattgcttaaatacttgctgctg

SEQ ID NO: 306241 - DNA, 122 bp, Homo sapiens
gaacagctcccacctttataaatggtaagtgggtaaaaaactattgttatccttcttttccggatactaagacagagagagatttaataacttgatgtcatagagctggcaagataagttat

SEQ ID NO: 306242 - DNA, 122 bp, Homo sapiens
cggttccgaggcggtcggcggtcgagactggggcctcgagccgagaagcgaagaacaaagcggccgcgttagcccgccgccccgagggacagcccgggcgcgcccgccgctccgcccacacc

SEQ ID NO: 306243 - DNA, 122 bp, Homo sapiens
ccaaggcataggccgcgggcaccacgatgaagcgagcagggtcatcccagaggctgcagccgccaacacccaggtccccaacactgctgttcatctctgaccttgaagtggcagaagaaagg

SEQ ID NO: 306244 - DNA, 122 bp, Homo sapiens
ctgcgggcttctgggccacctccgcccttgcagcgcagagggccccgtggtcttcgtcagcgctcagtcaaggtgagtagggcaggcagtcttttcttgagtctcttcgtttctgacacctg

SEQ ID NO: 306245 - DNA, 122 bp, Homo sapiens
gaattttaagcaccccttgtgatctgctgcagtgggcggacagatcgctcctggagaaagcgttcttccactatccaactgcttgcaggaactcacactgtacactttcattccactccacc

SEQ ID NO: 306246 - DNA, 122 bp, Homo sapiens
ctctgggaacgtcacagtgcggagaggggcggggaggcggggacgtgcaaaggaacgtgacgtgacgtcagcgcgtcgccctgccgccctcagcccactggtacctggaaggagtcttattc

SEQ ID NO: 306247 - DNA, 122 bp, Homo sapiens
tgctccctccgccgagcggcgtctttgtgtgcgggggtgtgggaggcgagcgcgagtccgcgcagcgccgccgagtgcccgctccctcccagggcgggtgggggcctctccgcgccgcccgc

SEQ ID NO: 306248 - DNA, 122 bp, Homo sapiens
taccatggcatgatgtaaatcaaattaatttagctccaaacacacacctccctgctgtctcgcagaaatacagagggacaaatttatctttcggcaaaatgctccccagctggtatttccat

SEQ ID NO: 306249 - DNA, 122 bp, Homo sapiens
atggccgtggaggactcgggtccctggccttctcaggaggggctgcctgtggagcaccgccgggtcccccgggtgtgtgcacagagacagaggctgtactgggaggtcctgggaagcaggcg

SEQ ID NO: 306250 - DNA, 122 bp, Homo sapiens
gggtgcggcctgcggggcctttgggggcgcacctacgccacgggctctgccattcctatccggaaaattcaagctgtttgggcaccaggagggactctgagacagagggcgtcggagaaggc

SEQ ID NO: 306251 - DNA, 122 bp, Homo sapiens
tttgggtttcacaaggtgggttgtgccatctgtggccctggtggaaccggtccggcagagcggacaagtggcgtggtcccccttcccttcctcaacctgctgtttccttgaaggccagccca

SEQ ID NO: 306252 - DNA, 122 bp, Homo sapiens
atttggttgccctccctgcggtccaagggcctggaacactccccagggctgccaggccagcgctttccaggggctccagcctacagcgccgccacctggggctggagccagaaacgcagggg

SEQ ID NO: 306253 - DNA, 122 bp, Homo sapiens
gcgggcacgcgggcggggggagggagcgcgggctcgaggccggcgccggcacgaagcgcgcgtcccgccaacccccggcacccgccggcctcgcttcccgcgcctcgctgctccgggccccc

SEQ ID NO: 306254 - DNA, 122 bp, Homo sapiens
cctcggtcagaccacccaccccccgcccgggtctgtcccctctcgctgccctcctcgtggcgcccccatcaggggctgacccccccgaccccgcacaggcccaggcccaaacccaggccccc

SEQ ID NO: 306255 - DNA, 122 bp, Homo sapiens
tgagggccgttgagtgtcgcaggcggcgagggcgcgagtgaggagcagacccaggcatcgcgcgccgagaaggccgggcgtccccacactgaaggtccggaaaggcgacttccgggggcttt

SEQ ID NO: 306256 - DNA, 122 bp, Homo sapiens
catttagtcacaaagctcacagaatgagtggctgattataataaaagggtcaactgaaaacggattttaaaagttgaatagcgtgcaagaacattagatttgtttgttaaatcaataagagt

SEQ ID NO: 306257 - DNA, 122 bp, Homo sapiens
ttgacggcccacgtggtctggaagtattcgagcatgcgctgcttgagcggccgcggcaggcggtgcacacggatgaagtccttgaggtccttcatgcggctgtggtagagcgagcggcgcga

SEQ ID NO: 306258 - DNA, 122 bp, Homo sapiens
tgagtggcacagggcgctcacccgggttgtagatgtgtgtacacacacatgcagaattctcggaacctgtgcattccaaaccatggataacaccaggagtcactgaaacacctgcatccgtc

SEQ ID NO: 306259 - DNA, 122 bp, Homo sapiens
atgattccggggctgaagtgggcatcgacgggtgcactttgctgttccagggagccggctcggcaggcggcggcgacgtggaacttgggctagggctagaaccggcgaaaagcaagccggaa

SEQ ID NO: 306260 - DNA, 122 bp, Homo sapiens
agaggggcagtacaatgccgatttgattctctttcttctgtatgtaacctgtgatcccttcgaagaatcttgtaaaaaattctctttatccttgcagttacaaattttaccaggaaatctca

SEQ ID NO: 306261 - DNA, 122 bp, Homo sapiens
ggtttcatgatatatatacataaccttgggtggggaccaactcccttggccagggccaggcgtgggagagtgaaaagtgggctgcgagtgcagggggccgtgagtgcggaagccgcgggtgc

SEQ ID NO: 306262 - DNA, 122 bp, Homo sapiens
gggtggagcccgtgtagatggatgaaagcccctataaaaagacaagagagagcttgcttccgctccgctctccaccagtaaggatacaacaaggagaggccgcctacaagccaggaagacaa

SEQ ID NO: 306263 - DNA, 122 bp, Homo sapiens
gcactttcttctcgcgcctctggatgcggtaattgtccctgagtgggaacaggcaccacccgctggctttctgaaggtgccttgtttagttcttgatgagttttagactttttgatggcttg

SEQ ID NO: 306264 - DNA, 122 bp, Homo sapiens
cgctgccttcccccgcaaccaccacccgcctgcgagccctcggctcccatcgactgcacccggccacggagactgggggacgagaggccaccagctcacccagaccccagcctcgggaccgc

SEQ ID NO: 306265 - DNA, 122 bp, Homo sapiens
tagagggaacaaatactttagctttgagccatggctctccaccgtaatggaacaataaaacgattaagggatgctaaaaaaatacagatgccaggcctctctcaggccaattcagaatctca

SEQ ID NO: 306266 - DNA, 122 bp, Homo sapiens
ttttcccaatggtgaaaaacccctctatcatgtttcatttacagggggctgatggtaaaacgaagatcgccacaccgcggggagcagcccctccaggccagaagggccaggccaacgccacc

SEQ ID NO: 306267 - DNA, 122 bp, Homo sapiens
agaagaccacgggggaagcaaagtttcagggcagctgaggagccttcgccgcagcccttccgagcccaatcatccccctggctatggagggcggactctaagatgaatcccgacctggacac

SEQ ID NO: 306268 - DNA, 122 bp, Homo sapiens
cattcctggcgccgcgcgcggcgcattgtgggagatgtagttcagctcctcagggcaagccggtacgcagaagggaagtctaggctgttggattcttgcattttagggaggaagggagaatg

SEQ ID NO: 306269 - DNA, 122 bp, Homo sapiens
ctgggcgccctccggttttaaggggcgagagcaattccattcctttttcctgagggtcaccggaaggggtggtggaagggggatgtttcgaggaaggtgtggccctcacagggagactgggt

SEQ ID NO: 306270 - DNA, 122 bp, Homo sapiens
ttccaacatttcagttttcattacccctcctctgttgccatagaaaccagactgtaacatcgtctctttgtcccaatcctgcagcagtgtgggccaacaccaggcttataagacactggtga

SEQ ID NO: 306271 - DNA, 122 bp, Homo sapiens
agaagaatcactacgtggtgggcgccgaaaggaagcagctggcacacagcctcagcctcacggaaactcaggtgactgcggcccgggcgcgaggaacccatctaggcgtgcgccccctcccc

SEQ ID NO: 306272 - DNA, 122 bp, Homo sapiens
ggctgttggttgcccgtttttataattatttctcgattatatgctgaacacggggtacatcgttcatgcctcccctttttaggcgatagaggggaacttcccgacgttgccacggcatttgt

SEQ ID NO: 306273 - DNA, 122 bp, Homo sapiens
tccgaacctgatattcaccagagctccttcggtcaccgacaacgctccccgctgctgccgcggcctcccgcccgccctcctcggcgtgttttcatttctaagtctacgggcagggattgccc

SEQ ID NO: 306274 - DNA, 122 bp, Homo sapiens
cctgctttcatgatgatttagcaaacagcagagaagagagacttgaagggagggagaaaacgatttggctggaagccttcccagcagaggagggtttttctttggttttgaaggacaggcca

SEQ ID NO: 306275 - DNA, 122 bp, Homo sapiens
agtcgtttgaagggggttacatcatataacatacaatggaacagcctggaaacccctctgcgattcagctccttgaagccccgcactgccagcaccggctccggctcctccagttcctccca

SEQ ID NO: 306276 - DNA, 122 bp, Homo sapiens
cgaaagataattaggcacaaattcacagtaaccttttattcctcacactgccttctcaggcgtggcttttgtccaaattatggggcaggtcaagctcaatgcttcatcccttctctgcctgc

SEQ ID NO: 306277 - DNA, 122 bp, Homo sapiens
ggccgggggccgagccgccgccccgattccggcttcacccgcccgcagcgcgcggcgccccgcgctccattcgcgctacctggcggctggcaggctgccccaccccaccgcgggccacacac

SEQ ID NO: 306278 - DNA, 122 bp, Homo sapiens
aaggcggaatataagggagatgggaggggcagcttgggaaatcaacacctcccaccctcacgacggataacccgaaggatcttctgcagcagaggcaggagtctggaggctgggatggtatc

SEQ ID NO: 306279 - DNA, 122 bp, Homo sapiens
atcggcggagccgggaagcggagggggcgaggggtgattaaccttggaacccgggtacggcgtaaatttggctcacgtgactccggggttgctaatctggagtctatctgccagatggggct

SEQ ID NO: 306280 - DNA, 122 bp, Homo sapiens
gaggctttggcggccagacattaggaaaagcatctcctgcttctcggactgcctggagcgcgaactggatatcaaggagccaaggttaagtccagaagaagaaggaaatccgaccagttgct

SEQ ID NO: 306281 - DNA, 122 bp, Homo sapiens
ggggcagcagcccaggcatccgctcagttcctgctcacgtccagcgcccatctccccttccgtgccccagaggctgaaatgggcccaatctgtgttgaagctgcttgtttctgggtcctgga

SEQ ID NO: 306282 - DNA, 122 bp, Homo sapiens
cgatcctccatccaagcagccagagggaactgaagctcggtgtgcccctgctctgacccccgactgtcctcacatctagcccagctctgcactctggcactcaaggccagcctggccccctc

SEQ ID NO: 306283 - DNA, 122 bp, Homo sapiens
ttgtttgcagtgtttcaagggaaatacatattgccatggtgaagctctaaatagattcaacgaaacatctaaaaattgaaagttgttaaaaaaaaagcaaagaaatatcaccaaagaaaaaa

SEQ ID NO: 306284 - DNA, 122 bp, Homo sapiens
cgccggaagtgggagagtgcccctctaggagcccggaggaccgcagctctgtggcaggcgcgggtcgtgtctcgcaggaggggcgcgggtccggctcagacctggcgggggcatcgcagagt

SEQ ID NO: 306285 - DNA, 122 bp, Homo sapiens
tgactgtgagcaggagctgtgccggcagcgcggtggcatctgggacgaggactcggaggacgggccgtgtgtctgtgacttcagctgccagagtgtcccaggcagcccggtgagctctgtac

SEQ ID NO: 306286 - DNA, 122 bp, Homo sapiens
actgggggaacaggcggatgtggggatctggggtcaggtggccttcaaacagctcgctcccggctgtgggaagttccatcactctccaagcttcattcacaatccgggcctcagtttctccc

SEQ ID NO: 306287 - DNA, 122 bp, Homo sapiens
acaattaatgagatggtcagtgatcatgggagcataaattggaacatccactttggaaaacggtttagaattatcttggtaatttaaacatgtttctacactctgacccagaaattccactc

SEQ ID NO: 306288 - DNA, 122 bp, Homo sapiens
ggcctggatcacatgctcatttctggactagagaagaggggaactcagccctactgaaatcgacaggacagattgtgggaaaggggttcatttcacaaaaggaaaatggtgggtctgtttcc

SEQ ID NO: 306289 - DNA, 122 bp, Homo sapiens
gcgaccggacgcgcgaggcagggccgaggccgtgtgttcagaccacgtgggcgcggggtgcgcgacagggtctgtgtcctgcgctgcgtgagccgcggtgggtgtccgcgaaacgctgtgtg

SEQ ID NO: 306290 - DNA, 122 bp, Homo sapiens
cccagccaggtgtgctccctccccaggccctaggcaggcgggtacaggggccagcagctgcgcccgccccaccttccttcccacccacatgccgaagggtggccaggcaggcaggtggacga

SEQ ID NO: 306291 - DNA, 122 bp, Homo sapiens
cttccttctccctatccctaggccccgccccctgacccgcaccttcccgccgcccctccccggttccatttcattgttggattgtggcgcttcactcctgctggcggccggcagggggcgga

SEQ ID NO: 306292 - DNA, 122 bp, Homo sapiens
ctccatcaattttgcatctgcaattagggctactttaccccagtgaagaaaggtgccctccgtattagggcttccttcctccaattccgactggacagggtagcagagcgggcaaagtgtga

SEQ ID NO: 306293 - DNA, 122 bp, Homo sapiens
gtaggttagttctctggcgccatcagctggcagcacgcgggaatataccaaacgcggaaacgcgccttcgcctgccctgagtaactgcaaatccagggctgagtgaggtatttaagcgcttg

SEQ ID NO: 306294 - DNA, 122 bp, Homo sapiens
aatgtcctcctccccctctgggccctttatataccctggccgggtgcaggtgacccttttcgtttaccttttggccaattaagtagaattttgttttgactaatggttgcttgtgacacact

SEQ ID NO: 306295 - DNA, 122 bp, Homo sapiens
cggcctggcgaccccttcctccgctcccggattagctcccgcccggcacctgccttgccgcgacactgattgaaattcaagccggcccccgcctctgaccccggccggagcagggaggcaaa

SEQ ID NO: 306296 - DNA, 122 bp, Homo sapiens
ggaccgctgtgaggaaacggggggcggcgtgggtgggtggccgctacccacggttccggacggccctcgggggcgcgctcgggcggcttccagcttccgggttcgagggcgcgcgctgcttc

SEQ ID NO: 306297 - DNA, 122 bp, Homo sapiens
gtggagccaccactgagagtcatgtctttgggaggatctaagttcctgacctgccaccttcgcaggctgcctgagctgcacttgacaagtggctttatgatccctaggtccacctgggcttg

SEQ ID NO: 306298 - DNA, 122 bp, Homo sapiens
gaggaggcggggttagggtgtagcaagactcctgaccccagaaggtagatacggcctagacgacgtcactagaaattgcccggggcgtcttctctccagcaaccttctgcaccgccttccac

SEQ ID NO: 306299 - DNA, 122 bp, Homo sapiens
taaagaggagtctgggtgtatatccagatggactgtgagcacagcctgagtttgccctgtcgaggtgctgaggcctgggagattggggtgagtagctgtggtccagggaaggttggcaagct

SEQ ID NO: 306300 - DNA, 122 bp, Homo sapiens
cggagcccctggctctcctgtgccactgctgggggtgtgacgtgcggcagctgctccagacgacaaggtggcagtgtattttaatgttacaactatgcttaccttgggatccagcaaccccc

SEQ ID NO: 306301 - DNA, 122 bp, Homo sapiens
ggtaggactgaggctaccacaggcaacagacttcaggttctcactgtccactctctgagccgctggaagttttaccagggccacatcttaaggttttacacagtaatgataacgaaaaagaa

SEQ ID NO: 306302 - DNA, 122 bp, Homo sapiens
tgcgtgcgggcgccccttctgattgaccctgatgagctgtagctctgatggcccctccttcgggaatgattagggtgacggctggccggggctcgttcgagtggcgcccggccggtggtgac

SEQ ID NO: 306303 - DNA, 122 bp, Homo sapiens
ctccgtcttcctggagcacccaggagagcccgctgcaagaagaagccccacggcaggccacgtggaggcgaattcacctcctacccagacagcgtgggcaatgctgaaacgagcgtgagctc

SEQ ID NO: 306304 - DNA, 122 bp, Homo sapiens
acattaaacttttgcaaaagagattgtgcagggctgaccaaggctgcatgttcatgttttcgtctgagtcagagcatgaatcagaactgaaggcagcatttcttgtaatcacagtcttgggt

SEQ ID NO: 306305 - DNA, 122 bp, Homo sapiens
agtgatcctcccacctcagcctcccaaagtgctaggactacaggcatgagccactgtgcccgattgcatctgcaccttgaaaagctctccaggtgatgctaatgtgcagccaatcgctgtta

SEQ ID NO: 306306 - DNA, 122 bp, Homo sapiens
agccctgtctcctccccctcttcctgcccccgactcccccgaccccgggcgcgcggcccacgccctgccctcgctcccggacccgcctcgcagaggcctcgcccgccccagacagagcgttc

SEQ ID NO: 306307 - DNA, 122 bp, Homo sapiens
atttcaggccagtctcattcattcctccagaagaggagctgcttttttggacaaaacccccgatctcctgttgtgtgtggtctcttctgcctatttcaggtgttttccttattttcaatgaa

SEQ ID NO: 306308 - DNA, 122 bp, Homo sapiens
agtgacaaagcccagggacaggacacgttgcaggtcagccgctcgcagctgctgggtgggcggtgtccactcttaccggccttggttccattggaaacctgatcgtatcttggtaatgcggt

SEQ ID NO: 306309 - DNA, 122 bp, Homo sapiens
gtggccaaagctggagggaggctactggaggcttccacaccccagcgagtccttgcggagcggcgggagctgcctcgcatgagacaggtgctttcagccccaggtctccccaaagtcaccct

SEQ ID NO: 306310 - DNA, 122 bp, Homo sapiens
cccacctgatgaacttgtcgaagacagcggcgcagtcctgtggctcctgcagcaccgcctcgctctggttacttagcagctccaggaacagctcactgtgcagtcccagcagcaggcggtgg

SEQ ID NO: 306311 - DNA, 122 bp, Homo sapiens
ttagagagattctgatctctaacaacactggccaccttagagtgttgcagaggaataagtcgaaaggactgctctgtgagtaaatttttaaaaatggattattacaatcacatccaaactca

SEQ ID NO: 306312 - DNA, 122 bp, Homo sapiens
gactgcatgccgggtgccctcatggcacttctcggttgcacgctggttagtattgggcgccgactgcatgccgggtgccctcatggcacttctcggttgctctggcttctgtctccctttgc

SEQ ID NO: 306313 - DNA, 122 bp, Homo sapiens
aagaacgcgaaacccagtgagtacgagaagatcgccttccagtatggaatcaccgacctgcgcggcatgctcaagcgactcaagcgcatgcgcagagaggagaagaagagcgcaggtgagcg

SEQ ID NO: 306314 - DNA, 122 bp, Homo sapiens
agacagagaggatctattttagggtggcaagtgcctacctaccctaagcgagcaattccacgttggggagaagccagcagaggttgggaaagggtgggagtccaagggagcccctgcgcaac

SEQ ID NO: 306315 - DNA, 122 bp, Homo sapiens
cacagagccacatttccctgaaggctctgaagtcccatacgggaaaccatgagggccttccgggaaggaggggaccgctgatttctgcagcgagtccctccagcgtcccggcccctctccgg

SEQ ID NO: 306316 - DNA, 122 bp, Homo sapiens
ggtggggggccgcggaattctaggtggcccctgcctcacctctggaaagaaccggaagcccgggccggggagggtgaagggagtcgcggacccggctgctcagccgaggaggaaacccggac

SEQ ID NO: 306317 - DNA, 122 bp, Homo sapiens
ccgcctgcaacctgcactgaagacgggaaccttgggagccggtaccggaacgctcggaaacggcaccaaagtacgaatcctagggcggaaaagcgttaccaagacactcgtccccagagccg

SEQ ID NO: 306318 - DNA, 122 bp, Homo sapiens
gagttcctgggactctcccaataaggttttaaaaaatctttatactttaaaaatttctgccgggcccagtggctcacgcctgtaatcctggcactttgggaagccgaggtgggtggatcacc

SEQ ID NO: 306319 - DNA, 122 bp, Homo sapiens
gcagcactggctcgtggtgggcgtggggcgagtggtggtgcggggtgggcggcggggcctcgtagcggggcgatgggggcctgggaggcggctggggggccccgccgccctccgaggactcc

SEQ ID NO: 306320 - DNA, 122 bp, Homo sapiens
caggcctacccaggacctgccttggggtagggggggcggtgtgggcgttccctcgggcctcggctgtcacgcgaacagtaaattcccgggcacaccaggtcagttggccagcgtaaacacat

SEQ ID NO: 306321 - DNA, 122 bp, Homo sapiens
ggggcggtagtttaggccaggggaccccaaaaccgggggatccgcactcacctacctgctcgatctcccggcagcgccgacctagtgcctggtactttctgcgatttaattcccgctggcgc

SEQ ID NO: 306322 - DNA, 122 bp, Homo sapiens
caggtgtggtgaggtgggcaggtgacggtcagctgtgtgatgagctcctgcgagctcgtccgtgggcctctgccgccggtaccgccccgccccctggcctcctgaaccaccatttagtaggg

SEQ ID NO: 306323 - DNA, 122 bp, Homo sapiens
caaccctgctcctgtggccccacccagaagtgattcagcatgcaggaggacagcttccaccgtctatgatttcatcttcgtcccgaccaattagcagcaagcctagctcccccaacacttcc

SEQ ID NO: 306324 - DNA, 122 bp, Homo sapiens
cccgccgcccgcgaaaaccctgagcgggagcgagagacccggagcccagccaggaaccggcgtgctagtggagcggactagcaacgcctactttctgccttcactacgggactccgacagtc

SEQ ID NO: 306325 - DNA, 122 bp, Homo sapiens
ctgcttgcttggctaagggcttcatgataaaattttaggatgagatggtggggcagtggccgttaaatcggctgcagtctgagccccctgccccttaactgccgagaagtgaacctaggtga

SEQ ID NO: 306326 - DNA, 122 bp, Homo sapiens
aatcctgtcaataatctaactatacaataaagtatgttaaatcagagacagacaatatctcgccattataagtgatactttaagtgaatattgtgcaaactcattaaaaaatgtttttgtgg

SEQ ID NO: 306327 - DNA, 122 bp, Homo sapiens
tcctgtccctgcccactcaccttcaaggccttgtttcctttattgggggtcgtcataacccgggggcacagcgagcaggcgctctctgcaagacacggagcaggtcagtaccctggagacca

SEQ ID NO: 306328 - DNA, 122 bp, Homo sapiens
tgcagagtagaaaaaaggtaacatcctaataatatatgattccatttacataacaatctccgaatgacaaaactagagatggtgaacacattagcggttgccaggggcctggggaggagttc

SEQ ID NO: 306329 - DNA, 122 bp, Homo sapiens
tctgggttaaaattggccccacgatttactacctatgacttcaagcaagttgcttaacctcgcacttcatcccacttcattatctcatttgtgaaatagaggtaaataattaaccctgtact

SEQ ID NO: 306330 - DNA, 122 bp, Homo sapiens
ctaattggttagttggacctcgaaccagactttcatctggaggatcgggcgaggagtgggcgggatttcgaactgagccactcccttcattggtgaaaagaaaacgaaccaggaactattcg

SEQ ID NO: 306331 - DNA, 122 bp, Homo sapiens
gcgctgacatcggcctctgaagtggttgccccgcactggcttctggcctggccgtggccccgacagttgggcgtcctgcagcagtcccaacctcaggactccctaccctccacctccaaaca

SEQ ID NO: 306332 - DNA, 122 bp, Homo sapiens
ggtggccgtggtcccttcttgtcactttactgtctcaagcgtcttctctccctggtcgcacgcgctgtgagcttattgttctgggcgttccccaccctcagttcccaagtgcagtgcaggcc

SEQ ID NO: 306333 - DNA, 122 bp, Homo sapiens
ttaaattcatttatgtctcctatccaccttctacatatagcctgaaggtaattttatatgcgatatttttaataacattgtgcatgcaacaaagttttgactgtgttttgactgcaacccat

SEQ ID NO: 306334 - DNA, 122 bp, Homo sapiens
ggactgtgctcgtgagcgccgacctccgctaggcgttatcagggactgtgctcgtgagcgcggacctccgctaggcgatatcagggactgtgctcatgagggcggactttcaccagccacgc

SEQ ID NO: 306335 - DNA, 122 bp, Homo sapiens
ttcttccgagtgcacaagcttaccgtaaggctgactgtagaagtactcgggatctctcgtcgacttgtcctcaatgaccacgctcgagcgtaccttcaccctagagaaaagccccacgttgg

SEQ ID NO: 306336 - DNA, 122 bp, Homo sapiens
tctggttcatccctacgagaggaagatgtaccaatgtgaaattctgtgttgctgggaccacgggggacccctgggtgcccctcgaatttccagcttcagagctctcccctccaggttcttta

SEQ ID NO: 306337 - DNA, 122 bp, Homo sapiens
gcgttatatcgagaggcctggcagcgctgcctgggcttgtttcccagctcttgcagctctcggggggttctagaagatcgtccagactatgactcattcctgtgttactgtaatagagaaag

SEQ ID NO: 306338 - DNA, 122 bp, Homo sapiens
ccttaacttttcgaaatctcagttactataatacatccgcaaaatggaaggaatgagtcccgcctgccctgccacctcataaggttattaggagaatccagtgaaagaatgggtgtgaaagt

SEQ ID NO: 306339 - DNA, 122 bp, Homo sapiens
ggccattccaaatctagcagatgagtcttaatgactaaacacatccttggattccacttacggaaaggaaatgaattcttggaaagttaagtaataacagaatgatctatggagcttttact

SEQ ID NO: 306340 - DNA, 122 bp, Homo sapiens
acctgtaagccgaggaacaccaaggattgccggcaaccatcagaaactagggagaagcaacgagggattcatctctagggactacagaggcagcatgggcctgccttgcctccagaactgtg

SEQ ID NO: 306341 - DNA, 122 bp, Homo sapiens
ggggagcccagcactgcagtgccaggcaggcgagcagcaggagctgaggcccctgtctgtcgtcctgagtcttcttgctcaagcttttcaagctgctggggagggcatccttctggaccatt

SEQ ID NO: 306342 - DNA, 122 bp, Homo sapiens
gccacaatcagatggatgaaggtggccactgcacaagcatggcccctttctgcctgatctcggcctctgaagacccagctggacagggtaaggccatgagaggcacagcccctggggtcact

SEQ ID NO: 306343 - DNA, 122 bp, Homo sapiens
ggaagagcctcatgttccgtgggggctgggcggacatacatatacgggctccaggctgaacggctcgggccacttacacaccactgcctgataaccatgctggctgccacagtcctgaccct

SEQ ID NO: 306344 - DNA, 122 bp, Homo sapiens
ggaattttactccaccttctagctatacgactttggggatacttaacctctttgaggcttcgtttcctcctctgtaaaacatgatcacaatgtctgcttcatagggttgttatgagactcca

SEQ ID NO: 306345 - DNA, 122 bp, Homo sapiens
gggggcgtggccccaggcttccagaaccccgaacctttgtcttcttgccccctcctgcgtcgtccacagctcagaaggaagtcagcgaccagaaagccctgaacgtccttcgcgccctcgcc

SEQ ID NO: 306346 - DNA, 122 bp, Homo sapiens
actcccaggccccggcggcgtccaccaggcgcccgctgcccctccccaagtctcctcctccgggacctcagccctggtgccctccccgcagtcccattcctggtttcccttcgcggcgcccc

SEQ ID NO: 306347 - DNA, 122 bp, Homo sapiens
agttgaagaaagactcacagttttcagcatccagttaccctctgagcatcaggcagaacccgccggccccaaaaccaggcccccttggcacatgtgggcccgagtgagtccagcatgaggag

SEQ ID NO: 306348 - DNA, 122 bp, Homo sapiens
ggccatggggcggctggaggtgcggcctgggagccctgcgtgctgggccctgggcagggacggcaggcgaggcgtgtggaggaagagccgcgaagagctgggcgctgtcttctccacgcctc

SEQ ID NO: 306349 - DNA, 122 bp, Homo sapiens
gcccgaggacctgctccacgcggcagggctgttgcagcgcaccagcatctcccaaaaacgcggctctcgagcccttggaggctgctgtctcatatcgcagtccccagcccctgtgactactg

SEQ ID NO: 306350 - DNA, 122 bp, Homo sapiens
tgggttgttttttctgccatgagaccaacaggtcaccagccttgttcaagttacagcaaacgaagctgggccttgtttggtctcatacttaattttcttttatatacatgtttttcttttac

SEQ ID NO: 306351 - DNA, 122 bp, Homo sapiens
agccaccactcccggcccaagttgcagaacaagtgacaaacatcccttctgcttgacagacgccgaggccagaagccttgtccaaggcagggcattgaggcagagggctctgagccgacagt

SEQ ID NO: 306352 - DNA, 122 bp, Homo sapiens
ctaaatgtcaaatgagtaagattcagtttatccagttccttaggcaagataacaagcccccgatttctaataatgtaggaagcttgttactttttaacaactggccttgaagacctgggtgg

SEQ ID NO: 306353 - DNA, 122 bp, Homo sapiens
agctggctagactgccagccagctcatgtctctatttccgtgcagctctgtgagagcgagcgtgggcacggctgtttgacctaggttccctttgaaactctcaacaaagcattctgatgttc

SEQ ID NO: 306354 - DNA, 122 bp, Homo sapiens
aatctgtaggatgatggggaagctggacagccctttgttgtagtctagtctttcatcaagcgtctatcaggacccacttgttgagttgtgaaagaaattgagtgagccaatgctgggaattt

SEQ ID NO: 306355 - DNA, 122 bp, Homo sapiens
gtgccaaaaactgttctgagcttttatatatgaaataatttaatcaactctaagtactaccgaggcacacatactcacaaacacatatacactctctcactcttcctaagtaatctgtgagg

SEQ ID NO: 306356 - DNA, 122 bp, Homo sapiens
agagagcctgggagactttgcgcattcttaactccgcgacccccctcgggccccctcccgcgctgcgctttgcagttttggtgctggcagtttctaccaagccgctttttctatcttttctt

SEQ ID NO: 306357 - DNA, 122 bp, Homo sapiens
gtctcaggtcagtataggagttttgatgtgaagtcagccaagaacagctgaacactacttcggctgaggcccttttataggagggattgcttcctgtgaataataggaggatattgtccaca

SEQ ID NO: 306358 - DNA, 122 bp, Homo sapiens
cagaaatggcaaccaactgtgcttctgcattacagaccaccaaccaatgggtggtggcagcgctgattctgttcctccaataggaaaggggcagaaggagaggcgttacttcctggagactt

SEQ ID NO: 306359 - DNA, 122 bp, Homo sapiens
gtgtttattattctcatttacagaggaggaaggtgagtcctggaggagggaacagactcccggggacacacggcaaggattccagcctgggcccattttggtagcgctccctcacggtgaca

SEQ ID NO: 306360 - DNA, 122 bp, Homo sapiens
gtggagaggatcatccaggagtggcagagccgaaacgagaggtaccaagcagaagggtaccggaggtggggaagggaggaggagaaggaggaggagagcgacgctggctcctcggtggggag

SEQ ID NO: 306361 - DNA, 122 bp, Homo sapiens
tccaggggcctgggggttgtttgtctggagagcagctgccgctgctttacttgggagggacgtgacccggacaggtttccctcagccagacgaagtgtggaaagtcacgttctatcgtgtgt

SEQ ID NO: 306362 - DNA, 122 bp, Homo sapiens
gtgagtacaagtcccccaggtaccagcaggaggcagcatcgcccgcgaggtctgcacgagcgctgctcccagcgagaaatttgacatccctgtccctgtttgcacaaggcttgatctccgcc

SEQ ID NO: 306363 - DNA, 122 bp, Homo sapiens
tattttatagaaagaaaatagatcacacagctactaagtggcagaacttgggtttagaaccgaggtttgatgcgtcttaacattgctttccttataccgcaattgattattcattagagcat

SEQ ID NO: 306364 - DNA, 122 bp, Homo sapiens
catctggcgccacaaccggctgagcaagaacaagaggttgtagcatggagggcccggcatcgctgacccccacgccgagggcttgccgttttcccggaggacgtggacttttgtgagacaag

SEQ ID NO: 306365 - DNA, 122 bp, Homo sapiens
gttgtcttctttccttccatcttttttccctgctaatctgtattttctaagttttctgcacggggcctatattacttttataattaaaagttacttaaaaaaccaaatatgaccaaaacagc

SEQ ID NO: 306366 - DNA, 122 bp, Homo sapiens
tggacggtgctataggggccagaatgagaagtagctcactcgtagctgtggttttaagcacgtggagaccatcgtttcttggaggtactcaagaaactggccttcttgggctcctggatcat

SEQ ID NO: 306367 - DNA, 122 bp, Homo sapiens
ttgcctgtagcccattgatctacccactatgtatattcattttaatgctgtttttgagtccgttgactaccccgggaaatcaaagttgactaccacagccctagtcctcaagtgtcttgcct

SEQ ID NO: 306368 - DNA, 122 bp, Homo sapiens
ctgagactcttggctcttcagctccacctgcaggaagaccctgggcatgagggcacatggcggctggcttccagattctgggcccattaatagggtagcgagggcaccgtggggctctgtca

SEQ ID NO: 306369 - DNA, 122 bp, Homo sapiens
cccggggttcggtacgtgaagtgccggcgcgaggctgctcaggccaccgcatgggccgggcgataaacaatcgcacaggatacacaacaccctggactgtcacaagcccctcgcaggaaaag

SEQ ID NO: 306370 - DNA, 122 bp, Homo sapiens
tgcgcagcttcaggaactccgcctcccgcttcttgttgagctctatctgcgtggaggtgacgcctcccgcctcctccagccgctcgctcagctcctccagctcccgggcatagtcgctgcgc

SEQ ID NO: 306371 - DNA, 122 bp, Homo sapiens
taactgttttctgatctgaagtagcccttttacgctgagaaagatgtgaatgacctctctcgtgtttactcgggtgaaagtcaggaggagtgaagcaagactgatattcctttgcagaccca

SEQ ID NO: 306372 - DNA, 122 bp, Homo sapiens
tcagatcaggaagcctgaccttccagtgcctttggtctaggtgttctgaggcccagcacccggagtcatacctcagtaactggcagctctatgttctccaagatcagggaagggaagacagt

SEQ ID NO: 306373 - DNA, 122 bp, Homo sapiens
ctcccatgtcaaagaattttagaaatgtttcttttccacccctgacaatttacccattcacgtacatttggtcttggaccccagccagagattaggccaatgggcctaggttctttcttcag

SEQ ID NO: 306374 - DNA, 122 bp, Homo sapiens
tgcagtctctggtggaaacggacagctcttcaggaataggtgctgtggcctgtgaggccccggcctgctccttctctttggattccgtggaaattggagctgtagaaaaaagcaactgcttt

SEQ ID NO: 306375 - DNA, 122 bp, Homo sapiens
tgctgggctttccactaccttaggccacgtgtcactatggagcgaagatcaagaaggtcccggaaggagagaagctgcggggtccagggagactttttggtggttggtcggagaggcttcag

SEQ ID NO: 306376 - DNA, 122 bp, Homo sapiens
gtactcgaccccgcgagcggctctcgccttccggggctggaacccgactcagatgtgaagcggcactgagccgctgcgcaggttcgtgcccagcgccccctgttggacacagtaggagctgc

SEQ ID NO: 306377 - DNA, 122 bp, Homo sapiens
cctgtgtgccaagttcgcccccggagtcgtcgtttccttctttcccggcagctgcagcgacgacccacggcctgagagagccgctgcagcacaggtcccgtgcgccctgccgcacagcctcg

SEQ ID NO: 306378 - DNA, 122 bp, Homo sapiens
tgttataaatgtatacactgtggaatgatggaatcaagacagttaacatgtccatcactccgcatactaacatctgtgaaaacatttaaaatctatgcttggctgggcgtggtggctcatgc

SEQ ID NO: 306379 - DNA, 122 bp, Homo sapiens
tttctgtaaaggtcccgaaagttctcggtcccttcgccacggagtcccgcgctgctctcccggggctcaggaaacccgggcgtcccagcctcacagctgcactcccagtcaccgctgctgcc

SEQ ID NO: 306380 - DNA, 122 bp, Homo sapiens
agcaatgcgcgcgtccgagagcaggagcgcgcgtggctgaggaaagaaagggaaggcaaccgggcagcccaggccccgccccgccgctcccccacccgtgcgcttataaagcacaggaacca

SEQ ID NO: 306381 - DNA, 122 bp, Homo sapiens
ggatttaaagtgtcagaaaactttttattgagcacctactgtatgaggcatcattctctccgtggggaagatcataatgaacaaggccaacaccctgtccttatggaactatgcattaagag

SEQ ID NO: 306382 - DNA, 122 bp, Homo sapiens
gggatgaacagaattcttgtgggctgagtgttttttgaaaattctctccaagaatgcatacgacttaaatatttctttaccaaaaggggaggaagaatagattggtttgcaaagttgaaaaa

SEQ ID NO: 306383 - DNA, 122 bp, Homo sapiens
gccccctgcccttggcctcaggttccctctgctgtgtacgggcagtgggggcacggggaacggggaagacagcaatgaacaggataggtttcctgcgaggaaattcgaggctcttttccctt

SEQ ID NO: 306384 - DNA, 122 bp, Homo sapiens
ctactcggaaaagctggggaaaagcgtcaccgtgaggactgactcaagcagaagcgaaagcggtgacaccgcagacccgacctatgcgcaggcgcgcacccgcacttcctgcccgccatacc

SEQ ID NO: 306385 - DNA, 122 bp, Homo sapiens
ttatggacatgactgactggagacatggagaagctgttgttattggagatttttattactcgcatttcctgagcgatggggacactcactgtggggaaaagcaagagagatcagattgttac

SEQ ID NO: 306386 - DNA, 122 bp, Homo sapiens
aactcagtgtgctgtatttcagctggcaaccctttactgaatggataacccagatttggacgaaacagtggctggaaggtggaggccctcaaagtctcaaagagagaggtcctcaagatttc

SEQ ID NO: 306387 - DNA, 122 bp, Homo sapiens
acccagctctaggcattatccccttccaaagtgctgtgtctgctctcatcagagaaaggacgcctgctacaatggaggttttctactagctattaattcaggatgctcaaatccccatttcc

SEQ ID NO: 306388 - DNA, 122 bp, Homo sapiens
cacgaaaactaagctgtgctattggctaacattacagtttcgctttaaccaatgggattgcggttttgaaaaacacttattttgattggacaaagttaatatacgtttccaggactcaccac

SEQ ID NO: 306389 - DNA, 122 bp, Homo sapiens
tcagaattagactcaatgcatcactcccccaccaggttaggaagtgaagctggtggctttcgggagttacccgggttgggaggacatggcattcttgctgtcagtgagaaagatgaccaggc

SEQ ID NO: 306390 - DNA, 122 bp, Homo sapiens
aagggtatggggaggggacgtggcctccccgaagaagaaccgatgcactggggctcctggcgtctgcggggtccataacgcctccctagggaggagagggaggagctaggagatgcagggag

SEQ ID NO: 306391 - DNA, 122 bp, Homo sapiens
accccatgaagtgacagctcatacggggttccaggagggggtggaggcaccagagcctggcggacgtcccctggcagcacttcctcatgtgcccccggcccctcgggcacccgcatgcgcag

SEQ ID NO: 306392 - DNA, 122 bp, Homo sapiens
tggtttgtgtagaaggccgggatgattaataaggtggcggccactttcccaaccccaaggcggtatttttaagtttctgcagtgggctgtaatttgctatcagtctgcatcgctcttctcag

SEQ ID NO: 306393 - DNA, 122 bp, Homo sapiens
aatagaaaaggcacaactggggtatttattcattccccccgttcctctagtgtttggtggcgttgccgttgcaagtgcgcagggctaaaatggactggttatcttaggatcatggaaaacct

SEQ ID NO: 306394 - DNA, 122 bp, Homo sapiens
ctaattgctgtggtttttggatgtttctgatagcaggcactgcttgctgagctaaaactgcggtgagagttcattcattctggactggttacttctgcagccgacatatttgtaaagactta

SEQ ID NO: 306395 - DNA, 122 bp, Homo sapiens
aattgcgattctaattttaaaaactaagacgttctgctggtgcacactagatggcagcaacgcgcatcattttaaggacggtgaaagtagcggccgcatcccttggtagggtctgtatagcc

SEQ ID NO: 306396 - DNA, 122 bp, Homo sapiens
aacttaagagaggcacagagtaaaatgcattctccttcattggtaacctctgtgtttgaacggaaatggaggcagaaaatgcattcaattctttggccgccatgcaaccataaagctgaggg

SEQ ID NO: 306397 - DNA, 122 bp, Homo sapiens
ggcatagtggtctgtgcggcgcggtgcccagtcccgcccgccccgccgcgcctggccgggcgcctggcacagcccaggcgctcagcggaggccccaggcatggcaggacctacggagcccgg

SEQ ID NO: 306398 - DNA, 122 bp, Homo sapiens
atgacgtcacggctggggcccccgatccatttcccccaggagccaggaacaatgacgtcacgactggggcccccgacccatttcccccaggagccaggaacaatgacgtcacagctggggcc

SEQ ID NO: 306399 - DNA, 122 bp, Homo sapiens
cggtaggaagtctaaggtatccaggagccaaaataatatatatgttccaggctttaagtgcgtcagagaatactcccaatccaggacacagaaaggcagatgggactggtattactactcta

SEQ ID NO: 306400 - DNA, 122 bp, Homo sapiens
agtgtgtgtgtgttaatggaattaagagtggcagcacacgcaggcgcagtgggctctgatcgctggaggtgggggttcggaaagtcccgtgggttttagtgcgcaggcgcagaccgggcgag

SEQ ID NO: 306401 - DNA, 122 bp, Homo sapiens
aggggagaaggaaattcccgcaggctgcaggggatgggtgcaagccaacagaacacaaggcgctttgtttgctccaggtaactgctcagttctcgctcacaaagtgcagatgcatccgctac

SEQ ID NO: 306402 - DNA, 122 bp, Homo sapiens
gtgtactctctgaggccccaagggaagggcctgcactccacctctctgccccgtttgctccgtgtatgcccctacaagaatgctcgcgtcttgccctcaggtggcatttttcaagtccgctg

SEQ ID NO: 306403 - DNA, 122 bp, Homo sapiens
ggtcagagctggcctccccggtgcagggaggaggagatcccatgagtgcgtggcagaaaacgccagccactcatgacgccttgagccaggtatcccagccccggcagggaagggagggcggt

SEQ ID NO: 306404 - DNA, 122 bp, Homo sapiens
tccccggacgcgtgcccctcaccagtagctgccggcgctgccgtaacggcacatagggcacgtagtcctcgtcgtcctcatcttccgcctcggagcggcttcctccggcaggcacctcgtcg

SEQ ID NO: 306405 - DNA, 122 bp, Homo sapiens
gccgggcgggacatccggcccgggtccctcgccgcgcccgccgcccgccgcccgcttcggcgccgcagcccgggagccggccacccctacacgcgccagggctgtcccctgccctcccctcc

SEQ ID NO: 306406 - DNA, 122 bp, Homo sapiens
tgagaggctcagcctcctgattactcacgccaggaacttacatgacagtgtagagttccccgaggatcacagcttgctttctattcagtgccattaattaaccgaaactctcccttttctga

SEQ ID NO: 306407 - DNA, 122 bp, Homo sapiens
ctcgggagcgacccggcggggccaggcacgggcagaagggccaagagggccacaggtgggcgcggagcggccggagtgggcggggactggatgagaggggcggggtctaggagagaggggcg

SEQ ID NO: 306408 - DNA, 122 bp, Homo sapiens
gtgtgaccacaacctcagctcttcctgctttatcacttaattctcatcacactccttgatcgattagtcccttttctcccagtttatccaactttcaagtgaatcccttcacctctacttta

SEQ ID NO: 306409 - DNA, 122 bp, Homo sapiens
gctgggggtgcaggctgtggtctaccacgggggctatcttccctttcgggaccccaacagcgaggagaacagcaacgatattgccctggtccacctctccagtcccctgcccctcacaggta

SEQ ID NO: 306410 - DNA, 122 bp, Homo sapiens
caccccggctggctccccggcccggctccagctccggtggggagagcctcaaacactgctcgttagtgactttattgctaaacaatttagaaaggcagccctgccagttttcataagtgaaa

SEQ ID NO: 306411 - DNA, 122 bp, Homo sapiens
ccagagcctctccttgcccttgctccatcccgacggtcaccgttgggtccacgcctccaccgccccatcttgccccaaacggaaagcgctgtatctgcagtggcagcccttccccacttcgg

SEQ ID NO: 306412 - DNA, 122 bp, Homo sapiens
acgggtcacatgtccagcactttctctatgagacacgcttctggctccactggctgaattcggctatcagccctcttccgtactcattctgccacgagtttcagaaaagcattccatcaaac

SEQ ID NO: 306413 - DNA, 122 bp, Homo sapiens
ccgggaccccttctctccgtctttgggaggatggtattaccttggagccagatttctaggcgagagtgctcctccagttaggctcagaagccaaggagaaatcgatagtaaccagtacagga

SEQ ID NO: 306414 - DNA, 122 bp, Homo sapiens
agagcttgctctactttttatgcactgctccacattgttgtgcatgtgtgagattaagtacgctgatgcctctgtctgtttcctacatttcccatgagaaatatgaaagtcagtattttaca

SEQ ID NO: 306415 - DNA, 122 bp, Homo sapiens
cgcgcgccgtggcccatgcccgccgcccccggcgctgcgccccgcgccgctcccggctgccgcctgtgccatttctgattttgcaacttggggaagaagaaaaaagcgagagaagggagctt

SEQ ID NO: 306416 - DNA, 122 bp, Homo sapiens
aatacagcaggaaaaactcttcatcagcacaaaacgtgctggaataagataactgacgatcggtcagagctgatgcagggaacgccccggctccaggatggctccaggaccaggctcggggt

SEQ ID NO: 306417 - DNA, 122 bp, Homo sapiens
catggacagtgaagggtgtggcattgggagtaccctttctgggtcttctctcccttcctgcgggggtagcatggtagtcttctccactgccccagtttattcactggggatgcggtccagtc

SEQ ID NO: 306418 - DNA, 122 bp, Homo sapiens
aagcagccttagagtttacagaaaattgagcaaatagtacaaacagttcccctcacataccgattttctcccactcaaagtttccctgttatcaaaatcttgcattactgtggtacatttgt

SEQ ID NO: 306419 - DNA, 122 bp, Homo sapiens
tggttaggggcgtggcagaagcggtcgtcaggggcgtggcggcagttacttgggcggggccggtagcggcgggagctgcactggccaggggttccggctgtatatccatgagcgccgctggc

SEQ ID NO: 306420 - DNA, 122 bp, Homo sapiens
ttagcatgcaagattagaagcacaagggcgtcctggaggagtctgaagtgcgcttctaaccggattcacatgtttttccacgcgccgctgaacagaatgtacctttgtgtcagcatgagctg

SEQ ID NO: 306421 - DNA, 122 bp, Homo sapiens
acagtatctagtacatgcacacacaacaaatggccaatgaatgatgtcgccttagctctccgacagctagagagatgcagcacttccaggttgtaatatttactgcccacatcttacaactg

SEQ ID NO: 306422 - DNA, 122 bp, Homo sapiens
attttctgttttctccactaatccatcagaaagagagagttcagttcgtaaaatcatccccgtagcaacttccacacactcaacgaaagagcagagattaagaaatggccgtaagaacttac

SEQ ID NO: 306423 - DNA, 122 bp, Homo sapiens
ctttctgtctgtttcacaggttgaaggccatgacttttgacttggttttaccataaggcacgtgcagttttttaggtgacgcacataaactttgtaaaattgagtctcatctctgtgtttgg

SEQ ID NO: 306424 - DNA, 122 bp, Homo sapiens
ggaggcggagattgcagtgagccgagatcatgccactgtactccagcctaggtaacagagcgagactccatctcgaaaaaaggtggggggagtgctagaaaaaggggtaagagagtagttac

SEQ ID NO: 306425 - DNA, 122 bp, Homo sapiens
actatagtagtcatcataggaccatagtcctctttgtggcaacagatctcagatatcctacggtgagaagcttaccataagcttggcacctataccttgaatatctgctatcaagccaaata

SEQ ID NO: 306426 - DNA, 122 bp, Homo sapiens
ttcatggtagtcaaatgcatgctacggcaccatcacatacgaaggtgcagctccaccactcgctatcctaaactcagcctctctcaaactcaaacaacctcatccgttgcagggaaggacct

SEQ ID NO: 306427 - DNA, 122 bp, Homo sapiens
ttctggttggtcttgagttggaagtggtggcaaaaaatagagaacttggcagtcattgaccgagtcctgactgcatagattgtggtttggtttcctgaagtggctgctgcagaggttcggtt

SEQ ID NO: 306428 - DNA, 122 bp, Homo sapiens
ttaaaacaaaaagagaaagtattcgcttctgcggagaacccgagcctcctcctgggcgggcgacgctcggctgatgggaccgggccgcgcaagcctcggatgcagccgggtggggggcacca

SEQ ID NO: 306429 - DNA, 122 bp, Homo sapiens
ggaagttgggacccttttagctatgaaatattttggattgcgtagggtcttgcgcagccgcgaaaagtagcgtgggccaggacagcgggaggtaagtcgccaagaaaagggttgggaagagc

SEQ ID NO: 306430 - DNA, 122 bp, Homo sapiens
gttaactggcaccatattcaggggaggactttcactcttcagctaagtatgaaatataaacgttctctgaggcctatatggacgtgtgtcttgcctgggcttatgtgtgtgcattttttgta

SEQ ID NO: 306431 - DNA, 122 bp, Homo sapiens
cttagaagttacacacacagaaactccaaattcatcacataaaccacaattttgtgttttcggtgctcagatatagaaccttcccatcctttttcccttgtatgaagcttgtgtcctcaatc

SEQ ID NO: 306432 - DNA, 122 bp, Homo sapiens
cgtgtgagggtacttcacacccactacttcctctccgtcgaaagggagaagcaaagcagtcgtccccagatatttgacctgctttgtcctaggttaaccatctccgggggtcagtctgcccc

SEQ ID NO: 306433 - DNA, 122 bp, Homo sapiens
gacgctttgagacccagaaaaaacagagaacagggagacactcaaagtgcgagggacagacgctcagagacacacagacatactcatgtaggaacagagatagggagagaagtagaaaccca

SEQ ID NO: 306434 - DNA, 122 bp, Homo sapiens
gttgcagagctgctgccgggagaaggcgccgcagcagagggccagaagctgcttcacgcgcggcgggtgcacctccacctgcaacacagggcgcactcaaccccgctttgcggcttcccggg

SEQ ID NO: 306435 - DNA, 122 bp, Homo sapiens
cctggcgcgaccgccagcagcacccagcgcggggccgggagctgctgggggcccaggctccgctctccccaccgctctgcaccgctgccggctgcggacagacccgatgcgccaccaccacc

SEQ ID NO: 306436 - DNA, 122 bp, Homo sapiens
gagcagacacaagcacatgggaggttttatgagtcaggtttgaaagtggcgtacatcactcggctcacattctattggcttagaactcagtcacatggccttgtaataccctgcagtggagg

SEQ ID NO: 306437 - DNA, 122 bp, Homo sapiens
cgggctgccctgagagaaacctgtatccacagctggggagcacttacagggtgctaggcgcgttggggcacccaaggggtgttgtggaataatagagaactaagagacttgggaagacaacc

SEQ ID NO: 306438 - DNA, 122 bp, Homo sapiens
gtgcaagagctggccgagtgcccctgagatgatcctgagaggcgacacttctcaagccatcgccccaaggtgacctgggttttcctgggcccacctggagccgtaaggatgaagaggccaag

SEQ ID NO: 306439 - DNA, 122 bp, Homo sapiens
taaaccaaggaatgactgggctatctataaacccagatgcactaagtggggagaaaagctcggagctgcagcatatcagcttttgtcaacctgccaacagcagagcgtaccatgctgcaagg

SEQ ID NO: 306440 - DNA, 122 bp, Homo sapiens
cgctgcggaagctgcgggcggaggacgctcggctgccgcgggaggagtaagggaggagggcggaacttgtaaagggaggggccatcaccagcaccaagtctgccaccgccggacccgcgccc

SEQ ID NO: 306441 - DNA, 122 bp, Homo sapiens
ccttgttcttgaagctcttgatgcggtggttctccaagctggggttctcggccatggctgcgcgcggctccggcggcggctactcctgcggctgcggcggcggcggcggcgaatcttggagc

SEQ ID NO: 306442 - DNA, 122 bp, Homo sapiens
ttctcacaatctaaaattaattgtggactcccttttctattcccaaattaaagagagaggcggccagtgagagatgcatgagttaaacaagctttacttattctactgaatgcaaactcaat

SEQ ID NO: 306443 - DNA, 122 bp, Homo sapiens
tgagtagagtgccttggggggtcctcatgccatttatgtctcaatacttaaagttacaaacgaagctaacaaactgctaaataaccaccttcataatgacctgggttcaaatgtcagcttct

SEQ ID NO: 306444 - DNA, 122 bp, Homo sapiens
gttatgatccatctggtgggtaatccctggcatgcaactgttttattcccactctggggccgggatgcctgggttcaaatcaaattctgccacttcccagctctgtgatctcgttccagttc

SEQ ID NO: 306445 - DNA, 122 bp, Homo sapiens
attcccaaactgttttccactgtggctgaaccattttacgttgccaccagcagggtatggcgagatccctcttctttttatctttgactccctgccatgacctgccacatccactcccagac

SEQ ID NO: 306446 - DNA, 122 bp, Homo sapiens
accgggcggggatgacgggggccggggaccctgcactttgggacgacctggcctggtggccgcgcttccttcgctacaaaaaggaagcacatcttggaaacaccgaacttctgtgacaccag

SEQ ID NO: 306447 - DNA, 122 bp, Homo sapiens
gctaacacacagttctcgggagacgttccccattcccagaggagtagtgtgaaacgcgtgcgcctctagtcttaaacttgacgtttgtattagttgggtttcctggtgtctctttagcaagt

SEQ ID NO: 306448 - DNA, 122 bp, Homo sapiens
acagggaggggcaatgtaactgcgacaggattcaagaatatggccaacatcagctatcgtcgagatcgcggctgatctcagcaatcgtggcattcacattaagtcctggttggagcgagtca

SEQ ID NO: 306449 - DNA, 122 bp, Homo sapiens
aaaggacaaaggggccgccgacgctccaatgacactgaccaagtcccgtgctgtggcggccgccctgggctgtggatctgaggtccagacggccctctgtggaggcccccacccccaccgcc

SEQ ID NO: 306450 - DNA, 122 bp, Homo sapiens
tgggtcgcgggtgggcgccgccaagggcacagcctgtccctcccggatggacgggggccgcggctgcagtaggtggcaggcctgccctccccaaggtcttcccagctcggccgcaccggggc

SEQ ID NO: 306451 - DNA, 122 bp, Homo sapiens
ggtggggtctactggggatccggggccgtgatctggtgtttgggaggctcggcgcagacccgctcgcggggcgtctccgctgggacggggcggggcggcccgaccggagccaaatagcgagg

SEQ ID NO: 306452 - DNA, 122 bp, Homo sapiens
aaaaaacagcaagctttgtgcaaacaaaacacagatacaaagctatgcataactacgaggcgtgagttattcctgccccggcaaaggaaagatgcatgaccttcagactgcagcacacgcag

SEQ ID NO: 306453 - DNA, 122 bp, Homo sapiens
gaagagctttgtggaactccgggcgatgcatcccctcaccggaagagctttgtggaactccgggcgatgcttcccctacaaggaagagctttctggaactcggcaatgcatcccctcaccgg

SEQ ID NO: 306454 - DNA, 122 bp, Homo sapiens
aggttctctgaaccccggcagctacctccccagtcctccccgggtctccacctgtgcccccgatccctgacgcccaggctcacctgcccggttgatctcaatcacctcctcctgagccaacg

SEQ ID NO: 306455 - DNA, 122 bp, Homo sapiens
tcaacctctgccatttacttatgtataaccttacacgaattattgaacagttctgtgcctcggtttcctcatcggtaaagcaggaataataatctctaccggaaagaatgctggggggttaa

SEQ ID NO: 306456 - DNA, 122 bp, Homo sapiens
gccttttgccattcccatgccttctatctgcccaggtcatttctagagacccagccgtgccgcagggtcgtcctgctcgccggctaagggcggcattctgtctgcatttgcctccttgcccc

SEQ ID NO: 306457 - DNA, 122 bp, Homo sapiens
tttcagcaaaagcctggctctcctttgccagttttcttccctttgcaggcagctcaaatacgcacttctcaaaggctgcacctgtcttttttcttgcatcacctgggcccgttcctgttcca

SEQ ID NO: 306458 - DNA, 122 bp, Homo sapiens
tgaactcctgacctcagctgatctgcctgcctcagcctcccaaagtgctgggattacaggcgtgagctaccatgcttagtctgtcataatatccttaatacaaaagtgtgaggattggccat

SEQ ID NO: 306459 - DNA, 122 bp, Homo sapiens
tggatgagcaactcaccagccggtttcattattgaatgcctccctctggcccctgagtaacggagctctcgctggcaggcctggctcttccccatagttctcaaaggttatagaaccccctt

SEQ ID NO: 306460 - DNA, 122 bp, Homo sapiens
gagaaagaaggaagcagcagtgaggaagcaggacaagaacatctcggaaattcagcccggcgcggtgggcgcgcctgcagtcgcggcgctttgggggcccgggccacgtagcacgaccctgc

SEQ ID NO: 306461 - DNA, 122 bp, Homo sapiens
gagctgagctgctgggtcctgccgtcagtgcagtttcttggcagcacgttggggacactgcgccatgagaacagagccacagaatgttaaaggcacagcctccttcgagggcatttgcataa

SEQ ID NO: 306462 - DNA, 122 bp, Homo sapiens
tgtgccaagcacttgccatgtacgggctctctttttcctcacagattcccccgaggcgagcgctattggtaacccatcttccagatatggaaaccaaggctgaggggaagggactggcccaa

SEQ ID NO: 306463 - DNA, 122 bp, Homo sapiens
ttaacccggcaccacggagagaaggtgctgcccggctgcaccccctcctcctgacagcggcgccccccggactgcggccggctggacacccagacggacccctccccatcccccgcgccact

SEQ ID NO: 306464 - DNA, 122 bp, Homo sapiens
tcccatctgagatgtccctgaagtgctaaaaatcatccctttaagaatccatatctaagacggtccatatcctagaccctattcttggcttataaagttgtagtgaaaattagtgaccttgg

SEQ ID NO: 306465 - DNA, 122 bp, Homo sapiens
ccggccaccagaaaacccctggaactcctctttcatagatcgtgactttgtgttattttccgtgttgtttgaaagtgccgaacagtttagaccagctcaccaatggctaatgtggtccattt

SEQ ID NO: 306466 - DNA, 122 bp, Homo sapiens
cctgtaaatgggagggtcaatccttacagaagtgggggggatagtataagaaagctggaacgatgtctgacaataaatacttaataagtgtgcttgcttctgaggcaagtgtttttaattta

SEQ ID NO: 306467 - DNA, 122 bp, Homo sapiens
gggtagtctgcactccacaccgctggatcctagcaggagctcccggcttctgtaattaaacgatttattattaaagcagccgctttcccataaccggcttcctgtagccacaggggcagagc

SEQ ID NO: 306468 - DNA, 122 bp, Homo sapiens
ttgctcctgtcacatcatttctctcacctgtccgctttgggatacgaagagaggcttctgcgtcaagcctatatttcgtgttaaggatctaggggaggtcttctagctcctgtctgccaatg

SEQ ID NO: 306469 - DNA, 122 bp, Homo sapiens
gcaccaggggtccagggggaggctccggcagcccaggtgggacggtggcgactgtgggtgcgcagaaaccccctcacaccacggcgggcggcagccggacagcaggctggccctgtccgtcc

SEQ ID NO: 306470 - DNA, 122 bp, Homo sapiens
cccacctcggcctcccaaagtgctgggaatacaggcgtgagccaccgcgcctggccgaggcggagttgtttcttcagtaccaggctgagggttgaactttgactgtgaggacgctaaaagcc

SEQ ID NO: 306471 - DNA, 122 bp, Homo sapiens
ctcgatctcttgacctcatgatctgcccacctcggcctcccaaagtgctgggattacaggcgtgagccaccacacccagccacacgaccctttctaaggaagtgaagatggcacatggagac

SEQ ID NO: 306472 - DNA, 122 bp, Homo sapiens
ttgggggatggcgatggggaccagtttccgggtagagaaggagataactcgatacaggaacgcacaggcagcctgaaagcagcccaggatctcgacaggggaagggaagaccctgctccctt

SEQ ID NO: 306473 - DNA, 122 bp, Homo sapiens
cagcaccagcgcctgggctggaggacagagaagccttttccgttgccggtgccggcctagcgtcctggaattacttcaatcaagtaagtgcgtttaacgggcttaagaggggctttcgggtt

SEQ ID NO: 306474 - DNA, 122 bp, Homo sapiens
gtcccgatggccccgtcacctctcccttcccgccttcggcctggttccttaaaggaacggcggagtctttccaaaagcaaggcaggttctggctgggaaaatggactagttgccctctctta

SEQ ID NO: 306475 - DNA, 122 bp, Homo sapiens
ctagcatctctgtggagcagccacagctcctaagtcactcactggcctggagcgcaccctcgccctctagttgcacgtgggtgcagtggtgaccactgggggtcgtggatacccccagtgcc

SEQ ID NO: 306476 - DNA, 122 bp, Homo sapiens
ggatatgctgggagttatctgacagacctgacacgggtacaagacacaagaacgctgatacgtggctcagagaagacacgcgggggtggggcccgccccgctaaaccccaggctccctgaat

SEQ ID NO: 306477 - DNA, 122 bp, Homo sapiens
tccccggcctgcccaccctgtgtccaggcagcaggagttcagcacacgcacgcttcctgtcgcccgaggtctcccgaagcctgcagtctcaggcttggcagacacaccccttcccccacccc

SEQ ID NO: 306478 - DNA, 122 bp, Homo sapiens
aagcagggtgaatcttagaccttggcatcatcatttataaactatgttccttgagcagctcgtatcatccactctgagcctcggcatctccttctatagtagccagtttgtggtggtggtgt

SEQ ID NO: 306479 - DNA, 122 bp, Homo sapiens
ttcctcagccttatgtatcgcactgatcagaactttccagaatctgcggcatttactcaccggcgcctccaccggcccctccacgtgccacttccgcttccttcttctcgagccttctggaa

SEQ ID NO: 306480 - DNA, 122 bp, Homo sapiens
ctgcctctcgcccccagaagtcctatccccctgccaaaacttgatcctttctggccaggtcgcctctttcctggtcgcccaggtgcgaaaactgaacgacagtagcagcaggcgcccccagc

SEQ ID NO: 306481 - DNA, 122 bp, Homo sapiens
cggaaggaggcaatggggatggggaatatatgcctctgaacagctgtgcctgaagtggcccgcttccacatccctgggaccaggacgccctccaagggaaaggacccaaagctgcctggatt

SEQ ID NO: 306482 - DNA, 122 bp, Homo sapiens
tgagcctgagactcaccagttcccaaaccgcctgcgcctgagactcaccggttcccaaaccgcctgcacttgagactcaggggttcccaaaccgcctgggcccgagactcaccggttcccaa

SEQ ID NO: 306483 - DNA, 122 bp, Homo sapiens
aaggtaggtttttgtctgtttgcttgtttttaaatcaacacccagggctaaaggaaatcccgagtttccctgataatcaggatgatttcttattttgaaaggcctattttgccttcgaagtg

SEQ ID NO: 306484 - DNA, 122 bp, Homo sapiens
gagggcgacaaaaaccgcggaggcgcattggggtggggggtgtctactgaaggccgctcccgacgtgcgcgtctttacgtagacgtcgggggcgcagccgcgctgtgcgcggtgactggcgg

SEQ ID NO: 306485 - DNA, 122 bp, Homo sapiens
cgagctccgcctcctcgcggctcccgacggcgcggcaggtggaagtgagcgcgcactggtcgggactctgaatcccccaaaagcgcatcctaggtgctcgggttgccagatttgggccctcc

SEQ ID NO: 306486 - DNA, 122 bp, Homo sapiens
acaagccgactggattacaatgtccactactgacaggcgcagtgcgtgtgtgtgacccaccgggttcccggggcactgtcccccccgctcccaccccacccgaggctccctccccaccctgc

SEQ ID NO: 306487 - DNA, 122 bp, Homo sapiens
tgcaaaaagcccatctctgtgcccatcctgggtcctatgacttttctctccctcaacagtcggttcccgattctggtccccggcccccagcagcgcctgcccccttcccaccggggcccccc

SEQ ID NO: 306488 - DNA, 122 bp, Homo sapiens
aaaacaccctttccccacacatggaaggacagaagggagggaaggacaagaggaaaaaaccgggaactctcaagtcacttatcagcaggggtaaatacgagctcaaattaaggcatttttgt

SEQ ID NO: 306489 - DNA, 122 bp, Homo sapiens
gcctcccaatcctttgactcacctgagcctgcaggacagatcagagatgcagctgcagagcgaagccgacaggcggagcctcccgggcacttggaccaggtaacggcggcgtggcagcgtgc

SEQ ID NO: 306490 - DNA, 122 bp, Homo sapiens
catgagaacttcttcccagaacttctacagagcctgggggcgcagaaaccgggtcctggacgctggtcctccttgccttcagatcctgatgggggttggagggggttgcactggagccccgt

SEQ ID NO: 306491 - DNA, 122 bp, Homo sapiens
tgcagtaatcctatgcctttgaaaagtagtatgtatactgaatgcacaagacgttaatttcgaggccgcactgagagtgcatatggattcatagactccttgtttgtaataaccatttgagt

SEQ ID NO: 306492 - DNA, 122 bp, Homo sapiens
cattcctgagaccagcaagaccatgagctctccaagagaaataaacagctgcggatgtgccgctgtaagagctgtgacattcgccgggaaagtctgcagcttcagtcgtgaagccagcgaga

SEQ ID NO: 306493 - DNA, 122 bp, Homo sapiens
caaatacagccaaggactggatctccggaaggctgacagcactgaccctcaagaaggcaccggctgacagacagaacattctgccctaatatgtgctgaaattccgctgagagcagagtggt

SEQ ID NO: 306494 - DNA, 122 bp, Homo sapiens
gtcggctagggttataggtggttctgagtccttccggaagctgccgaatcttagaagtcgcgccactgttgtggcgatggaagaaggcgaagctctacagaaaccattttggttgagggaag

SEQ ID NO: 306495 - DNA, 122 bp, Homo sapiens
gttccgagccgaggtcccggtaggtcagggacccccagtaggtattaggacactaggggccgcggcccactatgagcgtgggtgtgtgctaagcgcgagggccttttccccggtggcccgtc

SEQ ID NO: 306496 - DNA, 122 bp, Homo sapiens
tctggaccgcgcgggtcacgggactgcgggatcggctaggccggactgagtcggttacggcgagctgagacttcccagtagtgcaaagttttagtgaagggggttctacgaagtgcctgcct

SEQ ID NO: 306497 - DNA, 122 bp, Homo sapiens
caatgcctggccaagcgcaagtggttcttggcccggatcctaaactaatttttgtatgttcgtgtgtatataattttgctcgctccctcccgttcctctcccttcattaccaggagcacggg

SEQ ID NO: 306498 - DNA, 122 bp, Homo sapiens
tttacaacaactaggatgtgttgggtgagatgtttcagatctggagaaatgagcaggtgtcgggaaatgtgtgacttaaccgtggtgagggctggaaatccaaactcaccaccatgatctgt

SEQ ID NO: 306499 - DNA, 122 bp, Homo sapiens
ttgccatttggcagtgaaggtgctattgccggaagatggaaaagcagatattgtgagagccgctcaggacttttgccagtgagtagcccagaagcaaaggagacccacagatgtggatgtag

SEQ ID NO: 306500 - DNA, 122 bp, Homo sapiens
aagtttctccctccgagccaacgtccctctagcaggaagcccccttggccttgcggcctgcgtcctcattcggcgaactctcccgttcacggcttcctgtacatctgcccttgtggttgggg

SEQ ID NO: 306501 - DNA, 122 bp, Homo sapiens
gctttagctgggtatcagtgtctgttaacatataaagatgcctactctgtgtgcagcactcgtttcccacttccgcccgcgagatactctaacacgtgctaagagtagcttttgtttgtttg

SEQ ID NO: 306502 - DNA, 122 bp, Homo sapiens
cgtgtgttttttacaagcgctgggactggcatgagatttgatccaagcatttcttgtttccgccttggatgcattcaggatcagtgttcccagaccaggcaccccggggccttctcggctgc

SEQ ID NO: 306503 - DNA, 122 bp, Homo sapiens
ttgagattctgacttaattggttttgcctgcagtcagggtgtttcagttttaaaatctctcgaagtgctgctaattgctgccataagtagatgaacatattgatatcacagagctacctgag

SEQ ID NO: 306504 - DNA, 122 bp, Homo sapiens
cggccatgcccgccgctgccgcttcaacatggagctgtaccgactgtccggccgccgcagcgggggtgtctgtctcaactgccggcacaacaccgccggccgccactgccactactgccggg

SEQ ID NO: 306505 - DNA, 122 bp, Homo sapiens
taggaagggaggagttcgagcctaaggagttaagcatcctctctccgccctggctggtcacgctgcccctagcgcgacctagtataaaccagaccgagtcccgaaggactgggagaggtcta

SEQ ID NO: 306506 - DNA, 122 bp, Homo sapiens
gctggaggaaatattcatgctgtgtcatctttggtagtcagtgggcagttttctccctgccgagtttactttttttgcattttgaagttcaagatcaggttgggtgtttgagtgatctacgt

SEQ ID NO: 306507 - DNA, 122 bp, Homo sapiens
aagacgggagttccggcaactacagggagctcttcctggaaatctgccggagctgcagcgcggtgctctgctgccgcatggcgcccttgcagaaggctcaggtgctgcccgcccgtcctcga

SEQ ID NO: 306508 - DNA, 122 bp, Homo sapiens
gcgtgcagcgacgctgagtgactcttccataatgcagggctgagtgggcagcaggccagacgtgggtcagggagcgttcatcccgaaccgtgtccagccctggcctcgccggcccaagtcgc

SEQ ID NO: 306509 - DNA, 122 bp, Homo sapiens
aataagagagaaacggaagtggagataataaaatggaaagtggtggaagaatgacaaacgcgtgtgcatgtggaatgaatcatccaatcataggaatgattctttaggacagaggggagact

SEQ ID NO: 306510 - DNA, 122 bp, Homo sapiens
gcgaccctggcccggaatctccttgcctgcccgctctccttagccgccgggatggctttgcggcgccaaccaatcgcctacaaagatcatttcctcgggctgcaattcaaccaatccaagta

SEQ ID NO: 306511 - DNA, 122 bp, Homo sapiens
agttaacttcaccctgaagaaattcctcctggcgtttgcaaagagctcctttatgcctcacgtccagcttggctcaaaaggactctaaagagccggagagctgctgcggaaaggcggagtca

SEQ ID NO: 306512 - DNA, 122 bp, Homo sapiens
tggccctgggctggctgttgggcgtgggcccgtgtgattacagaggcgctgggacacagccggctgggacagggataatgaggtgtccgccgaaatgcaggactccttcggagcacagagaa

SEQ ID NO: 306513 - DNA, 122 bp, Homo sapiens
taaacacaggagagggaggaggaagatgtatcttctgtgtccccagaaacccgcaggcaccggtcccagcgatcccaggaagtgaatagctagtttgttttgggtagctaagaacactgccc

SEQ ID NO: 306514 - DNA, 122 bp, Homo sapiens
ttggaaagagcctcagagtcaaaaatgaaagtaaactatgtatttccttattgcaaagggcggaaacgtgtaattacagattgtgaaactgctgctcagaattccagactcattatcaggaa

SEQ ID NO: 306515 - DNA, 122 bp, Homo sapiens
tttttttttttgtaattttagtagagacggggtttcacagtggtctcgatctcctgccctcgtgatccgcccgcctcggcctcccagagtgctgggattacaggcgtgagccactgcgcccg

SEQ ID NO: 306516 - DNA, 122 bp, Homo sapiens
gtgtttaattggcagcctgacttgtaactaacttgcttcagggagttaaagaacaaataacgcactggcagtctgagaagcagatcagcatttcttaaggtttcccctcagttcacaccagc

SEQ ID NO: 306517 - DNA, 122 bp, Homo sapiens
gtggctttttgtgcgaggctgtttctctgcgaatagctcttggagccaaatcttgggacccggaaccgcgtgggcttggcgcatgcgtgttgtaattcaggcgccgaccgcggacgctccag

SEQ ID NO: 306518 - DNA, 122 bp, Homo sapiens
ccattggcgagaaacggaaatacccgctttcgagaaaaccggaagtgcgtggtcacgccccgcgcatgcgtgcatcggggcagctcacgcttcctaaatcccgtcatccagtgagaaagcag

SEQ ID NO: 306519 - DNA, 122 bp, Homo sapiens
ctcatttgatgtctatagtgggtttcgaaactgggtcacctggctggtggagaaacacgacgtgtcccacgtgaggaagggaggcccctccgccccgaggagaaatatgatggtgacgctca

SEQ ID NO: 306520 - DNA, 122 bp, Homo sapiens
tgtgggtctttctttggtgtttggaggcaccagtgatgaatggggacaagcaagggcccccggatgttctgcccggagtagctatgggaacatgagcaggtcactcacacactctgagcaca

SEQ ID NO: 306521 - DNA, 122 bp, Homo sapiens
gagggtccctcttttggggtggcagcagaagaaagggacttacattatttactgagcacccgttgtgtgtcaggcacttttttggggggcttagaacatgataccccaaagtatggcacctt

SEQ ID NO: 306522 - DNA, 122 bp, Homo sapiens
catatatttagtgcaattttaaatgcaaattttactgtcatttccagcctctaacacgtgcgcatacacacacacaaacacacaccattctttaaaacatttcattgtctccccatgagctc

SEQ ID NO: 306523 - DNA, 122 bp, Homo sapiens
taagagaaaagtaagctgggaaaagcaagaaaatgacaaactagtataccaatctgatgacgagggtggaaaaacatcctcattgacagggctccgaagagaatgtgggatgacgaaatctt

SEQ ID NO: 306524 - DNA, 122 bp, Homo sapiens
atcaaagccggcgccgcacgcgcacgcgcgcccgcagccgctcccccgcccgcgccgctccggctcccgcgcgcgcgcacttgaggcctcccttgtgcgtctcctccattcgctacgtgcag

SEQ ID NO: 306525 - DNA, 122 bp, Homo sapiens
agggaaagatgaagatgagatgagggtgagaatgatgagtgccttcgaaataaagagaaacgatgtagcccatttgaattaaatagagttggcccacatggatgacgtgtgagaacaatgag

SEQ ID NO: 306526 - DNA, 122 bp, Homo sapiens
cgtcgagctgggtgaaccgccgcgtgatgcgctcaatgcgggcgtgcaggtcgcggtactcgctgtactcggcattgaagtcgttcttgtagctctggcgctgctccgaagaggagatggct

SEQ ID NO: 306527 - DNA, 122 bp, Homo sapiens
tcaattcaataaatatttacagaagacctactatgctaagtattttttagtcttcggaaccgtcagtccctccaacagtccctccaacactaatgtttatgttttgtaccttatcggctgcc

SEQ ID NO: 306528 - DNA, 122 bp, Homo sapiens
atgttcaaagggaggtgacgacaaggtcaccaggtcaggcggtgccatcggatttggctgcgattgtctcgtcgataaatgtcctggcaggaaattactataaacaaactgcagcatctttt

SEQ ID NO: 306529 - DNA, 122 bp, Homo sapiens
tcccagcgtgggagccaggccatcttcctctcggctacctgtccccagcagtgcgactggcgctgcgccatctcttacggtgactacctgtaagtgatctctctgccatctgtcggccacct

SEQ ID NO: 306530 - DNA, 122 bp, Homo sapiens
ggtcagggctggacacacacagcttcctgctccctgctctacagctccctcgcaggccagcgtctccttgattctgtggtcaggcacagcccaggtgggttatgggaaggggactggagcta

SEQ ID NO: 306531 - DNA, 122 bp, Homo sapiens
gggacggttcctcttcagggctgtccctgacagcggggtctgtgcttgccgctgtctgtgcgtgtggctgggcgtgcggggtgggggcgggtgaggcaggaacgagaggaggagatggggct

SEQ ID NO: 306532 - DNA, 122 bp, Homo sapiens
caagtcggccacagacgaactgagccatgcttgggaggacgtcaaggccatgtttaatggcggcacgcgcaagcggaccttctccctacaaggaggcggcggaggcggtgccaatggcgggt

SEQ ID NO: 306533 - DNA, 122 bp, Homo sapiens
gagaaagagcggacagaggcagacgccggggctggcggcgatggagcagcagtcggaggacgcggaaggcctgcgagagtcgcccgcgcccagcgccggccttcgggtcccaccttgcgggt

SEQ ID NO: 306534 - DNA, 122 bp, Homo sapiens
tataaaagatgtgcccagagtttgaggctttagtgagccatgattacaccactgcattgacgcctgggtgactgagaccctctctccaaaaaacaaacaaacaaaagcccaaaacaaataaa

SEQ ID NO: 306535 - DNA, 122 bp, Homo sapiens
ccccacgccaggctccaccccatcccacgccaggctccacgccaggctccaccccccccacgccaggctccaccccatcccacgccaggctccacccaagccagcggcaccggttctggctg

SEQ ID NO: 306536 - DNA, 122 bp, Homo sapiens
ggagcgccgccacatctcggggcaaatggcgcgggggaagagtttcctcctcagcctccccgtctccgatcgctccgcaaactccagagcgaggcacgcgcctttaaaggcaggtccgcggc

SEQ ID NO: 306537 - DNA, 122 bp, Homo sapiens
tgttagagatttgctcttttcgtattggcatgtaaacaagtaagtcactaagtgaactgacgtcacaatttagttttaggaagatgcttttcccaggcacgatttgaactcagtggtttcct

SEQ ID NO: 306538 - DNA, 122 bp, Homo sapiens
acaaaaagagctagggtcccagtgtagcaggacaagccacagacaaaacctctcagacatcgagttgtagaaggaagggctttattcagctaggagcatcagcaagctgctgttttaaaatc

SEQ ID NO: 306539 - DNA, 122 bp, Homo sapiens
agggagatagctgcaaggcccatactgaaatcaaagagatctgcctccacaggagtttgccgctgtccgtgattctgaaagtactgccctagaacacagaagtttatcatagcttaagttgg

SEQ ID NO: 306540 - DNA, 122 bp, Homo sapiens
ttggataagatcaacgcggacccggtcctcctgcccaacatcaccctgggcagtgagatccgggactcctgctggcactcttccgtggctctggaacagagcattgagttcattagggactc

SEQ ID NO: 306541 - DNA, 122 bp, Homo sapiens
ctaaaacagcttgcttgctccaccccagagtatctgattcagtaatttggggtctgggcccggcattggcatttctaaggagtctcaggtgatgctgactgctcgtctggggactgcacttt

SEQ ID NO: 306542 - DNA, 122 bp, Homo sapiens
ttcggcacgagctggtgccgccgcttcctcaacgggcaggtggtattcgaggcgtggggccgcttgcgcctgctggacttcctcaacgtgaagaacgtgtacttcgcgcagtacggcgagcc

SEQ ID NO: 306543 - DNA, 122 bp, Homo sapiens
cactgttgttccccaaacccttccccaagttaagtaaaagagcagcctggagtccctgagcggagctgatctaccctgctcatcttcactcttcttcattccagcatcaacaaggatgtttg

SEQ ID NO: 306544 - DNA, 122 bp, Homo sapiens
gttgcacagactcttttactatataaggtaatattcagagaattctggagcttatgacgtcgatatctttgaggattataattcagcctacagcaaatgttgattttttttataaaaaagaa

SEQ ID NO: 306545 - DNA, 122 bp, Homo sapiens
tgtcatcatcttcctcaggaaactaccactttcccttctgccaggctgggtgacatgctgcgaagtttctgtgacatcaccaacctctcttcctttgagctctcacctgagcacaatgcacc

SEQ ID NO: 306546 - DNA, 122 bp, Homo sapiens
acagggacacccagggacagcgcctcactcaccctgcacctgagagggacacccgggggccgcaactcactcaccctacacgtgacagggacacccggggacggcgcctcactcaccctaca

SEQ ID NO: 306547 - DNA, 122 bp, Homo sapiens
cagcagggactgctgcaccgggaggtccaggtcagcatgtcctggaagcagaactgctggcgcctaggcgtgccctctcggtgccctcagctcggcctcctgtctggagggagcgcacaggc

SEQ ID NO: 306548 - DNA, 122 bp, Homo sapiens
ggacctcgctggatcccactggagcccactgggcctcactggacctcactggacctcactcggcctcactgggcctgactggacctcactggacttcactgggcctcactgggcctgactgg

SEQ ID NO: 306549 - DNA, 122 bp, Homo sapiens
ggcccccggtggggggagacacagggtgaagccggggactccacgaccccctgggccccacgcaggggctgcagggaaggcactggcctctgagggatgatcccagcctcctcggcctcacc

SEQ ID NO: 306550 - DNA, 122 bp, Homo sapiens
gttagagaccagcctggccaacatggcaaaattctgtctctattaaaacaaaaaattagccgggcttggtggagggcgcctgtaatctgagttactcaggaggctgagggaggagaatcgct

SEQ ID NO: 306551 - DNA, 122 bp, Homo sapiens
tgatgagccacgcctcacactgagaactccgggccaccttttctgggtctcgtgggcagtcgcctaaatcggaagcccacaaagggattcatccagaggagtgaggggggccccccaaagac

SEQ ID NO: 306552 - DNA, 122 bp, Homo sapiens
atgcccagcacttaggaattgggctgtggaacacagtgccagctccagagaaatcccaaacgttctccacaaacagatgagcatcagtcaaacaatttctcagtttcacaagaagcactgta

SEQ ID NO: 306553 - DNA, 122 bp, Homo sapiens
acatgatgggtgtggagcatggcttcgagaccgccagccacgagggcgaggcgggtccctcggctgaagccctgcagtaacccgcccagcctcccgcggggccacacacttcccctcccaac

SEQ ID NO: 306554 - DNA, 122 bp, Homo sapiens
aagatgtacggccacctcacaaagtaacggactactcctcatccagtgaggagtcggggacgacggatgaggaggacgacgatgtggagcaggaaggggctgacgagtccacctcaggacca

SEQ ID NO: 306555 - DNA, 122 bp, Homo sapiens
ggtcaggtctaacctcatgatctcctggtttccgaggcgccctgaggcgatggagtgtcccggttaattttgtggtagccctcgggaaaggctacgtgcctacaggtctcagctgtgcagca

SEQ ID NO: 306556 - DNA, 122 bp, Homo sapiens
ccactgaccgctgtcctatagtccgtcacgggctcggttggtttgactacttgtcataaacgcacttcccctactggttcatgatggatacacgggcggccacgctctcctcccctttagga

SEQ ID NO: 306557 - DNA, 122 bp, Homo sapiens
attacaagttgttttaggatctacctccagacccatggagtttctttagtaaagcctgaacgacacaggccaaaataatctccaaaggccagctctgacccttttaaatcaattttagctaa

SEQ ID NO: 306558 - DNA, 122 bp, Homo sapiens
ggctggagaatgtggagaacttgctgcgcaacaggaacttctggatcttgcggctgcccccgggcagcaagggggaggcccccaaggtagcaccgggacaccctggggtgggggagctcgag

SEQ ID NO: 306559 - DNA, 122 bp, Homo sapiens
ctggaagcagatcaaggcctaacttcattcaagacctaaatattatgagactcagttattcggttttatgtgacatctcttccattcaccatgcacaggcttttccagctatctatataatg

SEQ ID NO: 306560 - DNA, 122 bp, Homo sapiens
ggcgggagcgcggggacggggccgcctcctcggcgtcattggagcccaacagttagtgggcgctcacggtgtgctgagcggcgcgctaggcgtcgggagtggcatggcggactgcaggggcc

SEQ ID NO: 306561 - DNA, 122 bp, Homo sapiens
acatgggctggacgaacttggaactctttacctatctgtatagttccaggagcctacaggcggtcggtttttcagcgcttgccaccgggccaggcaaggtctttgcatgattgctgaggcag

SEQ ID NO: 306562 - DNA, 122 bp, Homo sapiens
cctcaagacgaagaggggggcggcctgggggtggctgctccaggaagagctgcagggtgacgttgagcgctgcctcctcagttaggtcttggtgggtgatggagccaggggcagccagcagg

SEQ ID NO: 306563 - DNA, 122 bp, Homo sapiens
tggcagggccagaaccatctggatgtgagctcggggcagaggagacgccaggagcaccaacggtgtgaccaggagaagccacagttgtggaaatgctggttccttctgtaaaaatgcctacg

SEQ ID NO: 306564 - DNA, 122 bp, Homo sapiens
ttcctttagccttcttagctctccctaccactcccacgaaaatgcactcaggagccactccgctttgaagactgaagccctgggcagtggctatgccaaaccatacagtgtaggtttcacca

SEQ ID NO: 306565 - DNA, 122 bp, Homo sapiens
ggaaaatctaaatatatatatagcagttaaaaagcaagcccaggccgtgagtagcgctcacggcttccacgtcaggattcccacgaattcacctactttctacgtgtccgcatcctgcctcc

SEQ ID NO: 306566 - DNA, 122 bp, Homo sapiens
cttcattttgcagacgccgggagctaaaaccagcgtggaaaaccagcagctaggacagtgcgcccggcgcctgagttaccatgcggccgttactagggcaatttgcaaaggcccgcctagac

SEQ ID NO: 306567 - DNA, 122 bp, Homo sapiens
tttcttctccggccctggcaggttccgggagcctcggctcgtgggtgccggaagtggaggcggttggtggggttggcggggctcagcgacgctgcgcgggtggcggtttgcgaactgcgggt

SEQ ID NO: 306568 - DNA, 122 bp, Homo sapiens
ggaaaagcaaggcagaaggggcccagacttgaggaaagggcaggggcaggggctggcaggcgagagaacctcgaagaatgggtggggccttgcacctcatacctaccctcatacccacatat

SEQ ID NO: 306569 - DNA, 122 bp, Homo sapiens
gctgtgaccccccccccgggaggggctccagggcccgcagtgaggagggggcagctgaagcgagaacctacagaggttgagaggagacggctccacatcagaggcccagaaaatgccggcgg

SEQ ID NO: 306570 - DNA, 122 bp, Homo sapiens
gctcgggtgccccccctccccacccaaggccggccctttcctgtggagtcatctcaccgccgtgcgcacccactcgtaactcgcacccgggtcctggctgcaccgcatcccctcctgcaccc

SEQ ID NO: 306571 - DNA, 122 bp, Homo sapiens
tgcagaggcagtggtgggggctgggttgattaccccgcctctgcccaggagctggagagccggggtcggggaggctggtgcccagaccatgaagaaggcccggctatggcgcatcactcccc

SEQ ID NO: 306572 - DNA, 122 bp, Homo sapiens
aaattcttaaagagctagtcaccaagtatggggggccaacccattcttggaaaggtctctcgctctaagcagcaaacagctctcatgttgcttcttccaatctattcatgtaatgctcccaa

SEQ ID NO: 306573 - DNA, 122 bp, Homo sapiens
gaaatctggtcagtgtaaaccaatttgttcttccctctgttctccctggtttctctccttcgtctgtatgtgtgtggtgtgtgtgtgtgcgcgcgtcctgtgttattttctcccccttcaga

SEQ ID NO: 306574 - DNA, 122 bp, Homo sapiens
gtgggtgtgagagcggaagtggccggctagagccgggggctgggcggggaccgggcttgtcggtgaagcggcagtggcggcggcggcggcggctcggcaggcgggttcaggcttcgggggcc

SEQ ID NO: 306575 - DNA, 122 bp, Homo sapiens
tgtccttctctgacagcagcatcagggctcaggcaggccgggaggatgcatcacagctggcggccttggacggggcagtggctcccccggcctgaggagtgccgccccttgtggccacgctg

SEQ ID NO: 306576 - DNA, 122 bp, Homo sapiens
agatgcgctgagtaagcttccaacacgcgagagctgccctgctacagtcattgccatcatcgccctggcctcaggggatgccactgcactcactccttccgggcagaccccttcactggcca

SEQ ID NO: 306577 - DNA, 122 bp, Homo sapiens
gtttactggagtactcctccaccggcagggttactggtgtcactgtgcacccagcccccacgagctgagtgattcatcgcagccttcggatccggaaggatgagcaaactccttaagtataa

SEQ ID NO: 306578 - DNA, 122 bp, Homo sapiens
ccacgcgcaacgtggaggctctcagaacacgatgcgtaaaagcagcacgacacggagcaacgcaaatcgtctgagcccagggaagttcaaaacctgcacagctcagcaacatacggctcagg

SEQ ID NO: 306579 - DNA, 122 bp, Homo sapiens
aatgacattgtgatcaaatgatttcccacagaagcaggcgatggcccagaggggcctccccgacaaaagtcctaaatgttaaagccccattattacatctctattaaatgcagctccaagcc

SEQ ID NO: 306580 - DNA, 122 bp, Homo sapiens
gaggctgtgcaaggcagctgaggctgctgctcgagtcccatcgacttttcacaggactcacggccccgccccgagtgatgtcagctgcctttccatccctttcccggcgatgcgaagcttga

SEQ ID NO: 306581 - DNA, 122 bp, Homo sapiens
tacgaggaatctttcatctagagactgtagatgcaggactgtgcccgtgcctggttaaaacgttgaagctggtgctaaagtgtgttgaggtgcctgaaagagaagcttttgttttttgactc

SEQ ID NO: 306582 - DNA, 122 bp, Homo sapiens
tgccactaataatgagttctgggagtactggcttgtgaatatttctagggctaatcaagtcgacactctagagggaaaaaccttatggtcaataagcaatgactgcaataaatggcagaagt

SEQ ID NO: 306583 - DNA, 122 bp, Homo sapiens
gataaacgctgcgcaaagccaatcaccaggctgagggggcggaggctgcttggagagtaacgtccccggctctgcctgctctgtgccgggagaggaagctcacagtgctacgcgcctgcgag

SEQ ID NO: 306584 - DNA, 122 bp, Homo sapiens
accaaaaatggtaaaggtgttgctaatctctggatccttcgtgtctacaaaactgtctggcgtatggcaggagcctggaaattatttttagtaagtaatgcatgagtaaattaatggacaaa

SEQ ID NO: 306585 - DNA, 122 bp, Homo sapiens
tctgataatctgccccgtctgtttggggcacagagacctttcatatgtcatataattacacgtacagttggatttactttccttgctttgttgtgtcttttttattcttccctttttgattt

SEQ ID NO: 306586 - DNA, 122 bp, Homo sapiens
ccctcctggagcctggcatctctctcaccgtggggatgaactgaatttcataggcatccacggggccaggagccggggtccactctgtccgaactgttgtctcctccaagagatgcatcctc

SEQ ID NO: 306587 - DNA, 122 bp, Homo sapiens
gcccgccctgcgggtcaaagcgggcaaagtcaccaaactcaggcagacgccacacggcctcgcttttcttcaggtccacagagaacagctgttcctcatcaaattcatgggtgaactggccc

SEQ ID NO: 306588 - DNA, 122 bp, Homo sapiens
cggggcagaaggaggagcctgaaggtccaccatggggtggaggctgcctgctcgcgggcccgcccccagagcccggggctcatcacgctgctctatgcgcctctgttggctcctgccaaaca

SEQ ID NO: 306589 - DNA, 122 bp, Homo sapiens
ccaccccacctgccctgtccacggaaaccatcacccaagcttggagctgtgcaggggacccggccaccccgtccctcctgtccacagaaaccatcactcaagcttggagctgcgcaggggac

SEQ ID NO: 306590 - DNA, 122 bp, Homo sapiens
aaaaagcgtcccaacttcagtccctccaaaggtgacttgttgagattcctccccgaggcgcgcaatccttggctgagctccacagaattcctgggctgtgggaatgaggagtaagcggcggt

SEQ ID NO: 306591 - DNA, 122 bp, Homo sapiens
gcggtgggaacttgatttctccttttggtcgcgcttcgggggctggagcttgtttccccacgtcgcccaatgagcgccctctaaagggaactgcctccttggcctcctctcgtccgcagctg

SEQ ID NO: 306592 - DNA, 122 bp, Homo sapiens
tttgtttattgtttccccacaagtaatcccagcactttggggaggctggggcaggaggatcgcttgagcccgggagatggaagatgcagtaagctatgatcgtaccactgtactccagcctg

SEQ ID NO: 306593 - DNA, 122 bp, Homo sapiens
tctcttggtttgggaggagggagggaggatcactagggtcactccgcggctgtcggctgtcgccatagtaaccagactgagcgggctgggcagccgctctactctcccacctctggctgggg

SEQ ID NO: 306594 - DNA, 122 bp, Homo sapiens
cctggtggaagtctgatagcgtctctgcacgtgacctctgacaaagcccatcccaggagacggggtgaagctattccccacactctcctgtgaacactggagtcttgcaagacccagggaga

SEQ ID NO: 306595 - DNA, 122 bp, Homo sapiens
gtcccctctgcccacatgtcctgctggatgctgggctccgccgcggtcacgtggcgtcagcgccgagttttagttgaaaaccacactcctggcttcacacagcccacaggacgccagagccc

SEQ ID NO: 306596 - DNA, 122 bp, Homo sapiens
ttaagtgcagtaatagaacagacattttcaggcttttaagttcccaacaaatttacctcccggtactctttctcaaaaagctccatcaaaataagaagagtaaacatagaaagaggaaacac

SEQ ID NO: 306597 - DNA, 122 bp, Homo sapiens
ccgcccccaactcacaactcttttgagtccagaatctcagaatcgggcgttgggctttgccgggtgcttcagatcaatggtaattatttaattttttccagttttatttttgtaaacagaaa

SEQ ID NO: 306598 - DNA, 122 bp, Homo sapiens
gagcggtgcaggagcaaagcatgtgcttcatctgtgcttctctcttgccacagacggacgcgtgctcagattccagtactgtgactttgacccagggcgtccttgcacacgtggggaggctc

SEQ ID NO: 306599 - DNA, 122 bp, Homo sapiens
gaaggtaatgccctcgggtcagccctcaaacaatggggaagaggagggtggataaacacccgctaggctgacaggcaattctgtatctgatccacgggtctctggggaactgagcctcactc

SEQ ID NO: 306600 - DNA, 122 bp, Homo sapiens
ggtcacagggacgtgtgggcgtggggtccagaggcctctgagggagcactgtgggtccctcgctgctctggatcctggttgtcccggtatttgaaggcgtccagcgctccatctccttgctc

SEQ ID NO: 306601 - DNA, 122 bp, Homo sapiens
cgtgtgtgtgttgaagtttgaagggctcctggagagaaggcactgctattcccttcttgccgtctgtaggcctggaaggatgcgaggctcccgctctccaccacaagcaacgaagcctgcaa

SEQ ID NO: 306602 - DNA, 122 bp, Homo sapiens
agttattccatcctttttgatacaaaaggccatgctttacgcctccttctccccatgttacgaaataaatgaactaattatgtgttgctttagactaattaaccactattatggcctattta

SEQ ID NO: 306603 - DNA, 122 bp, Homo sapiens
ggaaggatgcacagcctctcgttccaaagtccacagtctttctagtttctggaaggatcccgagtgactgccttttagtggtagcttctcagactccaccagggactcagccagcacccgcg

SEQ ID NO: 306604 - DNA, 122 bp, Homo sapiens
ggacgcgtgcgtgtgcgcggcgggtggggcagtgcagagcgggtcctggattggctgggccggtgagtgctggcccactaccccggctctagcgtactggcggagacagacgtgagagctcg

SEQ ID NO: 306605 - DNA, 122 bp, Homo sapiens
gccggccgctgtcagctccctcagcgtccggccgaggcgcggtgtatgctgagccgctgccgcagcgggctgctccacgtcctgggccttagcttcctgctgcagacccgccggccgattct

SEQ ID NO: 306606 - DNA, 122 bp, Homo sapiens
ctcccgacctgctagagcctagagggcggaggccggagaggctgcagccgggagtagcaccgcacatccgggaacgccagcagcgggctgagggctgcataactgatggaaggccgggcgcg

SEQ ID NO: 306607 - DNA, 122 bp, Homo sapiens
gtccccctccccctccctgtccttatctttcccttctgtctccatggcgactcaccacctcggcttgcctgcatcccagcctctgccagggattctgagccgggctccatccctccctcctc

SEQ ID NO: 306608 - DNA, 122 bp, Homo sapiens
tcgcctcagagtggcagctgtctagccctttgttcacacaaaaatgcgaccactactctacggcagagcttcctccagccagggctttagagtctccttcccttacttgtttgcaataaaaa

SEQ ID NO: 306609 - DNA, 122 bp, Homo sapiens
agggagggccttcctgtgggtgcatgcaggaaacgccccgaaaagaaacgtgtgagtgcgcgtccactgcaatttgtatgggaagttggccaggagcagggcagggtctggagcgagggtgc

SEQ ID NO: 306610 - DNA, 122 bp, Homo sapiens
caggcagggcttgggtgaggcaggcgaggtgccagtggttccctgggcacggggcagaatcggaggaggacatcctctttctgaggttaaggaggtaggggctggaggccttgacaagggag

SEQ ID NO: 306611 - DNA, 122 bp, Homo sapiens
gagccccaaaggtaggggccacagggcaaacggaccaagcgattcgggtgccaggcgggccgggccgggggcgggaagggccgggcccagggaaggtggaagtggaagaaactcaccgagcg

SEQ ID NO: 306612 - DNA, 122 bp, Homo sapiens
ctgctatactctgttacataataatacctacctcatagttaggaggtttaaatgcggtaacgggtataagtgcatggcatgtactaggtctttaataaatggtagttcccccttagtcaccc

SEQ ID NO: 306613 - DNA, 122 bp, Homo sapiens
gggtaactagcctttgagctcaaaggggcatttcgtgaggtcgccttttggttcggagagcgcgcggcgatcgggtggagggggcctggcgggaagaaagctggggcggggaaggggcgcgg

SEQ ID NO: 306614 - DNA, 122 bp, Homo sapiens
aaaaaataaatataaatataaatataaatgtagacatgtaagacacagggctgcttctgccgagcactcgcagttcacagaggttataggtgaattaatcccaagtgtgaggtgtactgtaa

SEQ ID NO: 306615 - DNA, 122 bp, Homo sapiens
tcccaaaggctgctgggaagagaacctcgccggtgtcacactgagacttccgcttcacctcgctatcttgccctagaaagggaactcggaggggactcactgacgaaaggagctccagatgg

SEQ ID NO: 306616 - DNA, 122 bp, Homo sapiens
gttattgccgccgaggtggaactatggcaacgggcgaccaatcagaaggcgcgttgttgccgcggagccccctgccccggcagggggatgtggcgatgggtgagggtcatggggtgtgagca

SEQ ID NO: 306617 - DNA, 122 bp, Homo sapiens
atgtttccacagctgcaggagtgcctggaattgtagagggtctttaaaagaaggaaacgccgctcgtcgctgaccgttctcattgagtcaggcgctgtctgaacctcccaaaacatgctgaa

SEQ ID NO: 306618 - DNA, 122 bp, Homo sapiens
tgaatgggtaacaggatgaacccgcccctgggctggttttctctgaaccctaactcctgccgttacgccccaccagctctaggccaggaactctatgtgccccggccacgctagagcccgta

SEQ ID NO: 306619 - DNA, 122 bp, Homo sapiens
cctggagggggtgatgagggccttgaggaatgtatagatacccctgcagaatgactcccgcggcttcccagaatgagggctttgcagagccctctctgtaggcaagtacttggcagggggtc

SEQ ID NO: 306620 - DNA, 122 bp, Homo sapiens
aggttgaatccccagttacaagaagccgagaggtcttcttgtcataaaattaacttccctcggctcctgtaacagggagtgggagcccaccctcccactcgccgtgtagcactctgcatctc

SEQ ID NO: 306621 - DNA, 122 bp, Homo sapiens
ccgagcccgaggcggggctgtggatgtagccgctgattggctgactggggcgcagcttgacggcgtcgggctggagagccgcagtcccggctgcagcacctgggagaaggcagaccgtgtga

SEQ ID NO: 306622 - DNA, 122 bp, Homo sapiens
acacattctaaatggaagctgatgcctgtcagctgtgtggggacattcctgggtgctgagcgctcaaatggcactccaggtttttatctctgagctgaaagggaaaggattgatttagcttg

SEQ ID NO: 306623 - DNA, 122 bp, Homo sapiens
cctgtgagcccctctccccgccgcagcctgcgccagacctgggagcgatgcgcccccacccgggcggcgcgccctctgccaactcgccacccatgggatcgactgccctcagctgcccggct

SEQ ID NO: 306624 - DNA, 122 bp, Homo sapiens
ttactacaagtcacatcctgatagaggccccactcgctggaaggggcaatgaatcaccagcgtctccatgggaatcacaacccagctagcccagccccacccctcctaatccactgccctta

SEQ ID NO: 306625 - DNA, 122 bp, Homo sapiens
aaccctctgttcccatggccccaccggaaagggctgagtgcttgcctgctgagcactgaccgccgggctttgtcgtgcgtgaaccccacgacatgggggaatttccatggcatgaaaattct

SEQ ID NO: 306626 - DNA, 122 bp, Homo sapiens
gcagccaggtgaactagaaacagcgtgggcctgagattcacatttgccctcttttccccccgaccccccaagcgctatgactcaggaggacccagagagaacctctcctcaggggtggggag

SEQ ID NO: 306627 - DNA, 122 bp, Homo sapiens
tgcgagaacacagcgagtgtgtgagtccctcccgctccagctcctccaagccgcggccgccgccgccaccctcgcccgcagcctcccgcagcctccctcggccaccggtgcctgctgggggt

SEQ ID NO: 306628 - DNA, 122 bp, Homo sapiens
taaggacaaggaaatttatacgcgaagcctggaagcgcccccgcccccgacgcactcccgcgggtcccacgcgtgctttcgccgcctttgtccacaaggtggcagcctttgaactttcttcc

SEQ ID NO: 306629 - DNA, 122 bp, Homo sapiens
cgcacgccttctctgcacttgtgcacagaatgttcttacgtttgcaaacagcgtgcaagccgccgcgcgcggcgggactcaagggggagacacatgcagccactggaacgctctttccagtc

SEQ ID NO: 306630 - DNA, 122 bp, Homo sapiens
attcattaaatatctttatatatgaaggcccggccaggcagaacattgtgttgacagggacgtcccgtcagcacttagccctgctctccccacccctcccctcctgcacaaatctcccggtg

SEQ ID NO: 306631 - DNA, 122 bp, Homo sapiens
tctcccagagaacagtgagaaagggttcccccttcagtgaagactgcaaagttcagccagcgccaacccaaagggaatggactccaggaaggggcaaattacattcaacatacaagaaagaa

SEQ ID NO: 306632 - DNA, 122 bp, Homo sapiens
agctttagtttcttggcaagaataatgtgatattagtaagtaaaggtcttaaaagtctgacgactggaatagatataaagtcctgtttaaactacctaaccttggctgtgggccgataatgc

SEQ ID NO: 306633 - DNA, 122 bp, Homo sapiens
agaggagagataccagtattagggagctggactatctcagctttcatgtagcttcagcatcgccatcctatttgttttcactgtgtaagctgctttagatgatcttagtacagaataaatca

SEQ ID NO: 306634 - DNA, 122 bp, Homo sapiens
aagacacagtactcccctttctctaaggacagtctcaaaatcgaggacaaagacctaaagcgaccttaacagactgcctcctcccacacctgcccaggggttcttcccactctgatccttgc

SEQ ID NO: 306635 - DNA, 122 bp, Homo sapiens
gcctgctccgcggggcgtggagaccgggcccttcttcctgggggtgacgtgggcctgctccgcggggcgtggagaccggacactgcctcctgtgctgtcattccgtgctcccatggctttgt

SEQ ID NO: 306636 - DNA, 122 bp, Homo sapiens
cccctcggcccatttcccggttcgggcgtgcgctcctctgctgcgacccacggagtgcgacgggacagccacgttttcacatcgggccccgtgaaattgccgccaatggaaaggacttggtc

SEQ ID NO: 306637 - DNA, 122 bp, Homo sapiens
tgccgcccgccacccagctggctcagtgatgcagtcccagctgtagagggcagaggtccacgcccctcgcctcaggagacctggacacagaagcctcccaggctctagcagttacaggggta

SEQ ID NO: 306638 - DNA, 122 bp, Homo sapiens
acggccaccaaccgccgccaaagcagccgccgccagcacccccaccctacactcctcgcgcgtgcgcctcccacagtccccaccgcgggactgttccattcctggcggctgcaggggcagga

SEQ ID NO: 306639 - DNA, 122 bp, Homo sapiens
cagccttgagccacgcactcagcagcagactcgggccccgcccctccaggctccaggccccgccccaggccccacccccagctcactgatctccagctgcctctggatgcggcctttgcagc

SEQ ID NO: 306640 - DNA, 122 bp, Homo sapiens
ccttactactcccacttccggccagggaacagccacttccacccggaaaaggggttgttccgccgtggggcgccagctgtggcccacccatcctgccccgtactttcgccatcatagtattc

SEQ ID NO: 306641 - DNA, 122 bp, Homo sapiens
tgtcgcggtctccggagcaggctggccgactgagggcgaccatgggtcccaagaaggctccggcagtcgcgggctcccacctcggggcgcggcgacgggggcctagaggggccaacagcccc

SEQ ID NO: 306642 - DNA, 122 bp, Homo sapiens
gggcgcgggccggagtgggcggggcgagcaggcgcgactgaatcgggcgccgcaaagagccgcgcattccagtgagtccacgtgacgcggccgcgaggcctgaggtaaacaaccgcggcccc

SEQ ID NO: 306643 - DNA, 122 bp, Homo sapiens
gtcgggggtgggggtgtgttcctgcgtcttccagggggaccgcaccaggtcgtaggggtacgccaccaccagctcgccgccctgcaggttgccgcccagcacaaaagggattttttccatcc

SEQ ID NO: 306644 - DNA, 122 bp, Homo sapiens
ccactccaaccccagcagccccatccggatgtttgcttccttccacccttctgccagcaccgcagggacctctggggacagtggacccccagacaggtgagattctgtcttctattaccagt

SEQ ID NO: 306645 - DNA, 122 bp, Homo sapiens
ctcaccactgctgcacccccggggcttcctgcggccctcggccagcctgcctgaggaagccgaggccagtgagcgctccaccgaggccccagctccgcctgcatctcccgagggtgccgggc

SEQ ID NO: 306646 - DNA, 122 bp, Homo sapiens
cccaggatggggccccccgggggggtgggtgaacacccaggggccctcctaggcgtaggacgtgaccaccagttctcactctaggtccccttcactgaggggggaaggggcggggactggag

SEQ ID NO: 306647 - DNA, 122 bp, Homo sapiens
ccattcaggccatgcgggcagccacgtgcaaaggccctgagccaggagtatacctagtatcgagctaagaggccagtgtggctggagctgaataaacagtggggagtcgtagcagatgagat

SEQ ID NO: 306648 - DNA, 122 bp, Homo sapiens
gcagcaatgccccaggctgtttttagcccccaggggccagttagggtcccagtgcaagctcgacctagcttcttccgcctctccacgaggaggcgctcccgcgcacgcgcctaccacgttcc

SEQ ID NO: 306649 - DNA, 122 bp, Homo sapiens
cgcgcgcatccgcgaactccctggacactaacacgccgaagtcagcgtcctcgctgcagccgccccacttccagccttcgccaggcggccccttatgatgcgagtcacagccgcaaatggtg

SEQ ID NO: 306650 - DNA, 122 bp, Homo sapiens
caggtccactgtccacgcctcagtccggcagtcaggtccgctgtcaacgcctcagtccagcggtcaggtccacctgctgttgcgtggatgtcaggggctccctgatgggacgtggtgagaaa

SEQ ID NO: 306651 - DNA, 122 bp, Homo sapiens
tcacggctcttggtggtctggcccggcccggcttgcagtgaacagcgctgtccctccatccggtcgccctgcacgtggctcagcagattgaagaagccctcctggtctggggagcccgcctg

SEQ ID NO: 306652 - DNA, 122 bp, Homo sapiens
gcagctgaatgactacgtggacatcatctgtccgcactatgaagatcactctgtggcagacgctgccatggagcagtacatactgtacctggtggagcatgaggagtaccagctgtgccagc

SEQ ID NO: 306653 - DNA, 122 bp, Homo sapiens
agggaagcacagcagaacatcagctgctggacaccaagggagccacagctcgagggggttcgtgctccaacagcagatggagctacacccttcccgatgacgtcacatcctaataaagccct

SEQ ID NO: 306654 - DNA, 122 bp, Homo sapiens
gattcccactgagactgcagtctggccagtgagcagcaggggcactgtgggtctgtctcacggtctgcacagtggctattcatagctgtgccaacccctaaattccccagggctgggcagtg

SEQ ID NO: 306655 - DNA, 122 bp, Homo sapiens
cacgggttgtaacagtaggaaatctttcgctcttccccagggtgcccattctccttatcccgcaaagcaaagtcctctactcctgggtctagttccggccccctctagtgtatggtagctta

SEQ ID NO: 306656 - DNA, 122 bp, Homo sapiens
ttgtctccaaaaaaaaaaaaaaaaaaagcctacaaaaagcttacaaagtctaaaatcggacgaacaagaggacacctgatgggggaaaagaaaagagattgcgatgggaagagagtggtggg

SEQ ID NO: 306657 - DNA, 122 bp, Homo sapiens
gttttaagactctcttaaggaacagtggtgaggtgccaacgtcctcactgtccagcttcacggtgggtcctcgggaggaaggggatggaggtggtgctgcctcagtgctctgaccgggacac

SEQ ID NO: 306658 - DNA, 122 bp, Homo sapiens
actcagggcccagccaccaatagggtaatcagctgttattgtgagtctgagagtctctgtcgaaacagagagtgagccgcatcagggagggagggagaaatggatgaggtgatgcaaaagtg

SEQ ID NO: 306659 - DNA, 122 bp, Homo sapiens
gacaaacagccatggggccagtgggggtgcagggacacccacaccactaagggctcagggcggcgccttcagagcctgaaccttcctctcatgctgccatttgaacaccacaacaccctaat

SEQ ID NO: 306660 - DNA, 122 bp, Homo sapiens
ccctccctcacctgcggccttcggggcaactcgaccgcgcctgggcgcgccccacccgcccgatttccccacggcactccgcgcccccccagccagagccggtgtccctccctctccaagga

SEQ ID NO: 306661 - DNA, 122 bp, Homo sapiens
accccaccagcccgacctcaacccactcacgtccacagcacgagccccagcggccttgcgcggtgcttgctctctagtagcggctgactaggtaaatcctaagttgtggttttttttcctgc

SEQ ID NO: 306662 - DNA, 122 bp, Homo sapiens
caagtgtttttctgattggagttcagaaaactcacacaaatccacaggtcacaccacagccgtatttaagcagtaccctctccaaaagctcattcaaagtatttgtgcccacgttcaaaaca

SEQ ID NO: 306663 - DNA, 122 bp, Homo sapiens
gagaagggaaggcggagggccagaccccaggcgcagtccgtgcccttctctcccaaggggcgaggactccccgcccgccagcccgcacacactcagacacactgcaagagtgaaaacttcac

SEQ ID NO: 306664 - DNA, 122 bp, Homo sapiens
aatggaggtatggtggctttgatattatcttcttgtggtggagctgaattcacaagagatcgttgctgagctcctgccagaccccacctggaggccccagtcactcaggagagatcagggtc

SEQ ID NO: 306665 - DNA, 122 bp, Homo sapiens
tctccagacaaagagaccggtacttggcaggtccctcaagtgggactcaaaagaccgaaccgagctgcagcctttcgctagcactggtcctcgccccttttggcatcttggtacttgtagtt

SEQ ID NO: 306666 - DNA, 122 bp, Homo sapiens
caaacacttgagtgtcaacttggttcatgcccccaggcattgctatatactggattcatgcgccctccccgcaaggggcctctcttccagtgatccccatctcaacacatgatgcttccatc

SEQ ID NO: 306667 - DNA, 122 bp, Homo sapiens
ctcaggtgatctgcctgcctcagactcccaaaatgctgggattacaggcgtgagccaccgcgcccagccacccatgccctctactaaacagctcttggagatggtagaattacggtgctgga

SEQ ID NO: 306668 - DNA, 122 bp, Homo sapiens
gtataatactattagaaggggtggcattttgttctgtttcttagcagcattgtctacatgcggcctgacggtctccttccctgggaaatttaaaaagccgtcccctggttgttagctctgat

SEQ ID NO: 306669 - DNA, 122 bp, Homo sapiens
tagccgtagagggtgagtcggtggcaggtcctgacggccggcgggtccttgggaggtggtcgccgtctttcatccttgctctccctgtctctggcttccgcgggggcgcgtagggggaggcc

SEQ ID NO: 306670 - DNA, 122 bp, Homo sapiens
ctcaccctgaagttgttgatcaggtcttcttccaactcgtcttattccttctttcttaagcgccacgggcggctgcgtctcctctttcttgtcaaccacgccaacgctgcggggcagcgggt

SEQ ID NO: 306671 - DNA, 122 bp, Homo sapiens
ccccactccagaaagctgcgtgtctaatgcccggctctttcttttccatcctttggagcccgcctggcatcagggataaccagccaggaccctctaactgccccagagttcagtcccgccca

SEQ ID NO: 306672 - DNA, 122 bp, Homo sapiens
cacactcttggatgcccacactctcgggcgcccacactctcgggcgcccacactcttggacgtccacattctcggacacccacattctcggatgcccacattctcagacgtcatctctgagc

SEQ ID NO: 306673 - DNA, 122 bp, Homo sapiens
catccttcagtcaagttgacactcagtactaaccatcacagtatccgtggctcatggccacgaagaggaaagggtattccatctaggttaatgaattaagtcttaagacagtgtggtttaat

SEQ ID NO: 306674 - DNA, 122 bp, Homo sapiens
aatatagtcaataaagtcaaagtttagctggctctacgtaactacaaagaaaaaaatcatcgcaatttaaaaaaatgtaactttcattaacgagcgcgccggaaatctcaggtatcaaagac

SEQ ID NO: 306675 - DNA, 122 bp, Homo sapiens
tcctccagacccaaccctcaagttccacccactagcctccccgccccggctttaggaccgcgggaactgttcctgcagcagcctggctttgtgaagagcagacagtagggcccggagtctcc

SEQ ID NO: 306676 - DNA, 122 bp, Homo sapiens
cgcgcgatcgatcccagggctctgttcacgtaactgatttcaaaagtcccgcaaaaatgacgttccacccacccagagacccaacctctaatcctcaaaagtaggacggctcaactgaagac

SEQ ID NO: 306677 - DNA, 122 bp, Homo sapiens
aagttttctgacaggaaaccggtcagttcttgtgtctctcagctctggttcccacggccccggcggcagctgcgcccccgacgcccctctcggagccccgcaggggcgcagagcactgtggg

SEQ ID NO: 306678 - DNA, 122 bp, Homo sapiens
ctagtttgagagctcccagtttcaagtcattgaaactattccagactgagctcgtctacgcgttgcagggtttggggggcattttgttgggggtgcagggcatttagttttctttaccacga

SEQ ID NO: 306679 - DNA, 122 bp, Homo sapiens
ccccagcagttcagccggggactcccggaggccggtgcccgcccgacgccgcgtctggcacggtcgcccactcaccgctaccctcgcgccgccctggcccaccaggcggcgccccctcccca

SEQ ID NO: 306680 - DNA, 122 bp, Homo sapiens
cttgttttctgtttttcaagctttccacataatgttgctgtattattttcactagaaaaacgtgggctaaaaaagaaattctgggctgggagcagtggttcacgcctgtaatcctagcattt

SEQ ID NO: 306681 - DNA, 122 bp, Homo sapiens
ttcctgcagctattcctctcctctagcaatagtcgaatggctctggtttcctcttgcgcccggcccagtttttccgttttagcttcggttgtcataggctgtgctgtcgctttctctgggaa

SEQ ID NO: 306682 - DNA, 122 bp, Homo sapiens
cacagcacaggacacacactgaggtggctgcaggccagtttctgcaggataagaaactgacgcccaggtggagggtgggctggggagcatggaggggcctggggccaggccccctgagcctg

SEQ ID NO: 306683 - DNA, 122 bp, Homo sapiens
ggtccataacactgtctgcaggtacaaacatacatttacatacttgctttacttctatgacggattcacaggcattcagaatttataactaaactgaacatagcacaggtgagcattcaaac

SEQ ID NO: 306684 - DNA, 122 bp, Homo sapiens
aattgctaaacatttgaatgttcccaaaaatgtgagtctgtgtgtctctgtgtgtctctacgtgttattccactagggatttgcacagataggttttgcacaatatccttgctgttattgtc

SEQ ID NO: 306685 - DNA, 122 bp, Homo sapiens
aagcagcatcatgatttccaaaaagggagtgacatttgatttggggcagctcttgtcatgcgccatctccaacttagaaaatccaccctgtacagcccggcccgcgtcagggacccttgcag

SEQ ID NO: 306686 - DNA, 122 bp, Homo sapiens
ttctgcagggagtcgaggaagggctggaccttgtagagcccgtgcgtggtctggctggagcggaaggccacgacgtggaagtacttgaggatcttctcgaagcgggcctggctcatgacgag

SEQ ID NO: 306687 - DNA, 122 bp, Homo sapiens
aggaagaaagggagagagggccaggcagtcgcactgtgaacagaacaggagaaggcgaagcggggcaaagttccctgcccaccgacgccagcctgcttggatgacttgcctcgtttcataat

SEQ ID NO: 306688 - DNA, 122 bp, Homo sapiens
gcctgtcgctccgctctgcgccgctaattggtctcgtcaggcggccggcaggagcagatccgagccgtgtcatcctcttagcgccctcacgccacccgccgctcccgccccgtgccccctcc

SEQ ID NO: 306689 - DNA, 122 bp, Homo sapiens
agcctggacaatatagcaagaccccatctccgcaaaagctaaaaagttagccaggtgtggcggcacatgcctgtagtcccagctactcaggaggctgacgtgggaggatcacttgagaccag

SEQ ID NO: 306690 - DNA, 122 bp, Homo sapiens
gtcgccagcgttgaggttccccatgagcagcgtgatgagtacgttcagctggctaatctgcgggggagagtgccttcgatgagacaccacgggtgcccacatgcactggggggtcttgtggc

SEQ ID NO: 306691 - DNA, 122 bp, Homo sapiens
acgtaaggaaagcccagtctgagaccccaaccccctccaccccatcccccactcctataccggtcctccattttggtgcctgcaaagctctgggaaagaatcccgggaaacgaaaaatggtg

SEQ ID NO: 306692 - DNA, 122 bp, Homo sapiens
atttaccccatcacactgactggaaatctgctcatcatcttggccatctgtgctgacattcgccttcacaaccccatgtattttctccttgccaacctctccttggttgacatcatcttctc

SEQ ID NO: 306693 - DNA, 122 bp, Homo sapiens
tgagctgatagaagctcgagttgcatatcctaggggattccagggatttatattttggtgcgtatttataactgggttgtctggtgggtgtgtgtttgactgggttgtcagtgtaaaattaa

SEQ ID NO: 306694 - DNA, 122 bp, Homo sapiens
gtctcagctatgtggactgttcaatgggagcaatagcactcacttcacagggtgattgggcggtcattattgcccttgagcctgagcaagccccgtgtttcaggggccccatgctttccagt

SEQ ID NO: 306695 - DNA, 122 bp, Homo sapiens
gtttgtgttctttacatgtcccttgctttctcagaacgtgtacttgacccggagcatctacgttgccatggaactcctttactttagctgttaggcagcaacgtttgaatagttcccctttc

SEQ ID NO: 306696 - DNA, 122 bp, Homo sapiens
tatccctttatatttcctccccatttcccttgttacagagcaatagcaccacctgacccccgttacagagcaatagcaccacctgaccccctcaaatgcagctgctctctttcagctgtcca

SEQ ID NO: 306697 - DNA, 122 bp, Homo sapiens
ctcggcggcggcgacagcctgggcggacagtgcgccgtgcgcaggcgcggagctagacctcgctgcagcccccatcgcctcggggagtctcacccaccgagtccgcccgctggcccgtcagt

SEQ ID NO: 306698 - DNA, 122 bp, Homo sapiens
tgcgtccagccctcggacctgccacgtcccagggccccactgccaggcaccgccccgtgccggccctgtacaggccacatctgctgcagcagccatgccagagctccgcctcccgggctccg

SEQ ID NO: 306699 - DNA, 122 bp, Homo sapiens
gcacctggcagcccctaatccaaggccgcctgccctgtgcaggaaatggtcgctgctgggcgtccttgcagccacttcagccaggccttcctttgcttctaattaacactgagcaggctcca

SEQ ID NO: 306700 - DNA, 122 bp, Homo sapiens
ggccctgtctgtgacctttgctgggacaagaagtattatcaggaatatttctgtatttcccgacttggcgggctgcataaatctcctatcaacttgggcaggcggcgaaatctgccgtggcc

SEQ ID NO: 306701 - DNA, 122 bp, Homo sapiens
gggcgcccagcaccaggggttcgctgacagctgcagggtttccggccatgcgcccgcggacgtgcagcttctgtgtcggtcccattaagaggaacctggcctgggcgacgtttgaggaccac

SEQ ID NO: 306702 - DNA, 122 bp, Homo sapiens
agcttcttaggttgtgtttttttttgttttgttttgttttggaaggattccactgaaaaacgtaagtttgaaacttagtgagctggatgatcaatcccttctagctctgaaccctggacact

SEQ ID NO: 306703 - DNA, 122 bp, Homo sapiens
cgcagaggccctgctggcacggccggaggtgcagggtgtgaagctgctgttcctagtgggcggcttcgccgagtcagcggtgctgcagcacgcggtgcaggcggcgctgggcgcccgcggtc

SEQ ID NO: 306704 - DNA, 122 bp, Homo sapiens
cgggccagcataaagatatgacctgcaaaggttgcgtttatctccagggaggtcctcccccgacctcagtggatgggcctgggagtgccacagtggcatgtaagcagtttctccacaggcac

SEQ ID NO: 306705 - DNA, 122 bp, Homo sapiens
tcaagtaatagcttgaccttggattagttgctttatctcaattttatttctgcaaagtagcgtgaggatccctatcctgctcacctcacaagttgtgaagttcattaggtttattgttgcaa

SEQ ID NO: 306706 - DNA, 122 bp, Homo sapiens
agaagcgcacagagctcacctgttgagtaaccgcgccacttcctggtccctaccacaggccggccagggaagccggggctccccgccagaacactgcctcgccttcatcacagcaccagttg

SEQ ID NO: 306707 - DNA, 122 bp, Homo sapiens
atttccatatctgcatttaatccatcaggaacaagacaatttgcaacaatttgcaaagaacgatctgcaggctttgactgtataggaaaagaagtgtagactagaccagaaaagacacaatt

SEQ ID NO: 306708 - DNA, 122 bp, Homo sapiens
ctgggagctgccgggggctgaggagtcccagttgttttctgtcctctcccaggacctggccgtgggtgccactcagagcacctgttgagtgccaccccaagccagctttctcttgcttttgt

SEQ ID NO: 306709 - DNA, 122 bp, Homo sapiens
cgagaagtgcacattccctccacccggcatcgtcatcatcgtgttgatctccttctggagcgtccacagcgctcccgacaatgcgagtcttccccaaatggcatctctttcataaagcgaga

SEQ ID NO: 306710 - DNA, 122 bp, Homo sapiens
ggcgacagagggaaaaagggccgagctagccgctccagtgctgtacaggagccgaagggacgcaccacgccagccccagcccggctccagcgacagccaacgcctcttgcagcgcggcggct

SEQ ID NO: 306711 - DNA, 122 bp, Homo sapiens
gctccgcggcagaggctgacgggccgcgggaggggcggggccgcgggaggggcggggccgcgggatcggttctaggagattttaggggcagtcactcgattcctctgcggtccaggccaggc

SEQ ID NO: 306712 - DNA, 122 bp, Homo sapiens
tttctcgagcaccagaggccatgttgtaaaggttggcagaagatcaggataggaccacagcgtgtacactgtacaaaaagagatccagaaaacactactaccaaaaagccaatcttctagag

SEQ ID NO: 306713 - DNA, 122 bp, Homo sapiens
agtcagttacataaacattccacctctttccataaattggccgcagttactgaacaatagcgttactgtgcaggggaagagggagctcaaggccacaccccacaagtgctggtcccccagcc

SEQ ID NO: 306714 - DNA, 122 bp, Homo sapiens
ttgtcccactaggacaccgaggtgatcgtctccgcagtgtcataaggaacagtgaggcctcgtgggcttgtgcccctcacgcactctccggtttgaaattggggtcggccctcattctaatg

SEQ ID NO: 306715 - DNA, 122 bp, Homo sapiens
accctctgcctggaagtcttggtcctggctattcaggtcgtctgacaggtctgccccacccgtttccagggcgggaaagtctgcccatcaccgattaaagtgagatgctgggaatgggggaa

SEQ ID NO: 306716 - DNA, 122 bp, Homo sapiens
ctctctcccccctcagctcctgtttccttactcattaagtggggggtcattcctgctggacgcctgtctagggtccttgtttgggggcggtcaaaggagatcagagagcacagacgggaatg

SEQ ID NO: 306717 - DNA, 122 bp, Homo sapiens
gcttgaaaatttccataagaaaggtttatagttaagtattaccatagaaataaaccaagtcgtactacgggaattaagttaatggcatggaaacatcactgtaaaatgaagaagaggcagaa

SEQ ID NO: 306718 - DNA, 122 bp, Homo sapiens
ttgggccgggcctggggtcaagggcagggttacggccccctagggagactccgcccctggcggaccccgccccacccctccacatgagacggcgcgcgcaggctcagttcctcggcgtagca

SEQ ID NO: 306719 - DNA, 122 bp, Homo sapiens
ccctgagaatgcccgccccggggtgccacatggccaggtgccagggctgccagctccttccggaagctctgcctgcttggccagcttgccctcccacagcgctgacgacttagagctgccat

SEQ ID NO: 306720 - DNA, 122 bp, Homo sapiens
tcctgcctaggagtgtcccaaggttttccttgttaaaattggtctggctggctgctgtgacgcgccacactgtcctgacggtgcacacactgctgtgtggaggaacagaggagtccagctgg

SEQ ID NO: 306721 - DNA, 122 bp, Homo sapiens
taaacttgaagcgactcatgactgcgcatggaggacctccccagcggaagcggaagtggccgccggcaactccgcccttccggctggccccgctcagtcacccgcagcaggcgtgcagtttc

SEQ ID NO: 306722 - DNA, 122 bp, Homo sapiens
cttcgtggttctttcgatccacgcgtgagccaccgaccctccgggcttgtagctttgtgtcgggctgtgagctgcggcaaagaccccatagttaaccgggaagtcctgatttccttaactac

SEQ ID NO: 306723 - DNA, 122 bp, Homo sapiens
gtgtgtcaaaatattcattcctatcacatgcagtaaaactgtattccagagccattaatacgccctgggggactgaggggatttgcagcctaagatttcagacttaaagcccgctaaggccc

SEQ ID NO: 306724 - DNA, 122 bp, Homo sapiens
tcctaccccgcccccgcttccaactccttgcgctaagttcccgcacctcgccccaccccccgctttgactccggtcctgccagccccgacctccatcccaaggccgagggccccctctgctg

SEQ ID NO: 306725 - DNA, 122 bp, Homo sapiens
agagcagtagccatagaaagactgcgtgagacagagtcctagcctatctgtccggccagtcgaacctcatgtgttcgctgctttcattttcccttggctgaggaaacgatggtttggttttg

SEQ ID NO: 306726 - DNA, 122 bp, Homo sapiens
caacccatatggtcatcggggcctccaggactcgggtctccttgtcaaaatacctccctgcgtcctccgggagggagtgtctgaaagaggcagacaaggcgaatgtgctttcctctttccat

SEQ ID NO: 306727 - DNA, 122 bp, Homo sapiens
tggctcagggccggcagcctgcaggcggcacggtcactggacaccccgtggttagttgcccggccaggaccaggccccccagcacgccaggagctgctgttttggaattggatgtggttccc

SEQ ID NO: 306728 - DNA, 122 bp, Homo sapiens
gccgcgctgtgccgggcggaccctacccgttcattggcgggaggctggagtccgcctctgcggagcttcccactcaatcagttgtgcgggtcgtgttgctacagcgaggaccggcctattct

SEQ ID NO: 306729 - DNA, 122 bp, Homo sapiens
aaatagatccttgttaaatctctcccagcatccctctcatctccatcatcttctgcaacgcggtgtctggcctaacatcctcctccgagagcaccatcctcggacctcgttaggaggcattc

SEQ ID NO: 306730 - DNA, 122 bp, Homo sapiens
agctggagcaagtccccataatagagagagctgagaaagaggagagggaaaaaaggagagcgaacgagagcaggcagcggccagagactgcagctaccttagagagccgctctgaggagagc

SEQ ID NO: 306731 - DNA, 122 bp, Homo sapiens
gtggccggaaccggcagggagctgagtgcgaggagacccgggacaccgctgcactggccccgcacgcgcgtctcagtggcgggtgtgctcctgcggtgttgggacgcatggagcccgtgctg

SEQ ID NO: 306732 - DNA, 122 bp, Homo sapiens
gtctctctcactcctggggtcggctctggccggtggcctccagctcagctagcggccggacgcgcagcccgccgactagccctccaggtcctagcgcgactcccggatcccggatccggcgg

SEQ ID NO: 306733 - DNA, 122 bp, Homo sapiens
tcattgctctgcagcacatcagggatgaggtcctgtggggccagcagggccccctctttccgtagggtgagcctgggcagcagcccgcaggtctggtagtagcgctgggccgcctgctcggc

SEQ ID NO: 306734 - DNA, 122 bp, Homo sapiens
atgaaggtttccccgcaaaatcaaaaggcttactgtcaagttttcgattggtctgggcttcgtgctatcgtgtgtggtgtgggaaggaatatgaatgtggtgccggctctaccatggggcct

SEQ ID NO: 306735 - DNA, 122 bp, Homo sapiens
ggggctgagagttcacagcgtgcactgtgaggtcacggttagagacaggaagccagtacccgctgctgttttctaggaggaggaaatgccaacgcctcctagagagaggtatcctcaccttc

SEQ ID NO: 306736 - DNA, 122 bp, Homo sapiens
gacgccaggttcccggtttcttctaggtcgccctggttcctggcagctcctggtgccacgcggtcctctacggtctcctctgacctgagagggacagtgagatggggctggcggggatgggg

SEQ ID NO: 306737 - DNA, 122 bp, Homo sapiens
gatctcctcgtcgtcgtccgggaagctcacctggcggtagggccttggcatcggctgtcccgtaggagaggagacattattttacagcagcggccaaaaaacaaacaaacaaaaaaacaccc

SEQ ID NO: 306738 - DNA, 122 bp, Homo sapiens
gctctccgggcgcatgcgcaccggggtggggcgtacgtagagatgcgcgggaaggagcgccgtggaagcgctccagtctggagccctccagcgcaggcgcacagcggcgcgctgctctcctc

SEQ ID NO: 306739 - DNA, 122 bp, Homo sapiens
cacctcttcccacactctgccaacacactagggcaagctaccatcattttccacctgaaccgctacagtcaccttctaagtgtttgtctgcctccattcctggcccctccaatctcttttcc

SEQ ID NO: 306740 - DNA, 122 bp, Homo sapiens
gtcggggtcaggggctacatcttcatgcggaattcctgacagcccctcggagctcctcaccgaggctcaggagcacggctctgatttctcagacaggcacatgcctgggtgccagcttttaa

SEQ ID NO: 306741 - DNA, 122 bp, Homo sapiens
aaaatcagcctggcgtggtggcagatccctgtaatgccagctacttgggaggctgaggcacgagaatcactccagcctgggcgacagagagagactctgtctcacaaaaataaaagtaaaat

SEQ ID NO: 306742 - DNA, 122 bp, Homo sapiens
tgagccatcatgcccagcctcaatatttttttaaagagatgtttgtttcccaaacttccacgcaagactctggagctacaggccactctgcagatggcatgcttgctgagtggctgtgtctg

SEQ ID NO: 306743 - DNA, 122 bp, Homo sapiens
gagggcgcctggagcggctggagcaggtgagccaagcctgctgggtggggcgaggccagacgtcactgtcaataccctgaggcatctcttcctttctagtgggccggtcaggctggggcctg

SEQ ID NO: 306744 - DNA, 122 bp, Homo sapiens
aaccaggccacagacctgggtgtcttcctagatgtgtaccatttatcttcactctgcccccgcttacagcctccaagtcttttgcattcgaccacgtggaattcctctttctcagttccttg

SEQ ID NO: 306745 - DNA, 122 bp, Homo sapiens
aggggttggagcccatgcctctaaagtcaccctgctgtttggaaaggatgagggagaagacggaagggaggacaagctgcagagggtaaggattgacagaagaaccgaatgctgacatcgag

SEQ ID NO: 306746 - DNA, 122 bp, Homo sapiens
gctgcctgctgcgaccaggggcacaggatagagctgcatctcggtccccaccccgactctcgccccaaccctgagaaccacttcaaggtagagccagggcaagtgacttctctctcggcctc

SEQ ID NO: 306747 - DNA, 122 bp, Homo sapiens
ttctacagctcgggaaacatcctcccctcggttaccccagtattgcccaagtggaggtgtcgccgggcccaaatagggcccagtgggtggctcccccgtcgccagccccggctgtagatgca

SEQ ID NO: 306748 - DNA, 122 bp, Homo sapiens
tgtcatcaaatctccctctgtaagggttggtcactgttgtggcttctctcgatgtgaggtcggactcaccttccatatcaaaagtggacaaaatcacactcacactctcttgttcacacata

SEQ ID NO: 306749 - DNA, 122 bp, Homo sapiens
ccctctacgggggcactggcgcggaaactggccctgtgtcgaagaaggaacgtactttggcgttcttatgagctgcctagtacaaattattggcagaaacaatgaattaaacattcaaaaag

SEQ ID NO: 306750 - DNA, 122 bp, Homo sapiens
gtcacagcctgaacccaggcaagaggcgcctgagtgggaacaaccccttcctggggaccccgcgggctccccaagggacacttcagacccggaagggaggggcagcgcccagagcgccctct

SEQ ID NO: 306751 - DNA, 122 bp, Homo sapiens
tgatgttgatgagcagctcctgctgcagaaactgctccaggatgtacttgggggccatgtcgaccagggactggaagagagcggctctaaggcacggcccggaggggcccagacaaccccaa

SEQ ID NO: 306752 - DNA, 122 bp, Homo sapiens
tcccagagctctcagggctgcagctttcatctagcctggagtctctccttagtgacaaatcggctggccaatggcttcagaagcctcacactgtctcacgctcagagaccaatcacggggtg

SEQ ID NO: 306753 - DNA, 122 bp, Homo sapiens
ctggaagtagctgcggggcgcagtgcaggcaggaaaagggctggatgccgggtcaccgcccggccccagctcctggcccgtccccgctcccggtccattcccgccccggccccgccccctcc

SEQ ID NO: 306754 - DNA, 122 bp, Homo sapiens
ccaggaggctcagcgaagctccaaaaccaattttacggactgtactactgatccacctgtcggggagaaagactctacccgcagtttgacgaaaatggtcgtttccagatgcttgtaggatt

SEQ ID NO: 306755 - DNA, 122 bp, Homo sapiens
acaacactgtacaacactgaaaccaacctatctttctttaatgagtaagttgagatgggccgtacatatgtaaagatggcgctgccataaaagagaaagacaatggccaggtgggaggcaca

SEQ ID NO: 306756 - DNA, 122 bp, Homo sapiens
ccagggctgagtaatgagcgctggacgcctgtgtctggcgggtgggcagcgatgccggagcgatccctgagtcggcctcttgtgctccttcatcagggcgcagacttgtcccacgtgttctg

SEQ ID NO: 306757 - DNA, 122 bp, Homo sapiens
agcaaaactaaggctaagtggaaatgactattcttcctttccccggaagtggggttgttgcgagttcctaaaccaccacctgattcttctgcttccacttcatctcacgcactcgccaggag

SEQ ID NO: 306758 - DNA, 122 bp, Homo sapiens
gaggtcagcttgactcaatgggctaaataggtgtgggactgttcacttgaggagctgaaccgaataaccaggagtaataccagcatacactatctttttggtaataaagctgatgtttaact

SEQ ID NO: 306759 - DNA, 122 bp, Homo sapiens
gcaatacgtggtaagaaaccagctgtgaggggctggcccaacgcagagcggcgcgaggtccgcttggcatctacaacaatcgaggggctagtccagaagttcaaggcggggttacaggttgg

SEQ ID NO: 306760 - DNA, 122 bp, Homo sapiens
gtgagaaggcacgcttaccttctagatttctcacactcctccagagttgcattctgcttccgtaactgtcctagaacagcatttcctgtatgaagatacacaggtttggccagagactgaac

SEQ ID NO: 306761 - DNA, 122 bp, Homo sapiens
ccctggattcggtggacagaccagctttacctccagagactccccctgtcttccctgcaccggctgactatacctacacacttcggtggcacaatctttgtttagatatgctgatgccttcc

SEQ ID NO: 306762 - DNA, 122 bp, Homo sapiens
ccccgccactgcccaggaacaaagctgtctggagcctccccaggggcaagctggcctcagcgctgggattccccggctaagagcgcggggctggggaggagctggggcgggggcgggcctag

SEQ ID NO: 306763 - DNA, 122 bp, Homo sapiens
cgtgaagattggtgtcggctcctgcgttccgccaagttcaggaacctggcatgggccggccgcctcccgcgaagggacacacctgttggtcaccgcgctcttactggccagacccggatatt

SEQ ID NO: 306764 - DNA, 122 bp, Homo sapiens
ccagtcacctcatctcctagccccgtgccctctccttctgtgtgcactgaccaggccaggcgggtgcccagcacttaccagcctgtgtggactttctccgcgccttcttgatgtcctcctct

SEQ ID NO: 306765 - DNA, 122 bp, Homo sapiens
caccatgaatgctataaggtgtgtggtattttctacatctgaacattattacaaattctccgacttaataacatctctttatccctaggtgttcccttaatttgtcaccagcaccgaaacta

SEQ ID NO: 306766 - DNA, 122 bp, Homo sapiens
taatggatggagggagtggagatgcagacttgggagagacggaagaatgaatgacacagacggggtaatctgagcagcaggaaaagaatccagagtgcctcttaaggccctgccaattcatg

SEQ ID NO: 306767 - DNA, 122 bp, Homo sapiens
agcagggacccgggggagcctctggtcgcacccgagacagttcgttaaatactcagtgcacgtgctggggatggaagtgctgacccactgctcaggtacgcgcgcacctgacgccgcttggt

SEQ ID NO: 306768 - DNA, 122 bp, Homo sapiens
tttctttcaggctccttcacatttgatctctgtgcaatttgataagaggagggaatgggccgtcaattatgaagagactgaaaacctgaaaatactgagtatggtcttagttccctctccaa

SEQ ID NO: 306769 - DNA, 122 bp, Homo sapiens
tagaatagacagcatcagcactgtgataactgagccagggcagcctgtcagtcactgtgtcggtcaacggcatcctttctggtggctgcattactctctctgaaggctccccatgaagtgaa

SEQ ID NO: 306770 - DNA, 122 bp, Homo sapiens
attccatgaatacatatttctgtctgttttgttctcttctgtattcccagcatctataaccgtgactggcataaagtaggtgctcaataatttttaaatgagtaagtgaaaggactttttat

SEQ ID NO: 306771 - DNA, 122 bp, Homo sapiens
ggggatgccagaggggccatgccagccccggcggggagtcacatttcattttcctctctgcggcacttcccacaattaaacccgggtgcctgtgctgatgacctgacccagccttggggaac

SEQ ID NO: 306772 - DNA, 122 bp, Homo sapiens
cccacacacactctttaatccaaacaacatctgggaacttcagcctctatcatgtaaaagcgaaacagatttagagggagagcaggagaaagtacagttccagtcgcactgaacaacaaacg

SEQ ID NO: 306773 - DNA, 122 bp, Homo sapiens
tctgcagcgagcactttttaaagtcacgcacgtaatgcattttaaagagcatctgctgtacggctccatttgctcgacctcggcactaagtgtgagatggaatggcatctcagtgcagtccc

SEQ ID NO: 306774 - DNA, 122 bp, Homo sapiens
tgagcttatcaaacagagattttctttgtcccactgcaccaccagtgtagtggatttgaacgagctggctgcaagtatgatgaatagaaagggtctcaaccctttggaatgccccaaactga

SEQ ID NO: 306775 - DNA, 122 bp, Homo sapiens
aggggccaccgcgcgggcggggcttggacgcgggggtggggacactgggtcttggccggacgccgcccacccccagccgggggactccggaggccgggcaggcactggggcgcaaaggccgc

SEQ ID NO: 306776 - DNA, 122 bp, Homo sapiens
accttcaccaaccactttctgccttctgactaaatacaaggtggtattgtttgtgtcctccgctcccattttttaaaggtttctcccatcaacctcctctatcccctgtcttctctttaaca

SEQ ID NO: 306777 - DNA, 122 bp, Homo sapiens
ggaccctgtcccaggacgcaggattggcgctgagctcgggatctctgtgtgcacctgcatcgctggtaggaggacgcccaggaaccaaggagtgaggcaggagcagcccccggcatcatcac

SEQ ID NO: 306778 - DNA, 122 bp, Homo sapiens
acgttcccctttctggcacgaagcctctgcccccaaacgaaaaagcaacagaccacagcccggcgggccctggaagataaacacagggtcagccctccccacagtcccaggccggtgacgct

SEQ ID NO: 306779 - DNA, 122 bp, Homo sapiens
agttttatgaatcatagtactgagtcattaccacagggatgcaccctaattctcaaaagccgaggtctcaggactgatctgattctggcatgattaaaatagaaagagccttcttttgccaa

SEQ ID NO: 306780 - DNA, 122 bp, Homo sapiens
ctgtttgctttttttcagacaaatgtgcaaactgataacaagaccatctgcttcttcatccgtagatataaaagatgcctacacatgcagcgaactaatcattttcctccctctaactgctt

SEQ ID NO: 306781 - DNA, 122 bp, Homo sapiens
tattcctaaaatgaagccagttaaaaagtaaacgatgtacaccagtgaagtatattgtcacgctgacttttgcataaaaagatggcctgctgtttttggagtgatgaatgagcactgcagga

SEQ ID NO: 306782 - DNA, 122 bp, Homo sapiens
agcgaatggtgcttgggtccctgggatccagggaacctcagggcggtgctcgcctctgcccggcagcgagagagggacccggtgcgggcccgatgacagggtcgaccgctgggggtcaggat

SEQ ID NO: 306783 - DNA, 122 bp, Homo sapiens
agctgcatggcaaagtcctgcacatgctccttcagagtctggcgggcatctgcctgtgcccgcttctcccgtgcccgctcctgctgcagcttggtcagtctcaaccgcagccgctgctcccg

SEQ ID NO: 306784 - DNA, 122 bp, Homo sapiens
ctattgcctattacaatacataattgtgctttcatggccaatagttccaatggcctaggtcgcaatttaggctgaccctagaaaatgtcccttgttactgaacaccactttctgaggagtag

SEQ ID NO: 306785 - DNA, 122 bp, Homo sapiens
cctaggagaagagggcgaggaaatttgttctaacaagatgaagccgagaaatgaggctagcgtaagagtcaccaggcactctgacccaatcaagatatattaagcatctgggtgtacagcga

SEQ ID NO: 306786 - DNA, 122 bp, Homo sapiens
atgaggaatcctcttcctttggtctaaattttgcatatcgtctgtttcttacagggcttccgtattgtctcaggctccactggaaatgcagcaaggattcctagcacatcccagttgccata

SEQ ID NO: 306787 - DNA, 122 bp, Homo sapiens
tctgtgggcctgtcacgtgtggacctgtcacgtgaggacctgtcacgtgtggatctgtcacgtatggactctcacgtgtggacctgtcatacatgcaccagtcacgtgtggacctgtcacgt

SEQ ID NO: 306788 - DNA, 122 bp, Homo sapiens
attgtctttgactttgaggggatggtagccagagcagaaagcaaagctgattttcatccccgtctggtaatgtggttggtaatgtgaagatgggtgtattctgagataccggctccttgcag

SEQ ID NO: 306789 - DNA, 122 bp, Homo sapiens
ccagtcttcaagggtttctccgttacgctttgcaaggaatgagaccatgggctgcacggccgcccagccaaatcctccaaactgaaaggccttttgggggagagggggagggaaggcggcta

SEQ ID NO: 306790 - DNA, 122 bp, Homo sapiens
cagacacagcagcgcgtgcgcgctcagcgggcagagctttgtgccccgggcctcctgggacgaggctgcaaaccttcagatcccagcacagaccccccggcttccctctgcccgcaaacttc

SEQ ID NO: 306791 - DNA, 122 bp, Homo sapiens
gccgcccgcctccgagttcttgcgcaatttgccgccgccgcccccgggcttggcccgctccgacacggtcttcaggttcagggggaactccttgaaccacttggccgccatgagggggcccc

SEQ ID NO: 306792 - DNA, 122 bp, Homo sapiens
agacgggttgggtgggtaccccacactgccgctgacgccttgcgctcactccgccattcgcgtgcgtggctgagagacccccggccccactgcgtgacccacccatgtcgcactggggacag

SEQ ID NO: 306793 - DNA, 122 bp, Homo sapiens
tatcttgatcccaccagggattgaggtgattcgcagctgaattgcagtgtctgtgaggaacggtctatttctatacacatttactcccatgctatatagcctttcagggtctcaatccgaag

SEQ ID NO: 306794 - DNA, 122 bp, Homo sapiens
gctggagaggtggagcccaggtcccctctaacaccccttctcctggccaggttggagtcccgccacaggccaccagagcggagcagcgcagcgccctgtctcccagcctgaggtgcagtgct

SEQ ID NO: 306795 - DNA, 122 bp, Homo sapiens
gcgcgcgggaccggaggcgcacaccggaggggaggtgcccccaccaaaatttaagtgcggcgcaacatgcaccacaggtaggggcactaccagggcaaaaagacttggtgaatgcgagggcc

SEQ ID NO: 306796 - DNA, 122 bp, Homo sapiens
tatttgggaggctgaagcaggagaatggcgggaacctgggaggcagagcttgcagtgagccgagatggcgccactgcactccagactaggcgactgagcgagactctgtctcaaaaaaaaaa

SEQ ID NO: 306797 - DNA, 122 bp, Homo sapiens
tccggctccacgtaacgatgcgattgggctgtacctctgtctgtctcctgcgcgatgtcccgccccgggaggtgtcacggaactcagctgatataagcccgggatcccgccgggtcaggttc

SEQ ID NO: 306798 - DNA, 122 bp, Homo sapiens
agcaccatctagtgataaacaggcacacagcggggagggaaagccggggagtggggagggcggataagagaaggaaatgccaactttaattatattatgagccggcaaggaattaggtcaaa

SEQ ID NO: 306799 - DNA, 122 bp, Homo sapiens
tggagaagattctatgtgcattcgaaaatgtactgacagggaactgcacacaccacacaccgttctctccccacccccaaagaaaaatcaggcagctactgcaccaatcctggccttcagcc

SEQ ID NO: 306800 - DNA, 122 bp, Homo sapiens
gagaggaaagatttacacgcagttctcaactttacgtgacgtgactagggagggaattgacggtcgcaccgtctacctagcccaaacggggtcacagcaggacaaggaagtagccgatctcc

SEQ ID NO: 306801 - DNA, 122 bp, Homo sapiens
agtgaaaaagctctttggtgttccaggaacagcagggttcctcccaaatcactttgccagcgttagttctcacactgttccttccctgagtggtccctgcaaatggaatcattctctgtgcc

SEQ ID NO: 306802 - DNA, 122 bp, Homo sapiens
cccggcctccggaggggagtgtcctgcgggtccgggagggagtcggcgacaggggatccccgagagggggtgtgggggcctgggaaccggtccctgagcccgccgggcagcggcggcggcgt

SEQ ID NO: 306803 - DNA, 122 bp, Homo sapiens
tggagagactgtgcactcgtgtgtgcgtgagagatctttattgagcaacttctgtgttctcgacaccacttacacactttaattaattaatttatttttatttattattttttttttgagac

SEQ ID NO: 306804 - DNA, 122 bp, Homo sapiens
ctccagggttcaagcaattctcctgactcagcctctcgagtagctggtactaccagtacccgccacgaagcccagctaatttttgtatttttggcagaaacagggtttcaccatgttggcca

SEQ ID NO: 306805 - DNA, 122 bp, Homo sapiens
tggaggtcgtaggggctggagggccaggcccactgcgcttcgcagcgccgcaccagcccgcgccttccagctgccagatccagggaccctcccgtcactctcctgagccccgccagacctgc

SEQ ID NO: 306806 - DNA, 122 bp, Homo sapiens
caaagactcctctgggcctggggtgcatcctcctcagcccccaggccaggtgaggtccaccggcccctggcagcacagcccagggcctgcatgggggcaccgggctccatgcctctggaggc

SEQ ID NO: 306807 - DNA, 122 bp, Homo sapiens
tgtacctgggaggcctgggtcaagtcactgccctcactcccagtccctgagcttgagtttcgctcttttaatgggaagcatgaccttcatgcttcatggagactttggggtatgtggcatct

SEQ ID NO: 306808 - DNA, 122 bp, Homo sapiens
cccagtacctggaacatagaaagcacataaatgttgctattattcatgccacagggcagacgacccaaaaacacggacttggctagctggacctagggacttgtcaactaaatgtaccagat

SEQ ID NO: 306809 - DNA, 122 bp, Homo sapiens
gcggtgcggcctcaggcaaaaacacaatcacaaggtaaaatacagcgcaaggaatccatccgccgaataaaaacccagagtcccctaccttcggccttgggatggcaaactggtcctgtgtt

SEQ ID NO: 306810 - DNA, 122 bp, Homo sapiens
agtaataatgaccccacggcagccactgcccttgtcctgctctgcgttccatccacgtcacgagcatcatctgcttatgaggaagggttactcattcccatgttacagataaggaaaccgag

SEQ ID NO: 306811 - DNA, 122 bp, Homo sapiens
cgcctcgggaagagagatgagctccgggttcgcagctggtgtttttaacttctgcccttccgttttctctctccctcagacatgcccactgttgctacgggtcttcaccaccaataacggcc

SEQ ID NO: 306812 - DNA, 122 bp, Homo sapiens
ccccccgcgatgcggggagtaagagccagcccctcttgcctccctggctcttaggatccgcggtggactcacaccctgtttacaagattgtgtgcaatgtcatctcccccgctggagattat

SEQ ID NO: 306813 - DNA, 122 bp, Homo sapiens
aagactgacgggagccagacccatgctgaccatagcgggaagacgaacgtgagctagatccgtgtcgttcacccctagatgactgtcctgatctagagccgtgttgtccgtagccagaggag

SEQ ID NO: 306814 - DNA, 122 bp, Homo sapiens
cggggtccagttcctgcaccttcagctgccactccatcctctgcacggcgttcagggccgcggcctcgtgctgctgccgcatgaggaggcaagtcttcatgcggtcatacttgtcatccacg

SEQ ID NO: 306815 - DNA, 122 bp, Homo sapiens
aaaccggttctcttcacatccttatccttgtgatgcagcattccgcttgcatttggaagccgtttaatatcagagagaagccatatttatgaaagtaaagaggctgctcagatgactgcaaa

SEQ ID NO: 306816 - DNA, 122 bp, Homo sapiens
ctggctgctcttatggagccgagatccagtcagggtgggggcgctggagccgtgggagcccggccagggcagggggctcgttgctgtggcaccccctctctgccagcaccaagagattattt

SEQ ID NO: 306817 - DNA, 122 bp, Homo sapiens
ctcggaaatcgggcggggacggaacgggctcgggctgcggggcctccagactcagtcgcacgctcagatttcgggatttctacccccggctgggatcgcgtaacttcctcattcccgcctgg

SEQ ID NO: 306818 - DNA, 122 bp, Homo sapiens
ggcaccatccaccacggccaccatgtctcagcagcaccgtccaccacagccaccatgtctcggcagcaccgtccaccacagccaccatgtctcggcagcaccgttcaccacagccaccatgt

SEQ ID NO: 306819 - DNA, 122 bp, Homo sapiens
cagaggacattctagtgggggaacagaccatgagcagaataaagaagtatgatgttaaagcgtgtaagggaaaataaagcagagaggccaggctgcctgagattcttcttctgaaaataaag

SEQ ID NO: 306820 - DNA, 122 bp, Homo sapiens
gggcctcgcgggggtgtggcccctgggggcagggtcccagggccacgtcctaccttcgggcgagccttgagtgccccctggccgccgggccaggaagctgtgagccagcagcgcctccttgg

SEQ ID NO: 306821 - DNA, 122 bp, Homo sapiens
cgcccgcctcagacctctctgggacccgccggcctggcgtcctggcccgcccgagccccacggtccctcgggtcctaacctcggcggggcaggcacctcctcaggaagccccggagcaggct

SEQ ID NO: 306822 - DNA, 122 bp, Homo sapiens
tggctttatgttccatcaccgatgagttgcacagggattcagtccttccgctgttcaggccgggtccttcaggctcagggttcccaggaatggagagggtatcagtgtcttccatggactca

SEQ ID NO: 306823 - DNA, 122 bp, Homo sapiens
gcagagggttacatcgtgtcaagtgtgtgaaggcagaatagcctgcagagaccactgtggcgttgaaaagaggtgtcgtcgcgaccttcggcgccggagaggcgaaacaagagggggtcttc

SEQ ID NO: 306824 - DNA, 122 bp, Homo sapiens
cccagctacaagctggagaacctgagctcctctgaaatgggctacacggccaccctgacccgtaccacccccaccttcttccccaaggacatcctgaccctgcggctggacgtgatgatgga

SEQ ID NO: 306825 - DNA, 122 bp, Homo sapiens
tgttgaatgtgatgtaaagggacccttcccttgaccctatcacaacagcctttgctggcccgaaattctgactgagcctatcagttgccccttctcctaaatgttaatttctattgttgatt

SEQ ID NO: 306826 - DNA, 122 bp, Homo sapiens
ttgtatttgtgtttttgttttccattcgtttatgtttctttggttcgtagtgtcagaagacgatgttttttatgacaaactgccctcgtttgaaaggcgctgtgaaacgcctgcaggtatgg

SEQ ID NO: 306827 - DNA, 122 bp, Homo sapiens
tctgacccaggccctgaactcacccctcacctgggagcatgcgtggactggcgtccccggcggcactcctgactgtctgacagacaccttcagagtgaagaggccacatctcaggcgctctg

SEQ ID NO: 306828 - DNA, 122 bp, Homo sapiens
ccgtggcggcccctgacgccggctgtcctccaggaataatctggggtccgctggtgccgccgtggctgccgttgcatttatttatgtcttcagcactgtggggagaagtggcacaggcctgg

SEQ ID NO: 306829 - DNA, 122 bp, Homo sapiens
tggcggccgctcgcagactagacaggcttggccaaaatcagacccagtgcagcaggactccgggacgcgctgatgtcctgacgggaaggcacgcactctctgtgggttctgccttctcccct

SEQ ID NO: 306830 - DNA, 122 bp, Homo sapiens
ccgcgtgagtcaccgccctcccagtgcctgggcacctgttggggcagctggagaggctggcgccgaacacctgcctgtcggctgcgcccctggcagctgccccatgctggccctcctggctt

SEQ ID NO: 306831 - DNA, 122 bp, Homo sapiens
cctcaggacgtgggcacgttgtcgtccagagagcaagagcgtcgctccccctcgccttctcggccgccctcccggtttaccgccccctgtgtccagagtaagaaaaggctagggttgcgctt

SEQ ID NO: 306832 - DNA, 122 bp, Homo sapiens
ctgaggaaaccgcgacttaaaacctaggtcgtcacgtttccaccgcatattaaatcaatacgggttgagcatccctaatccaaacatctgaaatccgaaatgcttcaaaatctgaaagtttt

SEQ ID NO: 306833 - DNA, 122 bp, Homo sapiens
atctctccccactggaatgtaagctccataagtgcagggactgttgttcagttttgttcacggctgaagcccaagcagctaagataatgtctgacatagggtggggcacggtggctcacgcc

SEQ ID NO: 306834 - DNA, 122 bp, Homo sapiens
acctggtccttttcacctgtgcacaggtaacctcagactcgagtcagtgacactgctcaacgcacccatctcagctttcatcatcagtcctccacccccgccccacaacagcctaccctgcc

SEQ ID NO: 306835 - DNA, 122 bp, Homo sapiens
tagctcactcacaatgcaggtttctagctgtgatcagccaagggcatgttttcaggtacacgtaagcattcatctccaaaactccaaggaatgttattaggccctataaattgatactttga

SEQ ID NO: 306836 - DNA, 122 bp, Homo sapiens
tcacagaaaataactacataaagcagcactatgcctggcatgtaagaaagtgccaactgtcgacagatgatccaaaagatttccttctaagcatctaacactgactgaggtcactgaagacc

SEQ ID NO: 306837 - DNA, 122 bp, Homo sapiens
cacctcccaaactagctggtctatgaggtcagggacctgctgtcttctttgaaaaataaacgaacatgacaagcacccaaaggtgcaaaaactgccatcaaagagcacagttggagctcctc

SEQ ID NO: 306838 - DNA, 122 bp, Homo sapiens
ggacgggtttagggagcctcagaggctggccacacagagactggtagggggttcagagggcgggaagtgaggcggaccaagggaaggggcgggtctggcccgtttcctgtccccttcttatt

SEQ ID NO: 306839 - DNA, 122 bp, Homo sapiens
caggtgttgtgaagaccactcgttctgtggttggggtcctgcaagaaggcctcctcagcccgggggctatggccctgaccccagctctccactctgctgttagagtggcagctccgagctgg

SEQ ID NO: 306840 - DNA, 122 bp, Homo sapiens
cagtgaactttgataacttttaggaaaactgtctgaagataaatataagcaagttgagaccgagaaaacgagaaattcagacagttcagatagttcagtagaaaatctagctaggactttaa

SEQ ID NO: 306841 - DNA, 122 bp, Homo sapiens
actaaggagaaacagctgtggaggcaccacccctgaggacgcagtgggcctggggttgggcggaccccaggctgcgggcggaggcgggacgtaggggcggggtttcggggcttcggagcgga

SEQ ID NO: 306842 - DNA, 122 bp, Homo sapiens
gccctggtgcctgcagatggtgacgacacaggcgaggcccaagggggatggcatggggcccgagctgggcggctgccctctctccctgagctcagggtcccctgggcccagtcacttccagt

SEQ ID NO: 306843 - DNA, 122 bp, Homo sapiens
ggcgcggcggcggagggggcgggcaggccggcgggcggtgatgtggcgggactctttatgcgctgcggcaggatacgcgctcggcgctgggacgcgactgcgctcagttctctcctctcgga

SEQ ID NO: 306844 - DNA, 122 bp, Homo sapiens
acttggtgcaaaccctgggagaaggtgcctatggagagtgagttcttttaagcttgccttcgttttctgagtgcatattcattgttttggagtctcacactctggtgatttagaaagtagat

SEQ ID NO: 306845 - DNA, 122 bp, Homo sapiens
gaagctgcaggtggatggagcagcgatcagaagccagagccacagcgcaaccctggggggcgggagcccccagggccagaacagccaccacacctgcgctggccagggcctgcacgtagccc

SEQ ID NO: 306846 - DNA, 122 bp, Homo sapiens
tgcgtgccgcgcatttctggcctggggagcgggtggagtaaacctgcgggaaccattttacgacaacgtgcggctgtgcggtgtggctgacggcaacgccgctgctcttggagaggtcactc

SEQ ID NO: 306847 - DNA, 122 bp, Homo sapiens
agtctcccgggatcgaaaataatttgggcaaagcggtgggaggtgtgtgcgcgcgcgctccgaggggagggcgggggagcaggccgggcggggtgcgcggggcggggggaggtgccatccga

SEQ ID NO: 306848 - DNA, 122 bp, Homo sapiens
cagctgggaaggcgttcgggagtgggttgcgatgcttccctgtttgttttctcctgacatcgtttttgtttgggtccaggggcctcacgggagctggatgctcggagcagcaaggcggccct

SEQ ID NO: 306849 - DNA, 122 bp, Homo sapiens
ggcgacgcagctctcaggcagggcggcaggagcagcctcttcctccctttggggaggccacgctgcgcgcccacctttcccaagagtagagggcgggaaaggtcagacgggggaggcagggc

SEQ ID NO: 306850 - DNA, 122 bp, Homo sapiens
cggcaggagcaggggtagggggcggggcagcacgcggggcgcgcggtatgggcggactcgcgcctgagccccgcccccggtccctcgtctgggccgagcccgcccagctggctgagacgcgt

SEQ ID NO: 306851 - DNA, 122 bp, Homo sapiens
ggattttggtccccgactccgacaggagccctcgctggcctcggggctgctcccaccacacgtcagcatcccggcctgagccaggagggactccgaggccgcctggtctccctgggccgggc

SEQ ID NO: 306852 - DNA, 122 bp, Homo sapiens
ctcctcctttcccctttttccagttgggggacaaagccttgtgctagctgataatacttccgcgaggattgaatattgtggctcctttctcgtgaatgtccaaataaaactccccttttact

SEQ ID NO: 306853 - DNA, 122 bp, Homo sapiens
ggcgcaagcgctcctaggccaggcgcgcgcttaggtctgagaccggccgaggagcaggggcgccctctggaggctgggaagggaaggacgcggttccccgacctgagcctccagaaccgggc

SEQ ID NO: 306854 - DNA, 122 bp, Homo sapiens
cgaggccggcgcccctggcgggcctggaagggtgggcttggctgggaaaggcctggggggcgccgtggtggcctcgctgcggttgtaatccatgcagaggacctcggcgtcgcggcccagca

SEQ ID NO: 306855 - DNA, 122 bp, Homo sapiens
ggccaccccgaggggaccttcctgaaggtgtctcgccggagagggccggtgccccaaggccgcgggccgctgggcctgtcatggagaagtggcggggacccgtcccaagttgagggaccacg

SEQ ID NO: 306856 - DNA, 122 bp, Homo sapiens
caagagcaaaactctgtctcaaaaaataaataaataaaagagaaaacagggtgggttctacgactcaaggaaaagggggctgaatttgagggctagattgaggagttcaattttaaacttga

SEQ ID NO: 306857 - DNA, 122 bp, Homo sapiens
cttagtccccctactgatcaacctatgactctggctaagtctttttaccttgccccacctcgttttcccatctgtaaaacgccaaagttggactctgacattctgtatacctctaaaataat

SEQ ID NO: 306858 - DNA, 122 bp, Homo sapiens
gccttggtaggagaagaggcaaggacaaaggaggaagtggaaaagaaagaatgggaggaacgggccaagactatttgcatacttgaacccaattgctctgtgaatatctgtgggcatttctc

SEQ ID NO: 306859 - DNA, 122 bp, Homo sapiens
aagaatgcagaagactccagaaggtgggggagccactagaggtaaggagcctggacccctcgatcatctggggaggggctatatgagtgagaaacaaacctttatcatgttaggttactagg

SEQ ID NO: 306860 - DNA, 122 bp, Homo sapiens
gcctaggtatacggtcagctatattatctaggtttgtgtaggtccactctaggatgtttgcgtaagaacctcacctaacgatgcatttcctggacgggatcccagtcgttaagcaatgcgtg

SEQ ID NO: 306861 - DNA, 122 bp, Homo sapiens
cctcctgagggctgggatgatcctgctgtcctccgcaggcgaaactgagtcagagcggggcgtgcgtgggccggaggctttacacaccaaagaagccggcgcctcctgcccaccccgggcga

SEQ ID NO: 306862 - DNA, 122 bp, Homo sapiens
ggaaagaggcgtcaggtgcctggctgaagcctgaaggtgacccgaaaacaagtcagagcccgagagatccacccgcgcccgcgcgggggaccaagggcccggatttaagaagagtgtgccta

SEQ ID NO: 306863 - DNA, 122 bp, Homo sapiens
ggccagggctccacgggcgagcggcgaccctgcctcccggagacggcgcggcctgccctgcgcgcctcagccccgggtgccggcgtctcgggcagcaccaccaagtctctctggaggggaaa

SEQ ID NO: 306864 - DNA, 122 bp, Homo sapiens
ggggcggaggccagggcgggaccaaggctgggggcggggccaggcatggctgccgctcgccggccgggggcggggccgacggtcacgtgtgtacacagggcccgggcggcgtgcgcgccgtg

SEQ ID NO: 306865 - DNA, 122 bp, Homo sapiens
ccagcactttgggagatcgaggcgggcagattgcctgaggtcaggagtttgagatcagcccggccaacatggtgaaaccctgcctcaactaaaaatacaaaaattagctggggatggtggca

SEQ ID NO: 306866 - DNA, 122 bp, Homo sapiens
ctcctgagacttaagtagcattcatcctttgcctgaggatcaagtgtgggcttcgtagctcggggagcctgggagagagcaatgagcctccatggaggggccctgtacaccgggaggtgcct

SEQ ID NO: 306867 - DNA, 122 bp, Homo sapiens
ggtgatcaatcttggatcgatgatgactgctggtggcgtatgagtcttacatgatgaatacgtgtctggaactctgaggtccatcacagaagtagagctccttccgtatgtttgaaatgatc

SEQ ID NO: 306868 - DNA, 122 bp, Homo sapiens
agaggcagccctggaatccagcaggcttggcattggtcctgggaccactcatgacatgcacgtgcacacacagacaccctggagccttatgtcctgtggcccccagggctgccacagagcca

SEQ ID NO: 306869 - DNA, 122 bp, Homo sapiens
acggggccagcgggatccacagccatctcttgtttctgctgtcaccctggccctgcgaaacgactgtgctcccctcagctctccgagccggctgggaactgcctccctggggggccatgtcc

SEQ ID NO: 306870 - DNA, 122 bp, Homo sapiens
gcacacgcagagcctctcagcggctctctgcagttctcaggaaatgaatggggggcaacccggggaactgttgtacttgcaaatgacttacccggatcacatgatgcgctaaatgtagggtg

SEQ ID NO: 306871 - DNA, 122 bp, Homo sapiens
ggacctagggtttcagctcacgaggctttgcagagcaccagggtccccatggaatagagccggaggcaggaattaccctaagacctttggtctcccggatggagagcctggggcacaccaga

SEQ ID NO: 306872 - DNA, 122 bp, Homo sapiens
tgcagtaaagaactacttgaggaagaataaaaagcagaagtacaaagtgcgtaaaatgagcgtagtttaagattttggaagaaaagacattctaatatcagagagttttcccacaaccagaa

SEQ ID NO: 306873 - DNA, 122 bp, Homo sapiens
taagagctgtaacactcaaccgtgaaggtctgcagcttcactcctgagccagcgagaccacgaacccaccagaaggaagaaactccgaacacatctgaacaaaaagggacagactccagatg

SEQ ID NO: 306874 - DNA, 122 bp, Homo sapiens
tgaaaggcacgagcaaagagtgcagtgccctgccacccaggagggctccccagcaatcatcgcagggaaagcgcccctccccctgggtcacagtggcttccagcagccgtgctgtgtgggcc

SEQ ID NO: 306875 - DNA, 122 bp, Homo sapiens
caggagaacagaaatattttgaagacctttctgtataaaaagtaatgaatttaacttcaccgattcaagagacaggacagtaaatattcttgttatgctgcttcccagggtgtcctaagaaa

SEQ ID NO: 306876 - DNA, 122 bp, Homo sapiens
tgcgcagagccatggaattctcctggctggagacgcgctgggcgcggcccttttacctggcgttcgtgttctgcctggccctggggctgctgcaggccattaagctgtacctgcggaggcag

SEQ ID NO: 306877 - DNA, 122 bp, Homo sapiens
ctttggattcaaggttaagaatccaaatgagaaataagaaatatccggtccctgatgattcgtttaagtcctgttcaactcgatgaaagcttccacccgaaggaagagttactgttcctcct

SEQ ID NO: 306878 - DNA, 122 bp, Homo sapiens
accctggccctctgcatgagcaggagggtggacacgtggagatgtgagacagaaagctaccgagacaagcacaaagttaagggaacccagaagccctgactcaccattcaaaggaaaaaaca

SEQ ID NO: 306879 - DNA, 122 bp, Homo sapiens
agcgggagtcggaggcaggaccaggagctgcagaggggccgcgggcagagccccagcgagcgcgctgccctggcgcggagcccaggggccgcccactggcgggggaggcggggagcgcgcag

SEQ ID NO: 306880 - DNA, 122 bp, Homo sapiens
tgcgtgggccaggccgccagcatgggctccctgcttctcgccgccggcaccccaggcatgcgccactcgctccccaactcccgtatcatgatccaccagccctcaggaggcgcccgggtgag

SEQ ID NO: 306881 - DNA, 122 bp, Homo sapiens
cacctgctaaagaaatgtgaaaagagtggaaacgtgctatttggaggttattttcctagtcgacatccaggagatctccagagatctatttcagccccacctgttggtaagtgactgtctca

SEQ ID NO: 306882 - DNA, 122 bp, Homo sapiens
tgatgcttcctgcccacatcacctgctctggcttagggactgcagctcttttggcaccttcgcttgctgccaggttcaacacccactgctttagaggcgttggtaggttagttaaggcgagt

SEQ ID NO: 306883 - DNA, 122 bp, Homo sapiens
atcttttttttctctaactccctttcagctctggatcccctggtgctgtattcctccttccgcacattccttcctttattctccatcagctctcttttaactgccacttttacttggtctct

SEQ ID NO: 306884 - DNA, 122 bp, Homo sapiens
ggccgtctgctcgggctgcggtcgggcacacaatagcagccattgtctcggccagggtggcggggggcccgcccagcccaccctccgggtgacccccgccctgcggtgggtgggaagggcag

SEQ ID NO: 306885 - DNA, 122 bp, Homo sapiens
caggtgccctctgtaacattaacgctgctgatgcccacctctgggtgactgtgcaggctgcgtgagccaagacctgggcccaggtggtggatgacagcgtcctgctgggctctgacatttgt

SEQ ID NO: 306886 - DNA, 122 bp, Homo sapiens
ggggaaaacatggaggattattccccaaaattttgacagggaccccagggactgggataacgttgtgactttcaccttctctgaaatgttggaattttatattacagaataaacttggattt

SEQ ID NO: 306887 - DNA, 122 bp, Homo sapiens
ccgggccctgaataatagggtttggggagttcggggcgcgccttagcccagttctcatcccgagctctgtctttgacactgtgctttgtagacactgtacagtgaaaccagaagtacggcac

SEQ ID NO: 306888 - DNA, 122 bp, Homo sapiens
cttttttccgaatgaccttaaaggtgatcggctttaacgaatatgtttacatatgcatagcgctgcactcagtcggactgaacgtagccagaggaaaaaaaaatcatcaaggacaaaggcct

SEQ ID NO: 306889 - DNA, 122 bp, Homo sapiens
gcctccctccgcagggtgccagccccggcctttatctcgctgcttcatgagctgattaggcgtctcagtgccaccctaatgagattgttgggccccgagggggggcacaaccaccaaggttc

SEQ ID NO: 306890 - DNA, 122 bp, Homo sapiens
gcacgacactttcgggccctggggaccccgggaggccgggatctggcctggggtggagggcgaggccagtcggcccccacctgctcaccgggcagactgtacccgggcaacggctccccgca

SEQ ID NO: 306891 - DNA, 122 bp, Homo sapiens
tgggctgggcggggcgggccgctggcaggctgtgggacaggccagggctatttctgcgctcgcttggagaggactgacagctctatggcgccgagtcatggtccctggaaacaagagaggtc

SEQ ID NO: 306892 - DNA, 122 bp, Homo sapiens
catgtatattcatgaacacacacttccatacactcaaaaacacatgctatcatatacacacgtacactcacatactcacacatatgcagtcacacacatgcatatacattcacaaacacatg

SEQ ID NO: 306893 - DNA, 122 bp, Homo sapiens
caaaagaaaaatgagcaaaggacatgacaatccacaaaggaacaaacataaaatgaccaacgtgaaaagacatacatactcactagtaatcaaatagattagaataaggaggcactacacct

SEQ ID NO: 306894 - DNA, 122 bp, Homo sapiens
gatctgaaagatgctcacgaataattctcgctgcagagcttagtaaaccaacaatacaaacgattttctgtaacgacctcccgtaaagcagccactcccctcacagcgctgagcaggcgtaa

SEQ ID NO: 306895 - DNA, 122 bp, Homo sapiens
ggttgccgccgccgctgcagccatcgtgccagcccctcgggtctccgcgaggccggctgacggtccagagtgggagacaagccaatttgggagcagataggatccagcttcattccacatta

SEQ ID NO: 306896 - DNA, 122 bp, Homo sapiens
acctcccattgacagcaagagatgccggtttccttgttagggccggcatctgtctgagaccggcatttttaacgaggtgttgctgttgatcactgcactggaacgtgcttgggaagcaaggg

SEQ ID NO: 306897 - DNA, 122 bp, Homo sapiens
cccctgcaaacttgcgcgcagccgggggcgtgtccgtcccgggagggtccccccaacacccgggtccccaaggctcttaccgaccagtaagcacagcacgtcgagcagcacgaagacccacc

SEQ ID NO: 306898 - DNA, 122 bp, Homo sapiens
ttctggaacgttaggttctccactgttgccgtcattagagattctcttcccaaagagtgtcggaaaggctgggttatacaaagaaaacaagttgctttattatggaacctctcaaagatgtt

SEQ ID NO: 306899 - DNA, 122 bp, Homo sapiens
gtgtttttgtgtaaaagcgcttcacctctgccgaccttctcaaccgggaaaacaatacgccgtcctagagcgaaaagccgcaagccctaattgatttgctccaaactgttatccagacccac

SEQ ID NO: 306900 - DNA, 122 bp, Homo sapiens
acagcagcctgccccggggatctcctggtcccaaggtcaatgttaggctgatagaggaaacgtagcccttccctggtggtctagtggttaggataataaaaataaatacacaaataaataaa

SEQ ID NO: 306901 - DNA, 122 bp, Homo sapiens
atgttcaagaagcccctgtccagttaagcctcctggcgaggcccttctgggcctttcctgcggccttcccagctcacctggagcagacggatcagcaaatccggccaaagaatactcaggac

SEQ ID NO: 306902 - DNA, 122 bp, Homo sapiens
gtgttctgcttaacaagactggaaagcaggctatacatttttggatattttccaacaatacggggaaaataataaaaagctgtggtacagtcatgcaccatataatgacattttggtccaat

SEQ ID NO: 306903 - DNA, 122 bp, Homo sapiens
aggaagcccctccccatgcaaacagtgcccccgcctgagatcaggacactgagtgagggccgcctcctctgcgctgcccatacgagaaggaagccctggagccgggccttccgtcgctgcgc

SEQ ID NO: 306904 - DNA, 122 bp, Homo sapiens
atcccttctctaaacttatgccctgctcctctcccctatctgtgcacagaggacttggtccgattctacctccggaacaatgctcagcccacagccctcattccctccgtgatgaacagtaa

SEQ ID NO: 306905 - DNA, 122 bp, Homo sapiens
accggcgaacctgcctgggcaggcagctcgcgcaggacggggcgggaccagacagttgcgcgcacagaaggctggcgtagcaggtaaagatggcagctaccatgttccgggctacgctgcgg

SEQ ID NO: 306906 - DNA, 122 bp, Homo sapiens
gtgagtgttacagctcttaaagtcagcgcgtctggagttgttcgttcctcccggtgggttcgttgtctcactgacttcaggaatgaagctgcaaacctttgcagtgagtgttacagctcata

SEQ ID NO: 306907 - DNA, 122 bp, Homo sapiens
acaacagaaagatgtttaatggacttacagttccacgtggctggggaagccttataatcacggtggaaggcaaggaggagcaagtcacatcttacatggatggtggcaggcaaagagagaaa

SEQ ID NO: 306908 - DNA, 122 bp, Homo sapiens
aatgaacccgtgagcagctcggcgaggggaccaatcaggagggcagcctgcaaatgtcagcgcccggagagtcccccactccgcccgcccgctcgcctgcgcccgcctgaaggaggcggcgg

SEQ ID NO: 306909 - DNA, 122 bp, Homo sapiens
ggcgggaagaaagggtggcaaacaacgattttaaaaatccagtcattagtatttgtaggacgaagaagctgatctgacagttgtccagagcagtggcccagctgcaacaggtagatggcgca

SEQ ID NO: 306910 - DNA, 122 bp, Homo sapiens
tcataccccaaggtacattctttgactatgtcctaggcccagaattctggagtcagaatgcggaagagagtggaaaaaaccacttacatcatcctaactaaccagcccacatttaagaatga

SEQ ID NO: 306911 - DNA, 122 bp, Homo sapiens
tccatcactccagcgggtcgcctcatggccagaggcatggcaggctggagaggccgactgcggtcggagggacctgctgtgttctcctggaggaagaatgaagccttgaagtcagcagagcc

SEQ ID NO: 306912 - DNA, 122 bp, Homo sapiens
gcgcgggactgtgggcgggacgggcggagcggtcttgagctctccggatggcctcaggtgcggggtgagggatctgggggccgcccctcggcaaactttccttccccgggcttctgcggagg

SEQ ID NO: 306913 - DNA, 122 bp, Homo sapiens
ggatagcagcaggagtcggggggccgccgaagatggggaacactacctcgtgctgcgtgtcgtccagtcccaagctccggaggaatgcccactcccggctggagtcctaccggccagacacg

SEQ ID NO: 306914 - DNA, 122 bp, Homo sapiens
aggaagcctctgggactcaaagagcactcaggtgccgtctccaccgcagcagggagttgtcgccactgtccttccccacatctgtgggtggatctgtcaccacccaccccaccttccctcag

SEQ ID NO: 306915 - DNA, 122 bp, Homo sapiens
gccgcccggcccgccccctgcactttgcagcgcggggaggagtgggcactcgaacacacgcgtgctcacacagggacactcacacaggcgtgtgcacactcacacacgcactcatacaggcg

SEQ ID NO: 306916 - DNA, 122 bp, Homo sapiens
gctgaggcagtggtgaggccgcctggctgttcctgtgggggctgcgggagctgtggagaccgtgagtggctaagggctgtggcctccgtgggagccgcactcattctcttcccttgcctact

SEQ ID NO: 306917 - DNA, 122 bp, Homo sapiens
ccatacccaggaatacttgttcatagccagctcagaggtgcaccatactttagcttcccacggccttcactcgttttctcctgtgggtgaattctaactaggctcgcctggtgagtgaacaa

SEQ ID NO: 306918 - DNA, 122 bp, Homo sapiens
gtcggccccggtggtggggattccgcgcgggacccacgcgggaacaaagaggcggctggacggcccagctctccgcacccggaaggacctgttccacctctccggctcccgtacccctctat

SEQ ID NO: 306919 - DNA, 122 bp, Homo sapiens
ttgaaatctcaccattacaattcatcagtttaaattaagttttaatactccactaaaagtcgaaggccccagggggagattggcctcccttattactgccttggtgtgagtcagtttatcac

SEQ ID NO: 306920 - DNA, 122 bp, Homo sapiens
cagccagtgtctgcggcgccgagagggccgttcgtggactcaaatgggtatcacccctaccgtttatagtcctcccaatagtctgcatctcgttttgtcgtggctggtcgtgtactccttgt

SEQ ID NO: 306921 - DNA, 122 bp, Homo sapiens
gagaggccctttccctgtccccagtgtggccgtgcttacacgctggccaccaagctgcggcgccacctcaaatctcacttggaggacaagccctaccgctgccccacctgtggcatgggcta

SEQ ID NO: 306922 - DNA, 122 bp, Homo sapiens
attcctttcctgatgttgtttatgtttacacttgattcccgttctttgttttctttaaatcgctaataaaacaactaaaacactcctagccaagtttcacagttttctcatggtatttttct

SEQ ID NO: 306923 - DNA, 122 bp, Homo sapiens
agcaatggcttcctgagttagaacaatggcttggaagtcaggaaacctagggtgtagtcccggctgtgccactaactagcaacaagccatgtgcaagtcaccggaaaggcaggggtcacatt

SEQ ID NO: 306924 - DNA, 122 bp, Homo sapiens
aagaatcagttttccaaatatgtgctatactcttacctgtgcagggccatatactggtaacggcttctcatgtaatgtattaggagaagttcataggtaagactcacagcaatacttgggaa

SEQ ID NO: 306925 - DNA, 122 bp, Homo sapiens
gagggatgtgactcatggttaagacagtctgtcgaggaccacaacgccacagactggggccgtccactgaaacgaacgtccaggcatcgcacgccctcctggaagacttcagcatctttccc

SEQ ID NO: 306926 - DNA, 122 bp, Homo sapiens
tcccatgacccatccggcagggagcgagctgcatcggagcccgcgtcgcagtcttcagagcggaaacaccgaacccgacaggagcccgcaagacaaaagcaacccggcgaaatctacgggca

SEQ ID NO: 306927 - DNA, 122 bp, Homo sapiens
atctcagattagagtgtgcagagacagccttggcagcgtccagctttacaaagttcacaacgctgcttcagcttcagtagggaggaaggaagagcagcaggaggaacctggtgcatgggttg

SEQ ID NO: 306928 - DNA, 122 bp, Homo sapiens
accgccgtccacaccaagagcgccaaggagcagcccagggaccgccgtccacaccgagggcgccaaggagcagatagtagcccagagacccaggggaggctcagcttccccacgctggaatc

SEQ ID NO: 306929 - DNA, 122 bp, Homo sapiens
gattgtgacaattaacttgataaattgttccttttcctgttcggaactgactaggttgtgcgtggatggaccagtgaaaagaaaatcctgtttgggtagggaagagggaagtagaaaacctc

SEQ ID NO: 306930 - DNA, 122 bp, Homo sapiens
gaatcagaacactccctgagcccccgtccagcccggtgggaaaaagtggctgtttgaaaacgggcctgattctgtgtcccgggcgcccccagctgacccgctgctgcgtcccgggcgccccc

SEQ ID NO: 306931 - DNA, 122 bp, Homo sapiens
ggtgtggagcactctcatgttcactttgctggtaggagcaggctgggtgtggagcactctcgtgttcactttggtggcaggagaagactgggtggggagcacacttgtgagcactttggtgt

SEQ ID NO: 306932 - DNA, 122 bp, Homo sapiens
gacttccattgtagtgggagagtgcaggcaattgcacagatggtcatgcatcatgacattcgttatcaacacagtgtgataaagggggcagacagtgatgaagagttggtgatttgtatact

SEQ ID NO: 306933 - DNA, 122 bp, Homo sapiens
gtatgctatcacagcatggatgggaggtagtgtaaaaaaccctgggctttaaaataagaccgtgcttagtgtgcattgcagcttttctatttattatcgatgtgtcactcatttgagccttg

SEQ ID NO: 306934 - DNA, 122 bp, Homo sapiens
ccgcacccccactgaccagtccattacgcacagggagcgctttccagctgaagaggagagcgtgcaggaaacgttatttacgtgcaattacaggaccatataccacggcatctgcatcctac

SEQ ID NO: 306935 - DNA, 122 bp, Homo sapiens
ggctcttcctggacccggcgcgcaccgtggcggcgccgcccacccagccccacgccccaccgcgccccccgcctcgggcaggtgcagactccaggtcctgcccgtttctcacggtctctccc

SEQ ID NO: 306936 - DNA, 122 bp, Homo sapiens
gcatgcgggcagacagacgcccaacacagagacctcccacacgctcgtctgtgtcaccgccgccccttcctggttggccctgcagacgaggaagccctccaacctgcagccaaattcactcc

SEQ ID NO: 306937 - DNA, 122 bp, Homo sapiens
gaggaaggcggggcggagggctgcagggcgggctaaggactggggctggccggccgcatgcgcgcgcggctttggtaaagaggctggagtttctggctcggcgaggttgtgggggagggagg

SEQ ID NO: 306938 - DNA, 122 bp, Homo sapiens
cttctcaaaagaagacatttatgtggccaacaaacatgaaaatacactcagccgagctcacgcctgtaatcccagcactttgggaggccgaggcggctggatcacctgaggtcgggagttca

SEQ ID NO: 306939 - DNA, 122 bp, Homo sapiens
gttactttgggaaaacagcgccttgagggccttgcaggaggcccgacctgggaaggctggcgaacgctaaccggagggtttttcttccagacttgattccgggatgttgagatctttattcg

SEQ ID NO: 306940 - DNA, 122 bp, Homo sapiens
tcttcaagagctgcttctttctctctcagcacctgcttaagtcttcttattttttcatctcgaatggtttcttctaactccggtggtgtcactgggaaaatatcttcggtataatttttatt

SEQ ID NO: 306941 - DNA, 122 bp, Homo sapiens
ggttgtctgcatgaagaaatttcggtttccctccaaccgccccctcctcgattctcctcccgcccacccaaatgctgcagttactaagcaaaaggatggggttcctaactttgatttctaag

SEQ ID NO: 306942 - DNA, 122 bp, Homo sapiens
tcagggactgatgcatggtgaaaactgcccggttgccccagtccccgaagctgcttcaagcgcccccggctctgggcgccccgcagagcatcctactccgcggttgcctctctcggtccttc

SEQ ID NO: 306943 - DNA, 122 bp, Homo sapiens
gcctccacggccgcgtcgggggcggtgtcgcccggaaccgcagcccccctgtttcctccccgcctcgcggcccctcagtcgcccctatttccggcgcgggacccccaccccggtacctgcac

SEQ ID NO: 306944 - DNA, 122 bp, Homo sapiens
cacctggtcaataaatgttttctcaatggatgaaggaaaaaatgaaactatactaggcttcgacagactggtaggaatttactaggtggtttgaaggaaacattttcaaaagcaaaggcaga

SEQ ID NO: 306945 - DNA, 122 bp, Homo sapiens
gggcagagtgggatgctcctgtcctgttcttcaacatggccacggagcctggaagtcaggcggagccggctcctgtggagggtgcattccctccggcagaggtcagctcagcagaacacctg

SEQ ID NO: 306946 - DNA, 122 bp, Homo sapiens
tgctctctgcaacctctgcttcccaggctcaagcgatgctccaacaggcatgagccacggcgcctggccatagttcttgttattataatctttaccaatgtgttcgtttcccccgcccccgc

SEQ ID NO: 306947 - DNA, 122 bp, Homo sapiens
ccgggtccaataaccctccatcccgcgtccgcgcttacccaatacaagccgggctacgtccgagggtaacaacatgatcaaaaccacagcaggaaccacaataaggaacaagactcaggtta

SEQ ID NO: 306948 - DNA, 122 bp, Homo sapiens
caaaatcactcgggaatagtttagttgccagggggccctgggtccatctgaactgagtcacggcacttgcactaaagcaaatctactcacagactgattactactgatttgctcagggaaaa

SEQ ID NO: 306949 - DNA, 122 bp, Homo sapiens
agggagagcgggggagaacaaaggcggcgggccgggcacggggagtgcgggacctggctacgcctcggggcgctattggcaatcggtgccgggggcggggcaggagaggcggagcctgggaa

SEQ ID NO: 306950 - DNA, 122 bp, Homo sapiens
caggccttgctccgatggttttgcagagtagcaagtgaagatttccaaaaggcggaagagcgggataagagaagaaaaagagatagataagctagcacaggaacaaggctcagagcaggaaa

SEQ ID NO: 306951 - DNA, 122 bp, Homo sapiens
ttacaggatcctcacacgttttcttaccagctcaaaaatgctgccccctcgtgcctcttccggagccatctctccaactttcaaggcagcgtggtggtgttcagagttgaaaggactctaag

SEQ ID NO: 306952 - DNA, 122 bp, Homo sapiens
gtcattttcaggaactgaagggcgcagagacaagacggtggccttctagccactggtgtccggtgacactgcataaaaatagctccatcagatgggcttgggggaagtggaggggtttgatc

SEQ ID NO: 306953 - DNA, 122 bp, Homo sapiens
taccaggtaccagggaccaaacgagatagtccactgtgtaacagggcatggtgaccccgtcgctgaattctggttttgattctttactaaattgtcaaagtgactttggggaaatcattttc

SEQ ID NO: 306954 - DNA, 122 bp, Homo sapiens
acgtttgacgttgcttctgtggcaacaatcagaggtttcaccactgccggaggaatctggcgcagaacctcgcccacggcaccagtcacccctctgctctcgtgttctcgagccgcagtttc

SEQ ID NO: 306955 - DNA, 122 bp, Homo sapiens
atccgcagcctccgggagaacacgggcggcggcgggctcgggttcgggctagggctggggcgcgggcggcccctggccggggcctctgcgagaggctgggaaccggcggcctcacctcctcc

SEQ ID NO: 306956 - DNA, 122 bp, Homo sapiens
ccgagactgagtttctgtggctctttatctcgtcttccatgagaagttttattaaagatgcgctgtgccccttttgagttgtcttccgatttacctgagccaaataagatgtaggcagttgc

SEQ ID NO: 306957 - DNA, 122 bp, Homo sapiens
gctccccaagaaaacaaaagcgaattcagcagcactgacctctgacggcgggcgggagggcggtcagcgcccggcagcgcaccccgctcctcccggctcctcacagcccgggctcccggccg

SEQ ID NO: 306958 - DNA, 122 bp, Homo sapiens
ggctggcaggaagcctgggcacaaacagggccgacttcccagtgtcagcgtcgatgaagccgtagcagcctggctcggtgacaccgaatgcgcagtgaaagaaggactcctggcggaagagg

SEQ ID NO: 306959 - DNA, 122 bp, Homo sapiens
aagtctgacccggccagtgggaaagccacctgcatcacaaagcgaggggcacacctgaaccggggctggcgggaagaggcaagtattgcgcgcgggctggctcccacatggagctgcctccc

SEQ ID NO: 306960 - DNA, 122 bp, Homo sapiens
atagaactcaggcagtctggcttcagaggccatgttcttaacctttacactatactacttcgtgactctaccccaaaatgtggagtgaagttgaaattttgtgccccagaacatgagtttca

SEQ ID NO: 306961 - DNA, 122 bp, Homo sapiens
gatacagagggtccatgtgcagatttgttacgtgagaatagtgcataatgctggagtttgcggtatgaatcccatcaccctgatagtgagtatagtatcccataggtggttttttaacccac

SEQ ID NO: 306962 - DNA, 122 bp, Homo sapiens
aggggagtgcgtggggagagctgtcaggccaggcctacctgtggcccttgatctcagccacgtcagtcatgcccccgacgctgaagcggaagtactctcggttcagggcgcgggcgatggag

SEQ ID NO: 306963 - DNA, 122 bp, Homo sapiens
aatacctaaacgttaataggcacatgcagctagtggcgaccatattagtgcagagccacacgcataaggctccactgatgttatgcccagccgccgacttattcttcagcacccccagctca

SEQ ID NO: 306964 - DNA, 122 bp, Homo sapiens
cttagtttccctgactgtaaaatgggaataatgatggccatctttgatgtgggcatccagcgaggccgtggatacaaatgcctgcacaaatgcttgccaagtgaaggggcaaatgtaagagt

SEQ ID NO: 306965 - DNA, 122 bp, Homo sapiens
caaaaagtatgaagtacgaagaaggcacatcttaaccaaactgcttaaactgggtaagaacgagacaatcttaacagcaggcagaagaaaagagacgtgctgggtacagaggaacaaagaca

SEQ ID NO: 306966 - DNA, 122 bp, Homo sapiens
ctttaagattttaaatgcaacctagacacttgtggttagggtgctgaattttgacatatgcggtttgacggaaagaatcactggtgtgtcaattctggtttgttgtaggttaacgaagccct

SEQ ID NO: 306967 - DNA, 122 bp, Homo sapiens
catagcttctgtccactcaaatgttgaatatccctgcattgtcaaattgtacccattactcggtacctgtctacctatagaagttcctttaaaaaaagagctgtctttttactacttcctgg

SEQ ID NO: 306968 - DNA, 122 bp, Homo sapiens
taaagctctgaagcttctttatgtaagcaatgcaaagcctctgggtgcactggaacccaacgcacccctccccccggcactactgcttggcagctggcagctgggatgttggggtcttgtgc

SEQ ID NO: 306969 - DNA, 122 bp, Homo sapiens
gcaagatttctgagcaatattcccggtaggaattcaagccacttcccaacacagtctatgcgtgtgtgtttgccacacacataagatcaaggagatcacatgtgactgcagatagattgaat

SEQ ID NO: 306970 - DNA, 122 bp, Homo sapiens
gcggtagaattttccgctatgggtcattctcggtgtccgcggggaagggcgtgacaacgacgggcgtgacggcgaagcaacagtgtctcgagagcgctgccgcccggagggcgccaggagaa

SEQ ID NO: 306971 - DNA, 122 bp, Homo sapiens
tggtgaactgcagactgactcagcaggtctgggggcaagggagtctgcatttttcatgggcgccccatcagtgcagctgccactggttcccagaccacactgggagcagcaagggcttaggg

SEQ ID NO: 306972 - DNA, 122 bp, Homo sapiens
ggcaatgttgccaggagtcacccctctcaatttgtcggcctagctgcctcctggcctgggcgttccccaccctgcagagcgtgccccgggcggtcctcgctgcagggaaaaccgctgggcct

SEQ ID NO: 306973 - DNA, 122 bp, Homo sapiens
ttttcaaactcaaatggaaaaaaacgaaacaaaaaccttgggcttcaagaggcatcctgccgcaaggcccagcgatgtgaattttcaacaaccgtctcaggcagatttcatgctgatggttc

SEQ ID NO: 306974 - DNA, 122 bp, Homo sapiens
cacggcaccattcaggatggccctacagatggtttcagactcccccacctctgccctgggcggccccatctgctggcccagctcagattgctgggctcccagctctaccgtggccccaggca

SEQ ID NO: 306975 - DNA, 122 bp, Homo sapiens
ggccagctcgctccccttggctggggtccctgggacctcctctgtggcatcaggactgcccgctaagttgggtggtgtgttttatgagcgtgacctgtgttggccaacagaggacagcaaaa

SEQ ID NO: 306976 - DNA, 122 bp, Homo sapiens
gtagtttgggtcacccaaaggcacacttgggaacattaaaaacctcataggggaacatgacgggggtggctgtgtgacctgtgggtgggcaactcctgtgtctggcttcagttcatccacct

SEQ ID NO: 306977 - DNA, 122 bp, Homo sapiens
ctgtagctgtttgagaacttggctttgcaaactactttcttaggccgaagaaaaactcctcggtaaactgttggaatttcaccaaagtatcaatcacggcagcccttgggactaatccagta

SEQ ID NO: 306978 - DNA, 122 bp, Homo sapiens
ggtgggcacagtactctgcatctccagacagcatcctccgctgattcggatgcatgatgacgtcagaacacttggatattgtggtaacttttgggccaggggctctgaaaccccgaagacct

SEQ ID NO: 306979 - DNA, 122 bp, Homo sapiens
tgtggtctgcagacagaagctttaccctgtgcacatacgaggagtaactcatttgagtgacgtcactggactgcggcccttagagcctcctgacgcggaggtgggcctttcacttctgcctt

SEQ ID NO: 306980 - DNA, 122 bp, Homo sapiens
caggacttgtgtccttctaattaccccaaggaaattctataaagcttcaaccagactaatcggctcactgctcccccaacacaaactgcccgcatatctaggctggattacgcccacgccag

SEQ ID NO: 306981 - DNA, 122 bp, Homo sapiens
agggagccggggagcgctgaagcccgcggccgttggggctaagagagggctatctgcaggcgtcctaggccccaggtggacccctgctccattggcgatagagccctggcagaaccctgccc

SEQ ID NO: 306982 - DNA, 122 bp, Homo sapiens
acatcatgccatttccacacagagctggccaagcaactcactggcttatacacagagttccgtggctccttgagactgactcattgcagaacttgggaaaagcaagggtctttcctttccct

SEQ ID NO: 306983 - DNA, 122 bp, Homo sapiens
gtctcccccacctcctgcagccgtggccaacacacacacttcctgaaaacactgagaaagcgaaaagtcacccagaatcccccggggcagacacttcctccccgcccccaggctgcaccccc

SEQ ID NO: 306984 - DNA, 122 bp, Homo sapiens
gatttggacgcgagtgggaatgaggtgagggagggatgagggcgggtcaggtggttgctgcggtcaagtcctggacagcaggagcagtctccaggggtgcctcagagcggactctaaaggcc

SEQ ID NO: 306985 - DNA, 122 bp, Homo sapiens
agcgagcctttgtacgaaggcagagggctgactcctaagttctgtccccctcccgaaggccggccgctagggaagacttggccaccctctggaagtaccttcccccgggaaaaccgcagcag

SEQ ID NO: 306986 - DNA, 122 bp, Homo sapiens
ataactttcctacttcttacttgcagtgctgtgttggacgagttgctggcctctctgagacggtacccattgtaaaatgtgtataaagtggccttgtgaagctctaggcaatgcgaagcact

SEQ ID NO: 306987 - DNA, 122 bp, Homo sapiens
cacgagcggcctctcttcagtatcagatcccacctgcatgattcctgcacctgctgatgtcggggaggtccggttgcgcgccctgtgggcccccagaggcatggctggtggccgagcacgcg

SEQ ID NO: 306988 - DNA, 122 bp, Homo sapiens
cccttcgaggcgggggctttcctgccaaggggcgataggtgggccatcccgaggcgggaacgatcaggtaggtgttggctggctttctcctgggtgagtagttaggggaaccgcccctccag

SEQ ID NO: 306989 - DNA, 122 bp, Homo sapiens
tgtccttgcgcttgccctgcaagttctgcgccccaggccccggcagggacggaaacaggccgggaagcagtgacacctggggcagtcagtcatccaggagccgccgccacccgccccacccc

SEQ ID NO: 306990 - DNA, 122 bp, Homo sapiens
tactatattcaatatggggcaagctctgtttcttgctctgtactgtcatgcgactcagcacgtgccgaccgcagcatcttctctgtctctgctgtgctgatgaccatccagttgaatcctgc

SEQ ID NO: 306991 - DNA, 122 bp, Homo sapiens
atgatcatagctcagcaatgttgaactcctgggctccagcaaacctcccagtcagccgggcgcagtggctcatgcccgtaatcccagcaccttgggaggccagggagggcggatcacaaggt

SEQ ID NO: 306992 - DNA, 122 bp, Homo sapiens
cctcgcggcgttttcaagtgctggctgcgaagcttgaaaaggacccgccgctgggccgggcgttttgtgtttgccaaacaaagcatgaaggcagagtgagtaaagggggcggacccggcgcg

SEQ ID NO: 306993 - DNA, 122 bp, Homo sapiens
ggagctgtacaggggacagggccagccccatgcagaggcacctagtaccaaatgcccagccggactgcccgtcattactctggctgccatagtggtgatttcccagaattgtattccttcct

SEQ ID NO: 306994 - DNA, 122 bp, Homo sapiens
acagagtcgccttggtgaacacagaaggatattgagtgcacacgcgcccccaccagtacacgctatttagaataataatatgtgtggtgctcccaagagttcacaaatgatttcgcatccca

SEQ ID NO: 306995 - DNA, 122 bp, Homo sapiens
gaggacggtaagcgctgcctctggctggtcggcgcagctggcaggaggcggggtggcctacgcagggggtctgtttaccgtctcaagatggccgtgtgggctttgttctgcgggcccggagg

SEQ ID NO: 306996 - DNA, 122 bp, Homo sapiens
gatcagggatgttgcccgcagagtgacccgcaaaggctgggcctaggtttcctgaatagacgtgccgccgggaagttgggggcctggctgaggctgtgcgggcacagctgttacaggcaggg

SEQ ID NO: 306997 - DNA, 122 bp, Homo sapiens
aattaaccactcatttattgatctccccactccatctaacatctccacatgatgaaacctcggctcacttcttggcgcctgcctaaccattcaaatgatcacaggactattcctagccatac

SEQ ID NO: 306998 - DNA, 122 bp, Homo sapiens
aagttgacagatgagctttatatttcttgaaaattttctctttatctcagttcacagaggcggatgggaaaggaacagatgtcagaaacagcagtgattctcagggaagattaaatggtaga

SEQ ID NO: 306999 - DNA, 122 bp, Homo sapiens
gccggggcccactccgatccgcctgggctcagctaagcacggaagccaagggggctgtgccgtggagctgggctcgcgccggggctctgggtgtgtgcgcttggcgtgcagggtggacgcgt

SEQ ID NO: 307000 - DNA, 122 bp, Homo sapiens
ctatggacttgcctgcgctggatattttatgtaaatagcatcatacaatatgtggcctttcgcacaatacggctggcttctttcacttagcataatgttttcaagtgtcagcctagcgtatt

SEQ ID NO: 307001 - DNA, 122 bp, Homo sapiens
caaacctggtgcacatgtgaaataggttctctaacttgagtttaccaggtggcatcagcccggttatgtgatttcggctggaaatggggaaactgaaaatcagttgtgggttcggtagaaac

SEQ ID NO: 307002 - DNA, 122 bp, Homo sapiens
tgccaccagtccaatcattcccaacagcatagctctgccccggctacatcaggagctatccgagaacagaaatcggttgagcttctcctgtccccttcctaatgagtgacccaaggcaccca

SEQ ID NO: 307003 - DNA, 122 bp, Homo sapiens
ggctgccggaaggaggacttccaactgggcagggtctgcaccttcttcccagggctgcaccggctccccggccccgtgggggctgttctggagagcaccgccacggccgccccgtccaggga

SEQ ID NO: 307004 - DNA, 122 bp, Homo sapiens
tgtttcttccagaaattcagacgcaacagaggttaggccagtttggtgggttccagtgagcggtgtgttgagcctagtagagcataggtacttggggttgccaaaaccccagcaagttgagg

SEQ ID NO: 307005 - DNA, 122 bp, Homo sapiens
gcgctgtgagccacgcagccccttcctgggctcaggctccttggttgattctaggctcagcgttttggcgcagcctttgctctccaagagacgcctaagcgcctgggcgccgtgcttctgct

SEQ ID NO: 307006 - DNA, 122 bp, Homo sapiens
tgtaatcccatcgactcaggaggctgaggcagaagaatcgcttgaaaggttgcagtgagccgagatcacaccatcgcacagcagcctgcaggacaagagcgaaactccatctcaaaaaaaaa

SEQ ID NO: 307007 - DNA, 122 bp, Homo sapiens
cccacaggcggtccgggtggtcggtgactgcctccccgagtgtcgggcactcggccatggcgtcctcgggccgcctaagaagcaagagccagagcctctcaaggccgctcgctggtccctgg

SEQ ID NO: 307008 - DNA, 122 bp, Homo sapiens
caccgtattaatgatttatacaccccgcaccactgcttttgttcacttgcggggcctggtcgtgttcataacggaatttcagggagtggggtcctgccttgccatgctgttttgctcagtgc

SEQ ID NO: 307009 - DNA, 122 bp, Homo sapiens
actccattttcccgcgtagctctgcgcagattctcgaggagactgcttccggctcagggacgccaagtgcagcagccgacgctgcagaggctctcgcggacagggccaggggtgcccgcccc

SEQ ID NO: 307010 - DNA, 122 bp, Homo sapiens
cagatctatgaattagcggtctgggtggcagcccattcttctttcagaggcccagaacaccgtgaaactatgctttcctgactcaagagaccctacctagacgtgggcccctttgacgagca

SEQ ID NO: 307011 - DNA, 122 bp, Homo sapiens
gcgcccagtcgcggagccacagacaaccgcccgctggcctaggaaaagcgggcgcgctcccgctgccgccccaccccagaatcaaaccgcgaaagagcagcgccgagcgccacccgcgttcc

SEQ ID NO: 307012 - DNA, 122 bp, Homo sapiens
ccctgggattctcttgccatgttcccttggtctctctttatgggcagcagcgacccctgtcgggtctcaaattcaacctcaatcggcgacttaatctaggtggaggtaaagaggaagcgacc

SEQ ID NO: 307013 - DNA, 122 bp, Homo sapiens
tctctagtggtggagacggcaagtgagcagacagctagacactgtgagctctgttctgtacgagagggtgtgcccagagaaggacacccagtccttggtggctttgttagccatttaatata

SEQ ID NO: 307014 - DNA, 122 bp, Homo sapiens
caaattccctccttgccatcagccacggggcagttccccaaagcgctaaagcctggagaacgcaaagcacatccagttacttaaaagcagcctttgtttcctacaatgagagaataaatcct

SEQ ID NO: 307015 - DNA, 122 bp, Homo sapiens
agacgcggccggtcccgcctccctcccagcccggaagatggggagcggggacaggcgacgcggacgaagcgggaggagccactggcagcctttgcgtactgtcatagcaacgggaagggcac

SEQ ID NO: 307016 - DNA, 122 bp, Homo sapiens
gaggaaaaatgtgggagcccccaagtaaggaccctctctgggagccggccacccctgctccgtcccctttcagagaactctggagacgagaacatgagcgacgtgaccttcgactctctccc

SEQ ID NO: 307017 - DNA, 122 bp, Homo sapiens
ggactggactttgcatcttcccttcgcgtggagcctcagtgtgagaggccctagccaatgcgtgcatgtcagaggtggtggggaccacatcagaagaagaggggggtgatgaaattaacaaa

SEQ ID NO: 307018 - DNA, 122 bp, Homo sapiens
tgtttttttttctttgagacggagtttcggtcttgttgccctggctggtgtgcactggcgcgatattggctcaccactgaaggggtggcctgcccctccacacctgtgggtgtttctcgtca

SEQ ID NO: 307019 - DNA, 122 bp, Homo sapiens
aacctcgctgagcccaagcattggtagggagaccccagcggccagtaaggcggctcctggcgccccctcgggccggagctgtgcgctgcaaggctggatcggagggagggcccaggggcctg

SEQ ID NO: 307020 - DNA, 122 bp, Homo sapiens
tccaggaggcaggcatcctctcccacagctactgaggaagtggttaacttcagtgtagctcggctcaactcagacaagccaggggtagccaaccggtactattcagagttgtgcataatgcc

SEQ ID NO: 307021 - DNA, 122 bp, Homo sapiens
tgactggatcacaggggtggtttctcatgagtggtttagcaccgtccccggtgctgttctcgtgatagtgagggagctctcacgagatctggtcgtttgaacgtgtgtggcagctccccgct

SEQ ID NO: 307022 - DNA, 122 bp, Homo sapiens
ccggtacaggtgaccggcgtcctgcagggcaggtgaccggccttgcattggatcccatgacgttctgctgccaagcactccgtagctggggaccggccggctgactcctgggtcccgataga

SEQ ID NO: 307023 - DNA, 122 bp, Homo sapiens
gcgctcccagacactggggaaagtgctttacgatgtcccgagtccctccagtctcgccagcggggcgagcgtgagggtgccccgaccgaccagcggccccgggtgcagggtggcgggcccgg

SEQ ID NO: 307024 - DNA, 122 bp, Homo sapiens
ggtaggctgtctcccagcacacatcagggaacctcagctctaatgagtacaaagccagcacgtttatttctggataaacagtgagggtgtgagctgctgcacctgctcctggctgtggggct

SEQ ID NO: 307025 - DNA, 122 bp, Homo sapiens
atgtggccatgtttagtggcccgtcactactcccctgcactggacaggctagggagaggccgctcaggatgtctctgctcaagtctgagggccacacaccacagcagaggggccagagactg

SEQ ID NO: 307026 - DNA, 122 bp, Homo sapiens
agcgggccccttcgggccagcgggcagagggacggtctccgggcacttggttgcgggctgcgcccctgcctccgcgctccgcaggtccggtcggtccgggcagaggtgagcagggggcgtgc

SEQ ID NO: 307027 - DNA, 122 bp, Homo sapiens
aactcgacccgttgttctcctggactgaggagcccgaggagtgtggccccgcgagctgcccggagagcgcgcctttccgcttgcaggggtccagcagcagccaccgagcgcggggcgaggtc

SEQ ID NO: 307028 - DNA, 122 bp, Homo sapiens
gcctccgagccagagcacagtcaaggaatcagatggcaattgcgtctctccttgggaacccgctccagggcttctgtcctctctctctggcggtgccgaggttgcctcagggctctccctcc

SEQ ID NO: 307029 - DNA, 122 bp, Homo sapiens
cgcggcggactgcggcgtggtaggaactacaccacccagaatactgtgcgccgagcgtgccggggccttagaccaatcattgcccaggaaaggggcacctccgtaagtgcgcaatacgccag

SEQ ID NO: 307030 - DNA, 122 bp, Homo sapiens
gggaatgttgggagcctcccaaggaggcttctcgcattccagaagcccccagggctgtcccgggcgggttgtaatgccccagactttggagatggatgcctatgtctcttgcaaaaggtctc

SEQ ID NO: 307031 - DNA, 122 bp, Homo sapiens
tgcggacaagagtgcacagaagcgaggaaagggggaggagagggctgtgggaagctgcggcgagatgagaagcagcatagggaccggagtgtcccaggcaaaggacaggagcggcgagtaga

SEQ ID NO: 307032 - DNA, 122 bp, Homo sapiens
acttggcacctccattcctcctcagggacaaaagaacggccatctccatccctcacttagcggtcagaatgacagggtgacccttgctatgtactacaaaaacacaggccttgcttttctta

SEQ ID NO: 307033 - DNA, 122 bp, Homo sapiens
agagaaggtcatgggccatggctcctgggacctggagcatctcccttgcagatgaacattcgagagcttcagagttttatgtcctacctgggccaggcaccatgccatgggggagggccagg

SEQ ID NO: 307034 - DNA, 122 bp, Homo sapiens
cgacgagctgcgcgcgctggagcgcgatggcggcctccccgggccgcgcctgctgctcgccgacaaccccctgcgctgcggctgtgccgcacgccccctgctggcctggctgcgcaacgcca

SEQ ID NO: 307035 - DNA, 122 bp, Homo sapiens
tatttaaaaggaaaactctgcctgggttcttgattgttgatggtctagatatccagtttacggatgattcaggccacatgctgagtatgcctgtcttgtggtccttttactatttattagac

SEQ ID NO: 307036 - DNA, 122 bp, Homo sapiens
cacggaggcctcgcaggaagtgcgtgtccacggaggcgcttggtggccaggggcggggggcggggggcggtgtgcgccggggtccgggaggctacgcaagctccgcccacgaggccattcgg

SEQ ID NO: 307037 - DNA, 122 bp, Homo sapiens
atgaatgaatgcgtgcacagggacgtgctgaggaggcttgggggccaattggctctgccccgccctgcctctgatccccgcctcctcacctgcccgcagccaccttctgggtgaaccctcag

SEQ ID NO: 307038 - DNA, 122 bp, Homo sapiens
ttactagttttatgacctttctgtgcctctgttttctgatctgtaatattggctaattaacggagaggcttgataatggcaatagtgttggcagataacactgaatgaacatgagctaccat

SEQ ID NO: 307039 - DNA, 122 bp, Homo sapiens
catactccggccctgtgcgtgcgcttccactggggaagttgtcccctggggtggaagggtcgaggcctccgtgggcttcgggttacttggggaagctcgtgacccttggaagcgaagctgct

SEQ ID NO: 307040 - DNA, 122 bp, Homo sapiens
cgccctgcgcctgcgcggtgaagcgccatagagctgagcactcctcccagattcctagagcggacagggcgatggcaggttcgccgggtgtgaggcttcacagcggtccggtgaccaagtcg

SEQ ID NO: 307041 - DNA, 122 bp, Homo sapiens
caagctaaaaatacgccggcccagtaaacaaatcccattccatcccgaccggagccacaccgttaacctagtaattatgagaagagtgagatcacgcagcccccggcttactcatcatcagc

SEQ ID NO: 307042 - DNA, 122 bp, Homo sapiens
tacttcaaaatgaagctgctagtcagtcacattcgacattcattatcttcactggctactcgtccacactcagaacgctgttcactgacaaaaaaaatttgatttagtctaggtgtggatta

SEQ ID NO: 307043 - DNA, 122 bp, Homo sapiens
tcttagctgctgaaatcagtgctctttcacttcttcagagaagcagggatggtacctacccggcaggtaggttagatgtgggtggtgcatgttaatttcccttagaagttccaagccctgtt

SEQ ID NO: 307044 - DNA, 122 bp, Homo sapiens
ccattagcgatgctgctgcataatgagagcctgcaatcagctcacagctgccgctcctgccgggagagcatgatattaaatagaaatcaggagaaattaaacttaaccctttccctggccag

SEQ ID NO: 307045 - DNA, 122 bp, Homo sapiens
tccacccccattcccagcccaccaagccctttcctgcctcagggacattgtacgtgcgtgcgatgcctcctccacagagcggacctccctgaccactgccctaatgggcttctccatcactg

SEQ ID NO: 307046 - DNA, 122 bp, Homo sapiens
ttcttctatccttctataaataccaagtttttcagcacttaggctgtaattgttttactccgctggtattttcttcttaggcttctagtgctaactaaacataaggactcaaatttacatag

SEQ ID NO: 307047 - DNA, 122 bp, Homo sapiens
acaccaagacttccgaggcaagtgggggctccccctggcggctgcgccgggtggctgctccgggattgtgcggacctccgagctacaccgtctccaaccaacagaagccagcaggaacctgc

SEQ ID NO: 307048 - DNA, 122 bp, Homo sapiens
gcgggattttttttttctttcgcactgtcttctgggaattgtagtctctcctaggctaggcggcccgtccaaagcgcatgcgcccagacacctccgaaaaccaacgcggcagagcgcagaaa

SEQ ID NO: 307049 - DNA, 122 bp, Homo sapiens
ataattctggaattagtcaggatggaggaataacgtagtggattgcaaattgcaatgtaccggtcaaaggccatagtgaggaggacagaggactccatgaaggacagaccatggatgaaata

SEQ ID NO: 307050 - DNA, 122 bp, Homo sapiens
ctcgcggcctcgcccaatcgcgggccgccagaccagcgcgcggcgccccccgccccgcaccgaggtgggagccccgcccctagccccgccctctgcagactcttgcacgagctgcccccgtg

SEQ ID NO: 307051 - DNA, 122 bp, Homo sapiens
ccattgcacttggtctcttgacctcgatgttgcccatgagcagtgaaggatgacttttgacgagccatgtcagatgtgacaggcaatctagttggcttgagtggaaatgtgctgtacaagtt

SEQ ID NO: 307052 - DNA, 122 bp, Homo sapiens
tgccctgtcggaatatgtccagccctaatgagggaggcgttgtcttcagatcacacactccgcagcggctctgctctgccgcgccccttcaggagcgctgggtctgagagaggacttcagaa

SEQ ID NO: 307053 - DNA, 122 bp, Homo sapiens
tgcaggaacaatggcagccttcagcacgatcgggagtggcaatgggagtctcgttggatccggagcacagcggacaccctgccggatctggagggatgggagtcagtggcgggatgggagtc

SEQ ID NO: 307054 - DNA, 122 bp, Homo sapiens
gagccgcccaccctgggttcctcaagaggatcacctggggctcgttaaaaacccagctcccggcggctccaaaccgtgactgggcagggaggggtctgggaatccggattttaaaccagcat

SEQ ID NO: 307055 - DNA, 122 bp, Homo sapiens
ggtcccggcacttccagaggcctcagggtcctggtcttgtagagacttcctgaacggtggcgcctgttccagtgtgtgtgcgctaactgcctgttctgtgccagccgcgcgtggccgaaggg

SEQ ID NO: 307056 - DNA, 122 bp, Homo sapiens
aagtgactttgcttctctgtgtctgtttcttcaactataaaataggtatgaaaacagtaccgacctcacagggttttgtgaggattaagttgatacatttgaaagtgcttggaggccaggca

SEQ ID NO: 307057 - DNA, 122 bp, Homo sapiens
tcagtagccccaaagcacatgatacactttaaagtgatctgggccgggtgcagtggctcacgcctgtaatcccagcactttgacaggccaaggcgggtagattacctgaggtcagtagtttg

SEQ ID NO: 307058 - DNA, 122 bp, Homo sapiens
gggtccacgcggatgttggcaccgtgcacccgatggaagcgggtgggagggggctccgggcgctcgagtccccagagtgcacccgaatccacgggctcggaggcagcagccatctctcggcc

SEQ ID NO: 307059 - DNA, 122 bp, Homo sapiens
gctcatatgagaacgtctggatacacagggctacacacggaccctcctgtatactgacaacgctcaaatgaaaacgtctggatacacagggctacacacagaccctcctgtatactgaaaac

SEQ ID NO: 307060 - DNA, 122 bp, Homo sapiens
tgtaaatggaatcacagagttcgagaccttttgagcccagcttccttcacttcacacaggcgtttgagagtggtccgtgttattccatggatcaaaagtttgttcttgttgccgaagcgtat

SEQ ID NO: 307061 - DNA, 122 bp, Homo sapiens
gcaaggcgaccatgccagcctcagtgacctgaacggaacccgagacgtgcatgcaggagccgggagggacgttcgcaatcgctgctcaagcccgacagcaagacgaccatgccagcctcagt

SEQ ID NO: 307062 - DNA, 122 bp, Homo sapiens
agtgcgtcccagtgcaaagccggaggtgcgggggccagggacgccctgcctgggctgctccgggctgcctgtggagggctgactgcaggaggggccgcgggctggtacctgtgtccgagtcc

SEQ ID NO: 307063 - DNA, 122 bp, Homo sapiens
cctctcattcctgcctcttttgtccctcttcctctttcccttttgtctatattcagttcccgatacaaagctttgagtagcaaggctgatggacccctgtcccctgggaggacaaccaacct

SEQ ID NO: 307064 - DNA, 122 bp, Homo sapiens
ggcgcgtctgggccgctctcccggcagaaagtctaaagagtttcattgcaaagtgtggctcgcgactgtcgcgctctcctctatacgcgactcccttttcgttctttcccagccccagccct

SEQ ID NO: 307065 - DNA, 122 bp, Homo sapiens
atctttttccaaactggcccatgaggtcagagacagtatctccattgtaacgtggccgggcggtgtcaacacaaacgcccccaccctcccctggacgcgcgtaacccgctccccgcaccagc

SEQ ID NO: 307066 - DNA, 122 bp, Homo sapiens
ccttcttccctccctctctgccacgggtgactctaacaaagaagctgtttgctggtcaggcgagcagagcaggggctgaggaaaggggtgtgtgttgggctggggttgagagcaggccctgt

SEQ ID NO: 307067 - DNA, 122 bp, Homo sapiens
agagaatggattaggtggcgtgactctgatgacgcaacgcacggggcggagctcagagaccgggttcccgctgcgcgtgatcgggccgtggtggttgtgtgcccacgtttagcagcgtgctg

SEQ ID NO: 307068 - DNA, 122 bp, Homo sapiens
tcccaaggctttccagagcgaacctgtgcggctgcaggcaccggcgtgttgagtttccggcgttccgaaggactgagctcttgtcgcggatcccgtccgccgtttccagcccccagtctcag

SEQ ID NO: 307069 - DNA, 122 bp, Homo sapiens
tgctccgaagacttccgggtttccaacgtgacttccggttgtcagaatttacccctgacgcggcggcggccgacgggaagctgtgtgtgcttaggtcgtggtggccccggtggtggtgggct

SEQ ID NO: 307070 - DNA, 122 bp, Homo sapiens
cagggagatctgcagtgaaacaagctgccagagactatcatcaagagctgctgctgcagacgttcaagctaagaatcagaggggaaaggaggagtggggaaaggtaagaaaagcaggaaaac

SEQ ID NO: 307071 - DNA, 122 bp, Homo sapiens
actggaggggcctcgggatttggggcaggatcacaggcctagtccacttaaaggtggctccgtgccaggccttcccagaatcaggttgaaaagaactttagggttagacaggttggagatga

SEQ ID NO: 307072 - DNA, 122 bp, Homo sapiens
aatagtaagaaatgaaaacaggcagggtagcttgctgtctgtgtttaaaactattaaacccggtaggtaaagcccatttggctttaaggttttattaggctctcacagaccccatctccacc

SEQ ID NO: 307073 - DNA, 122 bp, Homo sapiens
tgttatctcctcagttataaagtgaagggatttttctttttcagattactgagagtcttccgttactaggtaagtcaccgcatccttataactccaggtgacactgactggggtttatggga

SEQ ID NO: 307074 - DNA, 122 bp, Homo sapiens
gtttgtcctgcttccccaacaacaatggcttttgaagaacatgcttttgaagtgcaggatcgtggtgtttggggacaaagatgatggttgtggtagtaacagacctaacacactgatcagat

SEQ ID NO: 307075 - DNA, 122 bp, Homo sapiens
agcagccccgggtatctgataatatgacagaatgacagctattgactagagagcttaatccgtacctatttacaggtagggatgtctttaataagttaaaggaaattgaaagtttgttaata

SEQ ID NO: 307076 - DNA, 122 bp, Homo sapiens
cgcgtaaacacaccgagccattcagagctctctccaagtcacattctgaggctccggccccggaactctgggctagacgaccccgccccggaaccttgtgttaccggcactaaatgcagaag

SEQ ID NO: 307077 - DNA, 122 bp, Homo sapiens
aaacaacctggctccagaaagacaattaacaaaggctggagaccagccaccccctcgcggcgcacgcacgcaggcagctgcgtgggcatagccgcgcccgccagcgccctcggtgggcacag

SEQ ID NO: 307078 - DNA, 122 bp, Homo sapiens
gttcccctgggcttcaggacagagatccgagacggcaaacatgcaaaagcacccccataacggagcggctggccaacggggcctcctgccaccctccaccccggctcacggtgttctcacaa

SEQ ID NO: 307079 - DNA, 122 bp, Homo sapiens
tgctatttatagtttgaaatgttatcattttgccttgttttcgtggcctgaagtccccagcgcttcctgtctagcagtcctcattctctccctttgcacagtctgcctttagtttaaaatct

SEQ ID NO: 307080 - DNA, 122 bp, Homo sapiens
actgcgcgcccgagctgtgcgcatgcgcggaccgtccgcgcggtcgcaacgcgcaggcgccgtgtccacttccgggatctgtcagccgctccctctgggcttccgtcctccgcccgcgcccg

SEQ ID NO: 307081 - DNA, 122 bp, Homo sapiens
cttgatgatcaggtccacggcggctgccacacgctcctctaggcccttcagcggcagcagcgcctccagcacctgtggggtcgggctctgagcaggtgctggcagcacccacagcaccggcc

SEQ ID NO: 307082 - DNA, 122 bp, Homo sapiens
accggcggcggcacacgggcgagaagccgtacgcatgcgcgcactgcggccgccgcttcgcgcagagctccaactacgcacagcacctgcgcgtgcacacgggcgagaagccgtacgcgtgc

SEQ ID NO: 307083 - DNA, 122 bp, Homo sapiens
cactatgcattctgtgtagaccggccggaaccactgcctggtcattctctgtagaccggccgcaaccactgcctggtcattctctgtagaccggccggaaccactgcctggtcattctctgt

SEQ ID NO: 307084 - DNA, 122 bp, Homo sapiens
ccgtccctagcctgcgcctcagaccgagtccgggcggagtttgactgcagctactgaggccggcagccggcggcggcgggtgcgcagcgtctgggttcagaagaaagccgcaggtgggcgca

SEQ ID NO: 307085 - DNA, 122 bp, Homo sapiens
gctgctcattcctgtccggctgtaacaggacaccccaccctagcacctgaggacagtcatcgggcactcggataaacagagcaggaagaagatacccactgcattaccattgcagatacata

SEQ ID NO: 307086 - DNA, 122 bp, Homo sapiens
tgtagtggggtcattgggtaatcatctccggctctctgctgcagttggtgcgcacagacccggctagtttaaggccattgatgggactcctgtagacgctaagcgatggaaacattgtgcgc

SEQ ID NO: 307087 - DNA, 122 bp, Homo sapiens
ctcccccggcagctgtcctgagacacagaaaccacgaccacaaatcacagggctgcttggcgctcagacatattaggaaaaaaaggaagaagatttgggtgatctgaaaaggtcagtttgag

SEQ ID NO: 307088 - DNA, 122 bp, Homo sapiens
cctggggctcctgcttccccatcccggagttcccctgctccccacctccagtcgtcctgccggacctccacctggagctgtcacccccggagtcgccacacagacgtcctgccatggaacct

SEQ ID NO: 307089 - DNA, 122 bp, Homo sapiens
aggcctcttccgatttgtcggcggggacctgactccctgcggtgtctctggccccaaatacggaggccaggagcttttcgttgtctcgcccgatttggtatcttattagccggtgtcgctga

SEQ ID NO: 307090 - DNA, 122 bp, Homo sapiens
acgcccggtccgtgcaggagccgcagcggggacgcgggggatttgcgacccgggccgaagcggaggtttcctagctggggtctgagatgtggacctgaggcagaactgcccgtgggggatag

SEQ ID NO: 307091 - DNA, 122 bp, Homo sapiens
acacacacacatccacccatccacagcggaaggccagcagggcaccgaaagaaattgtggcggtcgcctggaccgcagaaggcagacctcaggaaggagcaggcgacagcgctgctcactgc

SEQ ID NO: 307092 - DNA, 122 bp, Homo sapiens
gcctgcagtgtcggctgaagagggtaacgtgcgtgcgccccggctgctcccggctgctcccggctgctccccggctgctccccgctgctcccggctgctccccggctgctccccggctgctc

SEQ ID NO: 307093 - DNA, 122 bp, Homo sapiens
cagggcgggccaaggcggctgttctcgctccagctcgatgctgcctccccggcccggttgcgctgtagccgctgccgcctctgcctgggtcccttcggccgtacctctgcgtgggggctgcc

SEQ ID NO: 307094 - DNA, 122 bp, Homo sapiens
cgtagaagaagacagtagaatgatggttgcagggattgggaggagggtaaaatggggaatcgctaataatgggtataaagtttcagctatgcaagatgaataagttccagagatctgttgta

SEQ ID NO: 307095 - DNA, 122 bp, Homo sapiens
gtggctcctcaggctctctcccctgctctcccacctctacctccacccccaccggcctgacgctgtggccccgggacccagcagagctgggggagggatcagcccccaaagaaatgggggtg

SEQ ID NO: 307096 - DNA, 122 bp, Homo sapiens
tctcctcccactctatctagctggttacactttagtaggctacaccaccaagaatcctttcggaaattaaactgccctgttgcaaaaatcattctccaaatatttacatgagctgcattagg

SEQ ID NO: 307097 - DNA, 122 bp, Homo sapiens
caagtcactgcttgagcctcagtctttgggcttgcacctcctccctggcagcggtgtgaccggagggaaaggcagcggcgagggccttggaggacctgcaggcagtgccccgcccacccaga

SEQ ID NO: 307098 - DNA, 122 bp, Homo sapiens
gcctcgctgaacaaacagtggttgggttgggcactgctctgcccagtgtttgcagtggagcgtgggcggatgcgagagtgcgtgcgaaggggaaggcgacttagttaaacaaaagggaaggg

SEQ ID NO: 307099 - DNA, 122 bp, Homo sapiens
agaaacactcagtttttccaagttgaggtcagagaggaacagtctctccataccccacaccgttcagtcacttagctcagccaccgtgggaacagtgcatgaattgcgacaaggctgctcag

SEQ ID NO: 307100 - DNA, 122 bp, Homo sapiens
ctctgataagttcgttttattgtgagaataaaactgctcaatgggcgctgttattccaagcgaggtcaggatttccggattctaccccgctccgcccctggccccgccccgagaatgtacgt

SEQ ID NO: 307101 - DNA, 122 bp, Homo sapiens
acaccccatggacaggatagtcagcagacaagtaagtaacagggctggctgggaagcccccgagccatcaccagcctcccctccagaaaagcctgtgcctgctgccccctagtggacatgga

SEQ ID NO: 307102 - DNA, 122 bp, Homo sapiens
ggtgtggtcccaagtgtacagtggcatcaagctcagcgcgagctcccgggaacgctccaacgccttcagcctgtttcccaggaacggtccccggcttcgcgccccaatttctaacagcctgc

SEQ ID NO: 307103 - DNA, 122 bp, Homo sapiens
gaaccacattccctagatgggccacgctccctagatgaaccacgctccctagatgaaccacgctccctagatgagccacactccctagatgggccacactccctagattaaccacattccct

SEQ ID NO: 307104 - DNA, 122 bp, Homo sapiens
gaaccgagaggctgagactaacccagaaacatccaattctcaaactgaagctcgcactctcgcctccagcatgaaagtctctgccgcccttctgtgcctgctgctcatagcagccaccttca

SEQ ID NO: 307105 - DNA, 122 bp, Homo sapiens
ctcgcccctcccccaggtcgccgaaagttcaaacattaaaggggcaggtttagagttctccgggcacaggcccggcccggtggctcacgcctataatcccattagtttgggaggccaacgcg

SEQ ID NO: 307106 - DNA, 122 bp, Homo sapiens
gaggctgaggcagagaattttttgaacctgggaggcagagcttgcagtgagcccaggtcgcgccactgcactccagcctgggtgacagagtgagactcatctcaaaaaaaaaaaaaaaaaaa

SEQ ID NO: 307107 - DNA, 122 bp, Homo sapiens
ctgtgctcactgctgggaactggcagctcaggggtctcggtcctgcctgcttcccctccacggcccctcgctgcctgtagctcctcacgccttagtccagctccatctgctcattccctgga

SEQ ID NO: 307108 - DNA, 122 bp, Homo sapiens
ccccagcccgtaggaaagacctagcctcctctccagcacttgtagagggagtcggatgcacgtctcttaaccacaggaagacagagaccctgaggcgggagcttcccttgctgcttctcttg

SEQ ID NO: 307109 - DNA, 122 bp, Homo sapiens
taaaggcggtgtctacatcatcctatccagcatccacactcagcagcacagcagcgggcgcgtgggaccccagcccccacctgcaggcatgcacgaccacgataagcttgtttctctgcgag

SEQ ID NO: 307110 - DNA, 122 bp, Homo sapiens
actccatagtaaccgacactcagcgctgggcattcccactgcatagtaaccgacactcagcgctgggcattcccactgcatagtaaccgacactcagcgctggacattcccactgcatagta

SEQ ID NO: 307111 - DNA, 122 bp, Homo sapiens
atcacagtgcatggggatgggtgggtgcatggggatggaggggcatttgggagccctccccgataccaccccctgcagccacccagatagcctgtcctggcctgtctgtcccagtccagggc

SEQ ID NO: 307112 - DNA, 122 bp, Homo sapiens
aattgccatacattgatctatacatatttaaaatgcgagagcagcaagggcattgacacacgaacacacaggtggaggctttgcctgctgggaaggggacgcatccctcaccctagagactg

SEQ ID NO: 307113 - DNA, 122 bp, Homo sapiens
cccggtgccctggaagggctccaggtggcggtctcgctgcagaatcctccgagctgcgctcgccgcccggtgccttcgcagcggccccggttgggttgcgggtcgcggggcggcgagcgcag

SEQ ID NO: 307114 - DNA, 122 bp, Homo sapiens
cggtgaaggtgggcgggactaagtcgccttagtccgtgacgtgcggtgtagttggggaaacgcaccgtggttccccgtcgggtcaggagatcccgagccccaggctggcgtgggcgaagcgt

SEQ ID NO: 307115 - DNA, 122 bp, Homo sapiens
tagagctgtaactagtaattaaagttcattaatcagctgtctcagccaggggcactaggccggctgctattttgatcaaacaattatttatcctgataaggggggaacatgtgagaagcttc

SEQ ID NO: 307116 - DNA, 122 bp, Homo sapiens
tgcacagtggctccctggggatggggcccatggccacagagctggagcccctgtgcactccggtggtcacctgtactcccagctgcactgcttacacgtcttccttcgtcttcacctacccc

SEQ ID NO: 307117 - DNA, 122 bp, Homo sapiens
gccggggagggaaaagcgcgactgtgattcgtacggctgggcccggaccgtgaaggggaccgggttgcggctgccctcacaccgaccaggtgggaccgtcggactgcggccgcccttggctc

SEQ ID NO: 307118 - DNA, 122 bp, Homo sapiens
aggctggagaaagtgcgagaagatgccagaaggtgcgaacctgagcggttcaggcagagccggcggtcgctcagacacctagggggattacaggacggaaggactcgtgaggggtccccaga

SEQ ID NO: 307119 - DNA, 122 bp, Homo sapiens
gtgggacaagaggccttacctgggggggccagtgtgcagagggccctagagctgagaggccgcggacggagtaacagctggattctgaggacgtggaagaggccacaccacgcagcagaagg

SEQ ID NO: 307120 - DNA, 122 bp, Homo sapiens
tacatttcctaattccattcttacatggcacaaatctgttgtaacagattttttggagctcgtcatattgcataagaaggaagtaatgttctgccacccaacggtgtttgtagtaaacattt

SEQ ID NO: 307121 - DNA, 122 bp, Homo sapiens
caggagcggccggcggggcgggcagctggggcgccgagcagctccgagcgggacagagagcgccggcggccgcagcgcgagtgagctgggtgtgcgaggccgccgccgcccactgctgcgcg

SEQ ID NO: 307122 - DNA, 122 bp, Homo sapiens
cagtgtcgaatccatctctgctacaggggaaaacaaataacatttgagtccagtggagaccgggagcagaagtaaagggaagtgataacccccagagcccggaagcctctggaggctgagac

SEQ ID NO: 307123 - DNA, 122 bp, Homo sapiens
gaagaaatatgaagccttagcggctttacccgggaagcgagtttcgagatggcggctcagcggatccgagcggccaactccaatggcctccctcgctgcaagtcagaggggaccctgattga

SEQ ID NO: 307124 - DNA, 122 bp, Homo sapiens
cccttgtgagctgcagttatgcacatcatggaatgtgtcctgtaggggtcacatggctcccggtcagtgttagactggcacatcttcttccctgtgcttgcttgctcagatgacagtgtacc

SEQ ID NO: 307125 - DNA, 122 bp, Homo sapiens
gcctgggtgacaagagtgaaactccatccccccaaaaaaaacttcagtaaaggctaggcacgttggctcacatctgtaatcccagcactctgagagatcaagccaggaggactgcttaaggc

SEQ ID NO: 307126 - DNA, 122 bp, Homo sapiens
cagaccctcctgttcctgtgcggccttgactagacgaccacttgctctggacttgctcctcgaggggtcgctccatctggaaactgagactggaattcctgcgcatccctgtccccgcatcc

SEQ ID NO: 307127 - DNA, 122 bp, Homo sapiens
gaggacccattacatgaaggtagacctttcatgtcttgttgccgacgtccaagtctcttgcggtccagaaatgccaggatggttgtttcaaatgcattgggtatgaattgcaccttgaatct

SEQ ID NO: 307128 - DNA, 122 bp, Homo sapiens
accgtggaactccagaccaccccagctctccaatgtagtggagacccttccgctagccatcgaaaataacttaagtcacttaagctgtacttgggataatcaggttatttaatgaggtgata

SEQ ID NO: 307129 - DNA, 122 bp, Homo sapiens
aggtcacatggtgtcaccccaggacagtctatcctttacaagccagtcactaaggccagccggattcagtgggaagggggttaaactccatctcttgaagggagagtaccaaggttaagaaa

SEQ ID NO: 307130 - DNA, 122 bp, Homo sapiens
ggcgcagtcttagattaagaatattttgcagagacttaattaacacagctaaggtgataacgttttcatttgactctgcgcttatgaaataaagtttaggtaagtgtgtgtattgtggctat

SEQ ID NO: 307131 - DNA, 122 bp, Homo sapiens
cagatgcccaccgcccctttcctacccgtccccctcaccagctcctggagacgtgtaccccgggtacttcacactccacactcagcaaaggccctgtttctgaggccaggcttcctccctga

SEQ ID NO: 307132 - DNA, 122 bp, Homo sapiens
acgcacgtcatgaggtttgtttttcttttaaaagtcaacagctggtgaatcgcacagggccgggcagggcggtcaaagggcccgttcccccggctgggaaaaaagcaggagcccagggcggc

SEQ ID NO: 307133 - DNA, 122 bp, Homo sapiens
aaacacagcagaggccttgactttgcctgatgaatggaggtgggcttcctggcagaggggcgtctgtgggtgagggaggaagtaggactggctggtcagaggggacggcacacaggaagctg

SEQ ID NO: 307134 - DNA, 122 bp, Homo sapiens
ggatctgcacagtcatcagtcttaagttgcacaagcattcccagcacgtactgggacctgcgagggccagtgctaaagtaggtgagagaccaaggcatgaacagtggaaagggcactgggtt

SEQ ID NO: 307135 - DNA, 122 bp, Homo sapiens
ttcattagcaagactaaacataatcatgcctatgaaagtgtggtagcctctaaaacattacgcaaatagccaagtattatcattatttctgttagtaatgaaacaatatatgcgtgtcagat

SEQ ID NO: 307136 - DNA, 122 bp, Homo sapiens
tccctctgccttttggataacgctatatctttgcttatgagaaatgggatgtgagcaactcgctgcacatttctctgattctccaggtcttggtcggctgacacgcattcgatcaagtttaa

SEQ ID NO: 307137 - DNA, 122 bp, Homo sapiens
gctagccctagctggccctagctgaccccaccggccctagctgggccaatcaggacctctcgcctcagaactgagccacagagaaggaagctgagtcacatcacagcaaagctctgaagggg

SEQ ID NO: 307138 - DNA, 122 bp, Homo sapiens
tggatctggccgcctttcagatccgagccccgcgtcccgctgcgccctaggagcgcgcggcggccccagagccctggctcggtgccctgagggccccacccccctgagcgcgcccgcggagc

SEQ ID NO: 307139 - DNA, 122 bp, Homo sapiens
gcttgatgacggagacgatgttgtcattttccttgtgtctacagcacctagcacagtgctcggcataaaataggccctcaaatgtaggtggatgataattactgaggagtaaaatttaggaa

SEQ ID NO: 307140 - DNA, 122 bp, Homo sapiens
cctgcttgagaccaagcccggcgacctggcaaggtggggccccctaccgcgcaatctttgcggctggcccccggctctcagctccgagtgcagaggctgaagaggtacccgggggacacact

SEQ ID NO: 307141 - DNA, 122 bp, Homo sapiens
ggtactgaagttgttcacagctcaatgcaagcatcaggaaacccctaggcccctgggtgccgcccgcaccccagcccctccttcctgccctaatagtggcctcctaggtggttggacttcct

SEQ ID NO: 307142 - DNA, 122 bp, Homo sapiens
aactacctagagcgctgccgctactgcaacgtcctctgcggggagcgtgaggaggaggcacgggcttgccacgccacccacaaccgtgcctgccgctgccgcaccggcttcttcgcgcacgc

SEQ ID NO: 307143 - DNA, 122 bp, Homo sapiens
atatttttggctttttttgaggtgtaacaaacacaactcgggatccgagaggacactctgcggctgccagcgaggcgggctggacagcgcaccaatcacggcgcagctccgccctatataaa

SEQ ID NO: 307144 - DNA, 122 bp, Homo sapiens
actcacagccaccgctgcgtgtgtcccagggattctcagaatagaattctgtgcctctctcgcctctggaagtgaccgcgctctgtaggaaaatatcacagcacgccggcctcgaaaggcca

SEQ ID NO: 307145 - DNA, 122 bp, Homo sapiens
gggagttatcaggttgagatttagaatgtgaaaacgatggccctgcacaaatccaatacacgccttttttactgtgttttaaatctctctatacaattatacccctgtaaggccctcaacaa

SEQ ID NO: 307146 - DNA, 122 bp, Homo sapiens
tgaattttttacagactttaaggatatccatttcacctagaacctcttgggaatcaaaaccggctggcttcccctttatggactgggggaggaaggggttggagcagagtaggcagctttgg

SEQ ID NO: 307147 - DNA, 122 bp, Homo sapiens
gggacgcgcgactccaggcgaccgctacgccggcagcgtaggcgtagaactggtggggtgcgcggaggaagccgggggagataagaacagcggcgcaggacgcctagcggccggagcggaga

SEQ ID NO: 307148 - DNA, 122 bp, Homo sapiens
cttttgtccaacaaacactatttgatccttatttgccagacacagccccctgcactgcggcgggacatggatgagaagaaaattgtgatcttttgtgcaattaaaatatcatctggaagtac

SEQ ID NO: 307149 - DNA, 122 bp, Homo sapiens
tcagttttagtcatggaggtagtgggggtttgcaaagtactgtggagtcagtgcaagagccgagaagactttgtaaaggtggaaagaaccactggtatcacacatgatagaacacaccagtt

SEQ ID NO: 307150 - DNA, 122 bp, Homo sapiens
tgggattacagacgtgagccatcgcgcacggcttagtcccaagattttagagccaagaagcgtttgcaggaggacgtagggaaagactgactcccctccctacaaagccccttttcctttga

SEQ ID NO: 307151 - DNA, 122 bp, Homo sapiens
atctataggcagaatcaaggaatagatcagaagtgcaagggagaactgatttcaggctggcgtgagtgaacagagtacacagaaaggagggattttgttctgaccttgtgaaaagaatcctt

SEQ ID NO: 307152 - DNA, 122 bp, Homo sapiens
ctgtgctcacaggaacacatcgaatcctctcgaccactccatggactctcttgccagggccgccttgagaaaggaacacagaccgagtggcttcaacaacgcctttgttttcccacccttct

SEQ ID NO: 307153 - DNA, 122 bp, Homo sapiens
ggtgaggggaccctgagcttcacctgggctagcgcggggagtgacaggtgcgcgaaggagcgcggcgctccgccctctcgccgacccgccccctccgggcctcgccctccggggctcgggat

SEQ ID NO: 307154 - DNA, 122 bp, Homo sapiens
ttcgctcttcacaatacatcttgctgctgctcactcgctcactgactcactctttgtgtccgtgccacctttaagagctgtaacactcactgcaaaaattcccagcttcattctggaagtca

SEQ ID NO: 307155 - DNA, 122 bp, Homo sapiens
gggcattctcggaggagtagacgtttaatacgaagtggcggcatagccctgccgagatgtcggtgatggcctggatgctgtaaccacaacctgtggctaaaaattttattttctatccttta

SEQ ID NO: 307156 - DNA, 122 bp, Homo sapiens
gcttcctcccgccccacgtgttgctaacgacgttgctaaagccgagcggccggaggcctgcgcccccgcacgctgattggacgagctccgagccacgcccctctgcctttctcccccgcgtt

SEQ ID NO: 307157 - DNA, 122 bp, Homo sapiens
ggacgcggaggttgccattaaccgatgtcgagccactgcattccagcctgggtgacagaacgaggctcggtctcaaaaaagaaaaaagaaacactaatggaaatattggtgacactgcggaa

SEQ ID NO: 307158 - DNA, 122 bp, Homo sapiens
ttcccctcctttcctgtcctttctttccaggcatataaaaaccctgttaaacaattatcacggtgcctgataagaatttcagtttaagttctcataacttattaaaccataaaacatttcag

SEQ ID NO: 307159 - DNA, 122 bp, Homo sapiens
ggcgaagctgggctggagtcctcttcagtcccacagggggatgtgtcacctgtagacactcggctgaccgccatctcggcgtggcccttgccctgggggcccttcatgcgcacaaactccat

SEQ ID NO: 307160 - DNA, 122 bp, Homo sapiens
atgggattagtgtttttataagaagacaaagggagaccagagctttgtctctttcttccacgtgatcacctggcaagaaggtggccgtctacgagccaggaagaaggccctcaccagaaacc

SEQ ID NO: 307161 - DNA, 122 bp, Homo sapiens
gaattctggcccgggccgccccagtcctactacccggggctgtccgtccccggctctccccggagtttcccagggcctccgccacgtgaccccagtgtttgtctcccgcccagagcccgcgc

SEQ ID NO: 307162 - DNA, 122 bp, Homo sapiens
cagggacgcgcaggtcagggacacccgtccacctgcgtctgccatcgcttcggggcctgccggtgcccggtcctcgttcagctgcagcgccaggcccaggcctgcactacgccggggtgggg

SEQ ID NO: 307163 - DNA, 122 bp, Homo sapiens
acatatatgcctgtcactagaaggcatacacagtcgcataggtatagctaaggagaacatcggctcgttcatgaaaagctgtagctgacctccgggaagagtgtacagtcatggacttattt

SEQ ID NO: 307164 - DNA, 122 bp, Homo sapiens
gcaaatgagatgaaagagcatttgccttagataataactcttttgtataagtcgcagactcgtgattcactccagctgtgggaatgtaaaactgtgattcatagaaacctccaaagaaggct

SEQ ID NO: 307165 - DNA, 122 bp, Homo sapiens
gttcccagcattgccatggtgaccgtggttctggtgctgcctcctcagacgcaccagcctcgcgccgcgtctgaaataaccccagggagccgagggcggtggaggtgggggcccaccaccca

SEQ ID NO: 307166 - DNA, 122 bp, Homo sapiens
ccgcttctctctccccactgatatatttgataattgtccagaaccagagatggcatcagccggggggctgaaggggagtaaaaaagagcccagggaggtggctggggcgggaggaatggata

SEQ ID NO: 307167 - DNA, 122 bp, Homo sapiens
tggacacacaaaaaagtattactcaatttatgctgcagcaacaaaccaactccaaagcatcgatgacatacctcaagaagcagtttcaacaatctgctgggagccagggtgaaagggcagca

SEQ ID NO: 307168 - DNA, 122 bp, Homo sapiens
gagacagggcattaaaatccaaagcagttactgaatgctcagagcaaaggttctagaaaccgtcactagcctagaaagataaataaaaagcagatgtaagtaggagttaggaagcattggcc

SEQ ID NO: 307169 - DNA, 122 bp, Homo sapiens
tggcctgctgacttactcctgtccctagacccacctgcgcacttgtgctggatgactggacgagcctgtataggaagcccagatcacatgggggttactaataacacccacctcaaaggact

SEQ ID NO: 307170 - DNA, 122 bp, Homo sapiens
cgggctggggcacgagtggctgcggagtgtgggtggttgggcgtgaggggccgacgggctcgcgcgcgcgccgtctgctgaggtccctcgggaaggaggagagcgcctgacgccgacccgca

SEQ ID NO: 307171 - DNA, 122 bp, Homo sapiens
cacctctggaggctgaggcacaactgggctgggagttgagcgcataccgagtaggggctgcgggggagcgggggcagggccggcggggcggggccagaagcccggcggggttgggggcgctc

SEQ ID NO: 307172 - DNA, 122 bp, Homo sapiens
agaggactccaaaacaaaacggggctcaccggctttgggaatctcgtcagctgcccccagcgcactggtagactacgaaagttcaaaccccttgcaaacatcaaagctaggaatatttcgcc

SEQ ID NO: 307173 - DNA, 122 bp, Homo sapiens
ccggaaggcgggaaggggaaccgctgccgggggtcagtcaggtcgttaccctccgtcagtcgcgggctgcccggctccctgcttctctcggcggcgcccatgtccagctcccggacgggaga

SEQ ID NO: 307174 - DNA, 122 bp, Homo sapiens
caaacagctgccagatcactgctttagagaaagcaggcgacagctgggaggcgacctggtcggagctcacttaacggttttgtatttcaaatccaaagagactttgcctgctcgaggcttgt

SEQ ID NO: 307175 - DNA, 122 bp, Homo sapiens
tcctttatctgccgagactgtctcccttggagccattggtacctcacccttgtctgtgctcgccagtgacaacagctgggtgcatctgttacacttgtgttcctggtcattttttttttctc

SEQ ID NO: 307176 - DNA, 122 bp, Homo sapiens
cgtctcccacccaacctcacaaggtgctcctaggaggaggtggggcagacaccagcaagccggcagcaggacatgctttattctgagcaggctgggcccttcggccagcggctgagagcaca

SEQ ID NO: 307177 - DNA, 122 bp, Homo sapiens
gaggcgaccgaggtcccctaggcctagtccccgccttgccggcatctagtgcgcctgcatcggaaccgaggggcccgcctcgcactcgcctaagaaaaccatttcccgggacgggcctggaa

SEQ ID NO: 307178 - DNA, 122 bp, Homo sapiens
ctggccccaggcttcagtgactgccaggaccagcagatagaggaccagggtttgaggggacgccataggcatctgaaacacagtggggagatgtctctacgtgggtgtgcaggtgggatggc

SEQ ID NO: 307179 - DNA, 122 bp, Homo sapiens
ttagcagagtccagtgccagtgagactgaggggcagccacttgcagttccatttaacagacgtgaaggatgtgaggctccgggtggttccctggtttgcctaatgacacgcagctatttgga

SEQ ID NO: 307180 - DNA, 122 bp, Homo sapiens
cttcttagtgtcatgagccactgggatttgtcccaatttcccattttgtatagttcctcacggctcagtttcgaaggcaaggtttccttaatggccaggatcccccttatctcaggtgcagt

SEQ ID NO: 307181 - DNA, 122 bp, Homo sapiens
cctcactgtgttgactccagatagcccaagagcaacccaacctgcctcatggtgttgggccgaggccagtcatagcagtgagtgttctggggtcatgcagaggcagccctcaacgatagaat

SEQ ID NO: 307182 - DNA, 122 bp, Homo sapiens
gcgttcaaggggttcaagcgattctcgtgcctcaccctgccgagtagctggggctacaggcgtgcgccactatacttggggcacaatttaactgtgatcagagtaaatgaaaatttcacatt

SEQ ID NO: 307183 - DNA, 122 bp, Homo sapiens
ttttcgggctcggaagctccactgtagcaggacaagccgcagacaaaactcctcagacaccgagttaaagaaggaagtggtttattcggcagggaacatcggcaagactcctgtctcaagag

SEQ ID NO: 307184 - DNA, 122 bp, Homo sapiens
tcactatgttggccaggctggtctcaaactcctgaccccaagtgatccgcccgcctcggccgcccaaagcactgggataacaggcgtaagccaactggcccggcccagaagaagtttttagg

SEQ ID NO: 307185 - DNA, 122 bp, Homo sapiens
gtttagttttctttttataatacaaaattaaggggaactgcaggctagacagttttgatccgatgttattctgctaatcttttaaaggtgtcttgcggtgactcacgcctgtaatcccagca

SEQ ID NO: 307186 - DNA, 122 bp, Homo sapiens
cgcgctgcggggcctgctgggacttgtagttcgcaggttcggggtgcgcaggcgcagtgccgagtttacctctgcgcgcgtcggggttggtggcggcggctgcggcgagttcctgaggggcg

SEQ ID NO: 307187 - DNA, 122 bp, Homo sapiens
cctcccccttagaaacgccacttccctccgtgaaaacggctggacaaggttgaacctagacgcatgcgcccaaagcgcggggtgcgaggtgggtggacccatcgcttcccgctctcttctcc

SEQ ID NO: 307188 - DNA, 122 bp, Homo sapiens
attgtttagcctttgaaacttctgctggtgtgagtgccctcaggggttccccaggaatatcgatacaacaccaacaggtaaacgcgcgcgcccgtgtgtgtgtgtgtgtgtgtgtgtgtgtg

SEQ ID NO: 307189 - DNA, 122 bp, Homo sapiens
ggaggccgtggcaggcagatcacttgaaaagccatccatgatccatccatgatccagcctcgccatccatgatccagcctcgcctctcttttcctcacatatcctgtctactttactcccca

SEQ ID NO: 307190 - DNA, 122 bp, Homo sapiens
ttctggatcctgaaggccaagaaatgagcatgagggttttatttttctgtgagttggccccgtgcagtttgtgctccagtgtgttctcctgtcacaaagcacttgcacatccaccacaccag

SEQ ID NO: 307191 - DNA, 122 bp, Homo sapiens
tttggtttggctaccaagttattgccagctacaggatacaacacagaagtgctcaaacaccgaatgcaaatttgcaaatatgaagcataccaaccaaatcttactcctcatggctttcaaat

SEQ ID NO: 307192 - DNA, 122 bp, Homo sapiens
caggcgccggcgcgggagaagccctgggtaagcccccgcccagcccgctgcttcttggaccgcagaatgaggcgatccgcgacgcccctccagctatacccatgccggaggcttgtcgcgcc

SEQ ID NO: 307193 - DNA, 122 bp, Homo sapiens
cccccgtgcggcggggcaggacatctcccagacagctggggacaccctttccagcgggagcgggaggcgctgttgttcaggaaaggaagttgtgtgtttgtgaatgagcgcactttgtggtt

SEQ ID NO: 307194 - DNA, 122 bp, Homo sapiens
tggggcccccgggcgcggccgggacgagcctccggagagctacccgcaacgacaggaccacgagctacaggccctggaggccatttacggcgcggacttccaagacctgcggccggacgctt

SEQ ID NO: 307195 - DNA, 122 bp, Homo sapiens
aagggatgggcacaaatgctgggcgcgtgctgtggttgccctgggaggccttggcagtggcggatccagtagcacaggcatcattgggtatgctccctgctggggccgtgggggtggagcct

SEQ ID NO: 307196 - DNA, 122 bp, Homo sapiens
gactgcgccagcggggcaggcccagaaggcgcggtatctgggaggtccggccgccgcagacgaccccgccgaggcccaaagtgcgccagcttctccgcgcccctccgcctcctcctcctcct

SEQ ID NO: 307197 - DNA, 122 bp, Homo sapiens
agtcagcctgtagaaaggggtgcggtggccagggaggacgtccccgggctctgtgtgagccgcactgcctctcacggtggacctgcgagccgggccggagcacctgcactggtgctctgggc

SEQ ID NO: 307198 - DNA, 122 bp, Homo sapiens
ggcgggcgcacccattggctgtggcgaaagcgagggccggggctggcggcgctgattggccgggacgctcggcggagccagggagtccggcgagtcgctgggggaagtcgagcagacaccca

SEQ ID NO: 307199 - DNA, 122 bp, Homo sapiens
gttatatgtgttgagatcagttagccacatcatctacaagcgcctgagaccagaaccacccgtccactaactcatgccttgactaagtgcctggtaggttcagactctgatctgtgcccaag

SEQ ID NO: 307200 - DNA, 122 bp, Homo sapiens
ccgcgtgattagggccgtgtccccttggatcacggccgtgtcgccaagcagcggtcccagcggcaatgactcctcaggtggcagttctagcagctgtagccccagtcgttgcctcagtttac

SEQ ID NO: 307201 - DNA, 122 bp, Homo sapiens
gaccctatccaggacgggttacttaaggagtccaacgggccttgagaggctgatcaccctcgtgtggcgggcgtctctccccggtgccctcccgcctggtgctgtcaagggcttctctgtgc

SEQ ID NO: 307202 - DNA, 122 bp, Homo sapiens
cgctgctgctgtggcctgcgcagccacgggaggcttcctgaaaggcattgctcggaggggcgggggcggggaggcctagcctgccccacagacacagctgtgaggcctgggtcatacacata

SEQ ID NO: 307203 - DNA, 122 bp, Homo sapiens
gtgttaaaacctggcgccaaaaggaacatgcgatgtgacgtgttacctctgcgcatgcgccgggcattcccagcgccccgaacctgatgaacgcgcggtggggaccccaggcttccgtgctt

SEQ ID NO: 307204 - DNA, 122 bp, Homo sapiens
aggctgggagcggctggacgtgcaaagcagaaggcggggatccggaatgaggccaacgcgcgcggacccccgcccacacgagggagcccggcgccccgacccgggggaagttgccgggctgg

SEQ ID NO: 307205 - DNA, 122 bp, Homo sapiens
cacccgcctcagcctcccaaagtgctgggattgcaggcgtgagccaccacgcctggctaacggctctggggactttcacacgcgcgttcacacacactccagtgcggacccacgatctgtgc

SEQ ID NO: 307206 - DNA, 122 bp, Homo sapiens
acactcactcactgtggcttgtttagtgcctgaggggcagaaaaactgaccctagatttacggctgctgctgctgctgaggagactttgaaggtttctgcagcaaacatcaccttctttgtc

SEQ ID NO: 307207 - DNA, 122 bp, Homo sapiens
gcttgcctctcgggggtgcatgtcctggcctgggggcttgcccccttctgacagagcctacgactgcatgctgcttatctccgtgccccagtgcctggcacagaggggcccacaagtcactg

SEQ ID NO: 307208 - DNA, 122 bp, Homo sapiens
gcctcttgcccagccagcggttgcgacctgccttgccaatgacccgtttgttatgatcaacgttggatactcggcctactgttgctacgcacgtttccagcacctgacagagaaaacagatg

SEQ ID NO: 307209 - DNA, 122 bp, Homo sapiens
tccctcctggtcactggcagactgttattgatggagacacccggggactgaaatgaatagcggtcagaggcccccgtgacgtcgtccctcgtgctgccgcctgcttctcccgggggcgtctt

SEQ ID NO: 307210 - DNA, 122 bp, Homo sapiens
gtgatggggaagggggaataagagagtaatagctatagggcatggggtttctttttcaggcgatgataatattctaaaattgaatgcagtgatggttgcacatatttgggaatatactttaa

SEQ ID NO: 307211 - DNA, 122 bp, Homo sapiens
cgacctaatcctaactccagggactcgcaggagttaggattaggtcgtggaagccacaggcgcctgggcgccctcctctacaagtgggaccttgagacaaagtgcaaactctaccgggaggg

SEQ ID NO: 307212 - DNA, 122 bp, Homo sapiens
gctgtgggagttgctagccactatagtaacctgagctgagctgggggaggaggtggtgagcgaatgcaccaccgggagccagaggagggaaagggactcgtctctcttagctgggaaaatag

SEQ ID NO: 307213 - DNA, 122 bp, Homo sapiens
tgaggcctccagcccggggccaagagcctattgatgacaccaacctcttgcctctggggacgcaggccgtagctgggccaaacctagacccacccttgccccacatgagttacaggtggaga

SEQ ID NO: 307214 - DNA, 122 bp, Homo sapiens
accaggccgagggctggagcccacaggagctggcgagaggcacagtgccctccgccctgacgcccctcctgagagctgggggaggacggcggctgcctggggtggggcccatggacgcggtg

SEQ ID NO: 307215 - DNA, 122 bp, Homo sapiens
agggcgggacacataccaaatttgaggagaccagctgtggttagtgatgtggcatgggaccggaggagggcccaagaagtgtggcctcagcacactaacaggggtgaagccagaatccagga

SEQ ID NO: 307216 - DNA, 122 bp, Homo sapiens
gagaggaatggggtcggatcagaatgagctctagggcctcggcggcgaggatcaaactcccgggcgtcgaagtcagctgagccggggaaagaggacgagccgggctagatatacctgcagcc

SEQ ID NO: 307217 - DNA, 122 bp, Homo sapiens
ctcataaagaagagtgttaaatgacttttgtgaatggaaaatctgcatatactgttgcttcgcctcagccagtcttgagtgggtggttcaatgaacctaaagcatgctgcctgtgaagctcc

SEQ ID NO: 307218 - DNA, 122 bp, Homo sapiens
tgcaaaccactgggaggagtgcggaacgcctggtacagataggggtggggatttgggtgacgcatttaaaagacagcgtgagactcgcgccctccggcacggaaaaggccaggcgacaggtg

SEQ ID NO: 307219 - DNA, 122 bp, Homo sapiens
tgcgacccctgtgacgcaaagggctcatcaccaatggcagctcggaagcagggcagagagcgagacccaccccccagctcccgcgcatcaaaacacaacacccgccttcctcacgcatgcgc

SEQ ID NO: 307220 - DNA, 122 bp, Homo sapiens
agctgccctttgctggcctgtgccaagaactggactgggcctcagagaccatgtgcagcacgggctgccacccacacagaggaacgcttctcagctgggactcatcagttccgccacccttt

SEQ ID NO: 307221 - DNA, 122 bp, Homo sapiens
agcagcgactcaggccattcctccacgctgaccacagagccggctgctgagtcccctggccggccgccccctacagctgctgaacggcaggagctggatcgcctcctaggaggctgcggagt

SEQ ID NO: 307222 - DNA, 122 bp, Homo sapiens
gatggcggtggtgacgggagggcagtggacgatgctgagtgtcaccgacgtctgcgacttcgtctcctgtggggcgggggccgttggcctcactcagctgccggacagcctggcaggttgta

SEQ ID NO: 307223 - DNA, 122 bp, Homo sapiens
aggaacccaaagcccgggtacttgtctcagaggccccaaagccaaatcctgattgctcagcgggctggaaggcgtggcctcagccccgccccgccccgcctcaccacaaagcggttggttgc

SEQ ID NO: 307224 - DNA, 122 bp, Homo sapiens
gcctgcctcgacatggtgccggccgccccgccccactcgcctagccacgggttagctcggcgacccctgcagacgccggagcctaagccgctgcccctcagcccacaagaccgaccggcact

SEQ ID NO: 307225 - DNA, 122 bp, Homo sapiens
ttctgtctttccaaggatgtgtgaccggaatggtggtcggcggcttcgacagtggctgatcgagcagattgacagtagcatgtatccaggactgatttgggagaatgaggagaagagcatgt

SEQ ID NO: 307226 - DNA, 122 bp, Homo sapiens
ccgcagccggcgccgcgacccagccgcccctcagccgcgccgcatccgggtcccggccgccgcactcacctgcctggcgttccgccgccgccgcctgctactattccaagtgcgcagtcagc

SEQ ID NO: 307227 - DNA, 122 bp, Homo sapiens
cgccacggactggggaaccggggtgacggggagacgggggggctggtggggtgaggtcggcgggcagcagccaagtgttctgcagctccgaaccccgccaccctctgggcgaacggaatggc

SEQ ID NO: 307228 - DNA, 122 bp, Homo sapiens
ttcctctccgtctccctcccaccccggccgtctatgctccaggccctctcctcgcggtgccggtgaacccgccagccgccccgatgtacagcatgatgatggagaccgacctgcactcgccc

SEQ ID NO: 307229 - DNA, 122 bp, Homo sapiens
tggaaccccaccgcccacctgcccacgccgttcagcggctgggcgctggagcgcaatctgcgccccccgggctctgcgcctctcagctgcgccggggatgccccagtccccgggcggggacc

SEQ ID NO: 307230 - DNA, 122 bp, Homo sapiens
gtgactacaattaataataatgtacgagacacttgcaaatcccaccccggcctgcagaggcgctgtcccgcccccaacccaaccacgggcatttgcaacacgggcggaaaaaagaaccaaaa

SEQ ID NO: 307231 - DNA, 122 bp, Homo sapiens
ttagcactttggggctttctagagggcagaaataggagagcactgttttcgaaattccatcgcatctcccaatattcggtggttggatgcagatgtaagggggctgttgggggtgtggggaa

SEQ ID NO: 307232 - DNA, 122 bp, Homo sapiens
cctgaatcgtgcagtgcgatcgtcacagctggactgtttccacctggtagctgtgacccccgggacggcctccttgtcgttgtccgtagttaccggggaagaaaggctttattaccctccgc

SEQ ID NO: 307233 - DNA, 122 bp, Homo sapiens
cctctgcagccgtggagatgcgtgtctgttgcttttatgccgctcaggccatggcgtttccggatagcagccaggttggagggacccgctgtctctctgggaccactctcttcgtcgcctga

SEQ ID NO: 307234 - DNA, 122 bp, Homo sapiens
aatccccatgtgcgtcatgcttttcatgtactaacagatttacaaggccgccaggaaaagcgcggcctaacacaggttacctggcttccctcgagtggagccagacagcagtagtcaccctg

SEQ ID NO: 307235 - DNA, 122 bp, Homo sapiens
ctgatataaaaagggcgtagacagtgttctgaaggtttggacatgagagagaatcacagccggccagtggtctcagaagtggcttcctggaggaagtggcattttgagttcttgaaggctgt

SEQ ID NO: 307236 - DNA, 122 bp, Homo sapiens
cagggtgattccttcttgaggaggaggacagcaacgcagcccggggcacgcagcctgcggcggtccacacacgccaaacagattaagggcccttttgcagccacagtgcccgggcctcacaa

SEQ ID NO: 307237 - DNA, 122 bp, Homo sapiens
aaggggaaaagctctaggcaaacaaacagatggattcagaggaccttaagtgatcaagtccggtaggagccagcagctggccttctgtgggctacttattagcattttccttagcttgttgt

SEQ ID NO: 307238 - DNA, 122 bp, Homo sapiens
ctcttcttggggactttacacttgtcgtgtcctctccttaagactcctgttctctcttcacgtgacttgttccatgacctccctccctaaaagaggccacctggtgatcctacatcccaaca

SEQ ID NO: 307239 - DNA, 122 bp, Homo sapiens
agggccgcgcgtttatttatatttccccagccggggccaagagagcccaggcaaacacaccgggccagagggatcacagacccggcacccgggtgggagagggcgagagggggcgggtctcc

SEQ ID NO: 307240 - DNA, 122 bp, Homo sapiens
tgacaaacagagagaactaacatgtttatttagctgtatgtatatatgcttaactacacccgaggaagctgtagagttagaaaaacatgaaccattaacagatgtggcctccctgcagaact

SEQ ID NO: 307241 - DNA, 122 bp, Homo sapiens
taaaatattggggacaatatggcacaaggcaattattacattttactgatgagtgaaggacgttcaaatagaaagaagggagacagcaaggaaaagatggttaaaatgatgcaaatgagttc

SEQ ID NO: 307242 - DNA, 122 bp, Homo sapiens
agacacagggtttattgagaggaacttacacacaaggcagcccaggggctgcaggctgaacgggagagtggctgctgcctgtggaaagtgagcagtttatatagaattttcacttaacactc

SEQ ID NO: 307243 - DNA, 122 bp, Homo sapiens
ttttggcacctaccgccactgcctggcgcacatctgccggctccggtacggcaaccctgacgccaagcccaccaaggccgacatcacgctctcgggatgcgcctccggcctcgtccgcgtga

SEQ ID NO: 307244 - DNA, 122 bp, Homo sapiens
ctcccaccgcctctcccaccacgtgatctctgcacaggccgctcccctccccatcggccacgagtgaagcttcctggggcctcaccagatgcagatgctggtgccacgcttcctgtacagcc

SEQ ID NO: 307245 - DNA, 122 bp, Homo sapiens
caggctccggtggccgagcccttccaaaatcacctccctttctggaatcttctcttcccccggccgctgagccagggcagcacgctcagcccgttagtaggccctcctacttcgccgcggcc

SEQ ID NO: 307246 - DNA, 122 bp, Homo sapiens
gccttctcgccaaagctgaccaatcaaacgcctaggccttagctcgagaaccaattgcaacggtagggcggggcttgttgcgcccggccgtgccccgaggcctccgcgcgagggcgtccaag

SEQ ID NO: 307247 - DNA, 122 bp, Homo sapiens
tgtccatttgtatgtggctgcaggaaatagggaggtctatagagaataggttatgtggttcgcagagatctttctacagagagggtttctttaacaaattgggaaacccttcctgtgagtag

SEQ ID NO: 307248 - DNA, 122 bp, Homo sapiens
cagcaacaggttatcaggaaggggagtcttgtcttgagaagggaggttgtttcacaggaccgcagagagcttttctagagatcatcttcaccatgattcccagtggggagattcctaaaaat

SEQ ID NO: 307249 - DNA, 122 bp, Homo sapiens
cctcgccctgtccccagggtcaattctggggtcaccgcctgtccccagaacctgccaccgcgtcaccgcccactccccgggacgcatctagaaggtctcgccccgcccccaggattcgctct

SEQ ID NO: 307250 - DNA, 122 bp, Homo sapiens
tctcccttgagggttgtcaccggtaaccagagctggctcccctggtgagagcaggagcagcgttacttagcaacaggcacagcacacaaaatccagctaatctgggctgccccagtggccag

SEQ ID NO: 307251 - DNA, 122 bp, Homo sapiens
agcgtcactgacaaccacccggaaatggtactatcgcttccggggctgcctagcgcgcggcgggaaattgtttcccagagcccggattcgtgaagcagttgagtgctgcagcggcagtcgtc

SEQ ID NO: 307252 - DNA, 122 bp, Homo sapiens
cccgtatgcgcgttttcagtcttcatttaggtccgaattcccggcatataagaatactaccgtcgcttgtttttcagatttttgcggctattttcgttggtgtgttggtcatgtctggtcgc

SEQ ID NO: 307253 - DNA, 122 bp, Homo sapiens
gcaattacgcatgccattagcagggagaggcagtgattcaacccggctattaggatgggccggaggtgtcacttagaggcggcagctgtcctcgtccccagtaattgctttctcattttgca

SEQ ID NO: 307254 - DNA, 122 bp, Homo sapiens
agccgggaagctgccatggaagccttggaattgctgggatctacctatgtggataagaaacgagatctgcttggggcccttaaacactggaggcgggccatggagctgcgtcaccagggggg

SEQ ID NO: 307255 - DNA, 122 bp, Homo sapiens
agagggagcagtagtctctcccatcattggttcctccctccccaccctgctaggccagaccgtggaaaatcccagcccagggaaggccaagccttgtgcttgagatcagacccccaggcctg

SEQ ID NO: 307256 - DNA, 122 bp, Homo sapiens
tagctggaatgcggacattgaaaaaaaaaaaaaaacactctctcagcccggcagcagctccggaggagccatgtggcatcaagccacagcaaaggggaaaaagtgctcttagcaacacaaac

SEQ ID NO: 307257 - DNA, 122 bp, Homo sapiens
ttgctgctctgtcatctcaatgtgtggcttccaggttagcacagctggagaacagaaggccggagggccactcaggggattttgctccaccatggaggggattttcatctctagtcagagtc

SEQ ID NO: 307258 - DNA, 122 bp, Homo sapiens
tttactttattctctggggagggccagcggctcgcatccccctcatctccagctgcagctcggatggtggattttcagtgccaacagacacatctgccgtgaactcgcagatgccagggagc

SEQ ID NO: 307259 - DNA, 122 bp, Homo sapiens
gcaaagggacaggaaagtgaggggaacaacagacgaccaacccccgccccaggagaaactcgcatctgggtgatcccactcgcccctcactagtgccccacgtaggagaaactttgcccttg

SEQ ID NO: 307260 - DNA, 122 bp, Homo sapiens
acggcgggactcatgcccgggccagttagcgccacctaccggccactcccttcctttcaccgttcacattgtcctgctggcccgcgtcttaaacccatttcacagtgcccagaagtagtggg

SEQ ID NO: 307261 - DNA, 122 bp, Homo sapiens
tcccaatgcatttgctgaccgggcacctaacgggctgctctcaaaatcactgactgtcaccgaggccggccagagacccttatgtatctgattcacgatgacaccagctaactctgagtaca

SEQ ID NO: 307262 - DNA, 122 bp, Homo sapiens
ctttcatacaactcctgggaaagacggttaccgaaacagagcgctaaatcattggctttgcgagctgcacctggtcaatgtcactgtctcctatgaatccacttaccattcagagctcgttt

SEQ ID NO: 307263 - DNA, 122 bp, Homo sapiens
ctgcaagtgaatggcagggctgggacccaccgtcctggtccctggcgccctgcccagggacggcctctcacctgcatgagctctgcagctggctgctgcgccttgccctccagttcggagat

SEQ ID NO: 307264 - DNA, 122 bp, Homo sapiens
ttcaagtgattctcctgcctcagcctcccgagtagctgggattacaggtgcccgccgccacgcccggctactttttgaatttttttaatagagacggggtttcaccatgttggccaggctgg

SEQ ID NO: 307265 - DNA, 122 bp, Homo sapiens
agccgaagcccaaggcaaccccaggagcagggagcgagctgctgggggaatgcaccggggcgccgcctgcggggagctgctgggggaatgcacggggcgccgccccggaggcctgcaggtaa

SEQ ID NO: 307266 - DNA, 122 bp, Homo sapiens
ctgtggggttcatcctcccgggccccttttaagcgcttggagtcactaggaatgtaccaacggccctcggagggaggacgaggcggagagccacccaagaaaggtggcggaggcggggagac

SEQ ID NO: 307267 - DNA, 122 bp, Homo sapiens
cgctgaggctttgggcattcgtgctgctgtgatgaggagtggggcgcactgagtccctgccgccttctgcctgtgaacaccaggccgggctcctcctcaggcctcttcaggcacggggggcg

SEQ ID NO: 307268 - DNA, 122 bp, Homo sapiens
gttgcagcaacaccacagagaccccacagtgtgtcgggtgtgagctccgccggcaagaagcggatcgaaccatccgtgcaaggccactgtaggtgcttcctgaaacgccatttacgaaggtc

SEQ ID NO: 307269 - DNA, 122 bp, Homo sapiens
gtccttctgttgactgcagaatttctgctggaaatgcagggaggctgcttgtggggttcgcgtgctgtgggaagtagggaaaatgagctggtttactttgtgtctttttgtgcatgcagact

SEQ ID NO: 307270 - DNA, 122 bp, Homo sapiens
ggaaacccaagtcttttataatgggtagtaagcatgcctgctctttgctccagagcaagacgctatcgtgtatttgaaaactattcactatatagacatatctgaaaaaatagtctggaaca

SEQ ID NO: 307271 - DNA, 122 bp, Homo sapiens
gccggccggggaggtcggcgcgggtggctggagacacacagccacaattacgaagagcctcgggcctcaccacccagctgcagcccaggaggcacacggttaataccaccgagttcgggccg

SEQ ID NO: 307272 - DNA, 122 bp, Homo sapiens
cagaggaggcggcccgggcctgctgggaggtggcggcggaggtggggcctgtgaggaggccgaaggccgcggagtggaaggcactggaggcttgttgttctgaggaggaggagggggaaccg

SEQ ID NO: 307273 - DNA, 122 bp, Homo sapiens
ctcgcatgtctgcgccgccctagccgaggatgctgaggatgaagctgccgctgaagccaacgcaccccgcggagccgccgcccgaggcggaggagcccgaggcggacgcgcggccgggcgcg

SEQ ID NO: 307274 - DNA, 122 bp, Homo sapiens
gacctgtattctcatctgtaatgcttgcaggacaagcacttttttgtctcatatcttcgtcgatccattacttggatcttttcctaatatttctcaggcttgtgatcatacttttgccctat

SEQ ID NO: 307275 - DNA, 122 bp, Homo sapiens
aaggggtgtgctctgtgggactcacgttgttccgaggtgcgttgggctgcacagggtcctcggcggccagggcgatgctgctcatggcaatgaccatgaggatgcacatctcaaagtagcgc

SEQ ID NO: 307276 - DNA, 122 bp, Homo sapiens
aaggagaagagagtgggcccgccttcagggtctggggccttccaggttgggtcgtaggggcgggagcgcacaggctgcgagagaggagcaaaggttggtggagggagaagagcagtctgggg

SEQ ID NO: 307277 - DNA, 122 bp, Homo sapiens
taaaacactccttaatactacacaagctacagaaaatgctactttgcatttggtcctcaacgtggctaactgcaagccattgagtaaaaagtgtaccttttaaactaattccttggtcagaa

SEQ ID NO: 307278 - DNA, 122 bp, Homo sapiens
tcctccctgacctcgggtccccagggcaggctgagacagacagacaaggctgtcctgcagcgctcccccagacagtgagctggggttctgcccacgctgctgcccaataccctccaaagggg

SEQ ID NO: 307279 - DNA, 122 bp, Homo sapiens
agatcctgggccaccgggacaggggcttggagctgaccgggcagcaggggcggagggaagcgttagggggaggtttgtacctgtaaacgcctcaaagtcttgcttttggggagggggtgcga

SEQ ID NO: 307280 - DNA, 122 bp, Homo sapiens
ctgcctgctccaggctgcttctcagcacaagacaaagagcatttgagctggtctcctctccgcccatgctctgattgccgcctttcagcttggcctagcacaaggaagttcatctggctcta

SEQ ID NO: 307281 - DNA, 122 bp, Homo sapiens
cacgggaggccttgggagaagtgggctgcgggcctggagctgatgtgtgagcgtggactgcgctacgcgtgacagaatccgtgtctgtcactccggtgctgtgctgggttgggaagatagga

SEQ ID NO: 307282 - DNA, 122 bp, Homo sapiens
gagtccaccacacatggtcttgaagaagcttttataaaaggcaaaggcatctttgccggacgttgttgcaaaggagtagaaacaagcagaggaaaacatcccaaagggtaaccactagcgtt

SEQ ID NO: 307283 - DNA, 122 bp, Homo sapiens
ggggcacggagatcactgagagtgccaggtggcgacccccgcgcagagacccagcgcgtccgtgttcaccagagcagccacgcaagctcacatgcacccccaggctcagacaccggggagaa

SEQ ID NO: 307284 - DNA, 122 bp, Homo sapiens
tggggagagggtctggtccgccactttgaaccatcttgagagtggacctttttgcaaaggcggatgtaactgttttatgacttgaggggcaagtcctgacttggtgagcttgctttgattca

SEQ ID NO: 307285 - DNA, 122 bp, Homo sapiens
ccttccacagacttcagcctattttctgggcaaacttagcagaaatgaccaaaatccactcgagagagacagcaacaaggagaggggaagagatcctattttggcttcttcaaatggaccaa

SEQ ID NO: 307286 - DNA, 122 bp, Homo sapiens
ggctgcttcttccccaggcccgggcgcaggaccgctggaggacgcagcgtccagggccagcgagctcccccggcagcaggtccccaagccatgtcaggcatctccaccacggctgggcgtct

SEQ ID NO: 307287 - DNA, 122 bp, Homo sapiens
taaaataagcatgtcatcaaactaactttcttggcctttgttctttggttgaaaaactcccgttgacctcatgaataccacatttattaaccccggaagacaacagatagctaatgcaacat

SEQ ID NO: 307288 - DNA, 122 bp, Homo sapiens
agctcctgggctccagtgatcctcccacctcagcctcccaaagtgctgggattataggtgcgagccactgtgcccagcagtttggtttgaatgtttgtcccctccaaaactcatgttaaaat

SEQ ID NO: 307289 - DNA, 122 bp, Homo sapiens
gcgcagacaagctccgtgcgtcaagacataacagcgtaagtgtacgacgttgcgcagcgacgcgggggccttcgggaaatgtagtctacaactggaaaccggccggatcgtgtctgcgcagg

SEQ ID NO: 307290 - DNA, 122 bp, Homo sapiens
accttcatctgctaaacaggtgcggacagatgatacagaaggtgcttccaaatccacccccgcattcccttcgtccacaggccgtccaaaccatagcccagtgcccagctgggaggattcca

SEQ ID NO: 307291 - DNA, 122 bp, Homo sapiens
gctgttgaaggagcaggacagcatatttattatatgtagcaggaaacacctagtgatttacggtccctttttaaactcagcctgaatatgcatttttggggaggggtggattttattttctt

SEQ ID NO: 307292 - DNA, 122 bp, Homo sapiens
tccaatgcagatccactagctggagaggtaattttgcgtctaattttgcacctctctcctcgcctccccgtctgctctccaccatcacgcttttcgacagtaagaaggatttggggttttgc

SEQ ID NO: 307293 - DNA, 122 bp, Homo sapiens
cagcggcagccacagccaggacctcggaggctactgctttgttcttagagacagcaaaaccgcagagatgactcagaagacaaagagccccctccccggcctctcccaccatccagctgcct

SEQ ID NO: 307294 - DNA, 122 bp, Homo sapiens
ggtagcaaaatctcactctcctagctcgcgggccctcgtaatagagaacctggagagtgtcggtgactcgagggtcccctagccgggtgttagaaagagctccaactccacggctctaactg

SEQ ID NO: 307295 - DNA, 122 bp, Homo sapiens
ggatgggagagggcgacggtataaggaagctcttggatccaggaacttctgaaatccggacgattaaaatttgtatttaattaagcgaaagctggagttgtctgcgtaggtgatggaaactg

SEQ ID NO: 307296 - DNA, 122 bp, Homo sapiens
ggtggggcgggcttgggtgggggggcactttctctttcactttgggcaagcagaggcttccggcagccttgagaggagagatgagcaggggtgggtctgactcaggctgacctggcacagcg

SEQ ID NO: 307297 - DNA, 122 bp, Homo sapiens
gaagaagaaggccaagaaggcggattagggggtggcccaaggggcaccggggagaggacccggacccaggaccctctgagctgggaggcttcctgcgctcagatctatcctttcctggcctt

SEQ ID NO: 307298 - DNA, 122 bp, Homo sapiens
cccccttacctgttgtctagcattgctgtgtacacggcctggggggacacggagaagaaccgaagcagccgctcctcccaggtctccagcgtttcctggggagagcggcccggtggtcaggg

SEQ ID NO: 307299 - DNA, 122 bp, Homo sapiens
aagtgatcctcctgctttaacctcctgagtagctgggattagaggcctcagccatcatgccgggctaaaatcttctcttcttgaaatgctaaaaaaaaatttttaacacacttgtttttcac

SEQ ID NO: 307300 - DNA, 122 bp, Homo sapiens
gcagaggggcgcgggtgggcgcgcaggagttagcgaactgacacggaggcgccaggcggacgcacggacgcaccgagggccgcagggccgcacagccgggcacacatcgtcgcgcagcggtt

SEQ ID NO: 307301 - DNA, 122 bp, Homo sapiens
acttgggctggaaggggcggctgagagcgctgggctgcaggggcatctggaagagcgctgcggcctgggagagagcaaaccgtgcccggcacaaggagaaacacagagtggacgttccaggc

SEQ ID NO: 307302 - DNA, 122 bp, Homo sapiens
ttttgtagggttactattgaacatgctagggctcggtcacgaggtggaagaggtagaggacgatactctgaccgttttagtagtcgcagacctcgaaatgatagacggtatgtgaagggtgg

SEQ ID NO: 307303 - DNA, 122 bp, Homo sapiens
gagagatttgtctcagccagagagatccagattcagccaacatttattgagcacttaccacgtgccttaacactttgctgcagaaagtgatgtctgtcctattaaccccactagatagtagg

SEQ ID NO: 307304 - DNA, 122 bp, Homo sapiens
atgtgtctgtgaaaggaggatgatcatacctatctcacgggtgtttgctcagatgcccatcgcagtgcctggctggtgggagtgcacccctggtggccactgctattctcattactaatact

SEQ ID NO: 307305 - DNA, 122 bp, Homo sapiens
tggagaaaagttgtaagcacagtaaagagaagcttccttctgagtcacttgagtggttgccgttctggccctgcaccctctgtgctttgggacggcgtccaacccgcattcatgtcaggagt

SEQ ID NO: 307306 - DNA, 122 bp, Homo sapiens
ttgccgcctacttgcagaagagcaggggctacagccaagcagcagggggcagaagaggctcgagctcggctctggaggccgatctggccaaagccaggatagaagctcccgtgacccattcg

SEQ ID NO: 307307 - DNA, 122 bp, Homo sapiens
tggcatctgcgccttcactgagcctacaggcaactggaagctttgagtcccctagggcagcgactgccctggcagcctgaggcagagcttggccggacctggcgacccctgagcttctggga

SEQ ID NO: 307308 - DNA, 122 bp, Homo sapiens
tggagcagtcatcaaatttgttaataatttgttcacattaaactaagcaaaaaagcctagcggcagtgatcttaggacttaagctaattatttagatgcatgagagatccagattattagtg

SEQ ID NO: 307309 - DNA, 122 bp, Homo sapiens
aatgcaacttctataacacagatgtcccaaatgtatctcttcagcccagccctttctccacgtctcagactccaacatccaaatacctgtttgtcagagccacttggacctccactgtcatc

SEQ ID NO: 307310 - DNA, 122 bp, Homo sapiens
cccatcatccagccccggcttatcaactgagcagtgcccctaacatttccgtacgttgctcggggtcaggctagactctgctgcccccgtgtgttccagcgcagaactgcataaagaaagag

SEQ ID NO: 307311 - DNA, 122 bp, Homo sapiens
gtgttatagcgcttaaggtggcgcgtcgggggtctgtcccttctgatgttcagatgtgttcggagtttcttccttctggtgggttcgtggtctcgctggctcaggagtgaagctgcagacct

SEQ ID NO: 307312 - DNA, 122 bp, Homo sapiens
tctagctgacatccaggcagcccacttgtctctcagacaagaaacaggcccaagactacacggctcagaaagacagcacttgggctaaaacccaggtctgctactgccaggctgacacccat

SEQ ID NO: 307313 - DNA, 122 bp, Homo sapiens
ttcctggggctcgccaggcgccctctcccccgcccgctgcccggtgcagcgctctcccgacgcccgcgtggctttcttccaggtctttgctcaaatgtcagcttacaaggtcttctctgctg

SEQ ID NO: 307314 - DNA, 122 bp, Homo sapiens
cacagctcctgccccaccttcatcactgctgagcccccctgggaaagctcatatctccagcgctcgcgtgaggacagcagtgccggcagcaccagggcacaggccccacagacaaggggccc

SEQ ID NO: 307315 - DNA, 122 bp, Homo sapiens
gctcactgagctgataacacactgctgtctgcggacggtggagctaagagtatggttacacgccctctggggcttggcgtggctggtgcccacacctggacgctggtgaggggcccacatgg

SEQ ID NO: 307316 - DNA, 122 bp, Homo sapiens
aggccgtcggtgagcaccgggcaatgcgaggccttgttaccgaggttgttgtgctgggggcgtttccagcacagtcattcaagggacgtgagctgcaaggatcgtcacttgacaggcggctt

SEQ ID NO: 307317 - DNA, 122 bp, Homo sapiens
ttgttgtttcttcattcttttcctcattttataactatccagcctctgcccattttgccacggtgcaatgttgtatgcattgactcttaggtttataaatacatcagaatgttctttgctgc

SEQ ID NO: 307318 - DNA, 122 bp, Homo sapiens
ctcccaaagtgctgggattacaggtgtgagccatcactcccggcatacaaagaatatctacgactgacttaggaaataaaatgttacaaatagagttgaaggctctgagggtccatccctga

SEQ ID NO: 307319 - DNA, 122 bp, Homo sapiens
ccgcgaccccccgtccctccgccctcgaccaatcctccgcctttgcccccccccgctccccgcccccaatccgctgccatctcccggagtgccccgagttgatatcttcccatccacccgcc

SEQ ID NO: 307320 - DNA, 122 bp, Homo sapiens
gttttaaagtggtaacagatggttttcttatccaataggattaaaaaatttgtccttacccggccgaccgcggaagtagagtaggcgggcggccaatggggacatgatggggggcggagccg

SEQ ID NO: 307321 - DNA, 122 bp, Homo sapiens
tgtttcctccgtctctatctctctccccactagaaggcaggtctcaggagggcaaggacccggcctgtccagcttccagccgtagccccagggccgggtgtgcagtagatactcaacaagcc

SEQ ID NO: 307322 - DNA, 122 bp, Homo sapiens
gttgagctggttatgctggcacaggcaccagctgcttcattttctctctttgtactgctgcgagtagaaacccatagggcccaattactgcagatgcctcttttctccaatagcaacattag

SEQ ID NO: 307323 - DNA, 122 bp, Homo sapiens
ggctgtgtctggcctcctggggtccttttgtccaaggacaaggtgtcggctctcagtccccgccgtccacaggatgcctgaggtcttcctgcacccacgtttgactggagcaaatggagcaa

SEQ ID NO: 307324 - DNA, 122 bp, Homo sapiens
cggctccccaggccaagacggctccccaggccgcacacagccatgagccaggctgcttgacgggacctgaccccgccaggttcccgtccagtccgcggggtgactccacccacagctggccg

SEQ ID NO: 307325 - DNA, 122 bp, Homo sapiens
agtcttatcgcagctaagcgggaagaccacttcagataacattagatgcttgccccaccgcgtcaccgtgattagattattattgtaattatgactccccaagatcttccacagactgggac

SEQ ID NO: 307326 - DNA, 122 bp, Homo sapiens
gcagggccacgcagatcttagctggagcctacaggtacaagtgagagccaccccctttgacgtaactggactggcatttacagaactcatgtacagcccactctcaggaacaccagccagga

SEQ ID NO: 307327 - DNA, 122 bp, Homo sapiens
ccctcttgggctagaccgcctgggtctgagtctggcagatgaattctgtgctccccagcccggcaaacctccctgggacacggggacgtcacagctcctcttctcggtgctgttgaaaagag

SEQ ID NO: 307328 - DNA, 122 bp, Homo sapiens
tcagagccccgtgcagaggggctgccttctggagggcaggtaggatgtggggtgggaagccggccctgagctggggtctccaccctgagggaccctcgctgcaggatcgcctgggcatccct

SEQ ID NO: 307329 - DNA, 122 bp, Homo sapiens
ccattatcaaggtccagaggggttgaactggcaggtggattccagctctgtggcacaacccgggccaagagctcagggatctcctaactcctgtcttaggtaccaagtcaccggtcatgtta

SEQ ID NO: 307330 - DNA, 122 bp, Homo sapiens
ggggcgtggctaagccagcggcggacctatgctggcctgggggggttcggggtgggggttcgggggggtggccccccgcagtgaggaggtgtggagggggcggcgtgtgcgggatcgtggag

SEQ ID NO: 307331 - DNA, 122 bp, Homo sapiens
gtagaaatcctgaagagccagtcattcttttacagagtacattcttcttagcctctatggcgctggtctatgcccttcagtgaacagttgtataaacaataattataatttgcaaccttgtc

SEQ ID NO: 307332 - DNA, 122 bp, Homo sapiens
ggaagccttgaacttctgacaacgtgggtgggccgctggctttccagactccagagcagccgctctgaactcaggctgcaaataagactcacttagggagctgctgaaaataactgttgaat

SEQ ID NO: 307333 - DNA, 122 bp, Homo sapiens
tcgcgtccctgccggtgcttgcccttggcccatgacggtaaccgcccagcactctgtccccggggccctgaactccggaaaccccactgggtaggctgtgcgtcccgcctgggaggatgggg

SEQ ID NO: 307334 - DNA, 122 bp, Homo sapiens
tgcctcggccgttttattcagttaaggaaactgagtcactccatcccaaagccagattcccgcggttctaagctgaagctgtctcgggtgcatttgcattccaaaaaggcgaagggtcccgc

SEQ ID NO: 307335 - DNA, 122 bp, Homo sapiens
aaaaggagcctcagaccagagctgatttagagctctgtaagtcacagaaaagtgccaggtcgtttgcagtattaatattatatgcatgtattatacccaggatactcaccacacctaagagc

SEQ ID NO: 307336 - DNA, 122 bp, Homo sapiens
caccaaaccctgactctccgtaggcttcacacacacgtgtgtccccgcctgtgagctcggcggtgtggtgctgaccaagcactggcttcagctcatccttcgctggtggctgcaagccatgg

SEQ ID NO: 307337 - DNA, 122 bp, Homo sapiens
aaatcgaatatgaggaaagactgacttattccataaagaaatttcaggttaggcttggcacggtgggtcacacctgtaatcccagctctttgggaggccaaggctggcagatcacttgaggt

SEQ ID NO: 307338 - DNA, 122 bp, Homo sapiens
cacgtcaccccgcctacttcccgacagcctccgggcgccgtcacctgcagcgcgactgagcgcgggaggacgctctagccaccctagagacatcgaaactcttcccaggccttgcagcaccc

SEQ ID NO: 307339 - DNA, 122 bp, Homo sapiens
cggaaagggaactccctgaccccttgtgcttcccaagtgaggcaatgcctcaccctgcttcggctcgcacacagtgcgcgcacccactgacctgcgcccagtgtctggcactccctagtgag

SEQ ID NO: 307340 - DNA, 122 bp, Homo sapiens
ctttctctaattgctccaacaatggcctctattaaaatggagacacccaattaaaggccccgccgggccgctctcggctgccggcaaagctctggcccccggcctgcgacgtgcagaccgcg

SEQ ID NO: 307341 - DNA, 122 bp, Homo sapiens
gcactttctcacatctgatgggtccgtgggacagtcacaagagagagaggaacgtgcctccgttttgcccacattcggggctgaggccgaggctgccccaccccgctgttttctcagcctcc

SEQ ID NO: 307342 - DNA, 122 bp, Homo sapiens
ctagagggctcccggagctgcagctggaggcggaaccgggggtgggaggacacgcaagcccgcggaggacctggtcagctgcttaagccaggagacccaggaagcaggggcagctggtgaag

SEQ ID NO: 307343 - DNA, 122 bp, Homo sapiens
cacccaacaacgggctgcagccatcagtaacaacggcagctccaacgcccagagaactcacggagcagacacacatcaggtactccaggtacaccagcgattcaggatcatccccatggcag

SEQ ID NO: 307344 - DNA, 122 bp, Homo sapiens
atagtcaaaggtgcttgagtcattggcatgtaagagaaatatacctgcatgttagtctaacgttctgatagaaatgacatgcatttatgctgccatttgttactatcaggactcgactcgtg

SEQ ID NO: 307345 - DNA, 122 bp, Homo sapiens
agcttccagaagggacagggagctacttaacagactgctggacccttaacgactggaaaccggaaccgtgggtgacggaaccgaccagacgtgacagccctttggctggggctgcagtccca

SEQ ID NO: 307346 - DNA, 122 bp, Homo sapiens
ggttggtggatgaccttgagccctcaggaacgagatggcggttctctggaggctgagtgccgtttgcggtgccctaggaggccgaggtgaggggtcttcccaccctgaggtgcttagcgtag

SEQ ID NO: 307347 - DNA, 122 bp, Homo sapiens
cttggaagatcttgtcttgcatcccgttctgggccaccagccaggagtactactgacgggcgctgctccgcattgtttcactgacttgtgatgggtccgtgttcctcagatcccctcccagc

SEQ ID NO: 307348 - DNA, 122 bp, Homo sapiens
ataaaaaacgcagtaaaatccaagcgtaagcagcttggcggccagagaccgtgaatgccccgtctttctctagcagcagttactgaaaaacctccaagggcggttttaatttcctctccttg

SEQ ID NO: 307349 - DNA, 122 bp, Homo sapiens
cctcacacttactgccacgaagtaagcatgtgacctttgcagtgccaggaaaaacaagtccgagcaagaaaacaacccaccctgaaatgcggtgggccgactgcttagggctgggtggtccc

SEQ ID NO: 307350 - DNA, 122 bp, Homo sapiens
agcgcggcattcttcatttaaactgtctataaatttctgcctagtcaaagttaagagtggcgccagggatttgaaccgcgctgacgaagtttggtgatccatcttccgagtatcgccgggat

SEQ ID NO: 307351 - DNA, 122 bp, Homo sapiens
ggatgttgctgaacaggcgctccgcctccacctgggcgcggcgggaggtgcggttggccacgcccctccgccaggttagccccgccccaggtccaggtcccgccctccttcctggtacctca

SEQ ID NO: 307352 - DNA, 122 bp, Homo sapiens
ggggtggcggcaggactctgggggtgggcaggtgtgggaagctgtgcactggcccagctccgtcctggccccccaggcaccctctcagcccccactcctcttctgggagcccatctcccctc

SEQ ID NO: 307353 - DNA, 122 bp, Homo sapiens
aataaagttcttggatgtgacgggcctgtgtctgctcagcttgttgggggcgggggcgggcgggcgggcgggcgggcgccgggcgctgccggtcacgtgggctggctcgatcacgtgggcgc

SEQ ID NO: 307354 - DNA, 122 bp, Homo sapiens
atcgagcaatccagaccacaggaaagtaccttgccccttctaagccctagatctaacatgcggagcagccaggagactgtgagaaggaactgcttgaggaagtatcccaggcattccttcag

SEQ ID NO: 307355 - DNA, 122 bp, Homo sapiens
acttactggtagaactgatacctcctaatctcaatgaagtctaagccagcagcactccagcgatgattttctttttcctttttttctttgcttgaattctggacacataatcatgccattat

SEQ ID NO: 307356 - DNA, 122 bp, Homo sapiens
cctcgactgcaagagaggagctgccagccgccccgagggtgaagcctgcagatgcggtgccggtcatcaatggcttctattgaacggatcaccgccagaagctgccatccacgactcagtat

SEQ ID NO: 307357 - DNA, 122 bp, Homo sapiens
ggaggctcgcgcgggtgtatacgagcctgtgcttgaatgggaagggccgggattccgggtcgctctggcccctccttcctccggagccagccagtccctcggcagagcgctggggctgcact

SEQ ID NO: 307358 - DNA, 122 bp, Homo sapiens
aagggaaatgtcaaatctgcatacatttcaaatgacccaacaatatttaccttagagctacgtctcctatttttctgacaattgcctcattgaggaagtgactcatgcagcataccaagccc

SEQ ID NO: 307359 - DNA, 122 bp, Homo sapiens
ccgccgcctcgatggggtgagtgcgcggcacggagttgggaggctcccggcgcggggtcccgggctcgtgtccccgcctttgtgtctggagctcgggcgcgggaggcgctggggacggcgcc

SEQ ID NO: 307360 - DNA, 122 bp, Homo sapiens
ccgctggtgaaggaacaggggagtggcgggagcccaatgggcagagtcggccctgtccaccgcagagacgctgagctgggtggggacgtgatttcccccgagaaccttcccacgtgatttgc

SEQ ID NO: 307361 - DNA, 122 bp, Homo sapiens
ctgcggggccgcgcgggtgtcaccgaggcgggcacagactgcacagtgtccccaagggctcgcgcacgtccttcaagacctgccagcgcgcgggaaaaggcaggctccgagtcaaccagggc

SEQ ID NO: 307362 - DNA, 122 bp, Homo sapiens
acggaacagcgacgcgcaagcaggtctctttcgtcagcgtaatccctccgcagaaagccgcgcactagttttaatcacgccccaccccctggccgctggcgccacctccgccactcgggcgc

SEQ ID NO: 307363 - DNA, 122 bp, Homo sapiens
ggccgacttctccccaacatgcgcgcaagctcagagtgaggtctgggcatgagagagttccgggcggaacgtgggacaagaccgagtctcaagggcctggaccagtgtcggagagggctgct

SEQ ID NO: 307364 - DNA, 122 bp, Homo sapiens
aaatgatgataaaagttcctaactcatagggtcttagtgcagattaaatgacttgatgcacgaaacaagcctggcatagcgcctggcatggagtagttcttgttagtgataacagctaacac

SEQ ID NO: 307365 - DNA, 122 bp, Homo sapiens
ttttaagttcaaagccctgtttttgagttggagaaacagaaaccagagctgttcagcagccggctaagctaaagcatttggtaagtggcacagccagaactagataaaaatccaatctccca

SEQ ID NO: 307366 - DNA, 122 bp, Homo sapiens
gcctccatctcccccagagcggggctccttttgggcagaaaaacctgtcctgttgccgctcggctcagggagcatgcccgtgatgtttgtcgagtggctgaatgagcgaacggatgggccct

SEQ ID NO: 307367 - DNA, 122 bp, Homo sapiens
tcacattgcgcgaacaaggatggtcacgcgccacaaaaggacttgcagggcggggcgactcgacggccttcccttttgctcccattggctgcggtcgtcaggttcgcctcctccactaccta

SEQ ID NO: 307368 - DNA, 122 bp, Homo sapiens
tctttccaaatgttccgaagggagctgtggtttgtctcactttttgttgaccgaaatcctcggaaagtgtatgtcacagggttttctttgaatccagctctgcctggcagccagtcatgatg

SEQ ID NO: 307369 - DNA, 122 bp, Homo sapiens
agagatcagggcgtttggcccagacacagggcagcctagacccgtggctgagagagacagcgcagtagcctcgggttcacgctcctctctccgggaaagttgctttccaagagttcaccaaa

SEQ ID NO: 307370 - DNA, 122 bp, Homo sapiens
cactctgagcactcgctggcggatctgctgagtcttcactccatagacaagaggattgagcgcaggtggcatgaggagataccatgtggccagaagaacatggacatgatggggtacatgat

SEQ ID NO: 307371 - DNA, 122 bp, Homo sapiens
cctagccgatggagggctgggattggttctccgggaccgattgacggctcagggcacgagcggggaccgcagcggcggaggtgagggcgccagcaggaagtgggagaagaggcgacccaagg

SEQ ID NO: 307372 - DNA, 122 bp, Homo sapiens
gaccagaaaaactgggagctgggctcgggcatccccagatgtaggtagaccccaagagggcgtggagtcttttccacacagaaccttaacagggacagaactgaccctccgcagagagccct

SEQ ID NO: 307373 - DNA, 122 bp, Homo sapiens
aacaacataacataggaggatttggtgagaaaatgcatttgaaatggctgaagacagtgccgtgtgttataagtgcttggtagttgttattgtcctgtggtagccttgggtctctagagcca

SEQ ID NO: 307374 - DNA, 122 bp, Homo sapiens
ggcaccatatcgttaccccaaaggaaaatgcatgcacgctgtcagagatgacgaacactgcgtctggaaacttcttaagggcacccacgtgtcctcagctgcagacagcagcgaggagacac

SEQ ID NO: 307375 - DNA, 122 bp, Homo sapiens
gggtgacggactcacctggaaaatcgggtcactcccacctgaatattgtgcttttcggaccggcttaaaaaacgggagattatatccccgagattatatccggcacctggcgtggagggtcc

SEQ ID NO: 307376 - DNA, 122 bp, Homo sapiens
ccccggcctgctggaggagaggggatcccccggggcagaggcggctacacccggagaacccggaaaccggaagcgcagatcctgccggctctggactagccgctcagcaccagggcggaagg

SEQ ID NO: 307377 - DNA, 122 bp, Homo sapiens
ctaacgtaataagccgagatcgggatactcggtctgcagtcgccccacggaccagatgagcgcaggtgtatctgcggaagctcaggttaccatgaatatcactgggccacggcgaaccctcc

SEQ ID NO: 307378 - DNA, 122 bp, Homo sapiens
gttctctctgtgtccccctcgcgggccccgcacctcgcgtcccggatcgctctgattccgcgactccttggccgccgctgcgcatggaaagctctgccaagatggagagcggcggcgccggc

SEQ ID NO: 307379 - DNA, 122 bp, Homo sapiens
gacccctgcagatgatcaggcggcagccggggtgatttccttcctcttttggcaacatggcgggcggagaagctggagtgactctagggcagccgcatctttcgcgtcaggatctcaccacc

SEQ ID NO: 307380 - DNA, 122 bp, Homo sapiens
gacatcgggccgcagagaaagtgccgatggcctggggcagcggtgcgagggtgggaaaaacgcaggatattgcatcatagagacgcggccaccttcgcccctggagagcgccagtctcagga

SEQ ID NO: 307381 - DNA, 122 bp, Homo sapiens
ggccgcagctgaggaggcgtttaccttcaggtgggttgggcctgggagaccagaagagtgcgagccctcggctcagctggggctcaaccccgactcttcgtagccgctcgcagcggccttgg

SEQ ID NO: 307382 - DNA, 122 bp, Homo sapiens
ggcggcactggggagcccgagcgtctttgtctccacggagctgagggtgaggcggagtctcgcctgggagggcagcggagctgctgaaagccgtagaaggctgtgcaggaagggttatgccc

SEQ ID NO: 307383 - DNA, 122 bp, Homo sapiens
atcagaggtggacccgggctggcctggggtgggaagggaggggttgtctgagccctgtaccgagccatgtggccctgggcaagggcccaagaaccagtgagtatagggtgaccagcttatcc

SEQ ID NO: 307384 - DNA, 122 bp, Homo sapiens
ctgtgacctgactttctgtgtgtctgtttccctgataagtgccggagtaccagggggagccggatgagatttccatacagaaatgtcaggaggcagttcgccaggtgcttgccctgcccttg

SEQ ID NO: 307385 - DNA, 122 bp, Homo sapiens
caacagccattcccagctgtccccgtggatgcgttatatatttagctgatctcttggaagcgagacgcagcttcgaaacaggtgagcagatttcttaggaaagacacatgagacatgaaact

SEQ ID NO: 307386 - DNA, 122 bp, Homo sapiens
ctacgactttcccacgctggtgtccacctgggagcacgacctgccctcccaccggcgccacgctggcctgctgtcgctccccgacatctcgctggaggccttgcagaagaagaaggccatgc

SEQ ID NO: 307387 - DNA, 122 bp, Homo sapiens
caggaaagggacctccctgatcccttgagcttcccgagtgaggcaatgcctctcctgcttcggctggcgcacggtgtgcggcacccactgtcctgcacccactgtctggcactccctagtga

SEQ ID NO: 307388 - DNA, 122 bp, Homo sapiens
accgccagcagccgtcacagcaacatcaaacacgggtgtttatgccaagccccatttacacgagcccacttctccccgagagatgaatttctaaaacaaacagcttttacatatgttcacag

SEQ ID NO: 307389 - DNA, 122 bp, Homo sapiens
gggtgcgggagcttgggtgggcgcggggccctggggcgcgctgggtgtggccgtcattagcgcccccgggcgccgggcggcgtcgtgggcatctccgaggggcgctgcgttgctggcgtctg

SEQ ID NO: 307390 - DNA, 122 bp, Homo sapiens
tggccagctgctcccttatgccttcccccgatccatccagaatcctaggcattcccatcccgatactggccaaatccagccaccccgcagcctgggtgcctggcaccatctgcccagcctgc

SEQ ID NO: 307391 - DNA, 122 bp, Homo sapiens
cggtcctggggagagcatggcgccgaggtgaggccggggctgcgggcaggggttgggggacgccaagatgcggctgcgggggtcgcgggggtcgcggggctcggccgggtcctgcgggggtc

SEQ ID NO: 307392 - DNA, 122 bp, Homo sapiens
tagtattacgaaagaaaaaccttagacaattaaatttaacggagtttaactgagcaaagacggattcaagaattgggcagtcctggaacaagaataggttcaaagacactggtgctggtgca

SEQ ID NO: 307393 - DNA, 122 bp, Homo sapiens
agctggattctgtcaccttggagctcttgtgtcactgacctagctgatgatttatcctctcgccagagtcagagaacttttgttgctcatgattagtttgccctgagacaaagggaaattac

SEQ ID NO: 307394 - DNA, 122 bp, Homo sapiens
cccagggagccaagccctggagaggaggtgggcagcaccaggcagccagcctgtgggccccgctatgcttcctcaggcagctagtctctgtatctggggtagaaagagtgggctaaaaagtc

SEQ ID NO: 307395 - DNA, 122 bp, Homo sapiens
cccatgctagaaagccataaatgtccttgacaggccttgtttagccgttggatacattagcgagtcccaaagacacttcagaacttaagtaaaggagaaaatgctccaattaccactggcaa

SEQ ID NO: 307396 - DNA, 122 bp, Homo sapiens
ttgaattaaaacaaaacaaacaaaacccaaacacttcccagggctgttttgaggatggcacgaatcagcatgtgtaaaacacagccccaggtacctggtaggtcctcaatatactcacacaa

SEQ ID NO: 307397 - DNA, 122 bp, Homo sapiens
acacctttttacacctgaccaaagcagccagtcatgggccagtgatgcaacaaggtcaaccggtgcattctggcccctcagaaaagcagcccccgggaaggtcaggaggaggctgctgactc

SEQ ID NO: 307398 - DNA, 122 bp, Homo sapiens
cgcaggtggagctcctgggacctgcaggaggtgaggcatccaacgtcacataggagattgcggctctgagaactcccgaggccccgaccaccctctgcgccgagcatctactgcgcgccgtg

SEQ ID NO: 307399 - DNA, 122 bp, Homo sapiens
cggacccgcactgcagcatctgcagggctccgacctggtgcgggcctccaaggcagggggcgcgcggcggcacagccggtggccgcgattttccgggccactccttccccccttacactccc

SEQ ID NO: 307400 - DNA, 122 bp, Homo sapiens
aagcctcaggaggatcctcctggctttcatcctgaacgcgagttaacttaagttcagaagcggggcaggcagtggcctgggaactacattacccaaaagacacagcggcggacacaagcagc

SEQ ID NO: 307401 - DNA, 122 bp, Homo sapiens
cccagggtccaggcccgccctcggctggcaggtgtgggcacagaggcagctgggattggtcgcagctggcggaggcgcgtcccaggctccggcagaccgctggaacagctgagcagagcagg

SEQ ID NO: 307402 - DNA, 122 bp, Homo sapiens
ccttctagagaaccgtgagagcctggtggtgaactatgaggacttggcagccagggagcacgtgctggcctacttcctgcctgaggcaccggcggagctgctgcagatctttgatgaggctg

SEQ ID NO: 307403 - DNA, 122 bp, Homo sapiens
atcggtaaaacatgtcccaacgcggtcgcgagtggttccatctcgctgtctggcccacagcgtggagaagccttgcccaggcctgaaacttctctttgcagttccagaaagcaggcgactgg

SEQ ID NO: 307404 - DNA, 122 bp, Homo sapiens
aagcccaattcataaatgagaacactgagaaatcctcagagaagtagccactctgtgaagcggagacggtgctggactagagcccctcagactccaggcctgtgttctctctgttgcaccat

SEQ ID NO: 307405 - DNA, 122 bp, Homo sapiens
tttacacactagctgtaagtgttactggaggcaagtaggaacttttcaggaattctgacacgttaacatcctgtgagatgcctgcagatggcctgaataggagtaattatgccacagaaaat

SEQ ID NO: 307406 - DNA, 122 bp, Homo sapiens
tgagacctggcagccacaactgcagtcccatcctcttgtcagggccctttcctgtgtacacgtgacagagtgccttttcgagactggcagggacgaggacaaatatggatgaggtggagagt

SEQ ID NO: 307407 - DNA, 122 bp, Homo sapiens
tggagtgaggagtggacactgggagccggttcctcaaataccctccacacctttgaccggcgcatgggccagaacgggggacccctccagctcaggctgaagagctcccccaactgccgggt

SEQ ID NO: 307408 - DNA, 122 bp, Homo sapiens
tcctctgcctaactcaatcctcttccaccatgacgctctcctggactatcttcctcatgtcggatgaggttatgagattaaataatttaacatttctgccaggagcggtcggtggctcacac

SEQ ID NO: 307409 - DNA, 122 bp, Homo sapiens
gcgggccgagggcttcgtgggccccggggagtcgggcgcagagacttctccaagtttgtgcgagtcccgagccctctgcctccctgccccggcccccgccgaaggctggcctaaagacgggc

SEQ ID NO: 307410 - DNA, 122 bp, Homo sapiens
tgggaagcacagtgcttggcttcatcttttgcaattctgcatcttttgcatttcccttctcgctctgctgctcgctcgcctttctttttcgtccttttcccccttttttgctcgcaccgtta

SEQ ID NO: 307411 - DNA, 122 bp, Homo sapiens
cgagacccagaagggtgagagggggaagccgcaccctcttcgtgggtgcgatgctgtgaacgtcttccttcaaggaaagagctgcttctggattttccttgaactccaggaggtgctaagaa

SEQ ID NO: 307412 - DNA, 122 bp, Homo sapiens
gtgtgtgttagacagaaagaaggaagagggcagggagagaaaaccaccgcattcaagcatcgccgcctctaggtgtaaggttcattccaggactgcctggagttggtgactttgcattcctg

SEQ ID NO: 307413 - DNA, 122 bp, Homo sapiens
tcggcggccgccatgctgctgtacggaaaacggcctaggcttctttcccggaaaggaacccgcgctcccgaactcaggcaggcggccgctatgcttccgtacggtaaacagcctcccgcctc

SEQ ID NO: 307414 - DNA, 122 bp, Homo sapiens
ggtgttcattaaaaagggactggatgattaatggtgtaggcatactttggcacagtgtgccgccattaaaaagagttctatatgctgatgtgcaatgatgcccacaatgttttttttttttt

SEQ ID NO: 307415 - DNA, 122 bp, Homo sapiens
ggacgcaccctgatcatctgtcctgtgacgggctcagccattggatcgcgaatctgcgttcgcgcatgcgtggtcctagagctacggtgacacttcgcgtgcggtgtaggcgcatcttcgct

SEQ ID NO: 307416 - DNA, 122 bp, Homo sapiens
gcgcaccgcgtggcttttgggggcagaccccggcgggctgtggcaggagggcggcggcggcggctgcggtcgaagaaggggacgccgacaaggtaagcgtcaatgtggcggcggccgggccc

SEQ ID NO: 307417 - DNA, 122 bp, Homo sapiens
ttgcttgcaggggcgagtgatgggctcgctccattgtgctcgtatttgcatggatgtgatcgcggccttgattggccggcgctgagaccgccccgccccctgcctcgtgccccccgccttgg

SEQ ID NO: 307418 - DNA, 122 bp, Homo sapiens
tataccacctctcaagccagttttggtcactttcttcgaattggagcttactgatcatcccggttgggttctaatagagctggtctctgagctgagcctacttttcagcctccagccccaag

SEQ ID NO: 307419 - DNA, 122 bp, Homo sapiens
agctcggtttttggcgggggcgctaaagtagggggatccgatattggtttccttggcaggcggggtacccaagtacctcccggttacacgtctggacaatgcacttccctatagtaactttg

SEQ ID NO: 307420 - DNA, 122 bp, Homo sapiens
gcctgaacgtgtggagggtggagttgccattaactaacgtgggaaaaggcaggtgtagtacgttttagagaaaatatccggaattccgttcagggccctggggtcttccttgaaagagtttt

SEQ ID NO: 307421 - DNA, 122 bp, Homo sapiens
gctctcgggagtccctggacactgtacctagcacatcccccagctcagcacgccgcaggccgccacatcttctagaacgacgaggttctggaactctgctccttgatcgcatttctcacact

SEQ ID NO: 307422 - DNA, 122 bp, Homo sapiens
tcgacctcccctttcaactgtcctaccgccttggcctggcacccgcgggcaggaccgaggcgctccgtggacgtgaatcaggtatgcccagggtcccctgggccccgcacatgagctgtggg

SEQ ID NO: 307423 - DNA, 122 bp, Homo sapiens
ctcagagattctaaaatcacatgatcacatttcaacttgcttgtaatgaattgggtgacgcgggatccaacctgtccgggagcttgtaatgaattgggtgatgcccattccgacctgtccgg

SEQ ID NO: 307424 - DNA, 122 bp, Homo sapiens
tttcctgctctggctcactgctgctcacagatatgcaaaacagagacctcctactccagccggcagacaggacccagccagctgcacgcacgcactgactcagctgagcctcctgggtggca

SEQ ID NO: 307425 - DNA, 122 bp, Homo sapiens
ggtgtgtgtgggcgctggtgtgtgcgggtgctggtgtgtgtgggcgctggtgtgtgtgggcgctggtgtgtacaggtgaccgtgggccaatgagctccaaacatcattagtgagaagaaaag

SEQ ID NO: 307426 - DNA, 122 bp, Homo sapiens
gcatcccctggcaccccgccccacgcccgtccttccggagtctacacatcggcgacctcccgtgtctaggcgcacacatttcccgccccgcggagactcccacgccccgggccctctctgcc

SEQ ID NO: 307427 - DNA, 122 bp, Homo sapiens
cccacctacaaaacaggctgcacgctccctgccacaagcagagtgactcatcctaacatccggcatcaattcttaatgagtccccgagcccccgcagtcctgtctacttcttttcttttcca

SEQ ID NO: 307428 - DNA, 122 bp, Homo sapiens
catcatgaccatgagacacaactggacaccaggtaggccttggggctacgcatgggcaggcggggtagggtgaggtctatgaacagaatggagcaatgggctaacccggagccttcactcca

SEQ ID NO: 307429 - DNA, 122 bp, Homo sapiens
tcagcagacacctggcctcctctgagatctgggtggacaggactaaccctctttgagacacgccagcccatgcgcttctggaactcggcggggtgggcagccctcctcccgtagcctaagcg

SEQ ID NO: 307430 - DNA, 122 bp, Homo sapiens
aggttgcagtgagccgagatcgcaccactgcactccatcctgggtgacagagcaagactccgtctcagtggggggaaaaaaaattaaagtggaatattttacatctttattcaggtatttga

SEQ ID NO: 307431 - DNA, 122 bp, Homo sapiens
gaggcagctctctgaactctggactttagtgagtgctcccccgctgagcctccccgttcccgctgttctgaagacagagacctccgcgagcggagcacgagctcccagcctatcatgaacat

SEQ ID NO: 307432 - DNA, 122 bp, Homo sapiens
aacaatgacagaggacatgggtgagtggcatttggcaagcaggataagtcactatcctttcgtgccttactaaaattagggaggaaaattagttcctatattataaagtagtgtttggcaac

SEQ ID NO: 307433 - DNA, 122 bp, Homo sapiens
ccgcgagcccctcggcggcggaaggccccagcgtgcaggcgcaggagggcgcggcgccggcggaagaagccctgtccccgcagcttgcgaccggagatccacgaatgtcccaagtcccagga

SEQ ID NO: 307434 - DNA, 122 bp, Homo sapiens
aattcattcaaacactgtaggaattgcctctttcgaaccctgtaggattttacttcttgacgcatctgtttatttaaaaccaaaggggtatgttgaggcatgggcaccctggcagcagaccc

SEQ ID NO: 307435 - DNA, 122 bp, Homo sapiens
ctgagaaaagccaatgtccgggtctcaaagcagtcaggcagaaggaagtctctcttactccggagtgggtcagtcttttgttctagtcaagctttcaactggttggatgggacccacctata

SEQ ID NO: 307436 - DNA, 122 bp, Homo sapiens
ggggctgtggatagacccaccacgtgatgagaaggctggccggatctgtcagcagaggcacggtgctgaccccgcccggtgccccagagccgtgcccagtgcccaaaggggtgctgtgcacc

SEQ ID NO: 307437 - DNA, 122 bp, Homo sapiens
ctcccgggtacctccccttggggtcttcacatgatgtgattttgaaaaaccagactcgggcgatcagagacctcactgcggaggaaatgaaggatgcctcgcttccaatacctggctcccat

SEQ ID NO: 307438 - DNA, 122 bp, Homo sapiens
gctgttcctcaaacgacacgcagccgaggtgggtgggtgtggggacgcgggagccagtgtcgtcggatcggcccgcagtccgctgtcctgctgagcccggaggccgcctggatggagccgcc

SEQ ID NO: 307439 - DNA, 122 bp, Homo sapiens
caactaatctgccaattaattatttgtcaataatgaaactgcagccacattggcttttgacgtgattgtaatattccaatattatactaaaatttcatgttctgggagccctgacaactttc

SEQ ID NO: 307440 - DNA, 122 bp, Homo sapiens
cccggctgagttctgcagagctggcggggccgggcccagagctcccctgtgcccagagcccggcccgccctgcggatgatgccaacctgaccagaaccccgctgtcccgggggcgcagcaac

SEQ ID NO: 307441 - DNA, 122 bp, Homo sapiens
ctagtagctaaatggagggtttaggatgcaggttctcggctcagacaccgggaatgaatccgttaagagaatgttgcggccctccaggccccgctcctcctgcctcgcaggtgcagtcactt

SEQ ID NO: 307442 - DNA, 122 bp, Homo sapiens
caggccaccgagagcgagctccgggccagccaggtgggcaggagctgagggccagcggggcgacggggaatctgtgtacccgagtgagtgtctaactcttatgtgtgtctccctgtgtctgt

SEQ ID NO: 307443 - DNA, 122 bp, Homo sapiens
cgttgtggccgcagcaacctcggttcgaatccgagtcacggcattgtggaaacaatggtacggcaagggcctctttttagacttagaaagccacacattcttctgggaagctaactctaaaa

SEQ ID NO: 307444 - DNA, 122 bp, Homo sapiens
gcttggtaataaatgaaagatgtaagaaccttaagaataaagtcttccaagttgaggctccggtagataggaaataaaggaaaacaaaacaactgcccttcctagtctgggaggtcaatcag

SEQ ID NO: 307445 - DNA, 122 bp, Homo sapiens
ggaaagccggtggcctggagatttctggagccgccaatccggaggcgggggtgggcggtgcgaaggcggggacagcggggcttgcagggtccgcccggcggcggcagggggcagccgagggc

SEQ ID NO: 307446 - DNA, 122 bp, Homo sapiens
tgcgggctgagtaaacatatgtgcatggttaaggtaaaaatgctacttagctcttcttcccgttaattcgttcaagaactggtgaaagagagcacacttcttggagactgaacttttaaatg

SEQ ID NO: 307447 - DNA, 122 bp, Homo sapiens
gaattcttaggtttaaacacattgttttatagatttttattacatccatctacagagcctcgctcagtgttctttgcagttggcctttaatacctaatgtaggactgcctaaaaactaatgt

SEQ ID NO: 307448 - DNA, 122 bp, Homo sapiens
ggttctcattcctgggaagggactgcacttacctcacgccagcccggggtgctgtgggggcggcccgttatcggggccccggagccggttcctacggccccatacacccgagctcggtccgg

SEQ ID NO: 307449 - DNA, 122 bp, Homo sapiens
gaagtctttcctgactcctcccccttctaactccccaccgacggtctgtgtccgctgccacgcgtgtccagtacctcgcagacctgaggaatgtagttctccttgaagtagttcttcagcct

SEQ ID NO: 307450 - DNA, 122 bp, Homo sapiens
cttctctctgccaagcagttacacgcgctgtgcattaaggcccagagaagcggagtttcacggccctcccacggccaaacccttcccttccagccagggagaggccagaactgaagaaacag

SEQ ID NO: 307451 - DNA, 122 bp, Homo sapiens
agcctcgggctcgcgaggagcagctcccacccgcggcttccgagtccagctctgtccctccgccatcccctagtcctccggcatttattcagggagacagggaggcagagagaagaggagaa

SEQ ID NO: 307452 - DNA, 122 bp, Homo sapiens
ccagcacaaacaacatctgggcaatcgatcatcctggacacaggaggtgcaggggggccacgaggaagagatcagagaagcagctctatgagaggggcttcaagcagctacagatcccaggt

SEQ ID NO: 307453 - DNA, 122 bp, Homo sapiens
cagcccaggcgccctggctcattatccatcccggccactggcgttcggttccgctcctgtcgcaccaccccctcactgctctgacagataccaggagctggtgccaacccgcagacacacct

SEQ ID NO: 307454 - DNA, 122 bp, Homo sapiens
gcgaagatggagtcgagaaagaggaagaagcgagggcgcgtcagtacagaccgtgggctgcgtgtcacgtcactgctgagcgaccgcgcggttccctgctatttgtaccgcccaaggcagtc

SEQ ID NO: 307455 - DNA, 122 bp, Homo sapiens
cctgaggagtggagtggcagctgaccctgtctgtgcccctagtattcccactttcctgtgcggtgcagcagtatgcctgggggaagatgggttccaacagcgaagtggcgcggctgttggcc

SEQ ID NO: 307456 - DNA, 122 bp, Homo sapiens
agtggcttctcccaggtctctgagggtgtttggagctcataccctcttctctttaacaagcgtgacagttaaaagagtaagggctggtatggacaaaagcaggaaggtgcctggggtagtag

SEQ ID NO: 307457 - DNA, 122 bp, Homo sapiens
ctccccgcagcccgcccctggaacgcgcatcctcctggcgagctggcatccctcccgacacgtgaccgcagcggggacacgcccgttccccgcccactccccgcccctgcctggcctgccca

SEQ ID NO: 307458 - DNA, 122 bp, Homo sapiens
actgactcataatctgactcagtaattcttctcccacatatatagtctagagaaattgcacgtgaacatcagatgttcaaaatgttcttaaacacattgttcataatagcaaaaaacaatta

SEQ ID NO: 307459 - DNA, 122 bp, Homo sapiens
actccaggaaaaggggctcctgggcccagggaggtgcgcgggctggggactcggccacggcgcctcccgccggtccttgccatctgaaggccgggaggagtggggagtcggcgcttgcaaag

SEQ ID NO: 307460 - DNA, 122 bp, Homo sapiens
tggcgcccttgcagaaggctcaggtgctgcccgcccgtcctcgatagctggtggtcagggcgtccaaaacactgaaaaccttccgttaggtctcaccgcctcagattgttaaacaatctagc

SEQ ID NO: 307461 - DNA, 122 bp, Homo sapiens
tcttcctgtttttactcctccttttcattcataacaaaagctacagctccaggagcccagcgccgggctgtgacccaagccgagcgtggaagaatggggttcctcgggaccggcacttggat

SEQ ID NO: 307462 - DNA, 122 bp, Homo sapiens
ccacagcccacctccgcaggtgctctcatgtcgaaaccagtttttctccatagggtgagccgcttcccaagaccatctcctgggagctctgccctcctcacagtccacgctgtcgctgtcat

SEQ ID NO: 307463 - DNA, 122 bp, Homo sapiens
attacacaaaacattaaatgctgtatcatctcattttcccaccgaagctccctggcaagacgttctccaggtggggtgtggtttgctccaggtgcaatgaatgggccccgttttgtattggg

SEQ ID NO: 307464 - DNA, 122 bp, Homo sapiens
cctgtggaagggaacgtggtcactgctggtcctagtcctcttgggagggactgtggtcaccgctggtcctggtccccgtgtgagggactgtggtcaccgatggtcctggtccccgtggaagg

SEQ ID NO: 307465 - DNA, 122 bp, Homo sapiens
tgcatcccccaaagtgacccacatttgtactttgaatgtcttcagacctctcccccagaccgagtctcaagcctcaagcccacctaagtgcccgtcaggtcctgggtgcgggaggtcggggc

SEQ ID NO: 307466 - DNA, 122 bp, Homo sapiens
ggctgcgggaaggagggggcggggcgcgcagggggcggtgctggccgggaggggcggggccgtccagccgcgctcgggccgcctaccccgcggcctcgcgacccggccaccccggctggcgc

SEQ ID NO: 307467 - DNA, 122 bp, Homo sapiens
actcccatgcagaaaatgtaggcacacatgtagttatgcctgtaggcacatatgcacacacgtgcacagacatacatgcatgtgcacagggcgcacgcaggcataggtacacactcgtgctc

SEQ ID NO: 307468 - DNA, 122 bp, Homo sapiens
atgaaaagtaagcctctctgtcgggtgttgatgagctttggagcaacgagataaactcagcgggtttggtagtctaaatggcacaaacccttagcagagcaactaggaaatagcttgtaaaa

SEQ ID NO: 307469 - DNA, 122 bp, Homo sapiens
tatcatcctcatattctttctggcctcggtgggtaactcggccatgattcacctcatccacgtggatcctcgtctccacacaccgatgtactttcttctcagccagctctcccttatggacc

SEQ ID NO: 307470 - DNA, 122 bp, Homo sapiens
gtgaaatacaagttttgtgatatgttttccctcaagctcagagggtaattcatgcttccacgtaaatacaggtggtagttatctacccacagatgtgactgcccccctccaagttttacctg

SEQ ID NO: 307471 - DNA, 122 bp, Homo sapiens
tccatcacagggaagtgtccctgcgggaggccctggccctgattgggcgccggggcggagcggcctttgctctttgcgtggtcgcgggggtataacagcggcgcgcgtggctcgcagaccgg

SEQ ID NO: 307472 - DNA, 122 bp, Homo sapiens
cctcgccagcgctcctgcactctggtctctgcagagccacatggaaacgccgcagacacccggacaaaagccgcccccaaccacccgccagggcccactgtgttctgtctgtcacttgcttt

SEQ ID NO: 307473 - DNA, 122 bp, Homo sapiens
cggttaggatagggaaagacgtggttcattggcagactgcatctgttttcggtaatcctccgttacaaacagttcggttaatccaaattcctgaaatcaacatgccagcaataaatggtata

SEQ ID NO: 307474 - DNA, 122 bp, Homo sapiens
tctcggggtttacggggcagtctggagtctaacagttcaggggcgaggcgacggcgggctcgacggcagccctcccccgacacagactcccgtgatccactgacgaaccaggatcgaggctg

SEQ ID NO: 307475 - DNA, 122 bp, Homo sapiens
tgtgcggcccggggggcagcagcgggggtgggacgtggtggtggtggtcggggctgccgccgctgcccgcgctggacgtactgctgccgtcgcccacgtcgcgggcccccgcgccgggcgcg

SEQ ID NO: 307476 - DNA, 122 bp, Homo sapiens
aaggaggggtcccgtgtggagtgtgtggacatcaggcatgaggccaggccaggtggtagacggagccttcacaatacaagaagaggaacgtttcttttaggtttctcactgcttgtgacgta

SEQ ID NO: 307477 - DNA, 122 bp, Homo sapiens
tgcaaacacgccacatgtgcccacatgtgcatgttttgatcatgtttaaccacttttaaccgccgtaggtacgtaatcagctcccgcggcaaaggtttaagaaaaaaaaaaaaaaagccttg

SEQ ID NO: 307478 - DNA, 122 bp, Homo sapiens
ctcaggagaggcccgcgactggagtaacggggctgtgctacaggtcagaaccgcactgggcgccgggagcctcgcgcccccaccgcagcccgtgaccacgtcagtcgccgactgtcacgctg

SEQ ID NO: 307479 - DNA, 122 bp, Homo sapiens
ggttagccctgcaagtaattccggcttcccgatgtggatgggtcatgtgatgactaggagcgtcacatgacacaggaagtgaggcaatcacagccatatttctaaagggcaattggcttcct

SEQ ID NO: 307480 - DNA, 122 bp, Homo sapiens
gtgcagtggcctgtcagcacttgggaggagccacatgtgcatttgtttactgaagttgtgcgcatgctttcttgagacatttttcccttatcagtcaggtgttcctagaggaaggtcacata

SEQ ID NO: 307481 - DNA, 122 bp, Homo sapiens
tactgaatttaaaatgaattaatttccatgtcaactgaagtgttcacgtgtgctagtggccggctccctggacggtgaggtcttaccgggtccccggtagctctttggaggatggctcaggg

SEQ ID NO: 307482 - DNA, 122 bp, Homo sapiens
agctaattttttgtgttttttagtagacacagggtttaccatgttggctaaggctggtctcgtactactggcgtcatgtgatctgtccaccttggcctcccaaagtgctgggattacaggca

SEQ ID NO: 307483 - DNA, 122 bp, Homo sapiens
ctgcgtctacgcgggacgccatccgaagccagttcacaccttcgttcttcttgcggatggcgttctcggcatacacacgggcacactctacatttttctgcagaagggcctgaaacccgcgg

SEQ ID NO: 307484 - DNA, 122 bp, Homo sapiens
gccgcctcctgcctcaacccgggtttctacccccgccctcccggtcctggctcaaactctcgtcacctgatcctcggcgaaagctcctatcgcgacactttgaccgtagccgttcccgccat

SEQ ID NO: 307485 - DNA, 122 bp, Homo sapiens
ggggtcagggcggagctcaggttgactctgcagcagagaactacaattcccatggggccgcgcggcagaaagaaaggggcgggacgggagggggcgcgtcgcgcttgcgcaggtcccggggc

SEQ ID NO: 307486 - DNA, 122 bp, Homo sapiens
tcagatgcagtaattatcaagactgccacacctgctgcaatggactgaacatttgtgccccgccaaaatttgtatgttgaaatcctaactcccaatatgatggtattaggtattgggattag

SEQ ID NO: 307487 - DNA, 122 bp, Homo sapiens
ctcatgacccacccacctcggcctcccaaagtgctgggattacaggcatgagccaccgcgcgcagcttaagggggtagaatctgagatccatcagctctagagtttgggatcttgagtaaca

SEQ ID NO: 307488 - DNA, 122 bp, Homo sapiens
gaaaaaagccagcagccagttgcaaaaccccaaagcaaggggagccgcggagcagctcagcgctggagagagtccgtgggaggaggcacgctggcggtgaagggcggggacccacaacccag

SEQ ID NO: 307489 - DNA, 122 bp, Homo sapiens
cgtggaaggtgcctggacacgggctcagccgcaggggcccctagtacctccatcgggtctcgtcccccacggcggggtcagagggcaagtcaccggccaacctcctccaggagctctgttta

SEQ ID NO: 307490 - DNA, 122 bp, Homo sapiens
gcaccctccacagacggctgctgctccaccctgggggccctgcagggatcaggtgccgggcgctggggcagggacctggcgggggattccaggtgccctcctgccccgtgaagcagccggta

SEQ ID NO: 307491 - DNA, 122 bp, Homo sapiens
gtgggttgcacagaaccctagtagcgagtccggctgagcctctgcggcctagcccagcagcgtcgtcttcccggctccgaagacgtcttcccgaagccccgctgccccggcgcaccagctcc

SEQ ID NO: 307492 - DNA, 122 bp, Homo sapiens
cttgctcttgttctagggaatgacaatggataaaagtgagctggtacagaaagccaaactcgctgagcaggctgagcgatatgatgatatggctgcagccatgaaggcagtcacagaacagg

SEQ ID NO: 307493 - DNA, 122 bp, Homo sapiens
gtacaaacagaaattcattcgcggtttctgtcacctgtgcgatggtcaggaagcttgttgcgtgggccttgaggccggcataaacccctcggatcacgtcattacatcctatagggctcatg

SEQ ID NO: 307494 - DNA, 122 bp, Homo sapiens
ctacggagaaggaaaccgggggaaagaaaaccagtaggcaggccaatggtttttcggcagcgcgctggcaagtttgtggaacactttctaggaattaggtcttttcctcccccttcatcatc

SEQ ID NO: 307495 - DNA, 122 bp, Homo sapiens
ccgcccgcccgcccgccccgccgcggtgcctctccgaggaggatgctccgcgagtcagggcggctgctcccgccgccgcatccctgcaacaccgactgacggcagcatcagcaccagtgccc

SEQ ID NO: 307496 - DNA, 122 bp, Homo sapiens
ctgcttggaggccgagggcagggcgcgaagcacgctgacagtgacaaccacagaaagagccggagccagcagggtgagatataaaaatctgtatttatattacaatgacataaggacacagc

SEQ ID NO: 307497 - DNA, 122 bp, Homo sapiens
gaaggggaggaggtttaactatcaaataacctcaggacacatctacagttccagggatgacgtgacagacaagggggtcttgatggaaatcctgtagtcccagatgctgcgccctaatggga

SEQ ID NO: 307498 - DNA, 122 bp, Homo sapiens
ccccccgcctgccgagggggctggcgggggggcattcctgggtccctggaactctgagcccgcgtcccccacccctaaggggcgtggggggggggcgcacccctccaaccccctttccccag

SEQ ID NO: 307499 - DNA, 122 bp, Homo sapiens
tgctcacctgggtgggcttgccgaaccacttccagagctgccgggctggcaggaaggcggcgatcttgggccggttctccacggacggcaggcgctgccgcttggccagctccttggtggtg

SEQ ID NO: 307500 - DNA, 122 bp, Homo sapiens
tctgggagcggcgtcggcgccccgggcgagcggcctccgccactcgccttcggggcccagcgagcccgcgcccactccccggccgcctgttcggtcctgcgttacctctgcgttcggccggt

SEQ ID NO: 307501 - DNA, 122 bp, Homo sapiens
gtggggtctagggctcagacgggggccattttgccagaggctgcctcccggagttgggggcggcctggcggcaggctgaagctgttcttttgcctcttctgcagcttggggcttggagagga

SEQ ID NO: 307502 - DNA, 122 bp, Homo sapiens
caaactttccaggtgcccccttggcctccgctctgaaggcgcggggttcaggaacctccgcggctgccccaggatcgaggacccagagagcctggcaccctcgcccccgcgccgggggaccc

SEQ ID NO: 307503 - DNA, 122 bp, Homo sapiens
tgtgccttgcagaagaagcggtggagcagctggaaggcgttcttcggctactgttgggagcgtcagtacaggtgagccggcggtgggaaggaaaggttagggtcgagctttggcggtagagg

SEQ ID NO: 307504 - DNA, 122 bp, Homo sapiens
ctagaattgtcctctgagagatttagatggatgggccacttcacagtagcagccaactcacgggagcacctgggcaacgctagtggacttttttgtagtgagtgtgttgatcatagaaaatg

SEQ ID NO: 307505 - DNA, 122 bp, Homo sapiens
ccttttcccgttactgactttgctctgtatccttttgctataataaatcacatccgcaagcgtttctatgtactgagttctgccagtgaatcaacaaacctaggccggttttgaggacctct

SEQ ID NO: 307506 - DNA, 122 bp, Homo sapiens
gatttttttaaaagtgtaaactaagggaaaataaaatactcatttaaaatgtgttggcagcgtgtagttggcttaaaatgtcatttactgagttgttaccatttttgctctctcaattttat

SEQ ID NO: 307507 - DNA, 122 bp, Homo sapiens
cccattgaaagggtaattacgttccgtgggctctttcccaaacctttggtgacgacactgcgtgtaaactccaggccagcagacgacccctccccttccctcctccccctttttatcttgcc

SEQ ID NO: 307508 - DNA, 122 bp, Homo sapiens
ttttccatttctaccaatcagttactggctttgtgccagagcgaaatatagattcactaccgagaataataactaaaagaaggaaaatataatcactttcaaatttatatagaatggtcctt

SEQ ID NO: 307509 - DNA, 122 bp, Homo sapiens
cgagcccagccccactcacccgccatcttgggatgggcatggaggcgggaccggcaggggcggggccctgcagacaggggcggggccctgcagacaggggcggggccctgcagacaggggcg

SEQ ID NO: 307510 - DNA, 122 bp, Homo sapiens
ccaggttacccacgggctcagggatggctcccacggggtgtttccagttcccgggagagtcgagtaaggtcccggagcgcacggccctgaggcctggcctgggggctcgggagacagggcgg

SEQ ID NO: 307511 - DNA, 122 bp, Homo sapiens
ggcacccggccacatttgtgtctatagctttgtttcattgtaagtattctaggccaggcacggtggctcacgcctgtaatcccagcactttgggaggccgagtcgggcggatcatgaggtca

SEQ ID NO: 307512 - DNA, 122 bp, Homo sapiens
atgtgctttggaagtctgtcatggttatttctctttttaggcatcttttcagggcacacccgtctctgcatcactgtctgtttccttgtgtcacaaatttctgttctttttttctctccctg

SEQ ID NO: 307513 - DNA, 122 bp, Homo sapiens
acaacagcggggacccaatgtcaacagctaaagcgctaggagctcggcggaggcaggagccgtcgcgactgccccatctccaagccgagttccagaggcggcgagaggagtgtcaggaaggg

SEQ ID NO: 307514 - DNA, 122 bp, Homo sapiens
ctcgagcagtctctggaacacgctgcggggctcccgggcctgagccaggtctgttctccacgcaggtgttccgcgcgccccgttcagccatgtcgtccggcatccatgtagcgctggtgact

SEQ ID NO: 307515 - DNA, 122 bp, Homo sapiens
tcaccaggcagaggtgtcatccgaattcaggctcctggggcccgggagggtccgactctacggacccaggtcgctgtggcccatcgctttcgatttgacttggtttctgtcgccactcgcgg

SEQ ID NO: 307516 - DNA, 122 bp, Homo sapiens
ggcctcggagggatctgagcagggctgcggcctgacccaggatctctctggcctccctggcgtcttcccaggtggcccaggaccgcagtaccagactgagctggactggcattgaccaggcc

SEQ ID NO: 307517 - DNA, 122 bp, Homo sapiens
tgaaagggccccacccagttgctagaggtcggcggcaaacttggctccatatgtctcaatcgccaaggcaaatattatgcagccaagcaatgtgagcctgggggccccaaggtgagccctgc

SEQ ID NO: 307518 - DNA, 122 bp, Homo sapiens
gctctcccagggtggggttttggctgggattgacctttctcccctaacagattggaaactcgtaatttcccgctttttggtgaaactcgttgacagacaccatctgctcgctactaccaggc

SEQ ID NO: 307519 - DNA, 122 bp, Homo sapiens
aatgaaacaaatgtgtggtcatttgttaaatctccccatctattcatctctctgtccgtccgtcagttcacccgtctgtccatctgtcccagggcgtggtttccgtgtgtgttaaccatgag

SEQ ID NO: 307520 - DNA, 122 bp, Homo sapiens
gcagcgcttgccgggtgtcagggtcatccagggggtcgcgcagcaggaagccttgctgtgcgccgccggcctggccgcccgggcagtagcagagcagcctgagcagctggcaccgctggaag

SEQ ID NO: 307521 - DNA, 122 bp, Homo sapiens
tagatatcggaagccactcgaacttttcgggaaagtatttggcaatttcaatcttctccacgggaagacgatagaaatcggcaactctctgcctcagggagccggcagtcccaccctgggcc

SEQ ID NO: 307522 - DNA, 122 bp, Homo sapiens
ttaagaagggaaacacaaaagaattgtttctacttgcagcattcttgcagcacactcaggcgtggtggctcatgcctgtaatctcagcactttgggaggccgaggcgagcagattacttgaa

SEQ ID NO: 307523 - DNA, 122 bp, Homo sapiens
gtggtgcgctctcacccacccgcgagctcccacgcacatccaggtcctccccgtccagctcgtggctcaatacaatacctagaaggcctgggggccctcaggaagaccgagggacagcagcc

SEQ ID NO: 307524 - DNA, 122 bp, Homo sapiens
gccactccagccaacggaaagccgcctttaagtagggtcgcgaaggaaggcgctgcctcgcgttggaggagcttgctctgagctgctgccacctgctgggctggagctggagctggagctgc

SEQ ID NO: 307525 - DNA, 122 bp, Homo sapiens
aaggccttccgaaactgcgggctttaagatcttgttcagagagcatgctctttgcagggacgtggttggagctggagttctttatcctcagcaaactaacgcagggaacagaaaaccaaaca

SEQ ID NO: 307526 - DNA, 122 bp, Homo sapiens
agatcacaattatctaacaaaatttaaaaattaaaatagccacaaattctatacttacaacgtaacaaaaaagatataaaattatgtcattaacatttaagaatgatagacaaagcaagaaa

SEQ ID NO: 307527 - DNA, 122 bp, Homo sapiens
acgctgccttacccagtctctcagcagtcctaagctgccttcgacggccgagaagcgcctcgattcttgcccctggctcatttccctggcgcgttttccagacgcctccgctcccaacgctg

SEQ ID NO: 307528 - DNA, 122 bp, Homo sapiens
tagagtcgttgtgagaatgaaatgagattatctacataaagggctttgcaccatgctggacggaggtgagcatcccataagtattagctgtagctatattgttagcgtctgctggtgtggaa

SEQ ID NO: 307529 - DNA, 122 bp, Homo sapiens
gctgggagaagagccagatctgctgaatgtaaatcgggttcttcccactcatccatctcccgcctgcttctctgcctctgcccctgatggtcgcttgaagctcagaccctggaggacagtgg

SEQ ID NO: 307530 - DNA, 122 bp, Homo sapiens
gcagttctgcagttgctaccgctggccgggaaggtgtagattccgctttccctctgcgcacgcgcggctcccggcacaaaattctcttgaatcgaacttatttgcatacgggcgcgcgcacg

SEQ ID NO: 307531 - DNA, 122 bp, Homo sapiens
ccaagtgccaaccacttcacagattcaggcgtcctcaagtggagaaaaccattgggcacccggcttccggcccggccacttagtgtcgttatggcgctgcctcttacaggtggcggtaaagg

SEQ ID NO: 307532 - DNA, 122 bp, Homo sapiens
aatgaacagtatttatttcaacagttgtgctaaaatagatcaaccagcagaatgcaacgacggttaataagactatgtgaaaattctcaataagacacagaaaactctcaatatagctttat

SEQ ID NO: 307533 - DNA, 122 bp, Homo sapiens
cttccccaggttgcaactgactttctccagggaaggaatatattcccaagttgatcaaatcgtgtggatgcaagtcttccaatgtgctcagtcaacaaaaatgtctgagcctgggatgtcag

SEQ ID NO: 307534 - DNA, 122 bp, Homo sapiens
aagaacatggccagaagggcccattcagcccagatcggtacgtgcgtgcacagtggcgcccggggtttgagaagctactgcggcctctcagctcagatttgctaaaaggtgaagacagcgct

SEQ ID NO: 307535 - DNA, 122 bp, Homo sapiens
tgagagtcaggacttgctctttcttggggatcctccgaaaccagcatgccttcctgcccacgacctaataaagtgggactttttcaagtaccccttgggagtggacgtgtaacacgtggtcg

SEQ ID NO: 307536 - DNA, 122 bp, Homo sapiens
ggcgggaggaaaaaggttccggcctcagccggcgcacctggcggaggaggaacctcgcgacgcgctctcgggcatcggtttctcccagcaaagcttggagggtttagctgcgcggagagctc

SEQ ID NO: 307537 - DNA, 122 bp, Homo sapiens
ggcttccgacaacgggcggggcggagcggcccagggaggcgtagcccgagactccaacgccgcccgctccgccccggcttcctggagccgcccccactgccagccactcaggaaccttccag

SEQ ID NO: 307538 - DNA, 122 bp, Homo sapiens
agcctcacgcacgacactggcctcattattagcattggagacaacactccaggcagcccgcgttcaacgataaataataagacaccaagccgcacggcctcctactaaatgctgcaggaatt

SEQ ID NO: 307539 - DNA, 122 bp, Homo sapiens
cgggagccgtgaggcggcgggagccatgggccggggcctgggcgggctgggggcccggggcggcgggcggcgctcagcagcggccgcctcccgggctccggagcgcagccatgttggctgcc

SEQ ID NO: 307540 - DNA, 122 bp, Homo sapiens
gactggatgacaagaaggggatgaattaataagattcaaaggtgaaacctcagtgcttgccgctgaactcagaggacagtagataataagtagtttgggtttgaatataatcaaggtatatt

SEQ ID NO: 307541 - DNA, 122 bp, Homo sapiens
ttctacttctccggcggcggtggtgatgagacctggatcccctctcttcaaaattgtagacgcgtctccgagtcctttcactcatcggaggctgccggatttcaatgtcatagttcccattg

SEQ ID NO: 307542 - DNA, 122 bp, Homo sapiens
gactcttcgggaaagcgaaacccaaggctccgccgcccagcctgactgactgcattggcacggtgggcatttgatcatgcataagtaggctcaggacctctgacacacccgaccccgcccac

SEQ ID NO: 307543 - DNA, 122 bp, Homo sapiens
agctctccgatgtgttggagaagctgcaggtgaaggtggcgttgtccccttcggtcaccacgagcagggctggggagaaggtgggggggttccagggcctgtctggggagtctgagagatgg

SEQ ID NO: 307544 - DNA, 122 bp, Homo sapiens
ggagcgtattaagctcactgatgcagagacggagccctcatcagcacttaaccctctgcacgccggcccctcatcagcacttaaccctctgcacgccagcccctcatcagcacttaaccctc

SEQ ID NO: 307545 - DNA, 122 bp, Homo sapiens
gctttaagctcccaccttcggttttgtactgggcgcgggaattgcaaaatgccagaatatcgcaaccatccccgcggcccggcgggtttgcaaagggtgccccggccaggaggcgggggctc

SEQ ID NO: 307546 - DNA, 122 bp, Homo sapiens
gactgagtcggtataaagaacccttaaaacactacacacaagaaaaattaagtacacatacgaggactggaatagcccattcacagaaggaaaaaatgcttggtgataattaaaacaactct

SEQ ID NO: 307547 - DNA, 122 bp, Homo sapiens
ctctccgagatccaggtgctgcccccgaggagcgcatgccctctgaaatacaggtgttgccgccatccccgagagcacggggacgtcccctgtgctgtggaggagcgcctgccctcccagat

SEQ ID NO: 307548 - DNA, 122 bp, Homo sapiens
caggatgaggaacaggagtttgggaaaaagggtttttcagttcccctgacgccacctgatcgctgagcttctgttatgtgcatgcaagtggggattcaagaattcttaggaaaggtaatctt

SEQ ID NO: 307549 - DNA, 122 bp, Homo sapiens
ctctggaaataaaaaaagagagcaacatcatctaactgccctacagatctaatagtatctcgcccggaggtctcagcgacctcggggtggggcctctctgaggctctggctcccccgggagc

SEQ ID NO: 307550 - DNA, 122 bp, Homo sapiens
tggcgagggcccgccatgagacgctcggggaaccagactgccgagcccccctctctgggccgacgccagcccggctgtggactggagaaaaccgcaaggccacctgcagaaagaaaagaagg

SEQ ID NO: 307551 - DNA, 122 bp, Homo sapiens
acaaccctggggacggatgttgcgtgttgactttagaatgggatttccagtgtcctcatccgtctcctgttgagatgggggtggtgatggggtgctgagctacgccggccgagtgcgtgtgg

SEQ ID NO: 307552 - DNA, 122 bp, Homo sapiens
tgcgctggcagagaggggcggccccagaaaccacttccagatgtgctcggctggccggctcggatgcgccagacttcctctggctaagtgcaaaacatgcaaaaaacaacgctgttctggag

SEQ ID NO: 307553 - DNA, 122 bp, Homo sapiens
gagccaggcttcccctcgtcgctcgtgagctgcaaacagtggaaagttgggaacctcagtcgctggcccaggcggagagcagcggcggcggcgagggcagcgggattcgggccgcggcgccg

SEQ ID NO: 307554 - DNA, 122 bp, Homo sapiens
ctgccccagcagaggcaggaacgtgtgttcaaggtggaggaaacggcctggccaaaggctcggaggtgggctttgtgcaaatcactgttcagagtgcctgggacctccgggtgagcagggtg

SEQ ID NO: 307555 - DNA, 122 bp, Homo sapiens
atcctgagacaacaagtttggctgtatggagggcctaccggcagcgctcctgagctagaacgccgagagaaagagcgccagaggagccagggaggaggagaagagctgctaaaggaataacc

SEQ ID NO: 307556 - DNA, 122 bp, Homo sapiens
gaatttattcttctataatcctttcttcatcattctgcatgaatgtgatcatatttttgccgagggcaaagctttcaaagacttatgttgaaaaattgaacaaaaggatgcaaaaaaaaagg

SEQ ID NO: 307557 - DNA, 122 bp, Homo sapiens
cgttcttatcccaatttcacagacgaggacgatcaagtcgttaatttgtcaaaggtcacccgcaggcgacaggcggggacagggtctgggaaaacccgctaggcaccgaggcccagagggcg

SEQ ID NO: 307558 - DNA, 122 bp, Homo sapiens
tgcgcacacgcacacgccgcccgcccaccaggcagacacccacacacctgtgcacgcacgcgcacgccaagccagcgggccctgcccctgccccggagccctcagtgtcagaaccaggctgc

SEQ ID NO: 307559 - DNA, 122 bp, Homo sapiens
caccccacccaccctgtccaacctccttcctttttcattgtctggttgctttgtgtacaacgtcccagcgatgaaacaccctccagccgcttcccttttcaaccttgccagttcctgcagaa

SEQ ID NO: 307560 - DNA, 122 bp, Homo sapiens
gataaataagttcccaaattggcaagaatctctacgcatgtgtaaaaaggcaacttttcccggcccaagtgactcaccaaggccctccaggcattatctagacttactttattctttgcaaa

SEQ ID NO: 307561 - DNA, 122 bp, Homo sapiens
gtgggcacgttatgttgtccacgtgaaccacggggatgtgtgggcatgttatgatgtccacgtgatccacggggacgtgtgggcacgttatgttgtccacgtgatccacggggacgtgtagg

SEQ ID NO: 307562 - DNA, 122 bp, Homo sapiens
tgtggtcccggcacccggggtacctgagcgtgggcccgatgcaggccgtgtcagtgctctcgatctctcgcaggatccgctcgtgctctgccgctgtctccaggctctccgcctccgccatc

SEQ ID NO: 307563 - DNA, 122 bp, Homo sapiens
cgccgcctccgcagctggcccggcggagtggggccgagacctcggggcggggggcgcaggcgccggcctgggccttggacgccccgcgggaggcgggagggcgatcggggtgcggggagggc

SEQ ID NO: 307564 - DNA, 122 bp, Homo sapiens
tgaaaagctgatcaaagtgaggccaacagaagtggaggcaccagttaagaagccacagtacgaattaggcagtggatgatggtgctttgatccaaattcataaggtagataatgacagtaag

SEQ ID NO: 307565 - DNA, 122 bp, Homo sapiens
gagtgaacaaagtatgaggacgcttctcttttctgtgccttccaggcttgccttccagaccgcctttgactttttcctttttgtgtttgatttacagcttccagagccaacagatctggatt

SEQ ID NO: 307566 - DNA, 122 bp, Homo sapiens
cgaccaggtgaggggcggcctcgcccacggcccgccgccctccgcccacccgcaggggcccgacccggcccggcagcccccatccccgcctgcagagccgaggcccagcccggggaccgccc

SEQ ID NO: 307567 - DNA, 122 bp, Homo sapiens
gagcccgtgctgcccaggatgtgtgtgtcacctgccgggtcttccaccgagcccgtgccacgcagggtgtgtgtgtcgcctgccgtgtcttcccaccgaacccgtgccacgcagggtgtgtg

SEQ ID NO: 307568 - DNA, 122 bp, Homo sapiens
aaatgcaggtaggaaagtaccatttctttgcattcactcactattgtctgcatgtgaaaccgacagtgattgtccctgaggcataagcttgtactgaaacgagattcttaggctttttgagt

SEQ ID NO: 307569 - DNA, 122 bp, Homo sapiens
tcaaatgttgctatgtaccaaatatttatacagtctcaaagagaaacaaagattcataaacgatattatattgtgttgggtacatattttgaacttttagattccaaaaaattccatgtcac

SEQ ID NO: 307570 - DNA, 122 bp, Homo sapiens
gactcgggagacaaggcctgggtgacggataaatttagcgcacgagtcgagtagctagcgcgggccggcaggcgtgggaccgcgagccgcgcgggggcctcgggggcagccctccatcccct

SEQ ID NO: 307571 - DNA, 122 bp, Homo sapiens
ggcctcccaaagtgctgggatcacaggcctgagccactgcatcagctttagcattacattcgtgtatgaagaagacatgctgcatgtgcttctataagaggcggggctaacggtggagaaat

SEQ ID NO: 307572 - DNA, 122 bp, Homo sapiens
taccccttcctgtgtgctgttctctgatccatttctagggtgtcctctgccttcatcccccgcccccgccactgaaggtccctcctgcctcctttatgggcctttcctgcaagcagccttca

SEQ ID NO: 307573 - DNA, 122 bp, Homo sapiens
gccctctacgccccgctgcagcgcgaaggatctggtggagaacaagtgcctgctgcccagcgcaactccttctgctacgagaacgagctggccttcctgagccgtgacgaggaggattaggc

SEQ ID NO: 307574 - DNA, 122 bp, Homo sapiens
gcatgcgcgctgaggcctgcctgaccgaccttcagcagggctgtggctaccatgttctctcgcgcgggtgtcgctgggctgtcggcctggaccttgcagccgcaatggtatggcagcttgcg

SEQ ID NO: 307575 - DNA, 122 bp, Homo sapiens
accaccagcagcagcagcagcagcagcagcagccgaacccgagggctcctggacacctggcgggtctccatcacctgtggagaaccagaaaggggctcagtagggctgcatcccggcccaga

SEQ ID NO: 307576 - DNA, 122 bp, Homo sapiens
ggtatcatagctcccatctcgccccctgcgctgggagaaatgggcgtcttgtcttcgctgcgcattgcatgcggaggagcagatgtctcagcccaggccctagccttgcatcgagccctgag

SEQ ID NO: 307577 - DNA, 122 bp, Homo sapiens
cccttgcggtcacgttcagcaagtgtgagcacctactgtctgcagggggccagaagaactcgcatctgctctcggggagcccacagtcatctgggcgggggtcccagatgagaaagtaatca

SEQ ID NO: 307578 - DNA, 122 bp, Homo sapiens
ctgtgccttttgtctggacgttgtggggctgcgagagcaccaggggacagcaccttttcccgggggtccatctgccaccacctccctgaggcttgtttcgaggacccctttattctggtgct

SEQ ID NO: 307579 - DNA, 122 bp, Homo sapiens
ttctccccactacgcattgcagagcccttggatagacctcgccggacccagagtgagggacgtggctcaagtcgacagaacacccagccacccacccacatgccaatagacacttttaaaaa

SEQ ID NO: 307580 - DNA, 122 bp, Homo sapiens
aaagggattttaactggagtggatgagaaaaaaacaacatatctagcaataaacttagtacggaactggagtggggataaaagtaaaaccaaaaacattgctttatgcattgaggtcaaata

SEQ ID NO: 307581 - DNA, 122 bp, Homo sapiens
gccaggttttccatttcaagtgatcccccgcctgggccaaaatgtttggattttcaggcacggaggggagatggacctcaggccaaaccatgctgggtaaaactgagggtcaaggctgtgct

SEQ ID NO: 307582 - DNA, 122 bp, Homo sapiens
gctgcagcacgcgggtaccaggggccacgggggcgcctccctcatttcctgtagatttcccgggctggcctcccaccaggagagtaggaaaatgggaccaatgctagaatatcgccctccca

SEQ ID NO: 307583 - DNA, 122 bp, Homo sapiens
tgaccgccaggcttggagaggagccgctcctggcaaagccagcgccctatttctgaacgccgcctccgttccggactacacttcccaggggctattgcagcggaggacacgcccacttccgg

SEQ ID NO: 307584 - DNA, 122 bp, Homo sapiens
ggctgcgatgggctcttccagccattggggatctcaggcagctccggacatgtgtcattgcggggcacctctgggggcacagaggcacaagatgcaggccctcggccagcaccaaagtgact

SEQ ID NO: 307585 - DNA, 122 bp, Homo sapiens
ccgcggcgcttgggggggagcccgcggcgcggcggcctaaggtgcgtaacgccccatgaacgacatcttccggtgggttagggagagacacccccctgtgacttggtatcactcagtcaaac

SEQ ID NO: 307586 - DNA, 122 bp, Homo sapiens
cagcggaaccggaaaagctttgacagaaagacgcgtgtattagggaacgtctgcaaagaccgcggcggaaagccagggattgtcttaaaaaattgtcagaccggataaagggaggtctaaaa

SEQ ID NO: 307587 - DNA, 122 bp, Homo sapiens
caggggtgggacagacagggtgagcttccgtgtagcctgcagcccctcgccccagcacagcgaggcacccagactccacaccagcctgtgccaggccatgcccagcgtgtccaccacaggga

SEQ ID NO: 307588 - DNA, 122 bp, Homo sapiens
ctgttccaagtggcccttactgacccgagagatgtcattgccgcaggcaggacctatgggcgcatataggttgtaatgaaactgttgtctcagttggaagcctagacatgaaatgggtcagt

SEQ ID NO: 307589 - DNA, 122 bp, Homo sapiens
gttaagtgacttactccagcagcgaaaagctgttcttttctgtgagtttctagaccaggacggattgcaggaaagtgctggggaaatgcttatagactaaggaatgggcataagtcagttaa

SEQ ID NO: 307590 - DNA, 122 bp, Homo sapiens
ggccccgaccgagctgtgcgaccgagtctctgagcagttccagcagcttttccaggaggccggtatctcctgcacagatttcatccgcaccacggaggcccggcaccgggtggctgtgcagc

SEQ ID NO: 307591 - DNA, 122 bp, Homo sapiens
ccacagaggcaaagtaaggagatctggtagcttctattcacctcttggctccagaaacagcgaccctgtatggatgactcagcagggagcagatgaggggaaggatgagcttctgtgctcct

SEQ ID NO: 307592 - DNA, 122 bp, Homo sapiens
gaagtcccttttgaagttaacaaaaattgagtccctggctgggaggtcccccgagtgttccgctgtgggctggaggtggcgtttctgtcgtgatttatgtggagtggttcaaaacagaagtt

SEQ ID NO: 307593 - DNA, 122 bp, Homo sapiens
gggctcctcagcggcagcaaccgagaagggcactcagccccgcaggtcccggtgggaatgcgcggccggcgcccgcaccccatttataggaagcccaggctgcaagagcgccaggattgcaa

SEQ ID NO: 307594 - DNA, 122 bp, Homo sapiens
cagtggccgcctggaaattgcggagtggaatgcagccactagagacggcgcctgagcccccgcccggggccccgttagttgagaaggaaaagatagcctctggagctttgaagccggccccc

SEQ ID NO: 307595 - DNA, 122 bp, Homo sapiens
tcctaaactgctgctctgattgagactcccccgaccccactgccgtgactcaagcaccttcgatggccccctattacccagaaaataaatatcaaacgcctcagtgtggtatttcacaatcc

SEQ ID NO: 307596 - DNA, 122 bp, Homo sapiens
aacttcgcgaccctcctggggctccgccggggcgggagaggcggggctcgcgggctgagccggatgcgactttggacccgcccccccacacacaccaggcagccccctgcttgcccccgccc

SEQ ID NO: 307597 - DNA, 122 bp, Homo sapiens
cgggaaggctcgaaaggcgcggagcgccgaggggagcgccgaggggagggctgagggggacgcgactgctcagggacctcgcgaagcaagaccgaggcttcaaaacaagttaccttggccag

SEQ ID NO: 307598 - DNA, 122 bp, Homo sapiens
cgtgcgaccggctctgcctcctccggtaactacccagcctcccgctgggcaccctagccgcggtactgagcaccttggttaggagctgaggggaagagggagactcccttacttcagggtga

SEQ ID NO: 307599 - DNA, 122 bp, Homo sapiens
gactgccgaagaggagacaggtgggcctgccctgcacgctggggcagctcggcactggcccgtcagaggagccaggtccatggccggtagcccacaggtaggagggaaagtggcagagccaa

SEQ ID NO: 307600 - DNA, 122 bp, Homo sapiens
taagtttgggggtactaaagtgggaggaaggagggtggggggggtcacaatttttactcccggtagtcttgttctgggaaggtacaaggtgaaattagaagtgacctcagaacccatcgacg

SEQ ID NO: 307601 - DNA, 122 bp, Homo sapiens
tcctcccagccctcttcccagaaggaggaggacctacttgctgcctacctaggatgatggcgagaagccagacccttaagttctgggggtcctaagcgggtccctggccctcgagacagggg

SEQ ID NO: 307602 - DNA, 122 bp, Homo sapiens
aggagatgtgtcagagccttggaatgctgcaactgggctgtgcctgacccaaggtgggggcgggtgcaaggaacctgctggcacattagaggtcttttcttctggaggcaaactttggagaa

SEQ ID NO: 307603 - DNA, 122 bp, Homo sapiens
caggcatgagccaccgtgccaggccggtagtcagcttttcaagacacatttgttcattatcgtaaataaactgtagtgatctctaatcatgaaccatggatgagcaatagaatttgaaacaa

SEQ ID NO: 307604 - DNA, 122 bp, Homo sapiens
tgttggaggtgcttttgctggctcacaagagctgattgtgcacatcccttcccacttccacgttcaatgttgtcgtgttggtagcttaagattgcccatgtcgggattatttccaccagaaa

SEQ ID NO: 307605 - DNA, 122 bp, Homo sapiens
atataaaaattagccggggcgtggtggcgggcgcctgtaatcccacttgttcattcctcccgtccggagttcgtggtctcgttggcctcaggaataaagctgtagacccttgcagtgagtgt

SEQ ID NO: 307606 - DNA, 122 bp, Homo sapiens
tctgggctgggccaggcaagtgggccgcagaggcctggcttagctttgggaacggaagcacgggaaggggcgcggagaggcaggaagcggcctggggaggctggggtggccgggactacgga

SEQ ID NO: 307607 - DNA, 122 bp, Homo sapiens
ctgccaagccgagcggccatgggaggtgagctgttgtcggcgttttgagcaatctgcgggcggacgcggggatcactcacccgcgatgacgaatttggccatggtcgagagagactcagagg

SEQ ID NO: 307608 - DNA, 122 bp, Homo sapiens
catacctgtgcaccgactcatcgcgcccgtgctgctctcggaccaccgcggcagtggacacgtgggagccgcccaccacggccttcagagcctctacgaagtccctgcagagctctccctgc

SEQ ID NO: 307609 - DNA, 122 bp, Homo sapiens
gcgagcctgcttcctccaatgcacagagccgtggcgcgtgtcaaagtgtgggaaagttcccgggagaggaaggggtggaaaatgcagccgctcatctcaaccctggacggctgcggcaaggc

SEQ ID NO: 307610 - DNA, 122 bp, Homo sapiens
tttgaaagtggctgcttgtttttttataaattccatcagcaatctccctgccaagggctacggaagcaagcaggagctatagcatcagatctatggaaggtcagcacaggagatgagcaaag

SEQ ID NO: 307611 - DNA, 122 bp, Homo sapiens
tgaatgcctaaaacccgtccttctgaaaaccgtgtctaccagggcgacctccagaggtctcgcgcgtagtcaccagtcccaaaatcacctagctggtaaatgtcacagattcaactggaggc

SEQ ID NO: 307612 - DNA, 122 bp, Homo sapiens
agggagacggaggctgtgagggactctgggaagccatggacgtcgacaggctccaggaggcgctggaagattttgagaagaggcaaaaaagaaagtctgtcctgtcctggatcagttccttt

SEQ ID NO: 307613 - DNA, 122 bp, Homo sapiens
aggttgctggggccccagtgctttgaacaatgcctggagcacagcaggtcctcggagctccgcatttcccccatgcgtgcagggagggaaggccgcgtgcccgcgggcgggggagggggcgg

SEQ ID NO: 307614 - DNA, 122 bp, Homo sapiens
tttcttcggtgaaatcccgcccgccgccccttccccggaccccaaaccttcaccatgacccgcgcgggcctcttaactaccgcccccgggccccagcccccagttttcgagcgggaaagggg

SEQ ID NO: 307615 - DNA, 122 bp, Homo sapiens
ccgactggaacctccctgctttctagtctaggggcttcgctgcggctgagactcggtcgccgccacgccttagcgtgaaggattccgggaagcctgcgggactgcgagtggagaggttttgc

SEQ ID NO: 307616 - DNA, 122 bp, Homo sapiens
gtcagataaatagttttgggggtactaagatcatttgaaacctaccacccaggctgtctacggtcactcgttgcaatattaaaaagcaattgaaagtgaatcactgaaagtgatccgagctc

SEQ ID NO: 307617 - DNA, 122 bp, Homo sapiens
atagttgtctaatttgtgtgtgtgtgtgtgtacatgtgtgcatgcgtgcattcgtgcatgcgtgcctatctagccttttttgaacacaatgactggcacctggtagataatatggttgaatg

SEQ ID NO: 307618 - DNA, 122 bp, Homo sapiens
gagcagtgattgtgggattgtaaataagagcatcagaagccctccccagctactgctcttcgtggagacttagtaaggactgtgtctacttgagctgtggcaaggctgctgtctgggactgt

SEQ ID NO: 307619 - DNA, 122 bp, Homo sapiens
caaatacccagaaaggaagtggaacctgcggtgaggccccagaggtgacccgccttgtcccgggcaggatgggcgccatcctgcagcccagccctacatccgctctccctctggagtcttta

SEQ ID NO: 307620 - DNA, 122 bp, Homo sapiens
gaacagacagactttccttgcgagggttggctcaggaaggctctgggctcatctcacagccgccccagcgagggtcggggaggcaggtgctggctccggtggggtctgcggcagagcaggac

SEQ ID NO: 307621 - DNA, 122 bp, Homo sapiens
cccccgaccctgtgcccacgctcaccacgtcgttcacggccttcttcggcccctctagcacgacattgaggcctggcttcagaagccctcgggaaaacgcatcctgcaactgcaggacacaa

SEQ ID NO: 307622 - DNA, 122 bp, Homo sapiens
aaaagaaattagtttcaaatttacctcagcgtttgtgtatcgggcaaaaatcgttttgcccgattccgtattggtatacttttgcttcagttgcatatcttaaaactaaatgtaatttatta

SEQ ID NO: 307623 - DNA, 122 bp, Homo sapiens
catagatcatttggacttttctgagttctttaactcctcgttcataatattttgcctctccgtgccaagagccagtgtcctggcttgatttgaaaaaagaagccctgaggaagttgtaatca

SEQ ID NO: 307624 - DNA, 122 bp, Homo sapiens
gaaaaaaaaggcatttgtcaaaatccaacatccattcctgtttttttaaaaaagtaaactcgccagatgtggtggctcatgcctgtaatcccagcactttgggaggttgaggcaggaggatt

SEQ ID NO: 307625 - DNA, 122 bp, Homo sapiens
ccgggaggctggggcagccatgaccaccgacggcgctcggggaagccccagggagcggaacgggcgaggcttatagaccgacaaccccccggttcctctcaacgcccgcccgcccgccgacc

SEQ ID NO: 307626 - DNA, 122 bp, Homo sapiens
tgctgccgttcaggtccaaaggccaactgccaaggaggcccccaagtcagggagggaaatcggtgcggctcacagtccacgatttaaatgtcagtctcatccaaaaacaccctcgcagaaaa

SEQ ID NO: 307627 - DNA, 122 bp, Homo sapiens
agctcagagtagagtcccaagtctggaccagcttggattctgtatttttggtgatgaaaacggatagaattcactctagtgacatttttcagttttttaacgtttggctttggcatcgatga

SEQ ID NO: 307628 - DNA, 122 bp, Homo sapiens
ccccgtttgtgaccgtgcagtggtttcccagcatctctgcagagggagccgcacgcccggcgttctcagagaaacccgatgagcctggctgcctcttgctgtgctttcccccactctcctgc

SEQ ID NO: 307629 - DNA, 122 bp, Homo sapiens
ccaattaagagtggacaattatcctccttttgctttctgtggcctcctcttgcattgtggcgtgttccactgccgtggtatgactgcttgtaggataaggaacaaggaaatagtggtaagaa

SEQ ID NO: 307630 - DNA, 122 bp, Homo sapiens
cgctgcgtgtaagactgcgaggggcggggtgaggaggcttgtcctcttttccgattggcccgctgagcgtctgtggcgcgcgcgcgcgcgccgccagcggtagcggaccttgagtggcaggg

SEQ ID NO: 307631 - DNA, 122 bp, Homo sapiens
tgagtgctgtgtgtttattttggtgcatctcccacctcatatccgtgagcaggaagcctccggtggtggctgttacatttgtactcctaatgctatcaataacccaagtcgtcaatgagggg

SEQ ID NO: 307632 - DNA, 122 bp, Homo sapiens
gtgtccgcatcgctctcatagtagaagacggtgaaggtctccttgcaggagcgcccagcccgaggcagggacaggcactcgagcatggtgaagcgcagcgtggcgtacacgtggacggcgcc

SEQ ID NO: 307633 - DNA, 122 bp, Homo sapiens
gccagggccctttccccactgtggtgtgataagaggctgccctcacagtcacaatgctcccgggtcacagaggtgctgggccccaggccagcctctgcctgggaagttctctctgggaacat

SEQ ID NO: 307634 - DNA, 122 bp, Homo sapiens
taggcaatgcaggcaaatcatttttcaaacgcatctgtgttaagtacaattcatttctgccggcaaagtacaagtatagccgcctgtacatacaattttatcattttcacaaatgttatctc

SEQ ID NO: 307635 - DNA, 122 bp, Homo sapiens
cggggcaagtgaggccaagtactgggcctccagggcgtcgtacctctgtgagacatggctcgctgtggggaaggcagtgcggcccccatggtacttctggggtccgctggagtttgcagtaa

SEQ ID NO: 307636 - DNA, 122 bp, Homo sapiens
ttgtgcaggaaaggggcaggagaggaggtgccacctagtgttctctgcaggatgtgcaggcgacgctgcagcagcagctgcgtgtttctctgggatcctttggattgttatgctccacaaac

SEQ ID NO: 307637 - DNA, 122 bp, Homo sapiens
ccttcaggtgacaacacctagggtaaaaggatgggacatcaggctgcagacgtgcgtatgcgtgtgtgcacacgcgtgcagtcttgactaggtgtggaaaaaaggtccgaagagattccaaa

SEQ ID NO: 307638 - DNA, 122 bp, Homo sapiens
tggctctgcaggcctcttttgttgttgggagctaacaaagtaccataatttgctagatgtcgcaggaagatgacaggccaaggggttccaggaaggatatctatgtaacctgcctgagctct

SEQ ID NO: 307639 - DNA, 122 bp, Homo sapiens
ggcggccggccagccaggagagcagccggtgaaggagcacttttgctttgtacgtggcaacgctcggcaggctcagcagtttcacaggtctcaggcgttccttgtaaccttaacaggtttaa

SEQ ID NO: 307640 - DNA, 122 bp, Homo sapiens
cactcacagtgacaggctcccagcacggcgcacggcactcacagtgacaggctcccagcacggcgcacggcactcactcctggtctgactggccttcaacattctctcctgagtccattcct

SEQ ID NO: 307641 - DNA, 122 bp, Homo sapiens
tgatgaagtcgagtaggttccagccattgcggatgtaggcgctggggtggagcaccagcccgtaggccacgatcttgagcaccgtctccacagtgaaaatcaccaggaatacgtactccacc

SEQ ID NO: 307642 - DNA, 122 bp, Homo sapiens
taatatcacctatagaaagactatatagagataagagaggtggggaacaagtaaaagctgcgggacactcctaaatttagagtcaaatttagagcagaaaatactagcaaaggggactgaaa

SEQ ID NO: 307643 - DNA, 122 bp, Homo sapiens
atggggtgaaacagctgattaaggggcaaaggctctcgctggccaggttctggcgtgtcccgggcaccacgcatcctgtccatgagctcacgtcgttgtcgtgatggagaaggcttggtgca

SEQ ID NO: 307644 - DNA, 122 bp, Homo sapiens
ctacagacatacgcgtggattaaggcagagtccgactccaggcaggcaagaagtgtcgtgcgcacagaccacccctggagatggggagctggcacatctcaacatccagccgattctgcggg

SEQ ID NO: 307645 - DNA, 122 bp, Homo sapiens
actgccttcactggagttacagtctagctaggaagacatgcatactgaagtaattaaagtcgggtgagtgtgaacaaaagggaagttagcaaaaacaactatggagttacaaagcaaggaca

SEQ ID NO: 307646 - DNA, 122 bp, Homo sapiens
tgtctgcgcgcgcagggcggggagccagtggcagcggcgcggtccaaaaaaagttgagtccgcaccgacgtgtgcgcgcaaggtcccgggataggtgcgggcgcgggcccgggatggcggcc

SEQ ID NO: 307647 - DNA, 122 bp, Homo sapiens
gtgacgacgtctcggaggaggtcagcaccgccctccaaatgtccaggtgagactcttgagcgggtggatgcagaggaaaaagagcggaggggagggaaaagcagctcctcttagcagcccat

SEQ ID NO: 307648 - DNA, 122 bp, Homo sapiens
catacttcctctgcccccaggttccttaaaaaatggtcattcttattttgttatttagtgcggtttttatccagaggggtcagttcttccgaggggcagactttcaaccaactgattaagaa

SEQ ID NO: 307649 - DNA, 122 bp, Homo sapiens
ccctcccctcagtaccaggaaaatccttctgcctcattccattaagccaatgtttactgtcgtaatgtttcatgggttttctgtgatggcagaatcatatgatggagacagaattaacatgt

SEQ ID NO: 307650 - DNA, 122 bp, Homo sapiens
taatctacctcttttttgctggctggtgcactgaataccttcttgtagcctttaacccaccggggctaagagtggccttgctaagagcccagactgcacaaaggtaccttgaaagttggctg

SEQ ID NO: 307651 - DNA, 122 bp, Homo sapiens
tggaagagggtgtttaggagtttagctcaaacggactttgcaagtaaaggtaaagccttacggggcctcaaaagtctctggtaacactttgtaaatacttgtgaaatcagctggctctatgc

SEQ ID NO: 307652 - DNA, 122 bp, Homo sapiens
agcttttccccacatttctgtaatgtggttttgccatctcaaagcgaatacctatctgcacgcagacactcattacaacccacttccagtctgcccccagtgtggccgccttcccctccctc

SEQ ID NO: 307653 - DNA, 122 bp, Homo sapiens
tgagctaggtgggcagaaaagagcagtgagtgttttgggttttttcactttcaggcttaacgcctcactgctagcacaagccgcccttaataaatcacacttaaaaaggagcttccggggtc

SEQ ID NO: 307654 - DNA, 122 bp, Homo sapiens
cgccgtggctcactgagttctgttgagtgggagattagaggacagaagaggaggaggctccgggcctcgggctcccaggatcccctcacactctggggtgtgaacccagctccactgcttcc

SEQ ID NO: 307655 - DNA, 122 bp, Homo sapiens
cgcctctagtaccgtaccccgctcccttcagccccctgctccccgcattctcttgcgctccgcgaccccgcgcacacacccatccgccccactggtgcccaagccgtccagccgcgcccgcg

SEQ ID NO: 307656 - DNA, 122 bp, Homo sapiens
cttatttctcaacccacagcaccctccctctggcctccttacttccagtcccgtgccccacgctgccaccaggggagctttctagagcagaactctgagcctgggagtctgcctttagcttc

SEQ ID NO: 307657 - DNA, 122 bp, Homo sapiens
acggggccagtggccacgtgactggagatgtgcgattccaggctgcaggatgtcagggctcgggctttaggggcgaggcctggggtccgcggtggtaggatgttatgggaagtgccctgtga

SEQ ID NO: 307658 - DNA, 122 bp, Homo sapiens
tgcgggcggggtgagcctggggcgtggcaccagccctctatccaaacatgtttgcttacacgttagctcctgggaggagataggagggtgaaaacaacctggagaccggtgtgcaccgcact

SEQ ID NO: 307659 - DNA, 122 bp, Homo sapiens
aatcgaccggtggtaaagcacccaggaagcaactggctacaaaagccgctcgcaagagtgcgccctctactggaggggtgaagaaacctcatcgttacaggtattaaaaaacaggaaaaaaa

SEQ ID NO: 307660 - DNA, 122 bp, Homo sapiens
gccgagaaaccaccagcaactaagctgcattcagctggagttcctcggaacgggaggactcgcagctctccctttccccagccaggatgagggaattagacaatggaagtcgagcactgggg

SEQ ID NO: 307661 - DNA, 122 bp, Homo sapiens
ctgggtcccgggcctcgggtcggcttcaggcggttaaggggtgcatgctctgcacccctgcgggagcccggtgggattggcctgcggggtggtcaacatgagtcctgccaagtgcaagatct

SEQ ID NO: 307662 - DNA, 122 bp, Homo sapiens
gtggctgaaatgcaagcaccatgtcatgacgaagctgggacgcagctgggcagacctccccgtgacagcaggagctggggaagccccggtgagcatgtttagtgtaaggaaggtgaatgctg

SEQ ID NO: 307663 - DNA, 122 bp, Homo sapiens
cagaaaaagggatgtggccacaccctgggggccagcccacaggcgaggcgagtccccaggcgccattctacgcggccagttttggagaactggaactgtgtagagcgtccggcggcagcgga

SEQ ID NO: 307664 - DNA, 122 bp, Homo sapiens
atctctgcggtcctcctgattctccgagttgtggtttctccccgttatgaaagtgtgtgtcgaacataacacagtgtttcctctcactcccctccatccactccgagtcaccccctgcaact

SEQ ID NO: 307665 - DNA, 122 bp, Homo sapiens
tcccgctgggtgacaaagttttcttccttttgcaaagctaagaaacattttccaccctctcggctcctcccacagattcccagaggtaatctgaaaggcaggtgcaattaaaaccagcaatt

SEQ ID NO: 307666 - DNA, 122 bp, Homo sapiens
cgttgtaaggcccattgtgccagtaggaagagtcacagactgtctgtagggaattaatctcggacgcggaggagttggcatctcgtctcttggaccgctttcggttcctcaggataaacacg

SEQ ID NO: 307667 - DNA, 122 bp, Homo sapiens
aagggaaggagacccgaaggaagcttctaacttttcttctggttgccggatgctggacaccggaagcgagccctagaattatggcgacctccgcgacgtcgccgcacgcgcctggttttcca

SEQ ID NO: 307668 - DNA, 122 bp, Homo sapiens
agcctggattctagtgaagcccaattcaccagccatttggtcttagtaaggtcattaccgcgctctaggtttgagtctcatttgtaaaatgaagggagtggaggggcttatagagctcgaac

SEQ ID NO: 307669 - DNA, 122 bp, Homo sapiens
tgtggaaggtgacgcccttttctgttcagaagacaaagccgagaatgcggcaatgacctgcgccccagaggggatgacctgcgggccaccctgaccccggcccgttcccccactgccagccc

SEQ ID NO: 307670 - DNA, 122 bp, Homo sapiens
acagcgacgccgcgattccgaggatggagccgcgggagccgtgggtggagcaagaggggccgcagtattgggagtggaccacagggtacgccaaggccaacgcacagactgaccgagtggcc

SEQ ID NO: 307671 - DNA, 122 bp, Homo sapiens
cagccagtcccttcccctccctgggcttccattccccagttctgcaccgagcagctcaggcgaaggatccctcagcaaccttacaggttttggtttttgtttttgtttctgagacatagtct

SEQ ID NO: 307672 - DNA, 122 bp, Homo sapiens
gtgtgcttctttccctccctagctagactatataccattgaaaagtgtgccatcatcctccgtgcatttatccatgcacattactgtggggcattagctgttactgactaccttaatggtag

SEQ ID NO: 307673 - DNA, 122 bp, Homo sapiens
gaagataagcgcgtgaggctggggtcctggcgcgtggttggcagaggcagagacataagacgtgcacgactcgccccacagggccctcagaccccttccttccaaagggtaacctccgcgtg

SEQ ID NO: 307674 - DNA, 122 bp, Homo sapiens
cgtccttggtgctgaagaagcaagaggccagtggaaacgaaactgctgcttcattccctccgatgcaggggccgttccagcactgcagggcagctcttgttccagaaacacaccgtgtgtta

SEQ ID NO: 307675 - DNA, 122 bp, Homo sapiens
aggcggcactcaccctggcgtgcttcagcacctcctggatccgaaagtagcggtcggtgacgcgattccgcagccagagctgcgcggtgaggaagaccatggcgcctgcaggccggcgtccc

SEQ ID NO: 307676 - DNA, 122 bp, Homo sapiens
agcctcggatttggggagtgttaaccccatgctgcttgggtatgcttcgacccaacctcacgggttaaaatcatgatggtgaggtattacagggcccagtcatttgttaggaaataaaacca

SEQ ID NO: 307677 - DNA, 122 bp, Homo sapiens
agatgaccatcttggctcctctcccgctgaccacctctgtccccttctggcctccatttccgttgtcgtgggatcagatgatataaaagggcttggtcagctgtaatagacccagaggcctg

SEQ ID NO: 307678 - DNA, 122 bp, Homo sapiens
gagtgagaacgcaccgccaggcttggacaaaggcacccggcctacaccccagcggctccccgccggggcctacgtggacttcagcctccagccacagggacaagagctgctggccagggctg

SEQ ID NO: 307679 - DNA, 122 bp, Homo sapiens
aatacagagttgaaaggtaaggtttagataaacgtgactcatttgttcagagaaagagttcgagttccaaagagataatgggaaggagcacccttgaggactggggcagtcagagaagaggc

SEQ ID NO: 307680 - DNA, 122 bp, Homo sapiens
tggaaaaagtctgcaatcccctccttggagtcagagggggaggccgggtgagtcactgggcgtgtagctgccgtgaccagccgcatactgccttgtagaatgcctgctctggagcccggccc

SEQ ID NO: 307681 - DNA, 122 bp, Homo sapiens
aagaggcaattgtccattactatctcaaatgcctcctgcttaaatcagtgtggggattaccgttggacagctcaaaaatgatatactgggagccaatttctctttcccccatggtcagtcac

SEQ ID NO: 307682 - DNA, 122 bp, Homo sapiens
attgctgtggtggtgaaaggagtttttaaatgttatcttcctcgagctggccggagaatacgtcattgagaagaagggaatttagaaactgcttaaatatggaagagaaagatatcagtgag

SEQ ID NO: 307683 - DNA, 122 bp, Homo sapiens
ctttaccctcaaacccaggaaagccgggtcacttggggctagggacggcccccgagcgagcggggctgcaggtgccgcgaggaaagtcagatcttatctgcgctcctagttatctccgcagc

SEQ ID NO: 307684 - DNA, 122 bp, Homo sapiens
ctggcttccttctaccaaagccaaccacatgacaatcacgagcgttccaaacaggcaaagcgatgtcttagggccagagcttagtcacccttcatagaaacgcctccacacagccagccttg

SEQ ID NO: 307685 - DNA, 122 bp, Homo sapiens
catttcgcacgacgcagcggttgggaacacagacattttcggagctggagccgccactgccgccgccattttgtgtctgtggagaaagaagcttctgtggcggctggaagtggacggagatc

SEQ ID NO: 307686 - DNA, 122 bp, Homo sapiens
cagcctgcgaggccagggccgagcgcgcggagccgaatgctgggctcggggatccgcggccgccgcctctaatccgcccttaagtagtctccgcctgcgtcacgccaggtcggcggagggga

SEQ ID NO: 307687 - DNA, 122 bp, Homo sapiens
cctgggtttacgcttcaccacagagaaggaacttttcagacgctcccttggccgcgcacccgggatcggaacagcgctgtcacttgcgacaaaatccctaggccagaggaagaagagcgcag

SEQ ID NO: 307688 - DNA, 122 bp, Homo sapiens
aggcctgggagacgttgcgcgcattcctagacgaagtatggaaggcctcgattggcttgccgatccccgacccgtgggtgatgttgtggatccaggcctcgagctgtggcgtgagggtcagg

SEQ ID NO: 307689 - DNA, 122 bp, Homo sapiens
cagtccagaaacaagatccaggtggacttttcttctccttatgagatgcaggtgtttggacgacttctagttgctctcctttaaacctggagactgagaagtcaaggtggtattttggaaag

SEQ ID NO: 307690 - DNA, 122 bp, Homo sapiens
gccaccatcagctgaccctgatgtcttcaatgtaaagtttttgtatcggttggaaccctgcgagcacgccaacagacaacacgaggcggtgtggagcaacatgctgttttaatgagcgcctg

SEQ ID NO: 307691 - DNA, 122 bp, Homo sapiens
tgtagaaaaggagaggagaaacatttcctaaggagcaaaaattggggcgcgcaccagtaacgaccagcgccacctgtttcctaaggtcttggccaagaggctatgaactatcccgggcgagt

SEQ ID NO: 307692 - DNA, 122 bp, Homo sapiens
gtctcctgaggcttgttcgcgggcgtgggggcgaggaccagggcgctggcctcgttttcgcgtatttaggacggaggcacacctgatcctgcagcctcccccagcatttcctaaaatgaagt

SEQ ID NO: 307693 - DNA, 122 bp, Homo sapiens
tctccctatatattctgcatgcattgaagtaggctcaaaccctcagggacctggtatagacgcagaatctgtttcacacaacaactgctatttgaaggtaagaggattccattggtttttat

SEQ ID NO: 307694 - DNA, 122 bp, Homo sapiens
aaaagtgttccggggagtggagccgccggttaggggctcagggcgtggggacgcgggctccgtttgccaggcgcggctggcaggtggggagtgactgccagcgctccccgcgcgatgtccaa

SEQ ID NO: 307695 - DNA, 122 bp, Homo sapiens
agccctgagccacagaggaatctggaagtggtggaaaggggcaggctggtgctggaagcccgaggtcggtatttgccccatgctgcaagaagtcaggaatgtggccatcgacatcagtagga

SEQ ID NO: 307696 - DNA, 122 bp, Homo sapiens
ctggctccctggggaccccatgccgcagcacctctcaggagtgggatgccaggaggtatgcgtctccatgaagcctgacggtcctgtctgtctttgcagtatgaacggtgccttagcgtttg

SEQ ID NO: 307697 - DNA, 122 bp, Homo sapiens
gtgtaggtgactgaataaaccgtggaacatccagatgatggaatgtcattcaccgctaaacggaaatgagctctgacgccatgcacgaaaagatatgcgggcactttaaatgagtatttcta

SEQ ID NO: 307698 - DNA, 122 bp, Homo sapiens
ttccttcatcggctcgcaaagaaacgtggcgatcaaggaagacagcgaaggctccatcctcgtcgggggaggataattcgaatctcagcctgtgagtttactcagcacacctgtttaatctc

SEQ ID NO: 307699 - DNA, 122 bp, Homo sapiens
atgttgactgaatatgtgcggtgaatcttgtttttctctccatttccagggacgcaaacccggctatttctccttcctggacccattttctccgggcgtctggctcttcatgcttctagcct

SEQ ID NO: 307700 - DNA, 122 bp, Homo sapiens
gtgggagaaggcgaggcgtcagcgatgctgtctcttccgtgaggagcgcagaggaggtcgcggcgccggaggccccagaaggctcgaaggcgccgcgggctggggtcggtggcttagggagc

SEQ ID NO: 307701 - DNA, 122 bp, Homo sapiens
cctggcctcaaggagagttcaaagtgagcttacttccagtctcacgtacagatgattctacgcctgtaatcccagcactttgggaggccgaggcgggcggatcatgaggtcaggagatcgag

SEQ ID NO: 307702 - DNA, 122 bp, Homo sapiens
tgcaaggtgccatctgggggcagctatctgcaaagcctctgctctgcgcccggcgctgtgcggggccgctcagttttcagcagtgtttttgtaccggcattttgcaggtgggaaacaagctc

SEQ ID NO: 307703 - DNA, 122 bp, Homo sapiens
caaacctaagaaatcatagtccattcttcctttagaaatataaagtcaacgagccgggcacggtgctcacgcctgtcatcccagcattttgggaggccgagccgggcggatctacaaggtca

SEQ ID NO: 307704 - DNA, 122 bp, Homo sapiens
ctggggagagttctggttggcgggtcctggggcggggccaggacagggcgatcctggaagcggggcttcggaagcgtccaggttggaggcgtcctggagtcggggccttgcgtgggggcagg

SEQ ID NO: 307705 - DNA, 122 bp, Homo sapiens
ttcctcctgagatcctaaccaggatttgtaaaacacccggatatgggtaaagaaccatcccgggttttgtatcaaaccaggccccagaggaacaggacattccagtagttttgtttctggaa

SEQ ID NO: 307706 - DNA, 122 bp, Homo sapiens
aacccgtggagctagaagagcccgtaggggagccccaagattgctgagaccagtgaccttcggccccagatggccttgccttggcccagaagggtcagaaggacctggtcagccaagctcag

SEQ ID NO: 307707 - DNA, 122 bp, Homo sapiens
gacctcattggcccaagggacacctccccctaagctgagggtgattcatctctctgtctccggcttccttcctgtcaaggatgtgggggaagggacagtgaggatgaggcctgggcagctaa

SEQ ID NO: 307708 - DNA, 122 bp, Homo sapiens
aagaggctccagtctgaaccttggggcctgatagcgccctcggtgctggcagcctcgacgcgtcaggatgagacccatggtgccagcacagacaacgaggtcatcaagagcatcagtgatat

SEQ ID NO: 307709 - DNA, 122 bp, Homo sapiens
gggcagagcgccaactccaagtgaaggtccggttgctgggcatgctaggagttgtagtgtcggccgcctttacaatctaggctgtttggaagatttagagcttctatttcttgaagatttat

SEQ ID NO: 307710 - DNA, 122 bp, Homo sapiens
acctcaaaacacctggtgttgccgcttcattaagtggttcaaaatccagatctataattgcgcaatattcaccgtatataaaaagaaatggatattaattttgacaaatagctgcaactgag

SEQ ID NO: 307711 - DNA, 122 bp, Homo sapiens
gcagcttgtataggatttagtatcatctgaagtttcaggcacccactgagtgccttggaacgtatacctgtggatatggggaaactgctgtactctataaaatacttgactatatagaccag

SEQ ID NO: 307712 - DNA, 122 bp, Homo sapiens
cccctggacagcacgaaatccaggctctgcggggtgatagacgggatctgatcagatggtcgcgaggacccggtttaagctacagaaggcctggggccgacaactcccgcagacgccttggc

SEQ ID NO: 307713 - DNA, 122 bp, Homo sapiens
ttcgacacttacctagtaaagtattcttaggcatcatcataacttttcctcacctttattcgaatagaggaataaatgtcttcagttgtctctccattacccctaagttattagtttgtcta

SEQ ID NO: 307714 - DNA, 122 bp, Homo sapiens
gctgcgggcggagtggggcctgagctggcatctcaccgggttgtaggtgggctggtagcccggtgcggggacataggccatcgctcgaggctgcgctagtggctggtcctgtgagaagagct

SEQ ID NO: 307715 - DNA, 122 bp, Homo sapiens
cgtctgttctggcccatgatgtcgggtgaagcatctcagctgaagccttgcgcagtgctccgccaggcgctataatgctgagcccagctatggctcctccttcttctcccttccgcgggaac

SEQ ID NO: 307716 - DNA, 122 bp, Homo sapiens
atactcctcactattgggaactttcttcacagctgcctcataaagttttgtaactaactccgctaagataaagagaaataagatttaagttatacttcaagaacattctaatggcatttaat

SEQ ID NO: 307717 - DNA, 122 bp, Homo sapiens
ggggcgcctggaaggtggaagccccctgtctttctcccttgccccgcttcccccacggtgcgtggatcaccatcgcattagtgactccctaacttcttgaaacttgtctgtctgcttctgtc

SEQ ID NO: 307718 - DNA, 122 bp, Homo sapiens
atgtttagtgtcacagaaaccgataataatgaatttctcaaaccaaaattcagattgtaacgacactttaatgttaagaggcatgtcactgagaagcaagtggtttgggtttcaatgattga

SEQ ID NO: 307719 - DNA, 122 bp, Homo sapiens
acactcgcaagtttcggggatggcggccggcgagggccatactgcgtctttccggagacacggaatacggcaccagccgtccctttatgatgcaatatgtctgcgcccaggggacgcttgct

SEQ ID NO: 307720 - DNA, 122 bp, Homo sapiens
ggcagtttccaaagggtagcaggaatcccaggcttgacctttgaaaaatcccaaaaacttcgctgccccgggaactcggcaagcaagtcacggtggacgcctcagatcgcagagaaattcag

SEQ ID NO: 307721 - DNA, 122 bp, Homo sapiens
aagaaggtcgtaaaacaccagaattccaacagccatatttccatggcatacatgggctggcgcggaggctcagagtgggcaaggcaggggtcgggctgcagggcgagcagggccacgcagcg

SEQ ID NO: 307722 - DNA, 122 bp, Homo sapiens
ctaaacggtttaacttctctctcattccctgctctcgcagttcactgcattcggttcttgcggtcctttcttaagcggctcgcagggtcccgagcccctcagctccccgggcctcggtggcc

SEQ ID NO: 307723 - DNA, 122 bp, Homo sapiens
gagaaccttatattgtcctgaagagaggtgatgacttaaaaatcatgctcaataggattacgctgaggcccagcttaggtgagaattctggaagaggatgctgagatccgaagtcccctgga

SEQ ID NO: 307724 - DNA, 122 bp, Homo sapiens
ccgcgggggtctgcagaggcctcagtgtggctgtgcgtggcccgtgtcctggaagccacccggacctggacgcagggccaggtgctgtgggaaggatggaggcccccacggccttgacctca

SEQ ID NO: 307725 - DNA, 122 bp, Homo sapiens
gaagaaatgttggaaggactcatatatgcatacattccttgagtgactatgaatgactgccgggcagtaacttctgggctgtggttgtaaactgtgagcactacaaaatgtttttccttatt

SEQ ID NO: 307726 - DNA, 122 bp, Homo sapiens
ctgttgttaccaagtggtctcgttcagtggggtaaagatttttgttttagaggctggagccggtctgcaaataaaagatggcttaggagaaaagctatccaatgttttttccttggcccgca

SEQ ID NO: 307727 - DNA, 122 bp, Homo sapiens
cagtcttagccatatgcttagaaaagaggcaggaccacaattaggattgactattgtggacgaggtgatgaaacgcagccccaaaggtgagatttgtttaccactctgtagccacggaggga

SEQ ID NO: 307728 - DNA, 122 bp, Homo sapiens
aacaaggacaaaagcggcatgcgggaaccagagcgttggcctttggtcaggtcagtaccccgaggtggagcgtcagcagtaatatcagaggctgcttctccttaaaatgactccggctgcag

SEQ ID NO: 307729 - DNA, 122 bp, Homo sapiens
gccaagacctgcaatgttgactatgacatcggggccactcagtgcaacttcatcctggctcgctccaactggaagcgcatccgggagatcatggccatgaacgggaaccggcctatcccaca

SEQ ID NO: 307730 - DNA, 122 bp, Homo sapiens
atggggcggaaccctgaaaaggcgagagctgagatgccgctccgttctgccttaccacgccgccccccagcgtccgccaattaggagagcccggagccggatccactctcagcctcaggaag

SEQ ID NO: 307731 - DNA, 122 bp, Homo sapiens
atcgctgttttcccaggtgtaaaacggaaataagacctcccacaaaggggtaagtaatcacgtgatacggcactcaaaacagcgccttcaacataagtaagccctttgtgtttgccaagact

SEQ ID NO: 307732 - DNA, 122 bp, Homo sapiens
cctccgagcttctcacgtaggggcccgaattcctttatagatattccttggggttttcctcggccccacccagaaactcaactctgtctgattggactgcaacaaagggaggtcccgcccat

SEQ ID NO: 307733 - DNA, 122 bp, Homo sapiens
tgtgtatatcatgacatcaccaattatcttgtgctatcaattcagcaatatgtgaaatggcgagctgatattaatctttccatggagatgggaagaaatgctgtgcagagatgcatctaaga

SEQ ID NO: 307734 - DNA, 122 bp, Homo sapiens
cccacaggtgctgctcagccccagcccacctggactttccgtgtctcggcagaggaggagcgagaatcaccaccgagccccaagtgcagggtcagcctcctggccaggccctggggagcaat

SEQ ID NO: 307735 - DNA, 122 bp, Homo sapiens
agttacatgaagactttaaagttaaggcatgttttcaaggcctgcttatgaaaggaaacccgtaataaatactttgtaaaattcagaattgtcttctaatttatttacttttgtaagttcag

SEQ ID NO: 307736 - DNA, 122 bp, Homo sapiens
cggggctgaagtgggcatcgacgggtgcactttgctgttccagggagccggctcggcaggcggcggcgacgtggaacttgggctagggctagaaccggcgaaaagcaagccggaaaaggcaa

SEQ ID NO: 307737 - DNA, 122 bp, Homo sapiens
cggcgcacactgaaccgaagacctcgtaggcgggcctcggggggatgatgccgttggcggcggccagcgccagcccctcggcagtgccgtagagcagctgcagctcgcgcgcctcgttctcc

SEQ ID NO: 307738 - DNA, 122 bp, Homo sapiens
tgaaccctggcagtgtaggctgcaatgagccatgattgggccactggactcctgcctgggcgacagggtaagaccctgcctcactctgtcaccccggctggcgtgcagtggtgagatcttgg

SEQ ID NO: 307739 - DNA, 122 bp, Homo sapiens
aaaagtcccttgggggtggggggacggcagcggctgaggcgcaggaaagaggagagcacacggggagtggcccttggaaccaggcgcgcaaaacctcagcccctaggctccatttccaggtt

SEQ ID NO: 307740 - DNA, 122 bp, Homo sapiens
gctgtccacatcagctttctcccctgccatgggtcaactcaggcccatttatgggccacacggctgcttggaaggcatgtggtggagaaggggaggagatagctgtcagtggacttggggaa

SEQ ID NO: 307741 - DNA, 122 bp, Homo sapiens
gtacattcgcatttgggcaagataaaatttctcaagaccctggctctgtgggcgactgcacgtgtggcggtgaccatcaaggtttctgacggatcttgtcaagagacttaagtcatcgtcac

SEQ ID NO: 307742 - DNA, 122 bp, Homo sapiens
ggccccctggcagcatctgtagcatcttcgttttatgtccctttctgaaggacgtgaccacgcagtctgtgatggggtttgatcctctgcctccttcggacacaatctactcctacgtcagg

SEQ ID NO: 307743 - DNA, 122 bp, Homo sapiens
gctgcagccccatgggtcgcccatggggaccctggccttgggcacctgtggagtacgtggcgctgggtcgctgggtcgctggcgccagtgtgcaagatgctccgcaaggaggcagcggcggg

SEQ ID NO: 307744 - DNA, 122 bp, Homo sapiens
ccgcgcgccccaggccccgggttggggtgcagggggcgcaggggttggtcgggccagcgccgcagctccggccccggagtctctccgccttcacaaggaagcggaggggatctggctccgtc

SEQ ID NO: 307745 - DNA, 122 bp, Homo sapiens
gccggctttgccatcggcatcgtgggggacgctggcgtgcggggcaccgcccagcagccccgactattcgtgggcatgatcctgattctcatcttcgccgaggtgctcggcctctacggtct

SEQ ID NO: 307746 - DNA, 122 bp, Homo sapiens
gggttcctggagctctaaggaggcagtattcgcaccaagcctgcctgctaattttcctcccggctgcccctagaggtgctgagtggtcattgtgacagtatcattacacaaaggaagctctt

SEQ ID NO: 307747 - DNA, 122 bp, Homo sapiens
atcacacacagaaaacaatctgttaattcttgatcgtacaagtaaacatgaaaagaataacggtcaaaaggcagaatagaatcacctattgtagagagcacaaggcatgagagatcagtaaa

SEQ ID NO: 307748 - DNA, 122 bp, Homo sapiens
cctacttctctagcgctgtggctcactgaagcgtactacgccggatgtcttaagatatcgcgagacctttacctctggtttcttacacatcctttagaaactggaatttagcgagaatacat

SEQ ID NO: 307749 - DNA, 122 bp, Homo sapiens
agggtgtgggggttgggggagggatgtgtgacaagcagcctgtgtcttcctgggccctggcggtcaaggccatgatctcagctaagcccagactcacactggagctcttcagcctgagcacc

SEQ ID NO: 307750 - DNA, 122 bp, Homo sapiens
ttctagctggggggacggacgagaagtaaatggggccacgccacgatggggacagcccaacgatgttaaggcagggtgtgacttcagatgagaggcatctgagctgaggcctaaaagaccag

SEQ ID NO: 307751 - DNA, 122 bp, Homo sapiens
acagaagcctggaaacagatgggctttcgtggccttgtattcctggcctctctcctagggcgcgctgggaaccagtctttctttccttccttcacctgaagagcctgggtcgaaagctgtgc

SEQ ID NO: 307752 - DNA, 122 bp, Homo sapiens
aagtgagcctgcctgtttttagttagagggagctctggggactttttctgcctcgggatccgggtcaggctggctcaccagccctctgtccgcagcgtccttatgtctagagaacgctacca

SEQ ID NO: 307753 - DNA, 122 bp, Homo sapiens
tgggaaggtgtttggaggagttggtgcagttccttagggactgcctgctgcgacgccatacgctcttccactgcgtcctgggccctggtggggcggctgccgaggtgggtcccctgcccaag

SEQ ID NO: 307754 - DNA, 122 bp, Homo sapiens
ccggactagaagaccaactaagatgggcgcctgcgcactgatgagtgttcgtcagcggggcgcgcctgcgcagacttgtgcagcagctttcgccctccagaggcctagttagggggttactt

SEQ ID NO: 307755 - DNA, 122 bp, Homo sapiens
ctccacggccccacggtcccgctcagttctgacacctggggagcttcaggagctaagctacgctacacggttcatggtgagcatcctcaagaaaccaccccaaacaccaacaaggaaagaag

SEQ ID NO: 307756 - DNA, 122 bp, Homo sapiens
cccatacttggcaatacatcatcaaaacctacaagttgtaaaaattataacccagacaaacgaggcttgctaaccttccactgaaaagcaagagggagaaaggtccctcaccaaaacttgag

SEQ ID NO: 307757 - DNA, 122 bp, Homo sapiens
gcagaaacgacgactcctcttttatttttcctgctgctgtattatagtttaattcacttccgtgttgtcttctgcctcattcggcagttcttgttctctataataacttttatgtttaaatg

SEQ ID NO: 307758 - DNA, 122 bp, Homo sapiens
caggcatggtagcaggcgcctgtagtcccagctactcgggaggctgaggcaggagaatggcgtgaacccggaagcggaggttgcagtgagccaaaatccttccactgcactccagcatgggg

SEQ ID NO: 307759 - DNA, 122 bp, Homo sapiens
cttatcagcaaggtttgcagccaaaaaggaatgcatatccagcaacctggacacaaagaccgtcagctctgttggctctggagaactgcctaactgctctagatttatcagtcaaaagaaca

SEQ ID NO: 307760 - DNA, 122 bp, Homo sapiens
tcaggcccgcgctgggctgtggggacccccgtggtccccagcctcggagcctggagggggcgcgacaagagagacaaagcccggggcggcccgggcctcggggtggaagggggtcccgggcg

SEQ ID NO: 307761 - DNA, 122 bp, Homo sapiens
caatataagcctagagctcttggaggacactctgtaaaaagaacctaatctgaggccaggcgtggtggctcacgcctgtaatcccagcactttgggaggccgaggtaggtggatcacttgag

SEQ ID NO: 307762 - DNA, 122 bp, Homo sapiens
aaatacttgagaaatgtgttagctgtgttgttattcttaataaacggtaacgctggtcaacgacctgaacactgcagtgggcccaggtcaagcttgacaacatgtaaattttgccctctctg

SEQ ID NO: 307763 - DNA, 122 bp, Homo sapiens
gctaatcagaagcataggtcacatttcacacagaagaatctgaatcccacttctgagccccgctgcttattcctctgtgatacctggcaccaagaaatggtgttccctgtttccgacaggca

SEQ ID NO: 307764 - DNA, 122 bp, Homo sapiens
acagctgtctctgggcgagggcgcaggctttgggaagtggttcagcgcgatcggggacaccgcttgcagcccttggtcctgcacccctaggaggggtgtcccacaagctcggcttccctttt

SEQ ID NO: 307765 - DNA, 122 bp, Homo sapiens
caacagggcaaacaaatacagaaaatattatttatttaattataatcttaacttgccaggcgagggtgtaataaagaatctaacctactctgcagtcagggacagtataaatgatggtgcca

SEQ ID NO: 307766 - DNA, 122 bp, Homo sapiens
tgcatgtctgtcactctgatcattgctgtctctcgctctatcttttgtctctgtccctctcgcttctctagatctgtcgatgtatctgtctctccctcctgtctcactttgtctctggtctc

SEQ ID NO: 307767 - DNA, 122 bp, Homo sapiens
agctcctaagaacagcttcaggcaagggaaggcaaagctgccaccaccagctccaaccagcggtgtcaaagccaaagacagacgtggctggggtatttactggcacccagcagagtgagaca

SEQ ID NO: 307768 - DNA, 122 bp, Homo sapiens
gaggatgtgtgcaggcggcggagtgcaggtccggtggccttcacggtgctctgcctcagccggctgcagataaatgttcaagctctggtcagccgacagtgctgcagcagagtgccaacatg

SEQ ID NO: 307769 - DNA, 122 bp, Homo sapiens
agcgaacttccgcgggcacggacgccagaagaggtaacagctcagtcttccaggggaggtcgggactggtgttttgtaaatgatttaaaagttccacccccaacatccagtagggtccctag

SEQ ID NO: 307770 - DNA, 122 bp, Homo sapiens
gagaagtaagcccagtgcaggatcctgaggcccgtgtttgcaggaccagggccggccttccgattccccattcattccagaagcaccgaaccacgctgtgcccggatcccaagtgcagcggc

SEQ ID NO: 307771 - DNA, 122 bp, Homo sapiens
aacttgtcccaaagcgggaacaaggcaacttggatatgggatctcttcctctctctacatcgcagagcacccgcagccacagttgagtctaaacacctgaagacgaaaccctgctctcctca

SEQ ID NO: 307772 - DNA, 122 bp, Homo sapiens
agccccatccaggggtgtgtctggggttcctgtccccacctgcccctgccacccgggtcacgtcctcctgttccaagcattggtcaccgaggcacgcccgtgtccagcgtcactgtggggct

SEQ ID NO: 307773 - DNA, 122 bp, Homo sapiens
cggcttcgttccctttgcttctttaccagacctccaagtgccctatccacacattggccccgcctttgctgggctccatccctgacctaggctggctctcgggctttgactcttaggctctt

SEQ ID NO: 307774 - DNA, 122 bp, Homo sapiens
gcgtccagcccgacacggaggactgaggtcgccgggaccaccctgagccggccccaggctcgtggactgagtgggaagcccatcctgaccagctgctccgaggacccaggaaaggcaggatt

SEQ ID NO: 307775 - DNA, 122 bp, Homo sapiens
atttttagtagagatggggtttcaccttgttagccaggacggtctcggtcaggatagagacggggtttcactgtgttagccaggatggtctcaatctcctgacctcgtgatctgcccacctt

SEQ ID NO: 307776 - DNA, 122 bp, Homo sapiens
gctctatctctcgtagtgttgattataccgcggaaggcgggaagagctgggaagtggcaacgaagcgaggcttgcaatgccagagccttcgaccagccttgcacaggggctcaacggccagg

SEQ ID NO: 307777 - DNA, 122 bp, Homo sapiens
ttgaagtaaggcgaattgaagtccgctggtctccagacaggcacggtaacgtgcacgcatcggatgtggttcccggggaatggtgggtgattgtccatcttcctaacagtcctcaaatgagg

SEQ ID NO: 307778 - DNA, 122 bp, Homo sapiens
ccaaaacttcattcctctaagaataataatcccgtcacagttctaatcctagcatagtgtcgtcttaactgcaatgtactatcctaactttcaattacatcttatttcagctttctttatta

SEQ ID NO: 307779 - DNA, 122 bp, Homo sapiens
gagccggggtcccggtagcttctagtaggttccagaaggcggcgcgtgcggttgggaacgcggagcggacggattcgattcaacggggttccggaccgcgctgcgctatggagcaggtgaag

SEQ ID NO: 307780 - DNA, 122 bp, Homo sapiens
atttaaaatactgttatacatatttccttttgagcttttgggattccttcccacaccccccgtttctttaagagttatttctttttttatatataatttctatcaccatatttcttgattct

SEQ ID NO: 307781 - DNA, 122 bp, Homo sapiens
ccagcttcttccaggaggaaggttaaatcttcttcctggcctctcttcccttcaccccctcgtgtggggatgacagaccccagccacgcacagtggacacatgccctgagtaagaagttaca

SEQ ID NO: 307782 - DNA, 122 bp, Homo sapiens
cctgtgattggctgaaacctggctattacaaaaaatacactgttgagttagttttctgttcgtttatgtacaaagttagtttttcacacagggactcaaagtagggagaaagactcaggcta

SEQ ID NO: 307783 - DNA, 122 bp, Homo sapiens
ggatgcgtgtggacagtgataacagcagctagcctacgtatgacacccactgaaaaccagcgctatacactcagctctacccttctaacttgttgaattcttacaacaccccctaaggcagg

SEQ ID NO: 307784 - DNA, 122 bp, Homo sapiens
agcactgggataggacccgcccgcccagtcctcattaaatatggcagcgagcggggccgacgtactgcggctgcgcaagttgaaactcctcctggcagctcctccccggcgggcctcccctc

SEQ ID NO: 307785 - DNA, 122 bp, Homo sapiens
tagaaaaaatactgtgttaaatagagcagtaaactagtagctatgtattaaacttctttgcgattgagaggattctggcagtagatggtaggtgccagcagtgaggataagtgaagaattat

SEQ ID NO: 307786 - DNA, 122 bp, Homo sapiens
ttttccaagtttcggtttccatctgagtctcacatgctctgtagagtgaaatccacttcacggcaaagggcaggctctgctttccccagacaagcccagccccactctcccttcagctccag

SEQ ID NO: 307787 - DNA, 122 bp, Homo sapiens
acaagggtgtaaaacaatgaggtcattttatcttgatctagagaataggaagaacttggccggaaatacataaagagcagagttccctggaaaattgcaaccgcagataagtgggaagtgca

SEQ ID NO: 307788 - DNA, 122 bp, Homo sapiens
cccgcaaccccccgccccgtctcactggcccgggttccgggctggcctgtggagaacccccgcgagcgcaccgcactccaatgtaaagccagccactgccggcccgcttcccaggtcgcttt

SEQ ID NO: 307789 - DNA, 122 bp, Homo sapiens
ctgacttctttgagtgcctccttctccttcacttacctattcaaaactcagtcaaggtcacgtggaagtaagaaagcctccacatggtatgaaatccaaagagtatctatgtcaactcctga

SEQ ID NO: 307790 - DNA, 122 bp, Homo sapiens
agagggagtaatgttgcagtatctgactggctgttcacaaaatctgtttcctttttctctcgactacatttcctagtctccttgcagtgaggtgtgaccacatggaaggccagtggaacgtg

SEQ ID NO: 307791 - DNA, 122 bp, Homo sapiens
aggcttcccgtccagagtcacctcctccagctccgccatcttgcgtgaggtactcgggtccgtcccgacggcttcgggcatcttcggtaatttccgccaacgcccttcgaacgtaccgagat

SEQ ID NO: 307792 - DNA, 122 bp, Homo sapiens
tgtgtgtgtgtgtgtgtttgcgtgcgcgcttgtgggtgtatttgtgcgtgtgtgtgtgtgcgttcacccctacgtgtgggtcggcacttccactgagatcactggcacacaagcagagccct

SEQ ID NO: 307793 - DNA, 122 bp, Homo sapiens
aagaacagtgtaactccagacatgatggaagagatgtgtaagaaagctcatgctgctatacgagagagtccagtctgtgaaaagaagcccaagaaagaagttaaaaagaagaagtggaaccg

SEQ ID NO: 307794 - DNA, 122 bp, Homo sapiens
gaaaagcctggaaacaagcccaagccagcacttgggcccgagtgcacgccaggccagcctcgcatgaggccctgccccgcagtgaagggaagcaggacatctctagcaagcactggagcggc

SEQ ID NO: 307795 - DNA, 122 bp, Homo sapiens
accagtgtcttctgcttctcaggaaattgtcttctacaaagtgatcgactacgtcctccacggcaaggaggagatcaaggtcattccgtaagtgcaggattttaccagaagcgtccccgggg

SEQ ID NO: 307796 - DNA, 122 bp, Homo sapiens
gcaggatgtgtcaggcatgcctaggcggtgtgggggtgagtctatttgatagttgccccccggtgatttctaggtaaaccctgcctgtgtttcccggggctgctctctccccggagggactt

SEQ ID NO: 307797 - DNA, 122 bp, Homo sapiens
aggaaaaggaggatcgatgcatatgtataccaagaacttctatgggggcaatggcatcgtcggtgcacagggccccctgggcgctggcattgctctggcctgtaaatataaaggaaacgatg

SEQ ID NO: 307798 - DNA, 122 bp, Homo sapiens
ccggaactcctccgtgcacttccggcggacgtcggggcgcgtcataacgccggccgtgggcgccatttttaatcctggcgaggcgaagtgtagtggcaaggagtttggttcagtgatttgtg

SEQ ID NO: 307799 - DNA, 122 bp, Homo sapiens
gtattaactcctctgcctggagccaagtagcctgtgtggtcctgcagcagaatacaggcccgtgctgtcggcccagctcacccccacccaggaatgattatggaatgggggatgcacacttg

SEQ ID NO: 307800 - DNA, 122 bp, Homo sapiens
agaaacgtctgcacaggtcctttgcccgttttgtaattgagttcctcgtttctgtggttgcgttgtcctgtggggtggttgacctgcacgcaccgtgtgaactgatcccacttgttccatgc

SEQ ID NO: 307801 - DNA, 122 bp, Homo sapiens
tcagagtgtccacaggtgttccccaacctcagccctccctaggtggggcagtcctgtggacggggagcagagaattgagggtggagggcagagagcaggccccctctttagcaggggactca

SEQ ID NO: 307802 - DNA, 122 bp, Homo sapiens
tatgccaaagaatcagaaatagtcataatttagagagaattctagaggtcagttccctttcgtatggactgggcaactgaaacccagacagggaagggaattagaccaagttcacaagcaca

SEQ ID NO: 307803 - DNA, 122 bp, Homo sapiens
caaggaaaaaagctcgcagtccagcagcccgggcctgggaggcttgtgagccgggcctttcgtaattgtcccctccccgcggccccctcccccaggcctcccccctctcccgccctcccgcc

SEQ ID NO: 307804 - DNA, 122 bp, Homo sapiens
cgtgtcttaaaacgccttggtgtgccgtctgatactgttctctaaagacgttaggagtcacggcatctggcctgcggttgggtgaagcactggccgttgggcacagtggatgtgtgaaaagg

SEQ ID NO: 307805 - DNA, 122 bp, Homo sapiens
caagcgggcgggtcgggacttagagcttatcccgcttgggctttatcccggcggccctggcggcctgctcgctcgtaccctgaggagctgaaatgacgcagagacatagcttgcttcggagg

SEQ ID NO: 307806 - DNA, 122 bp, Homo sapiens
tgcacatccctgtgtgcacggccacctggttcctctcctcacttgctggtgagtattgaacggctcacataattaggcagaactcaggaactttcctccctatctctttcactcttctgaaa

SEQ ID NO: 307807 - DNA, 122 bp, Homo sapiens
ccagcccagccctctgtgttcccgcagcctcgggaacggcccggcattgtgcaggacggtcgcagattgggtgtgtgctgcgccagggaaagccaacttggccgcctctcccgagcccggcc

SEQ ID NO: 307808 - DNA, 122 bp, Homo sapiens
tacaaagtgcttaccgaagtggtttgagggcagcggtgacactgtgagttatggctctgccggcagccagtggagccagcctctctgcacagctgtgcaagggtgttttgaaaagtggctca

SEQ ID NO: 307809 - DNA, 122 bp, Homo sapiens
tttttcttggctgctgtatccctgcatctggcacataactggtgctcaataaatatttaccgactatatgaatgaatgaaaagttcaatgtaaacgcaggactagcattaaggctggaacca

SEQ ID NO: 307810 - DNA, 122 bp, Homo sapiens
tgcctcttcccccctccccccaggattccctccccataggccacccgccttccagcagggcgtggtctctacagaggaggtcaggtctcccaggcttcctcagcgtcgacgccggggagcgc

SEQ ID NO: 307811 - DNA, 122 bp, Homo sapiens
cacccgctcacctcaagcagcgggggtgggagctgaggctcaagtctagactcctccagacgcccccagatctgccctgacggcttccagaattgccctcctctctgcctctgccattgggt

SEQ ID NO: 307812 - DNA, 122 bp, Homo sapiens
ccaaatatgttttggaagccaaacaattaagagaagtaaaattttaaccctagtaggtttcgcagattcatccccagatatgtttttgtttggcttgtgttattaacaaataaatgagtgtc

SEQ ID NO: 307813 - DNA, 122 bp, Homo sapiens
ctcacccagtgtcctaagcttagtaaacccaggccctgccccctgcccaccactaactcacgaataaagcctgaaagcagggccatttgggagcatccccccacccaccacatctggaagaa

SEQ ID NO: 307814 - DNA, 122 bp, Homo sapiens
ggtcaaggggaggaggggggtggaggctgaggagagtggggctgaagggtagaaatttaccgggaaatgattgcatttgggagctgtcttttttgtgatggtccccatggtgacaatttgtg

SEQ ID NO: 307815 - DNA, 122 bp, Homo sapiens
ccggggaggcgccctttcctgatggtccacacctattaacatcaaaatgttcattgaatgcgggcctcagggagaagaaactttctgtggatgcgcactaagagacgaaaatggcgatgtag

SEQ ID NO: 307816 - DNA, 122 bp, Homo sapiens
agagtgttatcacgccagtctccttccgcgactgattggccggggtcttcctagtgtgagcggccctggccaatcagcgcccgtcagcccaccccacgaggccgcagctagccccgctggcg

SEQ ID NO: 307817 - DNA, 122 bp, Homo sapiens
cctcccctccacagagaaacccagcagccggggcctctgctagggtgaattcaactcgtgcggcccgagttgcctcacctggttctgaacctgactcaccgtgactcccctcagccagcgca

SEQ ID NO: 307818 - DNA, 122 bp, Homo sapiens
tgggggcagtctgggaggtctccccacctcctctcctgagactggggagctagaagcttgcgctgcccctggaggcagctgccatgggctctgggccatgtggaaggcggaaaatctgagct

SEQ ID NO: 307819 - DNA, 122 bp, Homo sapiens
tggtgcaatcttgctatctatccccgggcagtcagcgcgcacttcagcagactccgtgcacggagatccgggatgacctcgctgtcctagtcttcaaagtgggcaccttcatccctctagtc

SEQ ID NO: 307820 - DNA, 122 bp, Homo sapiens
agaaaaatgtttacagtgggcagaatcaaagactcttacaatgaaatgctacccagctcccgcaggacgtggcgcacctgagtactggatgcagcatacacgtgtgcaggtgggggcggcag

SEQ ID NO: 307821 - DNA, 122 bp, Homo sapiens
ggatgaggaactgaggccagaagagggtggaagcgccagggaggcagggtcggtgtgggacgggaggccctgttattcccagacctctgcaggtggacagaagccccccggtcgttgcctcc

SEQ ID NO: 307822 - DNA, 122 bp, Homo sapiens
atgggatgtttcaaaaatagcagcctctgtatacatttgtcaagcaggaagctgggtctgcggggagtagggtggggctggttctcccacacgcttgccactttcaggcccttgccttgcat

SEQ ID NO: 307823 - DNA, 122 bp, Homo sapiens
ggaggagtccgcaggctccggttgcaacaattcacatcatttccgctcctgctgtgaccacgccgggtgcccagggtgctgggcaggaagttggggcgacgtctcccagcagtgcccctcta

SEQ ID NO: 307824 - DNA, 122 bp, Homo sapiens
gtgcccccgctccttcttgctgcgtcggctgctggaggtgcaccagctcgtggtccatgccgggcgccagccccaccgctgcccatcctgtggggctgccttcccctcctcactgcggctcc

SEQ ID NO: 307825 - DNA, 122 bp, Homo sapiens
tagctaattttttgtatttttagtagagacagggtttcaccatgttggccaggctggtctcgaactgctgacctcgtgattcgcccgccttggactcccaaagtgctgagattacaggcgtg

SEQ ID NO: 307826 - DNA, 122 bp, Homo sapiens
tctccaggcacaacaggaaaggccctctcgtttcttggaattcccagggcctgtgcctctcgtgcctgcctgactcatcccattgcacttatctcccctgcaatctcaaggtccagagcccc

SEQ ID NO: 307827 - DNA, 122 bp, Homo sapiens
ttattattactaagaggaatttaatgcaaggaaactgaaactgaggtcacacgcagctcccgggccagtgcctctcaaactttaacatgcatatgactcatctgaagatcccgttaacttgc

SEQ ID NO: 307828 - DNA, 122 bp, Homo sapiens
tcagagaccttgggacccgcgcaatgtggcagtggaaggcgcagggtctgaccccggccgcggccgccgcagcagctgatctgtcaaccccggccagagccgagccgcctgaggcctgcagt

SEQ ID NO: 307829 - DNA, 122 bp, Homo sapiens
aggctctggctatcaatcaatctccggagaaggaaaaatactatgctgagaaaatatattcgttcattagtcaagtatttactaaaggtgtactcggcgcaaggcccctggagagaggccaa

SEQ ID NO: 307830 - DNA, 122 bp, Homo sapiens
ggtatgcccgtgactctatctatggataccacccaacaaagtgagataaaaaaacacagacgagcagggtgatcattgtgcttgttaacttattcaacaaatatgtatactggatatcggtt

SEQ ID NO: 307831 - DNA, 122 bp, Homo sapiens
ctcaagcaatcctcccacctcagcctcccaaagtgctgcaattacaggtgtgagccaccacgcctggcccatagttctcttattatgagtgaggttggttgtcttttcatatgttcagggcc

SEQ ID NO: 307832 - DNA, 122 bp, Homo sapiens
cttcatccccaaagaggccagaccagctccttcacagtgctccaagagagcaagccatgacgcccaagcattttatccagcctctgcttgcttcagtttgctaaggtcccactggccaaagc

SEQ ID NO: 307833 - DNA, 122 bp, Homo sapiens
tttcagtgtatggttttccctgccaaacggttctgcttggtgccatccatggagggcgtgcgctgggccttttcctgcggcacttggctgccgagccgagccgaatggctgctggcagtgcg

SEQ ID NO: 307834 - DNA, 122 bp, Homo sapiens
ttttgttacgtggctagcccaggtactgaccgctgcgggggcgggctcacacagttcccccgctggcaagttttgtgacttgctttggaaaacccgggaattgcaccctctgcccttggcaa

SEQ ID NO: 307835 - DNA, 122 bp, Homo sapiens
gtcggtaaccttgaattttagcaaactagagaaggaagatgtgggtgtcctttcctcacgcgttaacaaggatgctgttaggttgtctatctactctgaatccctacttaggaggaaagtca

SEQ ID NO: 307836 - DNA, 122 bp, Homo sapiens
ggccgccaccgtgttatgggcgtgcgcaactgcctctacggcaataatatgtcaggacaacgcgatatcccccctgaaatcggggaacagcccgagcaaccacctttggaggccccaggggc

SEQ ID NO: 307837 - DNA, 122 bp, Homo sapiens
gagggaggggcagctgtgagccctggcgccaggctgtgggggctgtgggggctgagcgtccgggggcctggaggagggcagccgtcagtcatggttgcagaggctggtctggcagcaagcga

SEQ ID NO: 307838 - DNA, 122 bp, Homo sapiens
tttgcactcgtcccggctctttctagctataaacactgcttgccgcgctgcactccaccacgcctcctccaagtcccagcgaacccgcgtgcaacctgtcccgactctagccgcctcttcag

SEQ ID NO: 307839 - DNA, 122 bp, Homo sapiens
cccatctcccttgcgcgaaacgagcctcagcacgaaggcgacagaggggccggcagggggcgcccgagcccgtctctggagcacaaagacccccggcccctgcgcgacccggacgagctcgc

SEQ ID NO: 307840 - DNA, 122 bp, Homo sapiens
tttcgttcgtgtcatttgtgaagcccgacaggaagagtggagccctgcgctgtgtgcgtgcgttttaaagcgtgctggaaacgtctacaatggcagcgcagccagcagccacgcggccttgg

SEQ ID NO: 307841 - DNA, 122 bp, Homo sapiens
cagttgagggcgcggcggccacgggtgggatctcaggcgcgtggagaggaaggcgccgcgcgacctctcctcacagacatcagctcgggtcaaccgcgggcctcgagcccgagtggctgagg

SEQ ID NO: 307842 - DNA, 122 bp, Homo sapiens
ctaggtgacctgtgtgatacactaggtgacctagtgacacaggtgacacttccaggtgaccgcggcggtgacccgcggggctcccaggtgacctcgttggtgagccccggggctccccgacg

SEQ ID NO: 307843 - DNA, 122 bp, Homo sapiens
ccccgtcgtcattggctgagcgcctcgtgacgtcactctgaggcgcctcatgcggcgccgcgcacgggtcccagagccttctgggtagcggtttaaccccgcctcttgcgtcggcgccttcc

SEQ ID NO: 307844 - DNA, 122 bp, Homo sapiens
aacagaatgatctggggctctgagatcaagattgggctaggatatctttggaaactgggtcgaatgtggaacatcatatgcctcaagactgtggtagagaggctgagtaggctgtctaaaaa

SEQ ID NO: 307845 - DNA, 122 bp, Homo sapiens
cctccacttccctgcccctccgcctcgggtcgccctgggactcccacatctccatacacgcgctcccatcagcctgcaacccagagcgccccagtaacatttcacacatttctctccgtgcg

SEQ ID NO: 307846 - DNA, 122 bp, Homo sapiens
ctagggactctttgctaggcggcggagaggtacgttacagttctctacgcaaaacgcatgcgcgaaagatccgggaagtgtgatcggaaaggggcggagcatcagggagagtctcgcggaca

SEQ ID NO: 307847 - DNA, 122 bp, Homo sapiens
agggtttcatcaacaccattattgaccagtgagaggtcaaagtagtgagcgtactggctgcggatggcctcagagtccttctgcagctgctgcagggcttctgtctgcaaagaagaaagcca

SEQ ID NO: 307848 - DNA, 122 bp, Homo sapiens
cctgctgtttcatgtcaggacatcattctttcttttttgagacagggttttgccatgtctcgcaggccggtctcgaactcttggacttcagtgatccactcgcttcgtcctcccaaagtgcc

SEQ ID NO: 307849 - DNA, 122 bp, Homo sapiens
ctcccaaagtgctgaccaagaagggctatattcttatttcccttattcaccgtggaataccgttaccgatggaacactggtttgggaaacactgcacgggatgatacataagaggtttccaa

SEQ ID NO: 307850 - DNA, 122 bp, Homo sapiens
gcgcacctggctgcgcgcgctcgggtgtttacgcggcgtcttggcaacggtggagctgcgcgccctccgctcgaccaaaagtgacccacgcagaacgtggcctcccattggacgcgataaga

SEQ ID NO: 307851 - DNA, 122 bp, Homo sapiens
tcggtccctttcaacagcattttgacctttgcgagaggacatttgattgacggccctgcacgctctgccactcagagccgggcagagctgccgagggctcccacctgttagggattaactcc

SEQ ID NO: 307852 - DNA, 122 bp, Homo sapiens
tggagccttgtgtttcttgttcttgccgcccatgttgcagctgtggcagaagatccttcgcggcccaggccccgacggtaccactgcacagccgagagctcttcacattccccggctccggg

SEQ ID NO: 307853 - DNA, 122 bp, Homo sapiens
aatcacaccaccattcaaatcccaactgaataggggccctacaatagcctgggaaatacacggagcgttttccaaagtgcaggctccttcactcaaaatgtttcatttccctggctttttaa

SEQ ID NO: 307854 - DNA, 122 bp, Homo sapiens
ctaggaagggcagaatagggaagcctattaggtttgcaaactagtgcgaagtagcagcggcgatttcgcagctttctgccctccctcctggaagtgtggagcccgcgcaggctaccgcagca

SEQ ID NO: 307855 - DNA, 122 bp, Homo sapiens
gccaattcctgaccttaggtgcccaaaccagcctagctgacttcaagatactgggctggccgggccatttcctggggagagaggggaagtatgatcttctctctctgtagccaggtctcaga

SEQ ID NO: 307856 - DNA, 122 bp, Homo sapiens
ggctcgggccttggcccccaaagaaagccactccgacgtgtttgagatgggcttagttcccggacccgtcctactgcccccaggcgctggacagcctcagaaagaggacaagtctgcatgga

SEQ ID NO: 307857 - DNA, 122 bp, Homo sapiens
tcttctgacaattgcggaaatggcacactaatcggtacttagaaagtttaatctccattccgcaccattgctcagtatgacttattttctgatcatgggtttgactccccagaaagaagatt

SEQ ID NO: 307858 - DNA, 122 bp, Homo sapiens
tatttatcctggcagctccgcttctcaaacttgaaagtggagttgggtcacgtgggctcacgcactttccctcctcttctgcgccccgatcctgcttggaaaatcctcgaagatcccagtca

SEQ ID NO: 307859 - DNA, 122 bp, Homo sapiens
gtccggacgcagcggcccccggaggacctgggttgggcgcggagttgggcccggggctgtcgtgggctcccctcgtcttcggctacgtcactgaggatggggacacgtgagtgaaccttagg

SEQ ID NO: 307860 - DNA, 122 bp, Homo sapiens
atgcctgcaatccgtctcaaaaaaaaaaaaaagtacctccttcagcatcacattttgcatcgacactcaataaatatccacatcaaggaggaaaaaaaagccaccgggctgcagagaagagc

SEQ ID NO: 307861 - DNA, 122 bp, Homo sapiens
atctggagtgtacaacgaggagatactcatgagcaaagagctactttctccctaggactgcgtctgaagctatgcgaggagctcctggattttacattacccaataaatagctctcacctga

SEQ ID NO: 307862 - DNA, 122 bp, Homo sapiens
ctggtgaaagactccgggagccacagttccagctgggaattcttttcagcaaaatattggcgctgaagtacagtaggctatagcaggggttctgaaactgtaaaatgcgtgtaatgacctgg

SEQ ID NO: 307863 - DNA, 122 bp, Homo sapiens
caggagggagtggcagctatagtctggcaccaaagtccaggacacccagtggggtggagtcggagccactggtcctgctgctggctgcctctctgctccaccttgtgacccagggtggggac

SEQ ID NO: 307864 - DNA, 122 bp, Homo sapiens
tgggactttttggactgtgggtgtagcccacagagagtgagccgaggcagggcggggcatcgcctcataagggaagtgcaagggtttgggagatttccctttcctagccaagggaagtcatg

SEQ ID NO: 307865 - DNA, 122 bp, Homo sapiens
gtgcagaagtagcggatcacgttcgggtgctcatccgattctcgcaacagctggacctcacggtctgcgaagctaaaacactcggggaggatcctcttcacggccacgtcgcggttgtcaaa

SEQ ID NO: 307866 - DNA, 122 bp, Homo sapiens
ccagcttcatcctcttgggcgccggcgagtcctccccgggaggctcctgcttgatggtgacgcggctcgcccccgcgcctttgcctttctcgcggtccggccgggcctcggcttcgccgccg

SEQ ID NO: 307867 - DNA, 122 bp, Homo sapiens
cctactcccctccccagcgacttttggcctctgagcagatggcgggggcgggggcatgggcgcagccggccggtctcacaagctaccacacccatgaaatttcccattaagggaggtggggc

SEQ ID NO: 307868 - DNA, 122 bp, Homo sapiens
catgtccttccagatttgtaatttccttgataagcaggtgtgtgcgcgtgacatgtctgtcgtctacccgtcacacggttgtaccaggtagcctttgcttaataagccctcggagtactcgt

SEQ ID NO: 307869 - DNA, 122 bp, Homo sapiens
aggccaccgtgcctggccattgagtgttattaagaggagggtacgcagaaaacagactcccgccagctctgccccatgcgcatgagcggccgccgctcgccctcagccaggcccagcgcgcc

SEQ ID NO: 307870 - DNA, 122 bp, Homo sapiens
gttatagtgactgcagtgtactctcaatgaggaagatatagatacgaaaagaactagagccgcatcacatggggacttctgcaaatacagagactcggattaaaggtggagaagatggagct

SEQ ID NO: 307871 - DNA, 122 bp, Homo sapiens
aataaacgtctgcattaaagaagctaattctgctttcctatagcttctgaaaattaacaacgaaaactcttgccaccctacacctcaccttctgggtgcccccgaaacagaaagcctgctaa

SEQ ID NO: 307872 - DNA, 122 bp, Homo sapiens
cctcttactacggtggccggggtgctcaaagtacctgtagctgcggcgctgaggtcggaacgtctgcgtgtgtgcgggctggttttgtggcggctgctgctagagctggagcatttgccggg

SEQ ID NO: 307873 - DNA, 122 bp, Homo sapiens
gtctcggatgcgcggcttgcgcaggttctctgcggcgatgcgcgccagcacatactcctccgggatgatactctttctggccaacatcgtcctgtcaccatagccagcttagccacctccct

SEQ ID NO: 307874 - DNA, 122 bp, Homo sapiens
agtcaacattaaaaatccaattccaaggcaaaacagtacttacttaacagatttcccatccgattttgtaagaaaacaaattgccaacatgacaatcataactttagccatgtcttttgcag

SEQ ID NO: 307875 - DNA, 122 bp, Homo sapiens
aggctctggagcccctacaagcaacgtccgtctgtgtccaggccgatctcgctgctccctcggacgtactcgccctacaccccagccaaacgcactccgtgtttgccaacatgtgcgccttt

SEQ ID NO: 307876 - DNA, 122 bp, Homo sapiens
gaaagcaagtcctcttggctgtgggacagagcctgtcatgctgtcttcccctgctgcacccgctcaggtgacaccctctgccacttcctgctccaggtgatggatcccctggctcacactca

SEQ ID NO: 307877 - DNA, 122 bp, Homo sapiens
aaaaccatctggaacattccgggcagcgttcacgccaccacacctcccaaggaagtggagcgacagcctgtgcccggagataggcaccccagggccacccactcacggtttcccgcgcccag

SEQ ID NO: 307878 - DNA, 122 bp, Homo sapiens
tgagttgagcaagttcaagtctctgatcagaacaatctccctgggaaaggagctacagaccgtcccccagacagaggtagacaaggctaatgggaagcaactggtagaaatcttcaccagcc

SEQ ID NO: 307879 - DNA, 122 bp, Homo sapiens
cctgctgtggaagcctggactgggggaggagattgctaccctgtgagcctgagggagccacgtccagctgtgacctctacctggggctttacagagagttgtttatgggtaacagacacctt

SEQ ID NO: 307880 - DNA, 122 bp, Homo sapiens
gaccgccccccacctgctgattgggcggcagcaggggaaggcttgcggcgggctgctgcacggattggctgggtgcggaaagtgatgtgccgtgtcctgtcattggccgaaagagtctcgtt

SEQ ID NO: 307881 - DNA, 122 bp, Homo sapiens
ccgaccccgctgcaacctttccccttgggcgatgcctggacagcatcagtagtagttgcccgagggaggggggcagtcctcgtccggggacaggtcccaaaaggctgtttatttgttagagt

SEQ ID NO: 307882 - DNA, 122 bp, Homo sapiens
ggcgtttctgggatgctggttggccgggcacttacgtgtttcaaagcgggtgacagccgccgctcgggtgtactgttcgctctctcccgccaggatccgagttcttgttccccgacaactcg

SEQ ID NO: 307883 - DNA, 122 bp, Homo sapiens
gttcgccgcagggggaaggcgggatcatagcacctcggaggagcggccggtccgggcatgcgggcggcggggcggggagggaggcttccggaaccccgagagagcacccgtgcctcgcgggc

SEQ ID NO: 307884 - DNA, 122 bp, Homo sapiens
accctcagccaatcagcggtacggggggcggtgcctccggggctcacctggctgcagccacgcaccccctctcagtggcgtcggaactgcaaagcacctgtgagcttgcggaagtcagttca

SEQ ID NO: 307885 - DNA, 122 bp, Homo sapiens
ggcctgggtgggcatgggcagggcagcttcagcagcagggggactgagggcagccaaccgcgtagcccatgctgctaccctctcccacctccttgtcactcgggccaagcacagttgcccgc

SEQ ID NO: 307886 - DNA, 122 bp, Homo sapiens
tcatgctatgtgttctttcttgttcaaggcagagtcgcggctgggttgttaggatgctcgcgcccctgtacccggggcgtgcagggaagtgtaagaagggggcgaagggcgagaaacgctga

SEQ ID NO: 307887 - DNA, 122 bp, Homo sapiens
gggatggggagtgacacctcccgcagagtgcggtggccacggagtcggagggcagaggctcgtgaagagccggacggggaggagcgcagcggaagcctaacctcgtactccttccgctgctc

SEQ ID NO: 307888 - DNA, 122 bp, Homo sapiens
agcacattatttagcccttatttacagaaattaacattttttcttactgtctcccagagtcgtaagtctcatgatttattcacttttatgacaccttctcacccatccagacattcccttgc

SEQ ID NO: 307889 - DNA, 122 bp, Homo sapiens
ttcctttgtcttcgtctttaatgatcacagatagtacaaggacccagttctcctgcttttcgggttcaacacttttctgttgctggtatgattctcaaggtctttgattgttcaagccctac

SEQ ID NO: 307890 - DNA, 122 bp, Homo sapiens
ggcgggagactacaggcgctgcagctacatcctgtttcgtactgggagcaggtgccgccccgcggaacacttacttgccccgccctgcggtggagcagggcggtctcagccgccggaaccgc

SEQ ID NO: 307891 - DNA, 122 bp, Homo sapiens
aggagcgttttacccggtggtggggtgggaggtgcgtccgggtaactaatggcaaccgggcggggtgagcccgctctgcaggaactcctcgacggcgaaaaactacgactcccagggtgccc

SEQ ID NO: 307892 - DNA, 122 bp, Homo sapiens
atgtgtgtgtctttttcctcctttcttttggggaatcctgtaatatgaggtagcttatttcgtcaattaattagggtgctggatggtagagaattttgtcagtcaactatgtacacacagta

SEQ ID NO: 307893 - DNA, 122 bp, Homo sapiens
cgggctgtgtaggagcccaccctagggaggtacccagagacatccctggtttggctctgccgggaaagtgggccgagcagggagagggggaccagagaggaagagatggacagagttttccg

SEQ ID NO: 307894 - DNA, 122 bp, Homo sapiens
gcaggtgtacttcggtttatatgcacaccacaggtgacaaggagaaccttctctcctaaacggctaaagatggtgcgggggtgcaattctaaaaacgtgcactgagaaattcagctaaggat

SEQ ID NO: 307895 - DNA, 122 bp, Homo sapiens
ccgcgtctcggctgaggacacggtggcagctgcctccggtctgggccccggtggggactccgggtctggaacccgcatctcggctgagggcacggtggcagctgcctctggtccaggccctg

SEQ ID NO: 307896 - DNA, 122 bp, Homo sapiens
ggaggaggcgttttggggacaagcttgtcaagcagggccggctgccaacttcggggaagccgcgccgcgtcccccgcccgcccgcacttgttgctcgctagaggccgcgggctcacctcggg

SEQ ID NO: 307897 - DNA, 122 bp, Homo sapiens
acagggcacccgacttgactggcgtgtgcacagaagaccgtcgctgggctttgccagacccggcgggccgagatcgaaggacactgccggtgcaaggtccttgtgcatccagggggcggtgg

SEQ ID NO: 307898 - DNA, 122 bp, Homo sapiens
aagggatcagccgtctcggcctcccacaatgctgggattaaaggcgtgagccaccgcgcccggcctcaactggaaggctttaagtgagagatggggtgcaagggaatcccagagtcagaaag

SEQ ID NO: 307899 - DNA, 122 bp, Homo sapiens
gactacaagcgtgcactactatgcccgactaattttttaagtatttgtagagactagggtcgcaccatgttgcccaggctggtctcgaactactgggctcaagcaggccacctgcctcagcc

SEQ ID NO: 307900 - DNA, 122 bp, Homo sapiens
ttgtcaaaagctcttagagctcccattttctacccccattaacaggcctgaagggtggtgcggtggctcacgcctgtaacctcagcactttaggaggctgaggcaagtggattgcttgagcc

SEQ ID NO: 307901 - DNA, 122 bp, Homo sapiens
atgaaaacacatacacgtaattttttgaatggaggaaaggggaaggactttgaagtcagacggagacaattcaaatatttgctactagtttgcagtgtgaacctcagtactttactcactgt

SEQ ID NO: 307902 - DNA, 122 bp, Homo sapiens
cacagctgctgggatgtcctcgggcctcccctgtttgtctgcatgtcttcttgttgccatcggggcagtggagtccccggaaacagtccaaggccctggggtgggggatttaaatttttggc

SEQ ID NO: 307903 - DNA, 122 bp, Homo sapiens
gggggttagaactcacagctggccggctctttgggcttgctggtcccctgcagaaggctccgcaacccaagcagcgctcccccgccagggggtgtcccggccgggccgcccagcagcagagg

SEQ ID NO: 307904 - DNA, 122 bp, Homo sapiens
gctcagcctcccagccgagtccgcggggcctggggcgcccaccccgcccacccaagggaccgcgcaggggtgaactcccccgcgccccacctgcgccttccagacctcgggcgccccggcgt

SEQ ID NO: 307905 - DNA, 122 bp, Homo sapiens
cctcacctcagttacatggtccctggtcctattaaaggaaatgacacacctgtagcagtacgaggtgtctgcgtggaggttgcttgtaggagaacaagtgcaatttgatcagtttctcactg

SEQ ID NO: 307906 - DNA, 122 bp, Homo sapiens
tgcggtggctctatctcggctcacagcagccttgacctcctgaggtcaggtgaccacccccgggtaattttttgtattttttgtagtgacggaatttcgccatgttgcccatgctggtctcg

SEQ ID NO: 307907 - DNA, 122 bp, Homo sapiens
cctcttctctgagctcgttcttaggcccctctgccgtctgcacgctcctttccagccacccggcctcccgatgccggcctagcacgttcctcgcgccaggcttttgcatctgcccttcccac

SEQ ID NO: 307908 - DNA, 122 bp, Homo sapiens
ctccggctttcaggacgtcctgaggctgcacccacgtggcaatggtgtctgtcgcgctgtcgcctggatccggcaccactagcggagccgagcagagcccagggctccaacgcgtagggaaa

SEQ ID NO: 307909 - DNA, 122 bp, Homo sapiens
gtgcgggatataatctcctggtgcgccgtttttttaagcccgtcggaaaagctcagtactcgggtgggagtgacccgattttccaggtgccgtctgtcacccctttctttgcctaggaaagg

SEQ ID NO: 307910 - DNA, 122 bp, Homo sapiens
gagccaagactaaatgtcagatcttatgacatatacttttcttttccattatactttccacgaatctgtttcctgaatgattggtgactgttgcagttttagaatgggattcagtgtgaaag

SEQ ID NO: 307911 - DNA, 122 bp, Homo sapiens
taggttcacagaaaaattgaacacaaagtagagctaattctcatacactccctgcccccacgtgtgcatggcctcctctgctatgaacattccacatcattatggtactgtgttagaactga

SEQ ID NO: 307912 - DNA, 122 bp, Homo sapiens
ttatgtaactttctaatgatcataactcaccttctgttgattgacatacagtaatgtgtacggaatgtaggtttcggtcaaaaggtttttcttggcagtttatgctaaaattaaaatctgat

SEQ ID NO: 307913 - DNA, 122 bp, Homo sapiens
cgagctgggacaaggcgacacaggggctccctcggagttggatcggcccctgggacttggcgctcgcgagaggctggagcggccagagtctagcctgcgaggagacgcgggtcctgccctca

SEQ ID NO: 307914 - DNA, 122 bp, Homo sapiens
ctccaccagtcatggcctctgctaccttgggctagccatcgcgtgagccgggcccggtcccgcagccaccgccctgcacggcaccacagcaccaacagcagcccacagcccaggacagatag

SEQ ID NO: 307915 - DNA, 122 bp, Homo sapiens
gctattatatcctgaagcatctggctgtcctggtggggacatatgagcgctgccacaggccgggaatatcccaggcgagtaagaatagcccacaataagagatgactgctgcttgctctgct

SEQ ID NO: 307916 - DNA, 122 bp, Homo sapiens
aattatctgtgtattcagttgaaagcgccagtttgaccacagcagtgagtctcgctgcaccggatgggtttggttgtggataacctaagctgcaggccggactcggaactgcccgggacacc

SEQ ID NO: 307917 - DNA, 122 bp, Homo sapiens
cgctgcagcgcacgggtaccaggggccacggggcgcctccctgatcgcctgtagatctcccgggctggcctcccacaaggaggggagacaattgggaccaacactagaatatcaccctccct

SEQ ID NO: 307918 - DNA, 122 bp, Homo sapiens
ctccttaacccttccacggggagcgcctgccggctccggctgaggtcttaatgactccgacgcaaacccaggggccgggagtgggcatttgtattacagctggattatttaatccccattag

SEQ ID NO: 307919 - DNA, 122 bp, Homo sapiens
cactgcatgctccaagcccataacacccacagagtgtccagatttcctctgtgtacttgccgaccaacctggcttgccagcaccctggaggtttatctctttcttgtgtgatgaatgcagac

SEQ ID NO: 307920 - DNA, 122 bp, Homo sapiens
tgcggtgcattcacacaacagcggtgctacacagcagcgaagaggagcagccgactgacacgcacaacaactcggatctcaggagcatcgcaccgagctggagaagccagacacgagccgct

SEQ ID NO: 307921 - DNA, 122 bp, Homo sapiens
ccaatcaggggtgggttgcctggggggccaggttgagaccaatgaaaccctcttgagaatcgagccattagctggtcattgcatcagccacccctcaccccccgctggcctccaaataacct

SEQ ID NO: 307922 - DNA, 122 bp, Homo sapiens
gggtcaactagggaagctattctctggacactcactcccagatgccaggggagcctccatcggctcacgcatcccagctgaacctggcccggacctgggcgcgagctggcgcctgcgttttc

SEQ ID NO: 307923 - DNA, 122 bp, Homo sapiens
atctcctgagtgctggtgtcttagggcacactgggtcttggagtgcaaaggatctaggcacgtgaggctttgtatgaagaatcggggatcgtacccaccccctgtttctgtttcatcctggg

SEQ ID NO: 307924 - DNA, 122 bp, Homo sapiens
gcgcctccgcagccgccgccgccgcctcgctgctgaggccgaatcccgggggagcctccgcgtcccgccgccgctgccgctgccgccagagcagaacaccccaaaatggcggcacttccggc

SEQ ID NO: 307925 - DNA, 122 bp, Homo sapiens
gacggcagcccaaggctcagggaggcgtggcgtggcgatggtgaggggcggggttaggggcgggattaggattcttgtcccttagcgaaactgcgtgtcctgttttgctcccttgctattgc

SEQ ID NO: 307926 - DNA, 122 bp, Homo sapiens
cacacacgcgcgcgtcctcgcagcacacacttgtctggtgcaggtaagggaaggtggaggcggatcctggggccaaaggtatttagaatctttcaccctcagccgcctgggattgctgtgag

SEQ ID NO: 307927 - DNA, 122 bp, Homo sapiens
ttaagttcctagtcaacaagactacactcgactgtatgttaacaaacctaattatagccccgtggtaataaattgggccagggccctggctgcacatctctgaggtcatgtctaggagagct

SEQ ID NO: 307928 - DNA, 122 bp, Homo sapiens
cggaagaagccacctcccccgcacgcgtttagccggcccccgcgattcggcctaatgcgacgattggctatggctccaaatcccgcccttccgattcctgtctctaggtcacctccgcaaca

SEQ ID NO: 307929 - DNA, 122 bp, Homo sapiens
aacatcagagcccaacaatgtgctgggattgtatgtcacgtggctagtaccagttgctgtcgttaatgttggagtacatggaaaggataatacttggggggatggggccttataaagtttag

SEQ ID NO: 307930 - DNA, 122 bp, Homo sapiens
tacaatgaagacacctggaaacctgtctcttgagaggcaatgtgagctaaccactggagacgtaatttctaatcatacaacactttgccttgtgaggtagtgaccaccccattgccaaaggt

SEQ ID NO: 307931 - DNA, 122 bp, Homo sapiens
tcttgaaagggaacaagcagtacttttgctaagggatctttaagccgaaactcagctaggcgccccagagcttcctcaggatagcaaagctggatttttgagcagcaccacctgctggtcct

SEQ ID NO: 307932 - DNA, 122 bp, Homo sapiens
ccttcctccctttcccctcaatttgtctgtcttgtctctgtctctgtgtgtctctccctccgtctccacttccctcccttctttttactccctccctctctttctttctctttcccttcttc

SEQ ID NO: 307933 - DNA, 122 bp, Homo sapiens
ataaagtgcttcttttaagtgaaaaggtgaacgttcttgacttaaggaaagaaaatcgtacgccaaggttgctaagatctactgtaagaattagtctcctatctgtgaaattgtaaagaatg

SEQ ID NO: 307934 - DNA, 122 bp, Homo sapiens
tcaaagagcgagaaactttaaaaacttggatctgcacagcccggcagctcgccgacggggcgctgcaccgtttccacgcgatggaaacagaccccgagcacaagttaacaatgaaatcacgt

SEQ ID NO: 307935 - DNA, 122 bp, Homo sapiens
caggacgcatgcgcacctcgtcccggggccggcgccctctgctgacgagccccggcgctgcggctccccgcccacctcgcgggaacccgggacctaccgcttcgtccacctcccgcgcgccc

SEQ ID NO: 307936 - DNA, 122 bp, Homo sapiens
accgtaaccgcacgccctcagccccaagcccgcgcaccagtggctccagctccttggtgtcgatgaggccgaactccttgacgaaatagtagaagtgcttgtagcaggtgttcacgtgggcc

SEQ ID NO: 307937 - DNA, 122 bp, Homo sapiens
gtgcgcgctatgtgacctctcaggggtcgctgccttggacgatctgtaaagctgagtgcgcgctatgtgacctctcaggggttgtttccaaccgtgttgttgacatcttgagcctgccaagg

SEQ ID NO: 307938 - DNA, 122 bp, Homo sapiens
gggccgcaaccctctgcctctttccgcgagcgctgacgtcgccgacgtgttgtttaaaagcggccgcgcaggcgcagtgagcccaaatgcgaacttaggctgttacacaactgctggggtct

SEQ ID NO: 307939 - DNA, 122 bp, Homo sapiens
tgggccacccccaccagtggtcttctgggcaccccacatttgctttctccctagagctcacgagcatctgagatcgcgtgtttgcccgtgtcctggcctctcttccacctggaacacgttcg

SEQ ID NO: 307940 - DNA, 122 bp, Homo sapiens
cctttgtaggaattggcttctactactcattttgtttctgattcaacccagttccacaagcgccctactgtatgcacagggccctgtgctagattccctaaccttgctgagcatcattattg

SEQ ID NO: 307941 - DNA, 122 bp, Homo sapiens
cctcctcgcacgggccccgatctccgggccagcgaggaagggaaagtgctctcctggggacgagttcccaagacgccccaccgcccgcagccccggcccagggtaccttccgctccgccgcc

SEQ ID NO: 307942 - DNA, 122 bp, Homo sapiens
cgaacctacctttaaagagttaagcccaaatgccggcctgactggctcttataacgcggccgcctgggaatagcagcctcccattggctattggtgctgtccttcaggcagctctcaagcca

SEQ ID NO: 307943 - DNA, 122 bp, Homo sapiens
cccacccggcccgcgaggggatggcaactacccggggtccggaggcggggctgcgagtgtcggggcggggggcgcgggccgggtcgagcaccgccccgacgagggcccaggccagtccggcc

SEQ ID NO: 307944 - DNA, 122 bp, Homo sapiens
cctgatgtagatgccgaagtctcagcccccgacgtaagatgccgaagtctcagcccccgacgtaggatggcgaagtctcagcccccgacgtaggatgccgaagtctcagcccccgacgtagg

SEQ ID NO: 307945 - DNA, 122 bp, Homo sapiens
gggtcggctgccgtaggcgaagtcctggccggagtggggctggtatccaccgtaccctgccggggcagctgggggaaaggccgggttcacggcagggtccatcccaggagtgggttgtgcag

SEQ ID NO: 307946 - DNA, 122 bp, Homo sapiens
cggaggcctcctgacacgatgggtggcaagggtgacagaaacacaagtgaccccagtgcacgtggctgaagagggtgagcttcactgaggctcctaagcgcagtggtagcacagcctcccat

SEQ ID NO: 307947 - DNA, 122 bp, Homo sapiens
tgtgacaccacgggacagagttccacgtacacacagcacacggccaacaacacgctcacacgggctgagtgtgagaccacgggacagagttccacgtacacacagcacacggccaacaacac

SEQ ID NO: 307948 - DNA, 122 bp, Homo sapiens
gggatgcaggggccaggtcttgggcttgcagtggctcaacccacgtgggcctggggactacgggccacctggatgatgctgggaggctatgaaagtgaaagtctgggcaggcaggtctcact

SEQ ID NO: 307949 - DNA, 122 bp, Homo sapiens
cccgggagctcctggagaagctcattgagtcccggcaggccaacacaggtgcacccgccccgtccggggaagggtgctaacctcggggggcggcacacagctggggcctggcatgtgccccg

SEQ ID NO: 307950 - DNA, 122 bp, Homo sapiens
gtcttgctcaataaatgagtcctttattgcaatgcaggcaagcacctgtaagtctctgaacggtaagcagcagtaacttgctctcttgcacggaatcaactttttatttttaaaaagccctc

SEQ ID NO: 307951 - DNA, 122 bp, Homo sapiens
caatcatttcttcacggaacacacgtgggccaacgctgaccgggctctgtgccaggaacccgcaaggcgctgcttgttcatctccagccacggggagctcattccctagcagcgggccagac

SEQ ID NO: 307952 - DNA, 122 bp, Homo sapiens
tcaaacaggaattccctcattcaccattgccctggagagctgagccaattccacaagatccgccccctccacccaatgcgtaggtttatgagctgtcattagctgcagaatatgtgatcatc

SEQ ID NO: 307953 - DNA, 122 bp, Homo sapiens
cagctggatgcacttgttctggagctcctctgtgagttcagcaatggccacagtctgcttcgacagctgctcccgcagctccttcaaatggtactcccgctcctggatctcagcatccttcc

SEQ ID NO: 307954 - DNA, 122 bp, Homo sapiens
ctgtctgtccatctatgggtccatccaggggaacttacatgggtacctcaggggtatcagcgaccgggatgcgaaggtaggtgatatcctgcaagtacaaaatacactcaggcaggggacct

SEQ ID NO: 307955 - DNA, 122 bp, Homo sapiens
gccggcgtccagagaacggccgcgtcaaggtctcgtagtccaccgcgtagagctgggagtcgcgcggcctgttcagttgctcccgcagggcgcgcacgcggcgggccagctccgcgatcagc

SEQ ID NO: 307956 - DNA, 122 bp, Homo sapiens
ggggactcggtttcctattttctcttggggtgtgtttcattcgtcagttgttgggcggcacgggaaggtgaaattttgctcatgtggcacatccgtggatcattctcgccaccttgaatagt

SEQ ID NO: 307957 - DNA, 122 bp, Homo sapiens
gtggagaatacgaatgagacctactgcatcaacaatggggcactctatgacatctgcttccgcaccctcaagctgaccacctccacctacggggacctcaaccacctggtgtcagccaccat

SEQ ID NO: 307958 - DNA, 122 bp, Homo sapiens
agaaaagagagcccggtcttgaggctgctgtaatgagggagacagttcccagtttgtccccgacctgcccttagctcagctctttcagggacctgttggtgtggcctgatggcatggccctg

SEQ ID NO: 307959 - DNA, 122 bp, Homo sapiens
gaagtgtaatcagggagctatatatttctaaaaacccttgctcagtgcctggcacacagtcggtgctaatatgaacactttaagcctcttcagatgaggaaggaagggaagaaacaactaat

SEQ ID NO: 307960 - DNA, 122 bp, Homo sapiens
tatctcaccattttctcctatagaccacttcctcttttagttcaggcatatattctctggcggaaactctgaatttccagcatcttctccaaagtaggatagctatttgggaaacagaacaa

SEQ ID NO: 307961 - DNA, 122 bp, Homo sapiens
gacctgcaaggatggtgcatgaaagcaaaaccagagaggcgccttttccaaatgccaatgcgccctccacccagtccttcacaaaccacatcagcatggatagcaccacactccacaggctt

SEQ ID NO: 307962 - DNA, 122 bp, Homo sapiens
ctgtggtgtgactctcagtcactccaggcctgtcagaggaaatgagaaaaagaaaacgaccgttcttattctcatacagatgtccttgtgatattcaggatgggggcaggttatttgtcagc

SEQ ID NO: 307963 - DNA, 122 bp, Homo sapiens
tttctccacactgacctggtcttcaccctttgtcctccccctccttaaagttagttgcatcgtcagccttttctacctgaccctcattccacctgccaaactgtaattctcctttggagaaa

SEQ ID NO: 307964 - DNA, 122 bp, Homo sapiens
gggttggccctttctggggttggccctttctggggtgggcgtggggtcgcccagggggggcgtgggctttcctcgggtgggtgtgggttttccctgggtggggtgggctgggctggaatccc

SEQ ID NO: 307965 - DNA, 122 bp, Homo sapiens
tcagccagcacctacgtgtactcaccaagtggaggaaagccccgagcagggcttgtatctcggctgctctcacggctggtatcgcggctgcacccctgactcatgctgggtcgagggatacg

SEQ ID NO: 307966 - DNA, 122 bp, Homo sapiens
aagttggccacagtttttccccaacagtagtttgagttcagcagcagctcttttataaaacgtttgctgcacacactgagattgcacctggaagtacagaaataagaacacacgtattttat

SEQ ID NO: 307967 - DNA, 122 bp, Homo sapiens
ggagaaacctaaccttcactattcctctcagccagatagttttaacttcagtgcttggggcgctctctccagatgccccataacaagtggcttctgatcaccatatggacatctcacataca

SEQ ID NO: 307968 - DNA, 122 bp, Homo sapiens
tgaacccgggaggcggaggttgcagtgagccgagttcgcaccactgcactccagcctgggcgacagagggagtctccgtctcaagaaaaaataataaataagaataaataaataataaagta

SEQ ID NO: 307969 - DNA, 122 bp, Homo sapiens
cggggagacgggctgggagcagacaggagggaaattccgagcgctgggccgcaggtgtggcgaacaggagcctcttgaatgcaaaaatccaagatccaagatgctgcttttctgcagttcga

SEQ ID NO: 307970 - DNA, 122 bp, Homo sapiens
ccatcgtgtccaagtatgagaccaaatacgggcccttgtaacccgtgccccccgcccgggcggggtactgcctgcacctcagacctctgcctgggggctccctgtaacccctcacacgcgtg

SEQ ID NO: 307971 - DNA, 122 bp, Homo sapiens
cccaaccaaggctggcaatccagaatctgtgaagtacaagatagcagtatttgcataacacgttaaaaaccttttgcaagacagtgtacaaaggcttgaggagatatttgcaacatttcaaa

SEQ ID NO: 307972 - DNA, 122 bp, Homo sapiens
atcccagctactcgggaggttgaggcaggagaatcacttgaacacaggaggcagaggttgcggtaagtggagatcgctccattgtttatttgcatgtggacataagaaagggttaacatggc

SEQ ID NO: 307973 - DNA, 122 bp, Homo sapiens
aagaagagtcacgtctcccacggttcgtagaggaaggcctgcctgagcctggagcgggggcgggagagccacagtttggcatccccagggcatcccccagcccgcagactaccaggcctcca

SEQ ID NO: 307974 - DNA, 122 bp, Homo sapiens
attcactgctctagagggaggggacccttcagggagatggagaccctgacaagaagcttacgcgtgtaaaagtgagagctgagaaccacctgaatatccagtgaccaagagctggtggaata

SEQ ID NO: 307975 - DNA, 122 bp, Homo sapiens
acagagacaaagaaagcattgtggcttagctcttctcaacctacagttccaagacccccccgggaggttttgggtgcagcagctctatgggtatattctgaaatgccactgggctctggtgc

SEQ ID NO: 307976 - DNA, 122 bp, Homo sapiens
ccaaggctgaagaccgaggtccagggaggcgcctttccaaccgtgccagagagggcaggtcgcagacgccggggctgcggggaatagaggccctcaccgcagatgccacctgccgtgccctg

SEQ ID NO: 307977 - DNA, 122 bp, Homo sapiens
aggagaaaaatgatactctataattttaaaaatattttatctttcagtttgctttctgcccgcacacataactacattccacagttaagctatgcaattactgcatgaggaacatgttgcaa

SEQ ID NO: 307978 - DNA, 122 bp, Homo sapiens
aacattgcatagtgatgactgtttctgggccttgcccaacctccagtgtgataacattgccgtgacatcatctgagctgtaaagagaatagaatgttataaattgatatagaggtctttgtt

SEQ ID NO: 307979 - DNA, 122 bp, Homo sapiens
cccacgcagtgaaaagaccacccttgaggctgattccgggtccagctgggagcggccagccgtaaatcaccgcccccgtgggccgtaccattctggccggggggacctgggaggggacgcgc

SEQ ID NO: 307980 - DNA, 122 bp, Homo sapiens
ttcaaaaaatgcttgtcacttacctatatcccaaggctcctgtagagtcataagatataccgtaaatccttttaattaattctgtaacaatacaaagtattattataatcatattcagataa

SEQ ID NO: 307981 - DNA, 122 bp, Homo sapiens
cagcttcctcaggattttcttcagttgcaagtacctttccactgaaaatatgagcatgcccgcctggctagtaggcatctgtaagagtgtcgccaggcccgcgccagctgaggcctcagact

SEQ ID NO: 307982 - DNA, 122 bp, Homo sapiens
ctgtaccaatcttgtggtcaattgctgggtacttggtttcatctggttcttgattcctatcgtcaacatctcccaaatgtccttctgtggatctaggattattgaccacttcctatgtgacc

SEQ ID NO: 307983 - DNA, 122 bp, Homo sapiens
tgcccagcagcgggcaggtgtccagaaagagcctacggcaggtttctccagggagccaggcgcagtgccagagtataggcagacacacccctgccacactgactcaggcatactgggtagac

SEQ ID NO: 307984 - DNA, 122 bp, Homo sapiens
ccagtgagacaagactggtggttctcaaagactcatatgtcccttacaggcgcctgcccccgcaaccgattcgaccactccctagatttggtgagactaattccaccccattttctttctcc

SEQ ID NO: 307985 - DNA, 122 bp, Homo sapiens
gcacattctggctctgccatttaacactggccagggaacgcagccctaagcttgcctctgcggatcggggagccttgttcaaattaagatcgccactttgggaggccaaggcgggcggatca

SEQ ID NO: 307986 - DNA, 122 bp, Homo sapiens
gccccgcgcgttctccaggtggaggccaggaggcagagaaccgcgggcccgggggccacccgtcactttcaagtcgccccgccagaagcccagggcgaggaaaaggagagagacaaaagagc

SEQ ID NO: 307987 - DNA, 122 bp, Homo sapiens
ttccaattccagtgctggtcaaacaacaccctggccgtccctgtttgagcaggctgtttgcgcttgccgcggcttgtttgtccctggcgccccgctgttgaaagcctcagagcgtgtgacag

SEQ ID NO: 307988 - DNA, 122 bp, Homo sapiens
aacacgcagatgtgccctcggaacatcccttgtaaggatccatgctggctagcgtcagatcgaatttctagttagggtgtgcatgaaatggcggggaagaaagaggactgaggtgtagacgt

SEQ ID NO: 307989 - DNA, 122 bp, Homo sapiens
gcgagggccactgccctattggcttctgagtcacggactgccccggaagcttctgggccacggactgccccggaagcttctgggccacggactgccccggaagcttctgggccacggactgc

SEQ ID NO: 307990 - DNA, 122 bp, Homo sapiens
cagtcttggacaggaacaatctgttggccttagtcctgggatggttatcctgtctcctcccggtgctgtggggagtggtgcaggcagaacccaggtaccctggggtgccggtcctggctgca

SEQ ID NO: 307991 - DNA, 122 bp, Homo sapiens
cttgctgtggctgacgtcctagccgtgttaagggggtgggggctctggcctcgctgacctcgcctgccatggcaactgtaaggctggagaaatagagttccagcgccaccactgggactatt

SEQ ID NO: 307992 - DNA, 122 bp, Homo sapiens
gccgcggatcaatgtctttatggcagtgcctacaatatacaccaagctgatggagtactacgacaggcattttacccagccgcacgcccaggatttcttgcgtgcagtttgtgaagaaaaaa

SEQ ID NO: 307993 - DNA, 122 bp, Homo sapiens
gccaccttcctttttgccacctgtcccagcaccgcgactgcgggcagcacaggacctgggcgctgccccatcacttagagtgactacctgggcctggggatgcaccaagtttctaggagctt

SEQ ID NO: 307994 - DNA, 122 bp, Homo sapiens
aggatggtgctggagagcgtggcccgtatcgtgaaggtgcagctccctgcatatctgaagcggctcccagtccctgaaagcattaccgggttcgctaggctcacaggtaatcctcccccatc

SEQ ID NO: 307995 - DNA, 122 bp, Homo sapiens
caaatatctggtgaaacttgatttccattcttatgttattaatatttataaatgaagtatcggtttatcaatgtaggtaactacagtggttttaacaattgttatgaaaggctggttttgca

SEQ ID NO: 307996 - DNA, 122 bp, Homo sapiens
agcctccttcttgaagacccggcggagcgtcaggctcaggtggctgagcaggatgaagggcggggccagggcggggcgctcgtggtactccacaatcaggttgtagcgctggaacttccaga

SEQ ID NO: 307997 - DNA, 122 bp, Homo sapiens
gggggacgttttttggacagtggggtaaactgaggcccgataggggcgctaggcactgcccggagtccggcgcgcacggattgaggcgacctgattccgccgcatcctggcccgcgcggcga

SEQ ID NO: 307998 - DNA, 122 bp, Homo sapiens
ggagggactgtcctgcctgcacctatcagcagtgcggggccgggctactgcctcgccgtgcgcactgggtctacacaggcaagctcccgggaattcagctcctgcccagcccaaggcgatcc

SEQ ID NO: 307999 - DNA, 122 bp, Homo sapiens
tcctggtaacccttccaaagacccttcacggagagtagttttatttttccacttattaaccgcattcactagactggaaaaagaattccctatctcccaagaactctccctttcattcttgt

SEQ ID NO: 308000 - DNA, 122 bp, Homo sapiens
ccggaaaccacttctcggccaggtggttgaggacgacgctggttctgaagtctgaagcggcgatggcggcggccagaggcggcggccgcggggcggtcccttcagcatcagtggcactggcg

SEQ ID NO: 308001 - DNA, 122 bp, Homo sapiens
gtgggtgtggggcgcagttggcggagctgcccagggcgtgcgagcaggctgcgaggatggcgccccggcggcgcggaggtaccgccccgcgctcccccgatagctccccggcctgtcccctc

SEQ ID NO: 308002 - DNA, 122 bp, Homo sapiens
gtctcacaccctgcagtggatgcatggctgcgagctggggcccgacgggcgcttcctccgcgggtatgaacagttcgcctacgacggcaaggattatctcaccctgaatgaggacctgcgct

SEQ ID NO: 308003 - DNA, 122 bp, Homo sapiens
gtgttcggccttcctagaaattccttttccagaggaagaagatccgggttgggaagagtgcgtgactatggccccgggctcattgaaagactcctccccacaaaagtttagggctgatacta

SEQ ID NO: 308004 - DNA, 122 bp, Homo sapiens
tcaggtgttagcttcagttgttcctaggtctttcacaaatatcataaatgacaggcaggacgcttttctggagtcaagatctgttagtttcggagtcagaaagaccccgtttagagactcgt

SEQ ID NO: 308005 - DNA, 122 bp, Homo sapiens
ttgagggaccccagagctccagccaggccgctttctttgcggatggtgaagctgaggtcccgaggagggcaggggcaggtcccgggcgctcctcaggcaaagggagccgatttaggggctgg

SEQ ID NO: 308006 - DNA, 122 bp, Homo sapiens
ccggttggccaccccgtttctggggggtgagcggggcttggcagggctgcgcggagggcgcgggggtggggcccggggcggagcggcccggggcggagggcgcgggctccgagccgtccacc

SEQ ID NO: 308007 - DNA, 122 bp, Homo sapiens
ggggctgcctggagaaggggaggacaggcttcgagttttttgggtagtgacttctgtggacgtgaaaagactgcaccagaaatcggaggcagccctccaaacataacttggcctcttcgttc

SEQ ID NO: 308008 - DNA, 122 bp, Homo sapiens
attggggtgtgctgctccgggttctaacacatctgctactgagcacgtgccactgtccatcggaccttgactcatgttgcacctctgtctctgaacgtgatccttctgggtgcgcgcggggt

SEQ ID NO: 308009 - DNA, 122 bp, Homo sapiens
cctgtggttctcttcctgcgttcaggggaaagcgaacacacaatgttcgtttcctaaatacgggatgtgctgtgctggcaggtcattttccaccatgtcacgtccttctagatgaaggcagc

SEQ ID NO: 308010 - DNA, 122 bp, Homo sapiens
aaccggaaaatacagactaatcagaggattaggtgaaaagtgctatagaattcagaaaagcgatgtcactgcaggatggagttgctaataatctacagcagtgtgagacaactgtaggaatt

SEQ ID NO: 308011 - DNA, 122 bp, Homo sapiens
ggcacccaatgtggggactcgaacccaggttgaaggatcaccggagtgagggttggagaacgtggaactaagttggaggacacccgagtactcttaagcaatccccatggtgagtaagaagg

SEQ ID NO: 308012 - DNA, 122 bp, Homo sapiens
tgcagttctgtctgtaacagagcaggcagaggggagatggatggagcccaagcaggctctcgaccttgtggtgcatttgtgcactggaggtctcaagctagcagatcattttctttggtttg

SEQ ID NO: 308013 - DNA, 122 bp, Homo sapiens
tagagaattaaattccgggggtgcaaggaccaactcatgatgtctgagtgcccggagctccgagccttgtagtgtcagcactgtcacctctcaggctccaattgtccctttatgtaagctcc

SEQ ID NO: 308014 - DNA, 122 bp, Homo sapiens
cacgtcgtggtttgaaggagccaatgggccggcgccgccaggtgtctcttacctgcaccacgtgggggagggggaaggggcgggcaggtaaagccacatcccaaaacagaaaagctttcagc

SEQ ID NO: 308015 - DNA, 122 bp, Homo sapiens
acagcaaacacttgctccttatggcatattgcagagcaacttgaaagggggagctggccgcgtaggaggtgagagccagccgcaaaaatccgttcggcggcattttctcttcaaacccgccc

SEQ ID NO: 308016 - DNA, 122 bp, Homo sapiens
agagagagagctgttttatctgtggtttgtttagccctgagcactgggacattgcgcccccggtcgaattcaagtaaattgccctgagtagaccttacgtggggaagaggacttgtgattta

SEQ ID NO: 308017 - DNA, 122 bp, Homo sapiens
cggcctgacctccaactctgttaacctgcatgaggcagcgtcatctctgggactgtttcccgttctcccacaaacagcctgcagaacccaaagccacaagatgcagagaaacgtggtcccct

SEQ ID NO: 308018 - DNA, 122 bp, Homo sapiens
caagtccctgccagggtctccagatggcaatggaagctcctcctgccccactgggagtagcggctaaagctgggggatagaggggctgcagggccactggaaggaacatggagctgtcatca

SEQ ID NO: 308019 - DNA, 122 bp, Homo sapiens
cgcttcttaagcccatcaatgagggggcgtggttgctttgctgggccccgccccgagctgcgccctgagaggctctgctaggcccggcccgggtcttcaccggcgcaggagcctcagatctg

SEQ ID NO: 308020 - DNA, 122 bp, Homo sapiens
gccgggggtctgcggtggggaaccaggcctggaagtccagctcctggagttctccggagccgcaagaccacggggtacgggacccggtaccggaaacccgaggccacagctccactgcttct

SEQ ID NO: 308021 - DNA, 122 bp, Homo sapiens
ggggctgaggcgggcgcagcctcggggcagtccccacacaagggcaggacggagcctggacggaagctccacgccctggggtacctgctggggcatccagggtttcctgccccaggcccggg

SEQ ID NO: 308022 - DNA, 122 bp, Homo sapiens
tctggggacgtgtttaaaaagacacctggggcaggggagagctcagaggacaactccgaccgctcctctgtcaatatcatgtccgcctttgaaagccccttcgggcctaactccaatggaag

SEQ ID NO: 308023 - DNA, 122 bp, Homo sapiens
gcacacagcatgtcgtccttgatgagccgctcaaaccgctcagtgtggttggaaggaaagcggcggcgacaggtctggttacagaggacgttgctcctgaccttcaccgtcgcctcccacaa

SEQ ID NO: 308024 - DNA, 122 bp, Homo sapiens
tgtcctcttctagctatttcattcagctggctttccagtctatcagaaaaatgccatcatcggctgggtgtggtgactctcacctataatcccaacactttgggaggctgaggtgggcggat

SEQ ID NO: 308025 - DNA, 122 bp, Homo sapiens
tgttctcagaaccacataggaagtgttctagggtaacagaaatgggggtgggggcagtcacgtaagaagcttggtgctctctggatgatttgggaggacatgggaatcctactatagagtta

SEQ ID NO: 308026 - DNA, 122 bp, Homo sapiens
ccttctgcaccgggcaggagctgcagctggtacaactggagggcggcggcggcgccggcacgtaccgcgtgggcagcgcccagcccagcccgcccgacgacctggacgccggaggcctggcg

SEQ ID NO: 308027 - DNA, 122 bp, Homo sapiens
ttgcagtggtgaagagagaaacggtcaaagctgactctggcacaggacaggcttggagggcgccgaggatgaggtcgaacagacgatcgcgtgtgcgccttgaccttccctgtgcccttgcc

SEQ ID NO: 308028 - DNA, 122 bp, Homo sapiens
tcccaactcagtagtggtgatgagagagtgggaccgtaatgtcttcgtagggtggcaccccggacatggtatttactatcccagcacgcagacgcctaaacacaaagtcaacttcagggatc

SEQ ID NO: 308029 - DNA, 122 bp, Homo sapiens
gctacatcttcttcctacagagtcatggacctcaggtaggccacggagaagctgacagcccggtgtgccccttcttatcaactgcctgtttgtacactgtgcctggaattgctcattctggg

SEQ ID NO: 308030 - DNA, 122 bp, Homo sapiens
acagaaaacaacctggctccagaaagacaattaacaaaggctggagaccagccaccccctcgcggcgcacgcacgcaggcagctgcgtgggcatagccgcgcccgccagcgccctcggtggg

SEQ ID NO: 308031 - DNA, 122 bp, Homo sapiens
agaccatggctccactctcccggcacagaacagcttttcccacactccgcccgatgcacccgccaggccctccccagatgcaccttgctgtccccgagctcacacccccggggcccctgagc

SEQ ID NO: 308032 - DNA, 122 bp, Homo sapiens
cgccggtgaccatcttcatgggcaacgtggtcagctacctgctgttcctgctgcttttctcgcgggtgctgctcgtggatttccagccggcgccgcccggctccctggagctgctgctctat

SEQ ID NO: 308033 - DNA, 122 bp, Homo sapiens
acagggtcccccactgaggccagaaggggcgggcccaggggcgggccggcccagccccgacgccagggggagctagagaaggggcacctcccagcttagccttcactaggccctcggccgca

SEQ ID NO: 308034 - DNA, 122 bp, Homo sapiens
tgtgctttgcagaaagggcttggcctggcggccggctggactgcagatgtctcttccaggcgccctggagcctcgcagctgccgccacctccaactcaccccatcccccagtaccggggctg

SEQ ID NO: 308035 - DNA, 122 bp, Homo sapiens
ctctcagacctatgctgctgagggctgtgagtgctttgagaacaggtgctgtgctttcctcgtctttgaatcccctgcagcacctggcatagtgcctggcaccatgaaatattcatggaatt

SEQ ID NO: 308036 - DNA, 122 bp, Homo sapiens
gattgtctgcaacatgtgctgggtttaaatgtgtacataccctacagaaagaaaaatatgcgggctcagaattaatattgtttttgacttatagggaaattccagttgtgtttaacttggac

SEQ ID NO: 308037 - DNA, 122 bp, Homo sapiens
ggcgcgtggctggggaggctgccagtgctgctgaggctgcggacggaagacacctcctggcgctcgctgaggtccatcagcgtgcctccggggctggggccgtccttcgggtgggagtcgtc

SEQ ID NO: 308038 - DNA, 122 bp, Homo sapiens
gtgagagttctacagacaaggaggaagtgctctcggtgtatttcctgtggtgggttcacacgcagctagacacagctaacttgagtcttggagctcctagagggaagcttctggaaaggaag

SEQ ID NO: 308039 - DNA, 122 bp, Homo sapiens
ggtttcgccatgttatccaggctggtcttgaactcctgggctcaagcaatttgcctatctcggcctcccagagtactaagattacaagcgtgagccaccactcctggcctgtttttagatac

SEQ ID NO: 308040 - DNA, 122 bp, Homo sapiens
gttgaaggacatacttttcaggttcctgacagtcactgagctatacgcaataataaagtgcgtgattcgcgtgtggaaaccagtgtcgtgtccttaccagcttccttttctgtccaccttcc

SEQ ID NO: 308041 - DNA, 122 bp, Homo sapiens
tgaaggtccccctcaggtccttgttagtggttttttgttaggtgaacttataacataacacggtccttatttcatcaagccaggaaggagaatctccaatgtgtgctggtaagatggaggct

SEQ ID NO: 308042 - DNA, 122 bp, Homo sapiens
gagaaggtgcctctcctcttggtaatcagtgggtcatgtgtggtgatgctcaggacggggcgaaggtcccgtggctgaggtgtccactgaccgtttctgcctgaatgggtggttcggtggtg

SEQ ID NO: 308043 - DNA, 122 bp, Homo sapiens
tttccccaggtccgggccaataattgcaagtaagactcatgcctacaatctccgcgctttcgaaggtcagagcgggaggatcgcttgaggctaggagttgaagaccagcctggaagacatag

SEQ ID NO: 308044 - DNA, 122 bp, Homo sapiens
tccacgtggagtgggactgagaggcacaggtggctgaggggacccgcctgggatgtgaggcgcaggtgagtcgatgaacgccccctcctggtgtgagccgcccgctccccaaacgacgtccc

SEQ ID NO: 308045 - DNA, 122 bp, Homo sapiens
agtggatcgggagacagcgctgcccgggcggtgtctcgggaccccgacagctgcggttggcgggcaccataggccgaagcacccgggtatgattccccacccctgccccacctcctggcctc

SEQ ID NO: 308046 - DNA, 122 bp, Homo sapiens
gctcccgggaccatctggggaaggccgggcaacccacaggatggggaggcagagccaagccggatggagaccgcgctggacctgacctaaattccttccaggcatgcaaacctttccagaaa

SEQ ID NO: 308047 - DNA, 122 bp, Homo sapiens
gcccccagtctggaaacctctgaagcaaacgaccactctggcgtctcgtgttttaacaaacgtttcctgcccaacccggacaacccaggccaacaatgcaagagcttcgcgctagcggggca

SEQ ID NO: 308048 - DNA, 122 bp, Homo sapiens
ggatccagaccagcgaaactgctcccaatgaatcaatcccaacgggggctaaatgaaatacgttaaacagagaccacgttaaggataccgaggcgccaccagactcgacctcggcgttccga

SEQ ID NO: 308049 - DNA, 122 bp, Homo sapiens
agcgatgatctggaggaaaaagaggctgcacgaggttggaggcagcttgttttccgttcccgccaagaccctctgtggtcattccgtgcggttcttgtgctagtcctgtctgaatgatgagt

SEQ ID NO: 308050 - DNA, 122 bp, Homo sapiens
agggacacctgggggcaacgcctcactcaccctgcacgtgacagggacacccggggaccacgcctcactccctgcataagccaggggcagattgtgacctcatctgaagtcagagaacagca

SEQ ID NO: 308051 - DNA, 122 bp, Homo sapiens
gctgcgccgttttggcgggaggtggagagggggacatgggagccacgaaaccgaagggcccgcaatggagcatgactcccttgaaaatgataaaatatatactgttaggtttggatgccgcc

SEQ ID NO: 308052 - DNA, 122 bp, Homo sapiens
gggatggatccaaaattgtcaactctatctaagtctcctttccgcagccagcgctcaggccggaactccttggcccgagggaagttctcatcctggtacgatgtggcatagtggcaaagggc

SEQ ID NO: 308053 - DNA, 122 bp, Homo sapiens
ctccgcaaccccagggcctgcagaaaaggcccacgagactcagactggcagagacttaggcggaccaggaacaggggcgcagtctccgtcccacccaaaccctaaccagagagaacacggca

SEQ ID NO: 308054 - DNA, 122 bp, Homo sapiens
acccccgcgcggtctgtctcccgggcggcgggcgtctgctttcctcgaggtgagggattccgcgcccccgacgaggtgcagctgcaaagcgcccgcaggcgccggccaagccgggcctgtct

SEQ ID NO: 308055 - DNA, 122 bp, Homo sapiens
taaacattaaggaggcctgtctctgcacccggagttgggtgccctcatttcagatgatttcgagggtgcttgacaagatctgaaggaccctcggactttagagcaccacctcggacgcctgg

SEQ ID NO: 308056 - DNA, 122 bp, Homo sapiens
cttctctcagccagaagaacacttgagccccgtgcctggctcctaatcagggtcatggcacggagcctttgctcccccggcctggcttagtggctttggcagctgtgtctaagcacatccgc

SEQ ID NO: 308057 - DNA, 122 bp, Homo sapiens
ggattcgaacctgagactctatgatattacgtccatgccgcaagacagagctggcacctacgggaataacaaggaggtggtggcagggtagtgagctccccgtctctgggggtgtgtgcaat

SEQ ID NO: 308058 - DNA, 122 bp, Homo sapiens
ggtgactcttcaactcaccaagaatatcgtggccgctgaggtcctgcacacctggggatgcgtcgtgggcgccgaggagagcgtagcctcctgttaacgtagcctcctgctgctctttgggg

SEQ ID NO: 308059 - DNA, 122 bp, Homo sapiens
ctccagtcccttccactgtgcgtcttctgtcccccgttcttccccagcggacccctctttcgagactccctagtggggtccccagctcccgggcgatcctgcccttgccgagcgcgttttct

SEQ ID NO: 308060 - DNA, 122 bp, Homo sapiens
attttaggagcaatttgggatggagagctaggagtcgccacctcttggctcttccaaggccggaactggtgcctgcactcagttcagtttgaagactgcagctggatgccaagttccatgga

SEQ ID NO: 308061 - DNA, 122 bp, Homo sapiens
ctagggccccctctgtccacgcccgcaagccttgagtgacgccggtggcgccaaccttcgcgaattgttgggacaaagaacagaggagagggccctgccctggagcatgggcccgggggccg

SEQ ID NO: 308062 - DNA, 122 bp, Homo sapiens
cccagtcaggcttctctttgtaaggagactggctcttctgggacctgggcacaattcaggcggccagaatcaagtttgtcctgccccgtgaggaagtacaggacaggaatttctggaaggag

SEQ ID NO: 308063 - DNA, 122 bp, Homo sapiens
gatatagagactctggggttcattctaggggttgggacttatcttccacctcctgcccgccgcctcttcctccatccctgtcccctacccaccgcagcatttgaaaacctttcctttcgccg

SEQ ID NO: 308064 - DNA, 122 bp, Homo sapiens
aagttagttcacgctcccaactcctgcctgcctccccgcgctgccgactgtccgcaggaccggggaggttccccatcggcagtccccaacctatcccggtcctccaggctttccccctgctg

SEQ ID NO: 308065 - DNA, 122 bp, Homo sapiens
tatcactagcgtggaaggacccagaggatacagccaagcctttctgtcttctccatcccccggccttttaaacagcagtggggcggggccacggcatcgatcactcggcgctcctccaggca

SEQ ID NO: 308066 - DNA, 122 bp, Homo sapiens
gctgtatgcctcaaggaggcaaggagcctgagttgagtgcctctactctctactctaactcgtgcattctcagtagaggcaatattgcccccaagataaaacttggctcttggagggagaaa

SEQ ID NO: 308067 - DNA, 122 bp, Homo sapiens
ctattgattctttgtgtcagcctacatttcctgggagactgaagcatgacttcttcaccgcgtgtttgccaactctcttgtgagtcttgcctcagctcattctcaaactccccctccttgtt

SEQ ID NO: 308068 - DNA, 122 bp, Homo sapiens
gcccccaggccagtcacaaccagggaggccttcagaaagactggcgaggcctcccttggacgtcagaacacccagtgacctaccctgagagactctaggcagtgagaaaggaggggaggagt

SEQ ID NO: 308069 - DNA, 122 bp, Homo sapiens
tccaagagctcctgtctccccaggagccccccaggcctcccgaggcagagaacagcagcccggattcaggtgagccaagtcccaccggccccacctctgcccccaaccccccaccgccttga

SEQ ID NO: 308070 - DNA, 122 bp, Homo sapiens
ccagaacggcggggacacggtgctgagcgagggcagcagcctgcactccggcggcggcggcggcagtgggcaccaccagcactactattatgatacccacaccaacacctactacctgcgca

SEQ ID NO: 308071 - DNA, 122 bp, Homo sapiens
ccgcgcctcttcgaggtggccctctggtccggctttagaactctgcggttttgtggagctcgagagtccgggacaaggtagacgcaggatattgacctttttatttttaactgcattttcag

SEQ ID NO: 308072 - DNA, 122 bp, Homo sapiens
ggcggtctgaaccgtacttgcctagcctcccgtagctccgcgggcgcttcgagggtaccacgcactgaaatgatgggcggggcctgccccgaccctcccggcctccacaggcaggccagcct

SEQ ID NO: 308073 - DNA, 122 bp, Homo sapiens
atcttcttgcgttgctgccaaggccaggttggcaaaatcaaagcgcggcttggtcttgagcgctggaacgctgcctccagcggtgatctcgggcttgggttgaatgacatgagggaaccagg

SEQ ID NO: 308074 - DNA, 122 bp, Homo sapiens
cacggggcgctggaagccttggcggaggcctttgacggtgtcctctctcacagcgttcggcgtagtccccttcctgccatccgtcctgagctccctgctgcccgtgctgggcgtggccaagc

SEQ ID NO: 308075 - DNA, 122 bp, Homo sapiens
catctggctctgctttaaattgtgcttactgtcgacaacagaagtctctaaaaatggcatcggagtttatatttattcacatctaatttatttcagagggacagacccagtttccaaattga

SEQ ID NO: 308076 - DNA, 122 bp, Homo sapiens
ttggaaactaccacgtgagtctgtgagcctcgggcaaacgcttcccgttgtgcgtttgcgcgctcccaacgccagaaggcgcctcccccgaggtcctcggggctctatgttgccattgcgaa

SEQ ID NO: 308077 - DNA, 122 bp, Homo sapiens
tctgcaggcctggcctcctgcctcccgaaagcttgcacaggcccagcctctgcctcacagcggactccccacgcccagctcgctctcgcctgcggcctcccgagtcgaaagctccggcctct

SEQ ID NO: 308078 - DNA, 122 bp, Homo sapiens
tggccctggtagttcaagcaggtcctggcagcaggagggctgtgccatggaggatggacacgactgcactcatactcaaaaacagccttgaccgtggcctggtcatgggattaaaaaatttg

SEQ ID NO: 308079 - DNA, 122 bp, Homo sapiens
acgcgggtgaacctggaaggaattacacggagtgaaaaaagaccctgctcactggtaaggcgggtgaacccagaaggaattacacagagtggaaaaaagactccgctcactgataacgcggg

SEQ ID NO: 308080 - DNA, 122 bp, Homo sapiens
ggagtttgcaccgattcagagggaagtcgacggcatctgtggcagcgcacatgtacacaccgtgtgtggtggtgcagctgcctctgcccgggatgcatgatgctctctgtggtcctcgtcta

SEQ ID NO: 308081 - DNA, 122 bp, Homo sapiens
ggtgtctggaatgagaagcatctatacaggagcctaaatgggctgtaccctgtagcattccgaggacaggcctgaattctgagaagggaaagtggtaaaagtattgtccagtcctttttaag

SEQ ID NO: 308082 - DNA, 122 bp, Homo sapiens
cagactctattacaccccacattctcttttcttttattcttgtctgttctgcctcactcccgagctctactgactcccaacagagcgcccaagaagaaaatggccataagtggagtccctgt

SEQ ID NO: 308083 - DNA, 122 bp, Homo sapiens
caaggcgccgtccggaccgtggtgagcaaagccccgcccccctggccgcgggcccccccccgggtccaattcacacccgatgttctgtccccgtgccaaggggcagttcacacccagctccc

SEQ ID NO: 308084 - DNA, 122 bp, Homo sapiens
tgtcacattgccctcttgttttgcaaactaagtttgaaggatatgaatagggaagcctaacgttaactcatcgagaccctcgggcattgtgtttcatggagagagacacaatgtggactcat

SEQ ID NO: 308085 - DNA, 122 bp, Homo sapiens
actggcaccatccttattgggctttttgattggccgcggcaccaggacacgtcacaggggcggggccgattttaaagagccgggcgcggaaaaaaaaaggccgcctgtcgtcgtggagagaa

SEQ ID NO: 308086 - DNA, 122 bp, Homo sapiens
cattttggaaaccatgaatggattctgggtggagatgcccctgacccttgacaaatctatcggtgcttggtaccagcatgagctaactttatggctcaaaccaataggacaatttgctgagg

SEQ ID NO: 308087 - DNA, 122 bp, Homo sapiens
ccaggacagactggaggctgtagcctgctgcaccgtggctggcctccctgcagttggtggcgacagacactgtagtgtggctggaaaggtaggaaggggaaaatagttttgggatagatgga

SEQ ID NO: 308088 - DNA, 122 bp, Homo sapiens
gggttctggagattgaattcaataatgtgaccagccatttaatcaatcatgcccactcagcgaaatctcagtaagaactatggacacagagtctcagtagagtatacttattggttaattca

SEQ ID NO: 308089 - DNA, 122 bp, Homo sapiens
cagtatttctttgggtaccaggagacaaacccatggagtggggttgatgctcacagacttcgcttggcattcagatgtttcagcacgagcccatctctacttataacaagagcagtctgcga

SEQ ID NO: 308090 - DNA, 122 bp, Homo sapiens
tcccgaaatggcccagccttctagggcaggcaccaccaagcatgggtgtcagtggatgcccgcaggcatagaactcctaggcccccaagggaggtgtggcctgaggatgcaggtgcccttct

SEQ ID NO: 308091 - DNA, 122 bp, Homo sapiens
atagtatattagagctgggagtaggtctgcaagaaactcatatgcttacaccagggcagacggggaacacttgctatgttagctgcacgtcaggattcttagaaaggtttagcatctaacca

SEQ ID NO: 308092 - DNA, 122 bp, Homo sapiens
aacaaccaataacagcttccttgcccaatttccctgggcccttcatatgtaatccatacccgctgtctgtccttcacgggtgttcaccaactgctgtctctagctttgggtaggagggggag

SEQ ID NO: 308093 - DNA, 122 bp, Homo sapiens
ttgcgggcgggcgtaggctcggcaggctctgcactcgcagcggccagacggcccggaagccgccctccgtgaggggcttagcacctgggccagcagctcctgtgctcaacttctggtagggc

SEQ ID NO: 308094 - DNA, 122 bp, Homo sapiens
caggtgtgcaggtggctgtgtggagtggacacctggggtgctgactggcgtagtttgtggcgtggtgtcagtggctggtcccgccggggagcacgagggtgagggcgtgcggtgcctgtgtg

SEQ ID NO: 308095 - DNA, 122 bp, Homo sapiens
gcagcttggatcctgatcttaaattctgccactctaaattattataatctaggccaggcgcggtggctcatgcctgtaatcccagcactttgagaggctgagatgggcggatcacaaagtta

SEQ ID NO: 308096 - DNA, 122 bp, Homo sapiens
agggggagaggggtttgccctggtctcggggactggtctggctggcgcttccccactgcacgtttccaggtttagtttgtctgtgtctcctcttccatcccaggggctgagccccttccatc

SEQ ID NO: 308097 - DNA, 122 bp, Homo sapiens
tggaggctgttgctgggaggcgtggattctggaaagtgcgtgtgcgcgtccctggagcaccgcccgcggagccgattggcccggacgcgcggcgggggaagcccttggctaatctcctgcca

SEQ ID NO: 308098 - DNA, 122 bp, Homo sapiens
tcagtttctccatttctatcattactccagaagggttcttgggtgtggactaggcattctcgttggcatgcattcaagttctcctctgtagccactgatcctgttgcctctatcccacagct

SEQ ID NO: 308099 - DNA, 122 bp, Homo sapiens
cggcgggaggcggggactgcagtgccgagtgtagggcgccccagccgggctggcggttcacgctgcgctcgggcctctgccgggagggcgccctggcgccaaacccgggcgggcaggggggt

SEQ ID NO: 308100 - DNA, 122 bp, Homo sapiens
gaattgaaatttcatggtgcgtagcctggttggaaccagccccactggctcagctgtggtcgccttcacccgtaagcccgtccgtggtgcagctgagtgtgtgccaggagtgtgctgcctgc

SEQ ID NO: 308101 - DNA, 122 bp, Homo sapiens
gcaggagaacagcagtttcttctcagcctgcactttgagtttgcccagcccagctgtgcacgtcagcatcaccagctctgctgagctctgggttttgtggggaatccactcttattcttccg

SEQ ID NO: 308102 - DNA, 122 bp, Homo sapiens
cccgcagggcacttcccacgggtacctccaggctgccctccgtcacgcgtccctcttctccgggctgccctccgtcacgcgcccttttccaggctgccctctgtcacgctccttctcgaggc

SEQ ID NO: 308103 - DNA, 122 bp, Homo sapiens
agagcggtaggaaccgacgcgagcagtcctgcagcgtcccctggcggagcggaggctcaacgccagactctggaggacttgggataattttcgaaaactatctggaagtttagaagtaaact

SEQ ID NO: 308104 - DNA, 122 bp, Homo sapiens
gacacggggaggcttaagctggagttgaggggggtcataggtgtgacccctccggccccgcgtccgtgctgacgtggcccagccaatggcagagcagggcagagccgggtggcgcctggccc

SEQ ID NO: 308105 - DNA, 122 bp, Homo sapiens
cagcagggtcagccccctaacctgcgaacagaacggccacacagacaggcaaactgtgcccgggacagcagggtcagccccctaacctgtgaagagatggccacacagacgggcaaactgtg

SEQ ID NO: 308106 - DNA, 122 bp, Homo sapiens
ctgccgatcccgcccttcgatcccagccggacccagctccccgctcccgcccgcgggcggcgcctgcccagcctgctcccgccgccgcccgctttccaggaactgtcactgctgaccgtgcc

SEQ ID NO: 308107 - DNA, 122 bp, Homo sapiens
agccaagttactgattgctcctgagaccttcaaaacccagaggatatgaattttactcaccggaatctattctgttttccaagactcactttcaccccactcctcgttccatggggctcaaa

SEQ ID NO: 308108 - DNA, 122 bp, Homo sapiens
cttgttggttttcagagtcccagctgaaagacaatcctgccttctccatgctgaatgactcggatgatgatgtgatttatgggtaagtccctgtccgttagaaggccggcacaccttgggca

SEQ ID NO: 308109 - DNA, 122 bp, Homo sapiens
tacatagaaagaaaatgttccttgttgctctagatgttggtgctgtatccctaatacttacgggccaagcaagaagaaattgtataatctttgttgttcagaagtttctaatagaataaata

SEQ ID NO: 308110 - DNA, 122 bp, Homo sapiens
aaaacaccactaaagcgatgtgtctttcccaactaggacttttacatttgtgaaacatgacgttctggcttccaggaatctcttgctttctcttccaaaagcaaccaaattttaaattctag

SEQ ID NO: 308111 - DNA, 122 bp, Homo sapiens
aggacaacagcacgctgtccccgccgtgagcacgaaccctgggtgcaggctggcggcacccgtccaccacgcacaccctgacccagcagcccacctcaggagctagttcacacagtaagtca

SEQ ID NO: 308112 - DNA, 122 bp, Homo sapiens
aggaaaaaaaataacaaagcaacactcaacagacatggggctggggcttcccccacagtgcgccgggtcctggcgcggggaaggctcagagacccgtcgagaactcgagctggggtaccgag

SEQ ID NO: 308113 - DNA, 122 bp, Homo sapiens
tgcctggaacagcaggtggagctttcaccacgagtgtcccaggctgtcatttggagcccacgacctacccacggggagcagccaacagagtggtttcttctccaaagctaattcatctccaa

SEQ ID NO: 308114 - DNA, 122 bp, Homo sapiens
tctcctgcaggacctgggagtactagctgctttttaatccaaaaggcactggagagtatgcgaaagcacttggatagactagggatgtgataaaagtgttgttaaaggaagctgattcctat

SEQ ID NO: 308115 - DNA, 122 bp, Homo sapiens
gtagaaaaatctgtctactccttcctggtagatgggaagaccgccttccaggggtttcctcgaggccagaggagatctgagcacatgtcacaggtcacagcaggcaagaacaacagtgaggc

SEQ ID NO: 308116 - DNA, 122 bp, Homo sapiens
cggcggcgcggcgcaggcaccggcccggggagaggcaccatgagcggtgagtggcggccccgccgctgtcacctgccccggccgccccggctcccgccgctccagctgcacactccggcccc

SEQ ID NO: 308117 - DNA, 122 bp, Homo sapiens
ccaagcggcttctgcctcttcctgcccctgccttgtgcagccactggcttgggcgacgggcgatgactcacttcccccggcaggcatgcctcgcccgggcacggagctcgctggcacagggg

SEQ ID NO: 308118 - DNA, 122 bp, Homo sapiens
tttttttgaagagaggagatctccttgtgttgcccaggctgcactcgtgccttcttaccacggcccgtctcgtctcgtcagtgccacccgcgcactgtccccagggtccgggccgccctggc

SEQ ID NO: 308119 - DNA, 122 bp, Homo sapiens
cgggtggggcctgtgggctctgtgatgtaacttgggaggggcgcggggcggggcctaggtcgcgggccatctgggctctggaaggaacccttagaggagcgggaggacgccacaggtcctcg

SEQ ID NO: 308120 - DNA, 122 bp, Homo sapiens
ggggctggcctctgacctgggagcgggtggccaggcccctggcatcgtgccgagagcactcggtaccactccattctcaacggggcatcctccctgccatcaccgccgtcctccaactggat

SEQ ID NO: 308121 - DNA, 122 bp, Homo sapiens
tgtctttgtttctccgctgtgtgggcgcgtctcgagcacgtggcagctgagagcgcgggccgaagcgcaagcgacctgggttcagtgtctaccgccgcctggcaaaaaaagaacacggccgc

SEQ ID NO: 308122 - DNA, 122 bp, Homo sapiens
cggggcctgatcttcgcgacagccgggagggggcgcctctcccagccctcggccgtgtcccggtctgactcgcccccgtctgctcagcgctatcagcctgcagctggcacacaggtgcgtgt

SEQ ID NO: 308123 - DNA, 122 bp, Homo sapiens
gtccgcggactcttccggcgcggcggcggcgacggcgacagcgggctcccggcgcgcggccggcagcaccactggcagcgtaaccaccagctgccgccgggccttgttgaattgtgccttgc

SEQ ID NO: 308124 - DNA, 122 bp, Homo sapiens
aaccagagaacaacagaccctcctccagagtccccgttctaggacctccctgactgtcaacgaaagatgccaatcacaggcagccttagccagatcactgagcgcccagtaaaaaaaacaaa

SEQ ID NO: 308125 - DNA, 122 bp, Homo sapiens
gcagtcggtggaggtttcggctgcagctggagtgtggtttccctccggggcgcgcggctgcggtcccacgatggagcgtgcagccaactctgggtgggggcattgggccccgtgctctcctg

SEQ ID NO: 308126 - DNA, 122 bp, Homo sapiens
tttacagatagctaatggcctaatatgctaaatatagttgcagttccctaaccaaaagctcggtctgctctatggaagcagactgaaagcccccactgctgtgcaatgcgggtgagaacagc

SEQ ID NO: 308127 - DNA, 122 bp, Homo sapiens
acagaggagagccccggaagggagggagctggtgctcagggagggctgattttcagcagacgctcaatttggaaagcctttgggggaaaggtaattgctcagaattgcaaatccttttcttc

SEQ ID NO: 308128 - DNA, 122 bp, Homo sapiens
ctgtctggaaggaggtgcaggagcccgggggcaggggagctccgggcgccctgctggggccgcgctacttgggggcgttgcggcggcggccccgacgccccttgtcaaatcgcctccagggt

SEQ ID NO: 308129 - DNA, 122 bp, Homo sapiens
aaggatccttcttaaggtcttatctcaagagctctgggaggtggaagcatggggtgggatcggtggaccagggtggtaagtgtctgcacatctgcctgtccctgtatcagcggctacccacc

SEQ ID NO: 308130 - DNA, 122 bp, Homo sapiens
ccttcgttccttccttcgtctgctggtcgatttgttcgctcgttcattcattcattcgcacgctcattccactcctccccacctccacccaagcgtccagcccgcgcgcgccgctcccccgc

SEQ ID NO: 308131 - DNA, 122 bp, Homo sapiens
caagatgcctgccgtcatcaccattttaaagaatgagaaactgagattcaacggaggaatcgaccagcccaaggtcatggagttagactagaagagttgtctcaaacccaaagcagtcatgt

SEQ ID NO: 308132 - DNA, 122 bp, Homo sapiens
aagttggggggcgctggtaggctcatgggaaatagagtccggcccttgtcctgggaccaacggtgggccctgggaggcggacttccggtgaactcctgcgcgtgtgcgcctctccctgggtg

SEQ ID NO: 308133 - DNA, 122 bp, Homo sapiens
ctgctggctctccgagagagtgtaattagtatttatatcaaaatttatgaaacaaattttcggccgcagtataatttaaatgacctttgcagatgtagaataacaaccataaaaataacagg

SEQ ID NO: 308134 - DNA, 122 bp, Homo sapiens
gttctgattaccggtgcatgcagaccccagtcacgtaccccctgcttgctcaatctatcacgaccgtctcacgcagacccccttagagttttgagcccttaaaagggacaggaattgctcac

SEQ ID NO: 308135 - DNA, 122 bp, Homo sapiens
gcttggggggaggcgtagcaacttcagggaacttcccaaaggtgtgcgcaggttggggggcggggcgcggcgccccgggaggtggcggcctctgcgacagcggaagtataagagtggacctg

SEQ ID NO: 308136 - DNA, 122 bp, Homo sapiens
aaactggaaggtagagccggtggcggcaatttcagggaacgcatgcgccttagctcggagcgtggtgaacgtgtttgcgcatgcgcatcagagcctgcctcgttggcaatctcgggaagggc

SEQ ID NO: 308137 - DNA, 122 bp, Homo sapiens
aagtacctcactagactgtgagctctttgccagcacagactatgccttattcatatttcacgtctccagcatccagcaccaatgactgacctatagctagtgactgacaggcgtgttgagaa

SEQ ID NO: 308138 - DNA, 122 bp, Homo sapiens
ctataggtggttctggcttttgcttttctcccgacattccgggtggagatggtgaacacacgcttctccgggctccccctgatgctgccctcaggccttgggggtctggcctacccctcacc

SEQ ID NO: 308139 - DNA, 122 bp, Homo sapiens
gccacaggaggccctgcagcagacgcaggggtggctgcacggagccaggtgctctggaaacgtttttgacctgggcatcttttccttagaacaacttctaatccccgggaccaggagtgtcc

SEQ ID NO: 308140 - DNA, 122 bp, Homo sapiens
cttgcaaattcccatagggaatcttccagctaagtttagggcatatttgtccaaggtcaccgacagggtgaattatatgggtcaaatttctaggtgtctgtatgtgtctggcactccacttc

SEQ ID NO: 308141 - DNA, 122 bp, Homo sapiens
ggtgcaggtaagtggtatgaggctcaagttgttctggcggcgtcatttcagcagtccctgcgtacgaaagcgggaagggcctgggaagaggggcggagccggcgcggctgaccgggttgggt

SEQ ID NO: 308142 - DNA, 122 bp, Homo sapiens
gcgatctgggtcgagtgcatatcagccactagactgtcaaagactccagtcatcctggcccgagacgggaaagagcagaggtggcgggcgtgcgggggaagccaggcgcctcctctgtctct

SEQ ID NO: 308143 - DNA, 122 bp, Homo sapiens
agacagaacactggcccgggtgtagaaggcctgaaggacacctcagtaggcgggacctggcgggcatttctagaatgttccctgaaacagagccgaaagatgtcttcttttcaaggctgcgt

SEQ ID NO: 308144 - DNA, 122 bp, Homo sapiens
aaccgcggaactggtgcaatcggagtggagcccatggggtaggtgttgccattgagccaacgctggtttcctgctgtgagtgattttgctgcagttttgtgtgcagcgtctttttctcagga

SEQ ID NO: 308145 - DNA, 122 bp, Homo sapiens
atttgtccaatattgaaatttgagattgtcagaaataatgtgagtccctgttcatattgtcgtgtcccatagaggaaggccaagttttcaatttgctagattgggatgggatacaaggcatg

SEQ ID NO: 308146 - DNA, 122 bp, Homo sapiens
tgacctcctgatccgcccacctcggcctcccaaagtgctgggattacaggtgtgagccaccgcgcccggccgcacacaaactcttaagcagaaggctttgaacattccaatatcaggccact

SEQ ID NO: 308147 - DNA, 122 bp, Homo sapiens
cctctaactgtcatgtccatttcctcatgtgtacaatggagaaactcactagggtcactgcggataagctgattaacattttctatagagttactttatttttggaagtgttcccatcatta

SEQ ID NO: 308148 - DNA, 122 bp, Homo sapiens
cccagtggcccgagggagggctgcgaggcggtcagaaggcaaacagccacgacgccgctgcggtgtcacacccgcgccccctcgtgaattccaaggggcttcagaccagaggggtcgttagg

SEQ ID NO: 308149 - DNA, 122 bp, Homo sapiens
agaatgagctctggggtctaacagacctcgcttctccacccagtctagcagtcacagctgcgggacctggggcaactcacgcaacctctgagactcagtttcctcatctgtaagatggagat

SEQ ID NO: 308150 - DNA, 122 bp, Homo sapiens
gcggggccttcacgttggtcaggccctgggcttgcgtggtggccgcgatgctgcaggaggcgaacgcttgggtgggggccgagtcctgtgcacccgcctttccgacgcccccacagaatttc

SEQ ID NO: 308151 - DNA, 122 bp, Homo sapiens
ctgagacccgctcatcccctcctctgcaaactcaggcaccttcctaccctcctgacctgccggagtgcctgcctcttcaccaggtgcaactaactgggccacaacagttgctgcatgttccc

SEQ ID NO: 308152 - DNA, 122 bp, Homo sapiens
aaaaccaaggcccaaagacgccaggcaagggcagctcagcccgggatctttctcatgtaccggtgagctcagctcagcccagcaggcgttcagaagcccaagtggcccggctggggtcaggg

SEQ ID NO: 308153 - DNA, 122 bp, Homo sapiens
ccgggagcctggtgagggcggcgagcacagaaggagccccgggcccgggacatggaatcgcgcgagcccggcgcgggacggccggagacgcggccaacgctgcggccacgagcagccggcag

SEQ ID NO: 308154 - DNA, 122 bp, Homo sapiens
ctgaggtggctcaggcaggtaagaaacccacacagtcctgggtcctccccaagcctcggacgtgcagctgctgcttcactggaattcttctctcctcctggaaacttgctccagttgtgtca

SEQ ID NO: 308155 - DNA, 122 bp, Homo sapiens
atgaaagatttggaatctccccaggccacccacttgatccaggagcatatcaaaacccatcgagacagaacaggtgatccccaagaggaagcacaatgactttgtagagataagttcagaag

SEQ ID NO: 308156 - DNA, 122 bp, Homo sapiens
cagcatgtcttcggccggggggtcgctggtggcggctgggggtggggtgggcgtctcctccgtgggggtggccgacagagcagtggggaaggggaactggccctcacccagtgcgtgggcac

SEQ ID NO: 308157 - DNA, 122 bp, Homo sapiens
ggcagaggagctggggccggcgccgggaattcaggccgcgttcgccgccgcttcctgctgcgccaagcgcgggacacgtcacaccagtggccccggaaatcggctcaaccgtacttccgctc

SEQ ID NO: 308158 - DNA, 122 bp, Homo sapiens
agccgaggagcaggggtgtgcagggttccagcgacagcagcactggactcgtccagagggcggcgggtgagcggctggggccccgtggagccaccatggaccccgcaggggcagcaggtgag

SEQ ID NO: 308159 - DNA, 122 bp, Homo sapiens
cgccaggacggttcccggccctgcgccatcccacctcccaaaacgcaggcgaccctttctcgccacagccacaggagggctctaatccggctagagttcccccaggcactggggacagtccc

SEQ ID NO: 308160 - DNA, 122 bp, Homo sapiens
ccgcgcgggcacccgcgtgccctcaggcgcgcccccgcgccgggcccggccggcagagggcggggtcgctcaccagtccgcagctcgtgcttgacagtgaggagctgctctcctccgtcgcc

SEQ ID NO: 308161 - DNA, 122 bp, Homo sapiens
ctcccatacctgaatacgttctgggggtggatattttacacagcttggcttcacaaaccacggccggataattcagacgccaactatgtgtggttaagccagtactgcgctgacatacgggc

SEQ ID NO: 308162 - DNA, 122 bp, Homo sapiens
ggaaggtgggtagatgtacaagtgaaatactgaacaggggttagaaacagccagcattgccgggtgctttggctcatgcctgtaatcccagcactttgtgaggctgaggtgggttgatcacc

SEQ ID NO: 308163 - DNA, 122 bp, Homo sapiens
gtgctaactgtgaccacttttgctttgggagtcctagagctccttgtcaaggctcagccccgtggcctgcactcacctctcctcctgatggccttagcctcctgattgagactgcacactca

SEQ ID NO: 308164 - DNA, 122 bp, Homo sapiens
ggctcctgcgctccccagaacggtgggacgcgggggtcggcagcctccagctgaacatggcgccctggacgctgtctcgctgctgccactgcgtcatgggctgggtgccggtgctcctcatc

SEQ ID NO: 308165 - DNA, 122 bp, Homo sapiens
tggttaccagcaataaggaaatattcatcacagctgctgaggaggcctgagaatgccccacgatgcacaaactgcaggccgtggaggaagaggtggagggaaaacaccgaacaggaagcatt

SEQ ID NO: 308166 - DNA, 122 bp, Homo sapiens
gaccgggtggggacaaggagtactcgtagttgtggggcctgaggaaagtgacagattagacgaaagtatgctaaattagaggactggaggttttgctaaggaagaacttgtatgctgggagg

SEQ ID NO: 308167 - DNA, 122 bp, Homo sapiens
ttgccagtcatgcaaatgtgagtttgccacatgataatcacccttcatcagaaatgggaccgcaagtggtaggcagtgtcccttctgcttgaaacctattgaaaccaatttaaaactgtgta

SEQ ID NO: 308168 - DNA, 122 bp, Homo sapiens
cgggcagttcatcaacacaggagatcttgaataataatcaaggattaattaagtttaaagcgtatcacattttgtaccagtgtcagaatctgggggaggaagaacaattaaaaaagaattag

SEQ ID NO: 308169 - DNA, 122 bp, Homo sapiens
cttccctagaaatctgtcattttttggatgaatgaaggaatggaaacgacacagggactacgaagaaaagcccagccacctggccctttccaattctggccgcggacagccagtgctgtggc

SEQ ID NO: 308170 - DNA, 122 bp, Homo sapiens
tcctgacctcaggtgattcaccaaagtgctgggactacaggcatgagccaccgtgcccggcggaaggaaggataacttttaaagcatttttatgtttgcatgtttagtctaccagttttcac

SEQ ID NO: 308171 - DNA, 122 bp, Homo sapiens
tgcccaggtctagccgggtggagcaggcggctcctggtaggcagcgtggggtccatcccccggctgtccgctgtctgctactgtgagagcagtgggcagaactgacctctcaccactcctgt

SEQ ID NO: 308172 - DNA, 122 bp, Homo sapiens
catagattaaaaagctttgcatactgtagcccctggctacttctttgatcttctcttctgcggtctggaattcactaactgcagcagtcctcccttatttgcagtttcgctttctgtggttt

SEQ ID NO: 308173 - DNA, 122 bp, Homo sapiens
tcctctcgtttggggaggaaaaaaaaggaagaaccagcaagtagcagcagccaccagcagcgtcgccttcccaactgagaaagttaagccccgactggtgtcctgggtcccgaggcaaagag

SEQ ID NO: 308174 - DNA, 122 bp, Homo sapiens
ctcaggtgatccgcccacctcggcctcccaaactgctgggattacaggcgtgagccaccgcgcctggccagggactatactctttttaaaatagacatttgtggggctcacacaatatatga

SEQ ID NO: 308175 - DNA, 122 bp, Homo sapiens
ttccattctcgatactggcaggaaagtctgatagtcaggcctgaagtttagattccatcccgcaagcgcagagatatcacaccaagtgggacctctcgctcgttccacttcccagcccctga

SEQ ID NO: 308176 - DNA, 122 bp, Homo sapiens
agctgcaggcagcaggaggaaaagtgatttgatgcaggaaaactttacgctaaaaagaatcggagagtaatatccaatatatcccattgttgcctgcatatagaagggaagggcaggtctgc

SEQ ID NO: 308177 - DNA, 122 bp, Homo sapiens
tgacttgcccaggctgcacggagggcaactctggcagtcatctgtaactcgaccagttaacgtcccgaacgtgcctgttcgcggagatattagcaaacgtttcaaggatgtggctgtcagat

SEQ ID NO: 308178 - DNA, 122 bp, Homo sapiens
gtctccacgaccgagctggtctcggcaagtggtgcccaacacgggggctcgaacctgggtcgaatagtcgccagagcgatggttagaaaatgtggaactacactggaggacacccgagtact

SEQ ID NO: 308179 - DNA, 122 bp, Homo sapiens
tgttgtaaagagtcatgaccactggaagtattttcaggacgtagacctggtgggtcactacgtggggggagagaggtgtgaagcggaggtacatgctggaaacgtgtgaatgttgttacgag

SEQ ID NO: 308180 - DNA, 122 bp, Homo sapiens
gattgtaataaatgtacctctctgattggaatattgatagtggaagagactgtgcatgtgcgggggcacagggtatatgggaaatgtgtattttctgctcaattttgctgtgaatctaaaac

SEQ ID NO: 308181 - DNA, 122 bp, Homo sapiens
ttggggagcagcgctccagctgccactaatcatggaagcccagaggcgaaatcagcttcccggggacccagaaaattgctggagtctggcgaggggcaaatcaggaagtgtctttgtcggag

SEQ ID NO: 308182 - DNA, 122 bp, Homo sapiens
cgtccattgtactgtcctaccccttggcacttgtttcagagatcagctgcggagatggggcgagtcacccaggaacagacagacacacttgctacagactaaagagaacaagtggttctaac

SEQ ID NO: 308183 - DNA, 122 bp, Homo sapiens
ggattctgaaggtcacctgtcagtggctgtgctcagtctagagcaggggtcagggcctgtcggaagagttgttgtcttttttttctagacagttgtctcatcttcatagtcaggccttggcc

SEQ ID NO: 308184 - DNA, 122 bp, Homo sapiens
aaagcactgaagttagcataagaagccctgagatgaagtcccacttttaccactgaacaacgcagccatcctgggcaagacagtaagtcttgccaagtctttgcttcctctgctctaaaata

SEQ ID NO: 308185 - DNA, 122 bp, Homo sapiens
atgactgaatgactttcacaagaaacacgtggagtccagtgagcaccagcaatgaactttcgcaactgcagaaattagtgattgtagctgagttgacacaacagtagctgaacttattaatt

SEQ ID NO: 308186 - DNA, 122 bp, Homo sapiens
ggatggggcatagatcgaatccaggccacttccttggggagaacaggacccagaggagcccgcccgggagactcattcattcatgcacgaaggatttattaagcatctactgtgtgccaggc

SEQ ID NO: 308187 - DNA, 122 bp, Homo sapiens
ttggacagtggatatttcgacatttggatagtggacgtatatggatggacatttggatagcggacgtatgtggatgtgttactagggggtccttgctcccagagctcccaagatggtagcgg

SEQ ID NO: 308188 - DNA, 122 bp, Homo sapiens
agaggggctcctcacatcccagaagacgggtggccaggcagacgctgctcacttcctaggcggggtggtggccgggcagaggctgcaatctcagcactttgggaggccaaggcaggcggctg

SEQ ID NO: 308189 - DNA, 122 bp, Homo sapiens
gtactggctgtcaagttagtggctttgtaaagcagtagcaaccggcttaacgcctttccccgtctgcgtctcctgcagcctctgtgcagtgtgcacatctatgggcaggtgcattctgtaga

SEQ ID NO: 308190 - DNA, 122 bp, Homo sapiens
ttgagatggagtcttgctctgttgcccagggtgtagtgcagtggctcgatttcagctcaccgcaaccccgtcccgggttcaagcagttctctcgcagacttctgagtagctgagattacagc

SEQ ID NO: 308191 - DNA, 122 bp, Homo sapiens
agtattccgtggtgtagatgtgccacattttctttacggtctctatgtaacattcacacccggcagctgctgggtctaaaccgcaaaggggagggggtgtgacgaggcgtctacctcccatc

SEQ ID NO: 308192 - DNA, 122 bp, Homo sapiens
tacagctcaagcaatgacaaactgatgtgtggcactgcctctctcatcatctctaatccccggctggcagaacccccagcgtgtgagagaactgctgctctcccgaattccctaggtccctc

SEQ ID NO: 308193 - DNA, 122 bp, Homo sapiens
acaaagaaatgatcaaacaaacaaaacaaaaaatcccagctctccctccaaagaaggtcacggtttctctttgttttaaaataaaacacgaataatatccaaacctttctggcctcacaagg

SEQ ID NO: 308194 - DNA, 122 bp, Homo sapiens
gtatgcaatgcttttaaatgcgagattcaaaaccacaaagagacctggttcacccataaacgattaaggaaaacttctacctacagcccactgctgatcagcaggcactatgaaagcttttc

SEQ ID NO: 308195 - DNA, 122 bp, Homo sapiens
ggcgagaaccagccgcgttgccatggaggccgggggcggagccgcagagggacccgcggccggccaatcagagacgtagcggagcccggcggactacattgcccagtaacctcctgggctcc

SEQ ID NO: 308196 - DNA, 122 bp, Homo sapiens
ggcgggccctgtcagtagttgtcctcagcagctagtgggcgtctccgcagcgagtggcatcggccccgcccccagcccgtgctcgccggtgtcgggtcctaagtccctcggtcttgggttcc

SEQ ID NO: 308197 - DNA, 122 bp, Homo sapiens
gggccagctggggctgctcaggtggttctcacagcaagtcccttccatgacctgctccaccgccaaaggctcttggacctcggaacggggcatctgctctcccccgcccgtagcatagcccc

SEQ ID NO: 308198 - DNA, 122 bp, Homo sapiens
tggcccaaagtccaggctgcggaccctgcccctcccccgaccatgtttgtcccactcagccggaatccagggggcaatgccaactaccaggtgtacgacagcctggagctgaagcggcaggt

SEQ ID NO: 308199 - DNA, 122 bp, Homo sapiens
ttttttggctagtgctggccttaagaatgttcttactcgtttgagctgaaatctacaacccgcatgtcccatccatgagttctgctctgccttccgacacctcacccaacaaaaccagggct

SEQ ID NO: 308200 - DNA, 122 bp, Homo sapiens
acatgtctgcaaaccctacccacatgctcggatatgtttgaaatgaatgaattaatgaaccggtctggggtcaacagcttgaatttgtatacaggctccgccatttataggctaggtgagtc

SEQ ID NO: 308201 - DNA, 122 bp, Homo sapiens
cccgggcgggaacgtcacctaccaaggggtggctgtgacgcggagccggaaagaaggcatcgcacacaactacaaaaatgagacggagtggagagcgaacatcgacacagtgatggcgtggt

SEQ ID NO: 308202 - DNA, 122 bp, Homo sapiens
gaatacacctctcctggctctctgtttagtgtttggacgttcaaagatccctagactaggcggcgggagtttcagggccacgatccagatcttacaccaactgtgtgtggccccgcacaaaa

SEQ ID NO: 308203 - DNA, 122 bp, Homo sapiens
ggctcagagatttaatcacgttctcggactcaggccatggcagtgaatcttggagccacgcggccggagctgcagcagaaaccctggcaacggaaggagctctctgagggtttggtggaata

SEQ ID NO: 308204 - DNA, 122 bp, Homo sapiens
tgcaggcaaagtagcctccaggacagaggggtcagcacccgagggctggccctcctggcacgttcctccacgcaaattccaccccggtgagaggtgacagcgtgctggcagtcctcacagcc

SEQ ID NO: 308205 - DNA, 122 bp, Homo sapiens
tgacactggggttgggtacaacgagaggaccggggtggggggcacctccatccaggttcccggcaggggtggtgggtcacactcaccacctgcaggagggagaggtagcccagacccacgtt

SEQ ID NO: 308206 - DNA, 122 bp, Homo sapiens
ggtgatccacccgcctcagcctcccaaagtgctgggattacagacataagccaccacttccggcctggtattagatttttagtgtttttaaagatctgtagctgcaaatgtaattatggccc

SEQ ID NO: 308207 - DNA, 122 bp, Homo sapiens
cgaggttccactgcccagggctgtctaaccgcttgctttagactgtgggtgcacggagtccgtcactcagcctccaggaccagggctcctgatgtgtgagcgcgttccattcccccattccc

SEQ ID NO: 308208 - DNA, 122 bp, Homo sapiens
gaaagacaacacaggcagggcacagtggctcccgcctgtaagcccagcacttcgggaggccgaggagggagaatcgcttgacccaaggagtgtgagaacagcttgggcaacatggcaagacc

SEQ ID NO: 308209 - DNA, 122 bp, Homo sapiens
aacttccttcttctcattatcaactacaaacgactagtttacttgaacgaggcctggaagcggcagctgcaacccaagcaggactgacgcccgacagactccaccctaacagtctcaagccc

SEQ ID NO: 308210 - DNA, 122 bp, Homo sapiens
agaggcaatgggtgggaaacagcattgagaacccccccagtccctggttaaatatagacccgaggctcctccttctgccgcccctgtggctgcatggccatgataagccgcagggtggcctt

SEQ ID NO: 308211 - DNA, 122 bp, Homo sapiens
ctagagcggcgacagaagctcttcgggggatcagtggccaagggggcggacagatttgcacggcggattcctccgaagcaacccgtgtgaaagaagccaagcggcggctgcagcccgggccg

SEQ ID NO: 308212 - DNA, 122 bp, Homo sapiens
ctgaggcttggagaggttacataacttacctgaggtcacccagccaggaaacagtagagccggactccagacccatgccacatgaccacaacaagtgggtggaggctgcctgcagaactgaa

SEQ ID NO: 308213 - DNA, 122 bp, Homo sapiens
ctcactggccactgtgcagccacacagctgtcgcccagaaccgcccaagatgagcctctccgggcggaatgactgccagagagaatgccgcactgccagaaaagggcactgctatcccacct

SEQ ID NO: 308214 - DNA, 122 bp, Homo sapiens
ggaatgcattttcctgcaagccagactgctttttcctcggcatctctagcgtggagccagcggccctcaatatccgaatccaggatgcaggggctgcgtcttagcttttggccctcatctcc

SEQ ID NO: 308215 - DNA, 122 bp, Homo sapiens
ttggggcctggagaaaatcagtgctaaataggaatctgttgactcaatacacggatgatacgccgatcatcaatactccatatgtgatgggcaggggaggagagcagggcggtgaccagcag

SEQ ID NO: 308216 - DNA, 122 bp, Homo sapiens
ctcaaaggatccgcacacctcggcctcccaaagtgctcagattataggcgtgagccactgcgctcagccaaaatagcagcattctgatctaactcttaaaattgtttgtgatagtacacttt

SEQ ID NO: 308217 - DNA, 122 bp, Homo sapiens
gagggaggcaagacaggcacatctgggagtggcccttgggggaggatgcagcagaccaggcgcggggtcagcaaggagactccaggcttcagacacccacgtgggggaaatctgattccctg

SEQ ID NO: 308218 - DNA, 122 bp, Homo sapiens
atcctgcgtgtcccccgaccctgtcccgtccaagcacaggggtctcccagctcccaccaccggggcaattgcattcttggcctggctaggccgtccgtcctcgattctcccctcccctccct

SEQ ID NO: 308219 - DNA, 122 bp, Homo sapiens
cttgaaactgctggagctgaaagtttgtgaaattctgtcttcgcggttgcccccactgcccgcgaggagatggtggtagttaagcctaaaatgatagcggaagtcccacccacgatccggtt

SEQ ID NO: 308220 - DNA, 122 bp, Homo sapiens
ggaaaactttaaaattttaaaaagagcccgactgaaagtcttttacacacttgggcaacacgcccgcctatgggcacatgggcagggtgagtcagtgggacacaactgtaacagaaaaaaag

SEQ ID NO: 308221 - DNA, 122 bp, Homo sapiens
actgcagggacacaatctcactaaagatatagctaattacattatgaaaaccacagtagtcgtggtctcaagcatcagcagtcaggtaatgaacaatgagtgagtattacatatacatataa

SEQ ID NO: 308222 - DNA, 122 bp, Homo sapiens
aggggcggcggcggcggcggcggcggggttcccgcgccgcggagcccggcccgagagccgcgtccacgttcctgcctcctgctcccgccgccctggggcgccgccatgacggtgagtgcccc

SEQ ID NO: 308223 - DNA, 122 bp, Homo sapiens
taggccagaaaacaagcagaatggggagaaatgtgtctgggaggtgtagggaaagatggacgggagcttttgtgagcagtgcttgtgaaatgtgacagggcatttagctaggagtcatgaag

SEQ ID NO: 308224 - DNA, 122 bp, Homo sapiens
aatttaaaacacggctgtttagaaaaatatttatatttattgcagctgctcaattggcctcgttaaagtcggcaagcatttaaattgtgttacaatctcatttaaatcccgttccgttccag

SEQ ID NO: 308225 - DNA, 122 bp, Homo sapiens
atttgatcggtattacgagttctggagaggaagacaagagcggcaaagcggcgttcctctcgcctcacatcagaggtgcatactacaggattcctcacagtggatgttgacctcgatcccct

SEQ ID NO: 308226 - DNA, 122 bp, Homo sapiens
acggtgctgaggaacctcacgggtaattgacgcgcctgggctggggacggggatgcggtccgcccctctcctgtcttctccttcctcgggaggggacacgctcctcgccgccccacccccgt

SEQ ID NO: 308227 - DNA, 122 bp, Homo sapiens
ctccgcagcttccggggccctgggcgatcgggccgtctcgcctcaccctctcaccaggcccgacacatctgctggccacctttcccggtagacggtaagttcctcccaggcagggccgcggc

SEQ ID NO: 308228 - DNA, 122 bp, Homo sapiens
gcacgatccccagcagcagcagcagcagcgggtactgctggctcaggctgtagtaggtctcgtagaagaggtcttcgctggggggcggccgggggctgaagaggcgggccatgatctcccca

SEQ ID NO: 308229 - DNA, 122 bp, Homo sapiens
gtcttcaactaggagtggctcctttaagactcgcccttcccgaggtctattaaggagaggcgggggcgggcgtgagcctgtagatccgcccctgactggtgattggtcggtgggcgggcagg

SEQ ID NO: 308230 - DNA, 122 bp, Homo sapiens
ctaattacgcacacctcagctccccgggggggccaggaggaaatgcccggcagagccctccgtcctaccccgtgcagcctgggtctccctccacgggcccagcctcttccactgctgctttc

SEQ ID NO: 308231 - DNA, 122 bp, Homo sapiens
caaactacagattagcccagcaaggtcctccaaatcttttgcaatacacatttggtaatacgtgggtcatttagttctggcttccaggcagttcagctaaaggcttaggctagagaattgca

SEQ ID NO: 308232 - DNA, 122 bp, Homo sapiens
agcgggctccgggacggacagagaggcgggcggggatggtgtgcggggctgcggctcctgcgtccctcccagcggcgcgtgagcggcactgatttgtccctggggcggcagcgcggacccgc

SEQ ID NO: 308233 - DNA, 122 bp, Homo sapiens
cagcagcagcagcacctgggagctttttagaaatgtaaatcatcaagcactacccctgaccgactaaatcagaatctctaagtgcccagcaataaatgttttaacaaaccctctacatctaa

SEQ ID NO: 308234 - DNA, 122 bp, Homo sapiens
tccgtgggttctccagcccctgggccgcgggttctttaaagaacaccccccgcagcggcccgcaattgtggccttcccaaaagttacttaaaactggggggtggggtgccttatggaatttt

SEQ ID NO: 308235 - DNA, 122 bp, Homo sapiens
cgtgcatatcgtgaactatgaagcgtagtctgaccacggcaaggcaagactacaggggatcgagaggccgataactgaggtccaggatgtgtgtcaagaagtgagttaaacgcttctttgcc

SEQ ID NO: 308236 - DNA, 122 bp, Homo sapiens
gggaggagccagctgagccgacttacgaatctcctatccctgccccaagaaaaagaaccacgtgtgctaacagggaagcactctttcagtgctacaggatcctctacgctctggcccttctg

SEQ ID NO: 308237 - DNA, 122 bp, Homo sapiens
tttacctgagctgaggtgaggagctgagcaccacctgggtcagccccagctgggaacgtgcgcgccagcgactggcatttttcatcacctgtgcacgtgcaagaatccccacaaaacctgca

SEQ ID NO: 308238 - DNA, 122 bp, Homo sapiens
cagcctggaccttcctttctccaaacctcaggaagctggagtcccaaggctgcctccgggcggggctgtggttcagcagaagccacaaatatttaccttggagacctcggcctggtctgagg

SEQ ID NO: 308239 - DNA, 122 bp, Homo sapiens
ccagctctctggctctgtgttctgcgctgtgggtgctatttatattcccagtgagtggaacggggggaatggcccaacaaccttgactccagaagtcatgttcattgaaaaaaacacacaga

SEQ ID NO: 308240 - DNA, 122 bp, Homo sapiens
ggctagtgttctatttcaattggaccgcactgatctatacattctctcttttatgacccccgatttacagataaggaaactgagtctcaaagaggttagggcatttgccgaggtcggccgtt

SEQ ID NO: 308241 - DNA, 122 bp, Homo sapiens
tgttttgtagaaacagttcgtgactatgagcaccagttccaccttaggctggagcaggagcgaacacagtgggcacagtatagagaatccgcagagagggaaatagctgatttaagaagaag

SEQ ID NO: 308242 - DNA, 122 bp, Homo sapiens
gcctttgcactggagtccttaagtaaggcgcgtcgtttctctgcagccgctctcggaagccggagaaactgcattcactttagcaagaagacagggaaactgaaattgataatcccccgagt

SEQ ID NO: 308243 - DNA, 122 bp, Homo sapiens
tcaagaggtgattttgcactgattcagctgccctccaaccactgattattttaggtcaggcgctagtgagcagtgcggcccatcaccaagggacagacaaaagtcaattcatctataacaaa

SEQ ID NO: 308244 - DNA, 122 bp, Homo sapiens
tcagattccatcaggaccgctgagacttccgcggtctcagttggtattcagttctagatccgatttccagccactgggatgactggacactttgataatgtctgtgtgattatcaacactta

SEQ ID NO: 308245 - DNA, 122 bp, Homo sapiens
cagagagtgaacgcgcgggccaggtggctccagggcggcgccccagggcggggccggccacgccctccctaaccctggcggagctgatgggtggctgtagcctgattagaccgcgtcagtcc

SEQ ID NO: 308246 - DNA, 122 bp, Homo sapiens
cgtgcctccccgtcctcaggccgcttcctttcctggtttccaggtcctcgtttctcccagcgctgccctccccatctaagcccaagtcgccgtgagcccgcgctgcccccttgtggccaaag

SEQ ID NO: 308247 - DNA, 122 bp, Homo sapiens
gattcatgggagcttccctcgattttaaattaaaggcagcacaggcatgtgtgggaggcccggtggggccctgtgcttcctgagagagccacaccaggcattcggtagatgtcagagaccat

SEQ ID NO: 308248 - DNA, 122 bp, Homo sapiens
aagtcaaaggtcctgcccagccctgcggtcccctcagtcaactctgtttcggagacgtaacgatttggattgccaacaagtcaagatatgttcaagcccttggatgtagggtaaagaaagag

SEQ ID NO: 308249 - DNA, 122 bp, Homo sapiens
ggcagcgggcttggccacccgtttttcagacacaacaccagagaatggcactgaaataatcgcgtgtagcagaaatgtttaaaaacattaacctctcttattttctatacttgtgaattaaa

SEQ ID NO: 308250 - DNA, 122 bp, Homo sapiens
gcatctcatctctggccattccagcctccatcacccgcctcacctccatcatcctcgcttcggggctcattctggcctccagggctttgtacatggtaggctttcattcattcgtttgcaca

SEQ ID NO: 308251 - DNA, 122 bp, Homo sapiens
ctctgggaagtgctcctgtcatgagggatgctgacaaactaaagtggcttcacagtgtgacgagtgagaaatgacataaaagaatgaaagaagtgttgtgctagagagcaatattcaaatgg

SEQ ID NO: 308252 - DNA, 122 bp, Homo sapiens
ccatctctactaaaaaacaaaaatacaaaaatatattaaaatcacccgggcacggccgggcgcagtggctcacgcctgtaatcccagcactttgggaggccaatgcgggcagatcacgggtc

SEQ ID NO: 308253 - DNA, 122 bp, Homo sapiens
ctgtttctcttaagagtcaagtcaagtaagagctgatgactgttactggcattgcccgggcgtctagtattgcagtatccccgcccctgtgaggggtgcaaaaccttttctgatttcatttc

SEQ ID NO: 308254 - DNA, 122 bp, Homo sapiens
ctgcctccgggaaccaactgccgggagattctgattggctcagccgcgtgcccacgtgaccgaccaaaaccggccaccagggtctcccaactgcctgtcaaacgcacagccctgttgggccc

SEQ ID NO: 308255 - DNA, 122 bp, Homo sapiens
cagccgacatggcgagcgagtttctggccttcacttagaacactgcgtgggtggaagccgcgcgacttcacacagaacaaccgctggacctgtcccgctttgggcgacgccctttgatctcg

SEQ ID NO: 308256 - DNA, 122 bp, Homo sapiens
tcctctctcttttatcttcttttattgcattttgggggcgaatagggggatattttaacccgggctccttgcctgttttcacagactctaagtcgtaaaactctgttacaaaggaaatgact

SEQ ID NO: 308257 - DNA, 122 bp, Homo sapiens
caggcccccatgctgactctcgtgctgggagtcggctggtccggttgccccaagaacagccgcctctacctttaggcagaagtcactctcaggccctggtttgcacatgacatcatttaaaa

SEQ ID NO: 308258 - DNA, 122 bp, Homo sapiens
gccgggatccgggtgatcatgatcactggggacaacaagggcacagccattgccatctgccggcgaattggcatctttggggagaacgaggaggtggccgatcgcgcctacacgggccgaga

SEQ ID NO: 308259 - DNA, 122 bp, Homo sapiens
cttaagtccatccccattctcttctaaccctgaaatcaaagccagtctcagtaggaaacgcgatcttgctagctgagttagagaaggagcaccagacagctcaggacaccctcctccttcta

SEQ ID NO: 308260 - DNA, 122 bp, Homo sapiens
tttcctagttacagtagcaaaacatagtaatgtctggcttttcacagcatgcaagaccttcgccacaatagtttccagctgcctgcctgcctttacagccttaaaagacgttctgtccactt

SEQ ID NO: 308261 - DNA, 122 bp, Homo sapiens
gcagttggttaagctccgcaaaagctgccaatccaggcggcttcagtccaagaggctcttcgggagcagcgtctttttagcgccgggagaagtgaggcctgggtttggggtccaagtccgag

SEQ ID NO: 308262 - DNA, 122 bp, Homo sapiens
tggctgcatttgctttgccaactccacactgggagagaagggctcacaccgagcagctgccgtccagtgttgctgagcaccgcccagcagtagcgtggagagtgatcttgcagggtgtgaga

SEQ ID NO: 308263 - DNA, 122 bp, Homo sapiens
cccccagcggttaccacccaccgccgctgaagttgggctccccctccccgctcctcaactcgcagcttccttgggactgtgtccccttccaggtccggactcctttgagccttccaggaccc

SEQ ID NO: 308264 - DNA, 122 bp, Homo sapiens
gagaatccttagtgcccagcagtgcccatatccagggcgccggcacctctggagagaccgcgtctctgcagagattggcttgcagtgatttctaataaaacagattttctctgctctcactg

SEQ ID NO: 308265 - DNA, 122 bp, Homo sapiens
aaagtctactggtatgtttcctactaataaatcatgcctgatgcccccaagtcaatgactcgatagaggaagtgagtgatgaggcaggcagcataactctgtgaatgagccaaccccagccc

SEQ ID NO: 308266 - DNA, 122 bp, Homo sapiens
cgcgacagggaacctctccggaagaaatcgcgccccttctcgcagcaggatccagggccacgacccttgccgccagtttctgtgcggccacgcccccaaccctgccagaccacgccctttgt

SEQ ID NO: 308267 - DNA, 122 bp, Homo sapiens
tctcggggccaggggagccggcacggaagcggctgtgcgcatgagcagatgaggcctagccgaggcggcgggacccccaagtttggaaagctcttttaacggtgagaacgcgttaacacttg

SEQ ID NO: 308268 - DNA, 122 bp, Homo sapiens
ctctgcctcagacccctgcatcagggcagcctgggctggcagcaggctgtggggctctcccgtcccaggcttcccctgcagccctggccagccctgtcgtgggtctgctccccacggggccc

SEQ ID NO: 308269 - DNA, 122 bp, Homo sapiens
ttgtttttttttttgatttttttccaaccatttaaaaatgtaaaagccattgttgacttgcgggctggaccaggcttagggctgggctctggtccgcaccccacactggccccgtgtgtcct

SEQ ID NO: 308270 - DNA, 122 bp, Homo sapiens
gttatggctccattatcttttccatgcggcttccatgttcacagtgaagggggaataaaacgggttggtgaagatacattagcctcttaattcagcccacggaaaccacacattacatctgc

SEQ ID NO: 308271 - DNA, 122 bp, Homo sapiens
cctacagtgatttagtcattcttctaagcagtttagatacatgaactcatttaattcacacgacaattccctaaagtacacatgattagtatcctgctcttaccctagcagagagtggttaa

SEQ ID NO: 308272 - DNA, 122 bp, Homo sapiens
tctcgcttgccctcccccagagtctgggggtccctcctgcctggtgggtcttttatggaccgacaccagtgacttctaacagatgcttctgggagggaagctcgctacgctcccgctaggtg

SEQ ID NO: 308273 - DNA, 122 bp, Homo sapiens
acgcagccacaacacgggtcggaggcagagtccagcccagcaagggtgtggcagtggagacgagggaggggtgaagctggtggttccaggaggttccgtctgggtgagaccctctgctgcag

SEQ ID NO: 308274 - DNA, 122 bp, Homo sapiens
aatataacctgatcaagtctgatgcagtctataaaggcaaggccccagcctccgttgctacggcaaccgactccgcccccacccggagagggaacctgaaacttggcgaccccagcacccca

SEQ ID NO: 308275 - DNA, 122 bp, Homo sapiens
tgaactcctgacctcaggtgatctgcccaccttggcctcccaaagtgttagggttacaggcgtgagccacggtgcctggccggggagggtaatttaaaaacagacctgctttatgccattta

SEQ ID NO: 308276 - DNA, 122 bp, Homo sapiens
agaggccctattctccggggaggtggtcctgtggccggccgtgcggcagcgcctctcccccgctcagcgcgctcccagccgcccgcactcggcgccccgctctctctgctcctcagcccagc

SEQ ID NO: 308277 - DNA, 122 bp, Homo sapiens
catgttccatgttccggttctcccactgatgggcctttgcctttaggtgctccaaatgtccgagtcctcctatgggcccggcaatgtctggtggcttcccaaagcctcactgtgctcttccg

SEQ ID NO: 308278 - DNA, 122 bp, Homo sapiens
cttcaggagtgaaggaggccacgggcaagtcgccctgacgcagacgctccaccagggccgcgcgctcgccgtccgccacataccgctcgtagtattcgtgctcagcctcgtagtggcgcctg

SEQ ID NO: 308279 - DNA, 122 bp, Homo sapiens
tagacacggatgccgcatggcgtctggtagacacggatgccgcatggcgtctggtagacacggatgccacatgggcatctggtagacacggatgccacatgggcatctggtagacacggatg

SEQ ID NO: 308280 - DNA, 122 bp, Homo sapiens
tcatgcggcggttctggaaccagatcttaatctggcgctcggtgaggcagagcgcgtgggcgatttcaatgcggcggcgccgcgtcaggtagcggttgaagtggaactccttctccagctcc

SEQ ID NO: 308281 - DNA, 122 bp, Homo sapiens
cccctctccccggctgcagcagtcccagctaggccggactgctaagcctggcccagagcacggctgacaattcacggcagcctccctggcccagcctcctgcaagagaaggaggaccccaga

SEQ ID NO: 308282 - DNA, 122 bp, Homo sapiens
tggctggggctcaggctggcctgtttgtgaatttcacaattcacagatgttagccgctctcgggctaagtaaaggaagagaatgtcaagttttaaatagcttctcccttccatcctggctga

SEQ ID NO: 308283 - DNA, 122 bp, Homo sapiens
tcttggaatcaaaggaacttgaagcgtagtcattcctaaactaagttaaaccagaactagcgctttcagcaatgatgtaatttgatctcttcgggccaccgtcgctgagcatgcgcaaataa

SEQ ID NO: 308284 - DNA, 122 bp, Homo sapiens
cctagcagtcagcccagcagcgtaagtggtgaccagtgtgggcctctttgatcctgagaccgaaggctcggccactggccctctccatttgttccttgttgccctcccttcatgattcaatc

SEQ ID NO: 308285 - DNA, 122 bp, Homo sapiens
ctcggggcagagctctctgcaggttggacatggccacggtctttttgaggtcaatcacggcgtaggagtctgagcttcgggcagggtgggtggtgggcatgggggcttgggggctcgagggg

SEQ ID NO: 308286 - DNA, 122 bp, Homo sapiens
ccgcacggatagtcactgtctcagagtgcattctccaggggccactctcgtggaggcatccggggggtcccagggcaggtgggcagcctttttcggggggggtgcggtgtgagagccggaga

SEQ ID NO: 308287 - DNA, 122 bp, Homo sapiens
cctcagcctccctgggtcacctgggctggggccacaggcagcagtgggacatgggtggcccgcccttacctgtgcccattgtccttgcaggtgcctgtgaagcatgtgtaccgtgtgctgca

SEQ ID NO: 308288 - DNA, 122 bp, Homo sapiens
gaagtcttccccgagttcctaaaatcttggattttggagaccagtcaggccttttcttttcgtctagggcataggcttcccttcaggcagtgagcagaaggaatgagctggggtagggggag

SEQ ID NO: 308289 - DNA, 122 bp, Homo sapiens
aaactgaggcgggaggattgtttgagccaaggaagttgaggctgcagtgagtcgtgattgcgtcactgacctccagcctgggtgaaaaagcaagactgtctcaaaaataaaataaaataaat

SEQ ID NO: 308290 - DNA, 122 bp, Homo sapiens
cgagcgcgcctgtggagaagccaacaggccgccagcggcctcagggcggccgggtgagtgcgccctgccccctccggtggggacgcggcctcccagcggccaggctggggactccacgcccg

SEQ ID NO: 308291 - DNA, 122 bp, Homo sapiens
tcatatgacaacattctagatttatccagcaaatctactcctctcagacgtccctgatgccggccctgaaacgccttcgcctgaaagctatgactctagaatcttagcaaagagtgccatct

SEQ ID NO: 308292 - DNA, 122 bp, Homo sapiens
ctgtggagagagagagcctcagggaatctggagctgggctcacacagccagagaaggaaccgcgttcccggatccgggcctgcaaggtttccccactcacaacatgccccccaaagacactt

SEQ ID NO: 308293 - DNA, 122 bp, Homo sapiens
gacagcagcgctcggtaagtgtttccttattggttcaaatatgtaactaatggtccgtggcggtttcaagaataggacagcagcggcttctcttggttagggagaagagggggctggcgaga

SEQ ID NO: 308294 - DNA, 122 bp, Homo sapiens
ccgagggctcacctcaggcaatgaaaagtggtgggtaacgaatggggaaaacccaaaaggcggtaaacttggctcctgctatgggagaactttcaaaacaagcgtagcagcaagacagagca

SEQ ID NO: 308295 - DNA, 122 bp, Homo sapiens
aactccagtcatgcttccaggttaatctgctgtcatcttccatcttcttggatgggctttcgtgttcagacacgtctggctgacattctcacgttacatgcggccttcccagcctttgtccc

SEQ ID NO: 308296 - DNA, 122 bp, Homo sapiens
ataagaaataagaaaatgtaattaccataaacaaaaacataaagcagacagcacagtgcccggccaaaagcgagtgtttaaggattgatagaggtattattgttatccccttcaattaatgt

SEQ ID NO: 308297 - DNA, 122 bp, Homo sapiens
ccacgtccttgatactttgtgggtgatttatttcattggctcgctattacttggcagcggcggtggctcctcaagccagcgtgggctccaggtggccccgggccgggaggcgatggccccgg

SEQ ID NO: 308298 - DNA, 122 bp, Homo sapiens
gacgtgttctttgttttcctatgggtgaggaatggttgtatgagcagttgggtttcgggacgctttttggggagaacccgatggagtctgaaggatctctaaatcaggcggaacccacggtg

SEQ ID NO: 308299 - DNA, 122 bp, Homo sapiens
cttgacttgctcattacgtaaggcatagatgaatggattcaacagtggtgtcacaaatgtcgttattactgtcactgcccagttagtgtccacagaaccactctgcgatggccgcacataga

SEQ ID NO: 308300 - DNA, 122 bp, Homo sapiens
cgccccctgccccgccctggcggccggcccccgccgtattcctccgagccgcgggacgcgcgattctgccctggcgccctggcacccccgcacccgcttcaggtcgcccccggtacccccag

SEQ ID NO: 308301 - DNA, 122 bp, Homo sapiens
tcttggtcacccagggcaacagccaattggggtcgaaatcgtcctccctgtgtgcaaggccgggttctgtccggaaccaggctccaggtgaacattcgcagggggcttgtgacgcagcgttt

SEQ ID NO: 308302 - DNA, 122 bp, Homo sapiens
gtcggcgcgcgccccactcgggaatgtggctgtcctgtcgcgaaaaagagctcttgtttccgcttcgtggcaggcttacgcattcgacccagttctctctctcctctctgcctccttcccgg

SEQ ID NO: 308303 - DNA, 122 bp, Homo sapiens
gtccgccgcggcgctgtgggggcccctctctggggctggccaaggcctgccctctgctggcggggaggtgtggagagacaggcagaggtgggagtcggggctgcactgggcgctcgctggca

SEQ ID NO: 308304 - DNA, 122 bp, Homo sapiens
aataaacagaaatgaaagtgttactcatcaaaatcagtgggatgaagcgggagccgtgctcggggtggaggggaatctggagtgccggccacacagactagagcagaagggagatctgaacg

SEQ ID NO: 308305 - DNA, 122 bp, Homo sapiens
agtccccaggccaccgctccaccttcacttttgggagtccggactcagattcccatcattcgccctgcgggaggggccctgggcattttaaccccgggagacacacgcgcctggagagtggt

SEQ ID NO: 308306 - DNA, 122 bp, Homo sapiens
tataaaacaggcaaaagtggacctttatccgatctccgctctttagaatagaggccacagcgaacaaggcaggtgacaaacgtctcccaattcggagcaaggcagtgctggaaaccggatct

SEQ ID NO: 308307 - DNA, 122 bp, Homo sapiens
agaccactaaaaccttctctatattagcaataaggctgtttcactttcttatcatttggacgttcagcagagtagcacttttagtttctttcaagaacctttcctttgcattcagagctcgc

SEQ ID NO: 308308 - DNA, 122 bp, Homo sapiens
gggtggtggcctgccacgcgctcttcttgttcttcttggacttggtgctcagaggcttctcgcggttgcagaagtccgtgtgtgcagacaggagctcctgctgcttggccgtgtcgggcagc

SEQ ID NO: 308309 - DNA, 122 bp, Homo sapiens
gcgggtgcggtagaagctgcagtgggcgctgtgcgtcgggctcggcaggccgttcacccgcgaccctcggctgtatctctgcgccttatcccgctcgtcgaagtgctccagctccatgtctc

SEQ ID NO: 308310 - DNA, 122 bp, Homo sapiens
ggctaggccatccttgatgtgtttcctgaactcggtcattttggccaggggcctgagtgccgtctcccctgccagcggtgggggttaggagggaagacatctcagtgaggctcccatcagac

SEQ ID NO: 308311 - DNA, 122 bp, Homo sapiens
tttctatgacccagagggtgggtccatcactcaagtagccagagttgtcatcgagagaatcgcacggaaggtactgggttagaacccactctggcatcgacctttcccggtaggagtgccag

SEQ ID NO: 308312 - DNA, 122 bp, Homo sapiens
ctccagcatttatggagcgcctgctgtgtgctctgcaggtatagtcccatgaccaccccccgagcatggggttatctcattcttttttttgggggcgggggggacggagtctctctctgtcg

SEQ ID NO: 308313 - DNA, 122 bp, Homo sapiens
gtcctgggttttggggtgggaatcggattccagctgtggttctctccctgcgctcccgcccgcactgccacggcggacggccaatgggcgcgcggctcggggccggcggcgtccggcgattg

SEQ ID NO: 308314 - DNA, 122 bp, Homo sapiens
tgctgccaccgccctccaggttcatctgcagcagctggtcgatggtggcgtccacagcgccgctgttggcgcgcagcacgcattcgatgatgtcgtaatccatgttggggaacatggtcttg

SEQ ID NO: 308315 - DNA, 122 bp, Homo sapiens
ttgagctggggttgggcgacgacgatgggaagtgagtgcccaccctgccaccatgatcagcgcggcgggcttaggcaggggccgtggaacgtgaggggcgcgcacaccattgtgtcagctga

SEQ ID NO: 308316 - DNA, 122 bp, Homo sapiens
aatcagtcctctcataagtagcttggctgcctactctactaagaaattttatgccacctacgtttatcttaataattaacatttatgtggcatatcggcattttcacatatttcatttaatc

SEQ ID NO: 308317 - DNA, 122 bp, Homo sapiens
atgagatttgcgtggggacacagccaaaccatatcacagggtttgtcatgttggtcaggccggtatcaaacacctggccttaagtgatccacctgctttgggctctcaaagtgttgggatta

SEQ ID NO: 308318 - DNA, 122 bp, Homo sapiens
tgtatttggagcaagaaccaaggcattagtaaactttggaaaataggcagtgaggttgtccgatagagtccatctggggaagtattttgagccagttgggtttataactatgaccctaaact

SEQ ID NO: 308319 - DNA, 122 bp, Homo sapiens
agcgatgccccgcgcaggcgcaggcgcagacgatcgcggcccccgcctcaggccgcccggcggcctcgcctcactcccaccccagaccctcgcctggttggccgctctgactcaccgtcccg

SEQ ID NO: 308320 - DNA, 122 bp, Homo sapiens
atttccatcaggtaagttaaatctcttgtatataattattttttctcttaggagctctggcgctgttaggtctctctgatgtctggaggcaaagaggggacagagatagtggcagaaataga

SEQ ID NO: 308321 - DNA, 122 bp, Homo sapiens
gggcaatccagggccctcctcgagggaagcggggtttgcgccagggtccccagggctgtgcgaacaccggggagctgttttttggagaaggctctaggctgaccgtactgggtaaggaggcg

SEQ ID NO: 308322 - DNA, 122 bp, Homo sapiens
agcatctgtgtgtatgcagtgttatctaaggacacacccacagacacggacacgtccttacgcagagaacagccgctgcctcttagtgttcaggatgatacgtttttccttaatatcatcct

SEQ ID NO: 308323 - DNA, 122 bp, Homo sapiens
ttgctgtgtattccacaaccttcatttcctttgagatggataaagcaccttttaactgggcggtcttataggtgaatacaatcatcacactctagagttttagtttaagtgaattggcctaa

SEQ ID NO: 308324 - DNA, 122 bp, Homo sapiens
ctctggccacggcgtaggggtgggatagccacccccatttcacagatggggctcccgaggcgcggtgaggtctggcagctgctgggggcgcaggcacggccccccgggcgggtgtagcggtc

SEQ ID NO: 308325 - DNA, 122 bp, Homo sapiens
gtggttttcactttttaaatggagaaaatttcagttaaattaataggataaaccaggttgcgaactggtgacctgtaggccatgtttgcactgcaaatatatttggtctgaatgatattgat

SEQ ID NO: 308326 - DNA, 122 bp, Homo sapiens
agaggccccatgggaaatgcttggggccaggcccgggatgccgttcccgggggcaggccgcggccccactgcacagatgccatcactgaacctcacagcgaggcactgcccaggaccccacc

SEQ ID NO: 308327 - DNA, 122 bp, Homo sapiens
ccgccgcggctctcggctctcgggcgccctccctctatgcctctcacgcggcggcggcggcgcccaagctctcccggactgcgccgggcccagccccggccaccccggccaccccggcgcca

SEQ ID NO: 308328 - DNA, 122 bp, Homo sapiens
actttcccattgaccatgcaaaaccttcacgaagtcagggtctgtccaccgtctaaagatcgagacctcatgttgagttctgaggtaaaatgggaaaacagttttaacagtgcagtgaagct

SEQ ID NO: 308329 - DNA, 122 bp, Homo sapiens
ttggcttgcagactgctgcctttttcctttgttctttctcttcttatgcatccctggtgtcgctgtgtgtcctaatcacctcttcttataaggatgctagttatataggattaggacccacc

SEQ ID NO: 308330 - DNA, 122 bp, Homo sapiens
tacatcaagaaaggcacggcaggatccagcacgtggacgaacaggcagcagcgggtgacgcggtggcaaggagccgccgggcgactgccgttccccaacgttagctcttccgaacaatttga

SEQ ID NO: 308331 - DNA, 122 bp, Homo sapiens
gttttgggttaagtaacttaaaggatggactgccactactgagatggggaagactgctggcgaagcaggtttgggggaaggcagtagaatcaaggcttatacatactgagtttcagatggct

SEQ ID NO: 308332 - DNA, 122 bp, Homo sapiens
agcggcagagcacaccacaggtgaattggctagagttgttgttgttgatgagcaagacctcgacaaagcggaaggctagggcagcgggcgccagcaggcgcggggcctcggagggctcagcc

SEQ ID NO: 308333 - DNA, 122 bp, Homo sapiens
agctgagcttcaagaacatgtgcaagctcaagccgctgctgaacaagtggctggaggaggcggactcaagcaccggcagccccacaagcatcgacaagatcgcggcgcagggccgcaagcgc

SEQ ID NO: 308334 - DNA, 122 bp, Homo sapiens
gcggggccgcgatggatttccagcagctggccgacgttgcggagaaatggtgctccaacacgcccttcgagctcatcgccaccgaggagaccgaacgcaggatggatttctacgccgacccc

SEQ ID NO: 308335 - DNA, 122 bp, Homo sapiens
taaggtattaaaagtagtttgtaaactttctgtgacgtatgctgagtctatccaaactgtcgggaattggagcctcccgggaaccaaacactccccaaagatcatacacctacggagttccc

SEQ ID NO: 308336 - DNA, 122 bp, Homo sapiens
aagtgacctcagcagggcatccaggtatgtcaagcatggtgacaaagtgttcaggtcagacggtctggggaaaggctcctgtgttgttgagcctgccaagttgtgggtgcagcatggtacca

SEQ ID NO: 308337 - DNA, 122 bp, Homo sapiens
agcctaaacaagagggggagtacaatcacaacactctggagattaggtgcttaaagctttcgaaaacggcagcccgctttgttactgtggccggttcctggctgggaacaggctccttttcg

SEQ ID NO: 308338 - DNA, 122 bp, Homo sapiens
gcagtccgacgagggcgacacgagggcagacggtgtagccgaatcgtagccagagctgggcggcggcgagcgcccgtgcaccttcatgtgcttacgcagcgagctggggtgcgtgtagcact

SEQ ID NO: 308339 - DNA, 122 bp, Homo sapiens
gaccctgggcgctgtacccgtctgttggccgcgaatccagcagccctcagctgttaggaccgtgctgagaagtgggtccccgaatgccctggaccacgactgtggcgtcaggccgctgccca

SEQ ID NO: 308340 - DNA, 122 bp, Homo sapiens
atgagtccccatggcgacggcaggggccaggcccaggggcgggcagtccgagtggggctgcggcgctccgggggcatccgcggcggcgtggcggtgttcgccgccgtggccgcagtgttcac

SEQ ID NO: 308341 - DNA, 122 bp, Homo sapiens
tcccaaagtgctgggattataggcgtgagccactgcgccctgctggaaagagtttttatacgttactgttatcaaacgcagtagaggagtaaagtgaattaagaaaagaaagagaggctggg

SEQ ID NO: 308342 - DNA, 122 bp, Homo sapiens
cgcggtggaggcgccccctgcaggccgcagcgcatccccagcttctggacgcactgtgagcggttatgcagcagcacgctcatatgagatgccccgcagggtgctatgcaggcccacgtccc

SEQ ID NO: 308343 - DNA, 122 bp, Homo sapiens
acacagaaaacagaagccagaggaggctctcctagcgggccgttggcctccttgggcccgcggaaggcggccctttgggagcgcctctctgcaccgtcccagctccgctcccctctcgggga

SEQ ID NO: 308344 - DNA, 122 bp, Homo sapiens
aagtaatgtaagtttgcttttagccaagtgggcccaagaaggcacccatccacctttctacgtttcatagtgcatcccttcccaaattcaaattgtcctatcccagttcctgcaacaagcca

SEQ ID NO: 308345 - DNA, 122 bp, Homo sapiens
gggctggagcgtgtctgagagccggtgtggacagggtaggcgggagccaagctcaggtggcggcgggaggacgggcgggagcagggtcttggtgtggtggatccacggtgcggggctgcttc

SEQ ID NO: 308346 - DNA, 122 bp, Homo sapiens
acctcctccccctgggccttgggccctgcagccagcagtgggcacagggctcctcagggtcggctctcatggtaatgagctctctgcatcaaaaccatttgccgaggacaaagcaccatgtg

SEQ ID NO: 308347 - DNA, 122 bp, Homo sapiens
gtggggctgtgttggcggctgggggcgtctgtcacctgggtcctgaatcagggatctaagcgatgtggactcaggccgctggaatgcctgggttcaccggcagctcagttcatatttcttgt

SEQ ID NO: 308348 - DNA, 122 bp, Homo sapiens
agcaggtgggtctcagagtgccttgaagagaggagcactgggagaaggaggaagggaggacgctcactacagggaaattaccacgaaagcaaaggcagagaagtattactagaaattaattt

SEQ ID NO: 308349 - DNA, 122 bp, Homo sapiens
gcagatgcctcccacccccaggcctgtggacaagggcagctttgtccactgtgttttaggcgggacttcctgggcctgcccaagccctgctggagaatgttttggccaacttcctcccaacc

SEQ ID NO: 308350 - DNA, 122 bp, Homo sapiens
agaggcggagggaagaggcggaggacagaggcgcggggacgcagctagcctcgcacttaccgttggccgcctgggccggggggactggggcagaggggtctggctcgtcatcctgcccactg

SEQ ID NO: 308351 - DNA, 122 bp, Homo sapiens
aaaccttttctcttagaaaaagggctcttccccttttcttcatgagatgatcagcctctgcggggggccaggaatgtttggctggctgggctgggagtgcagctgtgggcatcctgagaaaa

SEQ ID NO: 308352 - DNA, 122 bp, Homo sapiens
gacccgcaccgcaggctgcgcgcagcagaggtggggcttcacccggggccttagagagtgcggaacctccggcagctaaggcagccaccctgcctgccatagacaaatggcgactagagcgt

SEQ ID NO: 308353 - DNA, 122 bp, Homo sapiens
gaccccgaagggaggttctgacattttggtggtcactgccatgtttcacagataaatttccgctgtaagccgtccttccgtgaatcaggctccaggaatgtccgcgaggtaagtgcccaggg

SEQ ID NO: 308354 - DNA, 122 bp, Homo sapiens
gggtgttggggagaggggcttcagggtgggcgtcctgggagcggcggcacctccccaccgcgtattgtcccgggtaatcttagacctctagggtgtgccagactccttgacgagggggaggg

SEQ ID NO: 308355 - DNA, 122 bp, Homo sapiens
actggggtctgtctgtcttgtgattgtaaggcactggctttcctgccaaacagctcattgcgcagatccagggcctctctccttggacctgggtggactccaggatctcctgctgaaatagc

SEQ ID NO: 308356 - DNA, 122 bp, Homo sapiens
gccggctactccgaggagcgctgcagctggaggggcaggtacggtccggggggctgtccccgcacttaggacggggtgcgctgcggctaggaccccccaggcgcccctcggagcgcgcagag

SEQ ID NO: 308357 - DNA, 122 bp, Homo sapiens
ccttcaggaccatgcatcgatggataactagaggtgatgctgccccctgccggacatggtcgggggagacagggagtgagggaagttgtcatggagtaagaaacaattttcccctgaagtgc

SEQ ID NO: 308358 - DNA, 122 bp, Homo sapiens
gtctgattttctcctcctctttgtgtacccgacggtgttgctgtgagctcaggaccatcccggcggctgtggatgggatcatcgtgtgtgtatggccacagccctccgcctcgctcgctcgg

SEQ ID NO: 308359 - DNA, 122 bp, Homo sapiens
gggcaagtgacacctggcgtgtgggcagacagataattaaaagacagattccacctttcccgtgttctctttggttagacaaacagcagctaatgaagcttgctgacgtcaaagttgcagtc

SEQ ID NO: 308360 - DNA, 122 bp, Homo sapiens
gggagggcgggggtctcttgccagggccggggccggggacggggcgggagcggtcagcggcgacctccaacctgggagatctcagactccgacgctgaggactccgccggctcggaggccgc

SEQ ID NO: 308361 - DNA, 122 bp, Homo sapiens
tgatggttcaggcagctgataactctgtgattggtttgatagtaccatcctttacctaatcgttcctgaatctgtcactcaccaccttctatacacaaacctataattttttatcaagatga

SEQ ID NO: 308362 - DNA, 122 bp, Homo sapiens
tgcactcgctggacctgccttggggagcagcacgtgtgggtccaggctgcgaatcccgaccggattctcagggaggggttctgcaaggtgcacccggtgggggctgggagctcctccggggc

SEQ ID NO: 308363 - DNA, 122 bp, Homo sapiens
agaactaaaggaaacaagatggatactccatggagcaaggccctgaaaggctgtgggccccgaagcagtggaaggaatgacagagaaagaccagcacgcttcgccacaccaacacctccgtg

SEQ ID NO: 308364 - DNA, 122 bp, Homo sapiens
aagccacgtcggtgcccatcatcctcacctgtgaggaagtgcaggcatccccacacactccgcacccaccagtggggctgtggtcagaaagagagatgccaccaacaccgggagggtgtggg

SEQ ID NO: 308365 - DNA, 122 bp, Homo sapiens
gggaacctgccgcaaagcctcatcctggcaactatacatggcccagaggtcgcgagcctgcgctgccagcgcgggccaaggaagagcagagcccagggtggaagggcggtgcactcggcgac

SEQ ID NO: 308366 - DNA, 122 bp, Homo sapiens
tccccatcaaattttacctcctcccccaaacatatgtgcacacacaaacacatcttgctccgtagaactaatgcctttaggactcagctcaatgggacttcactgcgcttctgcactggatt

SEQ ID NO: 308367 - DNA, 122 bp, Homo sapiens
gcacttgcgtgggaacgagaagacactcatggaggagtcggcagagcaggcacagcggtgcgacgagatgctgcttctcagagctgctgtccaacctgcactcgcgtgggaacaagaagaca

SEQ ID NO: 308368 - DNA, 122 bp, Homo sapiens
agaggctggaggatctttatgtcctcccaggaggaatgggagaaaggaaggaactggagacgtgggaaacacatggaataatcagttgagtgaggtccctgtggaagaggaaggggatggga

SEQ ID NO: 308369 - DNA, 122 bp, Homo sapiens
cagtcacttcctactcaccttgcctctggcatccaaagatgagaacttttgcccatacctcgggaacaagggctggataaaagatggatgtcaacaactaatagcccggttctcattatctc

SEQ ID NO: 308370 - DNA, 122 bp, Homo sapiens
ctctgcccatggcatcacagcagagcagctaagaaggtcgcctgtagaatcagaatgcctcgatctaaaaccctgccatgccatgtgtttatgtatattgttggccaagtttattagcttcc

SEQ ID NO: 308371 - DNA, 122 bp, Homo sapiens
gatggtagcaccaatgacaagattaaggtcagagacctcgtgatgccccgctagccaccacgatttttctgttgccttctgttcatcccacgtagatactatctggaagccccctccccaaa

SEQ ID NO: 308372 - DNA, 122 bp, Homo sapiens
gggcagcgggaggaggcggcgggaggaggcggctgtgcctgggtctggtttgaactgacacgtcgcattttggtcacaagccggtggttgtggagaccttctttggatacgacgaagaggct

SEQ ID NO: 308373 - DNA, 122 bp, Homo sapiens
tcaacttcgagagcgtaggccccacctatcgtgggtcgagttgcttggcggtcgtggttccggaggttcctcgggatgtcggtggccttcgtaccggactggctgaggggcaaggcggaagt

SEQ ID NO: 308374 - DNA, 122 bp, Homo sapiens
ccgcaactactacgacccctcctcggcccctgggaagggcgtggtgtgggagtgggagaacgacaatggctcctggacgccctacgacatggaagtgggcatcaccatccagcatgcctatg

SEQ ID NO: 308375 - DNA, 122 bp, Homo sapiens
gctcccgccgctcatcgccggccgccgccgcccccccatcgcctccgcgccccgcccccgcgacttccgtgcagccctagccacttccggcgcgcgatttcccgtgaagtcactccgtcccg

SEQ ID NO: 308376 - DNA, 122 bp, Homo sapiens
cccactgatctcaaacgccagggcccctcctcacccgccacggtgccctccctactccagcgcgggcccccaactctagccagggcccccaactgcagctctattccttacaaactccaccc

SEQ ID NO: 308377 - DNA, 122 bp, Homo sapiens
ttaaattgttctgagtttatttaaattgctgatgtgctttagggagtcgaaaacattgatcgttgcagagagttcagaaacctttaagagtagtgcttggatcattctcgtagagctattag

SEQ ID NO: 308378 - DNA, 122 bp, Homo sapiens
tcgggatggagaacctggcacgctacgtttcgcgggctctgagactcgggtggtgagagtcgccgagatgcgcactgggaagagaaaagagccaggacgcacctgcatttatggcgccatcg

SEQ ID NO: 308379 - DNA, 122 bp, Homo sapiens
agcaaccaaccccattggctggctcgaggagggggctcgcgagacagcgccggcccccggcgcgagactcccagtccagtggccgcctggaaattgcggagtggaatgcagccactagagac

SEQ ID NO: 308380 - DNA, 122 bp, Homo sapiens
aagttgagggtttgttttccccgagctgagcgccttcctgaaggctgggagacatcctctcgtggtctgcacagagcaacagctctggcctctgctggctctgccccacgtgtatagggctg

SEQ ID NO: 308381 - DNA, 122 bp, Homo sapiens
gctgaattagtaagtttttctgtttcccccttctacctttctctctgaaaccaattcccacggagtagaaagtgctgtgctgatgctaataaaatgcctgtggattaatgcactttgccctc

SEQ ID NO: 308382 - DNA, 122 bp, Homo sapiens
cagccgtcacccctccacagtctcagcgggctccacccgcacgtgtcagcgcccgcgacccgggatcctccagaaccacaatttgggagtgggccggtttagggtcagcaaaaacgctgggc

SEQ ID NO: 308383 - DNA, 122 bp, Homo sapiens
agatgaggtccgcgtagccccgctggtgcgagaaggcgtaggccgagcgccgcgttgacacgccccggcggaacacctgctgccgtcgctgccactgctcctccgccttcaaccgcttgcga

SEQ ID NO: 308384 - DNA, 122 bp, Homo sapiens
cgagtttctacttctgtgcataggaggaggaattcttcttatttagattacatttattcacgcactactttcagagattcagtcgtctttatttatttgattccagtgtgctcttcaaatga

SEQ ID NO: 308385 - DNA, 122 bp, Homo sapiens
aaggagacgctgccctccgggaatttgcagccgcttgcagaggcggccccttagcagctgcgcatccgggtggatagcggcgcttctgcccgcccagtgcctacccgcctctccgagagaaa

SEQ ID NO: 308386 - DNA, 122 bp, Homo sapiens
ctcaagcgatccacccaccttggcctcccaaagtgctgggattacaggcatgagccaccgcgcctgaccagagtcacttttgtaagggcactaatcccacacatgaggctccaccttcacga

SEQ ID NO: 308387 - DNA, 122 bp, Homo sapiens
cgggaggagcaaagggtggcttgtcccgacagtttgagctgttgtgcatgcatttacacacgcattaattccaaatgagtcagcacagtgtccgagacaggtcctgggctccagtgagcaca

SEQ ID NO: 308388 - DNA, 122 bp, Homo sapiens
aagtagagatcaaaaggcaatgcagatagactgacagatttcgcctgaagaggggaagcccgaccaggtaataaaggagtaagaggaaggatgttaaggacaattttaggaaacagataatg

SEQ ID NO: 308389 - DNA, 122 bp, Homo sapiens
gaccgggccgggactcccaccctggcccagctgctctcccgacggatcccgcctccctcccgtgtggggaccctcaccccagcccagactccagatcccaggaattcagcccgaagcggaga

SEQ ID NO: 308390 - DNA, 122 bp, Homo sapiens
aatcatgggatacgatttaaatgagggttggaggaggcatttgaacagtgtcactgagaacgtggcatgacgctgtgtctgaccagcaaatgcgaaggttttatgtggcttgtggacccgtt

SEQ ID NO: 308391 - DNA, 122 bp, Homo sapiens
agcggcctctctccgcctcaggtgagtcctgctcgacgcccaaggcccaacggtcagaaccgcctctgcccgccggacccagcgaagctaggggaacaaatcccaaaaacagttcgggcctt

SEQ ID NO: 308392 - DNA, 122 bp, Homo sapiens
cagtctggagtgcagtggcacaatcttggctcactgcaacctccgcctcccgggttcaagcgattctcctggctcagccgcccaagtagctgggattacatgtacatgccatcatgcctggc

SEQ ID NO: 308393 - DNA, 122 bp, Homo sapiens
cattcatgtccagcctccctcctgcctccccagactgagtggtgccctcagacggaaacgcggtattttcagataaacaccagaggcatgactgatgtggcccttgccttgtggagtgtgat

SEQ ID NO: 308394 - DNA, 122 bp, Homo sapiens
ccagccggccaccaccgcagaagacaccaggccaacgcctacaataccagtctaacgtctcgttcacaagtgtgtgtattcagacgagagccatcagcaggacacgggagaaagaccacgcg

SEQ ID NO: 308395 - DNA, 122 bp, Homo sapiens
gggctggccgtcagggtgtctgtgtgtcgggtggagttgggtgcctgggaccgcagtccccggacagcctgtgggctccacccccgtgaggtctccagaggcagggctttccctgtgggatt

SEQ ID NO: 308396 - DNA, 122 bp, Homo sapiens
agcaggtccccgcaccgcgcgggctgtgcgcgctccgggcaacatggtccagtgccactacggtttgggcgctgctccaggagctcctgagtctagatctaaccccacttggtccccatgga

SEQ ID NO: 308397 - DNA, 122 bp, Homo sapiens
agatgagaggtgtctctcgcaggaggctgggctgtcttctggagaggggcttgctggggccgcaggtggggagcttcggcctcccagacccctcccacccacgcaggtgggacgaagcgagg

SEQ ID NO: 308398 - DNA, 122 bp, Homo sapiens
aaatttatttcacctcagagagtaaacagatatattggagccccaagggttcatgggtagcgtatttacaaaggagcctcctccgccagcccgtgccaccgctgctaatgagagcagtcatt

SEQ ID NO: 308399 - DNA, 122 bp, Homo sapiens
gtgtctgcttccatcaaaatatttgtcacattatctgaggcccaggtcgggctgctccaccgctcctccttcgccctcctttatccggcccaccggggaggattcagccattcggaggcgac

SEQ ID NO: 308400 - DNA, 122 bp, Homo sapiens
ttcaagcgattctcctgcctcagcctcccgagtctctgggattacaagcatgcaccaccacgcccggctaatttttgccatgttggccagactggattagtgcaatattgtttcatagccat

SEQ ID NO: 308401 - DNA, 122 bp, Homo sapiens
caagctgccaatcaagatctccttaagattatttagcagggggaaggagagaagagggggcgatcacttagtgagctgagcacaagaggaatacctcgcagctttagagaatgtttagaggt

SEQ ID NO: 308402 - DNA, 122 bp, Homo sapiens
ataattaccaatcaaaggaacggccaggggagcaggctctgaagctgcagcctggcctcccggtcacttctccccgactctgcctctgatgaacgctctgttcccaacatctcgtcaactgg

SEQ ID NO: 308403 - DNA, 122 bp, Homo sapiens
aggaggcaagatgcaaagctcagcaaaagctggagtcctggctgtcctcaggaggtgtgacgttgcctggaaaaaaacagcagcaaggtggaaccagggcatttgaaccagctggtgccaag

SEQ ID NO: 308404 - DNA, 122 bp, Homo sapiens
accctggcacccccgcgctcttccgccccggcagccgggcaaccccgcgctcttccgccccggcacccgggcaatcctgcggaggtacagccacagctggacagacgcctagagcccaagag

SEQ ID NO: 308405 - DNA, 122 bp, Homo sapiens
aggagagcaacaacacccggggatcaagggccatcctcaaacaaaagtgtgattataacgcgttctgcacgggctataaaccgtccccagctccggagagcagggtgaccctcaccagcgtc

SEQ ID NO: 308406 - DNA, 122 bp, Homo sapiens
ccagacaaacgcagaatgcatggctgtctaatcgcctgatatcagccttcagttgagtgccgctttggccatattccctttgtagggtgcaacttcactgaagaaatcaaccccaggagtta

SEQ ID NO: 308407 - DNA, 122 bp, Homo sapiens
tcattgcaggggagagaacagaataaagacgggtacattttccatctcacctctgaacctcggttaggaaaacgctgtagccctgactagtgggctcaagggccgactggaaaagggcgagt

SEQ ID NO: 308408 - DNA, 122 bp, Homo sapiens
gttccgcagtcccggcctacttgctgccaacacatgccccctccgtgccccgccctcgcccgccacccttgccgcccttacccagagctccttgtacgccttctgggtggggacgttttccc

SEQ ID NO: 308409 - DNA, 122 bp, Homo sapiens
cgcgatccgcctgcctcggcctcccaaagtgctgggattacaggcgtgagccaccgcccccggccgcacccagttcttaataaggttatgtttacaagtgtaaagataccaggcggagaagc

SEQ ID NO: 308410 - DNA, 122 bp, Homo sapiens
ctctgcacagtaatccagggaagcatcttcttcaacgggacgcgagccgctttctcctgtcgctgtgggtttcatttgtggcgacgtctctgcaacatccatttttccctgagtttctttct

SEQ ID NO: 308411 - DNA, 122 bp, Homo sapiens
ttctttctagatggggtttcgccacgttgcccaggacggttttgaactcctggggccaagcgatctgccttcctcggcctcccaaagtgctgggattgcaggtgcgagccactgctcctggc

SEQ ID NO: 308412 - DNA, 122 bp, Homo sapiens
agcctgggcgacagggtgagactctgtctccaaaaaaaaaaaaaaaaaaaagatgcaagtcgacctagacctgtctgctccagagctagagatcacgtgcttgggcttgggaagcaagtgtt

SEQ ID NO: 308413 - DNA, 122 bp, Homo sapiens
agtttcctggccaggaggaagagcccccatccttgctggaggagggaggcgcgggatttccgggcattcttctgcacaatggcccagccatttctcgaaaggtccactggtgtggacactcc

SEQ ID NO: 308414 - DNA, 122 bp, Homo sapiens
tagaaaaatcagtctagcagaggccagatggatggagctgaggaagcaggcactgatgttcgaggagtttgaaggctcttgcagaagtccaggcagcatcatgaatgagtcatctcagcttg

SEQ ID NO: 308415 - DNA, 122 bp, Homo sapiens
ctccccgcccccctctcctgcccggtcggcctcgggagcctggtggggctcgcgccgcgtcgggacaggtggacttctccaggtaatctgtggtctcaggctcgtcactcggcgacctgctg

SEQ ID NO: 308416 - DNA, 122 bp, Homo sapiens
gtttcccgctccactgccagggagcaggggtagtggggcgcaggccctgatcagttgctgcgtgttcccataggaaggcccctgcatcattagaatttgacacttttgaaaagtaacctaag

SEQ ID NO: 308417 - DNA, 122 bp, Homo sapiens
gtccttaagacggcaggaagcaggtgccctccccagcgtcacttctgctaaggagggacccgtgttgccccaccaggcaagaatagtcagagtgacccatgtatctgggaagactctagtct

SEQ ID NO: 308418 - DNA, 122 bp, Homo sapiens
gaatcagccttaagtatttgctgagcattgagtatgtacgcagtacagagtttgtggtaacgtggaagattggaaaaaaagaaacaaacacataaaaatgaaaatgcaagaaataggatgtc

SEQ ID NO: 308419 - DNA, 122 bp, Homo sapiens
cccatcttcagaagacaggtggacggggacgatgggcacctgcttctcttcccggagaggcgtggtctccacctgatgccaccgctgctcgatctccacgtggacgttatgcgtcttgaggt

SEQ ID NO: 308420 - DNA, 122 bp, Homo sapiens
gccctcagggttggagctgtatttgcggtagctgtttcttagctcccagcaagtccggggcgccccggtactgcagtttgccaagtgttttcacaaaccttagttcataaacctctttcaaa

SEQ ID NO: 308421 - DNA, 122 bp, Homo sapiens
cagggcagcagcagactccgcccctactaaagaattcaagaagacgttctctttcctcagcgctttgttaaacaaattcttggagagggcgagagtggtgactaaagagaggagcctttcct

SEQ ID NO: 308422 - DNA, 122 bp, Homo sapiens
cccccagggcacaagaggccgggggacccctgcggtcgcgcgcgcgcgagggggcgggggcgggggggacacgagtttatttaaaaactcgtgtccggggagtttatttaaaactcggaagc

SEQ ID NO: 308423 - DNA, 122 bp, Homo sapiens
gtgtctagtacagtaatacacggccgtgtcctcggttttcaggctgttcatttgcagatacgccgtgttctttgaatcatctctggagatggtgaacctgcctttcaccgacgcagcatatg

SEQ ID NO: 308424 - DNA, 122 bp, Homo sapiens
tgactttccggagcagcgctgtctgctggaacattctacactgatggaatgttctagatccgcgatgcccaaatcggaagcctccagccacatgtggctatagagtgctcagaatgtggctg

SEQ ID NO: 308425 - DNA, 122 bp, Homo sapiens
gggaacattattgtggtggaggcaattatgagggtagcatttctttcgagacaaaacacccgtctgggaaggccccaaggtcagcttatgaaggaccccacttgcaccccaccccagccatg

SEQ ID NO: 308426 - DNA, 122 bp, Homo sapiens
tgctgtgtaggtctagaccacagttcttttgactggttgaaggaaaatgctatacttaaccgtagcatgtttgttttaccccaagtgctggttagaaggctagcccattgtgctgataagca

SEQ ID NO: 308427 - DNA, 122 bp, Homo sapiens
ctgtcggtgatctccgccacctcctctgccggccgcctgctgccgccccgggagcggcttcgggaggtggccttcgagtactgccagcgcctcattgagcaaagtaaccgacgtgagtcccc

SEQ ID NO: 308428 - DNA, 122 bp, Homo sapiens
tccagagggcgggatgcaggtattgcgaagaggcacacgctccgagaggaaccaccagagcgtgggctttgggcgaggaggggtctcctctggttgggggagatctggcaggcttgggggag

SEQ ID NO: 308429 - DNA, 122 bp, Homo sapiens
tgaaggtgaagtagaagatagaaaggctaattctcaggttcaatcagcctgtggtcttctcgcatattgtgaacagaaagaatactcttccaattgtacaaaccagtgcaagggccagagag

SEQ ID NO: 308430 - DNA, 122 bp, Homo sapiens
ctgtggtcctgggcgggctccggggcctctgcatttggtggcatggtgtgacagtgcccacgtcctgatttgggcaggtcggtgcaggctatccgggacagcgtccttgtttttaggaaacc

SEQ ID NO: 308431 - DNA, 122 bp, Homo sapiens
gtttgctcagaattttagtatattgctattcctgtccctaagaaatactgcttctctccccgctgcttccccggtgtacataccatactgcaacaacccagcttaagaaaattgatttttga

SEQ ID NO: 308432 - DNA, 122 bp, Homo sapiens
tatgtgctgcacacgtttctatttctaccgtggtaaccttaaaacaccaaggataaccagcggattcttaattaatgacctcctctgactccagtgatctgtccagggtcatgtcccacaga

SEQ ID NO: 308433 - DNA, 122 bp, Homo sapiens
ttcccagcaagtggaaagctagctatggaactaggcagttacagtacagtgtgataacaccggtcatcaaacccaagatgccttctgttgtaagatgcatcattggccaggcgcagtggctc

SEQ ID NO: 308434 - DNA, 122 bp, Homo sapiens
ccgtggtcaccacctggcacattcccgttctctgtaccccaccagtctctagggaatgctcgggaacacccagtttctgatgcaccccacagcaagacccccagtctctgtaggaccagccc

SEQ ID NO: 308435 - DNA, 122 bp, Homo sapiens
aacccagctcttcaacttcctttcaatctccagaaaaggctctctgcgtgctaatggtaacgtggctttacagatttttacccacttcaaatatggccgccaagctccgttctcttttaccg

SEQ ID NO: 308436 - DNA, 122 bp, Homo sapiens
cctacaaaggggatttctcatgagagccagtcacacgagggcagagactttggttatcctcgccctggtagcttcagcatctgcgctgcatgtggtaggaggcttgatcacttctgaacaaa

SEQ ID NO: 308437 - DNA, 122 bp, Homo sapiens
cgtcaagggtgccatttcgtgtaaggctttcctgggctgaagtgttctctcaggaagatccgcgtttttcagatgaacgccgaggcctggagacatcgaacagcccgcccgaagcggcccgg

SEQ ID NO: 308438 - DNA, 122 bp, Homo sapiens
gctgcatgacgactactcccgccgcgtctccaggagcactgagcaggacagcaggcggggcggggcggtcatgcatgggaccactgcaacctgcaccgtggcccccggtttcggctcagcca

SEQ ID NO: 308439 - DNA, 122 bp, Homo sapiens
ccccagcaggaccagctcagggctgggctctcccacagtccaggagagcccacggtgctgcggggtcgtaggaccttggcgtcaggccactccattcccaagttcccagggacccctgccct

SEQ ID NO: 308440 - DNA, 122 bp, Homo sapiens
tatctcccttagcatccccttcagcctttctcttgggcatggtggcagtggcgacagtggcgggaggtaggtgctggatgcaggatgcagcggcacacgggctttggtctgtcggggggtct

SEQ ID NO: 308441 - DNA, 122 bp, Homo sapiens
aaagcctgcttaggtagcattttcatgaaccagtaatacccaccactttatcccctatagcgtttcccgccacagctccgctccagctgatatccctttatatttcctccccatttcccttg

SEQ ID NO: 308442 - DNA, 122 bp, Homo sapiens
ctcccaggttcaagtgattctcacgcttcagcctcctgagtagccgggattacaggcgtgcgcaactacgcccagctaatttttatactttttagtagagatggggtttcaccctgttagcc

SEQ ID NO: 308443 - DNA, 122 bp, Homo sapiens
caggcttagggaatattgacccctggtggccagtgaggaaattcagaggcggccagaggccggcacttaccgttaaaaatgcttaactttattcgccacacgtccggggtaaactcgcgagg

SEQ ID NO: 308444 - DNA, 122 bp, Homo sapiens
tgcccctgctggaaggaagggatttgccccgggagagcaaacttctgactccgcctgggtcgctgactccgcgcggccgggcgggagggaggtcgaggaggccgctcgcacaaagccgcgga

SEQ ID NO: 308445 - DNA, 122 bp, Homo sapiens
cgaacgggggagctctcgggtgtgatgtagcgcagggcctcctcgtcctgcctctggatgcgagagttggggacccatgccaggatgagggtggctcccagcatctcatccttctccatgta

SEQ ID NO: 308446 - DNA, 122 bp, Homo sapiens
tgaattctgctgtgtttgcctcctcattctttctactttcttttgtcatgataacatcagcgttgcctgtcttcctattaaatcgcatctctcctcattaatctttctctcttagccaatga

SEQ ID NO: 308447 - DNA, 122 bp, Homo sapiens
gatttacacgcagttctcaactttacgtgacgtgactagggagggaattgacggtcgcaccgtctacctagcccaaacggggtcacagcaggacaaggaagtagccgatctcccagatgcgg

SEQ ID NO: 308448 - DNA, 122 bp, Homo sapiens
ccaggaggccactgggttccctccggcagcctgggcctggtgcatgttgggagcagtaagcggcctcccgccgcgcttcattgttaagaccgctaggccaggtagcccgcgcgcatgccaag

SEQ ID NO: 308449 - DNA, 122 bp, Homo sapiens
cttcctggactggttcgtgccggtctacttggtcatctcggtcctcattctggtgggcttcggcgcctgcatctactacttcgagccgggcctgcaggaggcgcacaagtggcgcatgcagc

SEQ ID NO: 308450 - DNA, 122 bp, Homo sapiens
aactcccccaggctccccgccgacccccgcgagacgcatgcgcggcgctctcgcccgctgcgccggtcccagcttcgagcgcctctatggcccggagacgcagcttctctggcgggcccggg

SEQ ID NO: 308451 - DNA, 122 bp, Homo sapiens
cccgggtgggggtcaaaggtggggtctttttaatgtctccaccctgaccagccaaagatgcggctctgccattaagctactgtgtgaagttttttttttttgtttttttttgtttttatttt

SEQ ID NO: 308452 - DNA, 122 bp, Homo sapiens
aaaaaaaaaaaatgcagtatcggttaaggaagttgatggtgagaggttcatccagccctccggaatgcccggcgtgggaaaagcagcagggaaaggtctgcgcgtcaggctggtgctggggt

SEQ ID NO: 308453 - DNA, 122 bp, Homo sapiens
ggctgggttggctccgccagctccccctgaggaggacgaggaggaggaggaatgattctgcgggcagtctgccagattggcaatttgaaacgcactgtctgtgacggctgctgaggctgctg

SEQ ID NO: 308454 - DNA, 122 bp, Homo sapiens
ggcaggggtctgacatctggacggagtgggaaagcagcctcgcatcctgccctggggagtcgggaggagcccagttccatccagctgtgcaaacaggaggaggaggaggtcccaagcctacc

SEQ ID NO: 308455 - DNA, 122 bp, Homo sapiens
tgcccactatgagacaggcacaatggcgagagagcaaaccctgctggttcctcaggctcccgtagcctctctgtggggggcctcactgttaggaagaagcccaagacctagagctagaggaa

SEQ ID NO: 308456 - DNA, 122 bp, Homo sapiens
ttcggcagccccaggtctcccgggatcttcctcggtgtcctgcggaggctctggctccagcgtgggctccagcgcaggctgggcttccggctgggcttcagcgctccggccaggcccaaggc

SEQ ID NO: 308457 - DNA, 122 bp, Homo sapiens
cgtctaacaactttggtgcttggggaagcagttaactatttgaaacccttaggccctcttcgtcccccaaacagagaccctgtcagcatccgattcgactccctctcctaatgtagggcact

SEQ ID NO: 308458 - DNA, 122 bp, Homo sapiens
tgagaaaaagaaaagtcaagtggagcgcccactgccccgcctgcagaaggcgagtacgcgcggaggagactacaggccccagaatcctccgcggttccccttgcctggggtcagtctcctag

SEQ ID NO: 308459 - DNA, 122 bp, Homo sapiens
gctgctgtcgaatggtggggaggagccggtttgctttgagacatcttttctcaggttggtcgatgaacaggcatgaaacccagggtgtggagaggtccccgtcccgcatcccccatgcatgt

SEQ ID NO: 308460 - DNA, 122 bp, Homo sapiens
aaagacagttcaatgtcttccttaagggcaatttttaaaactttatggaaaactaggaggcgatcagcaagggtcagaactcacaggtttgcaggcaaaggagcaagatccataggtggtgc

SEQ ID NO: 308461 - DNA, 122 bp, Homo sapiens
gttacagtgcagggagccgggcttcccgcaaagccaaaaacttacataagcagctgcagccgcctcccctgccccgggcagcccgacaatggcggctgcacgacttccttgttgcaagcttg

SEQ ID NO: 308462 - DNA, 122 bp, Homo sapiens
tttgagttttactgtagccagtgccacaaacaaatcaaccgccttgaggatctttctgcccgcctgagtgatcttgaaatgaataggtaactgaccagcgcctggccttgctgtctgttccc

SEQ ID NO: 308463 - DNA, 122 bp, Homo sapiens
tgaatttttttagatatatacctttctgtttttgtttttttgccactatactgttttccacggtggcacccaatttgcattcccaccgacagtgcacaatttctccacatcctcatcaacac

SEQ ID NO: 308464 - DNA, 122 bp, Homo sapiens
cgcaggaggcggtggcgggggtggaggctttcctggtccgaagccgagtgcggttgggggcggtggtgggtcagcctgagccccaaacagtgccgtgaaattctccatcgtaccctccgccc

SEQ ID NO: 308465 - DNA, 122 bp, Homo sapiens
ttcccaatctttttagtgtcaaactcctggagcattcaatttcctgcaggcaattcctgtcgttttcatggatgcctttttggagttccgaagtcagttggcagtcagggtggtgggcagga

SEQ ID NO: 308466 - DNA, 122 bp, Homo sapiens
gggagcccacctctacgtggtctgtcccgaattttctgcgcccatcaggggcttgcgctccgggatggtgcctttgaagaaagctgccacctccaggaagcctctggcagcagtccgggctg

SEQ ID NO: 308467 - DNA, 122 bp, Homo sapiens
tcaaacgtgctgtacttgatgttgtcgatggctggcagcacgatgcgacgccggtcctctcggatccgcgacagtgcgggctcggccctgcggaggcacagctgtgaggaggggcggcccca

SEQ ID NO: 308468 - DNA, 122 bp, Homo sapiens
gctgcgggcccgcgaggccctgttccccgtgcacagcgtggccacacccatatttggcaacggcttccgcgccgactccttcagcagcctggccagctcctacgcgcccttcgtcgggggga

SEQ ID NO: 308469 - DNA, 122 bp, Homo sapiens
atccgtcacttcggcgatcggcagttgctgcagggcatgacttccaagatgaacagcaagcggatttgtaggggtttctgctgtggttctgtaattggcaaggtttatgtgtaattgagtgg

SEQ ID NO: 308470 - DNA, 122 bp, Homo sapiens
gtggggttcggctgagagaggccacagtttcatctttgggaagctaccctgggccggccacgcgccgtgagccggactggcgacgcccccctgcctccaccgtgctccttcacccgagaaat

SEQ ID NO: 308471 - DNA, 122 bp, Homo sapiens
ccccacagaggcagaaagcccctttcccacttagcactgcagaagctctagtcctagctacgtgggaggctgaggcaggaggattctgcttgcctcagcctcacccacttcgtatccctagc

SEQ ID NO: 308472 - DNA, 122 bp, Homo sapiens
ggtggctagagtgcggaagtccaaagggaaatatgcctacttgttggagtccacgatgaacgagtacattgagcaaaggaagccttgcgacaccatgaaagttggtggaaacctggattcca

SEQ ID NO: 308473 - DNA, 122 bp, Homo sapiens
gtggctcccgaggagcaccccatcctgctgaccgaggcacccctgaaccccaaggccaaccgtgagaagatgacccggatcatgtttgagaccttcaacaccccagccatgtacgtggccat

SEQ ID NO: 308474 - DNA, 122 bp, Homo sapiens
tgaatccccaccgggcagaggagccggcccaggtgacacagccctgcctagtgcagccagcgccttcgcccggatgtctgctgcggagcgtaatgacgcgttccagggacttgctccaggcc

SEQ ID NO: 308475 - DNA, 122 bp, Homo sapiens
tcccctctctacagttttgtctctgaggtcacaaaacctgtggcccccaagacacacatgcgcacacacgcgcgtgcacacacacaccccacacatttattttttaatctaggggctcaaaa

SEQ ID NO: 308476 - DNA, 122 bp, Homo sapiens
ggccccctcggcccaggagctacgcgagctcggattgtgtttccccggcgaggacagggacgcgcgcgggcggggagcaggggcccggtggctccgacgccggaggcttgcggcccagggcc

SEQ ID NO: 308477 - DNA, 122 bp, Homo sapiens
cgcgctggggcagtgaggtttgtcggggcgggcgctcccgagaggcgccagcgggcagggcgagtggacatggcgcacactgctgtggacacggcatctcgcacgcccccgcccccgaggcc

SEQ ID NO: 308478 - DNA, 122 bp, Homo sapiens
acctcgtgatccgccagcctcagcctcccaaagtgctgggattataggcgtgagccacagcgcccggcctatcgtgccctttcaacagatgaagaaactggtgagtttaaggaactgaccca

SEQ ID NO: 308479 - DNA, 122 bp, Homo sapiens
gtcggcggtacaattggctgaggcgctgggccttgggaagcattccccgacgggattggtcgtcgctctcgcagagcccgcctcccgcagtacaagcggcccccgggtcgggtgggaggagg

SEQ ID NO: 308480 - DNA, 122 bp, Homo sapiens
ccggcccaggaagatgtaatgttttaagactttttaggatcgcacttattcaaacccctgcgcatcctccccatgtcgtgagttcacccgtcttagccccgaatccaaccctggtatagctg

SEQ ID NO: 308481 - DNA, 122 bp, Homo sapiens
gcccgcaaggccatttcctcttctcaccgtcgcaggcaggcaaggtccaaacaccgggaacggcaagaggatgcgttagccactcccgtgtcgctagcaccggtttgacaactgaggcggtt

SEQ ID NO: 308482 - DNA, 122 bp, Homo sapiens
gacatgaaaagttgtaaacatctctctgaaaataaactaaattaagttgctttatacttgcgtgaccctcgattggttttttttttttttttttctctttgggtcagcaactctcaatagaa

SEQ ID NO: 308483 - DNA, 122 bp, Homo sapiens
accgtgtccccaagctggtgcccttgctgtggctgtgctggctgctgcgcgcttgctaaccgagcttccgtctgtctctccccctctccgcgcagccctggggcccgactcctgctctgttg

SEQ ID NO: 308484 - DNA, 122 bp, Homo sapiens
ggggccctcacgccagtgcctctacttacgtcaccctcagatctccacacaggcgcacctcggccactagtctgacccccagcctcgctgagcccctgctcaaaagcgctgtttccaggcct

SEQ ID NO: 308485 - DNA, 122 bp, Homo sapiens
gggccgtgtctccctgcgtcagagctgggcctgaagataatgggcccactgaggtgcaggcggtggacagacccaggaagacctcgtgggtttcccaggaagacagagactgggagccattc

SEQ ID NO: 308486 - DNA, 122 bp, Homo sapiens
gcctctgcccggcatccctttgctgacgggtgactggaacggaggagacgccgcgcgaagcgcagggccccagagggacacatgcacagaggcgcacacacgggtcaggcaggaggcgcaga

SEQ ID NO: 308487 - DNA, 122 bp, Homo sapiens
ataaataaatttacataaaggacatatgacttcatagcatgtctatcctttgtgctggctcgtttccccacctttgtagttctgatatctatccatgctgatattggctgttcattcatttt

SEQ ID NO: 308488 - DNA, 122 bp, Homo sapiens
tgggaggctgggcactgagccgcagattctcatttctcaaggccactctgcgtagtagggcgctgctgccgccacagtgggtaccttaggggtggcccccagtgctcatagccagcgcagtc

SEQ ID NO: 308489 - DNA, 122 bp, Homo sapiens
accctctcccagcgtcacggctatgctgggcgaggtgacccccggggtcgtagctgggggcgtcggcggtgcagacaggggatgccggcagagattggagcccggcttggctgtttcccggg

SEQ ID NO: 308490 - DNA, 122 bp, Homo sapiens
gaagcaggaaggagggcggcggaggctccgctctcggggagtttgtgggggaaccgcgagcggcgtagcggatcccggagcccggcccccgccgcccgcccgtccggctgcctgccccgccc

SEQ ID NO: 308491 - DNA, 122 bp, Homo sapiens
cctgtaacggaggggcaggagtgggccaccgtcctgtaacggaggggcaggagcggccaccgtcctgtaacggagggggaagagcgggccaccgtcctgtaacggagggggaggagagggcc

SEQ ID NO: 308492 - DNA, 122 bp, Homo sapiens
gtccttgtctcagaagacatccgaggggagtggtatgccggaagattgaatgcggagcgccggccccgcacgtgaatgacttagagccccaggtcttcagggacaggcagtgccttcacatc

SEQ ID NO: 308493 - DNA, 122 bp, Homo sapiens
ctcctgggttccagcgattctcctgcctcagcctcttgggtagctgagattacaggcatgcgccaccacaccaaggctaatttttgtatttttagtggagacgcgatttcaccctgttaacc

SEQ ID NO: 308494 - DNA, 122 bp, Homo sapiens
cttatttgcacaacctcttccagctcagaccagcccctgggctgggacacccgtgtggcacgtcgcccacgctgctataaaaggggtcccgcgcgacttccaaactcagcgccaacccgcag

SEQ ID NO: 308495 - DNA, 122 bp, Homo sapiens
gcgtgagggagacgaagggacttccgtttccttcacctaggctggggccaagccgcagagcggagttggcatttccagattggggctcgggccgcgcctcctccgggaccctccccttggac

SEQ ID NO: 308496 - DNA, 122 bp, Homo sapiens
gggaagcgtgtgcaggggccaggagcgccaggctgctcgggcttcccggcccccgcagcccgccaggagctgtggccccgctcgtgccaaggcagaggcctgccctcctgctgctggcgctg

SEQ ID NO: 308497 - DNA, 122 bp, Homo sapiens
tggggagcgggtggggaagcagggtcatggtggcaaatttcatccatgtgggagccaaatcgagtccaaatggactcctggcaacgttttctctcttttggtcaataatgatgtaattcttc

SEQ ID NO: 308498 - DNA, 122 bp, Homo sapiens
gtcgctcagccacggatagagtgattgcaacatacaggatcagctcaggcatcacagcgccgcctgccagggctgtggcggtatccggccggttgctccacctggcgttcgagaggagaaac

SEQ ID NO: 308499 - DNA, 122 bp, Homo sapiens
ggagtagccgctggggaggctccaagttggcggagcggcgaggacccctggactcctctgcgtcccgccccgggagtggctgcgaggctaggcgagccgggaaagggggcgccgcccagccc

SEQ ID NO: 308500 - DNA, 122 bp, Homo sapiens
ggtggcccagtcctatggtggctacaaggagcctgcagccccagtctccatacagcgcagcgccccaggtggtggcggggtgagtaaccctggccggaggggagaggccagaggcagggggt

SEQ ID NO: 308501 - DNA, 122 bp, Homo sapiens
ccgagccccgagccccagcccccgtgcttggtgacgtcaggcagctggccgccgagtctacgcaaatgatttgcataatgaggaagcagccgccaatcagagtgggagttgactgggctcgc

SEQ ID NO: 308502 - DNA, 122 bp, Homo sapiens
ttccctaggttgactctgggtttttttatcacgctcgacaggactccttatgcatttcttcgaaagagcatccagtcttaacatcatcatttggcctcatttggtttaagaagcagaattag

SEQ ID NO: 308503 - DNA, 122 bp, Homo sapiens
ctctggatcaccggctagtactcccagttctcaatgtcccggtcctctggttgtcccagtcgctccagttgccccggtttccagcctcctcggtccctccagtctctcccgtccgcccagtt

SEQ ID NO: 308504 - DNA, 122 bp, Homo sapiens
aatagagaaaggccctgcaaggtacccaggcccacaaacaaaagcaatgggttctgcccacgggcccgaggattcagtagaaggaaagtggggacgctgtcccccgccccaaaggcactgac

SEQ ID NO: 308505 - DNA, 122 bp, Homo sapiens
ctatttcttctttaattgtagtattaacggcaaagcagaggcacctgccttcaatgctgccgggcgcccgctccatgaccgtgtgttcctagagaagctctgccccaggagggacaaatgag

SEQ ID NO: 308506 - DNA, 122 bp, Homo sapiens
ttttaaactctttaatggtgtgcgagtgacataatggcgctcaccatcccataattgtcccggatcaatagggaccattcagcttcagccaggccgcccctcggggcccccgcctatcccca

SEQ ID NO: 308507 - DNA, 122 bp, Homo sapiens
ggtgacagagaactttgtttggctgcccaaatacagcctcctgcagaaggaccctgcgcccggggaaggggaggaatctcttcccctctgggcgcccgccctcctcgccatggcccggcctc

SEQ ID NO: 308508 - DNA, 122 bp, Homo sapiens
aatggcaggatggcagtgatggcaaggccacaaagaaatagtgcaaccagcttcttgcctcggttattctgggaaacaggatcacggcgagtgagcagcacagtgccattcttagcccattg

SEQ ID NO: 308509 - DNA, 122 bp, Homo sapiens
aattgctggaagaagaggtgcaacgactggctgtcccagctcatgaggttcacgggtgtccgcagcttcctgaccagcgtccaggcatgctctgcctatgaaagcctcatttatcccgagcc

SEQ ID NO: 308510 - DNA, 122 bp, Homo sapiens
aacctgggaggctgggaggttttggaggaggtgcaagggtgcgcgtcgagcagttgggggcgagggccaagaagatccggactctggaagatggaagtttttcggacaagggatgtggacag

SEQ ID NO: 308511 - DNA, 122 bp, Homo sapiens
cacgggtggacactggctgccagtgaaggccctccccaaggtcaggttttacaacttgtccgggcaccaaatgttgcacctggaatctactgcttctgaagtttccaaccacagagagccaa

SEQ ID NO: 308512 - DNA, 122 bp, Homo sapiens
tttgcagggatgcatttgccttaacgagtgcctctggtatcccgctaaagccggacaaagcgtggccagagtgcggcccagcctctcagcctgcggcccggggaggagggcagcgcgggcgc

SEQ ID NO: 308513 - DNA, 122 bp, Homo sapiens
atgacaacatcacggctactcaccagtttggtgatacccccgtgctgcctcaccacccgccgtgctcttttaaacttggcaacattcgcgatagtctcggctgccaaacattttagactctt

SEQ ID NO: 308514 - DNA, 122 bp, Homo sapiens
aaaaaaaggagatgaagaagggtattgggtggggaaaatcttacctcaacttctgactggcggggacggttattttattaagcttgtccattctgtttggtaattgtaagagacacgaataa

SEQ ID NO: 308515 - DNA, 122 bp, Homo sapiens
acctatagcatctatgatctgagtgctgagttgcagttttgagcttaagacactgactcccgaggtggtcggagccatagggcatctgcaaggaagtgatatttaaagctgtaagaggtatt

SEQ ID NO: 308516 - DNA, 122 bp, Homo sapiens
ctcgtggtgcgccgttttttaagccggtctgtgaagcgcaatattcgggtgggagtgacccgattttccaggtgcgtccgtcacccctttctttgactcggaaagggaactccctgacccct

SEQ ID NO: 308517 - DNA, 122 bp, Homo sapiens
tgcgtggatgaaacctggtccaacattcgtaaaagcatgcaaaccacaccattgcttgggcgggcacacttcgtgcccctcccctatgccttgccagccccacccttctcacaaaccacccc

SEQ ID NO: 308518 - DNA, 122 bp, Homo sapiens
tgcaaatagccgtctgcgattttggcggccctccggattgtggtgacaatatgttgtacccggacattcccaaatttaaatttggcagtgaaaattccacaaagatttctggtaactttgag

SEQ ID NO: 308519 - DNA, 122 bp, Homo sapiens
cactgaggtggggagtagtgaggggaagcagtcatagaaaccactagttaacacatgtcacggctaataatatcaggtattttgatgctagtgtcaatgagatccagcatgccagttaattt

SEQ ID NO: 308520 - DNA, 122 bp, Homo sapiens
ccctttccggggaaggattggccgaggcgctcacctgtttgccctggtgaccaatgggctcgagctgcccgggctaggtcccgggctcggtcccgggctcagctgctggggtcgtgcggagc

SEQ ID NO: 308521 - DNA, 122 bp, Homo sapiens
gagcaaggagagagaggaggggcattaaaagagttcatagaaagggtcttatttgcccctcgaaggcacaggtggctccccaggacggcatagatagaaggaagggcatccctggcagaggg

SEQ ID NO: 308522 - DNA, 122 bp, Homo sapiens
ccggcctcacacaggaaggaaacgcaacctgggagagaacgcttccggcgggaggcgcggcgcactccctcccacggagcatgcgcgacccgcggtcgccggcgcggagggggcgtgctccc

SEQ ID NO: 308523 - DNA, 122 bp, Homo sapiens
acaaacgggatgaaagtccagggctgggacttcctccttggaatgtttgacaaggactgacgtactctaggccctttgaatcccggaagtccaggacacacccaaccttgattacagtgtcc

SEQ ID NO: 308524 - DNA, 122 bp, Homo sapiens
ctaatgtgagcatctatgccggtggatttcacatccccgtttcacggacgaggacacctccggtgacctgcagggaccccgcgccagtggctgctgcagctgactcatccgactcccacgcg

SEQ ID NO: 308525 - DNA, 122 bp, Homo sapiens
ctcattccttctggggctggaggggcagccctggcctccaaaggaggccagagcatcactcgccacagggatggaggggcagtgaggctgaaaagcagagaagcagtgcctggaatgtccct

SEQ ID NO: 308526 - DNA, 122 bp, Homo sapiens
tcagcagcgcccagagtcagggtcctccgctgcctgaggcgtcaacatgcctgcttgcaacgtgtttgtgcacgtgcgtgcacacgtgtatgtgggtaaacatgtctgtgcacatgtgtgtt

SEQ ID NO: 308527 - DNA, 122 bp, Homo sapiens
gccatagaaaaacaaggctgagttcagctcagagagcctgacagtagggcacaccctgcccgcaccctggcctccaaggatactcctgtgagtcagagggcttgggattctcccacggattg

SEQ ID NO: 308528 - DNA, 122 bp, Homo sapiens
tggttagatggaggagttgagcctctgacacctccaggttctgcctgccaagggttcctccgcagccgggctgagctgagcaggagcaatgggctctcgcttctgtcctgaggttcttgggt

SEQ ID NO: 308529 - DNA, 122 bp, Homo sapiens
tgcgcgtcctgcctcctgcgggcagcagctcggagcctgcgggagggagcaggctgggcgcgtggtggggggcgcgcgatgcggagggggcggcggcgcagccaatccgagaggcggccggc

SEQ ID NO: 308530 - DNA, 122 bp, Homo sapiens
gcgacttcccgtccctagtatgagctcgggtactagaacctcgcgccccgcctacaacttcggctaacccccctcggacccgcccccttgtagttggcagcggaagtccggagcggccccca

SEQ ID NO: 308531 - DNA, 122 bp, Homo sapiens
atctagcggagattaaatacggatattgacaaggtggcaattatcatttgaactcagacacggaggctcactttgcagctaatttggcacagaaaaaaattgttctaaacaatcaaaatttt

SEQ ID NO: 308532 - DNA, 122 bp, Homo sapiens
atgtcacagagagaagctgtggcccagagttgggggatcggctagctcaagaccatacttcggggaagggccggccagatccatggcacagcacccaggacctgcctacaggatgccacata

SEQ ID NO: 308533 - DNA, 122 bp, Homo sapiens
cagaaggtctcggacgccgcggcagggccggccagggccccacgagttagggagttgccccgcacccctaaacgctcagcacccatttacggttgaaagtacgcacttgacgcgtccgggcg

SEQ ID NO: 308534 - DNA, 122 bp, Homo sapiens
ttccagagtgtaccggaagccgctacctcccggggccagtgagctgtccgaggtgctgaccgggtgcgggcatcgcctcaccgactctgagaactagcttctagggaacaggggtggagtga

SEQ ID NO: 308535 - DNA, 122 bp, Homo sapiens
gctgaggtgctggcacagcccatcgtgtggatcaccccctgtgctttctcccacgaccaccggacagacgtggactacagagtcatggccaccttcacctaattctacagcaccctactggg

SEQ ID NO: 308536 - DNA, 122 bp, Homo sapiens
cgtagtcccctcaccatggaccagatccggccaaacacagaactaaaagaaaaaatccaacggtggcttgcagagaggaaacaacaaaaggagcaacttgaatagatactgtgaactaacca

SEQ ID NO: 308537 - DNA, 122 bp, Homo sapiens
tgcctgagcccctcttgcccacccccggggctagcgggatccgcagccctcgcttccttccgctgtcacccaggccctgcgaagcgggtatgcacccctcagctttccgagcccgcggggag

SEQ ID NO: 308538 - DNA, 122 bp, Homo sapiens
agctgggcgggccggggcggggcggccgggcggccggggcggggctacactcgggccccgcgtcctgctcccatggccgcccccggctccccgcgctgccccctttaccccgggccgcgccc

SEQ ID NO: 308539 - DNA, 122 bp, Homo sapiens
atggactattcttcctcattgtgattcactttatcactccctgaagcaatacaatctttccgaagatgtaaaccatggtgccaaaccatgtcattgcccagtctagttattatctcactctc

SEQ ID NO: 308540 - DNA, 122 bp, Homo sapiens
ctcaggcccgaggccagggccagccttggcaaaggcaagatctcttctgagaacaggtgccggcctggagccaacgggtggccttggcgtccggtggcctcggccccagcgtccagattgga

SEQ ID NO: 308541 - DNA, 122 bp, Homo sapiens
aagaccagacgccccacagcaggagcaaacacccgggtgcaggagtgaaaggcggaactacgatgcacacagctttgcaggcacacagcacctcagacacgcacacagctgcgcgtgcacac

SEQ ID NO: 308542 - DNA, 122 bp, Homo sapiens
gctggagcgcgccttcgagaagaaccactacgtggtgggcgccgagcggaagcagctggccggcagtctcagcctctccgagacgcaggtaatcacccccggtcgcggcctgccctgcgccc

SEQ ID NO: 308543 - DNA, 122 bp, Homo sapiens
ttaagaagctattctctctctttgcacagtagggaaagcacagaatctcagacagactaacgcagttgttccgttcctcagatcccatttgcagtgcaggtctgagtctctcctgtgggact

SEQ ID NO: 308544 - DNA, 122 bp, Homo sapiens
aaaaggctaaaaacagtagaaaatcatgtggcttccatcttccttttccagacttcaatccgtgtctttgcatgttgacaccgaatgactgaaaaatggctcgcatgtctgcatcccttcca

SEQ ID NO: 308545 - DNA, 122 bp, Homo sapiens
ccattgtggcatcacggttaccatggcaccaccaagcaactgtctggacatggggacttacgaggagctaggatgaaaggcctccttgttgcttagccttggcagggctcttctggaagcca

SEQ ID NO: 308546 - DNA, 122 bp, Homo sapiens
gcaccagcagggccaggggggccaggctcaccacgcacaccctggggaccttcagagcctcggggcccttggggaccagcttcaccctgaatcagaagaaaggacatatcagaagccaccct

SEQ ID NO: 308547 - DNA, 122 bp, Homo sapiens
tgctacaaaggtgattaggcctattttctagcatgttgtggcaataattcaaaatatgaccgtaaattaacatattaattgtaccgtgattatttaatgaacttacaaagtttctcctgcct

SEQ ID NO: 308548 - DNA, 122 bp, Homo sapiens
gagcatcccagcctccagacccctttggagtggagggagttaattacagaatcgtagcaacgtcaggcttggaacaaagacttgcaaggggaaaaagtgagcagctcctggcagatgcaccc

SEQ ID NO: 308549 - DNA, 122 bp, Homo sapiens
gtcctctggacaagaacaccagcttctccctcccctccagtctggaaatggcctccaccacgtctccgttgggcagcagagcagtgccccataactgcattttgtccagtttgcactgaccc

SEQ ID NO: 308550 - DNA, 122 bp, Homo sapiens
ctgcaggaaggaccggccaagaacaatcgcctccatggatgagcagccacccgcaccgcccgggacagggcaagtcctctgcggcacggtgcattcaccatgtaattagagtctgagttgtt

SEQ ID NO: 308551 - DNA, 122 bp, Homo sapiens
ctcacgggcagcacacggacaagagctcggtagtgtcggggaagcatctcggaggagctgcgggagggagcagagtgcccggacagagagagtgtggcaggggaagcatggctggggcctct

SEQ ID NO: 308552 - DNA, 122 bp, Homo sapiens
ggaacttgctagaaatacatgttacctgatctcaccttaaatctactgagtcagaaactccgggggtggggcccagaaatctgtgttttaaggcccttccagcaagtctgacatgcttgaaa

SEQ ID NO: 308553 - DNA, 122 bp, Homo sapiens
ctttgccctcagagctgcctggagttcagcctcagaatccaggagttcattgaactcatccggcagaataagagactggacgctgtgaggtaggcattgcggacgtgcgtctcctcgaggga

SEQ ID NO: 308554 - DNA, 122 bp, Homo sapiens
ttccacttatggtggggttatgtcctgataaacccattgtaatgtcagaaaatcgtaagtcggggatcatcagctatgtcaccagcattaagtacattttttaacttatgatattgttgact

SEQ ID NO: 308555 - DNA, 122 bp, Homo sapiens
caggaccttttgctgtcttccagccttgcaccagggaacgtctaaatcttcctctctccccgcctatggcaggaccaccctgagccgggtaaggtctcaggaccagagatatagactacgtg

SEQ ID NO: 308556 - DNA, 122 bp, Homo sapiens
ttgggcctggatgtgctgactttgccttttgcctcctttggaaaatacttagaccttccccgcgcagctgcgtccggtttcccggcgtggctacatccggttatgcgatgtcggatcttcct

SEQ ID NO: 308557 - DNA, 122 bp, Homo sapiens
gctcaggggggttctgaggcattttgacccaactcactaaatgcctgccctcgcacactacgcctgataaagtgcaaatatgaagagctggggtccctgcctgcccacaaaggcccatgtga

SEQ ID NO: 308558 - DNA, 122 bp, Homo sapiens
cccccagggccactcagcttcaatcagctgtaacccagccccaacatctgcaggccactgcgcagggagtccacggtcagcagccacctcagcacacctcctcctgtggccacatcttcact

SEQ ID NO: 308559 - DNA, 122 bp, Homo sapiens
ggcgcgagaaaaccccgagagaggccagtgcctctgtgcatgcgtcagtggcgagcgcaccgcccccacccgcaccccggcttggctttcccccgtgggcgcttttcggcgcatgctcagag

SEQ ID NO: 308560 - DNA, 122 bp, Homo sapiens
tgagtctgttggtgaggcttcagtgtaaaacatctgcatttctctcagactgttcacaaacggaagtgtcaaaatttggctttttcatgactttatgaacgtagttttagtagaaacactcc

SEQ ID NO: 308561 - DNA, 122 bp, Homo sapiens
agcagaaaacggcaggacttttagctcgtcatgactggtcatccaggccaagccgagtgtcgccctgtgctctccaccacggctgctcctgccaccatggcgtccctctgtctccgtaccat

SEQ ID NO: 308562 - DNA, 122 bp, Homo sapiens
cgcatagacacgcacacgtatataggcaggcacaccacatgcccacagccccccttcccacgaacaaaggcgcaggcacaggcgcacacgacatgtatctatatatagaccacagtactatc

SEQ ID NO: 308563 - DNA, 122 bp, Homo sapiens
ccccggcgccgagagccctggctgacggctgacggggaggagccggcgggcggagaaggccgcgggctccccagtgccgtcacctgcgcgggaccgctgcgggaaaccggcgggagctgcgg

SEQ ID NO: 308564 - DNA, 122 bp, Homo sapiens
tgccagctcaggaaactacagctcccgggtgggcttcccatttgaaactggctctgtgaacgggaaagaatttccctgggagaaaatggtcttagcctgcccacacctaaacttggactgct

SEQ ID NO: 308565 - DNA, 122 bp, Homo sapiens
aattaggactccataaaataaatacctgattgggaccaccaggaaaccaaactcatctggcggttctcaaccctgactgaattaaaaaaaaaaaaaaagaatcatctttggaaattttaaat

SEQ ID NO: 308566 - DNA, 122 bp, Homo sapiens
ccgggccgcgcaagcctcggatgcagccgggtggggggcaccaggcgctaggcgaaggagcgcaggaccaaaggagatgcttggctcctaagataacacctttaaaaagaagaagaagaaag

SEQ ID NO: 308567 - DNA, 122 bp, Homo sapiens
aacttacatttcaataaagattgaaccaaaaggtaaaattccacccaggcaaacaataaccgcaggctccatgaacctggaaaatattaaaattaatagtaaacttctagtatgatttccat

SEQ ID NO: 308568 - DNA, 122 bp, Homo sapiens
aaatatccgaggagggcgcgcaaggaccgtcaccacccagacttggaacatgacgcacggcgccagggcacccaggccccgctgcagtcaggtctggctggacggtgccacccgacacctcg

SEQ ID NO: 308569 - DNA, 122 bp, Homo sapiens
acagggctgtagtattttgatgctgtagtccaataactgtattttctgtccatattaggccgagagtaggggcgtcctccagggttgtataaaccatcagtagccaattcatttgcacctgc

SEQ ID NO: 308570 - DNA, 122 bp, Homo sapiens
gaacggaggaacctcagcccgcagctctgtccctgcccgtccccattgctctccctcttacgtaaaccaccaggaagaagaagaggaaacacggatccacgtcacatcgaggagcctcctga

SEQ ID NO: 308571 - DNA, 122 bp, Homo sapiens
gcagaggcggagcaggggcgcaggtgcctgcaacccaggatcccggggcgctaaaggcttcgggttctaccgcacgctcagtcgctggctccagaggtgctgctgggggccagggttcactg

SEQ ID NO: 308572 - DNA, 122 bp, Homo sapiens
tcagcctctatttatgtgtctatccagcacctacaagaagccagccactgttgttggtgtcggagacacaacagtaaatataacagacaaaaatcctgtccttgaggaacttactattgtgt

SEQ ID NO: 308573 - DNA, 122 bp, Homo sapiens
gggcgggctcccggcgctagcagggctgaagagaagatggaggagctggtggtggaagtgcggggctccaatggcgctttctacaaggtacttggctctagggcaggccccatcttcgccct

SEQ ID NO: 308574 - DNA, 122 bp, Homo sapiens
ccaagaggctgcagcctgcctgtttggagctggacggaagggcctgctctgcccgccccacgcgagctccgcggaaggcacctgtttctgaagcctctcactgcacgtgctccgctggagcg

SEQ ID NO: 308575 - DNA, 122 bp, Homo sapiens
gcggcagctgtccctgggatgtccaggtgtccgtctcggggtcgtagcaatcgaaggaggcggagtcctcaatgttgcagtccgtggtcagccgccgcccgcccgtcacgtagagtttgttt

SEQ ID NO: 308576 - DNA, 122 bp, Homo sapiens
cattcctgccactcacttgattttgacgaacttccgacatggcacggtgttcctcacacacgtctcggtcagggggtctatgtcttccacgatgacgaatggggcctcctccagggtgacga

SEQ ID NO: 308577 - DNA, 122 bp, Homo sapiens
ctttggtagatcctacttcatctcttcactcagtaaagcctgctattcctacccgttcttcgattttctttctcacactgcatactcttcctgagaaatagcatctatgctcataacttgaa

SEQ ID NO: 308578 - DNA, 122 bp, Homo sapiens
tcttacctaaagggattagcgttcttcgaagcccctggctctagagtctttgaacctacccggattataaagctcacctgtgccctgcctgcgcactccagccaaaaccggtccaggcttct

SEQ ID NO: 308579 - DNA, 122 bp, Homo sapiens
ggtgccggtggatgggggagggactggcctctgactgcggggttgcaccatggcggcggtcggtgtgcccttggctgaggtttcgttccttagcagtgagaacctccacatgcgtgggtagg

SEQ ID NO: 308580 - DNA, 122 bp, Homo sapiens
gcacccaggccagcagctgtggagggtgcgccaggtcccccagcactgccggcccacccacgccacgctcgaattctcactgggcctcagccgcctctccgcagggcagggctcaggacctg

SEQ ID NO: 308581 - DNA, 122 bp, Homo sapiens
aggcggccctgctgaggaccccgggacgactggggaggctgcccgagcctccgtgggtaccgcggggcgggggcgcggcggggcgggtaccttggtgccctggtggaagtcgtcgatggacc

SEQ ID NO: 308582 - DNA, 122 bp, Homo sapiens
gggattcggaggacctggcccatcgccgtggcctgcacggtgcgtgcacaccgctctgtccgcgcaggctgtgccctgctttcaagatgcctggaaacctctggcagctctgtcctgctgtc

SEQ ID NO: 308583 - DNA, 122 bp, Homo sapiens
gcctgcgttgtgggcgttctcggggagctgctgccgtagctgccgccgccgctaccaccgcgttcgggtgtagaatttggaatccctgcgccgcgttaacaatgaagcagagttcgaacgtg

SEQ ID NO: 308584 - DNA, 122 bp, Homo sapiens
aggtgacttctctttgctagagacaaaggcaccgtgagctttgagtagctaaaataataacgatattcttcaggctcccatggcagcttgctcaatcattacagctctctcacaactcagat

SEQ ID NO: 308585 - DNA, 122 bp, Homo sapiens
ttgggggggaggggaaggacaccttcccctccccctcacactcttttcaccctttctgcgcgagattggaataggcagtaatggtagactctggcttgaattggggaaggaggcgcagaaag

SEQ ID NO: 308586 - DNA, 122 bp, Homo sapiens
cgagggtaggagggaccccacccctcccggggcgccccgggctcatggtgcaactggactcgtctccctgcaagaaccagccctgcaccgctggggtcctggggcagaccccgctctgtacc

SEQ ID NO: 308587 - DNA, 122 bp, Homo sapiens
atgggctgtggggctcagcatgtctgcgggaaggtgccagctgcacgccggacccccctccgctgtcttcaagggcccaaggccttcttgctggacctgtgacccggcagggctgactcgct

SEQ ID NO: 308588 - DNA, 122 bp, Homo sapiens
accgcgctgagcaggacacgcgacaggtcccctcactggcgctgctcgcgttgaaccgcgcggggagccaggcagcccacgggaaaggtaagaattgttaggcttttaatctaaagtcgata

SEQ ID NO: 308589 - DNA, 122 bp, Homo sapiens
acccctccctggggattcagtgagacctcggaacccctggggcaggcgtgctggggactacgtggggggatacctgcgccattccccagacgcctctggggacctgctggggctgagcaggg

SEQ ID NO: 308590 - DNA, 122 bp, Homo sapiens
ggtattttaccatcaagactccaatgttggttgaaggaaatccttttccatgtgcacacacgtgtgtgtgtgagagagagtgtgtgtgtgtgtgtgtgtcaatgcttccattgtcataatag

SEQ ID NO: 308591 - DNA, 122 bp, Homo sapiens
tccggggcctgcgtgggctcaggtggggggcgatggaagcagggctgacacctggggctccgcacagatctgggaaagggttttcccctcagggtctagccctcccttcccaccctgggatc

SEQ ID NO: 308592 - DNA, 122 bp, Homo sapiens
agagttttcctgagttctgtgagtcactctagtaaatgacggaatctgagaagggggtcacgagaacacgtgctttacagctggcgggtcagaagctcaagtgacctgactggactctgaag

SEQ ID NO: 308593 - DNA, 122 bp, Homo sapiens
cagcttacttattaggatctgagtgaggcagtcgccgtgtccttctccagcctggtctgtcgcctatccccacccacaatctctgctctggccataactaacttcagttctccgaacctaac

SEQ ID NO: 308594 - DNA, 122 bp, Homo sapiens
acaatccttcctgcctcgacacccgtgccagccccagccaccctgacggcgggctgtccacggaaatgccacggccaagagcccaggtccttcacgctggcctcttccctgccgggctgggc

SEQ ID NO: 308595 - DNA, 122 bp, Homo sapiens
ttcatctccacaccataaaacctttcagccagaaggtaaatttgggactagcaagtcttccgaaaacatacaaatatgttttcttttcaggctataattttttttctataaaataatctggt

SEQ ID NO: 308596 - DNA, 122 bp, Homo sapiens
gttctgttatacactcaggctgtggctctctgaaagtcagtgcatcacagaactttgtctcgaaagctttctagcagctacccattttgggagtgggagggaagaatagaccttttaaattc

SEQ ID NO: 308597 - DNA, 122 bp, Homo sapiens
aagtaaccactgggaacttccagggagggaagcgctgagcagggacccacgcccgggcgccgcccacgctccgagggacccatgcccgggcaccacccacgctccaagtccgggcgccgccc

SEQ ID NO: 308598 - DNA, 122 bp, Homo sapiens
tccctggtgcttctagctctctttggggcctgggagccatccagtgttccctgtccaccccggacagcatctctgctctctgtagagcgttgcctggcttgttcctgctgtcccaaggggga

SEQ ID NO: 308599 - DNA, 122 bp, Homo sapiens
ggggagcgagcgcggccatcccgcgcgtaggtggtgtttctctgcaggcgccagtttcaccgcgggcgcccaggatcctcaacggttctgttgtgatgtgattcccctcttcgacttcgtca

SEQ ID NO: 308600 - DNA, 122 bp, Homo sapiens
aacagggcaaaatgcttggtaaatacagcactgataaatatgggtgcaagaaaatatcaccggcatcccccacaccatgctgggacatcagttctatgacagttttagagcaaaggggtcat

SEQ ID NO: 308601 - DNA, 122 bp, Homo sapiens
gctactccttgagaacatcgcggagggcccctccgcctgggagccgttttcaaccagccccgttagtggttgggacgtaagcctaacccccgctcatcccccaggtcccaggttggagaaca

SEQ ID NO: 308602 - DNA, 122 bp, Homo sapiens
cccccagcttggctctccaaagctcaccagtatcaaaggatttcagcttctgctcctctccgcagggctctctggtgggccccagacagagatgaaggaaaagtctggccttgaccttgagg

SEQ ID NO: 308603 - DNA, 122 bp, Homo sapiens
atgagtctgcttggaaaaaaggcattacatcactgattggagaacctcaaagcatatgtccgggcaggtgacacacacacagctcaggctgtgattgctaaaccactcccacagccaaataa

SEQ ID NO: 308604 - DNA, 122 bp, Homo sapiens
atgtttgatatttacacagctcaaaatctgaatacccactaatgtcttgtagctgttctacgtactctcagctttctactccctcctcccccatctttgttcttaaaacctaatggtaatac

SEQ ID NO: 308605 - DNA, 122 bp, Homo sapiens
aggcctccagccactcccatccatctttctgtccctctcaaagtcacttgcctgaccctgcggatgacaaatccgtccacagtcagccatgtgtctgtgcattcgtcagccactgggtcatc

SEQ ID NO: 308606 - DNA, 122 bp, Homo sapiens
gtcgaaaacaatgaaatggaggctgcaagagagaacacagtagcgctacttgccgtgcatcgagcatgtcctgaccccatagctgtaaagtaagcaagctcatttcgctttcacacaacccc

SEQ ID NO: 308607 - DNA, 122 bp, Homo sapiens
ggttctctacaggattagaaaaaacttgcgcgaattaatctgcgtagttaaaaacaaatacgaaatgagcgagaaagcacatagtagtcaaatctcgccaccacataaacaggttaagtttg

SEQ ID NO: 308608 - DNA, 122 bp, Homo sapiens
aggatctgctccttggtgcgcagctccggccgcagccagcggcagcacagctcccagaggcggctcagggcctcccggggcccagccacctcctggtagcagaagagccggaagagctggcg

SEQ ID NO: 308609 - DNA, 122 bp, Homo sapiens
gaagatgctgacagccccattcgcaggccccattgaccacgggtctctgaccgtgcaggacgattacatcttctttaaggtaaggttgcttctggggcttttggaaattggcaacaggtgac

SEQ ID NO: 308610 - DNA, 122 bp, Homo sapiens
cctggtgattcaaggccaagatgaggagccaacaggcaagcctgccttccaggataagttcgaggcactgctgaggctgtgtcagggagtatgggctcactggaccttcaggaaatagtcat

SEQ ID NO: 308611 - DNA, 122 bp, Homo sapiens
cgcccgagcgcgggtcctccccgggccgcccaggggggccaaaaagtttgcacttgttagcggcgacctcccgctcagcccgggcgggcgatgcgggcggcgcgggcggccccctcccccgg

SEQ ID NO: 308612 - DNA, 122 bp, Homo sapiens
ctcagatgcgcgccagctccagggaatgccggggggtgccagtccctcgcctctcccacccgggacccatcatttgttacggaagggcgatggggtgtgttttatttctgttatcacatata

SEQ ID NO: 308613 - DNA, 122 bp, Homo sapiens
ggagcgtggcccggggttcagaaacctgcggctgccacggtacccgagccgctgcagcgtcggggacaagggaaagtttctcgcaactctcgggagaagggatctgccttcgggaaccagcg

SEQ ID NO: 308614 - DNA, 122 bp, Homo sapiens
tccccaggagaacctcagggagactggctgggtgactccatgggatgccaggccctggtgcgttactagtttcgcccagtcttggctgaccccctatgtgagcagtgtcagggcagtgagtt

SEQ ID NO: 308615 - DNA, 122 bp, Homo sapiens
cctcctaactacttttcttcactccctagatccaccactcgcctcccacacagggtggagcgccccgaagtacttgcataagacagcacaatcccaatttataggttgtaggagcgccagtg

SEQ ID NO: 308616 - DNA, 122 bp, Homo sapiens
gcaccccactcctcaggtggtcacactccagcagtgccctccctggccctggaggcccggcgtggctggtgtcatctgtgaggggaactaggcccagttccttggaattcctattttgtttc

SEQ ID NO: 308617 - DNA, 122 bp, Homo sapiens
ttaaattgtacatgtggcttacattattcttctgttgagtagcactggtgtacaagtcttcgatatcaccttgtgcctaccttctcctacccccgcctcacccagctgacctctctgacctc

SEQ ID NO: 308618 - DNA, 122 bp, Homo sapiens
agcaccggggacagcggtccggccgcagcgcctcatctgcctgcggcagaaatgcctggccggggctggatgtgccagggctggagaccaaattgtctccctgagaccccggtcttacggag

SEQ ID NO: 308619 - DNA, 122 bp, Homo sapiens
attacgtcagtttcaagacaccaacactattaatatcaaaggagccttcgcggaggaaagcgccaccccagaccgagctcccttaaagagacagcgcgcgtccccgcgccgccgccgccgcc

SEQ ID NO: 308620 - DNA, 122 bp, Homo sapiens
tgggtggcctctacgggaatcctggggcagagatgggattacgaaaccctaaaccactcccgctgcgcgcgaatcacgtctggcaggctgctccagcccgcagtccacacacccccgggcct

SEQ ID NO: 308621 - DNA, 122 bp, Homo sapiens
ctcttcacaggccccagagtgactgtaatttcatcagcagtctaactaggtttggcactgcgctttgtctactaagctttgaaacaataagcactttcaaaagcacaaatacatcccaaaaa

SEQ ID NO: 308622 - DNA, 122 bp, Homo sapiens
tcaacaagtgggccttttatgcttcccaagccagccagggctttgcgaagccagtgtgtccggggagataattgcatagccctgtggggacatctccctctaagaactttcctaccgggtcc

SEQ ID NO: 308623 - DNA, 122 bp, Homo sapiens
ccgctggagcgcgcggaggatgggagctcctgcgtcagggcagagcaagttcccagtccccggctgtttccaggtggttgggcacagggcccacaggcgcccctgtgggcagggtccggggg

SEQ ID NO: 308624 - DNA, 122 bp, Homo sapiens
cagagtgggatgaggaagtctgaaatttgaagtggactctcagaaagatgaggaaggtggcggtgctgtagacaggtcaaaggacaatgacttaggagaggtgggtctctgcttctgggata

SEQ ID NO: 308625 - DNA, 122 bp, Homo sapiens
gtctatttcttcactcaccatctctgtcttacattcttccaaagggctgaacttcaagatcgttgagtactaaacctccagaaactatttttatttttttctaccacttttttttttttaag

SEQ ID NO: 308626 - DNA, 122 bp, Homo sapiens
tgccttgcaatttcaggatcagtatacatcaaatcaagtgaacaacccagggaattctgccgttaccttttagaaacagaataaatattaacagagctttacttctttccaccaaggaggac

SEQ ID NO: 308627 - DNA, 122 bp, Homo sapiens
caacttatgcagtctgtgacaaagagcaagtcaaggcaaggaaaaagctctcacaaagaacgtagctctgttctcttaaaatgtgtaactgttttcctggtagagcaaaatttcttgaaagg

SEQ ID NO: 308628 - DNA, 122 bp, Homo sapiens
gtcggtgattattaaggggaaatccctgaatatactctccagccaagaaggcagggctgccggggctgtacaagaagaggcagcagcctcctacagcaccactacaggcactgcgaggacat

SEQ ID NO: 308629 - DNA, 122 bp, Homo sapiens
tcttctagacctgaagcggcaggaccctccgttcccaataatacaagtcaccaaaaggagcgtcccagagtccagttttaccttcatgtgcctctcactcacttcaggcccaggccaggtta

SEQ ID NO: 308630 - DNA, 122 bp, Homo sapiens
tgaagaagcgctgcggcggtgctgagtcttcctgggtgctgctggagaggcatgaacaagcgccacgtgaacacggcagtgatgagtttcctgggtgctgctggagaggcatgaacaagcgc

SEQ ID NO: 308631 - DNA, 122 bp, Homo sapiens
tgcattgtgggcattggtaagagaactcattggagttttttgggggaagggtgctggggacgatggcagagagagatatatgatcaggtttagcacagaatataggcaaacgcacccttcaa

SEQ ID NO: 308632 - DNA, 122 bp, Homo sapiens
ggttcatcatcagttcctggagtcctcactgcacagcaggtacaagcggaggctgagagccgcagtcccaatacagatccgcctgatctcaaagcctgcgctctttatcattgcaccagcgg

SEQ ID NO: 308633 - DNA, 122 bp, Homo sapiens
gtcttcagaataaagacagattccacactactgcacagccagttcgtcaggggcagacctcgtctaccctgcggccacacctctcctatctgcacacagccacactggaccctgcttcctgg

SEQ ID NO: 308634 - DNA, 122 bp, Homo sapiens
tgaactctgaaggccaatgccctaaaaccacaaaaaattcttctctgagagtgagtctgacgttccagcctccgccatcctccccaaccccactcccaccttagtgagagcaacgataaaca

SEQ ID NO: 308635 - DNA, 122 bp, Homo sapiens
ctctgctggcatggatgatgggggtggctggcgagggtgtcgcgtgggcacgtgggagcccgaggctggcggtgggctgtgctccaggccttgcccggttgaccgtgtcttcggggtgagtg

SEQ ID NO: 308636 - DNA, 122 bp, Homo sapiens
cgtgcttcgggtgagggggcgggtcttccggccctctcgaaaatcatttccggcatgagccggaagaccgtcccggatggcctcggggactgccagtgtgtggaggtgagctccgggattgc

SEQ ID NO: 308637 - DNA, 122 bp, Homo sapiens
gctcggggtccgcgtcgcgtcctgcggggagagccaccctgccccgcgctgcgcccgggacggttccctggaaccactcaccaggcagcatcatcgcgcccagcagccagagcccgaggccg

SEQ ID NO: 308638 - DNA, 122 bp, Homo sapiens
gcgctgtctggcagggcccggggccacagaaggaaaacatgtctgtggaatgtggaaatgcgggactctaccgggcccgtttagagagcacagaaaaacatgggggaaagggagaggcgaga

SEQ ID NO: 308639 - DNA, 122 bp, Homo sapiens
agctgggattacaggcatgcacccccgcgcccggctaattttttctgtttttattagagacggggtttctccatggtggtcaggctggtctcaaactcccgaccttaggtgatacgcccacc

SEQ ID NO: 308640 - DNA, 122 bp, Homo sapiens
agggccggctctactgaggaggtcggtgagcagagtccgcagcggaaaaggcgaaggcgacgtgacgtccagcaagctcgccatgttgagaaggtaacacggcgaagccccgcccagctggg

SEQ ID NO: 308641 - DNA, 122 bp, Homo sapiens
tttgatcagccaggctggctcttcaggctgggggaggggtgggaatgggaagccgccatccgtgctcatgcgcaccccaacactcaagcttacccccagacccctggattctgcccactttc

SEQ ID NO: 308642 - DNA, 122 bp, Homo sapiens
ccacactgctgccgggcatcctctccccgcgacaccacgcccgctttcggctgcgcggggcgagcagcgtactgaccccggcgtccagccgcccaggtccccccagcaacggaggccccttg

SEQ ID NO: 308643 - DNA, 122 bp, Homo sapiens
ttctcagatgatagaggtataccagagccattgatttaaaaacatgagtgaggctgggcgcggtggatcacaccggtaatcccaacaatttgggaggccgaggcaggtggatcacctgaggt

SEQ ID NO: 308644 - DNA, 122 bp, Homo sapiens
aaagggaaagacgtacagacaccccacagatgagtcccggaaacacggcgcacgatgacacgagccagacacaaaaggacgcacattgtgactccatttacacgacaggtgcagagaaggaa

SEQ ID NO: 308645 - DNA, 122 bp, Homo sapiens
ggcccccgacggcttcctcaggaggactcacggttctgggggattccggaaccgctaccccgtcgcgagaaaggaggtctacttacgcgcgcaatctcgagcgagcggccttttccaccccc

SEQ ID NO: 308646 - DNA, 122 bp, Homo sapiens
tggaaaccggttcgacaggtaacaaataggtgggttgtcaccgttatttcccaacgcatgcgccgtcgctccccgggccaccccaagctaattagatcagatcaccgccccccacccccacc

SEQ ID NO: 308647 - DNA, 122 bp, Homo sapiens
agcatactggacatgcctcttctttaccttctcaggccagaacaccctcctctccacaaacgtgtgcacacttgcacgctcattaagcatgtgcacacatcatattcacacactcaagccat

SEQ ID NO: 308648 - DNA, 122 bp, Homo sapiens
ccctcagttcttgttctcacacatctgtcatttagttggtcacagttgggcaggtagaagcgggttaaaagttttaaaactcataataatcgtgtccagagataaatgaaggctgttgttaa

SEQ ID NO: 308649 - DNA, 122 bp, Homo sapiens
gcgcacagcaaactccccaggtgattcagatacctgtttgtttgtaaacctctaaattggcgccaccacagctagtgagtagcggagaactggccgcagcaggtggtcaccacagaggccca

SEQ ID NO: 308650 - DNA, 122 bp, Homo sapiens
agaaggccaggtcgcactgagccaggaagcagttggcaaaggggcggggtgacgcggtgacgcaatccgcctgcgcgctgggcggggcggggcgggctggggcgggctgtgagcggaccgcg

SEQ ID NO: 308651 - DNA, 122 bp, Homo sapiens
agagggaaagaatcttagcagcttgataccagcaacattcttgttgagtgtcacatgacacggatcctagagaattttaaaacattaactcactctgccctaaaaaactgtttacatagtcg

SEQ ID NO: 308652 - DNA, 122 bp, Homo sapiens
actgccttctttcaagggtaagcccttggtcacaaggggcctgggacagaaggcaggccgcgtccacacacactgactgggtcactatcactggcagtaactgagttaaagagagcggcgcg

SEQ ID NO: 308653 - DNA, 122 bp, Homo sapiens
gggtggaaggaaaaggagagcgggcgtagtgtttagtgcaggcacagtggccacagcgagcgatggatctctgactgatttcttcctggaggggcggggaacagggaggggaagaaaggcgg

SEQ ID NO: 308654 - DNA, 122 bp, Homo sapiens
caggcagcctcgcgggcgcctaggggctgggtgctagaataacagtgacattcctggctccgacaaaagctgaggacaaggaaggcagagaactggtacctgtgccgggggagttgtttttc

SEQ ID NO: 308655 - DNA, 122 bp, Homo sapiens
tcctcaatgacaatcttttgtccagtttacccaacaatcttttccgttttgtgcccttaacgcacttggacctccgggggaaccggctgaaacttctgccctacgtggggctcttgcagcac

SEQ ID NO: 308656 - DNA, 122 bp, Homo sapiens
gcaccgaaggggcaattattaattttcctcgggtttggaatcaccctctggacaagagaacgggcgagcgggagctaggagggaagagtggagaggaccggcgaggcgcgccagccggagcc

SEQ ID NO: 308657 - DNA, 122 bp, Homo sapiens
ggaagcacgctttattgtgggacgccacctccaaggacgaaaaggcacatggtctctccccgcccgaggtgatgggctgcagacaggctctgaccaggtctgcgcctggcctggagtcacag

SEQ ID NO: 308658 - DNA, 122 bp, Homo sapiens
agttctcactcccattgagtgtcgggtttctagagaagccaatcaatgtagccgcggtcccggttctaaagttcccacgcacccaccgggactccgattcttcccagtcgccgaggatggtg

SEQ ID NO: 308659 - DNA, 122 bp, Homo sapiens
ggaaaaaaacaaaactagacacaacctgatgttgatcaacagccaattgcatgaatcaaccgtgttctgtcccaacaagatgagacccctgcggcagctgcagagaacaggcgcgtctctaa

SEQ ID NO: 308660 - DNA, 122 bp, Homo sapiens
gcttgggggccacagggccagtctcgcagggcaggggtcgattccagtctggcctctgctcgggccctgggtcccggtgcagggttactcccccgcccccctcgggccacttcgccttccgc

SEQ ID NO: 308661 - DNA, 122 bp, Homo sapiens
tagagctaagcgaggcgctggggctggggcaggtgactaaccagctcacaatgccccctgcgggggaggaagagggcactgcaggcccactgcccggcccagaggcgagaagaggccacttg

SEQ ID NO: 308662 - DNA, 122 bp, Homo sapiens
ctgtcaacttttacgctcctccctgcgcgcacagcccccacctcacgctgccacccctcacgccccgccttcaaagtaggaggcaccattgtcattggacactgcttctctcactcctattc

SEQ ID NO: 308663 - DNA, 122 bp, Homo sapiens
tgaggagcgtctctgcccggccgcccatcgtctgagatgtggtgagcgcctctgccccgccgcccggtctgggatgtgaggagcacctctgcccagccgggaccctgtctgggaggtgagga

SEQ ID NO: 308664 - DNA, 122 bp, Homo sapiens
caggaaccacaataaggaacaagactcaggttaaagcaaacacagcgacagctcctgcgccgcatctcctggttccagtggcggcactgaactcgcggcaatttgtcccgcctctttcgctt

SEQ ID NO: 308665 - DNA, 122 bp, Homo sapiens
acagccttcaccgtttgctgggcccctagcctggcccttggtttctgacctttattctcccggctcggcctcccttccccacctcgcgtctcgccagcttccctcatgtccttccttccccc

SEQ ID NO: 308666 - DNA, 122 bp, Homo sapiens
caggcctgtccaggggcggggagcgtctctgtggccgcggcgggattgcggcgcggtggccgggcgtcccctgcaggaagctgttctcgctcgctgcctcccccacctgggagggaagcgcc

SEQ ID NO: 308667 - DNA, 122 bp, Homo sapiens
gggccgaacacgggagcaaggttggccagggctgccctgagccctggagaatccccagagcgatcgtccactacatgcccacgtgcgtgcgtgtgccagggagcgagagcccggacagcggg

SEQ ID NO: 308668 - DNA, 122 bp, Homo sapiens
ggcggaggctcccaccgccgctatgggtaggccatgcagcattcctgagggcggggtgggcgcaggaagaaggtgcccgcggccccgccccctccgggcgcgctgggcggggcgaagcccct

SEQ ID NO: 308669 - DNA, 122 bp, Homo sapiens
agaagtggctgatcgtggcaggatgtgtcgacgatgatgatggcaagaaagcaagatgtccgaattcccacctacaacatcagtgtggtgggattatctgggaccgagaaggaaaagggcca

SEQ ID NO: 308670 - DNA, 122 bp, Homo sapiens
agcgcgcgcacccgcccgccccttggggctcacggcctcagcgcgcctgcgcgccccgcccggggcgtccctcctgagtgccccgggagtcccctgagccccctacccgggccggggtgcga

SEQ ID NO: 308671 - DNA, 122 bp, Homo sapiens
gaacaaaggcagctcccctgaaagagccaaggccaggcgggaggtgccctggagagcggccgagcccgagagccggggcagggctgcctcagaccagagagccggccctgccagccatcggc

SEQ ID NO: 308672 - DNA, 122 bp, Homo sapiens
catcccccacctcccacccacccccttaacattcttttctgggagggacacattcttttacgcctgatgggtcagagctgagggtatgtgtgtggtggggtagggtggtggtcagggtgagg

SEQ ID NO: 308673 - DNA, 122 bp, Homo sapiens
aatctgctcaacgaccagcaggcatcgtacgaccccgtgttgcagacgaagaaactgaggcgcaaggaggttcctcggcttgtatgcctgggtgtcatgtatgagccaggccgtctaggtga

SEQ ID NO: 308674 - DNA, 122 bp, Homo sapiens
aggatgattcctgaaagccaatgaatgtaggacaggcctccaaactgtgccccacatggccgagtagttttctgagccaaaagcctacctccctcttcactcttggctacgtgctgaccgac

SEQ ID NO: 308675 - DNA, 122 bp, Homo sapiens
tattaataaatttaattgtgttgaaatattaagtttacattttggtgggattttccccctcgttttattaaagtggccttcctgaattttattgtggagggatgtttaaagttagtttgggt

SEQ ID NO: 308676 - DNA, 122 bp, Homo sapiens
ggtggaggcggagggaggcggtggcggcggcggcaggatggcgacggccgtcctgctgagcgtgtcggtgccgcggtgggagcgggtggcccggtatgcagtgtgcgctgccggaatcctgc

SEQ ID NO: 308677 - DNA, 122 bp, Homo sapiens
cggactctgggcttgttgccgttgttggctgcagccatggatgccctccctgccacacagcgcctgctggacaccgccactcacgcttagcagcctcccgtgttgcaggggctgcagtgtgc

SEQ ID NO: 308678 - DNA, 122 bp, Homo sapiens
accctgtatggggaggacagtcaggggacagccccatggcaaagcagctcccacagccgacgccgagggcagagggccggggtctcacctggcaggaaccctgccccttcctccctgcacac

SEQ ID NO: 308679 - DNA, 122 bp, Homo sapiens
actttgacaaggcgatcttaaagagacaatgtcttactctaaaggcaaactccctaatggcgtcattgtagggctcatgacagactggtgggaaagacatgtggggtgagggtactgctcag

SEQ ID NO: 308680 - DNA, 122 bp, Homo sapiens
cgaaggctgagcatcgccgcaagaggcggagtctggagcgaggcggagctctcctaggggcggggaaaatggggcggggcctccggacagggggcggagcgtggctgttcgcgctcatcccc

SEQ ID NO: 308681 - DNA, 122 bp, Homo sapiens
agccccacggtagaaggattgggggtgccggaagcaccgcaccgtgcgaggccaaaggtgcgcccctccagcacccaccaaaacaaaagacttcacaaggctcaaaggacccacggctttgg

SEQ ID NO: 308682 - DNA, 122 bp, Homo sapiens
cgagcttggctgagaggggaggcaacagagacgccaggatgggagagctcggagctatttcggactccaggccaacatccacggagaccttgagttacgtcatcggaactgtctggactttg

SEQ ID NO: 308683 - DNA, 122 bp, Homo sapiens
cctgtctacctgggtggattcggatgtaaaaccgacacaggcttttatctgagaactttccgcctactgaacatgactcatggtatttttgacatgggaatgagttctcattaagcacctcc

SEQ ID NO: 308684 - DNA, 122 bp, Homo sapiens
tgaagagctgcatgaagccggtgaggcgcaggtaatgtcagccagcgccacctccgccaacgcagggctgtgtctgggatggaggacaagcattccggcccaggaacccctcaggcctgctc

SEQ ID NO: 308685 - DNA, 122 bp, Homo sapiens
ttcattgtctgaaatatcagcctaaacgtagtttatgtttaggaagcaacaaccgcaaatcgtcccacatccaaacggagtggatttaggtttcactttttcaaggaaaaaccatcaaagaa

SEQ ID NO: 308686 - DNA, 122 bp, Homo sapiens
tgctacgcgctgccgagccggctccccatgccaggtgagtgcccgccctgcccgcccaggcgtcctcagagcgtgctactctgcccgccctgccccgtccggcaggcctggagggggccctc

SEQ ID NO: 308687 - DNA, 122 bp, Homo sapiens
ctattttggacgatattaagcgaaaatgaatgcaaatctgtgttcagcagccatctggcccgaaatgggggaatcagctgctctcacaacaggctcggaggctgaatccatttcagctcatt

SEQ ID NO: 308688 - DNA, 122 bp, Homo sapiens
cgggtacctttttgttgcagcctcgacagggcgctttgtaggatgagagctgcttctccacgtgggtggccttgtccaccttcttggggtcgaagggcaggcggcagagtgggcacagcggg

SEQ ID NO: 308689 - DNA, 122 bp, Homo sapiens
gaaggagtgaagcagcccctgggccactgttgggacccacctttgacagttgtgagacctcggtgaatcatttaataacttggagctgcaaacagtcatctgtaacatgggaggaaaccgac

SEQ ID NO: 308690 - DNA, 122 bp, Homo sapiens
gattttattttcctttgcaaagcttatgctgcccaagctgctttctcagaggtcggctggcgttggtgctcagggcctgcttgcagatttcgctggaacaagtttatttgtagtatagcccg

SEQ ID NO: 308691 - DNA, 122 bp, Homo sapiens
cggtgggctgtgctacccccaggtcgactcctccttgtccctggcactgctgcgtctccccggcaccagcagaagtttccaggcagcagcgcgggtcctgacctggctgctcagtgctgccc

SEQ ID NO: 308692 - DNA, 122 bp, Homo sapiens
acttgggaagtgcaaggggtcagggagttccctttccgagtcaaagaaaggggtgacggacgcacctgcaaaatcgggtcactcccacccaaatattgcgcttttcagaccggcttaaaaaa

SEQ ID NO: 308693 - DNA, 122 bp, Homo sapiens
ttccgcttccggtgtgagcggcccggccgggggggcaagatggcggcggcagtaggggttcgtggccggtacgagctgccgccttgctccggcccaggctggctcctcagcctttccgcctt

SEQ ID NO: 308694 - DNA, 122 bp, Homo sapiens
ggaggctgaccttggacaaaggggcattccggtcccaggaatcaagatttcatcctgctacgcagaatggccggaaacttaaaacttaggacttctgtatttctggaattttccatttaata

SEQ ID NO: 308695 - DNA, 122 bp, Homo sapiens
tcacgcccccggcatgtggccgccctcagtgggaggggctctgagaacgactttttaaaacgcagagaaaagctccattcttcccaggacctcagcgcagccctggcccaggaaggcaggag

SEQ ID NO: 308696 - DNA, 122 bp, Homo sapiens
aaaatgtggatattcaggttaacctgcgattttgttcgaaagtggctaaactgcattatccgaataatttacttttccactccttgggtataactaaaatgcagttggacagaaaagagctt

SEQ ID NO: 308697 - DNA, 122 bp, Homo sapiens
caaccattggaaagtggtttggcagtttctcaaagaacttagagagctactatttgaccccgcaatcccgtttttgggtatataaccaaaggaatataaatcattctgctataaagacacat

SEQ ID NO: 308698 - DNA, 122 bp, Homo sapiens
agttttttttttttaaggttttctgaatggaaaggaaatacagatcagggctgtcatgttcgtgcaggccactcaaggtaaaccatagtggattccagagtttacaccccctgagactgctg

SEQ ID NO: 308699 - DNA, 122 bp, Homo sapiens
aggattcgggctcacggtgtccctggaggctctggtgggcgtcgtggggctggactgctgcggggcaatggggtccccatcttcccggcacaggcatctgatctggtcatctgtttctgtgg

SEQ ID NO: 308700 - DNA, 122 bp, Homo sapiens
ctgggcggccgctttctctggtctttctctgctccgtagacatttctgtgtcaggtgcctcgcatattcgcacccacgcgccagggcattaagccgaaccttgcttggtggctctcagcctt

SEQ ID NO: 308701 - DNA, 122 bp, Homo sapiens
aacagagtttcaccatgttgaccaggatggtctcaaactcctaaccttaagtgatccgcccgcctcggtctccctaagttctgggatggcaggcatgagccaccaccgcacccggcctatat

SEQ ID NO: 308702 - DNA, 122 bp, Homo sapiens
atgctgctggagaggaaaaaaagagtaaatggctcaaagaaagtttcacaggcgctaaggcgtgtgacttctgtttgcttccaaggttagggaagtgtcccactcgtccccaactagagatc

SEQ ID NO: 308703 - DNA, 122 bp, Homo sapiens
ggacacaccggcctcgggctgggccctgcctcagccacatagcagcaccagtagagtgggcggcactgacccggcatcccaggagtgggcagaagggtctggaggagcccaggctgagccgg

SEQ ID NO: 308704 - DNA, 122 bp, Homo sapiens
ggtccggcagtggagtggtagtgaatctgtcgggccatggagtttgccaggcaggaggatcgcgagcgcaggagtagaactgggtggtggaggggagtagtttgagtctagttttgaatgta

SEQ ID NO: 308705 - DNA, 122 bp, Homo sapiens
gggtgactgagggcacctggaaaatcgggtcactcccacccgaatactgtgcttttccgacgggcttaaaaaacggcccaccacgagagtatatcccgcacctggctcggagggtcggacgc

SEQ ID NO: 308706 - DNA, 122 bp, Homo sapiens
tcaggccagcccaggccgcaccacggtctcctagttgacagttcgaggggcctcgcgggccgcttgcttcgtcagcttacagggatcccgcacgccaggtgagcccacacactgagcggaca

SEQ ID NO: 308707 - DNA, 122 bp, Homo sapiens
cttggcctggcgcttcattttgtagcggtggttctggaaccagatcttgacctgcgtgggcgtcaggtggatcatgctggccaggtgctcgcgctccggcgccgacaggtacttctgttgct

SEQ ID NO: 308708 - DNA, 122 bp, Homo sapiens
gatgctgcctgcccgttgcgagctgctggcctaagctcctcactgagactgcctggcattcggaggacgaccacaggggtgtgagctgccccggggtgcattcgcgtcaaagaggttgaggt

SEQ ID NO: 308709 - DNA, 122 bp, Homo sapiens
tcacgcagcaccatgttttcagggttcatccatgctgttgcgtggatcagagcttcatcccgttttgtggctaagaacgccgttgtatggatggaccacgttctgtgtccccaacatcagac

SEQ ID NO: 308710 - DNA, 122 bp, Homo sapiens
cgtggtggtggaagcatgaaaagtgcccggagactttgcagccttgaggagcccacagcccgggcgtgaggatttggctgtgggtcaggcgatgctcaagttctccccatcggctcctgggc

SEQ ID NO: 308711 - DNA, 122 bp, Homo sapiens
aggggccagaatcctaggagctgcggcctgctccccagagagctagttgctgctcttgttcgcattggagataaagaaagccaagtcccgaacccactgctggccgcgcgcagagagcagat

SEQ ID NO: 308712 - DNA, 122 bp, Homo sapiens
gtctgtctccttccagtacaatttaaatcctgagggcagagatttttgatctgttttgttcgtggctatattcatgaaacctaaaatagtgcctggtataggtatatagtacccaataaatg

SEQ ID NO: 308713 - DNA, 122 bp, Homo sapiens
ggctgaagtggacggaactgccaagctccgcctcgcgccgactaccccgcggtctagctgcgctggaacttactgcagctgccgcgccggcctccgcctttattagtgctgaccacgcctcc

SEQ ID NO: 308714 - DNA, 122 bp, Homo sapiens
cctcctagaaatcacactcccgtcactccagtcttatttagcgtggcttagtttcctctgcgccccctgcccccatcaccccgatcttatttaggtcgccttagtttcctgtgtacccctgg

SEQ ID NO: 308715 - DNA, 122 bp, Homo sapiens
agaattacaacaggcaaaagagacagtgacagagaaggacggaccccttgctgagctgcacgctgggaatgagacgagctactcagggcttctttcagctgcaggaagtgctttcaatgccc

SEQ ID NO: 308716 - DNA, 122 bp, Homo sapiens
tctcctcacgcactcacacagacacgtgtccagggctgtgctgttctaaactcgctgacccgcattctcctatcaggagccctccaaacggaaaatggctccagcagcaataccgccaacaa

SEQ ID NO: 308717 - DNA, 122 bp, Homo sapiens
gcgtggacagttgcgaggggtctgtgtgaaggcacttgtcacgagcttcaatactgccgccgtcccaggatgggagaactgcgcagcaggaagggcacttctgaaagcacagtggagagatc

SEQ ID NO: 308718 - DNA, 122 bp, Homo sapiens
aacccgtcatcagctaagtacagagcgggcggcgggcggggcggcggccggggaaattgccggttcccgtgccccgcggggcctgcgggcgccccgagtctgggggcccggggcgggcgggc

SEQ ID NO: 308719 - DNA, 122 bp, Homo sapiens
cgtgcaaggaagccctcctagtactttacatatggggaaactaaggcccacgtctggtagcggctgccttggcaaaatgagaacccaaatctgtgagaaagcctcgagtgcagccccggacc

SEQ ID NO: 308720 - DNA, 122 bp, Homo sapiens
cccgcccctccccccgtaaggctgcagcggatgcaagatctacttgtgtcgctgagctcgcgctcctcctcctcctcctcgccatagagacagcactcggcggcggtggcggtggcggtggc

SEQ ID NO: 308721 - DNA, 122 bp, Homo sapiens
ccagggcagcgacatccaggttcagtacgtgcagctggcgccagtgagtgaccacacggccggggcacaggtgagtctggggccccgcgccgggacactgaagtgatggcatggccgcctgc

SEQ ID NO: 308722 - DNA, 122 bp, Homo sapiens
gcgactctccaagacccgctctctaaggtgctcttcccctttaagactcacggctcttcccgtcaggctgcgtcgcagtcttaaggccccgccttttcagacagcttccgctgggcctgggc

SEQ ID NO: 308723 - DNA, 122 bp, Homo sapiens
ggcgattttctacggtatgatttcatccaaagaggatttcttaatcgcactgtgtgacaccgttaggggacttagagtgtcactcgccgccttaaatcctttcgggaacaagccaggatata

SEQ ID NO: 308724 - DNA, 122 bp, Homo sapiens
tgctccagcccagtggatccaaatggtatttgaagtcactcggaataaccggcagggccccgttcctgttctgggatgcatgctttgggcttgctattgagtgggcacacaggcgtgcacac

SEQ ID NO: 308725 - DNA, 122 bp, Homo sapiens
ctgtaggctttcctgtctttttctcaaaggcgggttcctttcctcattgtcaagattggccgctcctatcctattcctgctcagagcctggtcaaggatgggagtgggggtagagatttggg

SEQ ID NO: 308726 - DNA, 122 bp, Homo sapiens
gccgggaaaaggctcgtactggtgccagaatctcttactgtcaatgctcccaaaactcaccgcttgcccccaccccttttgcttaaatgacgtggttcttatctcagatcctgatataaagc

SEQ ID NO: 308727 - DNA, 122 bp, Homo sapiens
gcgccgttaccggcccagcacccgtgtctccgcacctcacgcctcctgcggcagtggcggcgaccctagcttcgctcgctttggggctgcgccgccgtggcctccaacaacgccggctccca

SEQ ID NO: 308728 - DNA, 122 bp, Homo sapiens
cccaggcaacttttcaagcccaccgataatcaagaaacttagttttatttcaaattgttccgagtaactatgtttttctattggagacaaaatgaacatcgtaacgtcaaagtaccaagata

SEQ ID NO: 308729 - DNA, 122 bp, Homo sapiens
cttgctcctgatgccgctctacgcgcagcttagtctgtcttctcctctcctccccgcaggcgactccttccaaagagcgagagagaaatacgggtattactgttatcccccactgggttcaa

SEQ ID NO: 308730 - DNA, 122 bp, Homo sapiens
gggctggcggcggcttgctcaggagccgctggggctggaggttgaccagttcctggaagacgtgcggctacaggagcgcacgagcgggtacgttgggcgggacttccgggaggtgggacggt

SEQ ID NO: 308731 - DNA, 122 bp, Homo sapiens
gcgcaccgctgcgtacctagcactccgacagatgtacgcatgcgcacaacgctctgttctcgagatccccgacagaagcacacatgcgcacaccgctgtgtgccaaggtcgccaaaagacgg

SEQ ID NO: 308732 - DNA, 122 bp, Homo sapiens
tggccctggagagcatgtgcacgctggccagctctgagttctcccatgaggctgtcaagacgcacatcgagacggtcatcaacgccctgaaggcgagtgccctgtccttgggttctgctcac

SEQ ID NO: 308733 - DNA, 122 bp, Homo sapiens
ctgacaggcgtgggcgtccctgaaggcctggcgctccagaattctttccacctgtcttcacgccctgctcccagcctctggctgagtgacgaggattcagagggtcagaaggggacacacga

SEQ ID NO: 308734 - DNA, 122 bp, Homo sapiens
gtagaatcaggggacccaagggatgagaaaagatagatgtgtagggcagatgggctgaggcgcaggaaataaaaatattcccggaagggtgctctggttttgtatggattcagggctagatt

SEQ ID NO: 308735 - DNA, 122 bp, Homo sapiens
cacaaagaaaaaggagagagagggagagacagagacaaagaaacagcccatgtaaccaagcgccgaacatgatttgaacaaccaacttagtaaacatcaatcttaggctgtgttatgtgaaa

SEQ ID NO: 308736 - DNA, 122 bp, Homo sapiens
agtatttatttaccatgggttaatcattcatttgctttatctgtttgttccatgacatgtcgtttcttcctaactggtctgtagcttctttcctttctatctcttttagattgctgcagatt

SEQ ID NO: 308737 - DNA, 122 bp, Homo sapiens
tacctcaccataacctcacaaggactgagcacaccacgggggctcagaaaccagggtccccgctcagaaactggtcccctcactcacacgtgatgtggccactgaaaatggctgggtgccct

SEQ ID NO: 308738 - DNA, 122 bp, Homo sapiens
aagtctggttttaggcaatctctaaaataaggatacttttagcagccctgactcatggtccgtggtgcaggaataaaagggcagaagtgttcatacatttctcatttagggaaaatgtaaac

SEQ ID NO: 308739 - DNA, 122 bp, Homo sapiens
cggccccggcccaggctcccgcctccgggccaagtctctcgctccgcgggcttcactgctcgcccccgcccgggcgaggtggcaaaacaaacactccgccttccagaccgggcaggtacccg

SEQ ID NO: 308740 - DNA, 122 bp, Homo sapiens
cttgcaccgggtttgagctgaagcccaattctcaccggccacgttcccaggctctgggttcggggctgcagagctgcaggaccgtgcagtccttttaagtgtgaatgttttcaccttcctgt

SEQ ID NO: 308741 - DNA, 122 bp, Homo sapiens
ccatccagtacgctccaaacacatcttctggaataggtttaaatcccagcctcaggaagacggcccccttgccaagttattcctttcttgggtcccagggaattctttggaacaggggtcct

SEQ ID NO: 308742 - DNA, 122 bp, Homo sapiens
ccatagaccaagcccatggcagacaagaccaatcaattacagcattctttttgaaaagctcgaatgtggtttccaaatctttctcaacacaacactcctcctggcagcaaccattcatgatt

SEQ ID NO: 308743 - DNA, 122 bp, Homo sapiens
ttcttccgtccatccggggtctgtcccgccgtggtattttgtgttgtgagtggaagctaacgttcccttttagctcctggatcgggaggagatgtgttcagatgggaggctgaggctgtttc

SEQ ID NO: 308744 - DNA, 122 bp, Homo sapiens
accagctcttttataaagagggagacccgctccttctttaacagcagattcgtcaaaatacgtccaaggcaaggaaacctagaaaggcgtctgggcaggggaaagtcgatgcgagggcgggc

SEQ ID NO: 308745 - DNA, 122 bp, Homo sapiens
agcaatgcgcctggggtgttgggccttcgtcaaggtcagcctccgcctctcagcctgctgcgccggtgtgtgctgcacctgcactctcagtcagtgcttccctgcattccgatatcacactg

SEQ ID NO: 308746 - DNA, 122 bp, Homo sapiens
cctaccatcacctctgttctgaagatggaaaaatgaggtaagaatgagccaagggtgacacgggcaaggatgaaactgaatatgcatccaggcagtcggcttctggagccatgatgttagcc

SEQ ID NO: 308747 - DNA, 122 bp, Homo sapiens
tctccaagtccccacccgtgccggaagcccagctggcttcaccgctctctggcactgcagcgggactttgccacacctaacccagacagtctggcagcccagagggagctcattcgagacaa

SEQ ID NO: 308748 - DNA, 122 bp, Homo sapiens
gcttgtggcccggccggagcttgcgtgcgcgttctgacggctgggtgctgtgttacaggtcggcgcagttcgagcacacggttctgatcacgtcgaggggcgcgcagatcctgaccaaacta

SEQ ID NO: 308749 - DNA, 122 bp, Homo sapiens
aacaaatataaatccttgcactcaaatggacagttcattacgtggtaccgcgtcctgttgcggatcaaggccacctgagttggttaggacagctaagcgggacgtccagggctgctcgccag

SEQ ID NO: 308750 - DNA, 122 bp, Homo sapiens
ataacagagccttcatttcaaagactacctgaagtaaaatgcagttttcttctacctactcggtgtcttttgcagatcagagtatggacatttgaaatattgctgcttctttcccccttctg

SEQ ID NO: 308751 - DNA, 122 bp, Homo sapiens
ccacccccaggcggctcggggccccgcccctgcagcccgaggccccgcctccaaggggctcgagtcctcactggaccaagcgacacagaactgggtgcgtccccagcacagcaggtccggga

SEQ ID NO: 308752 - DNA, 122 bp, Homo sapiens
ccaccccggcaggatcagcttgagccaagggtgtggtcttggggaatgtggcctccagcccggtggactcagcagctggcctggaccggggacctgtttgggggaggaggggaagaggacag

SEQ ID NO: 308753 - DNA, 122 bp, Homo sapiens
ctatatttttctcccttttccatctcgcctctctctttaaatattatatattatctgatacgcagtccatattcagttcccctagtgattcctaaaatgtccagtataggattcaggatcca

SEQ ID NO: 308754 - DNA, 122 bp, Homo sapiens
cgcggcgtcgggaggtcacggcgtcaggcttcccagacagtcgtaaacgccatgtgtttacgcgactggagcaagcggacgccggccccgctccgtcattgcaggccacgcctccactgaac

SEQ ID NO: 308755 - DNA, 122 bp, Homo sapiens
ctccaaatagccatacttagcctcagcaggagcctggcctgtaacttataaagtgcacctcgcccccgcaagccccagccccgaggaccgtccatggaccttatttttatatgagattaata

SEQ ID NO: 308756 - DNA, 122 bp, Homo sapiens
gtgcctgagcccacgtgaccgagccagggagcccgacggtctcaggaacgcccgacgccgcgcgtgacctctaagtgggagcaccctcgaaccgactcctggtccacccacaaggatagtgg

SEQ ID NO: 308757 - DNA, 122 bp, Homo sapiens
cagcaggaggatgggctgccagcaggccaggagggggctgggcatgctcctcacgccccccgccagcatcctcttgctcacctgcagccgggagcaagcacaggacagaggtggcggttagg

SEQ ID NO: 308758 - DNA, 122 bp, Homo sapiens
cgcgctcccacctttgccgcacactccggcgagccgagcccgcagcgctccaggattctgcggctcggaactcggattgcagctctgaacccccatggtggttttttaaacacttcttttcc

SEQ ID NO: 308759 - DNA, 122 bp, Homo sapiens
ccgggagcgctcctccagctccaggttgggggagtcggggtgggaggaggttcgggaaatcgactgatttagaggctgggggtgagtagcctcgatttatcatccctgatggtgagagtgga

SEQ ID NO: 308760 - DNA, 122 bp, Homo sapiens
gctgtggtttcgctggatagtaggtagggacagtgggaatctcgttcatccattcatgcgcgtcactaattagatgacgaggcatttggctaccttaagagagtcatagttactcccaccat

SEQ ID NO: 308761 - DNA, 122 bp, Homo sapiens
aactattaagacgatgaaggcatcgacagtattaatgtcaggtgatctgaaataaactcccgtaaccccaccccacccccaagagtttccattaacttgatcccattatgaacagccacatt

SEQ ID NO: 308762 - DNA, 122 bp, Homo sapiens
gcggggcgcctcggaggctgtgacctccagggaggtccggctgggtgcagcgtgacacgccggggcggttgccaaggacctgcccaatctgcgggtccagttgctagggcctccatcttggg

SEQ ID NO: 308763 - DNA, 122 bp, Homo sapiens
acagcgggctacgtgctctgaaaagagccagccaggggccccggctacccttctccggctcgctattcctctgaagtcctgtggacttggagtctgaaaattcctcgagtggtagagatgcc

SEQ ID NO: 308764 - DNA, 122 bp, Homo sapiens
tgcggcaggcggtgggggcggcatgctggggggtgtggaccggggctgcgtcttcacctccgctggggagtccggcatcgctgaggccttagctttcctgtccactggggctgcgaccaacg

SEQ ID NO: 308765 - DNA, 122 bp, Homo sapiens
actaaaaatacaaaaattggccgggtgtggtggtgatgcgcacctgtcatcccagctactcgggaggctgaggtgggagaatcacttgaacttgggaggcagaggttgtggtgagccgagat

SEQ ID NO: 308766 - DNA, 122 bp, Homo sapiens
gagggtgaggtgggcggatcacttgaggtccggagttcaaaaccagcctggccaacatagcgaaaacccatctctacaaaaaacaatagaattagctggccgggcgtgggggctcacgcctg

SEQ ID NO: 308767 - DNA, 122 bp, Homo sapiens
gccggccgcaggtgcgcgccgccccgccctgcccttcccgcggccccgccccagcgctgacgtcacagtgacgcgcagcccgcgcaggcgcagctacccggcaccccctccccgcggccggc

SEQ ID NO: 308768 - DNA, 122 bp, Homo sapiens
cgaattttctgggttagcaaacctccattcctgacatagttttgctcctggatgggtacgcgcgggggctctcaggcgctctggtgcagccgcggcgcttctgggagtggagcgcctctgca

SEQ ID NO: 308769 - DNA, 122 bp, Homo sapiens
tttaccgaagggagtgaaaagaacacctcacccaaacgcccgcccttatgtgcgcagccccgcctcctgtaggccccaccccaccaaagggtgcgcctgcgccgttcttttttccgtccacg

SEQ ID NO: 308770 - DNA, 122 bp, Homo sapiens
tccggccaacctgcaggagagagctgaggaagaaccacttgccgcgccaggagcatcccgcgccgcactatggaggcagccatcttggagcgtaccaaaaggaacagccaacgggttacgga

SEQ ID NO: 308771 - DNA, 122 bp, Homo sapiens
gaagcctataaaagataggtggtgtgcctacaagagcgaggactctggtatgttccgcagcgactcaagaaccacgtgagatgtgctaggtaaaggcaattcactcttgtttcaggttgcac

SEQ ID NO: 308772 - DNA, 122 bp, Homo sapiens
cggctgtgcaatcagctccaggtaacctgcggggacccgtaattgctctggagttgcctgcgagtttgcaaggtaagcacgcgcggcgcttctccctggccctggggcgcgcggtggagcgc

SEQ ID NO: 308773 - DNA, 122 bp, Homo sapiens
atccctccctgcagttccgcagcctccggcttccccacctcagcttggctgagagtttcacgttcatccaagtgcttctttacagactcactcccagctggaggaggcagagggtaaggtac

SEQ ID NO: 308774 - DNA, 122 bp, Homo sapiens
agtgccagcatactcagcgtggccggtgagtgggcaggagtacgggccacccgagggactcgggacgggcgtccgggctcgggtagtggtcacactcttggtctcctttgtccctagttcgg

SEQ ID NO: 308775 - DNA, 122 bp, Homo sapiens
aacccaagtaacagtgcgcgtctgacaccccttcgctatgacctgcgagacagaatcactcgactgggtgatgttcaatatcggttggatgaagatggtttcctacgtcaaaggggcacgga

SEQ ID NO: 308776 - DNA, 122 bp, Homo sapiens
tataggcaagaaagggaaatccccatatgccagaaatggagtgggaaccgcgagccaggacgcgcagggagctgacgctgcaggtgggaaccgagagccaggacgcgcagggagctgacgct

SEQ ID NO: 308777 - DNA, 122 bp, Homo sapiens
aatctaatctcagggcccatttaggagaagtagctgggaccacatcgggcctcgaggatgcgagtgtgaggtcgacaagatatcgtggaagagagcgaacgagggaggcccccgttggaaac

SEQ ID NO: 308778 - DNA, 122 bp, Homo sapiens
cagctcgagcttacctgacggccgaacgcagccatagcgcggagaagatggcagcagttacggcgccggaagcagcggtcctcccccgtccttcacttccggcccccggtccgtcaccgacg

SEQ ID NO: 308779 - DNA, 122 bp, Homo sapiens
gtgtcaggacagccaccgttgggcatcagggaggaccagcagacagaatagtggtggagccggtcacagagctgcacggggcagggtggagccggtcacagagctgcatggggcaggggacg

SEQ ID NO: 308780 - DNA, 122 bp, Homo sapiens
agtgatccacccgcctcagcctcccaaagtgctgggattacaggtgtgagccactgcgcccggcccatttcttaggcttgaaatgttacctatgtgatatccgtataggtttaaacatacca

SEQ ID NO: 308781 - DNA, 122 bp, Homo sapiens
ccccgggagcagcctctgccccctggccccattggcacagaacgatcacagcgtacagaccgaggcacagagcctggccccattcggccatcccatcgacctggtcccccagtccagtttgg

SEQ ID NO: 308782 - DNA, 122 bp, Homo sapiens
ggtcccgacctctcaggattgcttccggggttacagcggcgtcctcagaccatagagttccgcaaaagaagagagtacatcctcatgttccggcgctggaacaaccatagagacatgaacct

SEQ ID NO: 308783 - DNA, 122 bp, Homo sapiens
ccccaccccctcagcctctctcctaactagtatggatcttaggagagctatttttgccagcgaaggtaaagtttctgaagcttccttttacccctgctattgccccgttactccatagtcac

SEQ ID NO: 308784 - DNA, 122 bp, Homo sapiens
aattgctgcatagctatatggtttccactaacatctgtgggagtttaattttctgcattgcgatgaaaatgcaatctactcagaggccaatcatatttctggattgtggaataaaattaaaa

SEQ ID NO: 308785 - DNA, 122 bp, Homo sapiens
ttgatggcacactggctggaagccattggctcataaaatcatgagtcactgcagcagctccgtgcagaaaagtccacagtgtgggagtggtgaggagaatctgcttgagtggtattgcctaa

SEQ ID NO: 308786 - DNA, 122 bp, Homo sapiens
ttcaggtgcgcacagtcctcctgcgacgtcagatgcgctggcgccgcggcgctcctggctcggaccgatgcctgcgccttccctggccacgtcctggtgtttagtgcagcagacaccggccg

SEQ ID NO: 308787 - DNA, 122 bp, Homo sapiens
cgtcagactcaagccaagacatctccaagatccctgacaataaagcaaacactaggctggcgctggctaatagaggaacccagagggaaaaacgcttttctgtttatggacaattctccttc

SEQ ID NO: 308788 - DNA, 122 bp, Homo sapiens
cactaatgtgcttcaggtatatccctgtctagaagtcagattggggttaaagagtctgtccgtgattgactaacagtcttaaatacttgatttgttgttgttgttgtcctgtttgtttaaga

SEQ ID NO: 308789 - DNA, 122 bp, Homo sapiens
gaccttggacagcgtccctggtactggagctgaggtctgggcttaaggctgccgcaaaagcggcagccgcatctttcccattcctgccagcctgcggtgagaaaggggcgcaggctgtcctg

SEQ ID NO: 308790 - DNA, 122 bp, Homo sapiens
tttgttgggtgtggatgtttgtgtttatgtggaaacattcctgcacctttttctggcgtgcggttcagttacatggaaaaggtttggcctctcaggtcttattttaaagtggccgtcagggc

SEQ ID NO: 308791 - DNA, 122 bp, Homo sapiens
gcgccagcaaaagaggctggggattaatttcctgcgcgctccacaagaggcggggctgggcggggcgggggcgagagggaacgagggcgcctgcgcggagaggagtgaccatagagtcggtc

SEQ ID NO: 308792 - DNA, 122 bp, Homo sapiens
atctcttaaagggcatccacatctgctttatccctagcggaagagtgagggggcttcacacgtgcactcacactgtggagagagttggatttcccagacccctgagggcacctgtcagggtc

SEQ ID NO: 308793 - DNA, 122 bp, Homo sapiens
cagcagcagcgagcaccaccagcccattcaccacccggccccgggccgcagcacctccgccgcctcagcccggggatccctccgcccaggcccagacacactcgcccgcgcgggagcccgcc

SEQ ID NO: 308794 - DNA, 122 bp, Homo sapiens
ctcggagacagcatggtctatacagaagcagcttggatttgtcaagacctcagttcaccacgcagctctgctgcattttgagtacctgtgggtaaatgacctcacctcttcagccttatctg

SEQ ID NO: 308795 - DNA, 122 bp, Homo sapiens
cgaaaggaaacacactctcgcacacaaagaaaagtcccagagaaaccagggccggcgatgcgggtcgggaggcaccggagaagcaatgacattcaaatgaaaaaggcaacgaaaacgaaact

SEQ ID NO: 308796 - DNA, 122 bp, Homo sapiens
ggtcccctgagtctccgggtccaagatcgaccccgaggctgcgggacctgcagagatcctcgacccgggagagccccaggcgcctttacctggtttcatcttcagttgaggccaaaatctcc

SEQ ID NO: 308797 - DNA, 122 bp, Homo sapiens
aactgcaattccaaaaggaagtaaaaaggaaaatagtgtgttcccacctacctccccaaccgcagatctctcagaggctgagctgggtgtgagagagtaaaacactgagccgagcacacaga

SEQ ID NO: 308798 - DNA, 122 bp, Homo sapiens
agcagccggcgctgcggagttgtgggcgacgcacggcctggtttccacggcctttgtaaccgccttggaggccgcgatggctgtaaacattatctctttccccttgttatttcaaatggaga

SEQ ID NO: 308799 - DNA, 122 bp, Homo sapiens
ctcaagaaaattttaaatgattttacagatacaaccccaaagatgaagctccaacaaacccgccactactcgagcctttctcaccgtcttcctcacaggccccaccccctaccgcgaggagc

SEQ ID NO: 308800 - DNA, 122 bp, Homo sapiens
tgcaggaaactacaactcccgaaggggaaatggggaaaacgcctccgcctccttggtgtccgcaaggtcctgctaacaagtttgcagggtctatatcttcctggagggggggggggggggaa

SEQ ID NO: 308801 - DNA, 122 bp, Homo sapiens
tggagacgggggggtgcacaaggtgcggagccagctagaacctgtcgctccctgcagaagcggtttctgtgtgcggttctgatttgcctcaatgagaaggttttcattcatggctcccggct

SEQ ID NO: 308802 - DNA, 122 bp, Homo sapiens
aaacacaactacgtgaagttcttgttcctgtgctaatttgtccttctcttcaactaccaccgaaaatatacctctcacccacttggctcttctcaaagactgcactgtaatgcaaaagatat

SEQ ID NO: 308803 - DNA, 122 bp, Homo sapiens
acttctcaaatttatttttgccaactctctgcttccttactaaactatggtatccataagcgtagcttacagtgctcaacatttattcattaattggacagatactcactgagcttctacta

SEQ ID NO: 308804 - DNA, 122 bp, Homo sapiens
ataaatgtctgcttaaatacatggataagtgattaaaagacttatttctctagagaaccacgaaggaaggcagatgaagctgtaaggacatggagaagcaaaatgctgcaaatctatttttt

SEQ ID NO: 308805 - DNA, 122 bp, Homo sapiens
taagatgctggctgagctgtacggctcggacccccgggaggagctgctgtattaggcggccgaggtcactctgggcctggggacccaaaccccctgcagcccaggccagtcagacgccaggc

SEQ ID NO: 308806 - DNA, 122 bp, Homo sapiens
tttatgaatgttgatatgccctaaagggacatgtgttttagacactaaatgacaggtgaacgcagaccagcatgaggaagtagaagtttggccagcccttggtttagctctaggtaggagcc

SEQ ID NO: 308807 - DNA, 122 bp, Homo sapiens
actgtggtggagagaaagtgggggctcgtgccggtgaccataggggtgggggccaggtctcgggggagtagcttgcaccacttagtcaaaaatgaagtatctgcatagcttatgatctggcg

SEQ ID NO: 308808 - DNA, 122 bp, Homo sapiens
aactgtgaccacacgcaaacacgcacgcacgcacgcacactcgacgcgaccagacaggcgcgtgcgcgtcagtcgaaaactccgcccctcacacgccctcgccccgccccgccagtacctag

SEQ ID NO: 308809 - DNA, 122 bp, Homo sapiens
ggaaacgctgccagtctatcacaaaccaaggggggtgctccttctcctaggcacccccaccgctagtgtcaggtgccttccttatataacacatcccattttaagttagcctaaaacttcac

SEQ ID NO: 308810 - DNA, 122 bp, Homo sapiens
cacccccctaattgatcttcatttccattttaggctctgtataatacattctttactgtgcggtcatatctgtttttctctgcttcatattcgttagtgaatactagctagagtgaagaata

SEQ ID NO: 308811 - DNA, 122 bp, Homo sapiens
cagcgcgctgcagccgccctgctggagaagccgaactccctccggagtggggggctttgacgaggctggtgttcagcccaacaaagagggacgaggaggaaacaaacaaagtcccgcggagc

SEQ ID NO: 308812 - DNA, 122 bp, Homo sapiens
tttgctggcagcctgtgaacagtccacgcccatcacagctggtgcttgacctgagaggcccgaggacaaatccgctggcctacgaccatttctccagcacttgaccacgcctgcaggaggta

SEQ ID NO: 308813 - DNA, 122 bp, Homo sapiens
acgatcccatggggggtttccttctacccagccccgcgtcctggcctcgtccttaacccccgggttgccttcactcaggctgggaatccacgattgatttcctactacggaagcgggtggcg

SEQ ID NO: 308814 - DNA, 122 bp, Homo sapiens
ggtcccacccttggcgttcatcgttggccaatagggcagaatcactctgaggcgttgagccgcaaaccccagaaagttctccagccaactgccttgttagattctttgcaagtgggctctag

SEQ ID NO: 308815 - DNA, 122 bp, Homo sapiens
aaggtctgttttctcagaggggagcagcaggaagctgcaaggatgtttgcccagcacacccgtttactccctgcagctggggaggccaggtgtgggagtgacggggacccagggaccagccc

SEQ ID NO: 308816 - DNA, 122 bp, Homo sapiens
ttaccagctccattctacaatagaggaaactgagtaaatgaactcacccaggggtcctgccgctcgtaagtggcaaagccaggattcagttcaagtcggggcctgtaaacaccaaagcactc

SEQ ID NO: 308817 - DNA, 122 bp, Homo sapiens
caagggttggcgttgggataagagggtgaagtatcagctggccctgattctctgaattcccggacccaataacgcgaccaagcaccgtgactcccaggaaaactagcggagtgagcgcggct

SEQ ID NO: 308818 - DNA, 122 bp, Homo sapiens
ccagagtggggtgaagctaagatgaggggagggagagtatgggtttgagtttccctgggccgtcgaggaatcctctgagtctctgctccccaaagaaattaaagacaattcatttctgtgcc

SEQ ID NO: 308819 - DNA, 122 bp, Homo sapiens
gttgtcttccggctttgggcgtggccacgatgcactctgggagtcgtagtaggggaagaacgtcctccgctcttttgcgcacggtcgctagaggttctgggaagtgtagttgcctgaagctc

SEQ ID NO: 308820 - DNA, 122 bp, Homo sapiens
cagaacgagttcccactcaccaataaagaacacagctgagtctccaatcagtgagtctaccgccactgcagggtcaggcagcagtgccaacctagatgctggcagaaatgacgatttcaagg

SEQ ID NO: 308821 - DNA, 122 bp, Homo sapiens
cctacattttttgaacagcaaggcttacatcaaaccttgtgagatctcatcggcccacctcgatggatctttttagatcctggtgctcttgcccatgaattcacaatccctgccaggttggt

SEQ ID NO: 308822 - DNA, 122 bp, Homo sapiens
tatacttgacaactaaagatttgcaataaaactctcacaggataaattcattgcctttcccgtgaaagtttggctgaagaattgtgataacttcaaatgataagaggaaggtttttcttttt

SEQ ID NO: 308823 - DNA, 122 bp, Homo sapiens
cgagccaaggacccggggaggggtgcggagtgtcttttcggcttgtctcctccgggggtgcgtgcgtgcggacgcgcctagtctctgggcgcatcccgtaatggcccaagaccctccctctt

SEQ ID NO: 308824 - DNA, 122 bp, Homo sapiens
catacttggcctgagtgtgtttctcgtttcggccctgcagttgtgggcggtggtgagacgcgttccgaaacaggaccccgtcacggtgtgtggccctcgatgaccccccaacagggtgtctg

SEQ ID NO: 308825 - DNA, 122 bp, Homo sapiens
ggttttatactttctcaagccactgaggaacaagtttgcttaaatctttgcatttgacttcggcagttaataagcatcagatttaggtacatttaatattattatcttctatctcctctatc

SEQ ID NO: 308826 - DNA, 122 bp, Homo sapiens
agtgagctggcccgtcctctattgttgggcctctctgttgctttcagtccttttgtatttcgcacacctttcaggggctgagtgctgctactaaaccgctttagaaacagccttatcccatg

SEQ ID NO: 308827 - DNA, 122 bp, Homo sapiens
gggcacttagccgtgcaggaacaatggcaagcctttagccggatggggagcagcaatgggcgcctcagtggatcaggagcacagcggacaccctgacggatccggagggatggatgtcagtg

SEQ ID NO: 308828 - DNA, 122 bp, Homo sapiens
taacgagacgagcacaatcccgtgagctgaacagaggtgcccactgaaggacagaaacggcgctccaagggcacaaggctgtggggcttaaaaagggggattccggagtgccaggaagagtg

SEQ ID NO: 308829 - DNA, 122 bp, Homo sapiens
cacagacagagtctgggttcttactcacctgggcaggctatgggtggggtggggtgagaacgcactcagcagcctcagagggacataggaagaaaggagtgaggaaaactcccaggaattta

SEQ ID NO: 308830 - DNA, 122 bp, Homo sapiens
catctcggctcactgtagcctctgcctccccggctaaagtgatcctccagcctcagcctccggagcagctggggccacaggcaagcgccaccactgtaggctaatttttttttttttttttt

SEQ ID NO: 308831 - DNA, 122 bp, Homo sapiens
cacatgggagaacagccaagcctttgtggggattcagcgtcctccgggctgccccctctccgagaccctgcggctgggaaaaccaggcccccagccgtaaaatcctggagtcgaccagacct

SEQ ID NO: 308832 - DNA, 122 bp, Homo sapiens
cctgcttctcggattgctaggagccagcgcaggcagatgccggttccggggcttggagaacgtggctcggtggcacagagccgccgggcgaggcgggggcagggaggcgggcgacgggattg

SEQ ID NO: 308833 - DNA, 122 bp, Homo sapiens
taccctactaactttcagtcactgagacacaaatcagggcctggttggcagcagcgagaccgtcagggtgccctccccacctgcgacaataaacaccgcatgatgttaccctccagggatga

SEQ ID NO: 308834 - DNA, 122 bp, Homo sapiens
taggttgcctgtgaggtgttcactttctatatgatgaatattatacagtcaacctctttccgatatcgaatcccaccttggatgccttcctctttgctgtcaactccaggcagcagctggct

SEQ ID NO: 308835 - DNA, 122 bp, Homo sapiens
tctcgagacaaggccactttacaacctagttctgcccaagatggtggcagctcgaccaggcggtagataaggcaccaaagtgagtcatggagactcccacctgctcattccctcctctgcat

SEQ ID NO: 308836 - DNA, 122 bp, Homo sapiens
catcgtcacaagtaacctcagaaggtgacaaggtaatggctccactgcattccttgctgccgctaatcctcaccacagaaagggaaacggaggtgcagacaggcccatagcagcaccaggcc

SEQ ID NO: 308837 - DNA, 122 bp, Homo sapiens
ttgttgcatcatgccaagctctgtgttctttctaactagtagaatggagtgggatggtatcgtgatggtgaacccaaaacaatggtactaggaaggaggttggccaaactcagagtggaggc

SEQ ID NO: 308838 - DNA, 122 bp, Homo sapiens
agctggagaagggcggtcgctgaccggttggaaacaacgtcgtcgccatggaaactgtggcggccccagctggaggggctgggtgaaggttgcctggagaggcagttgccaagctgcaaggg

SEQ ID NO: 308839 - DNA, 122 bp, Homo sapiens
cgccgaccttgcagaggggatggctgcgtgcgggagacccttggcacttctgggcgccctcgccgcgcgcgagccgagcaggtacagagggacccagcctccccagccgccttccagccgca

SEQ ID NO: 308840 - DNA, 122 bp, Homo sapiens
tggatatacacaacagggtaattggttttatcagatttctaaactttaaaacccctttttcggaacacaagtgatctcagatctgagtcactgctgagaggtacaaacttaaaagctaccat

SEQ ID NO: 308841 - DNA, 122 bp, Homo sapiens
cttattcctttgaaaagatctaggaacaacacttttctctaactgcccggctagctcagtcggtagagcatgggactcttaatcccagggtcgtgggttcgagccccacgttgggcgggttt

SEQ ID NO: 308842 - DNA, 122 bp, Homo sapiens
gagacgactggggggcgcgcggcacaaagagctttttattcaaatttgtttagagtttcgcgaatttgcatgaaaaatgtgtgagaaaagccagctccggtgacctcatccgcacctgccat

SEQ ID NO: 308843 - DNA, 122 bp, Homo sapiens
tcaaagagacggtgaggtttcactatttcagaagtagaatttctaggacttgatgacctacgggatgtgaaaaagatggagtcaaaagtaatagcttttactttgcccacgtgggtgggtgg

SEQ ID NO: 308844 - DNA, 122 bp, Homo sapiens
aagaattggaaatgggttgaatgctgtttgtgaggcaaagtgtgtcaaagatgattcaaacgtttctagctttggggattgtgtgctgccatcaattaagacaggaagctcaaaagaaagcg

SEQ ID NO: 308845 - DNA, 122 bp, Homo sapiens
caatgggcttcaaggcttggtaagtcacccaatgcacctaggaatcctctatctctgctacgtggactttttgtgctgtttggacctagcatgggtcattcatactgctatttttggcttgt

SEQ ID NO: 308846 - DNA, 122 bp, Homo sapiens
ctccagtatcagcattccaggcccacccacctgggcccttggtcaccgggagacctcacgcgtacacacaggctctaacctgccctgagcccagatccggcgtttcccaagcagctctctca

SEQ ID NO: 308847 - DNA, 122 bp, Homo sapiens
ccttggtctgcctgctctgccgactcctccaggagtgtcttctcgttcccacgcgagtctcgtcgcgccgctgtgcctgctctgccgactcctccaggagtgtctatttcttcccacgcgag

SEQ ID NO: 308848 - DNA, 122 bp, Homo sapiens
ccagccgaccctgcccctcccgtggctggtgggcggcaccaggggctgcctggctttgctcgttcaccaacatcacctgggctggccagggcgcgctcacttctgccaccaccgagggccct

SEQ ID NO: 308849 - DNA, 122 bp, Homo sapiens
gcccgcgcccgcggtcgggtagcccagcgacgacgcgtacgggaggccggacgaggacgacgagatctctgccattttggagcccaggtcgagcagcgagtaggggctgcccgcggcggcgg

SEQ ID NO: 308850 - DNA, 122 bp, Homo sapiens
agataaaggcatgctgcactgccaacttgggggaacgctcacccatgtcggagtgctggccggtccaagccccacccccatggcctgatgcacgccaccagcctcccgctgaaaggtgacac

SEQ ID NO: 308851 - DNA, 122 bp, Homo sapiens
ggtgtcccggtgcccagccttctctcagcaccaccctgcggggacggctgcgagcccgcgcgcgagagcctggcgccccaggcagccccgcccacccagccgccgccacccgcgggacgggg

SEQ ID NO: 308852 - DNA, 122 bp, Homo sapiens
ggtgtcctgcaggagcctggaaactcagagagaagaatgagcaggactccccatccccctcgcttcccgcctcctgaccccaccagctgctggctggggcctgtttttattacaggcaggtg

SEQ ID NO: 308853 - DNA, 122 bp, Homo sapiens
gttctgaatgtctctaggtctgcagaaattattgccagcccttcttcacttaccagagcacggtaaagatgaatttgacaggcaggagcctgaagacatatggtatttgtgctgtgggtttt

SEQ ID NO: 308854 - DNA, 122 bp, Homo sapiens
tacccgcaaaggaggctgggacagggcggtgccgaagactccgagggagggcccgtgtcgcgcggctgccgcgcaccggggccacagcgccccctggcggccccaggggagcagacggcggc

SEQ ID NO: 308855 - DNA, 122 bp, Homo sapiens
gtaaacccccatgatttgactccacgggcagttaaagtgtgttcccaccccccacggatccgctgccactaggctgtgcgaaggcatttacctccctggcactttgatccaagttccctatt

SEQ ID NO: 308856 - DNA, 122 bp, Homo sapiens
ccggccccctgcctgagcctggtctgcaccccagtgagccgtgtatccagcccctgctgccgagtgacctgtgagcccagcccctgccaatcaggctgcaccagctcctgcacgccctcgtg

SEQ ID NO: 308857 - DNA, 122 bp, Homo sapiens
gttgttccatgtctagggtactccgactttggagttttggagagccacgtaacgagggtgcggctaagatgaggaaaaggcacttccgggattagatttcgttcttgcccagacatcgtctt

SEQ ID NO: 308858 - DNA, 122 bp, Homo sapiens
gtggattcaaagattttctgattggcaattggttggaagagttaggttaccatctgaagacgtggaatcaatagaaaagagtgtctgggttaaaataaggggttgtggagaccaagggtctt

SEQ ID NO: 308859 - DNA, 122 bp, Homo sapiens
acccgatcccgctttggtcacaaaagtcttggatccaggcggagaccttggggacccaggcgcagagagtttcagacgccacggagtttagatttctttggggatgaggcgtggggggaggg

SEQ ID NO: 308860 - DNA, 122 bp, Homo sapiens
ggcagcgggacctggtagaactggcctcagggctcagtggagttgccagactagactggccgagagaggagccaggacagaatttccaggcagggaagcaggaaatttacttcaaatcactt

SEQ ID NO: 308861 - DNA, 122 bp, Homo sapiens
agggggatatgtattattaagaaatttaggtttgatctgtattacttttacaacacagaacgagaaaagaatgtagacctccggctggggttagacttgctcccttccgtaagatgatgaag

SEQ ID NO: 308862 - DNA, 122 bp, Homo sapiens
ccgggggcctggccccgttttgaacccgggcccggcggctgcgttgggtcgccccaaacccggtgagcgtacgagactgttgcttcgctgtatgtctcatgtgcaccccctactcaccggtc

SEQ ID NO: 308863 - DNA, 122 bp, Homo sapiens
ttcctcagagggcactgcggtggttcctagccaacctttggaatgaagcgattacactggcggcttgtggaagattttgtaagtacggagtgttcaggcccagctcttttctgcattagcac

SEQ ID NO: 308864 - DNA, 122 bp, Homo sapiens
ggcccccggcagagcataagggcccgaggccagggacctagaggccggaccaagttcgcgcgaggtgttcacagcctaggcgccccgggcttggcttcgtactctgcaacaagccaagctcc

SEQ ID NO: 308865 - DNA, 122 bp, Homo sapiens
atccctgtcccccacggggcaagctgggtccctggagccctggagtggagcggcgagtcccggggcggtgcctgtctcagaaggagcggcccttggccagccaccctccagcgacactttgc

SEQ ID NO: 308866 - DNA, 122 bp, Homo sapiens
tgtgtcttggagcgcgccggcctggcgcccagcggccacgagggcatcctggcccttcggcgtgcagcttgcctggcgcacagcagtcctccttcgacccctgcatgtaccgcgagttgctg

SEQ ID NO: 308867 - DNA, 122 bp, Homo sapiens
cccttgcatcccagcggttccctcaggaactgcaggctgcacccaagcccaatctcacctcgaaccaggagctgccacatctgggcattgtggctgaccaccacggggattatgtgttcacg

SEQ ID NO: 308868 - DNA, 122 bp, Homo sapiens
gaactgtctaaacctgaataaagagattggaggttagtttaggaaatgtcacatataattcgttatctataatcaggaagcaagattgtgctgattttttatttcagaaagatgattttggt

SEQ ID NO: 308869 - DNA, 122 bp, Homo sapiens
gtattagacaagcctttgaagagcaagaacctcgtggttacggacatcacttagaaaatacgaagctatgtaacccttcagagacttggtggaggggtaatcctgatcattgttttggccac

SEQ ID NO: 308870 - DNA, 122 bp, Homo sapiens
tcctctgcacgttcttcatctgcacgcactgcgtggccatccccagcaccgtgtctcccacgcgcttgacctcggctaagggacatgagaggcacacacagctctgccggcgccccttcctc

SEQ ID NO: 308871 - DNA, 122 bp, Homo sapiens
tataaccttaagaaatatatatatatatatatatgtatttttttactgaatgatgtgggtcgtattgacacaacaggtttgagatctcccataggtatgactgtgttttgtttctgtggcct

SEQ ID NO: 308872 - DNA, 122 bp, Homo sapiens
ttcctccctcctgggccaaaccaccactggggactcttttcttcctacagctccaggcagcgctgcatcatggaaaggtcactcagctcacattcatgacatgctttctgtatgcaaggcag

SEQ ID NO: 308873 - DNA, 122 bp, Homo sapiens
acggctttttaccggccgcggctttttgcccccaccctgcctcgggtttttgccccgccgcggctttttgcccccgccgccccggatttttgctgctgcggctttttcccccgccgcctttg

SEQ ID NO: 308874 - DNA, 122 bp, Homo sapiens
aacaggggaaacagcaggctcttcttactagccaggaatatccactgttggctgcctcttcgtcttctgtaattcggccctcataggggccaaagtgcagacccagtggcagatcagatgcc

SEQ ID NO: 308875 - DNA, 122 bp, Homo sapiens
actgaacgcgcgactctggacaagtcacatctctctggatctcttttcctaatcctaacacgggacaatgataagactgactttccggggctgttgtgaagattcggtgagataaatgcaga

SEQ ID NO: 308876 - DNA, 122 bp, Homo sapiens
gggccgcctgtcttttcgagctgcgcttccagggacttcgcgtttgtgcctggcgggctgcggttggaagaaaagtgccaacatggcagctccagggtcaggccccttcttccaggaggcgt

SEQ ID NO: 308877 - DNA, 122 bp, Homo sapiens
cttaggggctttaaaaatattaactcattttgttctcaaaacaacactacgaacaggatacgatttttagcctcatttcaccaatgaggaagtgaggcacagaccagttaagtaatttactc

SEQ ID NO: 308878 - DNA, 122 bp, Homo sapiens
agggaatcctcctggtagcgggccagcagctccgacccagctgtgctcagtcagagttcccgggagagagttccaactcggacctttggttggagtttaaatcaactcgcagtgtttcccat

SEQ ID NO: 308879 - DNA, 122 bp, Homo sapiens
ggaccgtccggggagtggagtaagctcctccgaagtctttctggagagactcggcctgggcgggggaactccgcccacccaacccttggcaacccttggatattggcagttataccaataac

SEQ ID NO: 308880 - DNA, 122 bp, Homo sapiens
aagatggcgatggagatgaggcttccagtggctcgcaagcctcttagcgagagactgggccgcgacactaagaaacatctagtggtgccgggggatacaatcactacggacacaggattcat

SEQ ID NO: 308881 - DNA, 122 bp, Homo sapiens
tcctcttcagtatttctaggagcccttgaatggaatgtgacatgtgttcaagaacagaaacgaatactctttccttacagcctccttgggaagtccatccgccctcaggccaccccagtgtg

SEQ ID NO: 308882 - DNA, 122 bp, Homo sapiens
tggagtaaggggcggtgccaggacatccaatccaagttgcaatctataagcccgaagcctcgagtcccctttccttcagtacccagatgttcacagggatgtaataggaatggttccataat

SEQ ID NO: 308883 - DNA, 122 bp, Homo sapiens
ggaacacgcctcgcctacctttgtcggggtccagggggttcagggaggtggccagattggcgaactggaggaagaagagaagaaaatgggtgagggtcccgccgcctggcgccccgcccgcg

SEQ ID NO: 308884 - DNA, 122 bp, Homo sapiens
gagggcgtagggcgaggaaggaggagataaagcggtttggtgcatggatgagtcagagcccgggcactcccacccatggctgaaaagagcatgagtttcccacgtccctgttctgctgtgag

SEQ ID NO: 308885 - DNA, 122 bp, Homo sapiens
gtaggggtggagtgaaggcggggtctgggggggtgcgcgtggacggggagagtggaaccgcgggtgtggacctccaagtacagacgtcagagaacgtttgtcgtcctggctcgttggtctag

SEQ ID NO: 308886 - DNA, 122 bp, Homo sapiens
cttagttctactgcttatagctgtgtgaccttggccaaatctcttacctctttgagcttccgtttcttcagcagttacctggagatgataacattcacattgggttgtcgtgcgggtgacat

SEQ ID NO: 308887 - DNA, 122 bp, Homo sapiens
gcattgtgggagttgcagtttcttagtgcgcaggctgtcgtggccggactttctcaggagcgtgcttcagtattcacggtccagtgcgccagactggaaatgagacagctgtgctctcgctc

SEQ ID NO: 308888 - DNA, 122 bp, Homo sapiens
gaggtggaggttgggacgcggagagactggcttgggcttggcgatgggaggacccggacccgccgtcctcaggcggcgggcggcaggtggcgggaggcgggaggcggggaccgggccagcgg

SEQ ID NO: 308889 - DNA, 122 bp, Homo sapiens
tttaataaacttcccacttaacccagccacagttggtttctgttgtttgcaaatgaacttcgagacaatggcagctggtggcacagagattagagccagttactgggatttctctttggcaa

SEQ ID NO: 308890 - DNA, 122 bp, Homo sapiens
gcgccctcggaagccggcctgggcgccctcggcgggagggagtgctgggccgggtgctggcgcagcgctacgcagggtggcggaacccagaggaccggacgggctcgttcagggtggcggcc

SEQ ID NO: 308891 - DNA, 122 bp, Homo sapiens
cccgcccaagcgtggccaagtgaggactgctccggccgcaggtagctgaggcgcgggaggcggcgcgcgcgggacccgagcggagcgccggggaggggccgacggacgcgagggcggacgga

SEQ ID NO: 308892 - DNA, 122 bp, Homo sapiens
cgcccaggactggtatcagtgaacagtgacggtggggcagggcggtgaccttagcaccagcgcttcggtgggggggaggaagcacctgagccgcggagaaaggcctgcgtgaggtgggcaca

SEQ ID NO: 308893 - DNA, 122 bp, Homo sapiens
tctaatacttagtggcttaaaacaacaatttattattatctttcttgattctgtgggttacgtggcctcagatgggcagtgcacactgagggtctctcttgtgattgcagttaaatgttcat

SEQ ID NO: 308894 - DNA, 122 bp, Homo sapiens
ctggaaacgcacgtgaacaaagctctcgcccccgggagccgctgcctgcggtttcctagtcgatcccagcttctctagggagtgtcaggcgcacacagggttaagttagttccctccctggt

SEQ ID NO: 308895 - DNA, 122 bp, Homo sapiens
actgccaggcagggcaggggttgctcacgtcccaggaggcccccataagactcccacagtcgagtgcagaggtctccgaagcaactcagtcccgcctacaatctagccatggggcttgggct

SEQ ID NO: 308896 - DNA, 122 bp, Homo sapiens
tgaccgtggcaaagattcctccattagcgctctgtggagtccatctgtctatttcctttccggcattgcctcattccttcttcagtagcttccttactcgtatactttatatcatttgcgta

SEQ ID NO: 308897 - DNA, 122 bp, Homo sapiens
gaggccaacgggggtggatcacctgagttcaggactttgagactggcctggccaacacagcgaatccccgtctctacaaaaattagctgggtgtgttggtgcatgcctgtaatcccagctgc

SEQ ID NO: 308898 - DNA, 122 bp, Homo sapiens
cggctccctgggctttcactcggctctgttcggctcctgctcgggaagggtgcgcgggggcgagtcctgcgcatgcgccctcaattcctgctgctctcagggctgcgctcagcctcgtgttt

SEQ ID NO: 308899 - DNA, 122 bp, Homo sapiens
agcaagtggatatccatcctcaggggcaagtctccagctggaacctggtacaggcagttgcgaaacaaagacagtgccctggagaacatctgcttttgaattcttacctcgccatagggggg

SEQ ID NO: 308900 - DNA, 122 bp, Homo sapiens
cggggaggtctgcggcccaggttcgattcctgcgacttgtcctaggcaggcctgtatgtgcgcggcggccgcgtgctgtacagtgtgagggaacgtgtaccaaacgctcgcgggatacctgt

SEQ ID NO: 308901 - DNA, 122 bp, Homo sapiens
cgggtctcctcataaatgaggcccaagatgcgcttgacaccgccatgccgggccaagcgccggatagtgcacttggtaatgccctgaatattatcgctcagtaccttgcgatggcacttggc

SEQ ID NO: 308902 - DNA, 122 bp, Homo sapiens
ttgaaccagctctgaggcggtgaccgggctattgaaaagatgcacctgaaacaggatctgcgggcagctgcatttgccacccggctttattgctgctttccagcggcgaaggcgcagcagca

SEQ ID NO: 308903 - DNA, 122 bp, Homo sapiens
ccgcgccgtgtggcgcagcccctgctcttgagaactgtgagtgacaaaccatcttttcaacggcaacatcccctgatttgtgggcctcactacacctgcctgcatttcaagcagtgggcgca

SEQ ID NO: 308904 - DNA, 122 bp, Homo sapiens
ggctgttgtaatgtacatttcacgcttagcctttcctccccgcgctgggaagaagtgctgcgcaccgcggctccgccagggggcaggagaagtcacattacacagagaactaaaaaaaaaaa

SEQ ID NO: 308905 - DNA, 122 bp, Homo sapiens
agaacggcttgagctttccccagcgcaattcagaaatgctgtggcggtcgccagactcttcgggtagctcccggcagctccgaggtagcgctcccctccccaaccatcgccctccgggatgg

SEQ ID NO: 308906 - DNA, 122 bp, Homo sapiens
gttctggaggcaccacttactagggtggcctggtgttgtcactgaacccatttcctcacacgtaaaatggagagaccagtaccacccgtctccaggactgccaggaagatgatgcatgtgag

SEQ ID NO: 308907 - DNA, 122 bp, Homo sapiens
cccacctcctccccggtgcaatcagtcagccaggaggctccaaactgttagcgacaaaaacgcagctctcggtcactcccactaccctcccacccgcactccaggcatattttggaggcggc

SEQ ID NO: 308908 - DNA, 122 bp, Homo sapiens
ccgggcccgggtgggcggcatcaccaccaggttcacgccgagaaggagctggaggagagccgcccggctccagccggaccgcttgcccgccatcaccgttgtaatctatgcagcaaacaagc

SEQ ID NO: 308909 - DNA, 122 bp, Homo sapiens
ctggtgagctctgcctctgggcaggacacctttacccactgaattacatgtgaaagaccacgcagctccctcaaaccacttcctgcttcaagtacagaaaaaagtaacaacttattaagagc

SEQ ID NO: 308910 - DNA, 122 bp, Homo sapiens
ctagcgcatgcgcgcaatctgcttccggcctgcgagctcggtgttccgctttttgtgggccgggtgggtttcctaatctggtttcgtctgcctggttcatctgtgtgcgatggctccggact

SEQ ID NO: 308911 - DNA, 122 bp, Homo sapiens
gtgaacacaaggctggactgctcgccctgcagggctggctgagctctcccccactgctcacgtcactagactccgcctcccggattttataacaactgacacattgtagcctacaggagagc

SEQ ID NO: 308912 - DNA, 122 bp, Homo sapiens
tgcgcctgcgctgtgtgtgttcctggtctgcggcagccatgctgaactcgtatggagaggcgagtgggggggacagagtccaggactgcgggataggaagctggggatatggacaagcagca

SEQ ID NO: 308913 - DNA, 122 bp, Homo sapiens
tccgcctcccaccgcacctgctaccttgtcacacagctctagacctgctgtctgtgtcctcggagccccgccctgacatcctggacatgcctagcctgcacgtagcttttccgtcttcaccc

SEQ ID NO: 308914 - DNA, 122 bp, Homo sapiens
ttttaaatgtggccagggagctcgtctctctccgtgtcacagtgggatccgcctggcagccgccgggagctgcagccaatgtgttaggacttcaggtgcttcttggcacaaagctagactgc

SEQ ID NO: 308915 - DNA, 122 bp, Homo sapiens
ctcttcattcccctttgaaagcttctgtttgctgagcaaatgctgaccacacagagacctcgcttggagccagttactgcttccttccctaaccatcccccagggccacaacccccgctccc

SEQ ID NO: 308916 - DNA, 122 bp, Homo sapiens
gttggtgactaatcgactgatctcacttcccttccgctccaagcaccagttccggtggtacgggggaataccagtgaaatagtttggttctccctgaagcatctgcatattgaaagaacgct

SEQ ID NO: 308917 - DNA, 122 bp, Homo sapiens
atgcttgtgttcgtggacgcgtgcgcacgtatggagcggcggtacctatgattatttgcgcgtggcgcctggctatgcgtgggcgaacgcgcagtggagaacatgtgggcgtgcatgaagtg

SEQ ID NO: 308918 - DNA, 122 bp, Homo sapiens
gcagaggccacagagatgaccacaccagggcaacctgtagtgccagtgcctggttccacccggggggcatctgagaactgtgtccttccattcctgagtccagcacttcccaggccaggtca

SEQ ID NO: 308919 - DNA, 122 bp, Homo sapiens
actccctccagccctgccatactcccattggcaggataccctcaggtcccgccctagctccgtggccattggctgactgagtgagcgctcaggccccttcgggacaactaccttctagtttt

SEQ ID NO: 308920 - DNA, 122 bp, Homo sapiens
ccgccgtcgcccaaggaggatcggggccgggccgggccgggatgatccgggtcggaaggccgccgccgccggagggagcgggtcacccaacgccgcactgagccgcccccgccccgccccgg

SEQ ID NO: 308921 - DNA, 122 bp, Homo sapiens
tttaggcctgcggaggggcgttatctggagggccgcgggtgcaggccgcagtgacagggccgctcgccccgctagtcctgcctgtctcccggtgcagctgtgttcgcggcctgcaggcccaa

SEQ ID NO: 308922 - DNA, 122 bp, Homo sapiens
cctagttctgcggccgagaggggctaacgtacgcaccaccagcccctagacaaacacaaacgcatgtgagttttaggttccaccgttgtcacttcagcccagggtcagtaaacattttctgt

SEQ ID NO: 308923 - DNA, 122 bp, Homo sapiens
ggctgtgactcgagggatgacggtgacaggcctgcggagtctgatgccgcaggatactcgcggccgtgggaccagcctggtgacctgagatcctgctggcaaggtcacgctggcctgcacag

SEQ ID NO: 308924 - DNA, 122 bp, Homo sapiens
cctaggacccgcctctgcagggcacaggacgctggaggcccagaacagctcaggtgctcccgctgggccggcccgggccgggcgcttcctgggagggggaccaaactcccggccttcagctc

SEQ ID NO: 308925 - DNA, 122 bp, Homo sapiens
aacccccacgtctgaccctcccacacacacaatgtagtcatagaaacacctagagaacctcgagccccgccgcggaagaggcaggagagggaagaaaagcctcgggcggccgaggtgggggt

SEQ ID NO: 308926 - DNA, 122 bp, Homo sapiens
agacaggagcgttttaagtacaggcagagcggtttttggcccagccccctaggtctgggacgcaggtgaggggcggtctctccttcccctggcaggggcagcgtaagggtggccggcggctg

SEQ ID NO: 308927 - DNA, 122 bp, Homo sapiens
gtacacaggtgttggtgagtcattaaccacctagggcagcacttggtccacccggactggcgagtgcacacctccggctgacgcctgcgccacgtgctggggtcggaggccgagctcaccgg

SEQ ID NO: 308928 - DNA, 122 bp, Homo sapiens
ttcacgctctttctcctcctccgaggtgagtttttagactatttggaggccttggggaaacgcgagcagccgcgtgcaaaggagcccccccgccttctccccgcacatgcagccttgtctag

SEQ ID NO: 308929 - DNA, 122 bp, Homo sapiens
ttccctccagcctggcctagggacgactcttcttcagtgccgccttctccaccgagtcctcgcatattaagattccagaaggttctgatctcctggtgcttcagtgtaaacgagtgtgtttg

SEQ ID NO: 308930 - DNA, 122 bp, Homo sapiens
tataggctagagaaactcaggaactactgacccacagggaaggcaagcggagatatgagacggaggaatcaaacgctgccctggtggaggacgctgtgggtttacagtggatgatttcctct

SEQ ID NO: 308931 - DNA, 122 bp, Homo sapiens
gaggagggaggaggggacttggggcaggaggttccgcgagacccagatcggtcgcggggccgtgaacaccgcacctcacggacaaggacgcgccgccggcggagtgggggccttcgtcgcgc

SEQ ID NO: 308932 - DNA, 122 bp, Homo sapiens
gtaacggctccatgggtgtatgtgtgtgtacatgcaaattcaccacactgcacttgacatcgcgcagcttactgcacaccagttatacctcaggaaagctgtaaaaaccatactgtagtgaa

SEQ ID NO: 308933 - DNA, 122 bp, Homo sapiens
ggaaccagcagagccagagagaacagaacgctacggacattccccagctggccctggacacgtgcctcttcagctaaggcctcaaccaaccctcggagggcgttcagggcaggggtcctccc

SEQ ID NO: 308934 - DNA, 122 bp, Homo sapiens
ctgcaaccctgagtcccaggcggagcggtcagcggagagttccagccaacttattccgtgcgcctcgaaagggagggttgctgggcgtatagatattctatttcgcggggcctttgcgctcc

SEQ ID NO: 308935 - DNA, 122 bp, Homo sapiens
gcgtccgtctcatacttggtcctccactgggccacctccgagttggccttggacaggacgcgctgcagctcggccttggcctctgtctcctcctcgtactgctcccgcagcaggtcgcagtc

SEQ ID NO: 308936 - DNA, 122 bp, Homo sapiens
ggcggggagagggatttggtggcggggagcgggtgggggccactactcctgcaccgctctcgcgagaccgggccggagtgctgctcagcaggtgcgctccggctgggagcaggtgtgcgccc

SEQ ID NO: 308937 - DNA, 122 bp, Homo sapiens
aacagcgtgcttccaacaggacgcccacgtttgacacgttcctgagacgctggagaaaaccgattgccagcccgggctgaaaggaaacttgagaaatcacttagtccgtctctttgccttca

SEQ ID NO: 308938 - DNA, 122 bp, Homo sapiens
ccgcctgcagctcgggtgctgacggcctgaaagactgacagactgacagccccgaaacttcgcggggaggagagggatagacgcgcggggagtcgaagccgggaaacggcgcctgcaaggga

SEQ ID NO: 308939 - DNA, 122 bp, Homo sapiens
ctagtcaatcctttccaattgatcttaaaacactcttttgtctcttccctcttcagaatccgacaaggattcttctgttgactctagaattcagtctgaaatgttctgcttggcactcaccc

SEQ ID NO: 308940 - DNA, 122 bp, Homo sapiens
gggactggtgccgactgtcaaacccagcagatgggcttcatccaggcctcaactgtcagccgggacgaccccagatcacacgggcgtgggccgtggtcagccgggagcgtccacgtggtcag

SEQ ID NO: 308941 - DNA, 122 bp, Homo sapiens
ggatcacccggatgctggctggggatcacccggatgctggctggggctcatcgctgcacacgggcctccatgaacacgcgtcagaatcaggcagcctccggcctgctgcgcacgtcgttcct

SEQ ID NO: 308942 - DNA, 122 bp, Homo sapiens
tcacacactgtgtagttgtcggcaggagagttgaactccagcctctgggagagcagcccccggctgatgacggccaagccggccagggcggcggcggcgagaagccggagccgggccccggg

SEQ ID NO: 308943 - DNA, 122 bp, Homo sapiens
ggagttggagaggagcgggctcccggctaccacgcccgcgccttgcagggcacctgtgcccgtcgacctccacctcagctcgggaaacgggctgcgcctagcggctcccatgggaccccctt

SEQ ID NO: 308944 - DNA, 122 bp, Homo sapiens
tcacctgtttgcaggggcaccagatgggggtgcaggaaaactggttgcagtcctgagccccgtcactagtttgctgtgtgatggcaggtagtttttttgctttgtctgagccccagtcgccc

SEQ ID NO: 308945 - DNA, 122 bp, Homo sapiens
gctgaccctgggcaccacagcgaacccaatcgacctccggctgggttgcgggtgattccccgctccctggcggtagcacttgggcattttccgcggagaccccagagcctggactttgcctg

SEQ ID NO: 308946 - DNA, 122 bp, Homo sapiens
tggatttgaaggtgtttgaaatgactacagagaggtcactggggagaggtcgttgctttccgtagtgacttcttagaggtggtaagtgattgttgcttggtttatactgatagtaatggaaa

SEQ ID NO: 308947 - DNA, 122 bp, Homo sapiens
gggtgcctgagctcacacagcagatgttcgatgccaagaacatgatggccatgtgcaacccgcgacatggccgctacctgaccatggccaccgtgttccgggccgcatgtccatgaaggagg

SEQ ID NO: 308948 - DNA, 122 bp, Homo sapiens
tggacacagtgcttcttagaggaacagctacaaagaaatgccccttccccaaaaaatttacgtagacttaggaagggagattcaaaatgaaagggagaaaggcccctcggataaaacataag

SEQ ID NO: 308949 - DNA, 122 bp, Homo sapiens
ttggtaaaacctgcgggtcggaggttgctcacctgccccatcccagcccagagtccctcacggcacagctggcacaacatgatttgtaaactcaagggcggacactcgcttcaacacagcct

SEQ ID NO: 308950 - DNA, 122 bp, Homo sapiens
actgcctttatgagcagtaacactcaccgcgaaggtctgcagcttcactcctgaagccagcgagatcactgagcccaccgagaggaacgaacaactccagacgcgccaccttaagagctgta

SEQ ID NO: 308951 - DNA, 122 bp, Homo sapiens
tggggagggaggcagaggcagcattcagattctggccagagctcttcagtgcaaagtggacgaggccaattagagcctcctggagaattagaggtcctagtgaagattgtacattaactcta

SEQ ID NO: 308952 - DNA, 122 bp, Homo sapiens
cccatccaagcggaccattaaagcctcagtaatcactgctgatcaatcactggaccagggcggggcagtccctccgcctggcctgggcgcacgcgtggctgtccaagctgagcgcgggggcg

SEQ ID NO: 308953 - DNA, 122 bp, Homo sapiens
taattctcgaaagaatgttgttccccttccctttcccctcccgcctctgtacttgactctcgtaagaatgaaatcagaaaagtgcagaaaacacaggctcctagcaatggttcggggcaaac

SEQ ID NO: 308954 - DNA, 122 bp, Homo sapiens
aagagcaacctagtgcaaataaaacccttcaggtagcagctttttggagataatcaaatccgtttttagacttccacattttcctaactttatgccctccataaggatgtgatttctgatat

SEQ ID NO: 308955 - DNA, 122 bp, Homo sapiens
ttttcctttgttttagcaacaacgaactgtctacagactgacgctcgtgaaagcatggaacgtggacgagctccaggcctacgcgcagctcgtgtccctggggaatcctgacttcatcgaag

SEQ ID NO: 308956 - DNA, 122 bp, Homo sapiens
gaactgcaccactaggacggacgacacaccgacgtaatgaccatagtaagaccccatgtacgtggctaatgaggcagtgacccgacgtggctcggaagccctgctggggagatcccgccccg

SEQ ID NO: 308957 - DNA, 122 bp, Homo sapiens
gggtgctgcatccagatgcttctcgacagacgagggagtcatatgtctggataaatccaccgtatgttcaagcgatcaaaaatgcataaagtaccccggtaatcccatcataaggtcgaagc

SEQ ID NO: 308958 - DNA, 122 bp, Homo sapiens
gatgatgtcagctccggccaatcgcaggcggcgacacacagcggccccgcctggcgtgaccgagactctccatcacggcccgcaccattggctcaattcgaactctgctcgttctgattgga

SEQ ID NO: 308959 - DNA, 122 bp, Homo sapiens
gtctaggctttaagttgagagttcagagggagactggggaaggtggaggatagaatggttcgagttctagaatatgtggctctagatgagaggttgaactgaatcatcaatcctacatggat

SEQ ID NO: 308960 - DNA, 122 bp, Homo sapiens
ccttcctgtccctgcaccacccccgcgccagcagcactttgagttacaacggcaccacgtcggcctaccccagccaccccatgccctacagctccgtgttgactcagaactcgctgggcaac

SEQ ID NO: 308961 - DNA, 122 bp, Homo sapiens
gtctcatccccagattgttctcctttatctgtttttatgatttctacccctttgctatcccggttgaagtggaaagttttaagccatagaatatgcttgtttctgtgaagggtctttctaaa

SEQ ID NO: 308962 - DNA, 122 bp, Homo sapiens
gtgtatatgtgtatcaatacatgttcaccttaaatactcacaataaaaaatgaatatgtacgttttctaaaaggtttgctggtccccccaggcaccccaggatgctgtggcacattcacagg

SEQ ID NO: 308963 - DNA, 122 bp, Homo sapiens
cagcctgggcaacatggtaagaacccctctctacaaaaaatgcagaaacaattagtcgatcgtggtggtgcctgcctgtagacccagctactcaggaggctgaggtgagaggatcacctggg

SEQ ID NO: 308964 - DNA, 122 bp, Homo sapiens
caagcccgatctcgaggcccctgacccgggcctgccgcctccctccagcaccccgggctccgggccctagttgcttgggcaacgggaactgtcagcgacctggcccaatcacctctcggaac

SEQ ID NO: 308965 - DNA, 122 bp, Homo sapiens
tgaggcaagtcaagaaggccctaatttagctgtgcaaacaaagcattcctgggtttgatacgacttcattccctgactggcagtctgagcttacacatgcagacataaatgccaacacacat

SEQ ID NO: 308966 - DNA, 122 bp, Homo sapiens
ctaacaggacactaacagggaaattcgggacgctaacagggcctggagagctcacctgggcggtgtgggaaggtgggcggcgaggaagaagtaacgcctatccaccccacctcatactcatc

SEQ ID NO: 308967 - DNA, 122 bp, Homo sapiens
cgggagaggagagcggaagtggcgttggtctggccggagcccttgggtgaaattgttaggcgtggagagggagtgatgtcttccagactcggtgctgtacccgccgtgagtttcttggtttg

SEQ ID NO: 308968 - DNA, 122 bp, Homo sapiens
agggcctgtggcctcacctcagggactctggggctggaacccacgtctcggctgagggcacggtggcagctgcctccagtcgggccccggtggggactccgggtctggaacccgcgtctcgg

SEQ ID NO: 308969 - DNA, 122 bp, Homo sapiens
aaccacaatgagataccaactcataccagttagaacgacgatcattaaaaagtcaggaaacgacaggtgctgaagaggaagagaaacaggaacacttttacattgtttgtgggactgtaaac

SEQ ID NO: 308970 - DNA, 122 bp, Homo sapiens
ggcgtttagggtgtcgcctctggcatgtgctcccactgcagaaaacaagtccaaatgcaacgcatcgggtttctgaacagccgccagagcgcggaaaccagaccgtcagcaaagctgtcgcg

SEQ ID NO: 308971 - DNA, 122 bp, Homo sapiens
taagtagtgagtgcttgctatgtgcaagatactatgaggtgcctgggagatgtgagggcacgcagacctggcaagttattgacctctacagacctcagtcaccccataaaaaggggactgga

SEQ ID NO: 308972 - DNA, 122 bp, Homo sapiens
gaaagcgcctctttcaggaatgcaggtgaaatgaaaccagcatggcgccgaggaaggaagcgtgccccatcagtcctcgatctcaagcgggagctgagagaggagccaggaggccagaagcg

SEQ ID NO: 308973 - DNA, 122 bp, Homo sapiens
ctaggagaaaaggcgggagaaaaatgaagctggaggtgccggggattgaacccggggcctcgtgcatgctaagcacgcgctctaccactgagctacaccccccaacgctcaacgtgggccaa

SEQ ID NO: 308974 - DNA, 122 bp, Homo sapiens
agaccagcccgaggcggatccgtggcgcagagggcgcacggttcccggaggcgcgggacgcgatggggaagctaccgaaagtgccgagagaagccctggtccttccccatctggagccgggg

SEQ ID NO: 308975 - DNA, 122 bp, Homo sapiens
cattttatgggctaacgctgctgtctgtcttcgggcggcggcctctgggaaatgtagttccggagaacacggagtccttctggggctaggttttccgcttccggtgctcagtggctagccga

SEQ ID NO: 308976 - DNA, 122 bp, Homo sapiens
gggcaacaagagcaaaactctgtctcgaaagaaaaaaaaaaaaaaagagaatgagttttacgggtaacaagtgcttccggaggatgatgtttacatgagtctgggatgtcagggaaggagct

SEQ ID NO: 308977 - DNA, 122 bp, Homo sapiens
ggttaagcgccacacagttgagctgagtgccttagggagaatacctgtgctctgttgccccgtgtagaaacgggaagaatggagccctggggagggcgtgctcctggtataaaggccatgtg

SEQ ID NO: 308978 - DNA, 122 bp, Homo sapiens
cctgagtgtttaggttgtgccaggcacttaactcgcttaatcctttcaacagctttgagtcgtagatcttattatccccattttacagattagagagtctagcctcagaggttaagaaacat

SEQ ID NO: 308979 - DNA, 122 bp, Homo sapiens
ttgcgggtcgcgaggagtgggctcccccagggggcttttggagcgcgaccctgcgacccacgccattcagcagtgggattttattttgtttcagaaatactccagggccgtctagtctcttt

SEQ ID NO: 308980 - DNA, 122 bp, Homo sapiens
ttcccattggtggcctgcggcttattcgcccgtccgttgagtgacgcacttccggttctccgtttgcgccattgccctggtggttccgcctcgtgggttagatcccaaattacgcccgctct

SEQ ID NO: 308981 - DNA, 122 bp, Homo sapiens
gcaaggcgaccctaggccgaagacacgaaaaacaaacatggcatcggaagaaggctgaaccgctacatctccagtagagggaaagggaaatccagaaagaccttcccaatccctttaagttc

SEQ ID NO: 308982 - DNA, 122 bp, Homo sapiens
atttattcaataaataagtggttcctaaagtctttactgatgatctccaggattgtccatcgctatggtccaggccagctccactttctctgacaggctttagctgccagtggaatgggatg

SEQ ID NO: 308983 - DNA, 122 bp, Homo sapiens
cacaggctggggagggtgaatgggcagggagataggaaagtatttcaagccgagaggatgcgccaaggcctgcagggcccacagagactggcacatttgaggagaaacagcgtggcctgggt

SEQ ID NO: 308984 - DNA, 122 bp, Homo sapiens
cggcaccatggaggtggtgctgatctttctatgcagcctgttggcccacattgtcctggccgatgcagttgagagggagaagcaaattgacccttttcattatgactaccagaccctgagga

SEQ ID NO: 308985 - DNA, 122 bp, Homo sapiens
ctggacgctactccggacgcaaagctgtcatcgtgaaggtatcagcctcgcgggactctgcgtccttgcatgccgggaccaggctggctgcggcggggcgggcaggcttggaattcaaggcc

SEQ ID NO: 308986 - DNA, 122 bp, Homo sapiens
ttcccatacagcatctctgcaaaaattcaagcattcaaacacagctctgatgatcctccccgagtctcccagatcttgtttctcggataacagacttctagatccttccccctacccagttg

SEQ ID NO: 308987 - DNA, 122 bp, Homo sapiens
aacacagcagacaaactaaagttttaatctagctttggcccttacaaattttgtgccctacggcaagttacatctcgcttagattttttcattttaaagtggaactatctgcatggatgttc

SEQ ID NO: 308988 - DNA, 122 bp, Homo sapiens
ttttaggcttaaaaaaaaatcatgaatgaagctcttgaatttgcatagctaattaccctccgacagtcccattcacaaaaataaccctccctacaccgcctccttcacctggatccaaagag

SEQ ID NO: 308989 - DNA, 122 bp, Homo sapiens
actggggtctttagggatgttattaagtactgtaagcttcagttttctagtctgtagatgcggataattgtatctcagtcaaacagctgtggtaattagagacaatactatgcctttgtctt

SEQ ID NO: 308990 - DNA, 122 bp, Homo sapiens
acttacgtttatttggcattgtttgtgtgggcagcaccttatccactcacagctagtcttcgaagcattaaactttatttcaacaaagtgtaacattaacatcccagcctgacttgcttctg

SEQ ID NO: 308991 - DNA, 122 bp, Homo sapiens
gtgacactggcagcctttcttgcgttccctttaagggagctgctggaacctgcatcctggcgacagtgctgggcgtggcagacaggccgggttcaggactggctcattcccgtggcaacatg

SEQ ID NO: 308992 - DNA, 122 bp, Homo sapiens
tctttgagggagggaactggcagaaggagtcaggccctacggtggccctaggcagaaatccggtagttggggtggacctggggcctgacgtcgcagaccatgccaagaagctgggccaggac

SEQ ID NO: 308993 - DNA, 122 bp, Homo sapiens
ggggagctgagctctacacacacaaaggccgggcctgtccctcccctgcccagttctatccgggggccccaccctgccaggccagcctggcttccatagggtccaaaatcaggacagatgaa

SEQ ID NO: 308994 - DNA, 122 bp, Homo sapiens
gacaccccatttggagacattgttggattggacctcggagaggaagcagaaaaggaagaacgagaagaaggtgggcatttgatctggagtgtagctctgcacataggctggcctgctggcct

SEQ ID NO: 308995 - DNA, 122 bp, Homo sapiens
aatattttattcagtcataggcacttgtgttgtgcactgggtcacagatattactgtgggcggggtgggggaggtcaccttgaaatccaaagtctcctcttgaaaaaaagtttctgctggta

SEQ ID NO: 308996 - DNA, 122 bp, Homo sapiens
gaactgcttggcgccaatggtcttgcggttgatgttgctgatactgaaaaggtcgaaggtcgtgtctttgtcctggtgaccagctgcaaagggaaccgcagtggagaagggtgacgtagggg

SEQ ID NO: 308997 - DNA, 122 bp, Homo sapiens
gagtcccagaaaacgggcctctgtctttaaggcgcttcggtcctctgggagttgtagtttcgtgggtcctggagcggcccccttcccatctcccttctggattgcagccccgctgcccttca

SEQ ID NO: 308998 - DNA, 122 bp, Homo sapiens
catgcctgtaatcccagcactttgggaggccgaggagggcagatcacgaggtcagaagttcgagaccagcctgaccgacatggtgaaaccccgcatgttatgcttttgtctcagcctagact

SEQ ID NO: 308999 - DNA, 122 bp, Homo sapiens
ctgtgctctgccccccaaggttctggagggcgggggttgcaggctggggcgctcccccttcgccccggccctcggtgggcgcctctgacctgggccgtagtttccaggcccgcgcgtccccg

SEQ ID NO: 309000 - DNA, 122 bp, Homo sapiens
atagaagcagccccctggcttggaaacagccaacttccagatggcccacaactgacctgccgctgctcccgactgtggaatgagcctccgcgtaagccacagctcacgcttgtctctcttct

SEQ ID NO: 309001 - DNA, 122 bp, Homo sapiens
ggggtgaaatcaggcaacagaggcggcagctggctgaaatggtggaggccacctagatggcggaactttctgggtcacacacttcctgctcccttcctgagacttaatacaaaaaaggcctt

SEQ ID NO: 309002 - DNA, 122 bp, Homo sapiens
cccgttccccaagcctgcagccgcggatgccattgatccagcccaggcggctccatgcgccggtgttgccatttgcttcctgcaacttggctgagccctcgaggtgcctgcctggccgagat

SEQ ID NO: 309003 - DNA, 122 bp, Homo sapiens
gaggtgggctgcagtgcagacggttgggggttggggcgtccccgggagctgattggctgccgcgggtggaggcggagcttggccgccgcccccggaccgcagaggcccggctttgtgtcagt

SEQ ID NO: 309004 - DNA, 122 bp, Homo sapiens
ctccgcctttggagtgaggagggcgcagcccgcgtcagaacttagagggccaggcagggtcgcgcgcatggcctgggcgggctcgcggcgggtcccagctgggacgcgcgcggcagccgagc

SEQ ID NO: 309005 - DNA, 122 bp, Homo sapiens
acccattgcaagtctgggcctccagaacttctgacggacaggctctttgagtttgattaacgtcaaggcataaattttttaaactaaaacctaaaatattaatggaacaagaatcaaagtat

SEQ ID NO: 309006 - DNA, 122 bp, Homo sapiens
ctgagattttgcagtaaatctaattcccagtcttaaagcctggtcccagaggtccgtgcgcgggtcttggcattcattgttctccacctcaccttcgagcaggtcccatcctccgaggcgta

SEQ ID NO: 309007 - DNA, 122 bp, Homo sapiens
gcccgtggctgccagcacagacctggatggtctagcctaggacacacgtcggctatagagcgtgtggctgccagcacagacctggatggtctagcctaggacacacgttggctatagggcgc

SEQ ID NO: 309008 - DNA, 122 bp, Homo sapiens
ttttctttccattgcaattaaagatgttccctaagccctgtcagttccatccatgagattcgtcccctactccagccctagtgacactgacttgtgtcaatatcccttgcctcttggctcat

SEQ ID NO: 309009 - DNA, 122 bp, Homo sapiens
tcatgacctcagatgacctaaatatccaagcctgagggttttttctcttccacaagcaaacgaatttctccaggaatactttaaagcagtgcttcccaaagtgaggccctggaccagctgca

SEQ ID NO: 309010 - DNA, 122 bp, Homo sapiens
tcatacatttttgcttctcttgcctgtgctttcaaggtcttaatcacaaaatctttcctgcgtccaacactctaaagtgttttctgcatgttttctcccagtaggttcatagttttgggtct

SEQ ID NO: 309011 - DNA, 122 bp, Homo sapiens
tcgggactggggaggtggaaagtgtcacctgcaatggggaccgaagcagcgccccgaccccgagccaccttctctcctcgggaggcaacgatggcaggagtttcagttaacaatttacagag

SEQ ID NO: 309012 - DNA, 122 bp, Homo sapiens
agaggcgccccaggccgggtgaaaagtggccgaggagacctgggctgggctggcaagtcccggaccggggaggaggggagcagccctccgatgtgagggatcgcagaggaatgagcttcgtt

SEQ ID NO: 309013 - DNA, 122 bp, Homo sapiens
ctatttgaaaagcccgccaagggctgcaatttgccagatagtctcatccgggttgtttttcgaagaggttctcccggaatggaaatgaccgttatctgcaggagtgcatcggactctggcgc

SEQ ID NO: 309014 - DNA, 122 bp, Homo sapiens
ggtggccttgccgttaacatagaccctgaagcagcatcaacaacaatgtgagaaccctagcgtccacgtgagaaccctaccgttccacgtgggaaccctaccgtccacgtgggaaccctact

SEQ ID NO: 309015 - DNA, 122 bp, Homo sapiens
accgccaccttctggcgcaacaagaagtctaacaaggtcctgccaatgcggcgggtgctccgcaagcggcccagccctgcgccccgcaccatccgcattgagtggctcaagtccaagagcac

SEQ ID NO: 309016 - DNA, 122 bp, Homo sapiens
cttgagcgacccttccataaccagctcgcgaaacgaacgcgtggaaagctgtgaggggggcgggcactggttctcattcctgggaagggactgcacttacctcacgccagcccggggtgctg

SEQ ID NO: 309017 - DNA, 122 bp, Homo sapiens
cccgggctctgcagccacaaccatgtttggccggaagcgcagtgtctcctttgggggcttcggatggtgggtgacaggtgggagggtgggggaatgatgggagagaacttagaagtgaagtc

SEQ ID NO: 309018 - DNA, 122 bp, Homo sapiens
gggagctgaaggttgcagcgagccaagatctcgccactgcactctagcctggcgacagagcgagactccgtttaaaaaaagaaataaaaagagtcacatcagtgggacttcactgataactg

SEQ ID NO: 309019 - DNA, 122 bp, Homo sapiens
tcaacaaagtttgcatgaaaatttcaagaaacgatgcagtgctgaggacccccaggcacgcggtggagtcgcctcctccagagagttttcaaaacagagcagcttttaggctctgtagcctg

SEQ ID NO: 309020 - DNA, 122 bp, Homo sapiens
tctgcctggtaaaccagaaaatgtagttagcttttttggtggattttccatcttttaaaccgaggaagaaaatggaaagtttaataatcaattcaccatcctagtcagcctacatttcagtc

SEQ ID NO: 309021 - DNA, 122 bp, Homo sapiens
cgtgagccaccgcacccttgctgcttttctaacttttggatggagtgtggctcagggtggcgttgctgacttcgccgagctcccccttgtgttgcttttgtgcactgctcaaaaatatggcg

SEQ ID NO: 309022 - DNA, 122 bp, Homo sapiens
ggatagtgggaaagcctcggttcccaaggatgcgaattgtgcccgggttccatctcctaacgttcatatccctgaaggagggaccagaagtactctgagttccaaatttcagttaaaatcaa

SEQ ID NO: 309023 - DNA, 122 bp, Homo sapiens
aaccgtgcgggctttgcggcggcggcagtgcttccccggcagctccgcgtgctgcgggtgcgggaacagcgctgggactggcatccctgcagagagaagagcaaccaagtgggcagagcgtg

SEQ ID NO: 309024 - DNA, 122 bp, Homo sapiens
gtgaggctccttgaaagggggactctgtctgtgcagtgcttctgtaagggctacaaaaaccgcatggagggcaaggtttggtgcaaaatcaggaagaagtgtgagcctggtttcacccaagt

SEQ ID NO: 309025 - DNA, 122 bp, Homo sapiens
caggttctagaaggggctgctctgttgaccacctcttagggagtccagggtgaggtcctgcggtaggcattaacttcttggccagtccatccactggaggccccctgtatggcctgttcaca

SEQ ID NO: 309026 - DNA, 122 bp, Homo sapiens
accacccgttagcgttgtgaaatcaacgtagcggttcctgcccagccttctctgtctagccgggcgcggtggctcaagcctctaatcccagcgctttgggaggccgagactggaggatcatt

SEQ ID NO: 309027 - DNA, 122 bp, Homo sapiens
attatgatgggttacccctgaagaaataataccatagcctttaggcatcgcaagaatgatcgcagtattcaagtttggggataaagagccttaattaagacctctcaaagcagctctctgtg

SEQ ID NO: 309028 - DNA, 122 bp, Homo sapiens
cctgaacaccagccaagcccttcctggcatgtcctcttctggggcagcccctctccagcccgtggatcagcgccagcctgggatggactgtgccctggtgacataacaaagggaaagacaat

SEQ ID NO: 309029 - DNA, 122 bp, Homo sapiens
gcttctaaaattttttcaagttatttttaagaaccaccattggcagggcgaggtggctcacgcctgtaatcccagaacttcaggaagccaaggcaggaggatcacttgaggccaggaattcg

SEQ ID NO: 309030 - DNA, 122 bp, Homo sapiens
atgatcggcccacctcgacctcccaaagtgctgggattacaggcgtgagccaccgcgcgccgggtggaaaacattagcttctaatagcagtcttggagtggagtgaagacgttcaggaagtg

SEQ ID NO: 309031 - DNA, 122 bp, Homo sapiens
gccccgttttgaacccgggcccggcggctgcgttgggtcgccccaaacccggtgagcgtacgagactgttgcttcgctgtatgtctcatgtgcaccccctactcaccggtcccgagctccgg

SEQ ID NO: 309032 - DNA, 122 bp, Homo sapiens
ctgccagctgatggggcagaccagcagcttagtgtctcctttgctgtggaagcagaactgcgtccccattatttgacaggcaggaaacggtaaggctagcaaagcggggactgaagacttca

SEQ ID NO: 309033 - DNA, 122 bp, Homo sapiens
tccagccgaggtcctgtgaagcactttggctactggacgctggggagggcgcagctgggacgatgctaaccccttggccccgccccacggctcggcccaggccccgccccctgttcggcccc

SEQ ID NO: 309034 - DNA, 122 bp, Homo sapiens
ggtaatggcggcagcagtggaggtgccaggtgctgagctgagcaagcatctcctgagcatcggccccttctgtcctctcagcaaccttatgaagtgtgaccattactctccctgtttgtcag

SEQ ID NO: 309035 - DNA, 122 bp, Homo sapiens
ggttgacagggctgctcgcatgcgcggtctccaccgtggtgtttgtcgcaatgggcgctgcgcggaggactacatggaatctcgactttgcagcttgaagtcattttgttggcggcgctggt

SEQ ID NO: 309036 - DNA, 122 bp, Homo sapiens
tgaagagaaacaggtggcatggaaaagcgtggaaggaccttaatgctatcactaagcgaacggaaccaaatgaaaaggctgtgaactctaggattcctggtagatcaccttgtggaaaaggc

SEQ ID NO: 309037 - DNA, 122 bp, Homo sapiens
tatcatttttttaaaaaaaagagatatctgctatgggtgtcaaatatgctaggtaccccacggacaaggggaatgggaagttgggaagtcttggatatcagctacttggtagaaacaaagaa

SEQ ID NO: 309038 - DNA, 122 bp, Homo sapiens
tccttacacctgggatgcatttgtctgcaggtgcccgccggcccctcccttcaagcctcacggaattgaaacaaggggctgcaggaatcgattctccggccgaaagacttctccagtaaggg

SEQ ID NO: 309039 - DNA, 122 bp, Homo sapiens
ggctggccatcctcctgctgctggcctccattgcagccggcctcagcctgtcttgagccacgggactgccacagactgagccttccggagcatggactcgctccagaccgttgtcacctgtt

SEQ ID NO: 309040 - DNA, 122 bp, Homo sapiens
cgatgccccagtctgatagcaagacagaaacaggctgaggtaatgctttgcttcatgtggcggcagagtctgttgataccagagggatcgagcaaagttgagacacaattgctggtgtatca

SEQ ID NO: 309041 - DNA, 122 bp, Homo sapiens
gggtgataagggcttcaccggcggcggcagcgggctgcccgggcggcctgcctgcagcagcgtcttaggaaacaggtcaaacttctgcaacttggcctctgggaggggagaaaacgtgtcgt

SEQ ID NO: 309042 - DNA, 122 bp, Homo sapiens
tcagatggtaggcagaaaataaaacggaagtgatggaggtctgaggtcagatggagtggtcgggaaaacctgaccacttggcagatggtccttgaagtctcacaacaaccctcagaggccgt

SEQ ID NO: 309043 - DNA, 122 bp, Homo sapiens
gggctcagtgcctcctgagccaaaggaggctgccacattcatcctggctcaggcctcatgcgtgttcgttggcactgtttcttcattgtctgcttcagatgtaaatgtctctcaatcagtca

SEQ ID NO: 309044 - DNA, 122 bp, Homo sapiens
taagagagaactctgtagggttcagtccctcttctcagaatatatagtttaggctgggcacgatggctcacgcctgtaatcccagcattttgggaggccaaggcaggtggatcacttgaggt

SEQ ID NO: 309045 - DNA, 122 bp, Homo sapiens
attagctcaaaactccacaagagctatgatgcgtgctccgttcttgaaggacccaagagacgctccatcttaccctctgagccttccttgttatgtttcatgtgggtggaatatatgaccag

SEQ ID NO: 309046 - DNA, 122 bp, Homo sapiens
tgctctggtcttgttacaaatgtggacatatcctctgtgagaatgtgctgacagattgcccggcctgtcgcagtggacatttaattaagtgactggaaagttaaaagacactaacaagagga

SEQ ID NO: 309047 - DNA, 122 bp, Homo sapiens
ggacaaagcgagggggctgccacgggacggcgaccgtctgtcccacatggatgtaggcgccgagtggcagtgtaggcaagctcctccgtactggctccagaggttgttagactgagcatttt

SEQ ID NO: 309048 - DNA, 122 bp, Homo sapiens
atgaggagggaagcgaaacgttcgttcttctaagagggtaactgcaaaggaagtctgggccgctgcgttttcgggaacagcaggtgcggtggccgatggataactcgggctgggctggagcg

SEQ ID NO: 309049 - DNA, 122 bp, Homo sapiens
aggaggaaattgtcacaagtctctgccttcctcaggtccccttcctaggggattcctcatcgcatcccctagccgccctaccccaccacggtccttgggacctcgcggtgttctctccttga

SEQ ID NO: 309050 - DNA, 122 bp, Homo sapiens
ggtccaagaaccagagcagcttcatctaccagccgtgccagcgccagttcaactactgagcgtccaccggccgcgccacgaaccccttgccgatcccgatccctgtcgggctcctccgactc

SEQ ID NO: 309051 - DNA, 122 bp, Homo sapiens
tgccgcctcagtttgtctgctggtctcttggggggccaggccctgcacgtctctcctacccggcctcaaatggtgctgctgcccatgatggtaccacaccagggcctcagcctggcccctca

SEQ ID NO: 309052 - DNA, 122 bp, Homo sapiens
ctgagtgcgaccaccacttgatgtctgaggataccttccatctcaacctacctcgagtggcgagtccagacaccatcaccacgcagagaggggaggtgggaggacagttagacccctgggtg

SEQ ID NO: 309053 - DNA, 122 bp, Homo sapiens
gggcagaacagcctgtttttaagagttctgacccattgtaccagtgttctagggctgaggcgagggggctggtgggtgcagaatcggggacatttatctcggaggacgtcctgggagcagcg

SEQ ID NO: 309054 - DNA, 122 bp, Homo sapiens
gctggcctctctttcaccccgagacctctgcacctgcattctgtctggaaaacccccaaccgtcggcacgcatccctggtcaccaccttctaagtcttcagatcttagctgagacgcctcat

SEQ ID NO: 309055 - DNA, 122 bp, Homo sapiens
ccacaagataaagaatcaacaggaaagcctaacatgactttccagtaactgccaagtgtccgagatgcaacagccctggttgaggctttgaaagacagtgagctgtgcccctgctccatgca

SEQ ID NO: 309056 - DNA, 122 bp, Homo sapiens
gataatcacgtctgactcagagttcccgcacagtggaaactggctccctggccctgaggccggacagcctgcatccaacatcagcaagaggatgtggctttgacttcggctgtcttctctgt

SEQ ID NO: 309057 - DNA, 122 bp, Homo sapiens
cagcctccactagggggcttcggcgggaggattcccgggggcgtcgcctgcttccgccgccgcctccttcagtgaaagtcccttttgggtccagctgccacagccaccgcgctccctcaggc

SEQ ID NO: 309058 - DNA, 122 bp, Homo sapiens
agctcaacattttttaaccccgtctatgtttttgtttgttttttagcctcccatttgaaacgtggtaatactgtgattccatttcttgtttagctggtgagggaagagggtgggcaagttta

SEQ ID NO: 309059 - DNA, 122 bp, Homo sapiens
ggatcaggagtgcaagcctggggagtcagacctccccctgcctcctctgccaatgcagcccggaggctaccaccacccatcccggccgggcgcggtggctcacacatagaatcctagcattt

SEQ ID NO: 309060 - DNA, 122 bp, Homo sapiens
agcccatggagtgggtgggaggttcaggcatggcgggctgtaggtcccgagccctgcccgcgggaaggcagctaaggctcggtgagaaatccaatgcagcaccggtgggctggcactgctgg

SEQ ID NO: 309061 - DNA, 122 bp, Homo sapiens
ccccacggagaccaggcccctactgctctaaaagtgttctcagacacttccctctgcagccgctcccagagtaaacggcggctccgccgggtcggagtccacctgaggcgttcagggccaga

SEQ ID NO: 309062 - DNA, 122 bp, Homo sapiens
agccgggccccgccctgctggaagacagggcggaccgggcaaggcaggcgcggggcggggcggggcggggctccggctggcggggcgcggccagcgtgcagggctgggccagcgtgcggggc

SEQ ID NO: 309063 - DNA, 122 bp, Homo sapiens
ccacacggccgacacgtgttggggtttgcatctcggaacagccacacggccgacacggaccggggtttgcatcttggtacatgaaggctcagaagtgggtagcaccaggaaccgtggaagtt

SEQ ID NO: 309064 - DNA, 122 bp, Homo sapiens
tccagcaggccttggaaaactcttccctttgcatgcctgacttctgtttgttaaagtcctcgtgtagatgtcacctcctcagcagtgtcatttctgaacactccttctaaagtagcaaagtt

SEQ ID NO: 309065 - DNA, 122 bp, Homo sapiens
caacttctggcaacgagttgggttacattttcataagttccaggcctgagcgacgaggtgcgcagggcaggaggaggtttgagagcagggcaaacccgaaacctggcgctagaaaggaatca

SEQ ID NO: 309066 - DNA, 122 bp, Homo sapiens
acaaagaggtcaagggcgccctgaaaagggggctcagatggagggctgcaccccaagaggcgtgagggcaaatctggctcactggcattttcatgataacagttacagaaaaaaaaaccttg

SEQ ID NO: 309067 - DNA, 122 bp, Homo sapiens
attgcccctgcctctgcctttaagtctggtctgcgtggcttctgatagcgaagccaggggcggaccccgttcactgcatcaggagagccctgagcagcgcttggcaggaactctgcagccca

SEQ ID NO: 309068 - DNA, 122 bp, Homo sapiens
agtgctgtagggcattacaaagaagagagaaccatggtcttttttcagcattcttttctacggtcatgacttgtggacagaatttagctaaaaggctaatttttcaccatatgcctaccttt

SEQ ID NO: 309069 - DNA, 122 bp, Homo sapiens
tggaggggaaaggatctggctgactacctggaagccaggacagatcccaccccagaaaggcgcagtaggggctctcatcctccactagcccgcccctccctacctaattaaggaccctaatc

SEQ ID NO: 309070 - DNA, 122 bp, Homo sapiens
gggcgtggggtggccacgtgggcatggatggcaaatgctgaggagggcatggggtggccacgtggtcacagacagcaaatgctgaggagggcgtggggcggccacgtggacatagagggcaa

SEQ ID NO: 309071 - DNA, 122 bp, Homo sapiens
actggacgctcctagcaaccggctagcagctcggtttccaaggactgtaacgccttcaaccgcccgccgcgatagagtgcccacgaccctgcctcgggaatcccgctctgcaccgccccacc

SEQ ID NO: 309072 - DNA, 122 bp, Homo sapiens
tcacacgctcttcaccaagcacatcaagctggaacgcgagcggtgccaggccaagggcttcgtgtgtgagctctgcagagagggcgatgtgctgttcccattcgacagccacacgtctgtat

SEQ ID NO: 309073 - DNA, 122 bp, Homo sapiens
aaaaggcagcacttcgggggttgaaaagctacccgcaggggtctgctcgtgagggacccccgggcctctgcagcctttgttcagaggcagctaataagccgactcccgctgggcgctttgta

SEQ ID NO: 309074 - DNA, 122 bp, Homo sapiens
gaaggccaactcctaaggaccattcaaagtaggggagggggagtcttgcaagccacgttacgtaatttgtatccccccaactgtaatagaaggcattgaagtgtttctagaaagcagtaacc

SEQ ID NO: 309075 - DNA, 122 bp, Homo sapiens
ctattgtggaagtgtcatgatcgcattcttggatattgactcgattctatatgggtctctcgaatggaacccctgcgagtagctggagaactcaaccttctagacagtgatctagatgttga

SEQ ID NO: 309076 - DNA, 122 bp, Homo sapiens
catttttccagcaactgcagttcatgtgagcaggaaggcatacagcatggccgagctccacggtgggcggaggggaggacagaaaagggactgagaaaaggatggaaggggctgggtgtgga

SEQ ID NO: 309077 - DNA, 122 bp, Homo sapiens
aaagatgccaaagtcaacattttttcaaggagctataaagcccgtggaggagtcagctgacggcacagtgttcgcggctgcaccgctcggaggctgggtgacccgcgtagaagtgaagtact

SEQ ID NO: 309078 - DNA, 122 bp, Homo sapiens
gagctcgggcacaggcacttgacggggacgcgggtggcagtcacagcatctgtgctgacacgcgaggaaggggactcttcggtaatcccaactatttggtaccagagccaagcaaacgtgac

SEQ ID NO: 309079 - DNA, 122 bp, Homo sapiens
tactttggccgcaaggataaggggcaggacccagatgcctgcgacgtctacgccgacagccgcccaccccgcagcactgcccgggagctctactatgcggacctggtgcgcctggcccgtgg

SEQ ID NO: 309080 - DNA, 122 bp, Homo sapiens
ataagataaaataaaacaaaagacgcctgttgttttctcgggcagggatctgaagggagccgagctccttctgcagaagggcgctgagaagggagctggaaggaaaagaaggaaacattcct

SEQ ID NO: 309081 - DNA, 122 bp, Homo sapiens
agggatcttaatcatcgaggccacgaactcatcatggaagacgtacgcgaacatgccatccgcctcagagttcttggtcagtttccggctggagatggtgggaaaatactcgggcttcccat

SEQ ID NO: 309082 - DNA, 122 bp, Homo sapiens
agaagattggcctgagacacttaatatagaaatcccagccatcatgtgagaattccattccgtgcaagtacaaatacaagagaatttgggaatgttcactttggcttgtgttatgctaagtc

SEQ ID NO: 309083 - DNA, 122 bp, Homo sapiens
aaggcactctgcagctcgttatagtagaaggggacctcgcccgggcgggagcagttgagccgggccttcatgaatgtggtccatgtgtcctccagcaggaatcggccccccacgtcattctt

SEQ ID NO: 309084 - DNA, 122 bp, Homo sapiens
ctttaaatgacgttttccaccaccaaggaaacagccacctagccaacggtattttgaaagcgtttgtctggagttagaaagttctcttcttcaacacgtccctccccagggtgttcctccct

SEQ ID NO: 309085 - DNA, 122 bp, Homo sapiens
cactgacttcaagaatgaagcggcggaccctcgcggtgagtgttacggctcctaaggcagcgcgtctggagttgttcgttcctcccggtgggctcgtggtctcactgggctcaggagtgaag

SEQ ID NO: 309086 - DNA, 122 bp, Homo sapiens
acacacttgggcacatttgcatttgtttttaacacatttcaggacgtgcaccctacattccggtcaaaatatatggcacaaagctataaaatcgttttttcttcaaggttatttctcatcac

SEQ ID NO: 309087 - DNA, 122 bp, Homo sapiens
ccagtcctgcgccatgcgctcacactcctcagcccttgggcagttgatgtgactgggcgccgtggagcagggggcagcgctcgtccgggaggctcggggccgcacaggagcccatggagggg

SEQ ID NO: 309088 - DNA, 122 bp, Homo sapiens
cccctaagaaaggacccgtgggcttctggcaggacccgcgccatggacctcttatttctgcgccctgtgacaatctgagccgtctttctctgggggagaagtttcttgctgggagtggaggc

SEQ ID NO: 309089 - DNA, 122 bp, Homo sapiens
aacctcagctacaaaacagatcagtgggctgcttgcccgtgtggggcatgggctgggccccgagctctccctccagcacccagtacttcttccacaaggccctatgtgagctcagtttaaaa

SEQ ID NO: 309090 - DNA, 122 bp, Homo sapiens
accgcttgtcccaggaggttctacaacagctggcattgagagttcagttataatattttccgccagtttttcccagcccggcccccaagcgtctgattttaaagttcccgcctcaggctccg

SEQ ID NO: 309091 - DNA, 122 bp, Homo sapiens
gacaaattcagttttttcagatcctataaccagctggcatgactcgccctccatgatattcggtgacctcttatacagcaaagtcaccaggtgctcaaaataagggcagaggactcttctgt

SEQ ID NO: 309092 - DNA, 122 bp, Homo sapiens
actgacttagtcctagacctgggccagggacggtgggggctccgtgccccctggacccaccggcagctgggcacatctctcacctgaatattggctgcctccagaccacaggactgcagcct

SEQ ID NO: 309093 - DNA, 122 bp, Homo sapiens
cattattgttttaatttgcaagtctctaatgatatgtgatgttgaccatcatttcatgtacgtatttgccttccatatatattatttgttgaggtgcctgtttagatcttttgtccattttt

SEQ ID NO: 309094 - DNA, 122 bp, Homo sapiens
ctattatgtatggtttcccatattgactgacttgtggagtggctcaagcctgtgtgcctgcggctctgactaccaagagaacaggaggtactaaagagaattgcttccttgggaactccatg

SEQ ID NO: 309095 - DNA, 122 bp, Homo sapiens
cacgcgcgcacacggaaggcaggcgccgggtatataaatatctccagctctccccatagccgggcagatttattccgctgccaagcctgcagaaaattgacttgttcatggaggcggctatt

SEQ ID NO: 309096 - DNA, 122 bp, Homo sapiens
ccaactaccttttcatccaggaatttccaggcaacttgttactaaccagcctttgggtctcgcctttttggatcatcttactgaatattctccattctctcatgattatttctgtactctat

SEQ ID NO: 309097 - DNA, 122 bp, Homo sapiens
cgatggggcgtgctgggggcgccggcgcccggggaggctgcaggccgggacgcgggggaccgctgcaagaaaaagttattcacgcgttattgtcgggcgcaccgggcccagggagccccgct

SEQ ID NO: 309098 - DNA, 122 bp, Homo sapiens
cctctcttacgcggcctgcgccagtcactctggcacacagagagggtgtgcgatttgctgcggccggttccctcagccccggctgtcaggaggctggcctgcggccgtccgcgtccccaccc

SEQ ID NO: 309099 - DNA, 122 bp, Homo sapiens
aggggtcttgccacatcctttccaggtatacaggactcctccttcaggtccagcttttcccgccttccctggttttccttgaggaccccacctccaatgtttgcctcattcacaggctctca

SEQ ID NO: 309100 - DNA, 122 bp, Homo sapiens
tgttgaccccaaattgtgcttttcccaagaagaaaagggagagaaacattaggacaagttcggaactaaaatatagtagagaagcaacataatctctgaaatcacacagctattcggtttca

SEQ ID NO: 309101 - DNA, 122 bp, Homo sapiens
aaggcattgcagaaggcgaagagttggttgtgtggagatttctgttaatcactgtcttcacgagaagtccattgtgagaactggcagataaaaagctaactgtattcttattttgcattaag

SEQ ID NO: 309102 - DNA, 122 bp, Homo sapiens
aacatccctgaacactggtaatatttactgacattttcttggttaacatgtattataacccgtgtgctgcttatatctttaagccaactagctcactgcaaatgcgtattgggaaatgttcc

SEQ ID NO: 309103 - DNA, 122 bp, Homo sapiens
cttgagaggtgaaaaaacttctccagggtcacattattaagtcattaagaaggctggatgcggtggctgactcttgtaatcccagcactttgggaagctgaggtgggcggatcacctgaggt

SEQ ID NO: 309104 - DNA, 122 bp, Homo sapiens
tctcaagccctcaaaaatgcaaacttggttccagctttacaacataccatatccttctatcggttaaaggtttctaacctaaaaaccttctctcctttcttctcacctatttagtgcatact

SEQ ID NO: 309105 - DNA, 122 bp, Homo sapiens
gcccaccttggcggatgacagtcggggaggccgaggccagaaagggacccgcgggggaaacgtccacaggggccccttaggcctacagtgaattatttaagctgttcctggtgtttaaagag

SEQ ID NO: 309106 - DNA, 122 bp, Homo sapiens
accccctggctgggtcccctggggcatggccgagggacgccagctgtggggggggccaagcgaggggcgtcacggagggaccgcggagtgctccctccccaccacgggcactggacgggcac

SEQ ID NO: 309107 - DNA, 122 bp, Homo sapiens
agtggggaagaatcagaattgctttctttccaccccaaatctggtcttgcctcttctggccggccatgttcgtgtccactgggcggctacagggaattcctgaatgttacagttcaacatta

SEQ ID NO: 309108 - DNA, 122 bp, Homo sapiens
gagagagagtcagggacatccgtctttgcagacggacagcggggagcaagggcacagcaccgcttggctggtgtccagagaaagagttaagctgctgaccctgaagtcaagggagagccggc

SEQ ID NO: 309109 - DNA, 122 bp, Homo sapiens
aacaagtgtatgattagccaacatcaataggaagaatggaatggggacttcaagagatttcgtcatggtggaccataaaacatatgatttggagcaaaatgagagcggggctctgctctggt

SEQ ID NO: 309110 - DNA, 122 bp, Homo sapiens
ataacagtgccagcctgccgacgatcaggagcgcagctttcactattgtgttagccccggcggcggaaggactgagcctcactgcaacgttaaagagtccttctttgttcagccccagtcgg

SEQ ID NO: 309111 - DNA, 122 bp, Homo sapiens
ggaccacataccatggatatttactctgctacagccagtgggctgcctctgttccttgaacgtggccatttcattcccttctcaaggcctctgcacttagctattctttcagcgtggagacc

SEQ ID NO: 309112 - DNA, 122 bp, Homo sapiens
ccatgtgtctttatctgttacatggcataattgttcttaggtggcgttgtatggatccgccgagatcagacagctccgagccaagagtctgatacacagtagggacctaccagaccccagga

SEQ ID NO: 309113 - DNA, 122 bp, Homo sapiens
tgaagaagcagatgagcgagaagctgaacgagctggccgaccaggacttccccttgcacccgcgggagaacgaccagctggatttcatcgtggaaaccgaggggctgaagaagtccatccac

SEQ ID NO: 309114 - DNA, 122 bp, Homo sapiens
gacattaaaaggccggaaattctagggacgagggcgaaccgaggttggaagggagccaatcggagggtcaaagacttcagaatgaaaacagcttcgccaaaatgttaaaggcacctaagcag

SEQ ID NO: 309115 - DNA, 122 bp, Homo sapiens
ccccatgccacgttaaatgtccctcaacactagcctgaaagttccaaatgcctatactgacgctgcagccatgcaagaaagctgaataaaatcacaccacgggcagagagaggtgcagcaac

SEQ ID NO: 309116 - DNA, 122 bp, Homo sapiens
ggggctggacctggacctgccggtcgggcctcatcaatgctgggcaggcagcctcggggccgcaccggtgagggtttccgcccggagtctttggcattctcctcctcctggcgtcccggggg

SEQ ID NO: 309117 - DNA, 122 bp, Homo sapiens
tcctcttttggagaaaggagggagggaacggccttgtgagacgactccaggagcgaccagcgacctccacaagtcccaagtcttcccagcgcacagggaaactgtcacttacagggaaactg

SEQ ID NO: 309118 - DNA, 122 bp, Homo sapiens
gcatggggtggaaggtaggggctgaagggatcacgagccacaaaaaacacagtcaagccacgaattcataatagtaaggattcataatagctaagcatgggactctgctaggtagctgctaa

SEQ ID NO: 309119 - DNA, 122 bp, Homo sapiens
ccctttcgtcgctttttaagaatccgtgcatgtggcagtggaggcagcgaatgctcagcacggagagggccgtggttggagctcttcgcctgagtcgtttcatttgacagctgtgaggatga

SEQ ID NO: 309120 - DNA, 122 bp, Homo sapiens
cttcattttcaaattactataatatttaacatgccttttcagactatatatgtgacaccccgatgaataagaagagcagccagctgagaaggggaactctacaaagctattttttcaacagc

SEQ ID NO: 309121 - DNA, 122 bp, Homo sapiens
ggaggttgttagaaatgatgcatctcaggacccacctcagatctgtagaatctgaacctgcgttttaaaaagatgcccaggtgagtctgggcgtggtggctcactcctgtaatcccagcact

SEQ ID NO: 309122 - DNA, 122 bp, Homo sapiens
tgacagcaaagttagcaacctaccggtggagcatcagggctgcctgagatgttctccattcgcagcaaatgatcttattttctgaagtagcagctttctattgaaattcttcatcagtcgct

SEQ ID NO: 309123 - DNA, 122 bp, Homo sapiens
gtacagctggcttaggctcattgtgatttgaattcacccatggttggggctcttcatttccgctctgaaggcttcctcttcatcacagtgcaagagggcaagcctttgcatagctcctttct

SEQ ID NO: 309124 - DNA, 122 bp, Homo sapiens
tcggtctcccgcgtaccccctcccctccatccctgcgtctcagtctctctctgcagccgtcggtccccctcattgtccccgcgtctctggagctcctctcggagcctctctgcgtctccgcc

SEQ ID NO: 309125 - DNA, 122 bp, Homo sapiens
aggtcgggctcccggcagtgtccaggctctcgcccgccggtgcctgagccgtacccaccgcgtcccctccgccccaacagctggtgctgagggtccggcccggggtcatctggcagggccgt

SEQ ID NO: 309126 - DNA, 122 bp, Homo sapiens
gtagagccacgctccctctgaaggcaccagggagagatctgtttcagatcttcctcctagcgtctgctagttcttggtttgtggaaggataactccaaattttgcatgttctccctttgttt

SEQ ID NO: 309127 - DNA, 122 bp, Homo sapiens
aggggggaagacggcgtatctctggccctttaaataggggcgtggtgaagaggcgcggaccgcccaggagggggagcagtgcgaggaggaaagcggaagcgctgcccgcagtggtaggtagt

SEQ ID NO: 309128 - DNA, 122 bp, Homo sapiens
caatggagaggggcaggggtgggaagactttgttgaaaggcaaggggttccagtggatcccggacatcctgataatacttgtgtgcaaatcaaatcaaatccccccaggctgcgggaccagc

SEQ ID NO: 309129 - DNA, 122 bp, Homo sapiens
atatgggaggaaggggtcaagggaggcccacctggggggttcgagggcctgtctgaagcccggggtcaccaggagcaccagatgccactggggctcagggcggggtagggggaaggtgctgc

SEQ ID NO: 309130 - DNA, 122 bp, Homo sapiens
tgacattaatcacgagagttttgccattacctcttaaagatcccacttcttaatacacttcgtaatcccacttcttaatatatgatagctgcttaatgtccttgtctactgattcttttgtc

SEQ ID NO: 309131 - DNA, 122 bp, Homo sapiens
cccaacggcggcgagcccttccttataggcgtcagcgggggaacagctagcggcaaggtacggcggggcccggagccgcgctcccttcccggcttctgtccctgggcggcgcatgtggccgg

SEQ ID NO: 309132 - DNA, 122 bp, Homo sapiens
ccaagaccctagttcccctaagagctccgtcgatagccgcttgaacgttacaaaacgttacgttttccctttgagatagtccttccggtcccgcataccagtgtaactaccgacatctgctg

SEQ ID NO: 309133 - DNA, 122 bp, Homo sapiens
agggtccctttaacagagattgcgggaacctgggaaggaactgaactgggctaaccaaaccggtcgaaatgagcacagggattagattagagcacagaaattctggctagcagtctgagaaa

SEQ ID NO: 309134 - DNA, 122 bp, Homo sapiens
ccagctaccatttcctcactgcaggtcttaagaaaagctaccttaaatctctctgaatctcggcttcccctgtgaaaatggggttggtaataacgaccacaccacattgcaagaaagattat

SEQ ID NO: 309135 - DNA, 122 bp, Homo sapiens
ataacgcgttaatcattcatcctgagaaaagcgcggtgattcggtcaacgccgagcatgtcgcattaatccattgatgaatcagacccccaacctccactaggggcgagccccgtggcttct

SEQ ID NO: 309136 - DNA, 122 bp, Homo sapiens
tctccatccaaaaagggtcacagatacagcgtttggtgaacgagtcacagtggccatggtcggaacagttcagctgacatgctgagagtggcagcaaagggaagaaagtcaacaagactcag

SEQ ID NO: 309137 - DNA, 122 bp, Homo sapiens
ttcaaaggtaattcagggtatggagagcagctcacaatgcagaatccagagtaattattccgtgtgcatgtgaggttagtggctggaatagatttttaacgcttcttctggcaattacggtt

SEQ ID NO: 309138 - DNA, 122 bp, Homo sapiens
gagctaaaaggtagtatcccaccctctccataaacagacacctaagttataaaacttatgcgctcgatatgcaaaaatagctcgttttatacagaaacgatcctttccttcttttccttata

SEQ ID NO: 309139 - DNA, 122 bp, Homo sapiens
cagcaaagacaccctgctcccagtccagagagctcctgagactcctctgctggaaagcatcggctttgcttgtggcttaaggagaacacagcccccacaccccctttccattccccagctgt

SEQ ID NO: 309140 - DNA, 122 bp, Homo sapiens
ttaagttcatacaaatgagcaaggcagattttgtcatgataatttcaggctctgatgtatcgacaatatgaccccaaggttctctctaagatgaggaactattctaagaaaacaaggagaac

SEQ ID NO: 309141 - DNA, 122 bp, Homo sapiens
gggggccgcggcaccaactgaaaagggttagcgcatttgtcccaagccttcggtccagcccggcggcccagaccaggcgcgggccgcggcactgccatcttcctttcagcaagcccggcccc

SEQ ID NO: 309142 - DNA, 122 bp, Homo sapiens
acagccccctggggattgacttgaagattctgagcagaggatccacccccacccctgctgcgcccatccctaaccctgcaggatactggtcctgggcttcagggacatgtggctctgggaag

SEQ ID NO: 309143 - DNA, 122 bp, Homo sapiens
ccattctgagcccaggacttagcttgaatcaggctgttctgcagtcccgagtggagggcgcgaggcaggaatgcaagcagaagcacggcgttgagggatgttagaatgctggaaaggtgagc

SEQ ID NO: 309144 - DNA, 122 bp, Homo sapiens
tttgaattaggagaggcaaacctgcagtgactacttgcagttaccccattcccctacccacgtcactcaaagtgcaggtgccaaaacccacccccagaagttcagtgtcagggctggggcag

SEQ ID NO: 309145 - DNA, 122 bp, Homo sapiens
taggtaaggcccaaatcccttggctaaggttaatcctcggtgggaccggcaatagggacgcgtcccctttaaggcgccagctctccggcggcggcggccggaagtgttgaagcccggcctgg

SEQ ID NO: 309146 - DNA, 122 bp, Homo sapiens
tcccctctgtgtttagtcacctcttgattgggagccaaagcagaaaaccagtcagccccacgagcaggaattacctgtttctcatcaactccacttgccagaacggtctgtgactttccagt

SEQ ID NO: 309147 - DNA, 122 bp, Homo sapiens
tcagccgggaactggtgcccaggccatggagaagctgattcaaactttacttgtccacaccggtagaggtgaccgcgatgagaataccagaaacagcactacgaccctcagaactcagggta

SEQ ID NO: 309148 - DNA, 122 bp, Homo sapiens
ggctcgggtttcggggactccagcgacctcagatccttgggacacggtgcctggttcctccgggttgagggagccaccccagtcctgccttctacagccccggacacgaaggaggacggccc

SEQ ID NO: 309149 - DNA, 122 bp, Homo sapiens
gaagatgggacctccccacattcctggccctaagggtcattttattagtcactgaacgcacgggcagcgcctggatcctgcgcccgggcagtcctgggcttgaacgtgtgtgtcagccgcgc

SEQ ID NO: 309150 - DNA, 122 bp, Homo sapiens
gaaagaggcgaagcgagagcggaggccgcactccagcactgcgcagggaccggtgagtgtcgcttctgggggcagcgcccagtaaccgcgctaggagcgcggagaagggcattgggagagcg

SEQ ID NO: 309151 - DNA, 122 bp, Homo sapiens
gcggtttccacttccgcccctctcaaagaccctcttcatggttctggtgaacggacagagcggctggagcccgtgtggccacctggcgtggacctctcttggccgccgtccccggccccccg

SEQ ID NO: 309152 - DNA, 122 bp, Homo sapiens
gtacaaaaagactaagtttccaaaaggagtatttttgtcctatagcagagcaccagggtgcggaaggaagagtgctggcttgggggatcaagaattctgcatttacacccctctctgtcctg

SEQ ID NO: 309153 - DNA, 122 bp, Homo sapiens
gccaacacagcgaaaccccatctccaccaaaaaaatacgaaaaacagccaggcgtggcggcgtgcgcctgcaatcgcaggcactcggcaggctgaggcaggagaatcaggcagggaggctgc

SEQ ID NO: 309154 - DNA, 122 bp, Homo sapiens
ggaacgttacaaggccgtgtgtcatgctgccaggacccgttctatcctttccctgggcctcgcctgcttcaagcggcagccagacaaggtatgagctgatctcaccccaatcctaggtgtgg

SEQ ID NO: 309155 - DNA, 122 bp, Homo sapiens
cagggatgctggaagggggacatcgaacattcccaacatggagaaacaacgcacgtccagcgtgacggattcgctgattacccagatctgatcaccacgttacacagatcaaaacgtcacta

SEQ ID NO: 309156 - DNA, 122 bp, Homo sapiens
ggttgaggacgcacgcccgtgacacagcctcaggaggtcttgacatgtgccaaaggtggccgggacacagcttgcttttatacatgttagggagacaggagacatcaatatatgtaagatga

SEQ ID NO: 309157 - DNA, 122 bp, Homo sapiens
atttcctcagtgatcactgattagaatgagttggtgggatccttgggaagccaaacggagcggagttctggatcatgtcccatccagtccagtgaatccacgacccgcagacctgtcccccc

SEQ ID NO: 309158 - DNA, 122 bp, Homo sapiens
agtttattaggaaagtaaaggcataaaagaatggccactccggcagggcgcggtggttcacgcccgtaatccaagcactttgggaggccaaggcgggcggttcccgcggtcaggaggggcca

SEQ ID NO: 309159 - DNA, 122 bp, Homo sapiens
tggtgcagcttccctcccgccgcgctccgcgggccgggaaacttttgcgtagcccagagacgcaccgagtccttctcctggctgatgcctcgctagaagaaattcgcacgaacccgggcttc

SEQ ID NO: 309160 - DNA, 122 bp, Homo sapiens
aggggggtgcagggctgcacgccgctggggtgccaggggtctcttttcgttctctccaagcgaattttcagggaaagtctgtccactccggctggggaaagcccagttccttataggcaaat

SEQ ID NO: 309161 - DNA, 122 bp, Homo sapiens
ggaacagtagcccttggccgctgcagtggactctgggagttgtagtccgcgtgccctttgcggggcagagccgcggttcccgggcacaggggatggacgcgggaggtgagaagcggacgtgc

SEQ ID NO: 309162 - DNA, 122 bp, Homo sapiens
gggcccagaatgcagcaagcctggcagcagaagaagcgtgggctggggcggaacgggtcccgcggcgccctcaccggtgctggcgtggcgcggtggcgggggcagcaccccggcgcgcatgg

SEQ ID NO: 309163 - DNA, 122 bp, Homo sapiens
ctgggtttccgttcccagttctgctgctgctgagagcccaggagacctcgggcaagtttccgaacctctttgcacatctattttactcacttataaaagggagacaataatagtatctacct

SEQ ID NO: 309164 - DNA, 122 bp, Homo sapiens
ttccctcgctccaggagacgcttggtgggcacccaggaagctccgtaaaggcttctgggacgggcagaagccccgcgcccctgcctgcaccccgcgcgcctgctcatggcacgccaccagca

SEQ ID NO: 309165 - DNA, 122 bp, Homo sapiens
ccttgggcgatcgatggggactggatgccatggtgccatggagcaggtggtggcgcccatcggggaggctcaggccgcatgggagcccaccgtgggggggctcgggcatggtgggctgcagg

SEQ ID NO: 309166 - DNA, 122 bp, Homo sapiens
ctggttccccttatgggcagtgggaaaaaatgggattataggctcagtttagaatgtctacggaaaaaaaattaggaaatgaggtcagatcagtctctagtctactaactgtcttctgtgta

SEQ ID NO: 309167 - DNA, 122 bp, Homo sapiens
tgaggcccaggggattgggctcaggggccggattcaggatgctttccgcgcagagccagccgcagaaggggcatgggaaagagcctcatctacgcacgagaaaaccgggccgagagtcaaga

SEQ ID NO: 309168 - DNA, 122 bp, Homo sapiens
tgctgctgctcggcggccttgcgctgctggcggccggaggtaggggcgtcccgggtccgccgccccagcttagggtcccgaccccctcggcctcgcgctccctgcgagtttcggaaccacgg

SEQ ID NO: 309169 - DNA, 122 bp, Homo sapiens
cttcctcgtctcgcgagaacagcgcagcacctccgactcgcgagaagtaaacaccgcgcccgcaggctcggcttactcgccgataggctcagcgactacaactcccagcaggccacgcgccg

SEQ ID NO: 309170 - DNA, 122 bp, Homo sapiens
agagtaatgctttctgatgagacctttctttagagggcaacatcaaaaggaatcatccagcgtctgctgccattagcagatcacatgcaaccgttaggaagttgctaacagagttcctattt

SEQ ID NO: 309171 - DNA, 122 bp, Homo sapiens
ctttcagctgcccctgtatggagtggacggttgtggaggggctgacagtgtgtccacctgcgtcacctgcatcttccttgggagtggagctcccaccacttccacggccaacactccttccc

SEQ ID NO: 309172 - DNA, 122 bp, Homo sapiens
ccatgtgacagttaacaacgaggattcattctgagaaatgtgtccttaaggtgactttgtcgttgtggaagcatcatcgtgtgtacttacacaaacctagatggtgtagcctactacacacc

SEQ ID NO: 309173 - DNA, 122 bp, Homo sapiens
cccctctgtcctggctgtccttcaggtgcaaagtgattcccagggctccgggaacatccgcgtgcctggacggcccaggtggcattgaaccagccactgaggtcacaaatgtcccacaagga

SEQ ID NO: 309174 - DNA, 122 bp, Homo sapiens
agtaagcgctcgaaatgcagaagtagccggggccgcccacggcacctgcctcgctcggggcgagagaagacgccaggctgaggtcccagcgacctcaggcaccagctccgaaggagggcggg

SEQ ID NO: 309175 - DNA, 122 bp, Homo sapiens
agcgggcacgggcggacgcaagggcagcaagaaatacagcgcttcgtggtggtataaaaacgagacctttactctggcaataggaattcacatttcaaaagctgatgattgtcaaggcgatt

SEQ ID NO: 309176 - DNA, 122 bp, Homo sapiens
gatctagatttcctgccttttgatcgagaacgtgatcgacctttgctccgcgacctggaacgggagcgactttttgagacacttccagatctactgcggctgctcctgcgactcctacttcg

SEQ ID NO: 309177 - DNA, 122 bp, Homo sapiens
aggaggctagcaggggtcctgagttctctctctgcccacctctgccctgctgaatacccccgacccaacccacagcccagtctgtgttagtgcagaatccttcacaagagtgatgtataggg

SEQ ID NO: 309178 - DNA, 122 bp, Homo sapiens
ggcgggaaagccagctcctctaccgtgtcccctgtgcgcccgcggtcctctgaggacgcccgccccgtaccaacccgtcctggcttccactcggccccggagacagggcgggcgggtggcac

SEQ ID NO: 309179 - DNA, 122 bp, Homo sapiens
ttcagcacttgaagttcaggcagcgagagttgacatggggccagggctgcgcccctggggcgggttgaagacagggtgagtctcttgatattcaggaaatcatcgcgcacccagtcaccagc

SEQ ID NO: 309180 - DNA, 122 bp, Homo sapiens
caatggctcagtcgaccgtgtgcacaaacttgcgctttatccgccggggatcgctgggagcggagataaattcaatccccagggcaatcttggccccgcccgccccaccccatcctgtgctt

SEQ ID NO: 309181 - DNA, 122 bp, Homo sapiens
atgtgtgccaggcattgttttagaggttatagtggagtttcagagaggatccgctgttcacgtggtgttttaccggggtatactcatgaacaacaaataaccaccggttttaccaaggcata

SEQ ID NO: 309182 - DNA, 122 bp, Homo sapiens
cagaacttttctcagtctcgcgccatggtaaggttccccgtgaaaagaagctagttcaaacgtggccaacattcccaatatcagtaggtaatgggggggttctccacgttcccccaggaagc

SEQ ID NO: 309183 - DNA, 122 bp, Homo sapiens
cgcacctgcaatgtatgtggatttataaggaggtgccgaggacgacccatacctggtttacggtgaatccatggatcttgtctcctagtttatactgcagagccctctcacaagcccggtta

SEQ ID NO: 309184 - DNA, 122 bp, Homo sapiens
aaaggtgcagcatggagacagcatctgaacagagcctgcatctccccaggacccagcagccgtaccggggaggctcccagcaggcaggagaggccagcaccgaggggctgactcaggatggg

SEQ ID NO: 309185 - DNA, 122 bp, Homo sapiens
cggcggaggcagagaccgaggctgcaccggcagaggctgcggggcggacgcgcgggccggcgcagccatggtgaagattagcttccagcccgccgtggctggcatcaagggcgacaaggctg

SEQ ID NO: 309186 - DNA, 122 bp, Homo sapiens
accctcctcttctgtctctctgcaacccctcctggtgatctctgagtctctgagcacctccgccttcctctcccactgcctctttctccccctcatcctctgggactcacattccctaaata

SEQ ID NO: 309187 - DNA, 122 bp, Homo sapiens
ggactgatgaagttgagaagtcgagaggctgatctttacagattcatttaagccatcagacgaacacaagagaggctcaaacaagaaattcactgtgtacactctctaagacattctccaaa

SEQ ID NO: 309188 - DNA, 122 bp, Homo sapiens
aggcgctccccacatctcagacaatgggcggccgggcagatatgctcctcacttcctagacgggatggtggccgggaagaggcgctcctcacttcccagactgggcagccgggcagaggggc

SEQ ID NO: 309189 - DNA, 122 bp, Homo sapiens
gcgacaacatgcttgcggacctcggcttaatcggaaccataggcgaggatgacgaggtgccggtggagcccgagtctgactccggggacgaggaagaggaggtatgagcacggttctggtct

SEQ ID NO: 309190 - DNA, 122 bp, Homo sapiens
atttatttatataaaagtctgtctcctgtaccaggtcataagattcttgaaatcacgaaccgtgttttagacatctctgcatctattgagttccttgcacaatgtctggcacatcataggtg

SEQ ID NO: 309191 - DNA, 122 bp, Homo sapiens
tttgcaaaccctaagctaaaccatgacacacgtgtcattaaaatacacacagctcaatctcgtccatataacagcttctgaaatgcgaggaggcctggcgggaatggtggggtgcacggagg

SEQ ID NO: 309192 - DNA, 122 bp, Homo sapiens
ggttgagtgtggggaatggggtcccaccggattcagcaccaaagtcaccagtcccagctccgctgtctcagctcccggcggggtgacggggaggctctacccccttcgaagggcacgccagg

SEQ ID NO: 309193 - DNA, 122 bp, Homo sapiens
tctcggctccggggccaaccccactcctttggggacgcgattctgatgggctgaggtcttcgctcttcgcgggggtcttaatctttcccgagttgctcatagcacccctgttcctgtcgcta

SEQ ID NO: 309194 - DNA, 122 bp, Homo sapiens
gcaacagcggcaaaaactagcagaacatcctcaagccaggactgcatgtgaggaagacagcgccagcatcactgtttcatagtcggatccacaaagcccggggaagtggccggcagaagaca

SEQ ID NO: 309195 - DNA, 122 bp, Homo sapiens
agagatgagaaggatctccagcctgggagctggaggtgggaattctgctcaagtcaagatcgcttttagctttcctacattctcctgtgaagaaccattggattgaatgatggtggcaaaac

SEQ ID NO: 309196 - DNA, 122 bp, Homo sapiens
ctggacgcgtgcacctgctctcgcaatcaccgactgcggtcagcatcttccttagagcagcgccccgggccacttggatcccggtctcaatttactaagcgaacccagaggatgccccgagt

SEQ ID NO: 309197 - DNA, 122 bp, Homo sapiens
ttcatatctgccaaacattcaaaactgctctatatgttttctcatttggttttcacaagacgctatggggctggcaatgaattattcattaattcatcaaaaaaggattctggaaatagatt

SEQ ID NO: 309198 - DNA, 122 bp, Homo sapiens
gaattcaggaagcggtacggaggtcccggagacaactgctcacgcctctgaggggccgatcgctcaggatcccccagcagcagcgagagaaccagcagggcccccctcccctctccagccag

SEQ ID NO: 309199 - DNA, 122 bp, Homo sapiens
tatgcccacttccagttactcatccctgtatctgggagcgatgcccacacgccttcccggcgggcttctccgccagggtttttttgggggaggctgacataaagttccacgtgcttctgtcc

SEQ ID NO: 309200 - DNA, 122 bp, Homo sapiens
gggccaggggaggagggtggttggacgctgccaccgctgccggggctgtgcagggctgggcggggagcgaggacccggcggctcctgattgcggccccgggggaggtggccgagccggataa

SEQ ID NO: 309201 - DNA, 122 bp, Homo sapiens
aatgccaaaaaagacagataaaggaaagttaagccatagtggcaacctctgcagttggaacgagggagctatatcagtcaacagtgaggctaattgagaatatttgaggttggcgtatgtct

SEQ ID NO: 309202 - DNA, 122 bp, Homo sapiens
gcggggtgggcgcggacgcccctcagcacacactccgcacccggccctgcaggaagctcgcgctgattgacagctgcgttgtcccaaaaaggctcagcgaagatgctgatctgcgggtgggt

SEQ ID NO: 309203 - DNA, 122 bp, Homo sapiens
taattcccaagggttgtagggtggagtgagtcttgttatctccatctcacaggtgggagccgggtagcagagagcctgagggctttgcccacggtctgtctgtgtcacctcacccctctcca

SEQ ID NO: 309204 - DNA, 122 bp, Homo sapiens
ttggccagggcagctgtcagcgaggccaggttggtggcggagcccgagagggtggcgctccggcgggcctcgggggcacccagccggagtcctgtgctgcgccgccgcacagggcccgtggc

SEQ ID NO: 309205 - DNA, 122 bp, Homo sapiens
ctatgtccttgtcaacaaactagatctaggctgtgatgcaaagctgagtgatgaaacaggcgtgcccaagactggcctgctgatgactgtcctgggtattatcttcacaaatggcaattgtg

SEQ ID NO: 309206 - DNA, 122 bp, Homo sapiens
gacagcggcagtgaccacctggcctttgtgcgggctgtcgccggctgggaggaggtgctgcgttggcaggaccgcagctcccgggagaattacctggaggaaaacctgctgtacgcacccag

SEQ ID NO: 309207 - DNA, 122 bp, Homo sapiens
acttccctggaaggaattattccatttcattctgatccaggctcagttccactgagtttccgaattgtttcctgggcttgcttatcaagatggttgacaccctcctttgaccactagtctct

SEQ ID NO: 309208 - DNA, 122 bp, Homo sapiens
gttggcggcgctggcggcggtcgagccggcctgcggcagccggtaccagcaggtaagcggcgcccgactccagccccgaactccggtccctggctctgccctgcccgctggccgcctcaggc

SEQ ID NO: 309209 - DNA, 122 bp, Homo sapiens
ggttcctagagtccagcatttctatcaaatgtcctccaccccattaaccaacgcagcatgcgcgcgcgcgcacacacaaacacacacacacacacacacacacacacacacacgctcattcc

SEQ ID NO: 309210 - DNA, 122 bp, Homo sapiens
gaagtcccaaccctctaatcacatggttggtttctctgatgaccaacccccatcctgaagcgagctaggggttctaccttgagtcatctgcttagcacaaacttaggtagggtcaaaatggg

SEQ ID NO: 309211 - DNA, 122 bp, Homo sapiens
ttgggcccgggcttgggtccccgtaccccgggcatcacctaatatcaccacccctctccccgggtccccacaaaggcatcaagccaggcccctcgtcactgcctccactgcgccctcctgtc

SEQ ID NO: 309212 - DNA, 122 bp, Homo sapiens
gccccttacgcagaggcctgtgtactgcgtcgcgttggaccagttcttgccggtgcccttcgggttggggttttgccctgtagatcctcttcagtgacagctgcagattgtgaacccctcca

SEQ ID NO: 309213 - DNA, 122 bp, Homo sapiens
catccataatatctctgcccatccaaggcagttgtagtgtctccattcaacagtggagcccggaatattgttactggctgggtagcctccaagctccatcctttagccatcccagagattgt

SEQ ID NO: 309214 - DNA, 122 bp, Homo sapiens
gtgggacagcggggctcctcttcactggcctggtgcggggatctgagtgacgggtctggccgcaccgctcccttaactcctgtgtctcggccttcctggggactcctgagctgccccaaatc

SEQ ID NO: 309215 - DNA, 122 bp, Homo sapiens
gcgcttgcaagcgcaggaagagtcctggggggaccgcggtgggcgggatacctttggcgccggatcttcctctttctcccggtttgttcccgacggtgctcgctcgtgggcccgccctggcc

SEQ ID NO: 309216 - DNA, 122 bp, Homo sapiens
gtgacattttaccaatgtccttatagggctctcttgaggagaatctgtgtggcctggggacgggagtttggagaagattgaggagggctgctgacgaaggcgagagcaagcctcaagccttg

SEQ ID NO: 309217 - DNA, 122 bp, Homo sapiens
gttatgagaaattcccttggggccaaaggggattgacatgtggtcatgggaagggcagcccggagactccctcctgaatagtcaccaaggtccagttcccttgtgcatggcggaacccaggc

SEQ ID NO: 309218 - DNA, 122 bp, Homo sapiens
accgctcggccaagctgtcctgagccgctctgaggcgggtgcaccaagggatgcgacacccgccttctccagagcccagctgggcctttaagggaaaaaagtttgaagcctgcatttgcaaa

SEQ ID NO: 309219 - DNA, 122 bp, Homo sapiens
gcagagggtgggagctgctggcttgggacgggctcaacacctcttggggaaaagcatctccggccacgcaaagcaacctcatcacttcctccctcgaggagctcggcagcagacgggagcca

SEQ ID NO: 309220 - DNA, 122 bp, Homo sapiens
gtggttgactctcagttcactaccaacctgggaattctaggtgtctggaaagacagtacccgggaaccacaggcccatctcaagtggtacccacctcctctctgacctcagctgttcaccag

SEQ ID NO: 309221 - DNA, 122 bp, Homo sapiens
caacccagcctctacccagacctttatgctgtcattttaatgaaagcatctgagagacaacgtgaggtcaaacatagcacagatgggtcatatgcctctacggttcttctctgagcttcctg

SEQ ID NO: 309222 - DNA, 122 bp, Homo sapiens
agcatcagcctggatgggctctgaaagtcccggagggtcccctactgagggcggagggagcgcggctggcggaccggagcctccatggcgggaggatgagatctgcgttgtgggaatcttcg

SEQ ID NO: 309223 - DNA, 122 bp, Homo sapiens
tcagaccttgccccaggcttccctgctgagaaagcaaggccttcagacctcgcccctccccgtctgcctactctgtcagcagctctgcgctggtatctgcagcagttcctgttccctcgcca

SEQ ID NO: 309224 - DNA, 122 bp, Homo sapiens
ggcggaaagacttgtggcggcggctgtcaaagccaaaaggttttcgcttttccctgggatcgctgggaagtgtagtcttcccatggcaggcaatccggcttccggggctggagaggggtctg

SEQ ID NO: 309225 - DNA, 122 bp, Homo sapiens
ctccagctcttgggcaccttgctggggctgtcctcgaggctctggtcggcgctgggtgaccgcctcacagtctgggcctgcggggaccccttccccttggcagccacgcctcgggggctgga

SEQ ID NO: 309226 - DNA, 122 bp, Homo sapiens
ccagggcacaacaaacttgggcggagagcttccgtgtggccccccgggcgaggccgcccacggtggtgaggccatccgaggggatgcccggttcatcccccagtccaggagcctctccgaga

SEQ ID NO: 309227 - DNA, 122 bp, Homo sapiens
catgcttcttcgaggggcagcagcgcccccacggggctcgctgggcgcccaactacgacccgctctgctcactctgcacctgccaggtaggaggtcctggaagggcacactgggtcctggga

SEQ ID NO: 309228 - DNA, 122 bp, Homo sapiens
gggagcagagagttttcaagttccgagctcagcgctccagtggagttgggggcaagagcccgggggctgggtggaagctgacagtcctcccgctcggctctgagctccctcggagcgcgcgt

SEQ ID NO: 309229 - DNA, 122 bp, Homo sapiens
ccgtctggcagaggatgtggtctgtttttgatgtcccccctcccgcccccctggtgtgaacgtgtgggaccagaccctgtcctgggggtgcgcccaagtcactttaaccacaaaacgccatc

SEQ ID NO: 309230 - DNA, 122 bp, Homo sapiens
accggccggctgcgcgcgggccgcgccgccacagtccctcatcccggcccgcgcgacgcgcgtgagccagccgccgctccccggcctctctgctgctccgccgctgctgccgcggcagcccg

SEQ ID NO: 309231 - DNA, 122 bp, Homo sapiens
ctggatggaattctgtgcacagaagttatatacatatatgggtatatctatgtaacaaatcgcagcacaggagtcccctgggctccctcaggctctggtatgacatatttgagccatataaa

SEQ ID NO: 309232 - DNA, 122 bp, Homo sapiens
ccaccctcatcgtttcaagggcccccttatgcaaatacacgctcggttcttccgaggaggcggggcctgcatgtaaatgagggggcttgaggtggggctcacaccaagaggaaaccggttct

SEQ ID NO: 309233 - DNA, 122 bp, Homo sapiens
cagagcaggtgcagaaggtgaggaggcgcggccggggcagcgaataaccatcttcgttcacgttgtactctgcgtctttcggctcagacctcactaccacctatggtgggggtggcatttgc

SEQ ID NO: 309234 - DNA, 122 bp, Homo sapiens
cagctctcctttagttgcagcaaacattttcaacaacagtcactttcttctgacagtcaacggagaaaagctccactgcctctcctggctgccaggagcacatgacagggaaagcccaggac

SEQ ID NO: 309235 - DNA, 122 bp, Homo sapiens
tcgggcagttccggggactggtggccgtgtggtcggttctggggcgtctgtagtgaacctcgcacatcagggtttcgaagccgctgtgcctgaagtctttgatcttgacttggggactccac

SEQ ID NO: 309236 - DNA, 122 bp, Homo sapiens
gggctcgggacctgcagcccgccatgcctgagcctcccaccccctccgtgggctccggagcggccggagcctccccgatgagcgccaccgcctgctccacagcgcccagtcccatcgaccac

SEQ ID NO: 309237 - DNA, 122 bp, Homo sapiens
gttcttggtcttgacacagatgcaagaaggaggcagataatagacacctcccttccccctcgcccacataggctccggtgggttctcagggcaaggcctggctccctcctctccgacttcag

SEQ ID NO: 309238 - DNA, 122 bp, Homo sapiens
ttaagaacacaaacaagaaatccaacaaagaactgagcgcagcacgcggcgagggcgtgccggtctagcacgtgccccttccctcaccacccgctatccccctgacgccgcagtccgcctaa

SEQ ID NO: 309239 - DNA, 122 bp, Homo sapiens
cactgagctgctgggcgtggtgggaaggcggggaaaaggagaggttcgagccaacgtttacgggggactccactctgccattagccgtggctgcagcatcgagtttgagggaaccagcctcc

SEQ ID NO: 309240 - DNA, 122 bp, Homo sapiens
attgctaccagtttcagtagttttacattttattttaagaattttcttattttaagaaaacgtggaatgcttcacgaatttgggtgtcatcctcgcacaggggccttgctaatctctgtata

SEQ ID NO: 309241 - DNA, 122 bp, Homo sapiens
gcctgggtatgggctcccgccctgggattgttgagctcgggcaggaccgggtcttctttccgcccctagggggcacaagcgggcatgtccaagcgcctaggagcccgtaccgctggggacct

SEQ ID NO: 309242 - DNA, 122 bp, Homo sapiens
ccttcccacctttaagcccgctgctcatcagagcgtggagaatggggtccaggcccgctccgcccgctgataggcggggagcccaggggcccgtggctggcagagcaggccttttggaaaac

SEQ ID NO: 309243 - DNA, 122 bp, Homo sapiens
aagaatcgtgcgggtctgggacctgggggcccagagggagcgagctcctgcgcgggcgctcggtccgcaggtttcgcaggctcaggggcgtgcctcgttctcacccccactccggaccccgg

SEQ ID NO: 309244 - DNA, 122 bp, Homo sapiens
ccgggggtgccaaggtgcgtctccagtctgacgcgaccgcctggggcggagtcagcgggacgtgccacctgcagtgctggctagggctttttatttactagggagcagtttccccgcgcgac

SEQ ID NO: 309245 - DNA, 122 bp, Homo sapiens
gcatgggtactacctgcctccagggcttggagctcgggaggggaaccaatcccgggccctcgacctgggaggtgccagaaggccctcacacaagactccagcactagggtggggaggttaaa

SEQ ID NO: 309246 - DNA, 122 bp, Homo sapiens
ctccacagtattgaagaccagcctttaaaacatactagaagatatatttaaatacactgacgataactacccataaaactttacatagaggtgataaaagagacttttccatttaatcaagt

SEQ ID NO: 309247 - DNA, 122 bp, Homo sapiens
gcagcggtggcaaccgctgccctgcccactgccaccaccaatgaggatcccagggtcggccgcataattcacccggtgggccctgcagcttcaggagagtgagaaaggtccactcagcccca

SEQ ID NO: 309248 - DNA, 122 bp, Homo sapiens
gagccagctggagttccgggtgggcgtgggcttggcgggcctcgcacttgagctgccggccgccccgctggccccgggcaatgaggggcttagcacccgggccagcggctgcggagggtgtg

SEQ ID NO: 309249 - DNA, 122 bp, Homo sapiens
cgtgcgcagtccttgtttttgggctccggcgcggctttctagagatatctacggaaagggcggggcctcccagctccttcgcgatccttcctggcgccggccccgcccttcgtccgccaccc

SEQ ID NO: 309250 - DNA, 122 bp, Homo sapiens
gacatgacaggccctttcaccttctgccgagcacggctctctctccggatggactgcatgcggtatttttccatgtcctcaagatcccatgaggtgtaggtgtgcttcacatcagcagccgg

SEQ ID NO: 309251 - DNA, 122 bp, Homo sapiens
gtgtcagacgcactggagcgtgggtgtatgccggcctgtgcgagtgtgcccgtgtgcctgcgtgtcggatgcaatggagcgtgcgtgcatgccggcctgtgtgagcgtgcttgcccgtgtgc

SEQ ID NO: 309252 - DNA, 122 bp, Homo sapiens
tgcgcccgcttgtaatgctactactggtgttcctttctcagcaaggacattattttttcacggtgcccatagccagggaaagccctttaggcaaagaaaatcaaaatgtttgttgttttgga

SEQ ID NO: 309253 - DNA, 122 bp, Homo sapiens
gacagatgtaaagctttgctcagccagtggtacagaatgaaattcatttcctaggcctggcgcggtggctcacgcctgtaatcccagcactttgggaggccgagatggacagataagctaat

SEQ ID NO: 309254 - DNA, 122 bp, Homo sapiens
ttggtcctcgacggaccgcccatcggacttttattggtccatttgaaaggcctgtgggcacgcgccgcccgcagccttaaaggggccgcgcgcagccgtgtttccctctggaccagacgccg

SEQ ID NO: 309255 - DNA, 122 bp, Homo sapiens
gctgccctcgcggtgcgggagggcgagctgcgcgtggcctgggctccttccgaatggtggcgcctctgagcgccagttcgaggaggagtcggaggaggagcctgaatgtttggagatagact

SEQ ID NO: 309256 - DNA, 122 bp, Homo sapiens
ctggctatggagcttagatgagagtttaagggattggactcagggcagggccagtttctacgtgtttagcaatagggttgattgtgttttcaagcaacctaaacagctttatcagggaatgt

SEQ ID NO: 309257 - DNA, 122 bp, Homo sapiens
ggctgggaggggctctgcggcgagcaagggagcaggcggtaggggttctgcggcgatgggcgggctaggggcggggcgcgggtgggctctaaaagtcggtgcccactcgctccgcgctgccg

SEQ ID NO: 309258 - DNA, 122 bp, Homo sapiens
tgatctctagctctctatccccacccccttccctccccccactccacatgctatttgttccgtttctctggagaaccctgactgctacacagggcccttaagtgacagggagaaagagaggg

SEQ ID NO: 309259 - DNA, 122 bp, Homo sapiens
cattacctgggatcccatacctcttgtctggctgttcccattaatgtgctttttttggaccgcaaacatgtcatgtcagatggttaatggaaagatgagattaaaacacaccacaagactct

SEQ ID NO: 309260 - DNA, 122 bp, Homo sapiens
ctggccagcagctgtggagggtgtgccaggtaccccagcagtgccggcccacaggcgcttcgcttgatttctcgcccggccttagctgtctccctgtggggcagggctccggacctgcagcc

SEQ ID NO: 309261 - DNA, 122 bp, Homo sapiens
attgcaacggcggaggaacaagattgtaattagtttgccggatcgtctttccggatggaccggcggtgcacgtttaaaggccagtgatgcgcatgcgcgttatggagaccggaagaggagct

SEQ ID NO: 309262 - DNA, 122 bp, Homo sapiens
gaagcctggacctcccggcgccctgcctgtgggttagtttctgcattagttgctgatgtccgtctctggcacttcccaccaagagcctgaacccacacacctgggctcagtccccgagacac

SEQ ID NO: 309263 - DNA, 122 bp, Homo sapiens
actttggcttggagactgatcctctctgtgtaaattctgcccggtgctgtgaaggctggacggtggaggacctgctggggtctcctgggacccgcctgttgcttctgccctcccctgtggaa

SEQ ID NO: 309264 - DNA, 122 bp, Homo sapiens
ataggccccaaggctgcactggggggataagccaggctattttcatcacttccttccgcccgctcccgcagcggccacctcagctgtatcccatagagttgccacccaggcctcagccagga

SEQ ID NO: 309265 - DNA, 122 bp, Homo sapiens
tgttcatgtcactctgttcaccaacccactctgctgaaatgtcgttatttcttcaaggcccggaggaaatgctaccactctcatcagaggtacttttccccccaactctttccctgtccttg

SEQ ID NO: 309266 - DNA, 122 bp, Homo sapiens
tcttcagcaggtcacctgagcacgactgcagtttgtcagaggatggggatggcagcaagccgcgggcccttgcttcccttccccttgctttctccctgctcctggaatctgagcacgtggca

SEQ ID NO: 309267 - DNA, 122 bp, Homo sapiens
agaggccaagggactcacggaggtgaagtgactccactcaccacttgtcagaggcagggccgcaatttgagttcaaggccggctctaggaccaggcatgaagcagggccgcaatttgagttc

SEQ ID NO: 309268 - DNA, 122 bp, Homo sapiens
cacgtggctgcggccgcgcttccctccgagcccccgcctcttctcctgctccccgagccccgccctgctgagctgccagcccagaggagcagtctcctgcaggtctgaggaaggaaatttgc

SEQ ID NO: 309269 - DNA, 122 bp, Homo sapiens
caggaagccctggaggcgggccccacctgagccgcgctgagcttggagggaggccgcagccgccatcaccagaggctgcagcaaggccaagtccggctcttctgcctgcaggacaagggaga

SEQ ID NO: 309270 - DNA, 122 bp, Homo sapiens
acccagactcgccgggtttgagcgagagtgctgatttaggctgggagggtcccagccttgcgcgggctgggtcactgccccagcttccccctcggggagcccggtcccggcgcgcccctctg

SEQ ID NO: 309271 - DNA, 122 bp, Homo sapiens
aggaagccctcctgtgtcccagggacgctgtgcagcaaccctacactcagacactcactgcggtcccaactgaggacccaggaagccctcccgcgtcccaagggcgctgtgccacaacccta

SEQ ID NO: 309272 - DNA, 122 bp, Homo sapiens
atctgctttgtgacaataactcactttgcacctattaaaagagggagcattatatgtctgcggcggctcatcgaaattaccatgaacaagatcatcagcatttaaataacatgtgggcagtg

SEQ ID NO: 309273 - DNA, 122 bp, Homo sapiens
aaggaccacttgtgtttgtgactctgacagaacatgctctcttgtcccagggcccttgtacgtactttttcctgtctgaagaaccctcttcgcttcaccaacttctactcaacaactctctc

SEQ ID NO: 309274 - DNA, 122 bp, Homo sapiens
atcttgtgaaaaattcatgatgcttctctgcagtctgtcttcaagtttcatggaggcgtgcgttccgttggtgcctgggcagggcagcttctcctgacccaggctcagaaatcagaggacct

SEQ ID NO: 309275 - DNA, 122 bp, Homo sapiens
ggaacagacagcgtcgcaggaatctcggggcagcctgtgccaaggtctatctgtcctgaacgcactcgaagaccagactggcaggaagaaggcccagagctctctcttctcgggaagggcag

SEQ ID NO: 309276 - DNA, 122 bp, Homo sapiens
caaagcaacccactctcaacaacaaccgtggtaataagtaataatattgccagtgacatccgttgcaccttcatcccctagtcctctcctccagtgtgtcagcgcccccagtgtcccctccc

SEQ ID NO: 309277 - DNA, 122 bp, Homo sapiens
ggtgctgcccaggacagacggaaaccagtgtggagcccgcgtggggccgcccaggacagacggaggctgtgcacaccctatggcctggcgactctgttctgaggttcacaccttagaaaacc

SEQ ID NO: 309278 - DNA, 122 bp, Homo sapiens
cttctgtcgccaaatactcccacactcggaggtaaaggtacaaatcctggccagagcatccgagccttggacccgtttctcggcttccttggccttcccgccctgccctccagctccctaaa

SEQ ID NO: 309279 - DNA, 122 bp, Homo sapiens
atagcctcacgtggactgccttttgatgtgttggatgccgagatagtgtttcctggtattcgttgtttagcagatgacagtcaagccgacccgtctttaatgtcttggcttcttcgtcaccc

SEQ ID NO: 309280 - DNA, 122 bp, Homo sapiens
tgcaaaggcttggagggctgatggggcagagctgcccaggggcccaggacaaaggccaggcgtgcgcgcgcacacacacacacacacacacacacacacgcagtggcctccctgggggccgt

SEQ ID NO: 309281 - DNA, 122 bp, Homo sapiens
aatgtccggagctgggaagtagtgtccgttggagtgtccagccctgtggggggcagtgtccggtgcagcgtccgaggtgggcagttgtccaagctccagggagggtcgtgtccggtagggcg

SEQ ID NO: 309282 - DNA, 122 bp, Homo sapiens
gcctctggcctgtaggatgggaagctgtactggtgcgatgcacggacagacaagattgaacggatcgacctggagacaggtgagaaccgcgaggtggttctgtccagcaacaacatggacat

SEQ ID NO: 309283 - DNA, 122 bp, Homo sapiens
tgccagggagagagacggtgccaacccccggcgctcggcttggatgccctgccctggccacgccttccgaggcttccacgggctaaagagggattaagagacactaagctggggtcgaaaag

SEQ ID NO: 309284 - DNA, 122 bp, Homo sapiens
tggtgggggaaagggggtctgcgcagctgaaggagttcaatgaaagtgggacaagcgttgcggaaaactccgttgcaccctacattcggacgagctcatagacgcgctctgctgcacgaaag

SEQ ID NO: 309285 - DNA, 122 bp, Homo sapiens
tttgatctagcaaagctgacagtgtcctcacctaccaatataggtagatgactccttacacgtggacaagcacatccacctggccgcttctcccctttcctcccctcccccgttcctctcct

SEQ ID NO: 309286 - DNA, 122 bp, Homo sapiens
tcactcgattcccacgcgctcatgacctacagcacggctcgcatcagctttgtgtgtccgcgtttctacaggaacgtgcgttgcacctgcaatggtgagtgcagttttgagtgttccctctc

SEQ ID NO: 309287 - DNA, 122 bp, Homo sapiens
agcgtcatcccatacagcaggatgcagggcgagcacagcatggccagttggtggcggctgcgcaccgtccagatgaggcaggcccagagcagcagtacgaaggtcagccagctgtggtaggt

SEQ ID NO: 309288 - DNA, 122 bp, Homo sapiens
aagtggctcagtccaaagtttaagaaagaaaagaaagaagtggggaggggtttagtggcacgtctgtcttattctgaccacaagatatttcagtagcttttgtatttacaatagcaaaaata

SEQ ID NO: 309289 - DNA, 122 bp, Homo sapiens
ccctagggatgagcaccctgcagaggagagggtggcgggcagcggaaggaggccgtgccccgctctcggggtctccagcaaattcccaggaagggggtccctgcctccctctccagcctccc

SEQ ID NO: 309290 - DNA, 122 bp, Homo sapiens
tgactgggaacaataggaaaaacagggatgtccaccatgctactatctattacgagaggtcgtggctagtgaaataaggcaagacaaagaaataagaaatgaaactgtaatctaattggaaa

SEQ ID NO: 309291 - DNA, 122 bp, Homo sapiens
agggagtaaccctcaaacccatccaagtcctccagctgcagcacctgggccaagtcacagcgactgatgaggctggcctgatttagggcaagaaagctgctgaccaaatagatgagtagcgc

SEQ ID NO: 309292 - DNA, 122 bp, Homo sapiens
catattagcactgccttacccagttgttgtgaggagctaataaaatactgtgtgttaaaacgtgtggtaaaccctgaagtgctatacaaatgtgatgtattatttttgttctttaaaggtct

SEQ ID NO: 309293 - DNA, 122 bp, Homo sapiens
gggcaggtcgcattcgggcaaacggatcacacagatccaatcaggagtcactgggctgatcgcacattcattcctaaagggtttcctctaaagccattgatttccctcctccaccctcagat

SEQ ID NO: 309294 - DNA, 122 bp, Homo sapiens
aagggaagactggggactgggtagaagaggagaggtggagatgcttgcaagagaagagaacggaggaagaaggagaagggaaaagaagaaagccaaacttgccactctcccgctcccgggcc

SEQ ID NO: 309295 - DNA, 122 bp, Homo sapiens
ggcttgcctggccatcgaagcgtcagaggtgactataagtcaggaagggaaagaaaactgcggtcttcctggaacctcctctgcatgccccaagtggatttctcaaaggaacagtaagcagg

SEQ ID NO: 309296 - DNA, 122 bp, Homo sapiens
ttccgggaaattcaacaggagctttccaggtaaacgcctcccagattcttctgctcccaacggaccgttaggccctcacctagccttctttggcacctttcttcggagacgcagtcgttccc

SEQ ID NO: 309297 - DNA, 122 bp, Homo sapiens
gggctaacaatctgacaagtgacaggcttctgaaaggcttgcttcactctctccctcaggcggagaaggagaatggccatgtgatccctgggacatagaaacagatgtctgaggaaggagga

SEQ ID NO: 309298 - DNA, 122 bp, Homo sapiens
gcctcgggggtacttggccttactcttgtctctttttgattctggtgtaatgtaccaaaccgcagggaatcctggcgtggttttacccgtctccgcggataatccactgtcaactctgtctc

SEQ ID NO: 309299 - DNA, 122 bp, Homo sapiens
ctcattcattcaacaaatatttattgcgcgcccgcttagtgccaggcaccggaggtgccccgagcaagaagccgctctcgctgatccgtttccgctccccaagtgtccggcgcgcgccgtgg

SEQ ID NO: 309300 - DNA, 122 bp, Homo sapiens
tgcccctccacaccgcagcaggagtgctgtctcaccctcgtgaccccttgccccgccgatcgtggacaggttaaacccggcttggggggacccagtgagtccccgcccctccccctgtcgct

SEQ ID NO: 309301 - DNA, 122 bp, Homo sapiens
gctgagacggggcggggcctgcatggggtcctgagaggagtgagtgccgtcaccgagggccgcgccagactgcgacggatacagggagggcaagggtttccttttggcgctcccctttggac

SEQ ID NO: 309302 - DNA, 122 bp, Homo sapiens
gcgagcgcaagcgaggaatcggcgactgcgggggtggacagctggggcttgtagtcccctcgctaccctctattctggaagaggcgggtcgcggccgctgaactccagctctgcgcctgccc

SEQ ID NO: 309303 - DNA, 122 bp, Homo sapiens
ttgggggcccactaacctggttccccagactccaaacaaccccacgtggacagcaggcaacgttgcagcaggtgctacacagtagcaaagaggcagccggaagtggccccggtgggtcagga

SEQ ID NO: 309304 - DNA, 122 bp, Homo sapiens
agattcccaggctggtcggagcgcagaaatgaggcaggccagggccggcctccgccaccccgcccatctccagccccagcaggagcctggcccaggcctctggccccacagcgccagggagc

SEQ ID NO: 309305 - DNA, 122 bp, Homo sapiens
tcgccattggccgagaccaactacctatcgtgtctgggagggcggagcgctgagaaaatgcgaggttggggtggctaagacagactgtctgtcagcaactccgcccggaggagagtgagccg

SEQ ID NO: 309306 - DNA, 122 bp, Homo sapiens
ggggagattctaagagaaaaacgtctccctggtcactcaaaccacagattttggggagatcggggatagaagaccacgaacgccaccgtggggcgtgtcagccagcgagcgccccagcctca

SEQ ID NO: 309307 - DNA, 122 bp, Homo sapiens
cccggctcctgcgcgaccggagcacctagtcctagctgacgccgtgaccccaggggcgcgcggaaaccgccacacgccgcctagtcctaattgccgcccacctgcgtgagcaagggtcggac

SEQ ID NO: 309308 - DNA, 122 bp, Homo sapiens
tttttcctggtagatctccactttgcttactctctcttaatatcccaaagcaacaaaaagcgcagtgattttaattgcttacaaaggtcctttgaaacggatctaatttgactccacaaaag

SEQ ID NO: 309309 - DNA, 122 bp, Homo sapiens
ctgcttgacatctcggcagccctgtgcacctgtcatcccacttcacagaggacgcaggggcgggtggttacccaaagccgcagaaaagtttatgcaaaagcagctcgttgtgcagagtgtgc

SEQ ID NO: 309310 - DNA, 122 bp, Homo sapiens
aggtgctcttatgaagatcaaatgaggtattgatgtgacggctctgggtctcagtttcctcgtctgttaaatgcatatgagaattatctaaggttccttcctgcccttctctggggaccaca

SEQ ID NO: 309311 - DNA, 122 bp, Homo sapiens
gtgtcatcagcaaggtggtccctgcccccgaggccaagccggcgccctcgcagaacaggccgaagaccccaccgccggcccccgcgcccgcccccggccccatgctcgtcagccctgcgccc

SEQ ID NO: 309312 - DNA, 122 bp, Homo sapiens
ggatagttcggttagaatggaggtgcgaggcaggagagacgggcggatgagaaagaaatccggcccctgttgaattaattttgtgttctttcaacaggtagatggaacgcagctgagaggta

SEQ ID NO: 309313 - DNA, 122 bp, Homo sapiens
aggatgatgcttgtgcaagaaggaaatgaccgctgtcccggctccgcgggagacgaaccccggcttcccgccctcagggactagctctccagggaactgggacggtcagtgccggtcgaggc

SEQ ID NO: 309314 - DNA, 122 bp, Homo sapiens
ctagctactgctccgcagggcaagcccgctcctgcccgggcccgcccacaagcgaggccccgccccaaaccccgccccctgcgctccgggaaagcggagccttgcggctccaccccgactcc

SEQ ID NO: 309315 - DNA, 122 bp, Homo sapiens
cgtggtgcgcctgccgccagctgagcgcagggagggagctgagctcagccgaaaggcacacgtgcatttcagttggtaaaggagatgaccaatttggcttcgtcctcttcctttgcagaaag

SEQ ID NO: 309316 - DNA, 122 bp, Homo sapiens
cccgagcccagcctctccggggaggagggacccggcggcgcggcgtgggtcgggagcgggcgcctgggactacttctcgtttgaaagttttcagaggccaaaagtttgagccggggctgcgg

SEQ ID NO: 309317 - DNA, 122 bp, Homo sapiens
ccagccgggagaggggctcggcaggaggccagacagggggacaccttggtgccgtcatcccgtttggccccaggagctgaaattggaaagtcagtgctttgtaaataagtcagctgtcattt

SEQ ID NO: 309318 - DNA, 122 bp, Homo sapiens
tcaggtccagctgcatccaggcacctcgaaatcgccgccacccgcgagcccgacccagcccggctgccctgggtctccaagccaagctgagtccagggacttcagaacaacccaaaacagac

SEQ ID NO: 309319 - DNA, 122 bp, Homo sapiens
cacccccgagtcccgagatgggttagagaagcagcgagggaaggggtgggggccccgccgcgtcaccacccacctgcggccaccaccgtgcagccccagagcagcagcagccgcgcgcagct

SEQ ID NO: 309320 - DNA, 122 bp, Homo sapiens
tggaggtcatccgacccatcccgccgcctctccgcagtggcgcaagcgccccaaaatctccggagagggaactgactgacccactaggttccgccgtgtctacctctcgcagatgttgggga

SEQ ID NO: 309321 - DNA, 122 bp, Homo sapiens
ggggcgggtcaggttagggggcggtgcttaatgggagctggtcttggggccgggcttccgcgtgcgttggcctggcggcgagagcgcgcggcgggggcgtgcccggcgggcggggcggggcc

SEQ ID NO: 309322 - DNA, 122 bp, Homo sapiens
agtgtagggctgccgtgaggtgcgtggcgtaacgtgcgtggcgtaacgtgcgtggcgtaacgtgcgtggcgtaacgtgcgtggcgtaacgtgcgtggcgtaacgtgcgtggcgtaacgtgcg

SEQ ID NO: 309323 - DNA, 122 bp, Homo sapiens
acagagccctgccggggccaaaatcccaccgaggttgcagggttggcaccttcaggaccccgaggacactcagaaagctctagagattcccgcaggcggctgggttggtgaggcctgggatg

SEQ ID NO: 309324 - DNA, 122 bp, Homo sapiens
gcagcgcccgtcgacagcgtccctggctagcgtctagtgtctcgggctagaaataggaaccgttaccgtcgtacctcgagtagatttcagcctttcctcctagatgctgttttcatcattat

SEQ ID NO: 309325 - DNA, 122 bp, Homo sapiens
atgctaaggtgctgggctattgacagtttcacacatcacccttggcggggtgggggtgggcggacgggggcggtggttggtgggaaacaatgacaaggagaaccggagacagtatctttacc

SEQ ID NO: 309326 - DNA, 122 bp, Homo sapiens
tcatcctcgtcctgtcccctcctgagccttccaagaccacgcctgtgggttctgaactcacgcctccgagttcacgccccccaattctgttccttccccaggctactccccctatccctgtt

SEQ ID NO: 309327 - DNA, 122 bp, Homo sapiens
tttatagcctcagcacctcaaatggtgcaagcaccaaatagggaccccgtagacttcgaccggagggccggtgctggcttggacgcgttgcaggggtggggatggtggactctcagcttgct

SEQ ID NO: 309328 - DNA, 122 bp, Homo sapiens
gggtcaggcggggctggccaggatcataagacacgcgatgtcatttcattctgcaaaggccgcctccgccccaagcggcgcgtagatctgccgggagcgccccccgcaccctccccacgggg

SEQ ID NO: 309329 - DNA, 122 bp, Homo sapiens
ctcgaccataagagacaggtacgccctgggggggccagttcagagacctatcgctaggtgcgcattctctttctcagagacgttccatgctgagaaaaggaattcagcgatatttctcccat

SEQ ID NO: 309330 - DNA, 122 bp, Homo sapiens
ctccctggagaagggacatgggaatgaattgaaatggggcgctggacacctacagcagcacgcatgtccctccaaggctgtcttctcccagagcacaagaaggccagcccactgggccctgg

SEQ ID NO: 309331 - DNA, 122 bp, Homo sapiens
taaagagtaagagtaacgctggagagcatgtgcttttctttctttctttcttttttgagacggagtctcactctgtcacccaggctggagtgcagtggcgcgatcttggctcactgcaagct

SEQ ID NO: 309332 - DNA, 122 bp, Homo sapiens
aagaataatattagctgctgagaataggcataaagttaacagaaggaaaagacctggtcccgggactattgcaaaaaacctgcactaaaagcagaaagtcataatattgtcaaaatggctaa

SEQ ID NO: 309333 - DNA, 122 bp, Homo sapiens
gtggggacatggccacgagtcctggtttccactcgtgctctcagattggagaacccagaccgtattgatagatgaggggtgcagatcacagaggatttagcatggcatatttggacaccttt

SEQ ID NO: 309334 - DNA, 122 bp, Homo sapiens
ccgtgtggtgcacagcggttctgtgctgggcagtcggtgcaccttggcatccccacctgacgccaggcaccaggccaatactgccctgcgccgcacacctaaggaaaagatgttctcacccg

SEQ ID NO: 309335 - DNA, 122 bp, Homo sapiens
agccctgcggcttctattcactctgggagagcgatgctaagtttctcccatagaaagagccgggacacgcagaccgaagcggcgtagtcggcttccagggcctgaccagtgacccacacccg

SEQ ID NO: 309336 - DNA, 122 bp, Homo sapiens
gttctcacgcgaacgccagacgtggtggctctgcgcgtgcgcagagctaggtcttgcctacgcggtcatgttctggcttcccaagtaggcagaattggtttcccctggaagcaaaggtacct

SEQ ID NO: 309337 - DNA, 122 bp, Homo sapiens
cgaccccttccctagttaggtgtccttttctgtttttcgaacgaccgggtgatgggtgagcggaaagccgcttccaggagaccaaaagaaaggggtgcctttagaggacgggtgttccccaa

SEQ ID NO: 309338 - DNA, 122 bp, Homo sapiens
acccgcttcttcccagttctgcagagcgtgttcggccgggccttgctgactggtcagcgtcgccccacgtgctctacctacccggtccccgccggcgccgcggagaccggaagcgacccggc

SEQ ID NO: 309339 - DNA, 122 bp, Homo sapiens
ccttgcggagtttaatagaggaaacaagcaactaaacaaatgcaaaattacagattgcgacggggctaaggagtcaagggaagacctgaggtgacatttagactgacacattaagatggaga

SEQ ID NO: 309340 - DNA, 122 bp, Homo sapiens
cctgtcctaatctcagaggtgggagaagcaagtctagaacatctccaggctcagactaaacgagagtacttggactgcaaccaagtaatcactgcaaagtagttccaagcagcaagaaatac

SEQ ID NO: 309341 - DNA, 122 bp, Homo sapiens
tacgatagggggcgtaaagaagggtcatgggctccggtggtcgcaggtcccaccggcaaccgccagggcgggggcagcaggagcaggaacctgctcgcctccgcatctcgtcggctcccctc

SEQ ID NO: 309342 - DNA, 122 bp, Homo sapiens
cccacgtccagggacaaactgggagccgtgactgtcaggccgcgcggaggctgccctggccgcctttgcggtcaggtgaaggcgcagaggcagggaggccgggcgagcgcaggcgggcggag

SEQ ID NO: 309343 - DNA, 122 bp, Homo sapiens
aactgtgagtccactaaactctttttctttataaattacctagtctcggcgcacgcagctcgcgcccagcgctctccagccggggtggtggcggcagcagcggcggcgggggaggggtgcgg

SEQ ID NO: 309344 - DNA, 122 bp, Homo sapiens
ggtaggtaccctgcgaggactgaacgcaggccaaccagatgaagcaatgactcggctgttcgagaggatggaatccacagaaagaaatgccttcttagtcgaataggtacttcgacttttat

SEQ ID NO: 309345 - DNA, 122 bp, Homo sapiens
aaggactaaagatgcccagcgccccagaggaagggtgagagtcctctgggagctggcaggcgccagttccttgtcgctcacggttaagcccgtgtatcacttatttgtctcaagtgcttatg

SEQ ID NO: 309346 - DNA, 122 bp, Homo sapiens
gacgttctacctgccttgaagaagacacctgacctgcggagtgagtgaccaggtagtagacggttctgagggcatcacacacttgagggagggaggaggacagagagggccatggcaccctt

SEQ ID NO: 309347 - DNA, 122 bp, Homo sapiens
atagaggcagcagctcacactgcagtaaacacgcaggatgttgtagaccaaattgaccaacgtaatgcaggtaaatcactggaccaaatggcacccacccaagagggatggaatgagaggga

SEQ ID NO: 309348 - DNA, 122 bp, Homo sapiens
acagcgcgcacaacacatgggcctgcccagggcaacggcaccgtcaacagcgtgtgccctcgctcagggccctgctggtactacgcttcccagtgtgcagggttcccagacgtgtgtcctct

SEQ ID NO: 309349 - DNA, 122 bp, Homo sapiens
gtgcggcctgaaatggcagagtgtgtgtttcacaaaacaggggtggctcacggctgcagccgcccggggaggtcctggccttgccttcgaggggctggtcctcggggggtggatgcagcttt

SEQ ID NO: 309350 - DNA, 122 bp, Homo sapiens
cacgcccgggtggaagagacgcactgctgaaccctggcaccgcgggcacacgcgcccgggcggaggagacacactgctgaaccctggcaccgtgggcacatgcgtctgggtggaggagaggc

SEQ ID NO: 309351 - DNA, 122 bp, Homo sapiens
ctcgctgctgctgcagggctggcaagaccaggccttcattacgcctgcaaacctggtgttcgtgtacctgctgtgccgcgagtcgctgcgtggggacgagctggcgtcggccgccgagctgc

SEQ ID NO: 309352 - DNA, 122 bp, Homo sapiens
agcgataaatcatctggttcaggaacttgggacccttcattatcccaaacgtttgagcttcggtcggtcttacctagactcgtgagtgtgccaagccaggagggcatcctggaggaggcacg

SEQ ID NO: 309353 - DNA, 122 bp, Homo sapiens
tcccttcctccaggtttaattaattccaccctttctttccccagtccttgtagaaaacagcgaccacaactttgactggtcaagagagccaggataaaaggcgcttctaaattaagcagtgc

SEQ ID NO: 309354 - DNA, 122 bp, Homo sapiens
ctcgcctggatgaactcgggggcgtgtatctccagtttgaagaaggactggaaacaacagcgttatttgtggctgccacctacaagctcatggatcatgtggggactgagccatccattaag

SEQ ID NO: 309355 - DNA, 122 bp, Homo sapiens
ggagctagctggatgcgtccggactcctgcaggtacctggctggcgtccccacctccctgcgcgctccggagacttctccgggcgaccctgcaactttaccgcgccttcccccaccttttgc

SEQ ID NO: 309356 - DNA, 122 bp, Homo sapiens
ccagcgccctaccccgcccgaggggcggagcctgagccaaggccacgtgatgatgacagacggcactctggctttcctggagctgtctctatggtattcttcccagcccacccgtccctttg

SEQ ID NO: 309357 - DNA, 122 bp, Homo sapiens
gagctcgtgggtccctggagctgggtgttgccggcattggcctccctgggggcttcctggcgccagcccagctggcgggcaagcgctcccatggttcgaacgggatggatgcagagcagctg

SEQ ID NO: 309358 - DNA, 122 bp, Homo sapiens
agagggacagcctgcacaaaacagcctgtggtcggagtcaaagcagcctgctccagaatgcgcgctccctctcccgctctcctcccagtaaacgcaggtcaggcgttgggggggaaccgggg

SEQ ID NO: 309359 - DNA, 122 bp, Homo sapiens
tcaatggaccaatttcaatggaattcctgaaatttttgcttgcatcagtgatagactagacgtggatgacttaacctcttgcaataaatagctagaaaacctgacagtatatataaaagaac

SEQ ID NO: 309360 - DNA, 122 bp, Homo sapiens
ctccctctccaccctttcgcccgcctgggcggtccagctgcccctaggggccaactccagcggctattttggggctggacatcccgcagcttttcaaggcgtgcctttggtttttttaagaa

SEQ ID NO: 309361 - DNA, 122 bp, Homo sapiens
cactcctcgccatctccttcttagggcactgaaatggttgctgaaattgtctccctgtttcgcccttgcccactggcatttgtttcccacctccctcttagagatcttttaagaaatgcaga

SEQ ID NO: 309362 - DNA, 122 bp, Homo sapiens
aaatgaaaaaaatgagaaaaagaatgagagatatggaagcagacaatagttatttgacaacgcgggtcatagttactcctgaagaagggctagtaacaattggaacagaagaaaaactatgt

SEQ ID NO: 309363 - DNA, 122 bp, Homo sapiens
gttatgagactgagggccacagttccttgctggctgctggctggaggctgccccacgttccgtgtcctgtgggtttttccaccatgggagttattacttcatcaaagccagccagagagaga

SEQ ID NO: 309364 - DNA, 122 bp, Homo sapiens
tattaaggcttaaccttgtggttaactacctggaagttacagaattggctagctggtcaccggaccatttggggcggggccatgtggcaagacctatgggagaaaggatgacctcctccaac

SEQ ID NO: 309365 - DNA, 122 bp, Homo sapiens
gagcaagcaggccctgcgggactaccagaaggtgctagtgcagctggagagcctggagaccggcgtgggagaccagtgccgcaaggagttcacaggtgggtgcggaggcggggggacagggt

SEQ ID NO: 309366 - DNA, 122 bp, Homo sapiens
cagagttgttgaaaatggcttcctgagctgtatcctcagagaatctgattcagcaggtggcgaggcccgcagatttgcatttgtaacacactcaggtgatgccaatgctactagtctgagga

SEQ ID NO: 309367 - DNA, 122 bp, Homo sapiens
ccccaactgttccctgcagccattcatccacccacattaattcatttaataattcctgagcgtctgtttgaggtcagatcgctttctttcaccccaagatcccccactatctccccgctccc

SEQ ID NO: 309368 - DNA, 122 bp, Homo sapiens
ctgcctttgtaaattaccacgctgcgtttgatgaatgtttctccacttctgcggaggcgccgcttcacccgcgagaggcgggaaggtgctcatgcatgcggtgccgaagcttgttttctcat

SEQ ID NO: 309369 - DNA, 122 bp, Homo sapiens
tccttacatcagaactagccaagagggctttcacagtatcatactttatctattaaaaagcggcactgtggagagaggacttggaaaataactaagttggtttaaattgcaaccaactaata

SEQ ID NO: 309370 - DNA, 122 bp, Homo sapiens
actgcgggggtggacagctggggcttgtagtcccctcgctaccctctattctggaagaggcgggtcgcggccgctgaactccagctctgcgcctgcccaggcggccgcacgctcaggggcgt

SEQ ID NO: 309371 - DNA, 122 bp, Homo sapiens
ttttccagcccccctaaatggggcttgtgcatggtggccgaaattaaccctccttggtaccgtgttaacagtaaggtttaaaagttcgaactgtgcttctgcattaaggagttgaacgaccc

SEQ ID NO: 309372 - DNA, 122 bp, Homo sapiens
tgtattttctagaatgtattttcttttttcctccaccttttccttgctttccattagaagcgtcatccgcttttgtggaatgatgcattacattatacacattggtaaatggaacgaagagt

SEQ ID NO: 309373 - DNA, 122 bp, Homo sapiens
agtgtctgggacacctggggtccaggtgccttcccaacacctgaaaggcgggatgggaggcgggggcagatgttcacccgcttctgtccctactgatcttcctccccccggagtcccgggtg

SEQ ID NO: 309374 - DNA, 122 bp, Homo sapiens
ctcaggatgtgctgagtgaaggccattccgagggcagaacaagggcacgacggggccacgcggccccaggaatggtttctccagattccctcggctggcaggcagccaggagccttgcagct

SEQ ID NO: 309375 - DNA, 122 bp, Homo sapiens
gtctacaatgcaggtgctctgcacacgctccctggctgaccccaacgcagagaagatgcacgtgagcccacccccacagcaggcgtggacatttgcctcccttttataatagctgtattcaa

SEQ ID NO: 309376 - DNA, 122 bp, Homo sapiens
cgccaggaccgttttgccagggaagaagccatcgcgcacctgggttcgtgacacccgcgtcgctcacagccccagctcgcccggggagctgacccacttgctcagctcctgggcgagatagc

SEQ ID NO: 309377 - DNA, 122 bp, Homo sapiens
acttccaagtcctgtgctgtggctctgtgtgacaggccctctactaggtcccctggaatccggggcccatgcaaccacacccgcctccttagcgggcggtgggcttgcctgcccgccctttc

SEQ ID NO: 309378 - DNA, 122 bp, Homo sapiens
gctactccctagggggctttgctcttggtggtacgcacccgagaccttcttattcccctgcgtcaccatccacataaacaagagagcaccctgcttgcgccgctgtgggccactgcggagac

SEQ ID NO: 309379 - DNA, 122 bp, Homo sapiens
ctcccacgcactccagatggctctcctcactcctttcctcccagcccagagaagaccagccggatgctaacagccacatccagagaatcagccagcctcaccccagcaccgccctgtccaga

SEQ ID NO: 309380 - DNA, 122 bp, Homo sapiens
gaattaaggaggggggtgggaagcagcctgtctcatgaaatcattctagatttctgccctcgtttctgcctgtgcaatgtctcaaaccagctcactagctgtatttgatatctttctttact

SEQ ID NO: 309381 - DNA, 122 bp, Homo sapiens
cgtgtaggaaggcagtgacagtccaagtgacaggcagatcataaaacctcaaggataggccgggcccggtggctcatgcctgtaatcccaagcacttcgggaggccgaggtgggcaaatcac

SEQ ID NO: 309382 - DNA, 122 bp, Homo sapiens
ttttcatgaaagctaaaagtgtgtgtctattatttccctgtaacaagcctctctggtgtccgtgaggcagagatcagggtgtgggaagaggggttgtgttggggaagagaccttctgctgct

SEQ ID NO: 309383 - DNA, 122 bp, Homo sapiens
gaaaccccagatacatttgaacatctgcaggaacaaattctggtcacgccatctttaccgcgagggtctgcagtttcattctggaagtcagcgagacgattaagaacccacgggaaggaacc

SEQ ID NO: 309384 - DNA, 122 bp, Homo sapiens
ggtaatataaaacaatgaaactttccaggtgtgagcagcatgcggtggtggaggctatgacgaacagaaagcatgtgccctgtgtccttctcagctccagtcagttcctgccataccagacc

SEQ ID NO: 309385 - DNA, 122 bp, Homo sapiens
catgtaatgctggctgcattacagccaatagcatgatcacaccatcaataggaataaatacgcagagcagtgttggtcacacacaggattagagagccattctgatatgctgtacttatctg

SEQ ID NO: 309386 - DNA, 122 bp, Homo sapiens
acttcctttgggctttgaataataacgactttagaattgaaatcgtgggctggaggtggacgccacgcctcattctgatgggtccaagagccgaaatttcggcttctggcactctcctcact

SEQ ID NO: 309387 - DNA, 122 bp, Homo sapiens
gggttggggtgaactagaatccgtggaagtgctcagtctctcccgtgtttgactgactcccggccgcatacccagtccctgacacacgggggcgcacaacaaatatttcccgaaagatccag

SEQ ID NO: 309388 - DNA, 122 bp, Homo sapiens
gccttgggtccgggcatttcccttctgtttggttaccatcatctctgtgtctggggaagtcggcctccagcttggggagcgggaaaccggagtcagacccgccccatgtggtctgcagcggg

SEQ ID NO: 309389 - DNA, 122 bp, Homo sapiens
tcgatgcgttccgcgctcgattcttcttcagacgggcgtacgagagggagcggctgagggcggtgtgggaagagggaagagggggaggcagcgagcgccggcggggagaaggagggggccgg

SEQ ID NO: 309390 - DNA, 122 bp, Homo sapiens
gcagtggcagagccattactcagctgacttcccaaaagctgcaagccccatagggacatgcgggggccagagacattagctgacatcaggaaacatcttggctcttcgggcccctgaagtgg

SEQ ID NO: 309391 - DNA, 122 bp, Homo sapiens
cccactccatgggctcctgtgcggcctgagcctccccgacgagcaccaccccctactccacgacgtccagtcccatcgaccacccaagggctgaggaatgcgagcgcagggcacaggactgg

SEQ ID NO: 309392 - DNA, 122 bp, Homo sapiens
tcccggcctgtgtaccccggccaacacatgcagcggccactctcacagcggccccggccacgacagtccccaggacagctgcgcacaccgcagtcctcgccgctgtagcccgcattgcaaac

SEQ ID NO: 309393 - DNA, 122 bp, Homo sapiens
gccgccccggaagccgcgccgcctgcgtgggaccctgcgacgctgccacccagccgcaagcggaactcgcttggctcgtcaccccttcacccggtgcgcctgggccgtgtccgggcccacgc

SEQ ID NO: 309394 - DNA, 122 bp, Homo sapiens
gggtgaatggcttccggcttccgcacaccgagacccgccggtgcaggggtgaatggcttccggcttccgcacaccgagacccacctgagcagcagagaatggcttccggcttccgcacaccg

SEQ ID NO: 309395 - DNA, 122 bp, Homo sapiens
ctggctctcacgggagggactccattagggtcccaggggctgcattaagagtcccgacagcgacgcagtaaatgagacaagacgctgcggtaggggagagagacccatacattcaaatgcct

SEQ ID NO: 309396 - DNA, 122 bp, Homo sapiens
gtgtcagcgtggggggagaggcggtgcagaatatggagtctgctcttgcattgcctttgccgagaatagatcgtcggcttgggtggggggggcgcgcccactctcctctctcggccggcgta

SEQ ID NO: 309397 - DNA, 122 bp, Homo sapiens
tacgccctcattccttccaggtacaaacgctatctgggctaggccaaatgtggctcgcagcgggtccgggagcggggcacctaccggcagctcccgcagcggaggcgcgtcccccgggcgcc

SEQ ID NO: 309398 - DNA, 122 bp, Homo sapiens
gcccctggtcccaagagcagatgagctgcttgggccttccacttggtgtcccatgccaggcggacctggaggtgtcagccatggccctgaccacttcagaagccaacaggcaaatgttctct

SEQ ID NO: 309399 - DNA, 122 bp, Homo sapiens
cctgcttctggtccctgtctctgtgaatttatttctaagcccccttccatctttggttcccgtctctggctcgtggcccatggggccgatctggaatacaggactccttgggttccggatcc

SEQ ID NO: 309400 - DNA, 122 bp, Homo sapiens
ctggcctctaggtcatggcagatctcttctaattcctgcttcttggcggtcaggcgggcccggagctcctcagcctcggcacacagctcggtttctgcctggagctgctcctgcagctgcaa

SEQ ID NO: 309401 - DNA, 122 bp, Homo sapiens
atttctgtgttaactgggtctaaacattgtacaaagatttaaaacaaaacactccaccagcgcttccccaagaggctggtgtcggtttccgaacccacttgcagatgggtattttttctaga

SEQ ID NO: 309402 - DNA, 122 bp, Homo sapiens
aaagtcaatataatgattatctttcaaagtctttttataatattgctattgcacagttttcgactccttgaatgaaaaaggcttggatgataactgctgaggaacacttaaaaataatgatt

SEQ ID NO: 309403 - DNA, 122 bp, Homo sapiens
cttttggagacactgactctgcacaggcttctctgcttttcaatgtggcgtttaaggttccggaaactgtgcagtttagaaaactgctgggcaggtttgtcaaaggcaaagcaccctgggca

SEQ ID NO: 309404 - DNA, 122 bp, Homo sapiens
gtaaggactgcctgtttagagccctgagtgcccgctttggcttttttctgacaaatgtgtcgttgaagcacaccgattttccttcctgggcctcagttgattcttccgtaaaagcagaagtt

SEQ ID NO: 309405 - DNA, 122 bp, Homo sapiens
acggcggcccggggcaatagcatcccggcctccaggcccggggacgagggcgtccctttccgctttgacttcaacgcattccggagccgtctccgccacccggtcctgggaacgagggccga

SEQ ID NO: 309406 - DNA, 122 bp, Homo sapiens
tttcaatgtgaatggatcgaatggagcagccatgtggcagcaacagtttgcaaatctccacgccttctgtgcagctccccggccgccgctccctgcacgtggccccttctccgcagcgaccg

SEQ ID NO: 309407 - DNA, 122 bp, Homo sapiens
acatcccactgtatactttatacttttttataaaaataaatattcttacaaaaggacaggcgctgtgtctgtctggctcaccattgtacccaatacccaacagggtgccaagtacccaatac

SEQ ID NO: 309408 - DNA, 122 bp, Homo sapiens
cgagccactgcgcttgcgcctgcaggggattggccagtttcgctgacgagcatctctcgacggcgccaccgcccggacgtggccccaggagccgggagaggccggctgaggcacatgcgtac

SEQ ID NO: 309409 - DNA, 122 bp, Homo sapiens
caccatgaaggaggacggcggcgcggagttctcggctcgctccaggaagaggaaggcaaacgtgaccgttgtgagtacaaaagagacaggttggggagcatcccccccatctcacctgggta

SEQ ID NO: 309410 - DNA, 122 bp, Homo sapiens
agctcccagtgccagtatttgatgaaaccatcaaatattatcaagaagctggttgactcccggtggtgacctatttctgagcaattatttctagtaaccaggaaacaatctagcagtctttt

SEQ ID NO: 309411 - DNA, 122 bp, Homo sapiens
gccatatgaggggccaggaaatgaacgacaaggaggataagagtgttctttcttgaaagccgggacttcccctcaagaacctgggcctggggccgggactctgcatgactgggagcaagtca

SEQ ID NO: 309412 - DNA, 122 bp, Homo sapiens
tcattttccctatgctgttgattcccacctgctttccccacagaaccccctgcctctgttcggtgcagccaggaggaaatctgagcaagccccagacggtccctgctttgattaaaactgtc

SEQ ID NO: 309413 - DNA, 122 bp, Homo sapiens
agaggggcagggcaggaggggcccggcctgcggaagcggttggagggagaaggctcaatccgaatggctggggccccactgcggatcgccttcagcctccatctcgtttcttccgttaacgg

SEQ ID NO: 309414 - DNA, 122 bp, Homo sapiens
aataagacaagaatgacaaagtatgtgtacaattaaactcatagtgaagaatttctcattcgttagaaagcttgatggagaaaagtaacacaacctttagagaatttgaaccactgctctcc

SEQ ID NO: 309415 - DNA, 122 bp, Homo sapiens
ggaaatccccgagtgggtttgccaggccactgattaagaggaagtgtgtgtggttattaccgctggagttcccctaagtcctaaaaggaaagcaccagtgcacatgcaaaccactgggagga

SEQ ID NO: 309416 - DNA, 122 bp, Homo sapiens
tcaaagcattttgtatatataactgttttctttttttgcttttctgctgcatgtctttttcgtggggggtgatcctctgcagatccccccatttgcggacccgccatgtggaggaggcattt

SEQ ID NO: 309417 - DNA, 122 bp, Homo sapiens
ccctccacacacacaaacacagacatgcactgcccaaccgcaggcggcagggaggggctgcgccctgttgcggggctgagcgtggtggcgtggcagcgagtggaccaaaacccactgcgcac

SEQ ID NO: 309418 - DNA, 122 bp, Homo sapiens
cgggaggaggacgtcagcacgtcagccggggttttgcgttttgattgacagttgctatagcgaccgggtcggtccgtcgccattttgttggttggtttttttttaaaccctttcgcttcccg

SEQ ID NO: 309419 - DNA, 122 bp, Homo sapiens
acggagggtggaagccccacctgcttggccccaagtaatcagcagaactgctgctggctccgggagccaaggttccctgccctccctgtcctctcctctcatggtgagggagccagagacgg

SEQ ID NO: 309420 - DNA, 122 bp, Homo sapiens
acagtccaaaggctgggggacagagggaaagctccctcctttcgggccccagactggtggcgctgatacagaggaggctaggataaggcctccaggaccaaagcgcgaacccgtaaggcccc

SEQ ID NO: 309421 - DNA, 122 bp, Homo sapiens
ggagggcccggatgcgactgtctttaatagtgcctgcttagatctaacccctcatatgttcgtcctgacctggtcggaccatcatcattccacttcatagtgaaatgccttcattgccgtgc

SEQ ID NO: 309422 - DNA, 122 bp, Homo sapiens
taaccacataaatgtctgtacacctcactcaacaagtagactctgcagcatctctggggccgaggctccttcctgcctcactgttctcagcacacagcttttggccctggggtcacaaaaag

SEQ ID NO: 309423 - DNA, 122 bp, Homo sapiens
gaactgctgagacatcttctgcttggaggaggcaagggacaggcttcctgtttctaaaggcgtgtgagtggcgaccttgagaaatgtggccagtggagcattttgactgagttgggtcccct

SEQ ID NO: 309424 - DNA, 122 bp, Homo sapiens
gtggggtggggggttattctgtttgtttttttcaggggtcccgggaggcccaaaggcctccgccgctctcggcttgaacgcgtggaaccgttctcctcgggttcccgcgcgctccaatgggg

SEQ ID NO: 309425 - DNA, 122 bp, Homo sapiens
cttctacttctccatctagagatttttgtgtgtgtgccatcaaggttagcaaactttatacgtagcctaacacttaaaaaatgcactcattatcttaaacctaataaattccagagtttatt

SEQ ID NO: 309426 - DNA, 122 bp, Homo sapiens
ctgcacagactgcagaaggcacccctgcttatgggacgagcttgaagcaggaaggcagagcgtcacctggctcgacctccgctgggaacgcgctgcgggcaactgccattttccacctctgc

SEQ ID NO: 309427 - DNA, 122 bp, Homo sapiens
ctcctgggctcaagtgatccacagccacctcagcctcccaaagttctgggattacaggcacgagccactgggcctggcctactcctgcattttaattaaaaggacaaaagggtcgagcacaa

SEQ ID NO: 309428 - DNA, 122 bp, Homo sapiens
cgccaagatgttgttcccatagtataagccgtcgagcctggccactgtgcctgagaccctcgacccagccgaatacaacatatctctggaaacccagcgggtgcaagccgagcggttggcca

SEQ ID NO: 309429 - DNA, 122 bp, Homo sapiens
ctgggagaaccactgtcagcgagagccagtcactgcccaaagcgaaggcagcagaaataacgcagacgtgcctcttagaggactgacattcacggaaatctttgctcatttttagcgtttca

SEQ ID NO: 309430 - DNA, 122 bp, Homo sapiens
caggagacggcgcgcccctaagagaggaccccggctgtgggagaagaggagggagcggggcgcccccgaaccggctaagcccgttcgacccctacatggggagcccaggtccccggcgaccg

SEQ ID NO: 309431 - DNA, 122 bp, Homo sapiens
atggtggggtcacaagttcagaatgggctgggctggcagagccttcagggatttctctcccgtcacaggcgtcgccaccagcactctgtccccagggccgcacccgggacctggaggcgctg

SEQ ID NO: 309432 - DNA, 122 bp, Homo sapiens
attgctgtcgttggacagcagaacgtcgagggcaagcggattccatttggcttcaagcaccggactctgcctcacttcatcaaggatgactacgggcctgagagccgtggctttgtggagaa

SEQ ID NO: 309433 - DNA, 122 bp, Homo sapiens
gcgctccaggcccgggccggcccgcgcggccatgaagatgatgctggtgcgccggttccgcgtgctcatcctgatggtgttcctggtggcctgcgcgctgcacatcgccctggacctgctgc

SEQ ID NO: 309434 - DNA, 122 bp, Homo sapiens
ccctcccgcccttggcccgcgtgcctggagccagccccaccgcgcccgcgtttcctcccgcgggacttcccttggccctgggtctgcagcgggtcctgccgagcttccttccctcaggcagc

SEQ ID NO: 309435 - DNA, 122 bp, Homo sapiens
gtatcctactttcctacctcgcttttatttgcgcgggtttaaatgcgccttaacagaacccgtgcaaaggcttgcctacttgtctggctgcaccggatgagtagagcatcttccttggtggc

SEQ ID NO: 309436 - DNA, 122 bp, Homo sapiens
acacggaacacacacggcacacaggaacaagcactgtgccacagaacagagagccactcacgggggccgtgtgctccgagcgcacgtggtagtcgtggccagccttggatcggtacgtcttg

SEQ ID NO: 309437 - DNA, 122 bp, Homo sapiens
gaaggagatttttttttttctttgggacggagttccgctcttgttgcctaggctggagtgcgatggcgtgatctctgctcacggcaacctccgccttccgagttcaagggattctcctgcct

SEQ ID NO: 309438 - DNA, 122 bp, Homo sapiens
cccttcagctcctggatctctgagcgcagttccaaggggctctgctcctgcagggaggggcgggagcccaggcggtccagcggccgcgtctcaaagagcatcctggtaccctgcacatctcc

SEQ ID NO: 309439 - DNA, 122 bp, Homo sapiens
atgaggccgatctccaggagtcggttttgctccagtgtggctgtgtggtggtgggcgagtcgctgcccctcactgggccttggcctggctgtaaagttggtacagttcctccatgcattctt

SEQ ID NO: 309440 - DNA, 122 bp, Homo sapiens
ccacaacagatgagatggccaaaggattgctgagtgcgcacacgcaagtgtagaacagtgcgaagctttccaacccagttttccaaccacagcagcaccaacatcggcatgtctggggtctc

SEQ ID NO: 309441 - DNA, 122 bp, Homo sapiens
gctatggaaatccactgaagcaggtggaaaataaaaacaaaatcaagaaacatgtttggacgaaaacatcataggggatttagagtgcctttgaacatttttcatgtaagtttgggatagta

SEQ ID NO: 309442 - DNA, 122 bp, Homo sapiens
gccttcatccgcaattggtcttgtgccttgagtgcccacggttctggcgctcagtggccccggggtgaaaaggcagggtggggcctggggtcctgtggcagctggaagcacgtgtcccccgg

SEQ ID NO: 309443 - DNA, 122 bp, Homo sapiens
agcctaggtgaggcccagtctttcttgggtcttattatttgtgaaggtctctctgcctgtcggctggggcagagactgaaatactgccacctacctttggcatttaatgttcctctcctggc

SEQ ID NO: 309444 - DNA, 122 bp, Homo sapiens
atcgttaataatcagagaatgcaaatgaaaaccacaatgaactatcacctcactgttacacgctgttgacagacgtgtaattggtacagccgttataaaaaacagtgtaatggttccttgga

SEQ ID NO: 309445 - DNA, 122 bp, Homo sapiens
gagaggagccgtgcgagctaaaggaacacagtccgttcccgtcctgcaggaagccatcagcgcttctcaaacgtgacgcggttctcacctagtccagcggctatttctcctcccactttcct

SEQ ID NO: 309446 - DNA, 122 bp, Homo sapiens
gtgggggagggggtacatctttccccctcaacctcccactacaggtgagagtgcagctgacgccctggcccggcccggcagtgcgcctgcctccggcccgaacactcacaattcgcctctcc

SEQ ID NO: 309447 - DNA, 122 bp, Homo sapiens
gatcggattgtgacgtgcaacgaaaagtggatttcatatgacaaccagcaatgaccagctcgatggttggactgagaagaagctccaacgcacttcccaaagccgaactcgcaccaaaaaag

SEQ ID NO: 309448 - DNA, 122 bp, Homo sapiens
cgactccgcccgaggctggtcggctctgagacaccttgcccccatccctgactgggggagcggtggtgcttgagggacggcctctggaaccccgaggatttgagctttccgctaacctctga

SEQ ID NO: 309449 - DNA, 122 bp, Homo sapiens
actagcgaccggtgacctctttttcccccttgcctggctcctgtggtggcaggctgggcacgaggaccatgctgggccggagcctccgagaagtgagtggaattggcccgctgaggcccccg

SEQ ID NO: 309450 - DNA, 122 bp, Homo sapiens
caaatgacttttctagcacacctcatttccttctgttaaaatttcacctttcgcctggcacggtggctcacacctataatcctagcactttgggaggctgaggcgggtggatcacctgaggt

SEQ ID NO: 309451 - DNA, 122 bp, Homo sapiens
gagcaaggaaggagcaaaaatgcagacacagacacattctctccccgtcaagccggggagcgcatcgcagccctcggtgattaaaagccacacactctggacacatctcacccccacccata

SEQ ID NO: 309452 - DNA, 122 bp, Homo sapiens
ttccaaggctgaggctgtcaagggtgaggctgtcaccgcctcccaaggaagtggaactaccggtgtgcaccaccacccctgacacatttttgttaatttatttttttgctagagactaggtc

SEQ ID NO: 309453 - DNA, 122 bp, Homo sapiens
acccttaggttcctgggtctcaatggcatcaccccagaaactgctgggtttgcccacagccgctccctcccccaggtggtggagattgtgaagaagctggagtctcgccagcggggctggga

SEQ ID NO: 309454 - DNA, 122 bp, Homo sapiens
cggaggaacggggcccgggaaggaggtctgtcgctgactcttggctgtttgtcaggtggacgacatccttggagaaggcagcgacgacagcgacagcgagaagaggaggcctgaggagcagg

SEQ ID NO: 309455 - DNA, 122 bp, Homo sapiens
agagcaggcggggcagagacccatacctttggcgctgagtcgaggccaggaaggggcggtcgatgagagggcggccttagcattaggagtgcgtcggctgcaccctggcggatggaccttgg

SEQ ID NO: 309456 - DNA, 122 bp, Homo sapiens
cgacgtacctcaacatcattacacgcctgtccaaacccatagaaggcacagcaccaggagcgaggcctcacgcacaccgtgggctttagttagcgacgtacctcagtgttggctcctcacac

SEQ ID NO: 309457 - DNA, 122 bp, Homo sapiens
gccggcccctctgcggtttgggaaccactcaggcgcctctgtggagcgggcgggaaaagacgccgcggcctccttggcattctaacccgtgtccggaccctagaggccggccggtctcaacc

SEQ ID NO: 309458 - DNA, 122 bp, Homo sapiens
gactgtatgtttcagtctccctgggtagctgattcctagttgtggtgggaaatctcagtccgatttggaaggcaaagggcctcagccccgccctactgactgtgaattctacaacatatgga

SEQ ID NO: 309459 - DNA, 122 bp, Homo sapiens
tgccctcgatgattatataaaataacccaggcaaagcattgcacggagcctgcccgcagccggaagacagccctggccccagcgcgcagcccctcagggagcccggctcctttctccagcat

SEQ ID NO: 309460 - DNA, 122 bp, Homo sapiens
ctccacgctagtacctcgcctgattttccatcgttgcggtatccagccgcttcagacgtccgccgccttcagtggtggtagtcaaatgtagtcaaccaaaccacagcatcccttaggttaaa

SEQ ID NO: 309461 - DNA, 122 bp, Homo sapiens
gttttgaagatcgtgacgtcttgtaactagcagtgtgtgcacagaatcctactcaaggaacgtcttggcccagcgatgcaaagaactgaagtttcaaggttttatgtctattgctggatggt

SEQ ID NO: 309462 - DNA, 122 bp, Homo sapiens
atcctgtttgcagatgtccgccactggaggctgggggactacagaggcctggacatggggcggggatgaaggagaccatttcagggctctttatgccacagaaaaggacatgcatggtggcc

SEQ ID NO: 309463 - DNA, 122 bp, Homo sapiens
acacatgacaaaaaacacatactttaccatcttagttcaaaaaagtcactaaacaaacaacgggaacaaatcttcaagaagggggaacaactgatttccagagttgccacattatattgttt

SEQ ID NO: 309464 - DNA, 122 bp, Homo sapiens
ggaaacatggcatgagaaagtatcggtcacccgcagacaccagcacaagttataccataacgagactgaaactcacaaggcatctgtggggcctaaatgaagaaaactataaaactaccaag

SEQ ID NO: 309465 - DNA, 122 bp, Homo sapiens
ttgattcccctcactcttctccccagttaggacctcttttcctgtattttctgcacctgacgtgtcctttctctttcatcttgtccctgtgactggaataaatggagggatgagtcagggcc

SEQ ID NO: 309466 - DNA, 122 bp, Homo sapiens
gggcctgctcactgtctctgtgccatgcacctaccctacacgtgctaccaggtggcggtgcgcacagaggaaagagccgaggccttcaggtcagctgtgggaccttagaaaatggatttagt

SEQ ID NO: 309467 - DNA, 122 bp, Homo sapiens
ccagctcccccatccccgctgcgcctacctggggcgctcatgctccgccagccagctgcgcggggcgcctcctccacgcaggcctccggcttcctccaggcgaccaggccctccgtcccccc

SEQ ID NO: 309468 - DNA, 122 bp, Homo sapiens
aattgcaattctgaaacgctaaatccaaagacaaagccgctctggggaaaatagcaattgcgcaacagatcaacagctccaacctgtcccttggccctggcgcggcgaggtttgcacgctat

SEQ ID NO: 309469 - DNA, 122 bp, Homo sapiens
atgaagcgcaggagctccgtgtgactgccccgaggggcctggagcacctgggggcgcgggcgggggacccctgctgggaggccaggagactgcccctgctgccttctgcccagtgggacccc

SEQ ID NO: 309470 - DNA, 122 bp, Homo sapiens
ggccacccaccatggcgctgggcttggagcaggcggaggagcagcggttgtaccagcagacgctcctgcaagacgggctcaaagacatgctggaccatggcaagttcctcgactgtgtggtg

SEQ ID NO: 309471 - DNA, 122 bp, Homo sapiens
gacagctaagttctggaatccctggactttgttgcctactgctcttctgtttcacagagtcgcctgtgtgaagtcttttcaactgcctgcgcagttacagatagtgtactcgggaggaaaac

SEQ ID NO: 309472 - DNA, 122 bp, Homo sapiens
ggcctctgggtggggtggcgtttgcacacgggacgtggagaaagtccacaccatgcacagcgatacgcacacaccccaaacacgtggagtgaaaaccagatgcgagaacacagacactggat

SEQ ID NO: 309473 - DNA, 122 bp, Homo sapiens
gggttcgcacgggtcagcttctttcatccgcccggggcttctcgcattggtgccaccagtcgactcctggaatcttttcttggttgccaggacgctgagaagccaaggaagtgccagcccca

SEQ ID NO: 309474 - DNA, 122 bp, Homo sapiens
tcctcaaggagaggccagggtcctggggagagcatctcggatttcatttgtagaactatccgggaattgattttgatttgcctttcctaaagaggcaaatgatggtactaaaatttggtttc

SEQ ID NO: 309475 - DNA, 122 bp, Homo sapiens
cgcagctcatggggcggaccctgcgaatagaccgcccccgtataccccgcgctgtctgtgcgcgccggaccgccaaaccgagattagcaaggaccaggaccttaatataaacccagctcccc

SEQ ID NO: 309476 - DNA, 122 bp, Homo sapiens
gcaataatttccctttgatgacatcatccactgtggaagaacccagttgcttcagcgagtcgaactacagttttaacctcatcaaatatggcatctcccttgcttgctgcagcagggatgga

SEQ ID NO: 309477 - DNA, 122 bp, Homo sapiens
tacacgcagctgcccctgtcggcaggtatgtggctctcccaggacggccgggctgggtggcgcctgcttgcaggggcagctcccacagcctgggcagcgtccgctccatccctgctagttct

SEQ ID NO: 309478 - DNA, 122 bp, Homo sapiens
cgcagctgcggaggtgggggaccctgtgtggcagcctgctgagaggctgcgtgctccgcgcggttggaggggggaacctccagcccacctcctctttttcagccgagaaaccgctagttacc

SEQ ID NO: 309479 - DNA, 122 bp, Homo sapiens
cattctattcactacctccataagaccaaattttttagttcccacatgagtgagaacatgcgatgtttgcctttctgtgccagtttatttcacttaacataatgacctccagttccatccat

SEQ ID NO: 309480 - DNA, 122 bp, Homo sapiens
aggtacctttggcgtggttgcgtgcgcactgccacatagcacggaaagaaccagacaacccgatcctcagcagtgccgacagacctcggggcctccagaagacaccagcagagacaagcgcc

SEQ ID NO: 309481 - DNA, 122 bp, Homo sapiens
acctcaggtgatccacccgcctcggcctcccaaagtgctgggattagaggcatgagccaccgcgcctggcctctcccagcagtcttaactgctggtctcttcatcaggaagccagggtccct

SEQ ID NO: 309482 - DNA, 122 bp, Homo sapiens
ggggtgggctgttagtgttccttgcccaactgtggaaagggagtcccagagagggcaggtcgcttgcccaaggtcacgcagaaagccgagggtttccgtcgcgaacccccctccccactcgc

SEQ ID NO: 309483 - DNA, 122 bp, Homo sapiens
gaccaggcaggggcgcccttccgcaagctcccagctctagccggtgcctctggccccgcgcgcattaggtcgctgccagaaaattacccgggcaacgacaccgccggagtcccggatgtggt

SEQ ID NO: 309484 - DNA, 122 bp, Homo sapiens
aactgcgaagtcggggcgacacggcagcaactttaaaatcaaaccgcatccccaagggctcggcgtgttttttggcctctgcagcttcacgtacttcgtacgacaggagcgcacttgttctc

SEQ ID NO: 309485 - DNA, 122 bp, Homo sapiens
gccccaggggagaagaggagccaggcaggggctggcccagggccaccttgtgcaccctcacgtgcatggacagcggcggtacaggcgcctcccatgtcccgcgcgtccctgcccggctcaga

SEQ ID NO: 309486 - DNA, 122 bp, Homo sapiens
aggtcctggtgcagtccgcggcagaaaaggaccgcatcagtgagctgagggacaagcaggcggagctgcaggacgagcccaagcacgccaactgctgcacatactgccccaagagcttcaag

SEQ ID NO: 309487 - DNA, 122 bp, Homo sapiens
ctggcaacaggagcaggacctgctgacaggatcagtgggctggtcatgtcagctcccagtcgtaggagtggggcagggtgagggcaggaagagcagtctctgggtgccacactcaccctcac

SEQ ID NO: 309488 - DNA, 122 bp, Homo sapiens
cataaatgtcatgtttcttcacaaactgtagttctgaatttaactcattcaccattttgtcgtcaaaaagaagagttgatgttgttgaaagatctaaacagctttgcagctgatgttctaaa

SEQ ID NO: 309489 - DNA, 122 bp, Homo sapiens
ctgtacaatgatggcttatgttttttgctcattttcctaatgtgtgtgtgtgtgtgcacgcgtgtgcacgtttgtcctttttaattggttttatcagttttttatgtaacatgtttatatat

SEQ ID NO: 309490 - DNA, 122 bp, Homo sapiens
gtacttgattcattagattggttctcttgcatttccaattcatggtttccagagggtgaacgctgttctcaggatgtcttgcgttagaggagtttaggaagcatcaccaggtctgttctcca

SEQ ID NO: 309491 - DNA, 122 bp, Homo sapiens
tatattgcatcaggttacctttcattccaccgcatttgtgccttgcacttagtaggcgatcgataaaataactgatgataaaggggcttctgcagactccccaattcatttggtaaagaccg

SEQ ID NO: 309492 - DNA, 122 bp, Homo sapiens
aaaacgcaatcatcaggcaaaagcgaggccttgagtgaccactatgaggcagaagatgggcgtgaagagacaatcctgagacaggggctggtgtaagagagggcccaaaagaggccagtatg

SEQ ID NO: 309493 - DNA, 122 bp, Homo sapiens
gaggctattacatttacacggaggctacgcacaatctcaggggaggctcaaacagcagttcgttcctcacacgcactgttgggtgcaaagggcacctggagagtgagggagacctgggcgct

SEQ ID NO: 309494 - DNA, 122 bp, Homo sapiens
acagccccgctcgctgcccattgtctgcgcccctaaccggtgcgccctggtgccacagtgcggcccggaggggcagcctcctcccgtcacttcagccagcgccgcaactataagaggcggtg

SEQ ID NO: 309495 - DNA, 122 bp, Homo sapiens
atgtcatttgtggtataatcattattagccctctggtccattaggctattttctggatgacggcataaggcacagtcttgtgacattaaaagttacttagcctgagtagtctctagattact

SEQ ID NO: 309496 - DNA, 122 bp, Homo sapiens
agtaggatcaggcaaataaaactagttggacagcagacatatcatgaactcttgcaacagcgtgttatctgtgtgcatgtctaaagtgttatactgattcactattacaataaggatcatgc

SEQ ID NO: 309497 - DNA, 122 bp, Homo sapiens
cagcaaagcaaaggcctccaggtgctccccgcaggcgtgcgtggcgtagaggcccttcagcgtggtgtagacctccttcctgcgggcagccaggctcagggccctctaatgccccaccccag

SEQ ID NO: 309498 - DNA, 122 bp, Homo sapiens
ccttcctgtcttggatgcggctgagatttctggagcacagcagccgtcctgcagctgcagcgagtatttagagttcatagcacaagcctgcccctatttaagttgcagaaataacacattta

SEQ ID NO: 309499 - DNA, 122 bp, Homo sapiens
tggagaagtgtgtgcagatgagttctgcagcacccttctccccaagcttctggggccaagcgtggtttctgtgatgctggggccacactgccttcagacaacactgtagcagtgttggtgtg

SEQ ID NO: 309500 - DNA, 122 bp, Homo sapiens
attctttcttctcaggaggcaagggctgaagtggctacagacccagacggatgcacctcccgtaactcgaatctcttccaccgctaacagttttgtcccagctcatcggtggaggttgaact

SEQ ID NO: 309501 - DNA, 122 bp, Homo sapiens
ttccttcctctacgttagcatcctgtccggggtccccggcccatgtggcctttcttccagcgacagtacacttagctcagaacggattgacacccactctgtgtttccaccgggcgcgcagg

SEQ ID NO: 309502 - DNA, 122 bp, Homo sapiens
ccggacggccgggcctccggccccagcacagcccccctttcagaggaccccgggtcttcgcgcctgcggaccagaggctgttttcgcacttgggcttcgcgcttccttgacactttcctgtc

SEQ ID NO: 309503 - DNA, 122 bp, Homo sapiens
gtcgttgacatactccatggccagcgggctggtgggcagctctggccccatgctcagctccgcggccatcgctgaagcgaggcgcagccgccgctgccgcccgggaaactttgcggccggcc

SEQ ID NO: 309504 - DNA, 122 bp, Homo sapiens
cagcatgggcaggaggccaggcaaggataggagtgggagggttccagggagtcctggaggcgaaagtgatggactccagtccctgggcctggatgcaggaagtgaggcagcgctgaggaatg

SEQ ID NO: 309505 - DNA, 122 bp, Homo sapiens
actgaagtgaggggcaggttccgagagctcctcggagcctgagctttgggtctgccattccggggtttaatacataaccagggctctctgaaaacccttataatggggctttgttatggaaa

SEQ ID NO: 309506 - DNA, 122 bp, Homo sapiens
cgaatgggcttgggctttgcccgggtggcgcacgctcacacgctggaagcacagctttgacgatctccacacacgcacaggcacacacgccacagatgatgccggctcattctcagggggtg

SEQ ID NO: 309507 - DNA, 122 bp, Homo sapiens
cttaagcacgacccatgcaccacacacttcagttaaccaggcttgctaccttctagtcatcgaaacagaaatgggtattcattcattcttgattctataaatatttattaagcattgttcta

SEQ ID NO: 309508 - DNA, 122 bp, Homo sapiens
gcttgtgaagatgcataagaaaggtgtcttcctctctgaggaattagcacctgaatcattcgctgctttccagtgtggcacctaccataaaaacagctctccccatgaaggtcataaaatac

SEQ ID NO: 309509 - DNA, 122 bp, Homo sapiens
tgcaggctgtggccggagcaggagccggaacaccagctgggacgggttccctgtgcaggccgcagcacggacaggggccctggggtgcccggcagtccaggacagcccgagacttcacaccc

SEQ ID NO: 309510 - DNA, 122 bp, Homo sapiens
ccaccatcattcctgacagctccgtcctgctatttgtttcagattgcagccaagaatacacggattctacaggcatagacttacacgagtttctgattaacacattaaagaataattccagg

SEQ ID NO: 309511 - DNA, 122 bp, Homo sapiens
gtcccggtttccctgaggtcctaaagaacgttgacagccaacagcgcgcctaacttggagcgaatcctcttcgggctttccagagtgcgggggatagataaagagtagctggggagacgccc

SEQ ID NO: 309512 - DNA, 122 bp, Homo sapiens
ccttgaggatgtggcctctcctcaccttgttgggtgcacagataccagcctccaaatattcgcaattctctttttgatccctctctctctctctctctctctctctctctctctctattgtc

SEQ ID NO: 309513 - DNA, 122 bp, Homo sapiens
gaggcgggagccatccctttccccagccccagctctgcggccactcacctgctccgagaccgaagatcaaacagaatgttctcagtaagacccgagactccatggtgcggatcagctcagtc

SEQ ID NO: 309514 - DNA, 122 bp, Homo sapiens
aaatgactaataaagcatgattacccccctccaagagcaattacactttattaaggaggacgccttgaaaggtttagcataaaggaacacatttgaaatgaatggtagtcatcaggcagttt

SEQ ID NO: 309515 - DNA, 122 bp, Homo sapiens
gggcagggaagggaaccaatagaaacagagcacctgcttgggcccgtgttagccattttacgtagttatcatttccttctgctcccgtgtctaaatagcagcaaccactgctagtgttattt

SEQ ID NO: 309516 - DNA, 122 bp, Homo sapiens
ttcactggctgcctcttcaatgccagcgcctgggctgagcccttttcttgcattacttatcgcatccctgttttcacatggccctctgagaggtcaagtgacttcctcaaggtcatacagca

SEQ ID NO: 309517 - DNA, 122 bp, Homo sapiens
cctgcatttgctccagagcttattaagacaagccatttccaccacgatgaagagcacgcacgcacagccgtatcccagaatcaacggtgtctcaacgacaaaattgaaagcattctcacgta

SEQ ID NO: 309518 - DNA, 122 bp, Homo sapiens
tgagcctccctgtcatgcctggcctgtggacagccagtccccaccatccctcctgccgcccgacaagcttgggggtgctgtgcagacagctgtgtggcccgacagtctctaccagtcctgct

SEQ ID NO: 309519 - DNA, 122 bp, Homo sapiens
tgagaaagtagtccctgcataggctgaggagcgtgtgcacatctgtatttgtcccggaatcgtgaaatgtagatgcaccttactgattaaagggttaaaaaaaaaaaaccttacattaaaac

SEQ ID NO: 309520 - DNA, 122 bp, Homo sapiens
gtcttcatacaatgaaaacctctcaggaagtccaactgcttatttgtttgttctttcaagcgaaacaaatcatcattaaaaaggttcagcttcaaattaagaccttttagaagcttagagga

SEQ ID NO: 309521 - DNA, 122 bp, Homo sapiens
cactgagcagggaagctgtgggcagagcatgcactgaaaccttaggagccattgaggaaccgctggaggttttctcacgtgctcttccttccttctgctgcaggttgtttttatttttattt

SEQ ID NO: 309522 - DNA, 122 bp, Homo sapiens
gccctgactcaggtttttgaagagtctctaatggttcatttccagcctcatcaggcatcacgtctctgactggcagatgattcatctcagcagtgggggtcttttattcaaggcctcacctg

SEQ ID NO: 309523 - DNA, 122 bp, Homo sapiens
cattgaggcacgacccatgatgttgaacgagcttggttttctcaaccacttcacatgggacggacgtgggatggggggataatgttcatttctctgccttcccgccaccctccagcccctcc

SEQ ID NO: 309524 - DNA, 122 bp, Homo sapiens
actttcacattctgaaatagccaatatttcaactataataattaacaagaattaatcaaccgttaattatcttctaaaataacaacaaaaaaagtgaagatatgtattaggttttccactct

SEQ ID NO: 309525 - DNA, 122 bp, Homo sapiens
aactgggagggagggtctgtgaggagcaagtaaacatatggcctcaatgactcatgcctccgaagggctgagggaggggccaggagacatgcctggcctatgtccttccaccaacctggggc

SEQ ID NO: 309526 - DNA, 122 bp, Homo sapiens
ggggaggagtcaaggggatggaacgactacccagtgatgaagccagtgggcaggggatgacggtcatagactgagaggaagaagactggggtggaccagtattgggtgtggggaggtgaagg

SEQ ID NO: 309527 - DNA, 122 bp, Homo sapiens
tggggaggcacggaggactcggctggaaagggtgactccggtgagggcacgtaagctagccggcaggtcccaggggcactgcacgtcttggggagggacaccgaaaggggcagcccggactc

SEQ ID NO: 309528 - DNA, 122 bp, Homo sapiens
taattctagaaatagcgatcgcgaaagctaagtgccgagaagtgcgagagagtgcgagggcgtttttggatagcagaaatgttagctcaaaatcgacaacttacagttattcctaaaaatgt

SEQ ID NO: 309529 - DNA, 122 bp, Homo sapiens
gaagcttgatgggggcagggagggtgagaggtggcggccgggcgagcgcactgtaggacccgagcacaatggagagagcccccgaactgctggagatgaaaaggtggagccccagcggggtg

SEQ ID NO: 309530 - DNA, 122 bp, Homo sapiens
tacttgggaggctgaggcaggagaatcgcttgaacccaggtggtggaggctgcagtgagccgagatcccatcactgcacttcaacctgggtaacgagagcgaaactccatctctaaaaaaat

SEQ ID NO: 309531 - DNA, 122 bp, Homo sapiens
cctcctcgcgaggggacagagcggggaccacagctgaccgacgggggagcggcgtgaagacgtggagggggaaataagaagcataaacattgaggctgtcccaaccttcctcctgatggtca

SEQ ID NO: 309532 - DNA, 122 bp, Homo sapiens
agcgtagttctggaaatgcattaaaaacgccataggctcggaccggaagactactattcccggcgagcattgtgattcgaagcctgccggaaccccgcggagaggggagggaaggagaaata

SEQ ID NO: 309533 - DNA, 122 bp, Homo sapiens
ataggcgttaagcgttatgcacgctttatagatgtagaaagtgaagtacggttaaggaggcggtgtgaagtgtcaaagctatgaaatgtagaactgcattagccttggctaattccacgtca

SEQ ID NO: 309534 - DNA, 122 bp, Homo sapiens
cagcaccatgagccgcagcacgcaaggcaaacacagccggaggtgagcacatacctgcttcgcaccccatgcgcctaaccacaaggttccctccctccaggaaggccgttgtcttccctggg

SEQ ID NO: 309535 - DNA, 122 bp, Homo sapiens
ggcagacctccctgagaccctgaatgaactccacctagaccacaacaaaatccaggccatcgaactggaggacctgcttcgctactccaagctgtacaggtgaggccagcagggcaccgccc

SEQ ID NO: 309536 - DNA, 122 bp, Homo sapiens
accacagcaaggctggagctggctctcagaccgcaagcgctgggttctctctgccagtgccgcccgagcctgtggacaagggctggttggaggccgaagggaagcagcccacccctgaacag

SEQ ID NO: 309537 - DNA, 122 bp, Homo sapiens
cattaccacatttgtgctttttagttaagctctagatgggcttggctttttacaaatgaccgtctttgggctgatgtgtggcaccagctattattcagtccacatgattctgctggaacgct

SEQ ID NO: 309538 - DNA, 122 bp, Homo sapiens
tactggggtacccatgctctcacacactgagatacgcacgcattcccgctggggtacccacgctctcacacactgagatatgcacacattcccgctggggtactcatgctctcaaacactga

SEQ ID NO: 309539 - DNA, 122 bp, Homo sapiens
acctcgggagcagccaggagtcctcggtcctgggagggtttaaaagccagggggccgtctcgacctcagtctgaccttccctcccggcagcagcatgcgggggttgctggtgttgagtgtcc

SEQ ID NO: 309540 - DNA, 122 bp, Homo sapiens
ggccagggtcatcgttttgcgatctctcctgggagtctgggtttggagtctggtcttagccggtagcaactgacgtggcctgaccacccggcccgtccaggtccacgggtgaggggccgcgg

SEQ ID NO: 309541 - DNA, 122 bp, Homo sapiens
ttcatgagatacttcagcctcagcctcccaaagtgctgggattacaggtataagccaccgcgcttggcctctttcacatattttgaaatggtctgtgaaactgtcccttgaggagaaaatgt

SEQ ID NO: 309542 - DNA, 122 bp, Homo sapiens
ctgtgggccctgaggaagcgcgatccccttaattcctccctcccctctctctccaccgcccgcccctttgcaaggagcaagcctgacagtagctgatcggcgccctctctcaccctgtcccc

SEQ ID NO: 309543 - DNA, 122 bp, Homo sapiens
gcttctcctccagctcaaagttgacgacggggcgaagcaggctgctggacggcgtgccgccgcagagaaggaaatcgtggggagaagggggagaagagggcgccgctcgtcggtggacagtg

SEQ ID NO: 309544 - DNA, 122 bp, Homo sapiens
atgatctctttcccacagatgttctccctccctccttccttcccttccccttcctacaaacgtgaactcttaagtctttactctctggtcttcagaagggtttggttacaagcagtcttccc

SEQ ID NO: 309545 - DNA, 122 bp, Homo sapiens
gagaacatggtcaaggagttgggaaattatccagaaacatttttcaaagggagatcttcccgcataccacctcagcctggctctggattgcaggggaactccagaagggatggggtctgggg

SEQ ID NO: 309546 - DNA, 122 bp, Homo sapiens
cagggaactggggagggcggggccgtagcgaggagcagctgggcccggcgtgggggtgggcggggcccagggagtaggcggggtctgagtgagtggctgctgggcaaggagtctcggcaggt

SEQ ID NO: 309547 - DNA, 122 bp, Homo sapiens
agtttccttttccccagaggtaaggttggggggacctgccctcctgggccgcagggctgtcgtgaggatgaactgagatgcaccagaagagtggctgtctttacaatatgtgattatgttgc

SEQ ID NO: 309548 - DNA, 122 bp, Homo sapiens
acagcccagaaactgggcgtttcctgctgctctgggctgcaggggcgagacttctggcgtcgccgtcgtgacgtatttttcctatgcccggtccgtgcattctggttgtgaaggctgagttc

SEQ ID NO: 309549 - DNA, 122 bp, Homo sapiens
aaacttttcaaacctatactgttgttgataaattcttttaccacccgggagccaaccattcgtggctgcggctcccggggctctgacacccagcctggcacacaacatttcacttagcccct

SEQ ID NO: 309550 - DNA, 122 bp, Homo sapiens
ggttcacaagtcaggatgtggcctctttgatcctgcacatactgttctgccaacctgacccggctgacatttaaaaattggtagattttaggccgggcacagtggctcacaccggtaatccc

SEQ ID NO: 309551 - DNA, 122 bp, Homo sapiens
taaatctgtggaatcaaacggagaactaggattctcaggcttgctgaaactagaggccagcgacaataaacattactgagaaaacttcagctgatttgacacttgggagtggctgtgaagtt

SEQ ID NO: 309552 - DNA, 122 bp, Homo sapiens
tccccgcaaatatttggctagctgcgcttctagttccactttctttcaagagtgaacctacgagctttaaccgccaaaagcggctgatttcgatttggcctttgaccccccactgaaagttt

SEQ ID NO: 309553 - DNA, 122 bp, Homo sapiens
gctgcccccgccctcacctgccgctgtcctccttcactgtcccaaacgccgcgggccgcccggccctcgctggcaactcctgcgctttctcagtgtcgggctcgggctccagggaggagctg

SEQ ID NO: 309554 - DNA, 122 bp, Homo sapiens
cggcgcgggctccgggcgtgcgacgaggagttcgcttgcccagagctggaggcgctgttccgcggctacacgctgcggctggagcaggcggccacgctgaaggcgctggccgttctcagcct

SEQ ID NO: 309555 - DNA, 122 bp, Homo sapiens
gcgctggcgctggatgtgcctgctcttctcctgctccttcctcgcctcctggctgctcttcggcctggccttctggctcattgcctcgctgcacggcgacctggccgccccgccaccgcccg

SEQ ID NO: 309556 - DNA, 122 bp, Homo sapiens
gcacgtgaggcttcgggtgccctcgcctgcaccagtgtttatgattgacaagcgaggtcccgatttcccccatcacactcctgtgttccctaccccaaaccttctactctgttcaggccagt

SEQ ID NO: 309557 - DNA, 122 bp, Homo sapiens
cctcgggtttcgggaccatctgggtggaagctcattaggcgtcgtggttcctgaaggccccgggcttgcttcctcatggagaacgcagagaagtacaggcctgtaagtagccacccagtcag

SEQ ID NO: 309558 - DNA, 122 bp, Homo sapiens
tgccaaaacggtcatcgccattgacgtggggagccaggatgagacggacctcagcacctacggggacagcctgtccggctggtggctgctgtggaagcggctgaatccctgggctgacaagg

SEQ ID NO: 309559 - DNA, 122 bp, Homo sapiens
actgaagccaggccggggcaggttggctggacctgggcggggtagaggcggggccccaggcggagagaccttgccctttagaaccggcagagggagggcccggggcgggacctgtgcttctc

SEQ ID NO: 309560 - DNA, 122 bp, Homo sapiens
tttgctctatcgagctgatactgaagtacaaaaatatcaagaggctggagccctgaaggacgacagtgctccgacctaggtgtggtgtccaaaagaatgctgcattataaccaccagggaaa

SEQ ID NO: 309561 - DNA, 122 bp, Homo sapiens
cctggaatccccagcttctggtttccagccacttctagatgttctctggaaacataactgcgttgaaaccatactgaagtataaattcccaaattggaaagaaaacaaacaaacttggtagt

SEQ ID NO: 309562 - DNA, 122 bp, Homo sapiens
tctaccttatttttcaagctcttgccaagactctttcttgaattaagaattctaaaacaacgtcatggagcttcttctattagtctgctattagttgccagtcgctgcttacacagagtgag

SEQ ID NO: 309563 - DNA, 122 bp, Homo sapiens
ccacggagagccccagtctccctgccgtggctggtttccctcacatgctaaatagactcacgtgggccccaggagtaatgcctgttagtgactgcactgtggatgttcaccggggctcacgc

SEQ ID NO: 309564 - DNA, 122 bp, Homo sapiens
agcagctccagaaggagtgtggattccgagaagctgcagagccctggaaagcagaagagacgtgcagacgcctttgtggggttctgtcctttctggtgttgtacctctggagcctggggctg

SEQ ID NO: 309565 - DNA, 122 bp, Homo sapiens
gtggggcccacggggaaccccgggagctaagctgatcccctgtacctcctccatccctctcggcacccgggctgcctgcccagcagcgtgggaatctgttcctaccttacccccaacctccg

SEQ ID NO: 309566 - DNA, 122 bp, Homo sapiens
aggaggcggcccgcggagtccagcgaagtttggcggaacatggcggaagcgtctggggcacgcaggagcgcggggcggcggcggccggagcccgaggagctgtagcagccttagtcgccgcc

SEQ ID NO: 309567 - DNA, 122 bp, Homo sapiens
tctgccgccagcacatcctagaacaggcttcgctgagcatgaactcaccacaccggaacacggagagctgggccagcattggcacttgataggatttcccgtcggctgccacgaaagtgcgt

SEQ ID NO: 309568 - DNA, 122 bp, Homo sapiens
tggtctgtcctggccacgaatcatggctccacaccaccagtaactcacctcctggacccacgaatggagggatcctccacagctcacatgcttggggtgtagtgggtccttggacatcctca

SEQ ID NO: 309569 - DNA, 122 bp, Homo sapiens
gcgtgtaaagaggactccctccatcacttccttgggtgagagatggggcttccctgaacacgtgatctcacccacactccccacacacaccacaccctgtggctgcttctcttcaaatctcc

SEQ ID NO: 309570 - DNA, 122 bp, Homo sapiens
ttaagaaaagaaggccccccacactctacccggaacctgtctctacctcctccctacagacgcattccctggagcagctgtccaggggtcatgtccggtctccaccccccgcagcctccacc

SEQ ID NO: 309571 - DNA, 122 bp, Homo sapiens
acactcacgcgccccccaccgataacacacacagacacccacgcacgcagtggcggggcacgcacagccacccccacatggccacgaaagcagctggaatccaggtgtcagcagggctcctc

SEQ ID NO: 309572 - DNA, 122 bp, Homo sapiens
agtgtgctccaaaacacatgagctatatatactctaatgaagataactttcatatagtaccgcaaaggcgtctctgaagttcaagagagaataaaatcagataaacaagttttcacagctca

SEQ ID NO: 309573 - DNA, 122 bp, Homo sapiens
aacattgaacacctcctacgtgccaagccctgacatcaaaatgggtcagaagccagcagccgctcgctgaatctgtgttcctctttggaaaacgagaaccgtgaagcctgctggcatggtca

SEQ ID NO: 309574 - DNA, 122 bp, Homo sapiens
ctctagtaacacaatcacactgcttctaaaatgtttacctctcaggagccactgcgttcccgaccttcttctgccccattggcaggccccaaacatcctcctgagtcacaagtctcacccca

SEQ ID NO: 309575 - DNA, 122 bp, Homo sapiens
gggggcggcgggaggggcaggagacgttggccccgctcgcgtttctgcagctgctgcagtcgccgcagcgtccggaccggaaccagcgccgtccgcggagccgccgccgccgccgccgggcc

SEQ ID NO: 309576 - DNA, 122 bp, Homo sapiens
aaaggtaatttaatggatgaaggaggcccccatgcatgccctagcatcatgcccagaatccgagatgcataaaacattgactcgccactggaaagctgcaagagtaggtgcagttgtctctg

SEQ ID NO: 309577 - DNA, 122 bp, Homo sapiens
tggtggcacgtgtgtcacagggtccttctgtcctctgtgccctgtggggagtgggggctgcgggggcgaggggggaggccaaaatggcgcgtctctgcgagtaaccgaggatgcggattcag

SEQ ID NO: 309578 - DNA, 122 bp, Homo sapiens
gttaatgctggtgaccggctaggaagatgccgcctccctctcacgtgcgtctattcaaagcgctcccaactctatacatgctgtttaaggctccttgtagccctaaagttaggagaacatcg

SEQ ID NO: 309579 - DNA, 122 bp, Homo sapiens
tggcttgcaggtgcagccctccaatcctcctccccaagcggccttctgcctataaggacacgagtcatactggatgaggggcccactaattgatggcttctgtaaagtccccatctccaaat

SEQ ID NO: 309580 - DNA, 122 bp, Homo sapiens
gcgcgtgggcgctgccgagaggctgggagcccgggaaccggttcctggacttgagcggagcgagaaagagcgcgccgcctgcacgactggactggagcggccgggtgccctggaggcccctg

SEQ ID NO: 309581 - DNA, 122 bp, Homo sapiens
tccgaagactacatctcccaggctgctctgggccgccctgcgtcgtaaccctggcgcgcacggaggcggcgactcttacctcacaaaggtagctcctccgccggcagcaactcggcgcccgc

SEQ ID NO: 309582 - DNA, 122 bp, Homo sapiens
tgctgaggaccccgtcagggtggggtgagcctgtttatcacaacttaaatattctcccagcgtccaagagaacatggggcacaccgaggctcttattggcttctcaaggatacaaccatatg

SEQ ID NO: 309583 - DNA, 122 bp, Homo sapiens
cttgcccacctttgtggggaacttgagatgcaccagggtctgcacgatagcgtgtttcgtcggcgtcacatcgtcagccaaggggaagaagcagccgcccttacactcgtaggcttcatact

SEQ ID NO: 309584 - DNA, 122 bp, Homo sapiens
acccccctccctccctccctccctcccaaccaaaagtctgtaaaaaacaaaacattgacgcgggcagtcctactctctagtgtccccttgtggccaagcctggaacatcacatctgtacgtt

SEQ ID NO: 309585 - DNA, 122 bp, Homo sapiens
cacatctctcatttgcacacccaaagggccatgggctcactccttccagaggctgatgatcgcattttcagacaaatgcaactagaagttccttgcctcccctgacttcctcaggaagctgg

SEQ ID NO: 309586 - DNA, 122 bp, Homo sapiens
ttcgctaccagttgcgtcacctagcgaggtccacgctgattggctgtctgagctgggggccgaggtggtgttgggtgagagggggtttgcctcttgctcctctgtgtcagagccgctgtatc

SEQ ID NO: 309587 - DNA, 122 bp, Homo sapiens
cctggccgcccaggaccgtgtcctctgtgcactgacagaggccaacgtgcagtacgcagccgtgcggcgggtactcagcgacttggaccaaaagtcagtgcccagtcctctgctctttcccg

SEQ ID NO: 309588 - DNA, 122 bp, Homo sapiens
gtcccagtgatctcaggctggcctgagtccccacgtcctctgcccagggcagggagcagacgaacggctacaaggaccaggtttctttccctcctgtcccccacactccccaaagggactct

SEQ ID NO: 309589 - DNA, 122 bp, Homo sapiens
ctccctcggaatgtgttcattgttttcagagctccggagccgcttcaaattgtttcctaccgcgtccggccccaggggcagggctctttttctgtctctgctgtcacttacattcctctccc

SEQ ID NO: 309590 - DNA, 122 bp, Homo sapiens
attaaagagtagggaatgaggtctgtagcatcccaacattaagatgtaggggagaagaggcgaatccagtaaaggagacagaaaaggtggaagggggatcatggaggaattacactttaaag

SEQ ID NO: 309591 - DNA, 122 bp, Homo sapiens
atgaggaaaaactggtaacctcaagcactgctgatggtagcgtaggctggggtggcccttcgggagagcaatttcacatttggcactaagtgtacagactcagcttatatctatccatcata

SEQ ID NO: 309592 - DNA, 122 bp, Homo sapiens
gtgactgaaggggtaatatataatcacaaatcaaacccaaggccactgttaggcttctttcggtgccctgttgaacgggaaaaattaaaaaaaaaaaaagtctctcgagtttcacagattag

SEQ ID NO: 309593 - DNA, 122 bp, Homo sapiens
gccggtgtcaagaagctgccgcgcggtccccggccgaggagaatcaaacacatacagcagcgtcaggctccgggagacctcgtgaactcagtgatttcaagtcccgtttcagaccgtgcctt

SEQ ID NO: 309594 - DNA, 122 bp, Homo sapiens
taaattgatgtttaaattcaagttaaaataaattcaagttaaaatagtcttcagctcagccgggcgcggtggctcacgcctgtaatcccagcactttgggaggccgaggagagtggatcaca

SEQ ID NO: 309595 - DNA, 122 bp, Homo sapiens
aagttcactgatgctggccaggagctgtttggaatgactgccaatcttgaaagtagagtccgtgtatctcaagacataaaattagcaaaattcttctgcagccaatcccattttcttgcagt

SEQ ID NO: 309596 - DNA, 122 bp, Homo sapiens
tttttcatattgttatgacattttcaggatactgccactgcaaaatttgtttcttccctacgcatatatggaaaaggtcattcaagggtgtagactgagggtgaaaaaagagtgaggcaagg

SEQ ID NO: 309597 - DNA, 122 bp, Homo sapiens
aactccccaggtctgcgcacggcaatgggggcaccgggccttctgtctgtcctcagaatacgtaggatacccgcgggcgacaagccgggccaggctaggagcctccttccctgcccctcccc

SEQ ID NO: 309598 - DNA, 122 bp, Homo sapiens
ctcgcttttggaggcctcgtaaatgtggctgtgtgctgcatacgcagacagggacgggcccggccataggcgtacacgtacgaatgcacacacatgcacaccccagctggcacagtaacggt

SEQ ID NO: 309599 - DNA, 122 bp, Homo sapiens
ctcgcagttgagcttcacgaagccgatggtgcgcgcagacaggcacagacggtacacccccgtcaggttcttgctctggcccagacccttgggcttcaggttcacctgccacacctcacggt

SEQ ID NO: 309600 - DNA, 122 bp, Homo sapiens
agacgcgaggggcggggctccgagtgcacccatggagtttccccgggactgtggctctggcgtgccaggaatgcggcacggggagagtccgtgcttctgcagccggcccctcggagctgcga

SEQ ID NO: 309601 - DNA, 122 bp, Homo sapiens
caagctccaacgagctcggcgataggggcttcctagcagctcagcaccagtggcggctgccgggtgcgaggaccgaaccgcgaagccgctagcactactgcgcaacgagggcgaacaaagga

SEQ ID NO: 309602 - DNA, 122 bp, Homo sapiens
caggccctcccccgccgcagtcacggtgggtgtcctcctggcccccaggccctcccccgccgcggtcacatgggtgtcctcctggcccccaggccagggttccctttcgtgctcaggcttca

SEQ ID NO: 309603 - DNA, 122 bp, Homo sapiens
gaccctatcagaaaaaacaacaacaaaaaaaaaacagtgcccgctcggtttttcctgaaacgcgcagccctcgcctgtagccaggagaaaactccgcgagccaggaaaacacaaactcggcc

SEQ ID NO: 309604 - DNA, 122 bp, Homo sapiens
acggggcttgtgatgccgcccgctgaactttgtgacacagccgcttgcggagacaggaagcggtcgcagcacgtcaggcccgccctcttccgcggccgcggtgggaatggaaacatctgccc

SEQ ID NO: 309605 - DNA, 122 bp, Homo sapiens
gagctgaccacctccttttgacacctggacagccacatctaacccacatccccacgttcccgccttgcctctcagctgctctgtgcagcaagacagcaaaggcaagtttggcaaagctcgcc

SEQ ID NO: 309606 - DNA, 122 bp, Homo sapiens
ctgtcccggagccgcttggccgcctcagtcaataccccggcttccggtcccgcccgctagcgcgtgatcgttgtcaaccaatgggaaggcgtaaccgtacacgcaagcacgtgatgcgggga

SEQ ID NO: 309607 - DNA, 122 bp, Homo sapiens
gatttgcgaagatccaccgcaccttctgtggaactcccgtgtcggtgaacttttgtgccacggcccctaattctgcccatggtcatccacacctgcacgacttagggtccatgttccttgga

SEQ ID NO: 309608 - DNA, 122 bp, Homo sapiens
agcacacacagctcagtagcagcgccccgcccagatgtttatattttcctccatcggccccgccccccgaccatgaggggctctagccacgcccccaagctcaagtttctggggccggacta

SEQ ID NO: 309609 - DNA, 122 bp, Homo sapiens
cgcgtccagcgctgccacagcaacggcgcgcagggcagggacccaggagggaggcggggccgcgcctgacccagtccagcaccctggcctgccagcctcgccgcttcgccactcaccacaaa

SEQ ID NO: 309610 - DNA, 122 bp, Homo sapiens
tcttctgtttttatgaccaaataatattccactgttgttctccctaacctttgcaagcttcgttccttcttgtcattcaagtcatggcccagaccgcacctcctcagcaaggctgcccctga

SEQ ID NO: 309611 - DNA, 122 bp, Homo sapiens
tgccgccctctttcacactcccccgacctggatccccgatcctgaatccaaacttcatgacgtgtctgaagattgttttcaaggctgttctcttggtctctgtccagcacgtcttcccataa

SEQ ID NO: 309612 - DNA, 122 bp, Homo sapiens
agaaaagggctcttccggagtcctggggattgcgcgtttaaaggggaccctccctctccccggatcttctctgagcttggcaagttaatcggaagcactcgctggcctctcacctctcctat

SEQ ID NO: 309613 - DNA, 122 bp, Homo sapiens
ctcctgacctcaagtcatccacccgcctcggcttcccaaagtgctgggattacaggcccgcgcccggccggagttgaatttcttactgtggattgctggcaaagttgacaaaccactgctct

SEQ ID NO: 309614 - DNA, 122 bp, Homo sapiens
ctgcctggaaaccactggtggtttctgcactggcagtttcgagtcattttatcctcactccgtgtatgaatcatacttattgtatattggttggattctacctagatgtagaggattatgag

SEQ ID NO: 309615 - DNA, 122 bp, Homo sapiens
ggaggcagttactcagcccttctccatcactagggactcagagggtaaaatgggtcacttcggaggaaatgctttggaaaacaataaggctttggaatgtaggccagggactgcagggggct

SEQ ID NO: 309616 - DNA, 122 bp, Homo sapiens
tttcccagatgaccataaatgtaggggatagtgtatgcactttggatttcagctgaaatacgactaacttcctctgtgaatttgagcaagtcagttgacctctttgccctcagtttctttat

SEQ ID NO: 309617 - DNA, 122 bp, Homo sapiens
ctcagcaccagcgcggtggcgcagtggcctgagacactgtgagaagccggtcagggcgaacgagagtcatctgaacacggaggaaagtggctggcctgaccccacacacctcccacagcgga

SEQ ID NO: 309618 - DNA, 122 bp, Homo sapiens
ggcccccaccagcaggaactcatgtgcacacgaatccactctggcacccgtgggctggcacgcagcggagagggggcggggagagctgggaccccggggcagggtcattgccagcctgccct

SEQ ID NO: 309619 - DNA, 122 bp, Homo sapiens
ccccccaaccccccgccggccccggccaacccctaaatccccaacgccctccgctggggtcgcctcctccccgcagagccccttgttgggagttcaaggagcccgaagctggtctggctggt

SEQ ID NO: 309620 - DNA, 122 bp, Homo sapiens
ggccgctgcggccgccgctgcccccggaccctctctgcctgcacaactcgtcgctcttcgcgctgcagaacctgcagccctgggccgaggacaacaaagtggcttcagtgtccgggctcgcc

SEQ ID NO: 309621 - DNA, 122 bp, Homo sapiens
ttcttcttaactcacaggcccactgaccctcactgctgctgtgggctgctcccaccagcccgtgctgagcctcctacctcatctgcgaggagacagggcaagttccagcctgaggggcatgg

SEQ ID NO: 309622 - DNA, 122 bp, Homo sapiens
aagggtggagtcccacttccgctttccaactccctttttaggccaccgcattgtatatcccgacacacacacgctttgaatagagccctttggggtgggggagacttaaaggcagtttgtgg

SEQ ID NO: 309623 - DNA, 122 bp, Homo sapiens
gtcacaaatgactggcatacaacaaatatgtccttagtatctgagatactaaggaactgccggtacctatttttcctcctcaaattcaatcaaaggaaatcatttccatgtcaacatgcaca

SEQ ID NO: 309624 - DNA, 122 bp, Homo sapiens
gggcagcagcggcctccccccgggtgcgcgcgcatccagccccctccccagccggcgctgcgcttcttccgtaaccgagcccttggaatcccggagacccgccccgcccgcagcgcggcgcg

SEQ ID NO: 309625 - DNA, 122 bp, Homo sapiens
gtgctgaatgtgagtaagatcatagtgaactgtgcttcaatggatggacgagctccccttcgttttctccctctctccctctccctccctccctcgtttcctttcaaaaaaaagtcctccgg

SEQ ID NO: 309626 - DNA, 122 bp, Homo sapiens
ttactggaacaattagcatttaaagctttatggctgccattaaaatgtttatttcttttacgtttaggcggtttttcctccagtgttggttacccaggacggcaatactactttaatagttc

SEQ ID NO: 309627 - DNA, 122 bp, Homo sapiens
tgggaggctcccaacacctctgggcccctcctcccagccttcagaacccaggcccatccgcgtctcaaaggacgaagggttcctgcgtgacacatcggagctgcctgcctgagggcttgggg

SEQ ID NO: 309628 - DNA, 122 bp, Homo sapiens
ttctggaatgccagagcttctgaaacatagtagagaggggtctcgaacattaggacatctcggacacaaggatattctggagtgctcatggattaacaatattagagttctcccctgcttat

SEQ ID NO: 309629 - DNA, 122 bp, Homo sapiens
gcccctccccgccggcagaaccgtcttggtgtcacggagtccaggtgcttcccacccggtcgcattctttgacatgcagattggatggtggagggaagagtccagcctctgccgagagcctg

SEQ ID NO: 309630 - DNA, 122 bp, Homo sapiens
agggaggggcccgggtgagggccaggctctcaggggtcgccgacccggggaacctgactgcgcacctcggggcccctcttctcaccccacagcacaggccagctcgtgttcccggtccccgc

SEQ ID NO: 309631 - DNA, 122 bp, Homo sapiens
cgacttacctcagcgaagcgcgcctctagctcctgttggcccttccggttcaccttttcccgccctagggcacttccggcttgaaggtcattagcctaagatacgtgggtaatcttgagcat

SEQ ID NO: 309632 - DNA, 122 bp, Homo sapiens
tgtagagtcacttggagacactgagagggcagacaaggcagacagagagagatgagacaccgtagttagcaggtatatatatccaaggagagagggagtactggagagataaagagatggtg

SEQ ID NO: 309633 - DNA, 122 bp, Homo sapiens
aagcgtgctttcaacgtgtccagctggggctggtacaaaaggtttccttctgccaggctccggttgctggcaagtgtcatttctttgttaagctgaacattctgtgtctgcaaggaacacac

SEQ ID NO: 309634 - DNA, 122 bp, Homo sapiens
ttcccagacggggcggcgacgggacagaggcggtcctcactttccagatggtgcagcggacgggcagcagcgcccctcacttcccagaccgagggaggtgcggggagaggtggccaggcaga

SEQ ID NO: 309635 - DNA, 122 bp, Homo sapiens
gagagtgacagcaaaaagagccagcctcttctcccaggcttcttagcaacctgcctgtctcggctccaggaggcgggttccagccaatggttgagccacccgcttccagccaatggctgagg

SEQ ID NO: 309636 - DNA, 122 bp, Homo sapiens
ctctgtgtgactttgcataagtcgtttgcattttctgtgacttggtttcctcatttgaaccgaggatctttaaggctccttccaactcaatagtagaataaatgtagctttatcttccctca

SEQ ID NO: 309637 - DNA, 122 bp, Homo sapiens
tatcccacctatccccacttggagttggagggcatatttgggggcctgcggggggctagccgactcagccaccctgccagagccagcccagccagggcggggatgcatgcaggcaagaagag

SEQ ID NO: 309638 - DNA, 122 bp, Homo sapiens
gagagagatgagagagagagaagaggggtctccaatgaatatgtgggaatatatggaaaacgcgaatatccaaatgatatttggaaaacttggctgtgttggggtggtcagggacccagcct

SEQ ID NO: 309639 - DNA, 122 bp, Homo sapiens
ttggggagggagtagcagcgacaggagcaggacaggagcaggatccagagggagcgaggccggtgccctggagtcctattccttgatgttcactgggccctgctcaggcttaacatttccgg

SEQ ID NO: 309640 - DNA, 122 bp, Homo sapiens
ggaaggctaatcatagcaattttagttgttttgggttctagaatatgttctatgccccagcgacttagaggtatcattatctagaactcttcccaaactcataagaaggctattattgaatc

SEQ ID NO: 309641 - DNA, 122 bp, Homo sapiens
gcggagcctcggaagatctaggaactgagactggcgggaaaacctggctgggagtgccggcggctgagagctgcggggcagcccctgtcacgtagcccttctaggttcctgtgtatggcgga

SEQ ID NO: 309642 - DNA, 122 bp, Homo sapiens
acctcttcagaatgtccagaggggagttgccttgcttacctggggggcggtaccctctctcgtgccctcacagggctactcagcctcaggtagctggtgccagaataacacagactcagctg

SEQ ID NO: 309643 - DNA, 122 bp, Homo sapiens
ttagcatggagcaggcctcggtgcatcggctttcagctaggcatgcctgccaatgttcaacgtcctcctgggatacggaaggcaccgtgatagacatctgggcaagtcaacaggaaggtgga

SEQ ID NO: 309644 - DNA, 122 bp, Homo sapiens
cagggacattcccttatgtctttttgatgcaggaggtttaagagtctccatcttaaagcccgctgagttggctgaatgctgactttaggtgcccactatgagcagtgtagtgcccagtcctc

SEQ ID NO: 309645 - DNA, 122 bp, Homo sapiens
caacgtgtgcactctcctgggctgttgcttgttggcctttgaatgagctgctcgtgcctccgtctgtcttgcacaggggatgcacctcagctgtggctgccctctgaggtgcttcatgccgt

SEQ ID NO: 309646 - DNA, 122 bp, Homo sapiens
cgccgcctctggtatgtcaggggccgggattgtatttcgaaagatccgccattttcacctcgtcatcaccatcacagctcagcagcttccccgacagccggagcccgggccgccgccgccgc

SEQ ID NO: 309647 - DNA, 122 bp, Homo sapiens
ctgcaatcccagctgcatccttggtccaccctcaggtaatcggagaagagccacttccatcgtacatcacattttacataccacaatgagatgtcttggtatgcctgccaaaggaagctggg

SEQ ID NO: 309648 - DNA, 122 bp, Homo sapiens
ggcagctggggatgggcaggctgcagcgtgggcaagacgaggtggctgctgtgactctgccgctgaaccctcaggaagtgatccaggggatgtgtaaggctgtgcccttcgttcaggtgagt

SEQ ID NO: 309649 - DNA, 122 bp, Homo sapiens
tatgcccatcacaggtccaaatgccatttactttgcagcaagtttatctgtgcagctgaccgtctactgttagaccgtggcaaaaggattctatttttccacttttaccaaagcaggcagtt

SEQ ID NO: 309650 - DNA, 122 bp, Homo sapiens
ttgctcccagctttctggagacgttcaggaaacctcttccttgaaagagggagggcagagcgagcccctgcccccagccctggcctgagcagttgggagggatcgcactggcccttccggtg

SEQ ID NO: 309651 - DNA, 122 bp, Homo sapiens
cgaaaagtcggcacagaaagtcttaatcaagtatgggaatgaacccctgcggtccttgtccgagtctgaggatcagtcctttcagcgtttgtcttatgagctggctttcagtgccctgaaat

SEQ ID NO: 309652 - DNA, 122 bp, Homo sapiens
gagttagccttcactagaggttggggagtcagcttgcggggacgggactccgggaatctccgtctagacacaagcatcagcaagaggagggtcgcgggatttaggggagagctcgaagatca

SEQ ID NO: 309653 - DNA, 122 bp, Homo sapiens
cgggagaagttcatgggtccctttgcggattctaattcgatttggtggttcggctgcccgcggtgctttcaaagacgttttctgcagtcagaaaacacagcggtcatatcgaatcatgactg

SEQ ID NO: 309654 - DNA, 122 bp, Homo sapiens
gtgcctgtggtcggaggccacccgggccgtgctagcgtgttagggcagctccgagaaacccgcccagcgtggccgtgcatttcccttaagcccaggcctcggctgacagatgcgaagcggta

SEQ ID NO: 309655 - DNA, 122 bp, Homo sapiens
ctgccttgcaataaattccccaggctttatcaaatggccttggctttagaatttgcccttcgggacactaatggtagaggaaatagcttgtcattagatcaaaaaaattgtcatgaaagtcc

SEQ ID NO: 309656 - DNA, 122 bp, Homo sapiens
cgcgtccgctcccataacgccgtctgcggggcggggacaggggcggggacaggggcgggccgggcgtctagtttccctacgtcaccagggaagttctcactggacaaaagcgtggtctctgg

SEQ ID NO: 309657 - DNA, 122 bp, Homo sapiens
tccacgccaatgagaatgtgagggcggggcctgaatagacgcaggaaatggcgacggccgcgggtctgtgagcagcgggggcggggcctggttgtggcccctccttctcccgtccccaagtt

SEQ ID NO: 309658 - DNA, 122 bp, Homo sapiens
gagtatttactaagtactttctatttgcgaggccctgataaaagtactgtcctggccaggcgcggtggctcacgcctgtaattccagcactttgggaggtcgaggtgggcagatcacctaag

SEQ ID NO: 309659 - DNA, 122 bp, Homo sapiens
agacttcgtctaaaaaaaaaaaaagtgccctcttccatgcaagctccagttttaggcgagcgagccgggctctcctaaatagaaggttccaaccaatctcaccaggccaaaggggattttca

SEQ ID NO: 309660 - DNA, 122 bp, Homo sapiens
tatgaatggcttggtgccattcttggggtaatgagtgggttcttgttctattagcttcctcgagatctgattgttaaaaacagactgccacctccctcccctcactcttgctccctttcttg

SEQ ID NO: 309661 - DNA, 122 bp, Homo sapiens
ttcgggttttgtgtttttttgtttttttgtttttcagacaggatcttgctctgttacccacgctagaatacaatggtgtgatcgtagctcactgcagccttgttttctcctttgctagcttt

SEQ ID NO: 309662 - DNA, 122 bp, Homo sapiens
ccaggcctcacccttcgtgtgcccacgcatggaagagtcctgagccttgctgggttgaggcggttggtcattgtagagcaggaaggcgagctgcgggcggataaacggaggcaacgtgaaat

SEQ ID NO: 309663 - DNA, 122 bp, Homo sapiens
aggtgtcattggaaaacagcacctgcttgtctctgtactgggggttctgccagatgcacacgtgagctatgtgcttctccttgtacatggagacagctgtactttccaccaaggttgttccc

SEQ ID NO: 309664 - DNA, 122 bp, Homo sapiens
gatttggtggtagtggaacagggtgcagaagtccacgtgggccgagaacgcctccaaagccgccttctctgccggactcgagtggaattcctgttacctcaggaagcaaaacttctctgtag

SEQ ID NO: 309665 - DNA, 122 bp, Homo sapiens
ccgccagggttttatgcttctgtacagacttctccccaccgctagtaccccaatgctcaccgtagtctctggcacatgcagtgtgttcatcaaatgtttgttgattgaccaaataaactatt

SEQ ID NO: 309666 - DNA, 122 bp, Homo sapiens
tccagtctagaccccgacctcctggggcagggaaagcaggcagactgcaagcagccaccccgcccagctcgccctgcccgccctgcccgccagggagctgaagggtccacccctcccgccat

SEQ ID NO: 309667 - DNA, 122 bp, Homo sapiens
cctgaagccattccaccctttcgttgcgtcagcattgacccagaagactcattttgaccccggcctgtcgtcatcgagagcaaggccacggcagtcacccgctgcccttgtgcgcaatcgct

SEQ ID NO: 309668 - DNA, 122 bp, Homo sapiens
cgccggctcccctgggcgcccctcagggcgccgtctatacggacatcccggccccggaggcggcgcgccagtgtgccccgccgcccgcaccccccacctcgtccagcgccaccctgggctac

SEQ ID NO: 309669 - DNA, 122 bp, Homo sapiens
gccgcccccgccggcttcttttttcttgttctctgctgccttcagcacctcgaaggggtccgattcgtcgtcaaataactggtcgaatcggttggtgaccacgcagccgaagccttcctgta

SEQ ID NO: 309670 - DNA, 122 bp, Homo sapiens
gcatgaggcggaacacctgcaccaccttgcccaggtggccgaactccttgccgccctggtcgcccagtgccacaccagccagcagcgtgagatagaagggcagcacagacacaatgtcgatg

SEQ ID NO: 309671 - DNA, 122 bp, Homo sapiens
ccataggccccctctgctgggacacacaaatcacgtgccctcggtttatattcttattggcggcatcagtacatgtgtcggcacgtgagaaatgctggtctgagtctttgcttttgggtatc

SEQ ID NO: 309672 - DNA, 122 bp, Homo sapiens
atcccctggctctggtcacactgagcagataacccaactcagggctgaagaagccttgcccgatttgttcctgtccatggggacagagtccactttacgctggcaggaggtgagtcacacca

SEQ ID NO: 309673 - DNA, 122 bp, Homo sapiens
ttttagggagtgattattatcatccttgcttcaaagttaaaatataaactaaactcctctcgtggttggcttggcctatacccagaaataagcaaagacaggtagccggtgaggtcagagtc

SEQ ID NO: 309674 - DNA, 122 bp, Homo sapiens
gctatataaacccctagttttagtcagggggatggatttgagacttaactcccatctccccggctgcagcacccaattaaagccgtcttccctggtaatgctcttcgtctcagtcagtcatt

SEQ ID NO: 309675 - DNA, 122 bp, Homo sapiens
gaggatacctcctgggttccaaagcgcgagttgaacctgagcttgacattcattccgtctcgtacaaaagccatgcctgcggggagagggagaaaatttcctacaggagcctcaagactgcg

SEQ ID NO: 309676 - DNA, 122 bp, Homo sapiens
gcgctccgtgctcctttcactttgctatccaaggctccagtgccaggcttttgcagcccgcggctctctgttaatatttggagcgctgctggctgctttgccacaggcttgacccagggcca

SEQ ID NO: 309677 - DNA, 122 bp, Homo sapiens
atccccgcaccgctctctccaccccgagtaaattcatgcgtcccgtcagagtgttaaaatcgccctagggctggttctgtctccggtcgttctgccgtagggctgcgtaggcagctgctttc

SEQ ID NO: 309678 - DNA, 122 bp, Homo sapiens
gaccaatgagagtgaagcctccggggagagccaatggggtccttccttggcgggagggggcggggcgctccaaggtcgtctatcccctttaaacaacacagggcggacaaaccggcctttcc

SEQ ID NO: 309679 - DNA, 122 bp, Homo sapiens
aggggagccaggagggcctggagggggcgcctctgacaccggaggacctgatgggtgtggcggggagggtgggggtgccggaggaggtgacggtcctgaggagcctgctttgcccagcctgg

SEQ ID NO: 309680 - DNA, 122 bp, Homo sapiens
tgtatgtgtaattcctattccttagttttcatccttcaagcagttagtcccttcaaaacccgatgacaagacccaaacatattaaaaagtttagttggagggcccagggtgaaacacaaaaa

SEQ ID NO: 309681 - DNA, 122 bp, Homo sapiens
agccatccaatgcttgtcttctggtgccctcctccaggaagccattcctggtgccctgggcgctgctcccagccttgctcaccctgggtcatcaccgtttttggaggggtctgtgtcctccc

SEQ ID NO: 309682 - DNA, 122 bp, Homo sapiens
ggcactccgagtagccgcggcggccgaggccttgggcctagacgggcggatggagaggcccgacaagttcattgctaggaaatctagagagcaaaacaccaattgttatgctgaaggaggtg

SEQ ID NO: 309683 - DNA, 122 bp, Homo sapiens
caatatcagaacaaaaactgaactggtgaagacttctgcttttccctgaaactccttccccggcccccattccctctccacccctcccaccgctaccagctctttgcttacaaccccctctg

SEQ ID NO: 309684 - DNA, 122 bp, Homo sapiens
ccgcgcccccacgacccggaccggagagaggtcccaggagctgaggggttcgggctgggccgcgacgcccgctctctgggatcagcctgggggcgagggtcggcgggggcggctgagtcatc

SEQ ID NO: 309685 - DNA, 122 bp, Homo sapiens
tttgcagaatttaagtgccacataagtgaccacgtgggcaacgccctcggggccttaagccgcgccatttttggggctaggattggttggaccctccgtcacgtgacatgcagtcgccggat

SEQ ID NO: 309686 - DNA, 122 bp, Homo sapiens
agccgacccccgagcttcccaaaccgcttcccgggagtctcgagaacccaaatgaggaggcggggctctggctgcacaggcgcagaaggagcccaggagccccatcccagagtgctgcgcgg

SEQ ID NO: 309687 - DNA, 122 bp, Homo sapiens
cctttccattttccctgctcccctctgcagaagcctcatagggcccggcgcggcggctcacgcctgtcattcccagcgctttgggcggattgggtaggaggattacttgaggccaggagttc

SEQ ID NO: 309688 - DNA, 122 bp, Homo sapiens
ccgcttctcccccgcttcagcatcacctgccacttcttctcaatctgaagccactaagaacgatcaacaccagaccgttaaaacataaaccagtatgggccactaaataattcgtaaatatt

SEQ ID NO: 309689 - DNA, 122 bp, Homo sapiens
tccccgccgcccgcccgcccgcgggcaccgcgcgccccgcccgtcccgcctccgccccaccgagaaccgcgcgcgccctatcccgcggcccaaagccccctaactcaacccctaccggccca

SEQ ID NO: 309690 - DNA, 122 bp, Homo sapiens
gcacaggtctgggctgcgagttcaagcatcgcggcctcaggatgaggttcaagctgcattcggggcgtttgaggcctattcaactgggctgcaccaccccggccggtcccacagccaccacc

SEQ ID NO: 309691 - DNA, 122 bp, Homo sapiens
tggctaagctccccttcatgattcagcttaggtatcccccattcatgctcccacatcatccgatgctatgctgtgagcactactgtatccggtccctcactatatctagttgttccaaggca

SEQ ID NO: 309692 - DNA, 122 bp, Homo sapiens
tagaaaattcctgcagatggaggtttcaagggtcaatgctgccactctccctggtccatccgccttcagaaaagagacatggatggaatggatgtgggggtttctatcttctccacccccag

SEQ ID NO: 309693 - DNA, 122 bp, Homo sapiens
ctttaagacccttattcacccactgagtctatgccctggccgttctgccaacccccgccgcgcgctgcaggagtataagccagccctgctctgcgcttccagctgcgtctgcccaagcgcgg

SEQ ID NO: 309694 - DNA, 122 bp, Homo sapiens
agcatctcaaagagtaacccatatgtccttgagcagatgggaatgcaacagccttctggccggaacctgtctctttctttctttctttcttttgagacggagtttcgctcttgttgcccagg

SEQ ID NO: 309695 - DNA, 122 bp, Homo sapiens
aggagattgctacatgtaggcttatctggggaaaaaccagagcctcactttagtcccttccggtaattgacactactggacacccaggagggggaggagagagcttctcttcataaatgttc

SEQ ID NO: 309696 - DNA, 122 bp, Homo sapiens
atttcttgtgcaaaacatgctgaatacgattagcaatccccccgcaccgcggcgggcgcccgcagccaatcccgagccagagtttccgcgcgaccactcccagtttggtttcgtaggcgcgg

SEQ ID NO: 309697 - DNA, 122 bp, Homo sapiens
ggggcctgaacctggcagactggcctgggttcccgttccagcaaagctggacaggccagccggggcagcctccagggggccctgagctggatacagaattgatttttggttttaatgatgtc

SEQ ID NO: 309698 - DNA, 122 bp, Homo sapiens
actagattttagtgaaatggaatttctacctccagcggcccctggaacagtagcacacaacgatctaacaactgcttgtatgattggatggtgtaagtgcggacagaattagggaatttggg

SEQ ID NO: 309699 - DNA, 122 bp, Homo sapiens
gaactgttaaccattggctgaatatccttccagaggtttctgtatgcattactacacatgcgtccaattctagcaatatttggattctttttcattttacagtgtgatttaatttcagacat

SEQ ID NO: 309700 - DNA, 122 bp, Homo sapiens
ctaaataaaggactgattgattaggaactcagattgtgaagacagaaaggctcatgcttacgtctcatgtctactgtttattctgagtaatatattagaccagtgatgtaactttcccccct

SEQ ID NO: 309701 - DNA, 122 bp, Homo sapiens
actagttctttaaagaaccctcccaagggtattcccaagaaaaatatgtgtaggattccacggagagatgggcacactctgacagtttattcatttctcttctgatttcagctgacactgcc

SEQ ID NO: 309702 - DNA, 122 bp, Homo sapiens
ccctggactttggtatctcattcagctctgacctgcagactggaggccctgtgataaaaacggacaaaaaggctgaagagggccctccagaggaagtgaaactgaccaatcaattcgccaca

SEQ ID NO: 309703 - DNA, 122 bp, Homo sapiens
ccgggccaccagcgggtggggcctgtgggctctgtgatgtaacttgggaggggcgcggggcggggcctaggtcgcgggccatctgggctctggaaggaacccttagaggagcgggaggacgc

SEQ ID NO: 309704 - DNA, 122 bp, Homo sapiens
aatgggcagaccccaaggggccaaatttaggctaaaagaatctatatatcagagtctgggcgaggcggctcatgcctgtaatcgcaagcactttgggaagcccaggcaggtggatcacctga

SEQ ID NO: 309705 - DNA, 122 bp, Homo sapiens
ggctggaggaatgcttggtatgacacagggccagttgcagaggtggcaagtgtggggtcacgtgaggggtcagagctttgcccctctcaggctggcaaaaccctcctccaggccagtctgct

SEQ ID NO: 309706 - DNA, 122 bp, Homo sapiens
ctctgacgccctctgccggccgcttgcgcgcaccgcggacacgccgggtactggcctgcccggctctcacctgcccaggcccaagcagtcgctgtcccctgcctgtggccaggcccgctctg

SEQ ID NO: 309707 - DNA, 122 bp, Homo sapiens
ttatttattaatgtattttttgagacagggtctcactctgtcgcccagactggaatgcagcggcaccatcatggctcactgcagccgtagctttttgtgctcaagtgatcctcctgccttgg

SEQ ID NO: 309708 - DNA, 122 bp, Homo sapiens
cgggtctcccagctccacttaaacccctaaaacctgggacttctagcttgagacattccccgaccaccacccgtcacacacacgcgcgtgcgcgcacacacgcatgcacaccgattctctgg

SEQ ID NO: 309709 - DNA, 122 bp, Homo sapiens
cagaggaaggggaacccgtcgagcggtttggtgcgtgtgaagcgcgacatggcgaggaagcggacaagcccgggtggcccggcgtgtagagggaagggggcggggctagacgcggcctggac

SEQ ID NO: 309710 - DNA, 122 bp, Homo sapiens
cacccagcgccagagacgtgagtgctccaacggaggtggaagactgcggagcattgggggcgcggaggggggcggggtggggggcgggcactggaggccaacagcgcctttctcactgtaga

SEQ ID NO: 309711 - DNA, 122 bp, Homo sapiens
tacacaagcctgtgggtgtctgttaatgtacatttgtgtgcatatgtatgtagatgtgtgcgcctaccattgtgcccttgtctgtatttgtatgtgtctctgtgtgcatgcacagctgtgtg

SEQ ID NO: 309712 - DNA, 122 bp, Homo sapiens
ctccctggctccgtggtgcttcctggggtgggttggagctgctggcctctctgtttctaccgtctcaccctctcagagcttccgggctcttttctttgaaataatatgggtaattatcagaa

SEQ ID NO: 309713 - DNA, 122 bp, Homo sapiens
aaaggccttttcttggccggatctcctaggggactgccccaggggatggcagagagtggccggtgtcccacgcccctccacaggctgaacccctagaaacttcgccaggaactagctcaccg

SEQ ID NO: 309714 - DNA, 122 bp, Homo sapiens
gatcagagaaaagggatttgtatggacctgtgggaatgggccaaaaaaagcgcagatagtcgggaatcgtgttaatgcccatcagaggacattttccaagggaggtgttcaacaagtgtttt

SEQ ID NO: 309715 - DNA, 122 bp, Homo sapiens
tccaggataaggaaaaggaaactcagagactttaagtgacttatccaaggtgacacagcacggttagacccacaatgaaaacccggacttctgactccacagccagtcccacacagctcaac

SEQ ID NO: 309716 - DNA, 122 bp, Homo sapiens
aataaagttgtacgcggatttacgcctgggcaggttgaaatgcgtgtgccatgacagatccggaagcttgtctactcgaaggtccacatccaggtatgtttcacagtcatcacaactagatt

SEQ ID NO: 309717 - DNA, 122 bp, Homo sapiens
ccagctactaaaaatacccgcacgctgcccacctcccggcggggagaggcctggggcgggcgccagccccatccagcccgaagccggcgcctgctggtgtagagctgggtccccagagacct

SEQ ID NO: 309718 - DNA, 122 bp, Homo sapiens
tccgactgcaggacggagaacctgtgctgtgtggcggccgcggtggggcaaagaaagacgcgggctcaggacctcaggagccaggcttcctggggctgtcgcaagaatgacgattatcattt

SEQ ID NO: 309719 - DNA, 122 bp, Homo sapiens
ccttgtgcagctgcggttctcagcatccgcgggcggaggcctgcagccggtcagccggtgcgtcccgcccacggcgcggggccttctggcagccaagaaggaaatacagatgaggtgggcgg

SEQ ID NO: 309720 - DNA, 122 bp, Homo sapiens
ttaagggtcaaaacagatggccctccagcaatttgggcacttaccagagcagtggaaaggcgcaggatagccagcagggtccgggcagaagtataggtggcatccttactagcccaagcctc

SEQ ID NO: 309721 - DNA, 122 bp, Homo sapiens
gggttggacatgatatcccagtggtgcacgatgaccatgtctgcctgtgggtacaccttgcggtcggcagtgatgtggcagtcggctgtgccgggcaccatctctgaacagcgggacagagc

SEQ ID NO: 309722 - DNA, 122 bp, Homo sapiens
atctcgtgtggagataatgagaagcaaaatgtcttgtcaattcattcacccaatatttatcgagtacctgctggctgccagcacctgtttcctgtcttgctgtgtcgtccactcatggcctc

SEQ ID NO: 309723 - DNA, 122 bp, Homo sapiens
gctgcgagggcgaagcacgggcgagctgtcgttagggcccaggaaaggcccgttgcggggcgcacaggcgggcaggggaactcgcgccccgcgccgcgcgcccggcctcctgacgccagggc

SEQ ID NO: 309724 - DNA, 122 bp, Homo sapiens
gactttcagatttcccaaatgcttctgaagtaatacaactgggtgttttccagttatccccggtgacgcactctgttgaaacttctacttcaagttcataaagttttagcatcatgtttttt

SEQ ID NO: 309725 - DNA, 122 bp, Homo sapiens
ccgaagcagttccggttcggctccgagcagctgccggcgcggcggtgacggcggccgggacgatgcctgcgcgcagtcgccaccgcccccgcctccactccggctccccgccccgggctccg

SEQ ID NO: 309726 - DNA, 122 bp, Homo sapiens
ttttttcccccaggactcccgtgtatctactgaagggtttgcacacttctcaaaggacctcgcaccggccgcggtgctctgacaacgaccacaaaagaatctgtgggatttcccgggggagc

SEQ ID NO: 309727 - DNA, 122 bp, Homo sapiens
gagcccagttccagaacccctcgaacgctgggctggggtccagggatgtccccatccctgcgtcgatgggcacggcttggctgacgcacttccgcgatctgctccctccccaggtgtgagga

SEQ ID NO: 309728 - DNA, 122 bp, Homo sapiens
ggccacaccctccgcctggacgcagcagccaccgccgcgtccctctctccacgaggctgccggcttaggacccccagctccgacgtaagtccctctcgtgcgccacctccatccgctgcccc

SEQ ID NO: 309729 - DNA, 122 bp, Homo sapiens
ggacaagtccaaatacgacgagatcttctacaacctggcgcctgccgacggcaagctgagcggctccaaggccaagacctggatggtggggaccaagctccccaactcagtgctggggcgca

SEQ ID NO: 309730 - DNA, 122 bp, Homo sapiens
tatacagccccgcctccgctggaattgggttcccatccctgactcagaaagcaggggcggcgggaggtggctggctgagtccaggacagccacatacacgggttgcgaggctgcccacgctc

SEQ ID NO: 309731 - DNA, 122 bp, Homo sapiens
ccttcctccttggagagccgctagatccaatcagtgtttgacctggccgcgcggagggggcgggcccatgatacgcaatcgaaccccgcccgtctctcgggcaacgcctcctcccccccctc

SEQ ID NO: 309732 - DNA, 122 bp, Homo sapiens
tctcttcgtgctctcctgtcttcatgcagggaagtggctggacaactctacggggcgtggcgccggcaggagccagctctgaattccgccaaccacatcggttcgactgaaaacccacgaaa

SEQ ID NO: 309733 - DNA, 122 bp, Homo sapiens
catcctgtgctgaggatggtgcctcgcggagcctccactgcccctgtgtgctccgcaccacgtctgtctcgatggcgcccctcgaagacctcgggaagctccccgttcgctgtggccccccg

SEQ ID NO: 309734 - DNA, 122 bp, Homo sapiens
ccccccgaggtttcctcccagatctgttcccgccgggacctgaccttgcgcccctccaggcgccttaggtgtttgccaggcggagccttctgggaacttcaggccaccttcctgagcacata

SEQ ID NO: 309735 - DNA, 122 bp, Homo sapiens
atttttgcaggatgacggatttgaacgagcgtgttgcctcttgttctagtcttcagcctgcgttctcgcctgctgtattttctgacaacttattccccttttgtaggatctgtaagtctgcc

SEQ ID NO: 309736 - DNA, 122 bp, Homo sapiens
ccgcagtgcaacgtgtcctctctcggttccatttctggaggagctgatgcaattccaaggcgcggggctgggccagagctcggttcttgtgctacagtagaatagtgttccagcgtggctgc

SEQ ID NO: 309737 - DNA, 122 bp, Homo sapiens
aaaacaccattttttttttaaacaggaagtccagaggcccgggtccagggcatccagccccggatctcgaacgccctcctcgcccctcgccccgcgtagcccggctgcgctccccgctcccc

SEQ ID NO: 309738 - DNA, 122 bp, Homo sapiens
gagcggcccaccttcgagttcctgcagtcggtgctggaggacttctacacggccaccgagcggcagtacgagctgcagccctagccggccgcgcccgcctgcgccccgtgcccacctctgcg

SEQ ID NO: 309739 - DNA, 122 bp, Homo sapiens
cctccccgcccaggaatttcccccaagccaagggcctgcctctggctgagcaggtgagagcggctgagcccgtcccactcctctttaccagtgatggggcttcaccacttggaatcacaagc

SEQ ID NO: 309740 - DNA, 122 bp, Homo sapiens
ctgcccaggagctggagagccggggtcggggaggctggtgcccagaccatgaagaaggcccggctatggcgcatcactcccccgccaacatgcctttccctagcccttgcctctcccactcc

SEQ ID NO: 309741 - DNA, 122 bp, Homo sapiens
tggatctgaggatctgagtcagcgcccccttcctcccttctctttctcttaaagctgcaccgttgtttccccctgaaaggggattcccaggttgttttgcatttgtattaggaagtggaaag

SEQ ID NO: 309742 - DNA, 122 bp, Homo sapiens
accagaagcgcctcagctctgattggctggagctctgtgctatctcagccaatcacaagccgggctgtgctcctacaccatccgaagagcgaatcgtgcagagaccgtgtctacgattggcc

SEQ ID NO: 309743 - DNA, 122 bp, Homo sapiens
tcccggggtcgcgcgcttggctgtgaacagggtcttgaggttcagagtccgctttccaggcgcgtcttgatcttctccccttcccaggggcacctgccccttctgttctctccttctctctt

SEQ ID NO: 309744 - DNA, 122 bp, Homo sapiens
ctcagataaaaacaaaaatacatcaaaaatctttaatgtaagcacagaattcaatcatctcgtgtatgagaggttggatctgagacgtcttttgagtctggtcgtagtgaaggacgcaaggt

SEQ ID NO: 309745 - DNA, 122 bp, Homo sapiens
ctctcactccacatgacacggtacctctatggtcactgtagtcttgcctgtctccccactcgctctgccccccaccacatccatgcccttcctgacctttcttctctgccggttgctccctg

SEQ ID NO: 309746 - DNA, 122 bp, Homo sapiens
ggtggcagcaggcttggatgtcaccaagccaccgtgtttcatgctatttctggaagttctcgcctttgtggcctcggaaaggaaggcgatctggtgctttggggaaggccctcgggatgctc

SEQ ID NO: 309747 - DNA, 122 bp, Homo sapiens
gtgggatggagaaaaggtggcgcgggctccgcagcagccgcccaatggcactggagagggcgggggcggcaggggcgacgccccttccccagtgtcccccattcctccccgcggcttcgccc

SEQ ID NO: 309748 - DNA, 122 bp, Homo sapiens
gggagaaatatcgctgaattctttttctcagcaaggaacatccctgggaaagagaatatgcgcctgggggtgggtctatagatggcccccctgggtgtggccgtctactatggtcgaggctg

SEQ ID NO: 309749 - DNA, 122 bp, Homo sapiens
gaggcagatgacaaaccctctagttgctagaaaccaaactgctccccgagctggtgtttccgttttttgtactgactgcttatttgggcttgatatataatggtgaaaacaggaactgttta

SEQ ID NO: 309750 - DNA, 122 bp, Homo sapiens
acgttgatggcgaacggaagagggaaagaattgctggagcaatgtttgagtaagacgggacgagacactgtgctccatggaagggccgggcttggccagacaggtcttggacttggccgttg

SEQ ID NO: 309751 - DNA, 122 bp, Homo sapiens
gcaatggatttggctaggggaggcataggttaaactggaatttctcttggccagcgacaacggagctctccctcaggtactgggcagcatgtgagtcttggcaaagagaggtgatttctttt

SEQ ID NO: 309752 - DNA, 122 bp, Homo sapiens
agagaatatacatgtgtggatttgacaggcattgcttccacagcctggtccacggagcagcgtgccacccttggagctgagggtgtctcgctcacacgcatctcccacaccatcagggagat

SEQ ID NO: 309753 - DNA, 122 bp, Homo sapiens
aagttagtatcaaaggacagcatgtgtgtgcgcttgcgtgccagccccagcatgtgtctgcgtgtgtctggcgtggatagagtgtgcctgctggcatgtgtacatgtatgtgcatatgtatg

SEQ ID NO: 309754 - DNA, 122 bp, Homo sapiens
gccggggggttggcgcgcccctcgcgcggggagcgctatgagccgggcgaagggcggcagcgacagccccagcaactgcctctgccggcgcctcccgcaggccctcgccaactcgccccgcg

SEQ ID NO: 309755 - DNA, 122 bp, Homo sapiens
aggagtttgggggagacgagggacgcttggagatccctctaagtcagcggaacgcagggccgggctccagggaactacagctcccagcatgccccggggcccgcaaccgtccgccgcccggt

SEQ ID NO: 309756 - DNA, 122 bp, Homo sapiens
gatcaaattaggtaactgcacagcgctggggatgcagtaagtactcaaaaaggcaactaacgatggagttcataactttcgcagcctggctgacaactggggctgatttaaatatataccta

SEQ ID NO: 309757 - DNA, 122 bp, Homo sapiens
gtacctcactcctaagagacactggcaggtagttatcactgctctgtgacctgaaagttacgcctcccaataaaatgaaataaggtccaccaatgggagggaaccagctcagagcttcaggg

SEQ ID NO: 309758 - DNA, 122 bp, Homo sapiens
ctagaggcgggacgcggcagaaatcgagagcgcggtccgatgttgggcctaggcgatatccggaaccccaaaccctagttgtgcctcgagtcgactcggacaccaagaactcagacgccggg

SEQ ID NO: 309759 - DNA, 122 bp, Homo sapiens
cgggagcggctgttctgcatagcctgggcagacgttagcctgggaaacgtgtctgtcccccgcagcctctttttcgccacatgggccatcgaagggtccctgtacccagagcctcgtcagtg

SEQ ID NO: 309760 - DNA, 122 bp, Homo sapiens
agctagggggcaggggaggacggatagaatgacaacagtcgcccttaaccccttccctgccgccgcacaggcgaggactgagcacgcagctctgcctccatcccatccaccccagtgcagct

SEQ ID NO: 309761 - DNA, 122 bp, Homo sapiens
ggtgtcactctgtcgccctggctggagtgcactggcgtgatctaggctcacttcaacctccgccccctaggctcaagtgatcctcccacctcagcctcccgagtagctgggaccacaggcac

SEQ ID NO: 309762 - DNA, 122 bp, Homo sapiens
tccgctcggactgcagatgcccagagagtaggagcgcctggagaaggcggcggctggtcccgggccccgcgaacgccgccaggccggcggcgtgcgtgctcagcgccctgggtgggaggcga

SEQ ID NO: 309763 - DNA, 122 bp, Homo sapiens
ggagccaatccatgtgggtgccccggagcaagtggccggctgcgaaccagtttctgccaccgtcctgccgcagcttagcgccgggccggccagctccagcaccagcacagtgcggcttctgg

SEQ ID NO: 309764 - DNA, 122 bp, Homo sapiens
ccccaccaaagcccaggttttctcgggtgggggagatcctttcactctcttgtaagggggcggggacggccccagagatgctctggagatcctgactctgggctctggttgattcacagagt

SEQ ID NO: 309765 - DNA, 122 bp, Homo sapiens
cccttctacccctcagatcatggagggtgtgtagggggtaggggccttgaagtgcaggtgcgggtcaccccgaaaccctttggcaagggggtcttctagtagccctgtttttctccaccatt

SEQ ID NO: 309766 - DNA, 122 bp, Homo sapiens
cgggaacagcacgttctctctgattcttctttccaatgctccattgtgtggggacaaagccgagaagctccggttccccaggggtgtgccaggccaagacttcaggttacctagcacaggga

SEQ ID NO: 309767 - DNA, 122 bp, Homo sapiens
cctccttgggaggctcccagcattttgtgttgtctcgccattcttctctacctgcctcaacgtccctctgagtccgtgcagcccgcccacgccaccccacgtcctcaattttgcttctgtaa

SEQ ID NO: 309768 - DNA, 122 bp, Homo sapiens
gagaggtgttaaatatggttatttatgcactgtgggatgtgttcttctttctctgtattccgatacaaagtgttgtatcaaagtgtgatatacaaagtgtaccaacataagtgttggtagca

SEQ ID NO: 309769 - DNA, 122 bp, Homo sapiens
cctgcttctggagcaccaattaagcttttccgcgctcaggttgccttagaaactttagagcgcgtccgccccagccccgcccccggcctcgccccgagcttcgccccaagtccatctcgctc

SEQ ID NO: 309770 - DNA, 122 bp, Homo sapiens
attaggagaacttttagccaggaagaggaagttctgtgtattagaacctcactagagtagcgatcccaaggtaaaagtagagttgaaatacttggctttaaagcgtttgcaagtaaatctgc

SEQ ID NO: 309771 - DNA, 122 bp, Homo sapiens
agtagggagaaatattatgttgatagttgtttcatattctctcaggaactttaatgttcccgactcgggtgattccagctgtgttgctggcagtgttgtctcaaccctctccctaaaatgac

SEQ ID NO: 309772 - DNA, 122 bp, Homo sapiens
tactgcagctcacagctggctctgtgggatcatgtccccaaggctgaccggtgatgtcagcgcagctgcccctttcccagggactggggttgtctggtagagagccaggcggggctctgtct

SEQ ID NO: 309773 - DNA, 122 bp, Homo sapiens
cgaggacattccagtgggaccctcattggttccctgcaggatggtggattttctgtcagccgccccccaacccccaccaggttcctgagtccgtccctcgcctgcagctgccgctctgcaga

SEQ ID NO: 309774 - DNA, 122 bp, Homo sapiens
atttgagtacatgtgaatcatggatttggtattcaactttttccctggatgctttggaatcgtgtcttccatgctccactgggttcaatttaaaataggagaggctttctcttctgaaagat

SEQ ID NO: 309775 - DNA, 122 bp, Homo sapiens
acacttcctgggagacctttattgtcaaactcgaccagatttattcaacaaacagcaattcgagaaagcagtggaaaagagctgagtcacagtgaaagtgacatttccctttgcagctgaag

SEQ ID NO: 309776 - DNA, 122 bp, Homo sapiens
ctatggcttggggtcggcttccgtcccttgtagcactgccttctgggtaatgtagtttgacggaatccgggtggtacctggagcgcactttctgttctcggtgaggcggcttctcaaggctc

SEQ ID NO: 309777 - DNA, 122 bp, Homo sapiens
ctttcccggatctgctcgttcacggtgcccgggtgcgtgacacccatgtgtgtggctgtgcgtccaaaggttgagatgcaaagggcatgcggtgaactatctcaggtgaactatcaaggccg

SEQ ID NO: 309778 - DNA, 122 bp, Homo sapiens
ttaatccccggtgccggtgcggggatcagggcaacgtggagtgagacagcgaagggatggcgccgtgagccctcagcgcggggagacacacgccgggccggggcgccaggagcgggggtggc

SEQ ID NO: 309779 - DNA, 122 bp, Homo sapiens
ctcccagtgcctccgcttctgaagtagactctgcagaaacccgggaccacagggtaggtccgagcttttcctcttcccggctttgtcccctcccaggccccgcctcctcagcccacctcccc

SEQ ID NO: 309780 - DNA, 122 bp, Homo sapiens
gtcccggctccaaggcgcacccagagatgcggtgcatgtggcaggatggcccagccccgtcggcagccccagcttcctgcccctggtttccttcctcccacgggctacaggcctctgatgag

SEQ ID NO: 309781 - DNA, 122 bp, Homo sapiens
gcatacgcgcgtgaaactcagcctatttccgctctgccagtggcgtaattcctgtcggggcgtgtcttctcccggaaatggtctaagccccagctcctggcggagcgagctagcctgcgaat

SEQ ID NO: 309782 - DNA, 122 bp, Homo sapiens
catagggctgacagctgaaactgacgcatgaactgaggtggcagaactgctgggagcctccgttttctttgtttgctaaatagtaccgattacactggcagtactttccttgtgagagtctt

SEQ ID NO: 309783 - DNA, 122 bp, Homo sapiens
gtgtgcagcgctctcatgttgtggacgctgctgtgccaggctgggcgtccgtgcggagcgcgcccagcgctggagcgcgcctaagaggcgccctgcagtgtggctccggggtgtgggcgggg

SEQ ID NO: 309784 - DNA, 122 bp, Homo sapiens
gacgggcagcaaccccaggccgtccgggcgcgtggcgaggcggacgggaaggctcaggggcggcgaggtagagcgccaagcatcccgcgtcccagactgcacgccctgaccccgcggcgttc

SEQ ID NO: 309785 - DNA, 122 bp, Homo sapiens
cagtgtctgctccttagagagggacctgtggtgcctacagatgtccactatcctctcagccgaagcctcgtcagcctcctatcctgaggctgctgggctgcaaacaccaggagtcccacccc

SEQ ID NO: 309786 - DNA, 122 bp, Homo sapiens
gagaccaagggagggtgctgcaacagtccaggcagacggagtggaatgaaggtgaccggccgctgcagcaagctctggagtctcgcagttgggacgttaggggtaccactccaggacagagc

SEQ ID NO: 309787 - DNA, 122 bp, Homo sapiens
cagggaggatgatagtttttgtgaagggtataagaagagaaagaatgaggacaagattgccgaagagaaattgcacagaaagataatgcatgggaagggaaaactgaataggaaaagacgac

SEQ ID NO: 309788 - DNA, 122 bp, Homo sapiens
tgggaaccaggctgcctgctgcactcacaggccagcgcgagttctgggtgggcgtgggctcggcaagtcccgcactcagagcggctggcgccaccggccccgggcagtgaggggcttagcac

SEQ ID NO: 309789 - DNA, 122 bp, Homo sapiens
gactccgtggtctcctgcactgagctgtgatgaccatatccaggtcctgctagatgcatgcgtggggaggcagggtgccctgggttgggtcaatgatgagaaccttgtattatcttgaagag

SEQ ID NO: 309790 - DNA, 122 bp, Homo sapiens
ccagtaatggataattttaacacgtgccaacctctcctgattacgtgaataatttcactgcgtcttcacaacaaccttaactactattatcatcgttgcgttctggatgagagacctaaggc

SEQ ID NO: 309791 - DNA, 122 bp, Homo sapiens
gaggtcgccggacctttgaggggcattggaatcctgggctcctcctctgctgggtggagccgcgaaccctcgttctctccgcggttttgtgtgtgtgggggggtcctgctcaggaggggatg

SEQ ID NO: 309792 - DNA, 122 bp, Homo sapiens
aaatagaaaagcataatggaaatgggcacaaagctgaagacagcatccttcaaagacacacgacacttggatcccccgctgacgaaccgagggacctaccttttggattaggacgcagctgg

SEQ ID NO: 309793 - DNA, 122 bp, Homo sapiens
cccagctgcagacctccagaggccgactagagccggggtcagaaaacaggttttccctctcggggacagcgcccaggggaccggcattagaacatcggctgatgtttcatctggtcagggaa

SEQ ID NO: 309794 - DNA, 122 bp, Homo sapiens
attttagagattaaaaagccaggagtatctcagatgacaataattgggaaagaagataagcgaataagcctttaacccactctggtgccatagttatgataaatcccatatggtcaaattta

SEQ ID NO: 309795 - DNA, 122 bp, Homo sapiens
actttagagaacttaaggcttcattgttacaatgttttatttagaaccttccatcattaccgacgtcacccaaagccctaattgagggcttaatttctgggaaccttatactcaccattgcc

SEQ ID NO: 309796 - DNA, 122 bp, Homo sapiens
gcggttgtcaggggcgcaagcgtctcggggctgccagaatggctccggctcagggcgcggcgccagcgcctgtcatgtcccagctgcgcctctgggtcccacggcacctcctcaggttggca

SEQ ID NO: 309797 - DNA, 122 bp, Homo sapiens
cctgcacgtcactgaacttgttcttcacgctgttgagggctacgggcagctgcagggcagcggggcccacgggccgcgtggacagaaacgcctcgcactccttctgggctgtctccttctcc

SEQ ID NO: 309798 - DNA, 122 bp, Homo sapiens
actagagctcgctacttgtttagccggtataaggccagtcacacaatcctgcaaatttcccgcaacctcccgaaggggtcaaagcccacgccccagcaaaagcacaggcgctccccgcccag

SEQ ID NO: 309799 - DNA, 122 bp, Homo sapiens
ctagtgcgggacaggaggacacgggatcgtttcctggatctttgggtcccagggcagggacggcggcttttgttttagatgaagctgccggcctttagtgaacgggaccattgacggtgtcc

SEQ ID NO: 309800 - DNA, 122 bp, Homo sapiens
caaaattgaagtgacacagtgtctgaaatcccttcattagagatacatgcctttgatggccggacgtggtggctcatgcctgtaatcccagcacttcgggaggctgaggcgggcagatcacc

SEQ ID NO: 309801 - DNA, 122 bp, Homo sapiens
gttaatagttgaaagaacacaaagtaaaacagtagattctttgttcctttttctttctttcgtctcctctcagattggtaacatttggtattggtgaaggtattgtttggactgtaaattat

SEQ ID NO: 309802 - DNA, 122 bp, Homo sapiens
ggcgtggcatccagcacgcctctgcgtgtcacccatgtgcatcagccgcacagtcaaccgcgtgttgcccctcaccctgcccagctcagagctggcggcgtgtccactgtgagcaaatgatg

SEQ ID NO: 309803 - DNA, 122 bp, Homo sapiens
cttacccctcccaccccatccccgctgtgccccccatccccgccccttctatagctatttcgattcctggagagcattacacatgtgtcccatcccaggcctctagccacagcaaccacact

SEQ ID NO: 309804 - DNA, 122 bp, Homo sapiens
cccaggctcgaatgcagtggcgcaagctctgctcactgcaagctccgcctcccgggttcacgccattctcagcatcccgagtagctgtgactgcaggcgcccgccaccacgcccagctaatt

SEQ ID NO: 309805 - DNA, 122 bp, Homo sapiens
tctttcctcggcccaagccccggcgccgagcagagacgaccttagcggtcctacacctagcggtcctgcaggtccctgaatcctctttggatcagcgctgaggaaaggcgggagtgcggccg

SEQ ID NO: 309806 - DNA, 122 bp, Homo sapiens
ggtttcaccatgttggccaggctggtctcgaactcctgacatcaggtgatctgcccacctcggcctcccaaggtgctcagattacaggtgctgacagttttaaatggaaaaaggagcctgtc

SEQ ID NO: 309807 - DNA, 122 bp, Homo sapiens
actatttcactatctatgccaggaaagttacgtaaaaccacgcagaattttacctgacaacgaaatagaccttttcgttagatcctccaccccacctaaagcagttacacaggctgaaatga

SEQ ID NO: 309808 - DNA, 122 bp, Homo sapiens
gcgtaggttgccctggcaccgaagtccccggataccaaccagggcgggtgccccagcttccggtctgcccgttcaacatccttagtttatcatacatgccgtctgcgcccatctgttgcttt

SEQ ID NO: 309809 - DNA, 122 bp, Homo sapiens
tggacagccagaagcagttcagcggtccagaaatccagttcctgctttcgtgctccgaagcggatgagaacgaaatgatcaactgcgaagagttcgccaaccgcttccaggagccagcacgc

SEQ ID NO: 309810 - DNA, 122 bp, Homo sapiens
cacgcctccgcatcggatcctagtaagggagcggggttatcattttagcgtagcgttgcgcgtgcgcagagaggccgccgtagtttgcgttttcacctggtcgcccggcggccatggcggcc

SEQ ID NO: 309811 - DNA, 122 bp, Homo sapiens
gcagtgatggcagccgggcagggctcctaaggatgtctcttgtcctgggacattcttcagcgatgtcttttctgcatagtgaggactaaactctgaccttttcgtctcttgcccaaattcct

SEQ ID NO: 309812 - DNA, 122 bp, Homo sapiens
atcactcggcacctaattccgccaggctcccagaggggcggttgcagctacagcctagcacgccgcgtagccaataagaagccagaattccccctattctcaaatcctgaccaatcggtggc

SEQ ID NO: 309813 - DNA, 122 bp, Homo sapiens
tgcacccatgtggaccttctgaaaccgggaggctgtgccacgtctgtgggtagttcggtgcgcacacgctggatgggcacacgtgtgtgggcgcgtgcatgtgggcatacagtggcacatgc

SEQ ID NO: 309814 - DNA, 122 bp, Homo sapiens
aaaattccaccaaatttccaggatgcaaaagcacgactcgcagctcccaagagcctaacccgtggatttaaacggtaaacatcacaagttagggtctcagggactgagaggagcgcaacaat

SEQ ID NO: 309815 - DNA, 122 bp, Homo sapiens
gatcatcccagcaaaatgcaattaacagcgaaacacacacacatacactcacacactcggcggtgcggaatttttttaaaggacgtgttgttctgagttgaagaaaggtgagaagttcaccg

SEQ ID NO: 309816 - DNA, 122 bp, Homo sapiens
gcggcagcagcgatggtgagggcccaggcggggccggccagccctgcgacgggcagagggcgagtggcgagggtgggagagaggagtccaaagtccgcgggctggggcctcccctggggccc

SEQ ID NO: 309817 - DNA, 122 bp, Homo sapiens
gctgctggtgctcccgttccccagaccctacccctatccccagtggagccggagtgcgggcgcgccccaccaccgccctcaccatggtaagatccgagccaggacccgaactcctggggtcc

SEQ ID NO: 309818 - DNA, 122 bp, Homo sapiens
tctggggtcacaccctcacccttgcccaccctggagcccccgttttgctttgaggggacccgggccagtgactgtcgaatcacacctgaggccctgggtgcatcagtggccatgtgggggca

SEQ ID NO: 309819 - DNA, 122 bp, Homo sapiens
aggaaaatctgacatgagcatcttcagggcaaggaccatcttttagtgagagactgtattcgtccgttttcacactgctataaagaactacccgagaccggtaatttataaaggacagaggt

SEQ ID NO: 309820 - DNA, 122 bp, Homo sapiens
ggaagatcaacaggcttgaacgcagtcccatctcaaatccttgaagggcagtgggctgctcgaagcatgccaccaagctttggctattcaatgaaaggagccacagatatagacaaaaatgg

SEQ ID NO: 309821 - DNA, 122 bp, Homo sapiens
cggcccacgggtcgcaggagacgggacgccagtcctttggctccgttccgctggctccttcgtcagtactgacacctcgggcttgtagagcacttcacgcagtgcaaagcgccccccgtcta

SEQ ID NO: 309822 - DNA, 122 bp, Homo sapiens
aggaacctctctgagaaaccgcactgcgatgtgtacatccatctcacagagttaaaccttcgttttcattcagcagttctgaaacactgtttttgtagaatctgtgaagagatactgggggc

SEQ ID NO: 309823 - DNA, 122 bp, Homo sapiens
ggcttgtgcgcgtcccaggagcgcgctataaaacctgtgctgggcgtgatcggcaagcaccggaccagggggaaggcgagcagtgccaatctacagcgaagaaagtctcgtttggtaaaagc

SEQ ID NO: 309824 - DNA, 122 bp, Homo sapiens
gcgcccagttggacttggggagggctgcgcaaaggctgccgggagctgggaagcccggcgcgcgtcgtttgctggggctgtttgtgcgttgctgctgtgctaccgcgttgcgttttctaggc

SEQ ID NO: 309825 - DNA, 122 bp, Homo sapiens
ggccaacaggtagagaagcaaatacacacagtgcgtgtttgcggcgggggcttccatagacgtgcagacggcaggtcctggggtgcttcgtgggctcagggttcaccccgtggctgttggga

SEQ ID NO: 309826 - DNA, 122 bp, Homo sapiens
ccaagtgccccgggtggccaaggtcgccgccgccaggggtcgggctgcggggggtggggccgcggagagggtgggggcgggagttctgctgagctgcattttctcacgtttgcagcagcgaa

SEQ ID NO: 309827 - DNA, 122 bp, Homo sapiens
ataaaggttctgtaagtcccaccgcgggtgcatattgaaaagaaagggatcattagcacgcgaccctcgcctaggagtatataaaccgcagcacgactttcggatcacaaaggcagagaaaa

SEQ ID NO: 309828 - DNA, 122 bp, Homo sapiens
gacagcgatgcttaactgggggcttatgagtcgtcccagttcttggtgagaatcattcagcggagatttgggagcgctgaggtggaggttccggaaagagacgagatgagctgaaccttagg

SEQ ID NO: 309829 - DNA, 122 bp, Homo sapiens
ctcggctagagaggcccttcgaatgggcccaggactgcctggccatgtgatcagttcctccgctcagccattgttttcccattaaaacagagtgacaatcagcccctgccagctcggaggag

SEQ ID NO: 309830 - DNA, 122 bp, Homo sapiens
gtacctgaggccacacagcgagtgtgagagggtacctgaactggggctggaaccccaggccgttgcttctctgtggtgcttggttcttccagccttgctccccttccagcagggaggaggct

SEQ ID NO: 309831 - DNA, 122 bp, Homo sapiens
agatttttccttgttgcctgggctttggaaaggaagctgactccactgcagtactcagtgcgaaagtattgcatgaacaaattctacctaaaattaaaggaaacttgctatagctgagcact

SEQ ID NO: 309832 - DNA, 122 bp, Homo sapiens
tgctgatgggggactgtcctcatccctgttctgagctgtttcagcaaaagtctgaggggtcgctccagcgttgtgaccttagagcgtggtgatgggaaggactcagctcccaaggaatgtgt

SEQ ID NO: 309833 - DNA, 122 bp, Homo sapiens
cccgccgcagcctaggccccggcccccgccccggccccggccccggcgcggccctgggggcggatgcctggatgtggattttgccgtggggccaccaggctgttctcacgtgaacagcttta

SEQ ID NO: 309834 - DNA, 122 bp, Homo sapiens
cggagagctgggttatttcacgggaacagctggtgacaaagccggaggggtgtgcggggccggcgagagactgggattgtgtcttaagaggcatagggagccctgaaggggctgcgagctgg

SEQ ID NO: 309835 - DNA, 122 bp, Homo sapiens
ccgcggcgtcccctgccggccgggcggcgatttgcaggtccagccggcgccggtttcgcgcggcggctcaacgtccacggagccccaggaatacccacccgctgcccagatcggcagccgct

SEQ ID NO: 309836 - DNA, 122 bp, Homo sapiens
caccttgaaaccatattaccggtttatggtttcctaaaagctttttgtgtgattaggtttcgttttactgttaatcacaacaagaaacaggaagtgggtaaaaacaccaaagagaaagttgc

SEQ ID NO: 309837 - DNA, 122 bp, Homo sapiens
aggcgtgtgcctggctctagggggagacaggaacttttttacgagagaaaaaaatcctaacgcaatcccttcccgtggatgctagaggatgttagaccctgagcagcctccaggtagggcat

SEQ ID NO: 309838 - DNA, 122 bp, Homo sapiens
cttcagcttcagacaaaagccatgacacaagcataaaaaatcttaaacataacctcaggacgataagcaaggaaccatctgttgcattttatttatttattttatgacttggacctcccttt

SEQ ID NO: 309839 - DNA, 122 bp, Homo sapiens
gaggggtggggctgcgggaggccctggagcgcggcggtgatggcggggccggtgaaggaccgcgaggccttccagaggctcaacttcctgtaccaggtgagtctgcgacaagggccccacgg

SEQ ID NO: 309840 - DNA, 122 bp, Homo sapiens
gattacgggcctctcacttcgtaaatcacgcaggcctgaaacgctcacatttgtttaccacgagcatgtttgattttgtaatttaacaaataaaattgcagaggatttttaagagccctggc

SEQ ID NO: 309841 - DNA, 122 bp, Homo sapiens
ctatgaggagggaagtcaggagccaacgctcgaggggaatcaaatccaagtgactctcgccgacctgtggtcagaaaaccagcccaggagtcagaagctgggaacaggaagaaggcaaagaa

SEQ ID NO: 309842 - DNA, 122 bp, Homo sapiens
caaatagatacttgagttcccatcacatccaggcctttgggtgtgtatgaggccagtccccgccctggaggggggcttacaggatctactcttagctgtttttgtatcttttccagcattat

SEQ ID NO: 309843 - DNA, 122 bp, Homo sapiens
acccgagacgaaagcgcgtgggtacttgggagctgtcctggttggttttgcgtctaatcccgtcagttctcgcgatttaagctctgagactgagaacctacttaaagctatggcaaaggcac

SEQ ID NO: 309844 - DNA, 122 bp, Homo sapiens
tgtcaagatcttgtccaatcctagagtgagcccaaactcaggggcggagtttcatgatcccggaaccggtggtagtgtttgggtttgaggagagcacgacccagccctctggggtggggtct

SEQ ID NO: 309845 - DNA, 122 bp, Homo sapiens
agacaggaccaaatgggaggagcatgggggcgggaccggaggcgggggccgacggagcagcgttgggggcgcggcaggaggcggggccgagaaggaccctggagggcaagggggagctagag

SEQ ID NO: 309846 - DNA, 122 bp, Homo sapiens
acctctactgtggggcacatcttgagtcatctgctggagtaccattgtggatgggacagacgtggctccggcttcaccgagctgtagtgaagaatgaaagtcaacacactagcaattacaga

SEQ ID NO: 309847 - DNA, 122 bp, Homo sapiens
gctcagccaatcaggctccaggcgcggccagggggaggagatgggaggagaggccgggggcgatggagacgcggatacatcaacagaagtttctcacctaggaatgcgaggggcgctcccgc

SEQ ID NO: 309848 - DNA, 122 bp, Homo sapiens
gttttaattcagccccatccttataaagagataaaaaatgtgttcagaaacatgcaaactcgtggctgtcatcctgataaacagattttcttaaaggaaactgtaaaccagagccagactta

SEQ ID NO: 309849 - DNA, 122 bp, Homo sapiens
tacagtgagaacctcaggtcgtgaattaaaccggcaaatccagccagattcggtggctcacggctgtaccagctcacgtggctcccggcactttgggaggccgaagtgggcagatcgcttga

SEQ ID NO: 309850 - DNA, 122 bp, Homo sapiens
cagctgtgccgagcgctgccctgggtgcatccgtggcacctctcagggccccatccgccccgtggctaacagagctgttggtagctattacccacgcctgcctcctctgctgagtgtgctca

SEQ ID NO: 309851 - DNA, 122 bp, Homo sapiens
tcatgccattctcctgcctcggcctcccgagtcgctgggactacaggtgcccacgcaccacgcctggctaattatttggtattttttgtagagtcagggtctcccatgttgcccaggctggt

SEQ ID NO: 309852 - DNA, 122 bp, Homo sapiens
atccagatggcggatcctagattggcagcctgcgtctctctagctaccgtctctatggttcggggaatctccaggtcggggcttgaccggtccgacttttgcgcgtgcgcgagtcctggcgc

SEQ ID NO: 309853 - DNA, 122 bp, Homo sapiens
gaggagagggcggggcctcctcctttcacaggagcagagcggttcccccgcccccgacagcgctttctgttgctaggcgacctccgtgcaatcccgcctgattatccctcgcctggcctgtg

SEQ ID NO: 309854 - DNA, 122 bp, Homo sapiens
taaatcggaatcgcacacgtctctacacacagcaaggccttcctcctggcctgtcgtggccgggtccgtgtgtctccccacacctcactgaaataaaccctggggacacattttagaacaat

SEQ ID NO: 309855 - DNA, 122 bp, Homo sapiens
cttctaaactaaccatgactagaaagtcactgctgatcaattctactaactaggtataaccgaagttatttatactgagaagtgaataattttagaagtttaaatgttttataaagaaattt

SEQ ID NO: 309856 - DNA, 122 bp, Homo sapiens
tctccgctccgcggcctccagaatggcctagctgatccaactcgctctgtacgggccccgcgcctctccctggcagctcgtttttctgaatcctgcagcagccaccaggctcttctcagggc

SEQ ID NO: 309857 - DNA, 122 bp, Homo sapiens
tgaagacctaactgaaaacgttaggggatcaggagaccaggacacctgggccccgagtgtcgggtcaatcctgggggcgtcctggggcagaggctgcggcggctgcgtccggggctggggct

SEQ ID NO: 309858 - DNA, 122 bp, Homo sapiens
ccgacctgaggcggggcctggagaggctgacggggcgcagggcaccctgggagtcgtagtcgccgcgggcgcgccggcgcagagcaccctgggagtcgtagtcgccgcggccgcaccggcgc

SEQ ID NO: 309859 - DNA, 122 bp, Homo sapiens
acctcgtgatccgcccgcctcggcctcccaaagtgctgggcttatgggcatgagcctccgcgcccggcccagagcattctttataaggccgaatagtttgcatttgaaggtggctcccccca

SEQ ID NO: 309860 - DNA, 122 bp, Homo sapiens
ggcagacgtcaccagcaggagcagcaaaggcagcgaggccagcacatgcagcatggccgtcgctagtgccagggccggaacccgggcacctggcaacgggcaaacgcccctcccccgggaag

SEQ ID NO: 309861 - DNA, 122 bp, Homo sapiens
ctgggaactgtagtttccagctggcagaacggagcgccctgggcggagtcacgttgggggcgcccaggccacgccaacgcgggcgcagggctgagtatgcgggaagccacgcagcgactggg

SEQ ID NO: 309862 - DNA, 122 bp, Homo sapiens
cccgcacaagggcgtccagtccgagtctgggccgcctgcccactgtgccctgcacaagggcgtccagtccgagtctgggccccctgcccgctgcaccctgcacaagggcgtccaggaagccg

SEQ ID NO: 309863 - DNA, 122 bp, Homo sapiens
tgagaagaatagtagaaaccagatgttatgcaatgcaacatgaacctagcattgaacaggcgatttttaataagaaatagagaatagagccaagagaagttctctaagacaatagagttggt

SEQ ID NO: 309864 - DNA, 122 bp, Homo sapiens
tgcatgccccctgagtccttggctccaagcccatcacagcaccaggacttgtccaggaaccgcagtccttgtggcctggactgccttttaaatttatttagcaccccagagcacttcaggcc

SEQ ID NO: 309865 - DNA, 122 bp, Homo sapiens
tctatcccgtggtgtagtcatattttcaaaaattatttttagattatgggatatttcaaacgtacgagtgagtattgctttatttattggtatttgcatatcaatacatttggagtatttac

SEQ ID NO: 309866 - DNA, 122 bp, Homo sapiens
gcaccgtgcaggtggcatggccgggagtgagtcccagagcctcccttgcctcagtgtaagcgccgcaccacgagatgaagggagcgatgtcatctgcttcccagggtgcggtgaaagttacg

SEQ ID NO: 309867 - DNA, 122 bp, Homo sapiens
ttacctgaatcaggctgctggtgactcaccagctcccctttaaagcaacatcaggttcaacgcagtgactgctcagtagaagccatggctcgcagacactgcttctcctactggttactggt

SEQ ID NO: 309868 - DNA, 122 bp, Homo sapiens
tcgagtgaaggacccggagccgaaacaccggtaggagcggggaggtgggtactacacaaccgtctccagccttggtctgagtggactgtcctgcaggtaaagtacttctcttcctggtcagg

SEQ ID NO: 309869 - DNA, 122 bp, Homo sapiens
ggcatggccagccgagccccgagacaccgccagccctgtaaagagaggacgggaggtatgcgccgggtcagctgtggccacacaccaagccatgttaactaacactcgcgttctccctggtt

SEQ ID NO: 309870 - DNA, 122 bp, Homo sapiens
gcaaacacatgaaggtaattacctctttattagcggtcggcggtttgtaaacactcggcccgacgccgggccgcggaacggaagcgcccgcgctgccaaccctctgtcttccacgttaaatc

SEQ ID NO: 309871 - DNA, 122 bp, Homo sapiens
tctcaccggcccctggaaagggttccaagtcctttagtacccgacgctgtctgggaattccgggcgtttcggctccttggtcgcagaggcaggaggcgtgcgtggcaggagggttcgggtta

SEQ ID NO: 309872 - DNA, 122 bp, Homo sapiens
agtgcccgcgcgcgccgccaggctcgcaagcaccgcgtaggccagctggccggatcccgccgtctgtcatggcggcccccatcctgaaaggtgaggtacttcctgctgcctgctccagcagc

SEQ ID NO: 309873 - DNA, 122 bp, Homo sapiens
gctgggattgttcaagggtcagccatgtctcttcccggcccaggaccaataatggcttcccgccttcggacagccccatgctttcccctggttattctaggcttgctgtacacatgcatgtg

SEQ ID NO: 309874 - DNA, 122 bp, Homo sapiens
catcttgacattgttacctaacttctccctgggactgaataactatcaggtgccgggtaccgctaataaacctcaaacactttgcatgccccagtgcataactgtcgccctcagactcttaa

SEQ ID NO: 309875 - DNA, 122 bp, Homo sapiens
agaacggacactgcaaaccgctcaccacctgggccagggctaggcctatccggcaggggccgtccccacactgaatcctgcgtgcgcagaactcaagccggcatccaggcagtgggaacgcc

SEQ ID NO: 309876 - DNA, 122 bp, Homo sapiens
ccaggtagccatctccatggaagtccagagtttccagagctgctgggtggtgacttcttccgttaagctctaaccttggggagggcaggagatgtcatcaaaatttgtttagttggttacag

SEQ ID NO: 309877 - DNA, 122 bp, Homo sapiens
accaggcagccccacgcggcgcccctcccctcgcccgcgcccggcagcgaagcagttaagcggctggcaacaagcagctcctaataaacactcggctaattctgtaggaaaagcactaatta

SEQ ID NO: 309878 - DNA, 122 bp, Homo sapiens
agctgggcccagggaaccatcaagatatggagacctgtagtggctccgaatacctggctgcgccgttatttattgtatacaaggcaagagggcagggtaaggagtgtgagtcgtctccaatg

SEQ ID NO: 309879 - DNA, 122 bp, Homo sapiens
tggagtttaatgcatgcctaacaccctactgaagtgatcaggtggctttttgcagcactgcgtgtctgtataatcaaccttaaatcaaaacagatggggatgacagaatatattaagaggct

SEQ ID NO: 309880 - DNA, 122 bp, Homo sapiens
caagcacatttaccattcaggctgcttttattcagggagtgaagccctgggtcagggctccggggagcttcacaaatgacctcctgctgcagactgagcaggagggcgtcggattccatgca

SEQ ID NO: 309881 - DNA, 122 bp, Homo sapiens
ccccatcccgccctcctccttctgagcctctagagcccattacatcactccgtacgccttcgcgtagtcagcctagctccctctgacaagtgagaacatgtggttttggttttccacgcctg

SEQ ID NO: 309882 - DNA, 122 bp, Homo sapiens
aatcgcctcattagcatatcaacaatagtccaattgctcgccagtaccacaatctgccgccggccgctccgacacaggtataaaggcctctctacgccgcgaacttgcttctagagcgcact

SEQ ID NO: 309883 - DNA, 122 bp, Homo sapiens
cctcagggctgaaacccttggtgaagtccttcatgcgactcagggtgggtcccaggtccacgctgctgcagttcaggagcacgctcagcaaggcatgagttgcacaagagttgggtatcagc

SEQ ID NO: 309884 - DNA, 122 bp, Homo sapiens
cgggccggtcacggcgaggggcggggcaggaaggcggtgtcgacggggaaccgaaggccccgccccgcgggaggtgccggccggccccttgggcgctacgcacgcgcacacaggccgaactc

SEQ ID NO: 309885 - DNA, 122 bp, Homo sapiens
tcgctgtaacatctcaggagttcaatgtttcaacgtgttctgtagattactgtgataacgcggcaagctgtcgtaagacttcttgctgcacatttctttttaaaatattctccaggagtctg

SEQ ID NO: 309886 - DNA, 122 bp, Homo sapiens
ggctccaggcccctcacagtgaccttgctctcctggcccccaacacgcaccgcctggggccgcccgtccctgtccttgtactgcacggtgaaggagtcaaagcggccctgggggacggtcca

SEQ ID NO: 309887 - DNA, 122 bp, Homo sapiens
tggagccggggaatctctgcaagtaactaaccaggcccctcggattcattgccactttcccgccctcggcccacgaggctgaggagctccctctcatcgcctctccgttcctggcaaggccg

SEQ ID NO: 309888 - DNA, 122 bp, Homo sapiens
acattcgcccacaacccggaggtcgggcgccttcgttgcctgcccctccttatgccggggcgccaggctctcccaggaccaagcgcaaattggtgagacgccactccatgcagactgagcag

SEQ ID NO: 309889 - DNA, 122 bp, Homo sapiens
gccgctttctccacctccccccgccccgcccttctctgataccttggcgaggccggcgcacgggcctggggacggggaatccagaaggcttctagaggctgagaattcctatccctcaccct

SEQ ID NO: 309890 - DNA, 122 bp, Homo sapiens
tgaagatggaccgggctggcggggcgggggcgtcggggagcggcgggagctggccgggggcgggagaaggcggagacaaagtcttgcttcccgaggggagatggcgccctcctctggaaggt

SEQ ID NO: 309891 - DNA, 122 bp, Homo sapiens
tctggaaaatctgggtagtgaaaatgacttcctcaaacagttgcggggaggatgacattacgtaatggacatgaagcactcagcactgagcacctgcacctgactacaggctcaggcggagt

SEQ ID NO: 309892 - DNA, 122 bp, Homo sapiens
tccttatgcaaatagagcggccgcgcggggctgggggcgggggcggggtgggcggtggcgcgtgggggcgggggcgggggcgcggccggcgctgggagggcggggcgctccaggtggccacc

SEQ ID NO: 309893 - DNA, 122 bp, Homo sapiens
caaccaggatcccggacaaagacctagagatccaagccgacggcaggccaagctctggcccgagactgaggcttctgcttctcaggagatgagagtttaacaataacttcgtggatttcaaa

SEQ ID NO: 309894 - DNA, 122 bp, Homo sapiens
caggtcgcggccccgcgcacgcgcgcgcactcacagctcatccactattgctcaggagcccgtccacgccctaaaagcaaaacccttaaccaatcattgcagccgcgtggggcatcacggga

SEQ ID NO: 309895 - DNA, 122 bp, Homo sapiens
ggctccggctgcgccacgctatcgagtcttccctccctccttctctgccccctccgctcccgctggagccctccaccctacaagtggcctacagggcacaggtgaggcgggactggacagct

SEQ ID NO: 309896 - DNA, 122 bp, Homo sapiens
gcatggccagtgcttgtcttagtgtgggaggcttggtgtccgcccctggccacggagtctcgtgtctcctgctctttcgtggacggcgctcacctacatcttacatgcaggtccctccatgt

SEQ ID NO: 309897 - DNA, 122 bp, Homo sapiens
gggctgacctggcaaaactttggcgtctctgaaaacctctggtaaccagctcccttctagcgtgagggagccgggaggcctccttctggcccggcagtgagagcgtcgccgcccgaccctcc

SEQ ID NO: 309898 - DNA, 122 bp, Homo sapiens
cgccagaggctccctctctctccctctcccgggattttgctgccgggctccctctctctgcggccctagagttaatcccatcagccgaggtgaggcacctgttaccccggccttcctcaccc

SEQ ID NO: 309899 - DNA, 122 bp, Homo sapiens
cccatccacggcagagtgggacgctggcccagcagggaggtgtggaccctgctgctcccccggcctcaaccagaaaccccaaaggagaaaccctcttctccgggtgcagcccaggaaagcaa

SEQ ID NO: 309900 - DNA, 122 bp, Homo sapiens
ccccactcctagattgagtggggttatctcaggcaaagagacaatgggacagacggccaccggcaccagccccagctccaattctgccgctcaggtggtgatcactctcccacatctgcctc

SEQ ID NO: 309901 - DNA, 122 bp, Homo sapiens
cgctacgtccgtaggcatcagtccgcgagaccggctgggagcctaggaagcgctgcagggcggtgaagacgcggtccgctctgggaagttaagagatggcgtccataaagcacatctcccaa

SEQ ID NO: 309902 - DNA, 122 bp, Homo sapiens
cgggtcgcacgccgccatcatgttcttggcatcgaacatctgctgggtgagctcgggcaccgtcagggcccggtactgctggctgccccggctggtcaggggtgcgaagccgggcatgaaga

SEQ ID NO: 309903 - DNA, 122 bp, Homo sapiens
gcttcgcccagctccgccattgttcgcctcaggctcgccaccttccgacagctgtgtttgcgcatgcgcgacgggtgtgcaccgcctctcgacttccggttcacccagcatttcctcttccc

SEQ ID NO: 309904 - DNA, 122 bp, Homo sapiens
gccagcgctgccttcgcatcagaaccccattttaaaacacatccaagcgcgtggcgtcatcgggacgacgggcttctccccagtagagtgtcagaccaacaccgccctgcacaaagctctgt

SEQ ID NO: 309905 - DNA, 122 bp, Homo sapiens
aaggcgcacacctttgcacccgcaagcacacatactgttcacacaaccgggtacacatgacggctagcccaggcccgccgcccacgcagtcgcaggccagggtacacacggccagcgccgcc

SEQ ID NO: 309906 - DNA, 122 bp, Homo sapiens
ggtaacatttgtctacaagcagattaggatactgagtttaatgtgcacgtgttttctatgcgagcccttgggatcaacacctgtggatagcaaaggaggggaaaaggattaggcagagggaa

SEQ ID NO: 309907 - DNA, 122 bp, Homo sapiens
acaaaagactactcaaagtttaccattccaactctaaggagtccttaactcttcacctcccggggcatccggccgccggggaccgcgtctcgggccagcgccgggcaccactctggtcccgg

SEQ ID NO: 309908 - DNA, 122 bp, Homo sapiens
aattgttaactactaacattgattctgtgatcttccttttaaactcatctatctatctatcgatctatctatccatccatccatccatccatccatccatccatccatccatctatccacct

SEQ ID NO: 309909 - DNA, 122 bp, Homo sapiens
actcacttttctttattctcacccacaagtttgtcagctgaaagtggcaccctgttttgccgagaagttccttatatttgataattctagatctgagaaacagactcaaattcttttttctg

SEQ ID NO: 309910 - DNA, 122 bp, Homo sapiens
ccgtccacggagatgccaacaccgcggcccgacttgatccactcacctccctgcaagcctcgggcacagcacctgcatatggggtggtctcaacgttctccccacaatagctacctggttcc

SEQ ID NO: 309911 - DNA, 122 bp, Homo sapiens
gcataaaatgcatggaaaaataatgaagaagcaattgattctgcctggtgaagtcaatgacgactttacagaagaggtgatattttacctggacattcaaatacacacagaaatttgccaaa

SEQ ID NO: 309912 - DNA, 122 bp, Homo sapiens
cttgaggggagaggacccacttccacaggcgttagaatgactctgagacagacgcggcttcgtccttgtatttgtcctatgcctatctgagctgtggcaagttcctactcttcttccccgcc

SEQ ID NO: 309913 - DNA, 122 bp, Homo sapiens
gtccaggcaagtctgggtgtttggagtcgaaaggagactagattgaattttatgttccaccggggagaaggagtcacttttgggcaatagagagtcaagggatacaagcctgacccaaggac

SEQ ID NO: 309914 - DNA, 122 bp, Homo sapiens
aagtttcctctaacaaccattccccctacacccccacctccattcagtattgtccaagaacgcattgctcttaggggacagtatgataaaagtaatgcacagagaacactggttaaaaaaaa

SEQ ID NO: 309915 - DNA, 122 bp, Homo sapiens
gccacgaaaaccctggccatgctgtttgtcaggcccacctggctgagtgcaggaagcaagcgcttttcaggagctcactgcaacaccgggcaaacacttcttccgccagggatgcggttagg

SEQ ID NO: 309916 - DNA, 122 bp, Homo sapiens
tcacttcccgctggctcccccgaccccgggccccaccgtctgctttttctgcctatgaaccggcccactctggggacctcgtgtgtggggagtcacacagtgtttgtccttttgtggcttgt

SEQ ID NO: 309917 - DNA, 122 bp, Homo sapiens
aatcagccgcaggtcactgtgtgctgcaccacgacaagcatgttcacctttgctcctcaccggggtccacacaagcgtcccgcgaggaccaacgctggggccggccttctgggtcacagtgc

SEQ ID NO: 309918 - DNA, 122 bp, Homo sapiens
gccccgccccttctcgagttctccgcgctcggcctccggacggctcagggggccacgccccgtcgcccggggccccgcccactcctcaagccccacgggactcccagcctacctccctcccg

SEQ ID NO: 309919 - DNA, 122 bp, Homo sapiens
cctgaggaaaacggattcttgggccctgagttgtgggccttacctttcctttcttctttccgtttccggggaagggaaaaggaagtgttgtttggatctgaggaagtttgcacagtagctgg

SEQ ID NO: 309920 - DNA, 122 bp, Homo sapiens
cctggaaaagaagcttctcttactgtttacatttggcactgagagaatgattaagttgctcggccaggtgtggtggctcatgcctgtaatcccagcactttggaaggctgaggccggtggat

SEQ ID NO: 309921 - DNA, 122 bp, Homo sapiens
ggccttccgcaaggcctactccatcaaggacaagctgcaggccatcgagcgcgtcaagggcggcgagcggcaggccagtgtgtgccgcgacttcggcgtgccgggcgggacgctgcgcggct

SEQ ID NO: 309922 - DNA, 122 bp, Homo sapiens
actcatcccatctcctcctgccgcttcatcctctaagccctccccagggaacccaggaggcgtctggaacctgttggggacagtccctcacacctgccccattgagtaagggttcatgtgga

SEQ ID NO: 309923 - DNA, 122 bp, Homo sapiens
tttgtggcttatcgcctctcatttattctgtgtgagtaggtagaaaatgagcatcacggacgtgctcagtgctgacgacattgcagcagcgctccaggaatgccgaggtagaggggacgtga

SEQ ID NO: 309924 - DNA, 122 bp, Homo sapiens
attctttccagaggcgccacagggcagtaatggctgatgggcaccccctggagtctgacacgttcttccgaatgcactggaactgtggcaggatcatcctgcagtcctgcagggggcgcttc

SEQ ID NO: 309925 - DNA, 122 bp, Homo sapiens
ggtgggatactaactggcccttcccctagataggaggccatcaagtgcagagccagagaccggccctgggcctccgcaggctcccccggagccaaagagaggccaaaccgaagcgccctgcc

SEQ ID NO: 309926 - DNA, 122 bp, Homo sapiens
gctgataggcttggctccatggagcagggttgaacaagttcaccagaagggaacacacagcgggaaagacttaggctagacccaaaggaagaacttccctgtaattgagagctgggcccaga

SEQ ID NO: 309927 - DNA, 122 bp, Homo sapiens
gatctgtggggtattgctgaaaaccactgagtcctctatcttcccacccttggtcagccccggttctcatctttaggatgttttgtctcgcctatcaagcatcgctgggagtcccccgaagg

SEQ ID NO: 309928 - DNA, 122 bp, Homo sapiens
agggtctcccgcccaaggtcatggccataacaacttgcaaacctcaggtgatggtggccacggccttgagcctgcagagctgccactatgatgcccaaagctgggttgcttctaggaaaggg

SEQ ID NO: 309929 - DNA, 122 bp, Homo sapiens
tcgcgggcggcggctgctggcttagagccaaaggaggccgggaatttgcccagactgaggcgtgtcctgtctcctgtggtggagctgccccctgggcctgctctctccaggctgcgctgaca

SEQ ID NO: 309930 - DNA, 122 bp, Homo sapiens
gtgcagctgtggttggagaacggtgacatttaccgagccgctgctctaacccaggccctgcgggaaccggcgtctcgtgggcactcggtagctgtgggcccggcctgtgcttggggtttata

SEQ ID NO: 309931 - DNA, 122 bp, Homo sapiens
aagttgggcgcggggactctgaggcacaaagcgagcagcgtgctggctgcaggctcccgccgcgcttgctgcgaacacgtgcagcagcggccgcggggccttggggcccgggggcccggaga

SEQ ID NO: 309932 - DNA, 122 bp, Homo sapiens
gagaggtcacaccctaattggctcttgtagaagtgacacgaaaacataggacagtgtggacgttactcttggctgcggcagcagcagcagagacaagtgggtcagcagaggcttcctaaacc

SEQ ID NO: 309933 - DNA, 122 bp, Homo sapiens
gtgtgatcttcaacaagtcactcagtctctgcaaacctcggtttcctcatctgtcagtcccgcttcctctttgctgcgcgcgctctcgttgcctggcaacgggaggcgacgcccggattgag

SEQ ID NO: 309934 - DNA, 122 bp, Homo sapiens
actggtcccaagctgtgatgtccgcttcctcctgtcagagagtggcagcaccaagggggccgccatggtgaccgcggtggcctcccgcgtgcaggcccagcggaagcagatcgacagggtgc

SEQ ID NO: 309935 - DNA, 122 bp, Homo sapiens
gaggagggaagcctaatgttatgctctttatgcccgaatttggcgaaatcgagccttgcccgctgttttttcctatgacagtgtctgaacctttctttttcccaggagtaggaatggcccct

SEQ ID NO: 309936 - DNA, 122 bp, Homo sapiens
ggaagattcctagttggtcatttacttcttttaactacatacagcttggaaattaaatatcgttagtattacataacctgtttcttatggtgaaatgtctgcgaaagtttacatgcaagtgc

SEQ ID NO: 309937 - DNA, 122 bp, Homo sapiens
gatgagcatgttgaagagcgtgcgtggggtcaaggaaagctgagcagcatgggccggccacgccaccaccgctgggggggtcctgcccctgggggtcatcactgccaggccagtgctaccag

SEQ ID NO: 309938 - DNA, 122 bp, Homo sapiens
aacccctgcctgtggaatacagacaccaagagactaagctcagtacctatctgagcataccgtgtgtttaacagcctgtggaaactgtcctgtccctgaagatacgctgtagattaatttta

SEQ ID NO: 309939 - DNA, 122 bp, Homo sapiens
tcccatggttaagatgatatgtaggccaatatacttttatatcaattgtttcttttctgccgatgatgatatgataataataactttaaaacagtaagctccagccagcacggtggctcagg

SEQ ID NO: 309940 - DNA, 122 bp, Homo sapiens
ccctgctgcgttcctcggctgggtgccggggtgtaggcagaggatataacagccaggatacgtcccagtcctcaaggaggtgcacataaataacacacgtgatggtgacgtgggacttagaa

SEQ ID NO: 309941 - DNA, 122 bp, Homo sapiens
gtgcccagccccggcgcccctgcagaacgagccattggtggcggtcccgatgccgttgtacgccgcagcgccctcctcgctgctcagaaccagggcgtcctcgctcaagttcaccagaactt

SEQ ID NO: 309942 - DNA, 122 bp, Homo sapiens
ctgtgacatctctaggtcccctgcaccaactatgaaaccaaatgcccagacttcttgctacgtgagataattaacgtttctgctgcttaatctcctttcagaccagtactctgttatttgta

SEQ ID NO: 309943 - DNA, 122 bp, Homo sapiens
catagctgccgcaaattcagccactttgccatctgtcctcttcgctggtttgagcctgaccgattttaataaatagcctttcattttgaaatatcaccacgggcttaacttttttcttcatg

SEQ ID NO: 309944 - DNA, 122 bp, Homo sapiens
tctgaactggaactaaaaggatatgtacatcagtattgacagacaacaagaagactgtatcgtcccatttatataaaattctagaaaaaaacaaatgagtctatagtgacagaaagcaaacc

SEQ ID NO: 309945 - DNA, 122 bp, Homo sapiens
cgggcggctggcagctgtggcgccgacatggctgcgctggtggagccgctggggctggagcggggtaagcgtgcgccagggggccctgcccacccgggccgcggcctacatacccagccccc

SEQ ID NO: 309946 - DNA, 122 bp, Homo sapiens
ctgagtctccagctcaaggtcaaaacgtccaaggccgaaagccctccagtttcccctggacgccttgctcctgcttctgctacgaccttctggggaaaacgaatttctcattttcttcttaa

SEQ ID NO: 309947 - DNA, 122 bp, Homo sapiens
ttattctaattttgtatcttcttttgattgtcctatcattgtgggtcccagtttaggtcccgtaaattattcagtcatttcccgattgtgggacattagattgtttttgaatttttacatca

SEQ ID NO: 309948 - DNA, 122 bp, Homo sapiens
actgggccacccgtacgcccctctatcagaaaccccccactattggccactggactttgccggttcgggctgtgattggtcgtagacagaagtccatcccctaagcaaccacctgacagggg

SEQ ID NO: 309949 - DNA, 122 bp, Homo sapiens
taaaagttggtgaatttagtattaaaagctctggcactcaaaacctcagtgtacagcaagcggaaggaatgggctgaagaagcagagagtacctcagatgacaccgtgtccctggtctctgt

SEQ ID NO: 309950 - DNA, 122 bp, Homo sapiens
gcccgcacccaccacgcacctggaagtttgtttgaggtcggcgcaggtgcaggggtggcccgagttgtaagaatggtatggtactgaaagtggcacgcggagttcaaacctacactctgttg

SEQ ID NO: 309951 - DNA, 122 bp, Homo sapiens
gcagggtgacgatctagggggagtcatgaatagtggaagctacccaggtcccctaacaatcgtaggaagaccaaagtcccagggggacttgaggatatgcagatatttctgtgcatgaccaa

SEQ ID NO: 309952 - DNA, 122 bp, Homo sapiens
aatgctgggattataggcatgagccaccactcccagccccacttttttcagactggaaaacgcacactcacatgtgcatctttaaatgatcacttgggctgtggtatggagaatggcgacca

SEQ ID NO: 309953 - DNA, 122 bp, Homo sapiens
tttcggtcaggaccacccctctcatcagccccgagggcccggcaagccgctgagtccctacgggacagcacggggcctccggagagctgtggctccctggcctcacctgcaccccgccagcg

SEQ ID NO: 309954 - DNA, 122 bp, Homo sapiens
attccatgaaagtcctagtgtaacccaccctctcacttgacagaatgggaaactgatacccggaggacacagctgggagtggccaagtggagacagctgggagagtgggtgaggaggtgaag

SEQ ID NO: 309955 - DNA, 122 bp, Homo sapiens
tacgaatgaatgattattgggaagtgagggatatgaatgctccatgtttttgggggaaaacgaaagtagtctttcattttgtttttgttgttgttgttgagaaggggtctcactctgtagcc

SEQ ID NO: 309956 - DNA, 122 bp, Homo sapiens
ccacctccacgcccggggccgtggcccccacatcactgtgcagctccccggccccagccgcgcctccggggaagcccgtttttaacctttcatccattgggactcaaaactgtgagacgcgt

SEQ ID NO: 309957 - DNA, 122 bp, Homo sapiens
caatagctgtttctgacattagtcttaggggttagtggaaagggctgataactcctccatcgctgaaatgccctcttcccctggcctccatcccccacactcagcaagtttcacactgacct

SEQ ID NO: 309958 - DNA, 122 bp, Homo sapiens
gcaatgtatacactttgtattgggtagttttcctgctcaaaacctttttctaactcctcccgccccgcgctttttaaagtccttacaggtgaggtggattcccgccctgggcgcctcccacc

SEQ ID NO: 309959 - DNA, 122 bp, Homo sapiens
ctgcgcctgctattcccctgcccttgcggactggctgcgcctgctgtttccctgcccgtgcgcactgactgcgcctgctgttcccctgcccgtgcggactggctgcacctactgttcccctg

SEQ ID NO: 309960 - DNA, 122 bp, Homo sapiens
caggagggcacctggtgcacacggccaccttctcgggatcgtggatgtaggggcagcgctcgccacggttgcacctgccgaagcggttgtagtacatgcagtactccttcctcttctccctg

SEQ ID NO: 309961 - DNA, 122 bp, Homo sapiens
tacgggaggaaatcatcagagccagagtgcactcaccacacttcccacacctcaaataatcggatgtcagagcagggaaggcccctgggaccatcaagtcttggggtctcagatgtcagtgg

SEQ ID NO: 309962 - DNA, 122 bp, Homo sapiens
taagataccagcacccttacatgttcttaaagtgtgtagtctcagagcaagcagcctcaacgtcatgtgggaacgtgtaagaaatgtgaattattgggttctcccccagacctaatgagtca

SEQ ID NO: 309963 - DNA, 122 bp, Homo sapiens
gccagcgccggaaaagatggcggtggtgcgctgacgtcacttccgcttcaacactctggccgggcgaggctcgtgggctccagtttcagccacgtaggaccgggtagaacacagaaattcta

SEQ ID NO: 309964 - DNA, 122 bp, Homo sapiens
acgttctccggagccctggccagcgcacgctcctccctgtccgggtaaactgaggcacagcgatgagagagatccagagcccagcgaaagcccccacggctgttcggcgtccccttccccca

SEQ ID NO: 309965 - DNA, 122 bp, Homo sapiens
ccagcttgtgaccctaagcagtaaggtcaatggcaggactcctagacccttgggatgagtcggctcctgacccctcacatggtagatagaagaggatagcgctatagaaatgaaggtttttt

SEQ ID NO: 309966 - DNA, 122 bp, Homo sapiens
gggtctcaccggcaccggcagcaccattacctgtgggaggtctggagggtgtgattcccacgttggttgtgctgcaaggaccagaggtgggacgtcactcagagttgggagcgctgtgtcct

SEQ ID NO: 309967 - DNA, 122 bp, Homo sapiens
cgggcacaccctcacccgggcacaccctcacccggacacgccctcgcccgggcacagcctcgcctggacacaccctcacctgggtacatcctcgcctgggcacagccttgcctgggtggcct

SEQ ID NO: 309968 - DNA, 122 bp, Homo sapiens
agttgattttttgataatctgcaatctggataatttgtactgctaaagttttaataaactcgacatgagaaaaacactttggtgtagtactgtgtgctgtgtttaactattttatgtatgca

SEQ ID NO: 309969 - DNA, 122 bp, Homo sapiens
ggccacggcggcaaagttgtgggtctggatggcgagcggcgtgatgaggctgctgagctccggaccgaaggcgaaggcgttgttggcgcacgaggccgacgagcaggccgcgcacggggccc

SEQ ID NO: 309970 - DNA, 122 bp, Homo sapiens
gaaaatttgctctttggggaaagaggcaacttcctttgcaggagatgagtatctcccggacgcgggctggacaggaatgcccaagaaggcacaatgtccattaagccggtgaatggcaggga

SEQ ID NO: 309971 - DNA, 122 bp, Homo sapiens
ggtgaaggacaagaccctgcaggagtcgagctttgaggacatcatggccaccaggtcctccgactggctccggcggcctttgggggaggacaatcagccggagacccagctgttctgggaca

SEQ ID NO: 309972 - DNA, 122 bp, Homo sapiens
cagcctcgccctccgcaatcaccgccagcaggcactcacctacgcccgcgctatgaccttcgcctggccctgacccacgccctcggcagagaccctcccctggccgaccctgacccacgatc

SEQ ID NO: 309973 - DNA, 122 bp, Homo sapiens
tcccgtggtcctcccatggaccaatacgccctttgaccccccccccagcccccactcatccggccgagttgggagagacatatccagaaggtcagaaaggccatctggaaggcacgtctctt

SEQ ID NO: 309974 - DNA, 122 bp, Homo sapiens
caggggggcgggacccggctggcactcaggaggttggtgaaataggggcgtggtctccctcgggggcgtggcgatccggctcaaaaggcggggcctgggtggaacctagcctatggcaattg

SEQ ID NO: 309975 - DNA, 122 bp, Homo sapiens
tttggcatttcctgtggtcaaatttttaatttctgaactttatcggatttccaaagataccgtcccttggctgtcttcattgatttcttcaaaggatttcctcggcaaagttaccctagtct

SEQ ID NO: 309976 - DNA, 122 bp, Homo sapiens
atacatactggctgtatacctcccgtgttcattcagctttcacttgatcactgcaaaaaacgaaattccgagtttggtgtgttgcttttgaaaagaaagattagtgtgttctgtaaaggtgg

SEQ ID NO: 309977 - DNA, 122 bp, Homo sapiens
actgcaccacccccaccctcgcacggccgggcagcacctgctctcgcgcccggcctccaccgcggcctcaacctcacttcccactgcatgctgggggaggtgaatacctggccgacagcgca

SEQ ID NO: 309978 - DNA, 122 bp, Homo sapiens
aaatgtggcatagcgtggccacatcaatggggtggtgaacagctttgaggtaaaggctttcgagtttgagactgctttcagaggactgtaggtaaacgtcggaaaactcatttaagatacta

SEQ ID NO: 309979 - DNA, 122 bp, Homo sapiens
ttcttccggctctctttcagccggcccctccagacgatggccattcctgttgccttggtccgcaggaacgatgggttatgcatgaactttgtagaacatggccttgtcttcaccaacgcgga

SEQ ID NO: 309980 - DNA, 122 bp, Homo sapiens
agccagggcagggcgatactcgagctagctctcgagatcagcgagaggttacttccggggcggcaccgagaagctgaaacggaagtggcgtacggcatgcgccggtggcgtgatggagcggc

SEQ ID NO: 309981 - DNA, 122 bp, Homo sapiens
tacctaaaaggtgttttccacgtggagtgggactgagaggcacaggtggctgaggggacccgcctgggatgtgaggcgcaggtgagtcgatgaacgccccctcctggtgtgagccgcccgct

SEQ ID NO: 309982 - DNA, 122 bp, Homo sapiens
ccatctcgttgagagagctgatgaaccgcggctcctgcacttccacttccttcagtacgtcggaaactactttgcagacttcccggatagttttggcaatggcagctttcctggcttggcat

SEQ ID NO: 309983 - DNA, 122 bp, Homo sapiens
attgctgcctccctactctcaggagtcggagtatgtgtctgcacacctacacgagtggatcgacctcatctttggctacaagcagcgggggccagccgccgaggaggccctcaatgtcttct

SEQ ID NO: 309984 - DNA, 122 bp, Homo sapiens
taggtgaatctggccgaggcttctgcgtcaaggacggcgcgggtcagctgaggccaagaccgcaggcactgccctaccgctctccagatcacagctccgcctctgcaaggccccggggaaac

SEQ ID NO: 309985 - DNA, 122 bp, Homo sapiens
ctggagtttgttccttctgatgttcggaggtgtctggagtttcttccttctggtggggttcgtggtctcgctgactcaggagtgaagctgcggaccttcgcggtgagtgttacagctcttaa

SEQ ID NO: 309986 - DNA, 122 bp, Homo sapiens
gatcgtcacttccggcgcgagaggccgggcaggccgggcagggagtgcgggtcggttctgcgtgcgctgccggacgaggctcccgccgccgattgacccgcgctccgcccgtagtcgggccg

SEQ ID NO: 309987 - DNA, 122 bp, Homo sapiens
agtacacaacttttgagactggcttttcctattcagcataatgcccttgagatccacccacgtggcagagtggatcgctgcggagtggcaccccggggcacccacgtggcagagtggatcac

SEQ ID NO: 309988 - DNA, 122 bp, Homo sapiens
cagcagttcaaaaaagttgttttgactctcatttttttccttctcagcatccacagagttcgcttctgtgtgagaaactcttaaattattgtttctcttggagtttttatgcatagcttaat

SEQ ID NO: 309989 - DNA, 122 bp, Homo sapiens
ccgtgtggcctgcggccggagaccgccccccgacccccaccccgcagcgcccgcacgcggcgcgcctctccatcctggccgcggtcatacatgcctggtggctccgctcacttcagctctgc

SEQ ID NO: 309990 - DNA, 122 bp, Homo sapiens
gcccttgaccagtgaagaggcaaggccagggctgagcctaagtcacaggcagaaaaaagacgcagaaacattggaataacgctccacacgcactgcttgattctgcgctagaaaccctgtta

SEQ ID NO: 309991 - DNA, 122 bp, Homo sapiens
atcagactcttacagccagtcattgaagtctcctttaaatgatatgtctgatgatgatgacgatgatgatagcagtgactaaggacacatttgggagtatttaatcaggtgtggctatctga

SEQ ID NO: 309992 - DNA, 122 bp, Homo sapiens
ggataaatatcatacccttggcattattaacactgtattctccacaattgctaaactgcacgccactatgtatatttgaaccgagagcaaatttactgtgacatcttagactaattttagat

SEQ ID NO: 309993 - DNA, 122 bp, Homo sapiens
gctcctggaccgaaagctgtggctggttgaggcgttgcctggcgacgtgttactcagtggcgcagtgcttccgtagaggccagctggttgctacgcagcaacaggaaacattccgcgctacc

SEQ ID NO: 309994 - DNA, 122 bp, Homo sapiens
actttcttcccttcatccatctacccacccaccagtaaatcaatgagtgcttgtttatcacgctcctgtagtgagtcaggtgttgtgcttgtgttttaaatatgtataaaacttgttctcta

SEQ ID NO: 309995 - DNA, 122 bp, Homo sapiens
gggctgcccatacgtcgcagactggggccagatcactgttttactgtggggctgcccatgcgtcgcagactcggggccagatcactgttttactgtggggctgcccatgcgtcgcagactcg

SEQ ID NO: 309996 - DNA, 122 bp, Homo sapiens
gggagggaacgacctcccacctagaagcaatgacagcagcgggggcgaggaggccgtgagcgccagggaggctgctccaggggaagctgggagccccacctgaccccggctggatcatctca

SEQ ID NO: 309997 - DNA, 122 bp, Homo sapiens
aacccggcagccgtggggggccggagggcagctgcggaggccaagtctcctccagcagctcggacactaactgtatcccccacaacccgcccaggtggttccacccacgcggcgccctgctc

SEQ ID NO: 309998 - DNA, 122 bp, Homo sapiens
ggtgggtgcaagatgccgctgccggttcaggtgtttaacttgcaggtaacgagccgaggccgccccgggcctccgcgcccccgcgccccccgccactggggccgggctgaggtcgagcaggg

SEQ ID NO: 309999 - DNA, 122 bp, Homo sapiens
ctggttgacagagcaagactctgtctcaaaaaaaaaaaaaaaaaaagaagaagaaaaaaacgaaatgttaattaattcatggtctacatgataaaacaatcctgctgctagggttatgtgct

SEQ ID NO: 310000 - DNA, 122 bp, Homo sapiens
caggtgattctaatatgcagccaagacctggaatcactgcaaaatcaagcaaggtgaagacgcagtaaatgtatcacctgtcatgtttgcttgtcatctgaatttaaaatgacctattctaa

SEQ ID NO: 310001 - DNA, 122 bp, Homo sapiens
ccagtgccccgagggcatcgtgctgctgctgctgcaggccatcctgggctccatggtgaacgccttcatggtgggctgcatgttcgtcaagatctcgcagcccaacaagcgcgcagccacgc

SEQ ID NO: 310002 - DNA, 122 bp, Homo sapiens
acctcaggtgatccacccgcctcgtcctcccaaagtgctgggattacaggcatgagccaccgtgcctagcctaggatgcatcattctttaatggagagatgagaggaaaaataaagttaaga

SEQ ID NO: 310003 - DNA, 122 bp, Homo sapiens
gatccggaacaatttctgcttcaacacaattgtccacggagggcaccagttccgtcccaccggcggaagcgagatctgcctagctactagacctgctgcctagctgtcattcggacaaaaag

SEQ ID NO: 310004 - DNA, 122 bp, Homo sapiens
ctttattgcccctgggtttagagtcaggtgtctcctcattagacagaggctccttcaacgcgagactggggttttgttcgccttcgtagaggatacaccgacagagtagcctcaagcgcact

SEQ ID NO: 310005 - DNA, 122 bp, Homo sapiens
aatgtaaccggagacccggctgcccgttgccatggggacggaaagctatgatgtcaccaccgtccgggtgggtgtgctggggttcaccctcccatttccccaagaccccctgccaggacata

SEQ ID NO: 310006 - DNA, 122 bp, Homo sapiens
gtgatttttctaacccaatcacagtctctctccccttaattactcttgcggctctgtcttcgtaagggaagtggcccggacaaaatacatgccaggcagtgcaacggctgctaggagaaagg

SEQ ID NO: 310007 - DNA, 122 bp, Homo sapiens
cttggaatgtagattcgcgtcgggcactatcagatggaaccgttttggatcttggccgcacgttgggaaacccacccggctttgctgagtgggtgccggggagggaagggtgaggggggacg

SEQ ID NO: 310008 - DNA, 122 bp, Homo sapiens
gcgtcacgtggcgggtgcgcgaagtagggccggcttgggagggcgccggggaggcggggccggctgggcgacagctgggagggggaccgacgccttcccggacagcggaggtcggggcgcca

SEQ ID NO: 310009 - DNA, 122 bp, Homo sapiens
cacgcgcggcactgtttcctgagggcctgatggtggacgtttgcaagacaaatccacatgcgcgttgtgtagacctgtaatcgtcacagcagtcatggatggattgtgtacactttcagatg

SEQ ID NO: 310010 - DNA, 122 bp, Homo sapiens
atctttacccacgaaattccctctgcctggagtgtacctgtgccctctagatgactcctacgtatccttccaagcccagccagacagaccccttctgctaaaatttttccttaccaacctcc

SEQ ID NO: 310011 - DNA, 122 bp, Homo sapiens
tggctcctcacccctgactatgtgagactctgtgctagtctacacagcaccagaccaacacgacttgctgtataataacccccatttataatagcctgcatttggaagatgaaaaaaataat

SEQ ID NO: 310012 - DNA, 122 bp, Homo sapiens
ctctttcatcactcagcccagcatctgatcacatcctctgtcactcagggactgagtgggcggggccttaagcattatccaatcagagacgctgggctggaaaccgtccaatcaggcaggca

SEQ ID NO: 310013 - DNA, 122 bp, Homo sapiens
cttgagtgtaggaccgttggcatcttaattaccctcccacacccaaggcttgcaaaaaagcgagccttctcttccctctccagtgcataggcatgagcacatggacaggtacaccaaaggga

SEQ ID NO: 310014 - DNA, 122 bp, Homo sapiens
agctagggtgagtgatcgagccacgcctggggtcccggcctgtcaccccgaagtccccgccgccttccaccctgtcaggctccaactctgggctccggcgcggtcccacctccggggggaac

SEQ ID NO: 310015 - DNA, 122 bp, Homo sapiens
agatacattaaaaattaatcaggggtgctggcccagtagcatgaatgtcaggtatggtaccgtcctctcacaggctgggaattctgaactaaggtgtctcaagatgttggcatgaaagatac

SEQ ID NO: 310016 - DNA, 122 bp, Homo sapiens
ttgtaagattttatcctcaatacagcattagagaaatacaaagagagctccatccaacgacgttgggattgaggccattgaaggcccctctaagttctgtaattttaggggtgaaaaggaag

SEQ ID NO: 310017 - DNA, 122 bp, Homo sapiens
ggccacccaggccaggatgtaggcgaaaccgtaggagtaatccgagttgagatgccactccgggtgcctcaccgtgtagatggccgcagcactcatcacgcacagacctggggaaggagagg

SEQ ID NO: 310018 - DNA, 122 bp, Homo sapiens
aaaccccgtcagaataaccacccgggacagcggtggtcgaagtaactacgcctaacttttcgctttccatcgtgtcccctccataaaaacactgctgggcccccggaatccaaaggcgaagg

SEQ ID NO: 310019 - DNA, 122 bp, Homo sapiens
ttgtgtctgtgtcacttccttcagaaatcgacgtggccgtcctcggaagtacccagtgagcgctcccatggctccccctgcagttgggggcggggagccctgtgcagctccttgttgctgcc

SEQ ID NO: 310020 - DNA, 122 bp, Homo sapiens
ctcctcaccacaccccatgtgtgatcacccttaaacagaaaacatgcacctaagatcctacgatgcgctgcccacctcacaaaaaaccggtgcctctaggtaagagcacctagctgacccat

SEQ ID NO: 310021 - DNA, 122 bp, Homo sapiens
tccattttagttctgaacagtctaaagcatgtgtatccaggggcctttctttggggtccccgtcccagcacccctcatctcccccatgaggacttcttccaagcccctcaagcctcctgccc

SEQ ID NO: 310022 - DNA, 122 bp, Homo sapiens
ttggggtgacgctgtgggagatgttctccgggggcgaggaaccctgggccggggtcccaccgtacctcatcctgcagcggctggaggacagagcccggctgcctaggcctcccctctgctcc

SEQ ID NO: 310023 - DNA, 122 bp, Homo sapiens
ccataaatatagcatttctgtacaaactgtatgcagaactgggctgcatcattgggaaagcgttaatagagtagttggcttccatgatatgcagaggacctaaagaaacctctttaaagtgg

SEQ ID NO: 310024 - DNA, 122 bp, Homo sapiens
tttcagcatcctttttttgggagggcggaatttttgaacgctgtttacaccggctttcagcgtggatctggtgaacgatattaaaacgccaattcaaaactgagattgtcatttttctcccg

SEQ ID NO: 310025 - DNA, 122 bp, Homo sapiens
gggcgccggccagccgctccgagtgcggggtccgccgagcccacgcccacccggaactcacgctggccagcaagcaccgcgcgcagcccctgttcccgctcgcgcctctccctccacacctc

SEQ ID NO: 310026 - DNA, 122 bp, Homo sapiens
ataaggacaaacgccagttgcctggccgtgggcagaggcagctggagacagggctgtgggcggcaaactccctgcggccaggagcaaaaggccagggccttctggaggagcagaggaaggag

SEQ ID NO: 310027 - DNA, 122 bp, Homo sapiens
gcctccgcccgccaagcctggttcggggggcgggggagggcacagagagggtcagagagccgcattccgggcccggggatgtcctacatatctatgaggtagggactaggaaaacctgcggc

SEQ ID NO: 310028 - DNA, 122 bp, Homo sapiens
ggctccggctccggctccggctcgggaggtagccaagctgtggacccagagatccgggatcgggatcggggaactgcgggcgagggcgggagggagccgcggacacacgccgaggcggccgc

SEQ ID NO: 310029 - DNA, 122 bp, Homo sapiens
tgaggcagataaaaatccagatgtggaatctctctgtccacattccagaggcacagaagacgcagaggccctggccaagctgggcacagagggcagctctgcagggcccaaggccgcgggat

SEQ ID NO: 310030 - DNA, 122 bp, Homo sapiens
gctccataagttcattcatttctgccctccttccaatgtcatcctctatctccacatacccgttctccccgactttgcccacatgaagctttctgatcgcgttcagaagcgccgccttgggt

SEQ ID NO: 310031 - DNA, 122 bp, Homo sapiens
gccccgggtgcttcttacgggccagggcggggctagccgggggcgggggctcgggctcgccgggaggtctgccccaccccggccgcctcaggcctcagtttccccgtctgcagtgcgagagt

SEQ ID NO: 310032 - DNA, 122 bp, Homo sapiens
cacctgctttcctaagctgctgtgggaactggcctgcggtccaggcactgtccactgtgccgctgccctcttttctctccagccagagcgcagtgcagccgctatggggagaaatccgccgc

SEQ ID NO: 310033 - DNA, 122 bp, Homo sapiens
aatgttgctgtcctacctccaaaagacggaactgtcccactggtaggaagggtccagtgacgttctagcctgcatcaggagccgggtaatggaacgggtacacagtcactggggagaagtag

SEQ ID NO: 310034 - DNA, 122 bp, Homo sapiens
cccctagcgacgctagcggtgtcacgctaggccactaaagccactcccacttggcctttacgctgtgtcacggagcctaagccttgcgacccagtctagaccttagatcctggggatgcagt

SEQ ID NO: 310035 - DNA, 122 bp, Homo sapiens
ttcagcaaatagcccaattctaccaaatgccagaagctgctctaagtgtattttcattgacggctcacaacaaccctgagagaggtactattatcatttcaattatagagatgaggaaatgg

SEQ ID NO: 310036 - DNA, 122 bp, Homo sapiens
gtgttaatctagtggtaggtttatagctgaagctttctacttaagccgggtttaaaaacacgtccacaaaaggatattttcttataaaaccagagttggcccggcgcagtggctcacgcctg

SEQ ID NO: 310037 - DNA, 122 bp, Homo sapiens
caggggcaaatgaccagaacacttgcagctggaaagaactgtagagaggactttggaaagcggagggttgacagagccggtagttgtctcctgtccattcatctcctaggctgaagctcctg

SEQ ID NO: 310038 - DNA, 122 bp, Homo sapiens
taatgtgaaagttgctcaagtgcagatttgcacgacagcctgcaaatgttcctttggagacgaaatggtttctcaggtcaatgatctgcatatttaaaagtctctaggacaccctaagatgg

SEQ ID NO: 310039 - DNA, 122 bp, Homo sapiens
aaattttaaaaagacaaagaaaagaagagaagaaggaaggaaagaaagaaagtgacagatcgtgagaaaacatttgcaacttgtaaaattaaaaagtaatatacagtggccaggcatggtgg

SEQ ID NO: 310040 - DNA, 122 bp, Homo sapiens
ctgtctgaagatgagagagaccaggctgtttattgcttttgggaggcatcagagtccaatcggcatgtgagtcacttttcagaggctggatcaacgggcagccccctggctgcaggagctga

SEQ ID NO: 310041 - DNA, 122 bp, Homo sapiens
acccagtcacctgaaaggaatctggaccccggcactttctagcagagcccggggcggtgacgcgcggtggcctgaccgtgtgacgatccgcgagtgcggcggggcggggcggggcggagcgc

SEQ ID NO: 310042 - DNA, 122 bp, Homo sapiens
tttccaggctttgtctgtgctctctcccctgttgctggcatttctatcagaataaattgccgtttgcccatcttgtctggtgtgacttttctatatactagttctttgacatgagttgctaa

SEQ ID NO: 310043 - DNA, 122 bp, Homo sapiens
gggcgcggccgcgggaccccaggcccggatcccgagtctccctttctgccgctgcaaaagcgttctttctgaccgagacctgcggccggaacaagtcccgctgggcctccatccagaaaaca

SEQ ID NO: 310044 - DNA, 122 bp, Homo sapiens
cttgtacaaaagactgaagagaaagaagcccaaagtatgtggagcaccctaaggcaggctcgctcttttgaatgagttcctagcatttgaggaaggagatagccagggagaaatggagaagg

SEQ ID NO: 310045 - DNA, 122 bp, Homo sapiens
tgatccccattttacagatagcggaactgagacagagaggttactcttgcccactctgcccgccaagtgtcctcacgttggggtggaagcccgttgcaagctgccaggcccctcgtagctgc

SEQ ID NO: 310046 - DNA, 122 bp, Homo sapiens
gccttcctcaagggaccagagggcgagccaagcccgtgcgtaaagctggagaggactgggcgcggccagcgcagagacccgctggcgttggtctgacacctcgtcttgggctcttgacacct

SEQ ID NO: 310047 - DNA, 122 bp, Homo sapiens
tccttgcagtgccagctccttcctcctgctctgattctgttcactcttccaccctcttcccgagtctcagatactgggcaatactccaactgtttgtgggtggacaaaacaattacatagaa

SEQ ID NO: 310048 - DNA, 122 bp, Homo sapiens
cccaggcggacccgctgatcatctagttagtgggggaggggcccaccaggggtcggggcccggggcagcccctccagggccagacaatgtgtcttcctcaggagtcccagcaacagaggggc

SEQ ID NO: 310049 - DNA, 122 bp, Homo sapiens
ccgtgtgggccccgggcatgtcccgtcggggacgcggaggaggggtccgcccaccacgtccggtccccgtgggtgcagcgcccttctgggctccccgagcgtccacactccctccttggcag

SEQ ID NO: 310050 - DNA, 122 bp, Homo sapiens
gtctcctttttttcttcctccctgctttgccgcgtgagattaccactcctcgggtcagctcgcgaacgccagggaggcgagtgtgaaacacacgcgccaacacccctcctcctcctcgtgcg

SEQ ID NO: 310051 - DNA, 122 bp, Homo sapiens
cccaagttaactgagctccccttggcgtctagacatccctcctcttctttctttctctgccgtgtcattccaccgtcgctcctctgctggtctgctggtctactggtcggccctggagcttg

SEQ ID NO: 310052 - DNA, 122 bp, Homo sapiens
caaagtagggagctttggaattttctttcaaatgattgaccaggtgttcggcacggttatcgagcaatccattgtacacccactgacgcgagacgccactcccacctctcactaaatcctcg

SEQ ID NO: 310053 - DNA, 122 bp, Homo sapiens
tgtgttgtccgtccctaagcacactgcgcatgcgcatttcccagggcaaggagggctctgcgcatgcggacagtgcaccctgagggaagaatcatggaaaaggggtgagtctatcaaaatct

SEQ ID NO: 310054 - DNA, 122 bp, Homo sapiens
tgtaaaagggggagagtagttcctaccttccagagttgtcttgagaattatatgagaatacgtacataaagcacttagtagttttgtcatatcaagtgcccaataaatgagaccagtattat

SEQ ID NO: 310055 - DNA, 122 bp, Homo sapiens
tgggtgtccggggtgtggatggtggtgacgttggaggcagagtccctcagcactccacgccgtagcggtcgaagttgcggagcagcaggccgatctccaggtgcacggtgccaccagcagct

SEQ ID NO: 310056 - DNA, 122 bp, Homo sapiens
tagcttcaggtaacaggcaattatgtgctttaagagagaacccctctcccaggaagtgaacgtgattggcacaccaactggggtaattcatctttccagggattaatttaagaaagggcatg

SEQ ID NO: 310057 - DNA, 122 bp, Homo sapiens
ccgccacctttcccatgaattcacctttctgtacacagcaagcgcctgagcggagacggccgacacgtttcccactgttaccccaggaaaccgcggctcctgagggggtcagggcctgggca

SEQ ID NO: 310058 - DNA, 122 bp, Homo sapiens
cctcctcgcccttcctctcccctcccctctccgcactcctcttccccccaggatcgcttccgctgcttcgggctcctgcactgccctggacgctatgaaactctcctttctcctctcccctt

SEQ ID NO: 310059 - DNA, 122 bp, Homo sapiens
aacacctggcttaccctctctgtgcctcagtttccttatgtgaaatgagggaactcacagcgtggctgtgaggactgaactagttagtatgagggaagagcatttaaaacagcccttggaac

SEQ ID NO: 310060 - DNA, 122 bp, Homo sapiens
aggccacggcgccggcccccagcaacagcttcagggccgtgcccatgccccggggcccggcgggcagccgtcccgccaagtccttcaagttctgggccatgtctgatcttgaggccggcggc

SEQ ID NO: 310061 - DNA, 122 bp, Homo sapiens
ggcctgtgctgtcccatatggtagccgctagccactagccgcatgtggctattgagcagtcgaaatgtgcgaaaattcaaattaaaatatgttgtatatgtaaattgcacaatggattataa

SEQ ID NO: 310062 - DNA, 122 bp, Homo sapiens
ccagacctctgcaaaaggcccaaaaccctgctagactcaggctccaacttgcccacttctcggggcagagctgccacttccacgaggtgctcctgctcccaaggggcagtgactatgttcct

SEQ ID NO: 310063 - DNA, 122 bp, Homo sapiens
caatgacaggctgtatatccagcggtggtcccataagactacaaagcagctgaaaattcccgttgcctagtgaggttgcggcgtgtaatgtcacagtgcaacacgttatcactcgtttgtgg

SEQ ID NO: 310064 - DNA, 122 bp, Homo sapiens
gatatggtttctgtaagatgaagcctggccattctaagtcacttgagtgaaaacagcttacgagcctggcagaagaataattcacaacataagaaaacactttctgatctttaaaaacattg

SEQ ID NO: 310065 - DNA, 122 bp, Homo sapiens
tagaggctacacgtggtctctcggatactagaactatctttcttgccttggaccagctaacgtgccttggttgcgccagtgtactgagccctgtggacatcacctcattaaatattcaataa

SEQ ID NO: 310066 - DNA, 122 bp, Homo sapiens
ctgcatcaagaaaaaaaaaagttaaacaatcttgtcaaatgaaggtcggggaccctagatcggctctgaagttacttggcttaaatagagacctgcgcagctaacccagcccagcgctcgct

SEQ ID NO: 310067 - DNA, 122 bp, Homo sapiens
cggccgggccgagagggcgccgtccccggcagtgacccggctcccgccgctgcgagcggacggggaggcctggccttccagtaaccaggatgccaccctccaacgctgccaggggcaaccgg

SEQ ID NO: 310068 - DNA, 122 bp, Homo sapiens
cccaaggtcacgccctctgtggttattggcaactcggggacgctgcccagctcccgattccgctcagcacctgtggacgcgggagcatctatcatcaatcctctgcaattctattttatgat

SEQ ID NO: 310069 - DNA, 122 bp, Homo sapiens
gagtccctggccagtgtgagtcctagcattgcaggaggggagaccctggaggagagagcccgcctcaattgatgcctgcagattgaatttccagaggcttaggaggaggaagttctccaatg

SEQ ID NO: 310070 - DNA, 122 bp, Homo sapiens
ggatctgggagaagggtggcttgggcactcccatggccactgcagctggcaccacatacccgaagcccacagcctctaggaccagagcagcactggggcttgtctgagtcctgtggccacta

SEQ ID NO: 310071 - DNA, 122 bp, Homo sapiens
agccctcagcggcgccctgggccccctttctcgcggcggccaggggagctgttcgcagggcgtccagacctcaggccactggctcactttcttggagtgggtcccaaccagggaacgagggc

SEQ ID NO: 310072 - DNA, 122 bp, Homo sapiens
acactcttcgggactgcgcggctggagatattgggtgacaggcgacgtgggctcctctcccgcttcctctctgcggaggaaaagaggcttaaggtcaagtgccctccaggggcctgttcttc

SEQ ID NO: 310073 - DNA, 122 bp, Homo sapiens
tctggtctcaagcattggtggccaaggtttggctctgaaaaccccattgctggccagacacggtggctcacacctgtaatcccagcattttgggaggctgaggctggtggacctcctgaggt

SEQ ID NO: 310074 - DNA, 122 bp, Homo sapiens
cttttgtcttgtctctgttttatccctaatgccttaaaagtgcccagcacaaaggtgaaacgcaataaaacattttcaaaataagaaaatttaatgattcgaacaaagcagtttcaatggtg

SEQ ID NO: 310075 - DNA, 122 bp, Homo sapiens
tcgcccaaagcctatagtgggggccgcagcagttccagtaacggttacagccggagtgaccgctacggagaagaaggctgctacgaggagtacagaggccgctcgcccgacgcccacagcgg

SEQ ID NO: 310076 - DNA, 122 bp, Homo sapiens
tagcgtctgtggtgggctcttctgggcggcgcctggcatagcgtctggggtgggctcttccgggcggcgcctggcgtagcgtctggggtgggctgttccacgcgggcgtctgacgtagcatc

SEQ ID NO: 310077 - DNA, 122 bp, Homo sapiens
agagaccccggggatggggtgggagcgccttcccatcgcgggctcaaaaagaaggaaggacgcccccaggggtcgtagaaggaggactagctccaagccacaactttcttcggacccaaggc

SEQ ID NO: 310078 - DNA, 122 bp, Homo sapiens
accaggtcacacggggagcctgtggatgaggcagaggcaggacttgggcctgggtctctgcgctaaatgactcctgggcatcctgctgaactctctcccagaaggagattggcctcacatac

SEQ ID NO: 310079 - DNA, 122 bp, Homo sapiens
tcctgtggacagtgagattgctacagttcttgaagactttcccacagtactcacaagtgtcgctgcgtctgccctcttttgagctgggcctgcccgggcccggaccactaatatggggcgtg

SEQ ID NO: 310080 - DNA, 122 bp, Homo sapiens
gcgcaagggcaggtgcgggcaaggaagtcccactggggcttttggggacccagcacagctcgggcgagtgggtgagggtagagaggatgcctcagtgcgtccggacaccaccgagaccatag

SEQ ID NO: 310081 - DNA, 122 bp, Homo sapiens
tccgacctctgctgtatcaggattcgattcttggtgttaaacaagacaacgctgaaggctcggtgcagcagccctgcaaaggtaagtgccatttgtgtgagtgcatgcctggagtctgtacg

SEQ ID NO: 310082 - DNA, 122 bp, Homo sapiens
tccctcccagacataggcacggggctcttggaagccactctcaatagatcgcagaacgagcgagctgcctcgcaaccgagaacccacggcgaccacacggcccgggaggccttccggctcca

SEQ ID NO: 310083 - DNA, 122 bp, Homo sapiens
aaaggaggattgaggaaactgattactttgagcaatgaacacctggttaatgccaggtagcgacatcttaagggaaaggaagttgagtccaataaggaagccaataaaaatcaagaggataa

SEQ ID NO: 310084 - DNA, 122 bp, Homo sapiens
taactcaattccatactcctcctcatcacctggtacctatgtgggaccccctggtggtggcggccctccaggaacacccactatgcccagtccctcagattcaacaaattccagcgacatct

SEQ ID NO: 310085 - DNA, 122 bp, Homo sapiens
gcagcgacttgaatgcggtaggccgccctctgggccctctcctgtctgggttgcagctggcgtttcgtgtcttggcagtaacactggcgtcaggactgtcaccggatggcctgtttttcaga

SEQ ID NO: 310086 - DNA, 122 bp, Homo sapiens
acatggttcatacaggaggaacgtacacagtgcaaatcttttcatatttggacataatcacgaggcactttgctgtgtgatatgaatttcttgaaggactgggaatagtcattaacttgttt

SEQ ID NO: 310087 - DNA, 122 bp, Homo sapiens
ttttcgctgcattacgcagccctgaccagcagggggaaccgcgttttcgcgcttcgagaacgggagcttagagcctcggaaatgcattgagcacgcaggaaagccaaccgactgctctttta

SEQ ID NO: 310088 - DNA, 122 bp, Homo sapiens
gatgttgtgactaatgtcatcctcccgccccctggatattacaaaccatatcacaaggggcgtgtacacacacttcgatattggtattaataccgtcctctccctctttgggtattcggtgc

SEQ ID NO: 310089 - DNA, 122 bp, Homo sapiens
agggcaggcagagcagggcaaaagccaggagcagggacgtccgggagcctggggagaaaccggagggcaagaagggagccgcagagcaagaggccagcactctccctgttccaggagctgtt

SEQ ID NO: 310090 - DNA, 122 bp, Homo sapiens
tctgggtaaaaacaaacctgagtgtctctgccgtgtgcaaattagcctggctctgagggccgcagggctgaatagaaactatcctcgagtgaataaaaatgttattaaatttaaaaccacag

SEQ ID NO: 310091 - DNA, 122 bp, Homo sapiens
ccgggatccgccgaagcgactgcggaggcgggtcccaggcctgtcccaggagggggtgtccgggagggggaccgatgcctacgtcagacaggagggcaggggactcgcgggattcgtgggga

SEQ ID NO: 310092 - DNA, 122 bp, Homo sapiens
aaagccggttttgctcactgtcgcctggcaaagcaggcgcttgttagcacccactgaatgcgcttatgtgctcagaaacggtcccattggttgggactaccttccccgatgcccatccgccc

SEQ ID NO: 310093 - DNA, 122 bp, Homo sapiens
tcaggaactgagtaaactgagtaaataaacaataacaagtctgtaacccatgacatcagtcgccagttggctggaggaggtgacttgatcttgcctgttttgggtcttttggatgttgtgtc

SEQ ID NO: 310094 - DNA, 122 bp, Homo sapiens
ggtctgcgatcctactcacgcagatgtgttgcgctcacggattcgccttggtttaaggcccgccgtctgggtgcgagctttctttgtttttagcccttcccgccattttggaaagggtaact

SEQ ID NO: 310095 - DNA, 122 bp, Homo sapiens
accagcctcagttgttctcgatctgctccaggtccagctcccagcgggcccgggggaagacgccctcctccccgacactgtccccatcacgggggtccccgctgctcctgcgggagccatca

SEQ ID NO: 310096 - DNA, 122 bp, Homo sapiens
cctgatactcctggttctgccgctccaggtcactgcggatctccgccagctgggactccacgttggtgatcagtctctgcacctgggacagctgggagctgtagcgggcctcgctctctgtc

SEQ ID NO: 310097 - DNA, 122 bp, Homo sapiens
caataaaataataggactaaggagtgggaggatgcttatcaagtgtaaatagtgtgcatacgtggccaggaaccctacagctaaggagtcaggctggaccaagggtgaggtggggtctgctg

SEQ ID NO: 310098 - DNA, 122 bp, Homo sapiens
aggcacgcgctactgtgaggtcaggacgaggaaaagagccaggacctttcacccagatcgcggcggcccagcaggacttgcccggagtgtctcatgcagacttttgtgtgtgtgaagaaaag

SEQ ID NO: 310099 - DNA, 122 bp, Homo sapiens
tgggctgggccaggccccgactcagaaccggacggaatcgagagatcttggcccgtcctccgtgccactcttttgagggtagactacatttcccagaaggttcagcggtttgagtcagcttt

SEQ ID NO: 310100 - DNA, 122 bp, Homo sapiens
cctgagtttgtgatccccaaaagcaaaacactgaactccgcgacgatttccacgcaccgccgtcagcttccggactccggcaccagcagcactggcctgcgagttccttttgcgcctgcgcg

SEQ ID NO: 310101 - DNA, 122 bp, Homo sapiens
tacttctaaatgcccacagggtgttcattagacagcgtggcctgaagtgtttcctgatgtcgagtcatggccgcctgggtttcttcacagctttccttttggagctcagggcggctgtcgtc

SEQ ID NO: 310102 - DNA, 122 bp, Homo sapiens
cctccttactcctgatacttacaagagaggctgagggcccggggccctcaccagtcatagcggcgggactgtcgggaaggggagtcctcaggtccctggatggccaggcggggaggcccctc

SEQ ID NO: 310103 - DNA, 122 bp, Homo sapiens
agggaagtatcctggagacagacatcaaaggcatccgagctggcagcccacaacaggtcacgctgtcacggggacgccgggaaccacatgaaaagcagagaattcacggggcgttcgatgat

SEQ ID NO: 310104 - DNA, 122 bp, Homo sapiens
ggtggatttgctgacatgcctgagtgttgacagggggcttggtgcaggaagggctcagggcgtgggtgttggccaggggtccaaagggacctctgcctcagagagcccagcccagacaggca

SEQ ID NO: 310105 - DNA, 122 bp, Homo sapiens
ggctaccctcgcgggtctgtattttgggatttcctgccagtgtctgtgagtcggggctcacgcccggggtgcgggtgccctcctggaagtgtctgtgtctcatagtgagtctgtctgcctgg

SEQ ID NO: 310106 - DNA, 122 bp, Homo sapiens
gcctgggaatcggggctagaggcccatttgttccccgccgcaggccagggagcaggcacgcgtaactgggtcagccccgccccgccccgccgcgcgctggtcacgccccctcgagcgcgggt

SEQ ID NO: 310107 - DNA, 122 bp, Homo sapiens
tgctctgctatagcaacacaaaacagagtaaaacaccatcttgcagtcatttttgtcttgcgcatttcttcttcctcaatgtctctacaatttaaatctgcatgttaattaatggtaaactc

SEQ ID NO: 310108 - DNA, 122 bp, Homo sapiens
gttttcgtttttccttgtccaccctaaaggttttcgtcaggatattcccaaagcctccgtcggtctgggggcaggagtagggagaagggatgaggtgactttttgggcggggtggggggaac

SEQ ID NO: 310109 - DNA, 122 bp, Homo sapiens
tgagcccttcctgatgtgactttattagacaaacccccactcccgccaggggtagacacacgagtatctgctttaggaagatttctgcaacacggcagggtgcaattcaaactctgggttct

SEQ ID NO: 310110 - DNA, 122 bp, Homo sapiens
ccacatctgtgaacgttttcatgctaaatctggccatttcagatctcctgttcataagcacgcttcccttcagggctgactattatcttagaggctccaattggatatttggagacctggcc

SEQ ID NO: 310111 - DNA, 122 bp, Homo sapiens
tacatacttcatttttccattcacccacttctccaagaccacttggctatgtatttccttcgtccacccaatgcttcaatcctcattttctctctattgacttcttttgaccttctctcaac

SEQ ID NO: 310112 - DNA, 122 bp, Homo sapiens
gggacattactgtacactttgggggactttataacagacgctgtacactgctggggactccgtaacagacgctgtacactgcgggggactccgtaacagacgctgtacactgcgggggactc

SEQ ID NO: 310113 - DNA, 122 bp, Homo sapiens
tgggggcggtttgagttagtgaaaatgtgtgtattaaacagatatgtaaatgacccctgccgagcgctgaaaatgaaggtatgaaaaggcatcatcatccgtggttcccacctggcataatg

SEQ ID NO: 310114 - DNA, 122 bp, Homo sapiens
gcgaccgcgcaggccgagccgaaagggagctccctgctggcggctgtggggataaacgcccggcctgcctggcagcgccagtgcgcgccgccagacgtgggccaggcgggccgggcgctgcc

SEQ ID NO: 310115 - DNA, 122 bp, Homo sapiens
taccctctgagaggcccccgcagaggggagcaggagagcagcacactagcatcctgctcgcggaagcctggaacgcaggacatggtttctgccagaaagagctgagccaggccaggctgcgg

SEQ ID NO: 310116 - DNA, 122 bp, Homo sapiens
taaggcgagctattgtaccatggtgagttggacatcgctgttttctcgtgggagccgtttcgagagagctctctgtaatgtcgccgtgtccttcgcctgcatacaaaatgcaaacacaagac

SEQ ID NO: 310117 - DNA, 122 bp, Homo sapiens
gggcggcacagcgatctcaattaggaaggtggccaccacgctgagcttgtgcagccagaccggcaggtggtgtgcgaaccaggcggcgggcgtgggcaggcactgggtctcgtagtggtagg

SEQ ID NO: 310118 - DNA, 122 bp, Homo sapiens
ggcattttgggggatgggcatggcaaacagcagtagagttctttaggaaaaaattagggacgttttcagcagctcccgccacctactatgtccgggttactgcgggatccacagaatggaag

SEQ ID NO: 310119 - DNA, 122 bp, Homo sapiens
tagcaatgggacccctggccccagtggggattgtcccgtacgtctgctcacagggggagacgcatacccgaggccccttctcagcagacagaacgaggacacaagtctcagggcagatacgc

SEQ ID NO: 310120 - DNA, 122 bp, Homo sapiens
tggtgtagcttactacatacctaggctatatggtatagcttacagactactaacctgtatcgtatgttactgtactgattactgtagggagttgtaacacaaaaaagtatttgtggatctaa

SEQ ID NO: 310121 - DNA, 122 bp, Homo sapiens
aattagcgcactggctcccggtgtcgcctcggccttagaaactaggacgcctctgcttctcgttagctgcagccctcgtgccttttatgctcagcagagtgacgaggccgctcgtggttttc

SEQ ID NO: 310122 - DNA, 122 bp, Homo sapiens
tctagcaattccactctagtatatactcaataaatgaaaacacaaaaatctgcacacaaacgttcacagtaccatcgttcctaatagcaaaaacaaaacccctttatcaattgacgaaatga

SEQ ID NO: 310123 - DNA, 122 bp, Homo sapiens
ccttctccgcaaaacctcggcaagcgggttagtgaattcaggtcactaagaagctgagcccgcggaaagctgcccaaacacccccttctctaggggactccccacgccccccgccgggacgc

SEQ ID NO: 310124 - DNA, 122 bp, Homo sapiens
acggaaacgcccctagcccgcgggcctcgctttcctctcccgggttcctgggtcacttcccgctgtctccagcccgagctcgtggccccaatccctggtacctccatcctctggtcacccct

SEQ ID NO: 310125 - DNA, 122 bp, Homo sapiens
gaggctccaactgggaagggaagtgagacggttgttcaaggccacagggctagtcgatgacgaagggatgctataattcagaggagcttagctcagaaaccaggaaatggtactgcctatgg

SEQ ID NO: 310126 - DNA, 122 bp, Homo sapiens
tcacctgtcagccacttggggcccagaaccattttatcaacatgtccccgcgctgatccccgggacctctgtttaggccacctcacttagcaagagggactcagcagatgggatggagtgaa

SEQ ID NO: 310127 - DNA, 122 bp, Homo sapiens
ctgcctcccaggttcaagcgattctcctgcctcagcctcctgagtagctgggattacaggcgtgagccaccttatccagccaacctgcttctttgtgtggcacaattgaaggcttttagggg

SEQ ID NO: 310128 - DNA, 122 bp, Homo sapiens
tctgctgtaccacgtgcacagtaccagggatccagaagagaaggctggttgccagggcaacggaagataaagcccttgctctgccaggctgctgattggctgagacaggtcccacctcctgc

SEQ ID NO: 310129 - DNA, 122 bp, Homo sapiens
gctgtggcaaagcctgcagagcacagctggaaggatgggttcagctgccatgtcttacaccggagatgctagagaagtgacagcctctttcagtgtcttagaggcccaaacagaaagaccca

SEQ ID NO: 310130 - DNA, 122 bp, Homo sapiens
tcccaccgcgagaagctcaccaagcctgaactcttcaatggcgcggagaagaagcgcaagcgcacgtccatcgctgcgccagagaagcgctcgctcgaagcctactttgccattcagcctcg

SEQ ID NO: 310131 - DNA, 122 bp, Homo sapiens
tagccaacgcggtgaccttgaccccggcccaggccctgctaatgaagaggaaagcccgtacgcactcggcctgacccacggcgaccctctgtgaccaatcatactaccaacctcttaaacag

SEQ ID NO: 310132 - DNA, 122 bp, Homo sapiens
ctgttatacatagcactggtaccgcaaacattttacttaaactcttaatagcatttctttcgccagatactttaatatttcaccttacattaatcctggattcacatttctttaattgaaat

SEQ ID NO: 310133 - DNA, 122 bp, Homo sapiens
taattattattcaacattaatgaatgttactgaacatgtacgatgtgcctacttctctctcgggtatcatgtgatacagagaagtataagacacagtccttaagagtgatacagaagcaccg

SEQ ID NO: 310134 - DNA, 122 bp, Homo sapiens
gcacccacaggcccccagtctgctgctgaccaaattcagctgggattgccgtgggccccacgcggttaagtggttaataagcaatcctccccgacgcgggctggaggtgccccgccttatgt

SEQ ID NO: 310135 - DNA, 122 bp, Homo sapiens
ccggccgttgcgcaactcagggcgtttgcaaaaaccacgtctgggaggacttggccgcaacgcggcgaacgggcgcgctcggggagtgtgggcggcggcgaatgaatgagcgagtgaacgaa

SEQ ID NO: 310136 - DNA, 122 bp, Homo sapiens
cacgtggggtagagccctgagacactaaatggcgggggggtggggggaggaaagggaaggcggcagagctccccgagccgggacagtcacttactctacaggcagtggggcccgacacagac

SEQ ID NO: 310137 - DNA, 122 bp, Homo sapiens
agtgtggacctgtcatgtgtgaacttgtcacgtgaagacctgtcacatgtgaacctgtcacgaggacctgtcacgtgtggacctgtcacgtgtggacctgtcacgtgaggacctgtcacgtg

SEQ ID NO: 310138 - DNA, 122 bp, Homo sapiens
aggttcctgtggcagagaaactcgtgaccggggagctgggttcccgctgggtaccccacccggcctcaggcaccgcctctacccgaaatgaatccccccgccgcccccccaggcctcctgcc

SEQ ID NO: 310139 - DNA, 122 bp, Homo sapiens
tagctgccttcctgtggggcagggctcgggacctgcagcccgccatgcctgaccctcccccgcactccgtgggctccaagcctccccgacgagcgccgccccctactccacgggcacccagt

SEQ ID NO: 310140 - DNA, 122 bp, Homo sapiens
tcaggggctgcagatgcccacgggaaaagagaccagagctgagtcacacagaagagtccacggtataacaatgtggaatgagggttctgtgctcaagctattgtgagactacaattaattta

SEQ ID NO: 310141 - DNA, 122 bp, Homo sapiens
tttacaggtgaagaaaagcctcagagtagctgaataaattttcacattcacaaagctgtacgagggaaagtgactaccagagtgaattccacacagatcatctgatgtcagtctttgatgtc

SEQ ID NO: 310142 - DNA, 122 bp, Homo sapiens
gtgtgtgtgttaccaatggcatctggttttgcatttggcagccggcgtcccttaggaggccggcctcttggaaaggatttctcagcaatccatggcctgtgaagagtcacactccccctgga

SEQ ID NO: 310143 - DNA, 122 bp, Homo sapiens
tgagaattacagctttgtagcttcgtatcccttttcagcaggagccagcataccactcctcgctcatttccccgtgtgctggcctcgctcattttcttttgcagggacttgttctgctgaga

SEQ ID NO: 310144 - DNA, 122 bp, Homo sapiens
gtgaaggtgcagccgtactgctggaagtaggccctgcggaggcacagcgtctcctgccctcgtcctgggcccgcgatcccaccccaggctgccgctggcctcttactgaggctggcacgaag

SEQ ID NO: 310145 - DNA, 122 bp, Homo sapiens
aaaagggcattgctgagtagaagcacctcttccctcctaccttgcggtttccccatgacccgccctaaccctcataaaaggatctctgctgcaagagcctcccaacccagggccttccctgc

SEQ ID NO: 310146 - DNA, 122 bp, Homo sapiens
gtcttgaaaagggaaataagttagaaaaggccgctgtctcagccatgccagcgcaggtggcggaggaggcggcgtatcagtgacagtggtgactgcgtgtgcatgcgtggcggaggaggtgg

SEQ ID NO: 310147 - DNA, 122 bp, Homo sapiens
gctaaaggcgggacgagactcgattgagcgcaattatgaccaatcaccttgcggaatattcggcctatagcgaaggaggagctcagaacaaaaaggagaccccacccccgccgacggtgaaa

SEQ ID NO: 310148 - DNA, 122 bp, Homo sapiens
ctccgggggctgggcatgaagagagccggtccagtctgtggtccccagctccagcggggccgtggcgtggcgcagcccctcagccctgactcccacaagaggacagcgagtcgtagagtgag

SEQ ID NO: 310149 - DNA, 122 bp, Homo sapiens
tgtccgaatgactggcttggtcactggaacacttagaaaaaagttgtgcgaaagaaggaacgctgaacctgtccacgggaaacgggagactcctatagcacagaaccgcgtgctggctttag

SEQ ID NO: 310150 - DNA, 122 bp, Homo sapiens
accagtgagataccatgtttgatactttagtgaattcatttcctaatagttttctgtgttcgcaaaggtatatgtgtagatataaatatattacacctacatagaaacgacggatcactcag

SEQ ID NO: 310151 - DNA, 122 bp, Homo sapiens
agaaactggctctgcaggtgctgaccttgcaggttcagatctgagagaggatttactcttcgcttagttgtgaggcccaagcgcagccccctcccctccccgggctgtgctttgtctcctgg

SEQ ID NO: 310152 - DNA, 122 bp, Homo sapiens
agaaccaggatccaaaccccagctgcctggctccagactcgtgttcccaaggtcccactacgcttggtcaccttactgcattatagtatcctggtctttggcagagtccacgtaaaagaagg

SEQ ID NO: 310153 - DNA, 122 bp, Homo sapiens
aaagatcccagtgctcaggccacactccacacaagtttaaacatctctggaagctgatcacggacatcttcctggctcacggtcagaactgagaaacaatgacatatctgctcactagttta

SEQ ID NO: 310154 - DNA, 122 bp, Homo sapiens
tcccccgtccactggcaggaagagagacagccttcagagagtttgggactctctcattcccggagaattaaaagcctccgagacatccattttagaagttctggtcaatcgttcttaaagtg

SEQ ID NO: 310155 - DNA, 122 bp, Homo sapiens
ttatccaggtgacacccacacccacaccttttccgggtgacacccacaccacaccttatccgggtgacacccacatccacaccttatccgtgtgacacccacgtccacaccttatccgggtg

SEQ ID NO: 310156 - DNA, 122 bp, Homo sapiens
tcctttatttaacgcagtgtttttagtgcatgctctcgtttggcgaaagagaaggttttacgttcagaatattaaaagggaccccgaggacaaagcaggatctcggaaaataagatcacatc

SEQ ID NO: 310157 - DNA, 122 bp, Homo sapiens
acgaagccagcgagaaagatccaacccgggccccctgcctgaaatgggacacggggatgacggggcaaagccgggcaaaaccgtgctcctggctctcgcgattcaggagacgcgccaggctc

SEQ ID NO: 310158 - DNA, 122 bp, Homo sapiens
ccggtctgagcagcgggtgtgtaaatggaacagtcccgagatgaattttatgggagtctgcgcaggtccttaatgtgtggctgtaccctccagccccatgtaccccacacgatggacagaca

SEQ ID NO: 310159 - DNA, 122 bp, Homo sapiens
ctggggcataggacctacgggcaactgagggacccactcacgtgcagccgccattcgcgccgcttccagggcaagcacccagtcagggcctctcgctgcgcgccctagaccgcgcccgcccc

SEQ ID NO: 310160 - DNA, 122 bp, Homo sapiens
ctggtgccagaaagcttgggttcgattccccgctctgccacctaggagaggtgcagtatccggttatttaatctcccatgtccggcgagacgcgcgctctgagtgcttccgaggtgcgggag

SEQ ID NO: 310161 - DNA, 122 bp, Homo sapiens
ttgttctaaggaaaggagagcccagcaagcccctgccttttggagaacaaatactgagaacgccccgtgcctgagattctctgagtaaaagcactttgcaaaatgttgagccttattctgca

SEQ ID NO: 310162 - DNA, 122 bp, Homo sapiens
gaccgggcttttcagagcctgggtgcgggcaggcttggggggccggcatgtggccttcagcggcctggtgggcctggagccggccacactggctcgcagcctcccccggctgctggtgcagg

SEQ ID NO: 310163 - DNA, 122 bp, Homo sapiens
gatcaaagctgtgggcaagctgacgccggtgagcatttcccagaggaccatgaacgtgtgcgtcttgcggtcagtcagcccagcgtctgtgagacggtgcctgcttgcatggtgcagtccag

SEQ ID NO: 310164 - DNA, 122 bp, Homo sapiens
gctttctcttcgcaatggactttgcagcaaccacgtcggccattggctcagctcggccctcgaccaatcagagctaaggttacttccacaccggtcgttcttggcaaccagtgggtaccgtt

SEQ ID NO: 310165 - DNA, 122 bp, Homo sapiens
cccctccccattcctggtgttatgtaacatttggggattaataccgcaggcgtccaggggcggctgccgggattcaaacccagcgctgccctttcctgggctgactgagcgactttgcgtcc

SEQ ID NO: 310166 - DNA, 122 bp, Homo sapiens
ccagagccatgggagccggaagtccaaggaactgtacctccatcatgacgactccggttacgtaaaaacattcaaacagaaaatgctggccaggctcatgcctgtaatcccagcactttggg

SEQ ID NO: 310167 - DNA, 122 bp, Homo sapiens
cgttatgtgggggtctggttgcggttggaagacttatccgagtcagggctgcattgccagcgcctttcccaagagtggaggttggcggtgcaggcggtgcggctgccagcctgagattgttc

SEQ ID NO: 310168 - DNA, 122 bp, Homo sapiens
cagggtgtttatgggccagcatatgccttcagttatgttgaaaatagctgatcatctttccgtacattctgaacatttctcagtttcagagtgctggccacaccaaagcatcagccctggct

SEQ ID NO: 310169 - DNA, 122 bp, Homo sapiens
tcatgtaagtagttatggcatgcagcttttcagtcactcaaacctgacctcttacactagcgtgccatagagcctacatttcctacactcagccaaattctttaaagagatatccatatttt

SEQ ID NO: 310170 - DNA, 122 bp, Homo sapiens
aggaacagcttcatgagttcagtagaagtaagctttatttgtagcttctgccttgtttgacggcgtatctattcagggaagcgcacagtaaaagaattccttagcatgatgtctgttttggt

SEQ ID NO: 310171 - DNA, 122 bp, Homo sapiens
caatatataaaggcatatccatagttctggtatctaccagagggggcaaatccccccaagcggctttcaacattccgcttcctacagtcggtgcgcacagaaccctcggggcctgtggggtt

SEQ ID NO: 310172 - DNA, 122 bp, Homo sapiens
cctccaagggatgagtcagacgtggagcagtgagaggggtgtgtgagcgagtgtggggtccgggcattgcacagacatgctggctgctgccatggggtgggcagctccaggtgccggcacgg

SEQ ID NO: 310173 - DNA, 122 bp, Homo sapiens
gttcctccccggagggcggggtgacgggtgcggcgccgaatcgcaacaaaaaacgctgctcgagggatgttagtaactgtctcagcttaagttgctgccttttagcttacagtttgtatcgt

SEQ ID NO: 310174 - DNA, 122 bp, Homo sapiens
gaccctgaaccccaaggccaaggtggccggagcgcaggcggcgctggcgttcaacattagcggggcgcggggtctgcaggacgtgctgaggaccaacctggggcccaaagggaccataaaga

SEQ ID NO: 310175 - DNA, 122 bp, Homo sapiens
ggcggcagtagggggagggatggtgcatcgaggaagccaaggtctcaccattttgctcggcgggtcggcggctcgctggctcgctggctcggagaagtgttgcgctcaggctggctcgcagg

SEQ ID NO: 310176 - DNA, 122 bp, Homo sapiens
agggattaaataacttggcagaggtctcacagtcagtaactgatttgccttccaggggttcgaatcctggctctgccatttggtagctgtctggacttgggtaagccattcaacctctctgt

SEQ ID NO: 310177 - DNA, 122 bp, Homo sapiens
cgatgtacttgcgctcctcctccgagatgctggggtgcagcgcgggggactcgtaggagacgagcagccagaacaggtaccagaagatcccgaagctgcctgggggggtcaggagggggatg

SEQ ID NO: 310178 - DNA, 122 bp, Homo sapiens
agggcggacgtggatgccaactgacaccagctcagtttcttctttggaaatacacacgtacgataaacgcaaaacgctggtcggccaattcgctatttgacagcacacataggttttcaaac

SEQ ID NO: 310179 - DNA, 122 bp, Homo sapiens
aaatagctggaattacaggcgtccgcacacccggctaatattttgtatttttaatacagacggggttttaccatgttggccaggttggtctcaaactcctgacctcaagttatctgcccacc

SEQ ID NO: 310180 - DNA, 122 bp, Homo sapiens
actcactgtcacgacaatagcaccggaaagatctgcccccatgattcagttatctcccaccgggtccctcatgggacacatgggaattatggaagctacaattcaagatgagttttgggtgg

SEQ ID NO: 310181 - DNA, 122 bp, Homo sapiens
tggggacaaagggctccatcctgggactgggggaggtggctgaggtgaataaagtgctgtcgagaaatcaactgcatggccttgagagatgagttaaccctttcaagacaccaggctaatat

SEQ ID NO: 310182 - DNA, 122 bp, Homo sapiens
ggggtcatcaagaagaagaggaggagggggtggctttctgatctcaggtgctttacctgacgcagctcacagcatcctcgcaaggcatctctctctgatgcccattatcgccaggtgtgaca

SEQ ID NO: 310183 - DNA, 122 bp, Homo sapiens
tgaagggcaggagggggctgagcccagaaagagcgggcagctctgccctggggcgcccgccgcctggaccctgattcctggcgctggggacccagatattactgttatgaataatagtgata

SEQ ID NO: 310184 - DNA, 122 bp, Homo sapiens
ccagcagctgcagagggtgcgccgggtcccccagcagtgctggcccacccacgctgcactcgattactcactgggccttagctgcctcctgaccgggcagggctcgggacctgcagcccgcc

SEQ ID NO: 310185 - DNA, 122 bp, Homo sapiens
ccggccctgggtgtggggaaccgcgctgaggagctggaaactttcccggcaggtaactcccgcagcccggactccgccgcgggcctgcgagcgccccgggcatggccagctgccagtgtgcg

SEQ ID NO: 310186 - DNA, 122 bp, Homo sapiens
ggggccctactccctctcagagatgacacacaagtgcccccaaagaagaacccgaggagtcgcaggctgggccaggctgctggcttccagtgacatcacatgactttggggccactgcctca

SEQ ID NO: 310187 - DNA, 122 bp, Homo sapiens
cgaatctgcgtgggccacaaccacaacattagtttgttgcttacactccctgtgctcatccggggctggcaggatccctgtgctcctccgagtggcacaggaaacttggctgatagaggcgc

SEQ ID NO: 310188 - DNA, 122 bp, Homo sapiens
agtccatctcactatcacccgcaatgtgaaggcaaaattcagagatcacacatgttcctgcgtcctacagaccagcaaacattattccttgcacgtcgccacagagaggcaacattttttaa

SEQ ID NO: 310189 - DNA, 122 bp, Homo sapiens
gactacgtggccttcagcgatgctgactcaggctttgctgacgcccagctggtgctcacccgcaaggacctccctttggcagtatcatggccatggataagcccacgcggcccatctactgc

SEQ ID NO: 310190 - DNA, 122 bp, Homo sapiens
aaaaattgtcttccacgaaaccggtccctggtgccaaaaaggctgggatcgctgctttaacggactgacctctgagcagctcgcaggtccccggggtgtaagtgatggtcttggggcggcgc

SEQ ID NO: 310191 - DNA, 122 bp, Homo sapiens
tagaaaggaagtcccaattgtaaagatgtcaattctccctaacagaattaatacatataacgtaattccagggaaaatagcagtgggagcatgaagtttatttggaagagtccttgcttaag

SEQ ID NO: 310192 - DNA, 122 bp, Homo sapiens
ggctgcgggcgcagggcagcacgtagtaggcaggatggtggcaggctccaggaggctccgcgtgcgccaggaagcaaaggcgcggtagcaggtgctagtcaactgcggttgggtttagcagc

SEQ ID NO: 310193 - DNA, 122 bp, Homo sapiens
ctgagtgcctttatgcctaaagtttttgttgttgtttcgttttttgtttttttttttttccgttgctgttgaaacggcatctcgttctgtggcccaggctgtagtacagtggcgcgatcagg

SEQ ID NO: 310194 - DNA, 122 bp, Homo sapiens
atgttctggaaatgcatattggtggtggttacacaacattgtaaatgtgctttaggccaccgaattgtacactgaaaaagtggttagaaggtaaattacatggtatgtatgttttaccacaa

SEQ ID NO: 310195 - DNA, 122 bp, Homo sapiens
ggcgcagggagccggggctcccgggttgcaagctgccggcgggctgccgggcaggtggagcgcgggacggcccggtgcgagccccgcggcccctcggcgcgcccaggcccggatctcggcct

SEQ ID NO: 310196 - DNA, 122 bp, Homo sapiens
gcaggcggtgggggaagggaagcacgtgtagccagggcagggttgcatcatgagctcgttcgggttttctattgcacccttcgtttttctattgcatgtaatacctcagcatcagtctgcac

SEQ ID NO: 310197 - DNA, 122 bp, Homo sapiens
ggagaggcgcggaacgggcgagggccaggaggccccagcaaagcctgcagaggtttatcccgcccgttacgaggcccaaggccatcgcccggtgaagcggggtgggccctgggcgcggccgc

SEQ ID NO: 310198 - DNA, 122 bp, Homo sapiens
tgagggctggctcacctgcatggagggggttgctcccaccccaagcatgagtctgacccacgcaccagctcactctcccctcaggaccaccgacttgcccagtcactgaatggagaccacct

SEQ ID NO: 310199 - DNA, 122 bp, Homo sapiens
ccgggacccagcatgatcaggggcctgaaaacctccttgacgccaggagcgcctgagcaacgctgtccacccgagtggcttgattggctgctctgggcaatggcgttccccagggagcatca

SEQ ID NO: 310200 - DNA, 122 bp, Homo sapiens
gtggtagctcaggaatccaaatcttcctgtcttgtggctcatttgtctttgccggggacacgtcttccccactcctgatgtttccttccatgagcagagaaccccactggcacaaaactctt

SEQ ID NO: 310201 - DNA, 122 bp, Homo sapiens
tctcatgccccaaattgcattttcccggaaagggctcagggcgactgaggtccccaccgccgctgcggagcaggctagggactggggcaggtcccggcacaggggaggggggcgggggcgct

SEQ ID NO: 310202 - DNA, 122 bp, Homo sapiens
gaggtgagacctttcctagagaagcagttgagtgtaggagctgcctgggagggtgagactcgggaagcaagtggtgcctccgggctgctgtatcaggcaaggctcagccaggagaggtgggt

SEQ ID NO: 310203 - DNA, 122 bp, Homo sapiens
agggtcagggagggccctgagctgtcaatggtgtcagccaggggatcgcagggcgggcgccggggttccccatgccctcgcatccgggcactgtggaagaaggagctcatgtccaggagcaa

SEQ ID NO: 310204 - DNA, 122 bp, Homo sapiens
cctcggccagagtccagtcgccaggttcagcgacgcttctggaaagtatgcgatccagggcgctgatgtgcactaccctgtggggcaccgaaatagcttaactctatttaagcccgcagcag

SEQ ID NO: 310205 - DNA, 122 bp, Homo sapiens
ctgctgttattggcaatgacaaaattcagagagtgagtaactgagatagagaggagaaaacgtcaaggaaatgacaggccaggttgtgaaaaggattatctgcatcggtgctgaaataacca
